United States Patent Application Publication US 2008/0050393 A1 - sequence listing, part 29

SEQ ID NO: 105167 - DNA, 374 bp, Homo sapiens
ctgcagggctctctcagggcagttccagcggtcccaggcaaactgatacttgcattcttcaataccactctgggcaccagctgccacactgctggagtaaatcaggtaagcctgtagggacataggggtaaaaattcagactgaacttaggaggcatttaccctaaactgaccaaacagccctcttcctgctcactctcccatccctccaaaataatggagtaagcctttaaatatgctgtctcatttgacatcacaaataacttgtgaaataggcactatattatagattaggaaactgaggcccagggagtgagctaaagtaatttccccaaagtcccagagctagcaaatggcagaactagaaatgaaact

SEQ ID NO: 105168 - DNA, 406 bp, Homo sapiens
cagcaacaagaggtagagcctggaacgaagttggcagcaggaactgtcctgaccctgggtaagacgggtctcagccacttgacctgccagagccccagcatctacctgtctcttcttaacttggcaccacataagcatctcccggcctcctcgccctggttttgccctggctcctggggagccatctgtgtccatggcagggggaacaagggtgcaggcccccttccttctgagtaaacatttgctgacaataggagaaagagaagatctgggagtcttggtgaaagaagggaaactggccaggcgccatggcccacacctgtaatcccagcactttaagaggccgaggtgggtggattgcttgaggtcaggaattcgagaccaatgtgggcgacatggcaaaacc

SEQ ID NO: 105169 - DNA, 364 bp, Homo sapiens
atggttttactgtgttggctattctggtataaaactcctgaccttaaacgattggcctgcatcagcctcctatagtgttgggattactggcgtgagccactgggcctgggcagttcaaattttatattttttggtgcctagacttacataacatttaggaaaaggttaattaattatccatatagttctacctttttctttctttttttttttttttacaaaccccttttaaagaataatgggggaaattttaaaaggttttaaaaaaattttaggccctttgttatgcccaaccaaattttgaaaaaatagggagggggacccctttgtaaaattaaggatttctggaatcagaaaaaaaaat

SEQ ID NO: 105170 - DNA, 386 bp, Homo sapiens
cggacgcgtgggcaagatcgcgccactgtactccagcctgggtgacagagcgagactccatctcaaaaaaaaaaaaaagggatttggaaaaagccccttttgggttttaaaaaaaatttcaacgccctttttggtttaaacggggcaggggaaaaaaataaaggggtttaacaaaatggggtttaaagggggggttaaaaaaaaacccccccggggggaatttttttttgcccaaaggaagctggacccgcccccccccttcctggggggcctttttttttggcccttttttttgggggggggattgggagggaaatttaaggcggggtttttttaggggggggggccgggcctcttccggagggggggggggggttacccccaac

SEQ ID NO: 105171 - DNA, 934 bp, Homo sapiens
ttttttttttttctgtttttaaggcaggttagtttaattttatagaagaaatatttttcaaacagtacaaatgacacaattagagagaaaagagtgacaaaaaacaaagagatgaatactgattataacttattcccacaacagaaggctacttatttctacaattatcaatcaaagcctgacaattcagtgattagatgaagtgaaagccaaattcccttttacatgtggtactatttcaaaagaaccctggtggcaggatcctgatggttttgagaccagaactgcttctaaaacctggcagcgtttttttgttttgtttttatcgcgaggcctggtagatggacagattgaaacatagatggaaacacctaggacttcacttttctggcatgtggggtattttctggggttggcgtggcagtctgaactagtcagaagctccaagaccacgtcatgaatgacaagcaacatagggcgcttggtgtccttctgcctgctcaggccacctccactgcctgcatctgcacctgcagagaactgcgcggctctctggccttcctttgtcttttctttccttgtcatggctgcattgagctgcaaaagcggacacaggcagggaggcagggggaggttcaaaggtaaaggtggcaaacacgagggctccttggactgatacggaagcaggcactgcatctgtttcttgcaggctatcagtgagattctatttttaaaaaacccagccaggcatggtggctcgcaagtccaagatcagcctgggcaacagagcaagaccttgactctaagaaaaaaatcaaaataggctaggcacaatggctcatgcctatcatctcagaactttgggaggctgaggcaggagggtcacttgagcccaggaggttgaggctgcagtgagctatgaccacgtcactgc

SEQ ID NO: 105172 - DNA, 415 bp, Homo sapiens
gttgcagtgagccgagatggcaccactttactccagcctggcgacagagcaagactccgtctcaaaaaaaaaaaaaaggggggggccccccccaatttttttttagggggaaaaagggaaaaccggtttgtacccttcccccccggggatttttccccccctttaaaaaggaaaaaggggggtttattttttttttaccaaaaaaaaaacctttggggttttttttttaaggaaaaaacccccccccaaaaaattttttttttttttttgtaaaccccgaaggtcccaaatgctaaaaaaaaaaaaataaaatggtttttccccggggttggccaaaggggggaaaaggggatttttttaattagggcaaattttcctttttccaaaaaaaaaaatttttggaaatcggttcccc

SEQ ID NO: 105173 - DNA, 419 bp, Homo sapiens
  misc_feature (1)...(419): n = a,t,c or g
agggntcagatacattgggcgaaccacgctgccgcccttttctatacatcctcactggtccttgggatcttttatctttctgataatagccattcttatggaggggaagtgatatctcattatagttttaattttcctttccctggntagggatgttgagcattttttcatatacctattgaccatttgtatatcttctttcgagtaatgtttattcaatcctttgactttttttttttttttttttgggaaacagggttttgccttgccccccaggtggaggggcgggaattccggtataccccactgcacccttgttttccggggcccgagggatctcccccctcaccttctgaaagcttagggtaacgggggctgcccacctggttgggttaatttttaatttttctgcggaaccg

SEQ ID NO: 105174 - DNA, 421 bp, Homo sapiens
cgaactcctgacctcaggtgatccacctgcctcggcctcccaaagtgctcggattacaggcgtgagccaccggacctggccagcaggtaacatttattaagtatctactatgccttaggcatggtgttaatgtataactattatgtttaatccttacagcagtttacaaagtaccataggtggtatgcataaggaagcagcatctattgatgtatttactcaaggtgattaagctactaggtagtggaattctagtgggtctagatctggacttgatggctgagttcttactaatataccttgctactttggaagaggaatagagtttcaacatgtgttgggcagaatattcaaagctaaagaaatagcttgcacaaggtagggagatgggaaagtgaagtgtctgtggtgatgaactgaa

SEQ ID NO: 105175 - DNA, 377 bp, Homo sapiens
  misc_feature (1)...(377): n = a,t,c or g
ctagttgaagaggaccaacaattaacagctcaaatgnnnattctttttcctcacaaattgacatggacagtctggtgctatgggctttatctttaacatcatctcatcccttcttaaaatgagttatccatttgtaaactgttgatttctgcagggcactgtcaccataaatgtgatatttgctcttacttcaattttagaagaattcatgttgctctggtaggggcttttttcaaactgatgtcttatctttcttagtgcctcaaatgagatcctgttcagatacgttataacaagttaatatgagtttattttggtgcaaaaaatttttgaactccatgcataatttttttcataagatgcattttccataaagt

SEQ ID NO: 105176 - DNA, 375 bp, Homo sapiens
  misc_feature (1)...(375): n = a,t,c or g
agtggaagtggtctttgcaccaaatgagtatttacnnnnctttctcttttaatactttttttttcttttttttttggccaaacccctttttttttttggaaagggagtctggttctgccccccaggcggaagggcagggcccctgtttgggttaacggaaccctccgcctccggggtaaaggcgattctccggcctaacccttttgagaaccgggaacggcgggctggacccaccccccccacccctttttttttggaagggtaagaatggctagcctccctccccggaaaaccctttaagggccggggggagggatcccggaaaaaggtcctccggggaccatccctaaaaccggaggtcaaggacaccccctt

SEQ ID NO: 105177 - DNA, 375 bp, Homo sapiens
  misc_feature (1)...(375): n = a,t,c or g
ataatggcgaaaatagttggtgatttgaaaataaaaaatagattaatttcaaatttttcaattgatcactttgtttttttgttttttttgtttttttttaaacggagtcttgctctgtcacccaggttggagtgtagtggtacaatcttggctcattgcaacccccacctcccaaaaaaaaaaaaaatataaaaaaacaaaaaaaaaaaataaattgggggcgggggtttaaaagaagactttaaccatgggggggggtgggggttgtatttttttttttgtaatgccctcactttggtggggcggggccggtataacaaccgcttgggaagatgaagcccgagaatcccttcactttgggcggcggagatacan

SEQ ID NO: 105178 - DNA, 403 bp, Homo sapiens
  misc_feature (1)...(403): n = a,t,c or g
tttgcccatctcttcttagaggaactttaggtctcttttcaagtctcctcagtcatcaatagttcctggggaaaaacagagctggtagacttgaagaggagcattgatgttgggtggcttttgttctttcactgagaaattcggaatacatttgtctcacccctgatattggttcctgatgcccccccaacaaaaataaataaataaattatggctgctttatttaaatataaggtagctagtttttacacctgaaaaaaaaaaaaaaaaaaaaaaaaaaaaaaaaaaaaaaaaaaaaaaaaaaaaactaaaaagacannggggngagaggaaggaaaaaaaaaattttttattttctaaatacgggggggccttttttaatggaggccctccctacccccca

SEQ ID NO: 105179 - DNA, 422 bp, Homo sapiens
ccggaaccggggcggaattcccggcgcgagccacacttctgttgagtttatacataggagtggaatggctgggtcatatgataactccgtgtgtaaccttctgaagaactaccaaacgacttaccaaagtggctcccctgttttctattttcactggcagtgtgcaggagtggggttttttataatgcccaataatcggatttattcaggaagcaagcagcttccagcttatttactgagcttttaaagatatacttaatgtcgtttcttaagaaaaaccaggtctttatttactatgagactccaagtgctttaatatagttgaaactaaagaaacataaatttttcattctgcctcttaattgcatgggaaactgcacttattaagcattcagtttaatggctatataacactttatcat

SEQ ID NO: 105180 - DNA, 403 bp, Homo sapiens
  misc_feature (1)...(403): n = a,t,c or g
tccaggcactgtccagngatcctaatgattctcaattctctgagacttagtgactcctttttataacaaatattttgcttgaatttaattaatagataagtcataggtaaatccacatatgatttctacaaaacttaatatgctactctaataaatataaaagaaaaacaagaaaagtaatttgtaaggacaatatatacaatgtaatataataaggtaaaaatacaaaacaacagtagttgtattgagtacaactttgttaaaagaaatagcaaagtggcctgggcacagtggctcacgagtgtaatcccagcactaatcccagcactttgggaggctgaggagggtggatcatgaggtcaggagatcgagaccatcctggctaacatggtgaaaccccatt

SEQ ID NO: 105181 - DNA, 386 bp, Homo sapiens
agcctgagcgggaatagtgggtactgcactaagtattttaattcgagcagaattaggtcaaccaggtgcacttttaggagatgaccaaatttacaatgttatcgtaactgcccatgcttttgttataattttcttcatagcaataccaataataattggaggctttggaaactgacttgtcccactaataatcggagccccagatatagcattcccacgaataaataatataagtttttgactcctaccaccatcatttctccttctcctagcatcatcaatagtagaagcaggagcaggaacaggatgaacagtctacccacctctagccggaaatctagcccatgcaggagcatcagtagacctaacaattttcttccttcatg

SEQ ID NO: 105182 - DNA, 397 bp, Homo sapiens
aataagaaagcagggaagggggcatagatttactgtgagaaggttgccctctttttttttttgtttttttttttttttttttttttggggggaaaaaaatttttttttttcccccccgggggggggggggggccccccataaaattccgggccccccccccccggggggaaattttttttttccgccccccccccccttaagggggggaaaaagggggccccccccccccccggggttttttttttttttttaaaaaaaagggggggtttctttgtttccccgggggggggttttttttttctctttttggcggggggggcgggggggtttccctcccccccccccccaaaaaaaaatttttctaaagggccccccccccttttacaaaaaaaaaaa

SEQ ID NO: 105183 - DNA, 396 bp, Homo sapiens
tgggacaccagcacacgtattattttaaatgtaatgaaagtttcaggaaaggaaagaaagaggttgaagatacattttaagaagtagtagccaaaaactctcacgtttgatgaaaaatattaatccacattgtccaagaagctcaatggacactaagtaggataaacacaaagaaatccatacctagtcacattataaactgttgagagacaaggaatcatgaaagcagcaagaaaggattcctcacacgcgaaggaaccacggtaagattaacagctgacttctcttgaaatcatagaggctagaaagttgtgggatgacatattaaaagcaccaaaagaaaatgtaaaagcagattgggtgcagtggctcacacctgtaatcccagcactttgg

SEQ ID NO: 105184 - DNA, 389 bp, Homo sapiens
gtttcaccatattggccaggctggttttgaactcccaacctcaggtgatccacccgcctcagcctcccaaagtgctgggattacagacatgagccaccacacctggccacaaggtgacttttgaactgaaacctaaaccataggaaagaaccagccacatggagatgtgggctattccaggcagagagaaaaatcccaagagcaagggccttgatgtgggaacagtcttagcagtatgacagaagcacagcgagcagggttgggaccacatcacgtagggcctcataggccatagtaagaattgtattctaagtatagcacgaggctactggagcattttaagcaaaggaaaaattattatcaactttatttcttgaaatcacactgag

SEQ ID NO: 105185 - DNA, 384 bp, Homo sapiens
gatgtggtagctagagctccatccagtagcattcttggacttcaaagtaactttggaaatagaagtcatgaatggcagagcagcaatatagaagactgggtcctgatactgtgagattacccagtactgctatgagtaaagggtaaataaaatcctttctctctccctggtgaaatgacctcgaatttggctttcagcactgtttctctggaaacctactaggcaaggtaataatggaatgtcagctgtaatattaggcaatattgtttatgattaaaaatgagcccttagctgggcacggtggctcacacttgtaatcccagcactttgggaggccaagatgggtggatcacttgaatccaggagttcgagaccagcctgagg

SEQ ID NO: 105186 - DNA, 404 bp, Homo sapiens
  misc_feature (1)...(404): n = a,t,c or g
ttttgctggtggctttgttgactttggtgcttgtgatggcggcctcctcactggcaatgagaagatcaccatgcaggcacactcatcacagcgctaagctcgcactgattttttacctgagtaggcctagaaataaacatgctagcttttattccagttctaaccaaaaaaaaaaaaaaaaaaagggggggcccttttaaaggaaccaagtttaaggcccggggggggggaaggaaaaatttttttaagggggccccaaaattaaattccggggccggggtttaaaaacgggggggggggaaaaacccgggggtaacccaaataaaagccctgtggaaaaannnnnnnnnnnnttntgnnntgnttnaggcncaataagttgctggtttttatcaaaaaaaaaa

SEQ ID NO: 105187 - DNA, 394 bp, Homo sapiens
  misc_feature (1)...(394): n = a,t,c or g
gctggtttcgaactcctgacctcatgtgatccgcccacctcagccttccaaagtgctgggattataggtatgagccactgcgcccggccctcgagtgccaccacttctttgaccttggaaaggtcacttaaccttgtagatcgtcattctctttattcctgattggactaatggtaattgcacacctaccttcacagctgaagcctgatacacaggcagttttgtatttgtgctatgtgagctcttgatgccatacatatgtaggtcattcttgcagtagcacaactgatgattttcatcttgatgagtgctatctcctaagntttaatattaaatttagtgaaaagagatgaactttggaatcacaatacctgtgttcgcatctgtgccactg

SEQ ID NO: 105188 - DNA, 408 bp, Homo sapiens
aatgaaagtttggttatgactacaccgatattgattccatgtgtaaatttgaaatacttaattttttaaagctgtttcatggaatctatagatgtgacaaaaagctaataatgtattctgtcactttacttccttgtcaccctaagactgtgtttctccttccagtaataggatacgaggtacttgtctgagaacatgtaactggagtagacttttatgtagtgatctgaggcccttactagatctctttctttctaagggaaatcaccaaattttgagcctataggtaaatcatttgtaaaccgggggttggctgggcgtggtggctcatgcctgtaatcccagcattttgggaggccgaggcaggcagatcacctgaggtcaggagttggaaaccaggctggcaat

SEQ ID NO: 105189 - DNA, 408 bp, Homo sapiens
gcctgccccatgctcagcagtgactgacctgctttttctactgtagattgtacagtgcatgcaaatggaacaatacagtggtgtcctctgttgccctctgtttttcagtcaatgagtagtacttccatttatgaatatattcttcccccaccctcacattttttttttttggaaacaagttttcattgggccccccaggttgaagggcaggggggcaatttggtttaatggcaccctccacttccaagggaaaggcaattttccggcctaaccctctggagaagcgggaataacgggggctgccccccaccccgggttatttttggttttttaaaaaaaaacggggttccccctggtgggccgggcggttttaaaactccggacttgggaacccccccgcttcgcccc

SEQ ID NO: 105190 - DNA, 407 bp, Homo sapiens
tcttttcctatatgttcactttgtaagtttatttttatagagtggaatgatgggcggaatcacctataccattaatgtgcctctagctctggaaagtaattgtactttgactaaattcatatatatatgtggtgggaggctgagatgggaatatcacctgagctcaggagtggaggctgcagcgagctgtgatagcaccactgcatgctggcttgggtgacagggcgaccctatctaaatatatatatatgtatatatgcggatatatatatacatatatatatatgtatatatatatacacacacacacgggtatatatatatttattagctatacacagacacggaatgtgagtgcctcaactattccctcctccaccatctacactcttttcaggtacagaagt

SEQ ID NO: 105191 - DNA, 410 bp, Homo sapiens
aggatccccaaagaacccacagcaaaaaagacaggtttaaacacctggtagggccagagggcagaggctgggtcatagcagtactggtcttgatctcctgacctcgtgatccgcctgcctcagcctcccaaagtgctgggattacaggcgtgagccaccgcgcccggctgaggatataaaattcatgttttgagccattctgagtgaaacaatacttgtgagaggcgttcgaagcagagcaaccccatcttgaacagggattgagtaaaatgaggctgagacctactgggctgccttcacaggaggctgggtattctaggtcacatggtgagattggaggttggcacaagatgcaggtcacaaagaccctgctgataacagcagttagcagtggggaagccagctgaatc

SEQ ID NO: 105192 - DNA, 440 bp, Homo sapiens
cccgggtcgacccacgcgtccgagattttgtatcctgcaattttggacttattgaatttctttgatcatgaaatgccataagtcagttttaacaacagcttttcagttgaaataaagattattatgtattgtccctaaatgtgtcatgtgtgctgatcgtaaggtgtttgcatttttaaaatgttaaaatggggagtggggcatgtcttaaaatcaatgaaatatgacagataagtaaataaatggaaataaaaatacataaatatgtaaaaaaaaaaaaaaaggggcggccgttttaaagaatccaagtttacgtccgcgggcttgcaaggtaatattttttttatagggccacctaaattaattccccgggccgcggtttaacaacgtggggactggaaaaaccttggggtaacccaattaaatcgcctttgccacaa

SEQ ID NO: 105193 - DNA, 497 bp, Homo sapiens
  misc_feature (1)...(497): n = a,t,c or g
cgggcgcatgcgggaccgcatgcgaaagttccggaattgacccacgcgatccacgcgtccggacagccccatgcacgttactgcccctgaataccttcagtggcataacatgtggaggtggaagacagtgatattgatgatcctgtccctttgtaggcttacgctagtgtgtatgtgtcttagttttttgttttttaaacttttatgagacagggtctctctttgttatccaggctggagtgcagaggcgtgattgcagctcactgcagcctcagactcctgggctcgggggatcttcctgcctcaacctcccaagtaggcggattcccaggtgtggggctgaggtgggaagatcccttgaactcaggagtttgaaaccagcctgggaaacacagtgacaccctttctctgcaaaaaaagaggaaaattaaccggacatggtgccacatcgctgtagtcccagctactcatgaggctgaggtgagaggattacttgn

SEQ ID NO: 105194 - DNA, 391 bp, Homo sapiens
  misc_feature (1)...(391): n = a,t,c or g
aagcaatcttcctacctcagcctcccaaagtgctgggattacaggcatgatccaccatgcccaccctaatttttaatttttataagtacatactaggtgtgtagcctcagtttacagatgaggaagctgaggtctagagaaacttgctaataaatgcagagcaggattttaaccaaggtctgtacccggctgccatgctacactcctgtttggctgaagccagccagcctgtctgcctctggatcacccttgagtagcaggtccttcctgagacctcagggagagctttcttcctggtgggattcggcattcccttanaggcaaggagtgagagacggtgtcaaaaagaggtcctttatcatctaagggagagttgggaatgtttgaagag

SEQ ID NO: 105195 - DNA, 467 bp, Homo sapiens
  misc_feature (1)...(467): n = a,t,c or g
ttcggaattcccggcccgacccacgcgttcgggtaccactgcactccagcctgggcaacagagcatgatcctgtctctgaaaaaaaaaaaccggaaaaccggctatgtcagncaaggagatgggggctgaancaaaaaagtgaagaggaagtaggaaagaaacaattttttttgcagactttccagaacaagcaaaacccaactgggatgctctgccggttttcctctaccttcataatggaatttgccacatgcatgacccaaagcaatgttttttacactgcagaccatgacccatcagtgactcctggaactaatgtagcgatcacaaccaccatgttcttataaaaaataaaaaatagaaccgaacctatgttaaggcatcacacttaccacttatgaaggtgtcatttcctaaaacttttgtatattccagatatacgatagtttggtccatgtcaaaacan

SEQ ID NO: 105196 - DNA, 431 bp, Homo sapiens
ccgggtggacccacgcgtccgcaaagtacattccttctatacctaacttgttgagagtttttaccatgaaaggatgtcagaggttctcaaatgcttttctgcagctattgagatgatcatgtgatttttgcctttcattctctctctctctctttttttttttttttagaaaagggattttttttttggggcccaggggggaaaacaagggggggaataaaattaagtggacccttggcccggggggaaaaggaaattctcggccctcaccccccaagggggggggaaaaaggggtgggcccccccccggggctaatttggatttttaaaaaaaaacggggtttccccagggggggcgggggggcgaaaaacccccacccccagggggacgggcggggggggccccccaaaggggagggaaaccggcggga

SEQ ID NO: 105197 - DNA, 413 bp, Homo sapiens
  misc_feature (1)...(413): n = a,t,c or g
caggctggtcttgaactccagacctcaagggatccgcctgcctcagctttccaaagtgctgggattacaggtggagactggacctcanaagagggagtgggtgccccgagaactcacagctagcggacagtggaaagggcaggagccggaccaaggtgaggacagtggaactgaaggctgctggttacctctcctgccctccgctggccacggnggagaagacagcccctccctcctgctctgacctgacagtgttcatccatcgccctgtattagcgaagaacaacatcaagctggctagcaaggaactgtatacagggtccagctgggtatcacactggatctcacccaaagcttagatgtgatccagctcagtatcacaaagcagaacgaaaaggatgtgtttgggctgt

SEQ ID NO: 105198 - DNA, 450 bp, Homo sapiens
  misc_feature (1)...(450): n = a,t,c or g
cagcagcgcaaangcnntggaanttacgggccgacgatctcgtgtcttgaactcccaacctcaggtgatctgcctttctttttctcccgaagtgctaggattacaggagtgagccaccgcacctggctggcctgttttctcaaatgtaataccactgcatgtcggggtccctgctgtcaccaggctttaaacgtactcaagcccagcatggctccttggtggagcaacaccccttgggttcctgtttccagggggagtttctccgggggcagccaagatggcctaccaggcaacacctgacggcaacatctggtgtggacactcactcagccagggcctaatagctgggggttcctggtaccggcccgcccacctggtgctctccagagactcagccctaccccgccacctgtccctccccaagcctcttagaattacacctttggggcg

SEQ ID NO: 105199 - DNA, 414 bp, Homo sapiens
tttcgtctcaagttagactgtgtggttggttatgcaggatcctgagaatgaatggattgtatctggctggggagggaaggaggaacctgggagatacttcatgtgcgaggctaggtcttcaagtatggacagggtttttttttttttttaaaaaaaaacccttttttttcccccaggggggggggggggggccaaaatttgggtaaatggaatcccccccccccagggttcacccctttctgtggcctaccctttgggagtatgggaaaaaaagggccccccgattcacccccataaaaaacgggttcccccggtgtaacccgggggggttttattttctgaacctgggaaccccccccccgggccccccaaaggggtgggtaaaagatcatctccaccctcccccgtactctc

SEQ ID NO: 105200 - DNA, 429 bp, Homo sapiens
  misc_feature (1)...(429): n = a,t,c or g
tttcgttggggttttgccacgntaccagtgctggtctttaacgactgacctcaagtgatccacccgccttggcctcccaaagtgctgggattacaggcgtgagccactgtccctcgccaattctcataaattctttatacaaatgttaatttcacattccctttttattagaaaaaaaaaccccactctataaacacaaatcaggaggaaaacccaagagacaaaggattaatatttttacaataaagctccaataaaaaataaacctcttagcaccctaagacatggtgagaaaaaaaaaaaagataaccctcccttgtttatcaaaaaaaggctaaatatggctttagggccttatcttcaggctaccaaagattataaaagttattgagttttggggagggggacataggcttatcacattaataa

SEQ ID NO: 105201 - DNA, 457 bp, Homo sapiens
  misc_feature (1)...(457): n = a,t,c or g
tccggaattcccgggnnnnaatttcgtgcgaggggtcgcgagaggatcaaggggtggagccacacgttgcgagtgggtggggttgcgccctgtgggcatggcttatgggcgctcgccctcttggctgctctaggtcaagcccagcgcagcatctcacaggccacctcttccacgcgccgcggataccccggggacggctccggctccaactcccactccggctcctgctgcagctccagccctgaccccttcctcagggccgggctcagcggctctgactctggaggaggagctgcaggaagcgatccggagggcgcagagatggggtctcactatgttacccaggctggcctcgaactcctgagctcaaagcgatcctcctgcctcagcctcccaaagtgctgggattacagacggtgtctcactctgtcgctcaggctggagtgcaatggcgcaa

SEQ ID NO: 105202 - DNA, 409 bp, Homo sapiens
tttcgtctctttcgaggccctgtaattggaatgagtccactttaaatcctttaacgaggatccattggagagcaagtctggtgccagcagccgcggtaattccagctccaatagcgtatattaaagttgctgcagtggtgtccttgacaacattagttacaagcctcagacttcataactgggctcagtggcactgctggtatcatgagtcttagtttctggttatcagttggaataataaatgggattccattggcatctgctcccagcgcacgaatggaaaaccgtgcgctctagaagagacaaacttacctactcgtacgaacggactgctttctaatatgtagggcgggatataatcaattggatgtccgctttgctataaacctgcagagtgggaaaaccctgg

SEQ ID NO: 105203 - DNA, 410 bp, Homo sapiens
taaggagtgaggtttatggactggtcttgactacctggtatcaagtgaaccgtgtgccttggactcacaaagctgctcgatttacaagagtgagccgatgggcccgaccacgaagcaaaatatctgagtcctgttattggctaccccaggcccataggacaaagtcctaacccctagtcaggacactcagtggcctctgctctctcctgggttttcatcctcttctcttctcactcctggccactgatctggttccactgccctcatttgctctcctgctcttgcttgagctattctttctgcctggaatgcccaagttggcaccataatcaccaactaaaagatccttttctttttatttttttagagatagggtcttgctatgctgcccaggctggtctcaaactcct

SEQ ID NO: 105204 - DNA, 397 bp, Homo sapiens
tttcgtcttgaggccaggagttcaagttcagcctttttttcatagcaagaacaggtctgttcaaataaaaataagtttttaaaagagccaaccagttgccttttctcattttcattacctctagttacatcgtaatattgtgttttcttccctgtagtctagtggccaggaaagagggggagcagtaatataaagttttgtttctagttgaaaaaaatggctttttttttttgttttttgaaacaaagccttgttgtgttgccccaactggagtgcaggggcccaatttcggttaattgcaggctccgcctccggggttaccccttttttctgccttagccgccccagaagttggaattacaaacgggacccccccccccccgcgtttttttttttg

SEQ ID NO: 105205 - DNA, 428 bp, Homo sapiens
tttcgtggcgtgaacccgggaggcggagcttgcagtgagtcgagatcgcgccactgcactccagcccgggcgacagagtgagactcggtttaaaaaaaaaaaactaaaaaaaaaatttgtttttggcaaaaaaaagtttttggggtcggcttccccttttaaaaaatggggggataattagcctaaaggactgggaaaacggaattggcccccccattttttcttattaaccgggaaaacttgataataggggggcaaaagtttatttttatttatcccaaaaattaggaaaacaaaagggccaaaaggagggtcaggatgccctactttttttttgggaaacaaaccccccttatattttaggggcttaaacaggggaccatgttttgctcattgtcctaatataaggggggggagggtatcttttt

SEQ ID NO: 105206 - DNA, 426 bp, Homo sapiens
  misc_feature (1)...(426): n = a,t,c or g
tttcgaaagaatttgtggacctattttaccatcacaaacaggaattccaaagatggctacagtgaaaaatatcaaaatgattatgttttgaaggtaactttaattttggacagaaagaaatataatccaccataaatgtggggttcaaatctttttacatggagggataatggcgctgtgacatatactagatgagggcactctttaaccagccacacaagagaaaaatatgtgtttttctgtctaaaataggatactgaacccttctcagagactgtcctttgggtttggattatgaagaacgaaggagttgtttagaaagtatggctctacagccaggcagtggctcacacctataatcctaacactttgggaggccaaggctggcggattgcttgagctcangagttcaagaccagcctagga

SEQ ID NO: 105207 - DNA, 405 bp, Homo sapiens
tttcgtgacctcgtgatatgcccacctcagcctcccaaagtgctaggattacagacatgagccaccgtacctagccagcttattgttaaacactattatatgcctctcttccaggtagtctctctactcggagcagagcaaggtcaaagcgaagctcacctagtggggaataaaccctgtaagagctgcctggccttgtctgcctacccatggtaccacaatcctgactaccatagtccgctgagcttacagtctagtcaggaaacagaataaataaatggaaaataaaaagcaaccctggacagcttaagacaactatagaaacaaggttaatataacgtaggacatgtttcggaaaattttggcaatagatgtaatatgttttatgtattagaataaaataag

SEQ ID NO: 105208 - DNA, 460 bp, Homo sapiens
  misc_feature (1)...(460): n = a,t,c or g
natctttatattctcgggtcgacgatttcgtccgggcagaggctgcaatctcggcactttgggaggccaaggctggtggctgggaggtggaggttgtagtgagccgagatcacgccactgcactccagcctgggcaccattgagcactgagtgaacgagactccgtctgcaatcccggcacctcgggaggccgaggcagtcaggcgtggcggcgctcgcctgcaattgcaggcactcggcaggctgaggcaggagaatcaggcagggaggttgcagtgagccgagatggcagcagtacagtccagcttcggctcggcatcagagggagaccgtggaaagagggagaccgtggggagagggagagggagagggaagaattatttttattcacaatccaatctggcagctaaaagaaaagcagtctttggatgtagaaacctggttttctgaagagcccact

SEQ ID NO: 105209 - DNA, 431 bp, Homo sapiens
tttcgtcgcggacgcaagccgccgacggaggaggccttttaactacggtgggtttctctcttcgcgttaaatctcccctgccgtgcagcctggtgccgcgtaggctcccgtgggacgctcccgtcggacgccgtccgacctagattgttaatgttattgttgggaaaggcgaaaaaggcagaaagatcccagaatagctgatccgttgtaacggttggaactgaagctgggatagatgggtagccgaagatcatgtgcttcgtgagcctagtgaaaatcgtagattggccagggtgcggtgcctcacgcctgtttcccagcattttgggaggcggaggcggctggatcacgaggtcaggagtttgagaccagcctgtgcaacatggagaaactctgtctctacttataatacgaagagtgggtgggcgtgt

SEQ ID NO: 105210 - DNA, 449 bp, Homo sapiens
aattcccgggtcgacgatttcgtgttggaatttgctggaggtccactccagaccctgtttgcctgggtatcagcagcggaggctgcagaacagcgaatattgctgaacagcaaatgtttctgcctgatcattcctctggaagcttcgtctcagatgggtacccggccgtgtgagttttcagtctgcccctactggggggtgcctcccagttaggctacttggaagtcagggacccacttgaggaggcagtctgtccattctcagatctcaaaccccatgctgggagaaccactactctcttcaaagctatcagacagggacatttaagtctgcagaggtttctgctgccttttgtttggctgtgccctgcccccagaggtggagtctacagaggcaggcaggcctccttgagctgaggtgggctccacccagttcgagcttcccggccc

SEQ ID NO: 105211 - DNA, 412 bp, Homo sapiens
  misc_feature (1)...(412): n = a,t,c or g
tttcnnnccgttgcggggtgcaggttttctgggaggatttttggcgccgaccttgaagggaccccaacgtgagagggaaagacgcccgtgatgccaaggcttgggcagcggacagccaaaatcctgaaaccccgcggcgctccctgtgattcactttccagaggcccctcagtgccccgacgctggcccggagggcggtcgctgactgtcttgagactgaagctcactttcggatcctgggcgttcttgccaggtttttttattaatacagagaaaaccagtggctttgtgacagttagttttgaaactccctgaggagggccgagcgcagtggctcacgcctgtaatcctagcgccttgggaggccgaggtgggcggatctcctgaggtcaggaattcaagactagcctgc

SEQ ID NO: 105212 - DNA, 413 bp, Homo sapiens
tttcgttctcgaactcttgacctcaagtgatccacctaccttggcctcccaaagtgttggcattataggcatgagccaccacgcccggctgtattttttctcttttaagtctgttaatatggtggattttgttgcatttcgaatgtgaaagtaacccattcctcagataaacctgttttggtcatgacatgttatccattttctatactgtagcaattaatttagtaaacatttaagatttttctctttatattcatgagaaatacttgtggttttcttaaacacccttgtctggttttgtcatcgtgttaatgcagaccttattacatgagttgggtactgctcctgtctctttggatttttggaagcatttacatacaattgctatattggttttctattgctgcataaca

SEQ ID NO: 105213 - DNA, 404 bp, Homo sapiens
atacctgtagtccctgctactcaggaggctgaagtgggaggattgcctgagcccaggaggttagggctacagtgagccaagatcctgccactgctctccagcctgggcagcagagccagatcccgtctcaaaaaaagacagaaatgtagaattcatttattgttgttgattgactttcccactgcttgctccttatgcttgttaggaaaacagtaagttgtttgttgggtattttgagatccttggataaaggacttggaaaatgaaggtgttattagtcttagtcgtgtactttggtgctggctccagaattactactcatcctgatgggaagagaaaagaaagagtgagtgagatttgcttattgtttgttatgatcctaatgccattaacttgtttcctgg

SEQ ID NO: 105214 - DNA, 410 bp, Homo sapiens
cttgaactccagacctcgggtgattcacccacctcggcctcccaaagtgctgggattacaggcatgagccactgtgcctggcctgcaattttttttcatgaccacaaagttacctcttcctgcttgaccaagaaacagcacatcagcagtttatattgtgggaacaaggaatattgggcaaaaagtgagtggttagcacgtgcaagcaagcatcggcctgatcagaattttttttctttttttttctttttgacaaggtctcattctgtcacccaggctggagtgtgaaggggtgggttgcccctccacacctgtgggtttttctcgttaggtggaacgagagacttggaaaagaaagagacacagagactaagtataaaaaaaaaaaaagggggcgcccgtttaaaaga

SEQ ID NO: 105215 - DNA, 410 bp, Homo sapiens
ctgagattgtgccactgcgctccagcctggttgacagagcaagactgcatttccaaaaaaaaaaaaaaagggcccttttttttttaaaaaacggggttttttaaattttaaaaacccttttttggggaaaaggaaaattttttcacaaattgggggggaaccatttggcaaaaaaaaaaaagaaggggttttttttttttgaaaacaaaggggaaacaaaaatgggggaatggaccccttgcattaaggggggcgggggaaaatttaaaaaaggggggggaaaaaaggtttttggggggggggaaaatttcctcccctccccaaaaaatttcggggaggggccgggggaatgttttttttttgacccccccgggttcttttatctttttttggagggggaaaaaatatac

SEQ ID NO: 105216 - DNA, 423 bp, Homo sapiens
cttaagtaaatttgcctgtgccttgatttctttatgtttagaataaagcagtggctctctaatttttgcatgcatcagagtcacccagagggttgttaaaaggcacagattgctgggccccaccccaaaatttctgagttaataggttgggagtggggcctgaagatttgcatttccaacttcccaggagatgctgatgctgctggtcagaagaccatacttggagaacaatgaaatgaagagaccgagttgtggaatgtccaagctcaccactggtctcaaaatctaagtttttgaatatttttttaaattctttaaaaaaaacaattcttggccaggtgtagtggctcacacctataatcccagttctttgggaggccaaggcgggtggatcacctgaagtcaagtgttgagaccaccctg

SEQ ID NO: 105217 - DNA, 403 bp, Homo sapiens
cacgcgtccgctggcctcaagtgatcctcccatttcagcttgtttcttttttaagtcatgaatgagttttgaatttgttcaagtggtttttctccatcaattgatataattatatgatttttcttctttagcctgttgatatggtggattacactgactgattttgaataccggaccagccttctattaccagaataaatcccactcagtcatggtgtataatttgtcttatgtgttgttgaattctacttctcaatactttgttaagggttttttcatttattgatgagggatcttggtctttggtattctttttttttttttttttttaaaaaggaattttcttttttttcccgcctgggggacaaggggggggttctaaacccccccccgggggggggaa

SEQ ID NO: 105218 - DNA, 391 bp, Homo sapiens
gggtttcaccatgttgaccatgctggtctcaaactcctgacctcaggtgatctgcccgcctcgggctcccaaagtgctgggattacaggcgtgagccaccatgcctggccaccctgctttagatggctctaagtctctgttcttttggaattaggcttctctagcccatggagaggaggtctgtgtgaaaggatagggaagagctagaaaggtactcttgtatttggtcctaaggagcctggattttccaggcaacaataattactcttagccaggctatccactgtccactagggttggagagagggggtctctatattgcaattttttttttttttttagaaacaaaatttttttttgttgcccaggctgaaaaccacgggcacatcct

SEQ ID NO: 105219 - DNA, 441 bp, Homo sapiens
taagtataacactttgttgcattttttcctatttaaatgtctgtctacccagacttactcgttcaaaaactgtctcatttacattttgtagaagtagagtaccatagtggatagaaccacaggctctggggctgtcctgtctggggttatttgctagctctaccacttaacaatcttagacaagtcacttcagtcttttttttgggacaggatcttgctttgccacccaagctggagtacagtttaagagctcactgaagcctctacctcccggactcgggtgatccttctgctttagcctccctaagtattgggattataggcatgagccactgtgcccagcctcacttctctttttttttttggaaagggccctttgctttgccccccaggtggaggggcagaaccctgataagggttaaaaaaagcttaattttttgg

SEQ ID NO: 105220 - DNA, 424 bp, Homo sapiens
aaccactgaaatgcagtaataaaaggcttgttggaattttggaatttaacctcagccttaaggatgagttagtcaggcgatgggggggggaatcaccctaaaagggaaaaaaccatggggcattctggaaactgcagtcaaccccaggggggaaagcagggccacctccatagccattacctgggggatcttggccaattaattttaccatctctgagcctaattggctcatctataaaaggaggataataatagggtttttgtcatagggccgttgggaggattaaatgagttagcccatgataaagcttttaaaacacaaaatcatcactggctgggggtgggggctcatgcctgtaatcccagcactttaggaggccaaggcaggtggaccacttgaggtcaggagttcacgaccagcctg

SEQ ID NO: 105221 - DNA, 436 bp, Homo sapiens
  misc_feature (1)...(436): n = a,t,c or g
ttgcccgatggttggaacctctcagcggccgcatacatagctggggaagggcgtcaggcttttttgacacagtcatacggttggacttgccacttttgcaagctcaccctgactgccgagaagtttaaagaagcagggcgagcctggggtcagggaattctggcagaggctggtgcaataatcccagtaagggatggagaggtctgtgattaaacactgtcatgtggctacagagtgagagcgagagcaaaagcgagagagacagcaagagagagcgagtgagaaagagagacagcaagagagcgagagagacagcaagagagagagagcgagagagagtgagcgagagagagagagcacaagagcgcagcttgtcaggaaaattgtgaaccaaatttcatgatggagtggaactgaaagtcaagggggtggttan

SEQ ID NO: 105222 - DNA, 436 bp, Homo sapiens
  misc_feature (1)...(436): n = a,t,c or g
ttcaattgngaaaaaatccagcggncgaatacatcttccgttattttccccagcgtggttatacaggtgcgagccaccatgcatgggggggaaccgctatttttaatgagctgcatactattaatttcaaggatgcgccaaaatttgcctaaccaataccctgctgccatatgctcatggttacttaatttggaggcatgatgggaagggttgtcatgaaaaaatgacagctaaaattattcacagctgtaaacttagcccagatgctttataaagtcagctgggagttcccctctaaacacacacacacacacacacacacacacacacacacacacacacattttcagaaaaaaaaggcttagtgccatgatatctttatcatctggggtctctttctctcgctcctactgcccacgcctttgtattacttttg

SEQ ID NO: 105223 - DNA, 433 bp, Homo sapiens
  misc_feature (1)...(433): n = a,t,c or g
acaatgccgcnnngctcgctcgatcctctcagcggccgcaatacagtgcctggaacgggaggtttgtcctttgccctccccacccgcctgccctgcctgtggccaccctcctcaaattctgcaggtacagggttgtctctgaacgtgttttctccagttctctaagtagactgtgctcatctagaaagaaggcaggaaataaagatgacccctggtcccatgacccaaatatgagctgcgctcacatcattttccggacctttttctttttgttcctacttaataaatacattaggaaaaaatttcccaaatcatgaaatatcaacaacatgatttaccctgcagaggctttagaaaatcatcttttggccaggcatggtggctcacgcctgtaatcccagcacttttggaggccaaggcaggtggatcacct

SEQ ID NO: 105224 - DNA, 401 bp, Homo sapiens
  misc_feature (1)...(401): n = a,t,c or g
aatacaggcgtgctgattatgaagaataacagagctgcagggactaactgggtagcaaatttgagggcaaaaagagaaacacagtaagttagtttactttaaaatcagaaaggagaaaacattcagttcctcaagggaaaaagcaaaacaaaataaaacttctttcccctgactgtaaattagaaaataaacgttttggctgggcgcggtggctcacgcctgtaatcccagcactctgagaggccaaggcaggcgaatcacctgaggggaatggggagagagaggaagcgactgagccctttggaagtataattttaggttttttcttctgtacacagatcgcgcatttgcatagatcagactatgagccaaatgaagactcataaccaagctagttatan

SEQ ID NO: 105225 - DNA, 401 bp, Homo sapiens
aatacatctgggagatggaggttgccgtgagctgagactgtaccactgcactccagcctcggtgacagagcgggactttgtctttttaaaaaaaaaggaaaaaaaaaaagggccaaaaaagggacgaaatggaggggaaggggggcctttaaggggggccccttacccaacagggtttgttttttttaaaacacaaaaaaaagccaaaaggccttttttaaaacccaaggtaaacccccccccctcgacccaaaaaaaaaggcctcaaaaaaaaccaaattttttttacccaaaaaaatctccacccggaaattccggaccgggccctggaggggaaccaatttttctttaaagaaagccaaaaaaaacttgggcaaaacaaggaaaaaaatttttccttg

SEQ ID NO: 105226 - DNA, 384 bp, Homo sapiens
aatacatctgggagatggaggttgccgtgagctgagactgtaccactgcactccagcctcggtgacagagcgggactttgtctttttaaaaaaaaaaaaaaaaaaaaaagggccaaaaaagggcgggaattaagggtgaaagggggttttaagggggggcccttaaccaaaaggggtggttttctttaaaccccaaaaaaatggccaaaggccttttttaaaacaaaaggtaaaccctcccccttccacccaaggaaaaaggccctaagaaaaaccaaattttttttgccccaaaaatttcccacccggaaatttcggaacggatccttgagggggaccaatttttctttaaaggaagctaaataaaagttggggtaaacctgg

SEQ ID NO: 105227 - DNA, 369 bp, Homo sapiens
aatacagtgtttcttttaaaggataatagaataaatacaactagcttatcaaacccaagatttcaggattacaaagctttctttcatttatttatttatttatttatttgaaacggagtctcgctctgtcacccaggctggagtgcagtgacgtgatcttcaacctctgcctcccaggttcaggtgattctcccacctcagcctcccaagtagctgagattacaggcatgtaccaccatgcccggcccacagagttttctcttaaataaatttaagttttaaaaagaagtccatttaaaaaaaaaaaaaagaaggccctttttaaaaaaaatattgcctaaataaactgccaaatgatttggggatacg

SEQ ID NO: 105228 - DNA, 334 bp, Homo sapiens
tttcgtgctaaccgtacagtgaaggatgcgcacagcatccatggcaccaaccctcaatatctggtggagaagatcattcgaacgcgaatctatgagtccaagtactggaaagaggagtgctttggacttacagctgaacttgtagtcgataaagccatggagttaaggtttgtgggtggcgtctatggtggcaacataaaaccaacaccctttctgtgtttaaccttgaagatgcttcaaattcaacccgagaaggatatcattgtagagtttatcaaaaatgaagatttcaagtgagtgcaatgttcactagctaatataagaggcatgtatt

SEQ ID NO: 105229 - DNA, 457 bp, Homo sapiens
catgcacgccacctaagctaggatcctctacagcggacgcaatacaggactggtacataagcgagtacactttaaacacgtcatcaactgtaatgtacagtgcctagcattctgcgtgagccttcctaatgctgggcttgcactacctgtattgtaacgtttagattttttgtttggttctgttttgattgagatgggatcttactctgtggcccaggctggagtgcagtggcaccatctcagctgtgcagtggaaccatctcagcttactgcaacctctgcctcccaggttcaagcgagtcccctgtctctgctccctagtacttgggattacaggcatgcgcccatgccccgttgatgtttgtatttttagtatacacggggacctgtatgttacccctctctgctcaccattcccgtgcagccaattcatctcacttctcgtaccccctactcg

SEQ ID NO: 105230 - DNA, 373 bp, Homo sapiens
atacattccttgagatttcctcccattcattttctctgtatcacccactgggaacctcttagttggatactgattctctaggactaatcttctaattttcttatttactcttagtttttatttctttctctttctaatacttttcaggttagtatcaattttatcttccaacctttacactaacttatttttcagttctaagagctcttcttgttttctgaatgttttcttttttaattgcatcctgtgcaattaaaatacaatatcttgttttagatctctgaggccggtggctcacacctgtaatcccagcactttgggaggctgagatggacagatcacttgagcccaagagtttgagacttgtctaggg

SEQ ID NO: 105231 - DNA, 367 bp, Homo sapiens
aatacatacttcgtctgaatgaaaaagtgaaaaaagtgttaacatctttcgttagttcaaagaacaacaaaaaatgaaacacaccaaaaccctttcctgtgttatgcttttctacatactaaatggttttcaaaagaaagtaccacagagagagtcatctattatttctagacagaattttcttttagttaaaaatgtaaaccaaaatgagatactacttcacatccatttgaatggctataatttaaaaaaagcagaaaataacgagtgttggacaggatttggggaaattgaatgcttgtgcactgctggtgggaacataaaatggtacagctgctatagaaaacagtatggtggctattcaaaa

SEQ ID NO: 105232 - DNA, 367 bp, Homo sapiens
aatacagctgggtggatcacttgaggttttgagttcaagaccagcctggccaacatggtgaaaccctgtctctactaaaaatacaaaaatacaccatacatcattaggtaattacaaattaaaacaattagataccaccacatacttactagaatggctaaaatccaaaacactgacactaacaaatgctatcaagaatgtggagcaacaggaactctcattcattgctggtgggaattcaaaatcatacctgtaatcccagcactctgggaggccgaggtgggtggattacttgaggtcaggagttcaagaccagcctggccaacaagggaaaaccccatctttactaaaattataaaaaactacg

SEQ ID NO: 105233 - DNA, 370 bp, Homo sapiens
aatacatcctggctgtactataactacgtgtttaggtttgtaaaatctggcacactatttttcacagtgactgcaccattttccattcccaacagcaatgtaggagaaatccaggttctccacatcctcactaatatttgttatgacagactgcctttcctattcacagaagattgtttccaggactcctcctctgactgataccatatccactgatgttcaagtcccttacatagaacgagaaatctcgcttatggagggccaactatataatcatttcgtgttttagaggttctgacagatatatagtatcatctcattgcgggttcacttggcgatatcgaacgcctatcgatgctccacacctttg

SEQ ID NO: 105234 - DNA, 456 bp, Homo sapiens
  misc_feature (1)...(456): n = a,t,c or g
aatacagaggtaggagaatcgctcanacccaggaggcagaggttgcagtgagctgagattgaaccactgcatccagccagggagaaagaacgaggaaaaaaaaaaaaaaagaactgggccttcctttgcccccccttttttttagccggggggtaaaaagaaattttaatttaattaagcctttctaatggtttccaaaggggccaaaaaaaaaaccataaacttttaaaaccggaaaaaaaaacctttttttaaaaaaaccttatcccccccatggattttcctaaaagccaaagggaagggcctttcctttttcaaattaaggcccattttttaacctaaaccaaaaaagggttaattaggccgggccccgggggctcccccctgaatccccacctttttaaaaggctgagggggaaaaattgcttgacccctgaattttaaaaccaccctggt

SEQ ID NO: 105235 - DNA, 459 bp, Homo sapiens
  misc_feature (1)...(459): n = a,t,c or g
aatacagaggtaggagaatcgctcanacccaggaggcagaggttgcagtgagctgagattgaaccactgcatccagccagggagaaagaacgaggaagaaaaaaaaaaaaaaactgggccttcctttcccaccccctttttttagccggggggttaaaagaaattttaatttaattaacccttcccaatggtttcaaaagcggccaaaagaaaaaccaaatactttttataacggaaaaaaaaacccttttttaaaaaaaccttattccccccctggattatcctaaaaggcaaaggaaagggcctttccttttttaaattaaggaccattttttaacctaaacccgaaaagggttaataaggccgggccccgggggctcccccctgtattcccacccttttgaaaggttgagggggaaaaattccttgccccccgttgtttaaaaccaccctgggcat

SEQ ID NO: 105236 - DNA, 479 bp, Homo sapiens
aatacataccttgtctttaagttcaaggctgcagtgagccgattgcaccactgcactccagcctgggcaatagagtaagaccctgtctaaaaaaaaaaaaaaaaaaatttcacaggggggttctcagggaaaaaaaaaagttaacccataaataaaccctttgccctcaaatggggggggaggggggggggatcctctgaggggggtccccaaaagggggggccccaaaatactgcggaagggcaggctgaaaacgtggaggaaaaggaaccacatgctgggctcccaaccccggggggagtacttggtggatctttaaaatcccaacggccaatgccccatgacaaattaatatatgtgtgcgcgggggcacacccatattctaggctttcccccggggttcctcatgggggttaaccccattcccctcaaatacgtgcgtgggtgcggggtgacgttcccttttgctcaatttcccc

SEQ ID NO: 105237 - DNA, 536 bp, Homo sapiens
  misc_feature (1)...(536): n = a,t,c or g
ggttgatcctctgagcggccgcatacagtggtgtgtgtgtgtgtgtgtgtgtgtgtgtgtgtgtctacacaggatcttgctaggtttgcccaagacttgtgtgcatgtgcgcgtgggtgtgtgtgtgcgcacacaggatctttctagggcgcccagactggtctcaaactctggtctcaagcgattctcctgcctcagtctctcaaggtgttgagattataggcatgagctactatgtcaggcctatatttggtctttgtccccattccctggcatgcagctccctaaactcttggaatctccagagtggtaaaaatgtcttcatatgctaaagagatgacaaatagccgagggcccctacatagccacaggatgaaggctggtcacctgaaagactaaggcaggattagaggactgtgactttcacccccaccttggccagagttattattattattgtgagacaaactntctctcttgtcacccaagctggagggcagtggcacaatctcggctcactgcaacctccacctcgg

SEQ ID NO: 105238 - DNA, 492 bp, Homo sapiens
aatacatcctctgtgtctccctctctctctctctctctctctcatttctctctatctcatttctctctctctctctatctcatttttctctctctctctttctctcctctgtcttttcccaccaagtgaggatgcgaagagaaggtggctgtctgcaaaccaggaagagagccctcaccaggaacccgtccagctgccaccttgaacttggacttccaagcctccagaactgtgagggataaatgtatgattttaaagtcgcccagtgtgtggtattttgttttgactaatacaacctgaaaacattttcccctcactccacctgagcaatatctgagtggcttaaggcactcaggacacaacaaaggagaaatgtcccatgcacaaggtgcacccatgcctgggtaaagcagcctggcacagagggaagcacacaggctcagggctctgctattcattctttgtgagaccctgggcaagccatgaatggat

SEQ ID NO: 105239 - DNA, 663 bp, Homo sapiens
ctcctcctgccgcccgcgggcccagggtgacgctaaggtggggccgagcctcgaccgggtgcgcctagaggtcgagtgctgccgccctccgctgggtctggacagttctcggcggcgacaccagctcaaaacggcctccccgccctccgcggacctgggtcgcgcccaggaatccgatccaaggctgtgaggcctgtccctttgggaagggtgggtgtttatttccgggatgcactcagagcctctggacagtcaggtcggaaactttgctgtattgggaacactctgtcacctacttccttctcagttgggaaggaagtgccaagaaaacatgaaacaaaccaaaaacacgaaaaagggattctctgtatggaagccgtgaagcctcaaaaatatctaggaggacagccagcgacctgggacctgtggcagccatgtgaaagcagggttaatgtctggactaaatgttgcttccacataagtgcaccctcagcctccctcccgccaagtgaccttgggtcctctttgggcttgaaggcaggtggctgtgtgggtctcgctgcaggggtctctgtgccctgcaaggtgtatgaccagttgcagtgaggcagcaggttttgggttcaaatcctgtgctagcctctggccagctgtgcaacgaaa

SEQ ID NO: 105240 - DNA, 387 bp, Homo sapiens
aatacatgtctgcgtcacattttggtaattcttgatctttgatgttaccattgtaattgatctggcgtgccatgaaccacactcatataagatggcacacttaataaacgttgtgtgtgttctgactgctccaccgaccagctatttccccatctctttccttgggcctccgtattctctgagacacaacgatattgaaattaggccaattaataaccctacaaggacctctcaatgttcaagtgaaagaaagagccacacatctctcactttaaatcaaaagctggaaatgactacgctcagtaaagacggcatgtcaaaagccaagacaggctgagagccaggcctctagtgctgaacagttagccaagctgtgaatgcaaaggg

SEQ ID NO: 105241 - DNA, 428 bp, Homo sapiens
aatacattcgggtgtggtagtgcatgcctgtggtcccagctcctcaggaggctgaaatgggaggtttgccggagcccacaagttccaggctgcagtgagctaggactgcaccaggtgccactgcaccaggtacccaggtgacagcaaaaccctctctcataaaaaaaaaaaaaaaaaagaaaaaaaaagaaaaaagaaaaaggggaaaaggggtccccggataaaaattcaatttggaggtggaaaaaaccgggaaaaaaaacttttaatttaacggccgggggaatggaaaaccaccttcgtgaaaaaagtcccaggggtttttttcaaaaaatttcgaaaggggccggaatttttggagggggaatttaacctaagggcttttttttaaggcccttaaattttaaagggccaccaaaattaaccag

SEQ ID NO: 105242 - DNA, 411 bp, Homo sapiens
gtcggtctgcgcagcctcctgcgttttttctcttggatcttggcactgagaggcggtggccggcgggatggagaaaagtatgatgaacctgcccaaggggccggacacgctctgcttcgacaaggacgagttcatgaacgaagatttcgatgtcgatcattttgtgtctgactgtaggaatcgtggccagctggaagaactgagagataacccgcagctctactataaacttcttaaaacagccatggtcgaactcatcaacaaggattatgcggattttgtcaatctttcaacagacttggttggcatggagcaagccctcaaccagctttctgtgcctttgtgacaattacgagaagaggtcttgagcctttaatcgtttgtcattgaaagaatctccccctcttctgc

SEQ ID NO: 105243 - DNA, 403 bp, Homo sapiens
  misc_feature (1)...(403): n = a,t,c or g
aatacatgctacttattgattgttgccatgggtaatacataatatctctgagcaagtggctgctgtatctataggcggcaagtctatattccaggcaggaggaaggtgacagaacaaaagcaaaggtgaagacaggaagggcaaagggctttctcaactttcttattttggagagacagttcttctagtgacttcactttacaccttgatgtcagaactgtgtctcatgtccttattagaaaaacctgccctctgcacttttcagctgggcacatagcccctgtgaaataagggttctataagtaagaaatatggtagaatggctgggcgtggcggctcacgcctgtaatcccagcacgttgggaggccaaggcgagcagatcacctgaggtcaggagtttgn

SEQ ID NO: 105244 - DNA, 653 bp, Homo sapiens
gttttccaacacgcctaaagagaaatagcaaccccataagaaattaaccccccccataccagggttagttcatgatagaactgcaggccgatattaatgacacacctacgataaaacacttcttcaagaacacaaggctctggtcacaatagacacgggtcgtcatcaccaagaccaagtggtagccgcaagcatcctatactatgacagggtatgtacaactgtatgtgcctagccagctgctgccgccgccgccaaaactcccagaacaggactcttcttctcttagaggctcgtgtgctccagcaccctctccccactccttttggaggtccagaccacttccaggctctaatctgtgtctccttgcccttttcctggcccggcctccaccctaagcttcctggtggccgacttcaggcggcggggcgtggacgtgtctcaggtggcctggcagagcaagggggacacccccagctcctgctgcatcatcaacaactccaatggcaaccgtaccattgtgctccatgacacgtaaggcccccgggcctcgccctgctacaacccaccaatcagttggctcaatcagttccctcactcgccaccatgggcatcccaactgcccccctctgtagcttctgtgtaccagaagt

SEQ ID NO: 105245 - DNA, 480 bp, Homo sapiens
aatacaagtgagggtcggtcaattgccagttggtgcggttccactcgctccttctgcaacatatactggaagagttctcgcccatggccatggcgttgcacagactcatggatgtaaaagtccaggatgcaaagtggctctacctcattatgagcctcacgatcatccagtacaaagagcttcttgtatccaactttgatgaaaccaataatggctccttttccagccggtcgggctgaactgtctttgagaatataaacaacatggcggatactctgcatccttgatgcactattgataggagcggagagagtctggaccttggcacaagccttgaccacttcatctataatggtcataatttgctgctgaatgtcaacacaggccggtgttctgggttcggatcagagaactgccggcctcatgagaatgggacggcctcaatttccggtaagagaaaaggacgtgcggatttttttg

SEQ ID NO: 105246 - DNA, 477 bp, Homo sapiens
aatacattggcgggattcatgttgggtgttgtggtgcgacatatgccatgtttaggcgggccccgctgaccctgtagctgggctgggtttggtgcaataacacgttgagacatcaacatgtgtggaagggtggtattggtagctgaacggatgacactgcgaccctgtaatgttctcaaattttgaggttcaaccccttggtccccaggccgagagggaagcttagataggccctgctgtcccacatgggcaggagatggttgatcaatatatgctgcattctgtacaactggagcattctgggccacattctctttctgtagctgactatgtctcactttcttctacagtacctactccgtttcttcgtagttgtatttatccctcttccttttctacatctgattccgctcctgatatgccttctttctaaatatccatattgtttttgcttctgtcattctactatcccgtccc

SEQ ID NO: 105247 - DNA, 385 bp, Homo sapiens
ttcgccattctgctattgatgcttgtgattgcaatgtgaggttctcgcgttgtgattttcagctacatcaggtaggttatgtttctctcaaaaccggctataagctcctgtgttgttttatcatggaccttagcttctttgcattgggttacaacatgctcctttagctcagcaaagttcattattacccaccttccaaagcctgcttctgtcaataatgctatctcagcctcagccccagcccatttctatgcccttgccagagaggtattgtggtcatttggaggagaagaggcactctgactttttgagtgttcaccatttttgagttgattttctcatctgtgcggagtatcaaactttgatctttgagattgatgacctt

SEQ ID NO: 105248 - DNA, 491 bp, Homo sapiens
gccgggccagcactcacagctctgaacgatgcgtccaggggccagtggccaaagcaatgctccaagaagaggtagagtttctgctggatgaacctcgggacagcggcccgtttgaactcctccagggggctggtggcgtgggagtgggcggagggtgaggcctgctctggcttcaggctgttggcaaaggcgtgcaggtgcttcagcagcaggcgcaccaccaacacatgctcctcagtaggcgtgaacgactcctgggtggagaaggaggggtgagggcctgggaaggagcgtggcacccatagcactcggcctccaggtctgaccacatcccgcaccgagccagttgctctgcttcccccacgggaggcatgagccaggccgggagtggggccaccccatggggcaccactgtgcctggcacccagatgtgccttgcactgcttggtctgaactgtgaccagcttgtggtatggaagtgcttggcccag

SEQ ID NO: 105249 - DNA, 514 bp, Homo sapiens
  misc_feature (1)...(514): n = a,t,c or g
agaattaatttaaaatctgatcttgaaggtcctgcttataaccaccttactgcctctgagatggaaggggacttctggacacagcaaaggaagggtccccatgccatggtgtttgtcatgctgtgatataactagttgtttactcatctgtgagtcccctgagccagaagcttattcaggacaggacccatgtctgattcttctcggtgccctctacccaaagcccagcacagagtaggcctgnnnnnnnnnnnnnnnnnnnnnngaatgaatgaagcaaatataaatagatgagagggtagagcacctggcctgtgagctgctttcctgcccacctgtttcctttctttcttagctgagggaatcactttaaccctgatggagcatctcatgggggcccccaggactctgaccggacagggccaagaggaccttgcctgcccagtccttggggagctcagatcctacgagactggtacccacaggaggaaatgggtactttagggaagcagga

SEQ ID NO: 105250 - DNA, 374 bp, Homo sapiens
ttcgccattcgtgccactgtacttcagtctgggcaacagaactggacactgtgtctttaaaaaaattaaaagaatctaatttttattcgatatttacaatcgatgttatttgatatttattaatataatttgatatctatcatcgaactttgattagatatttatcatcatttatttagttgctatttatcgactgctgtgccttggacttttcagggccccaagacagtgcaagcaccccaggcctcagttcagcttcaacaaaataggtacaaagaggtaagcctggccgggtgcgatggctcacacctgtaatcccaacactttgggaggcctaggtgcgcagatcatgtgaggtcaggagttcgagaccg

SEQ ID NO: 105251 - DNA, 437 bp, Homo sapiens
aatacatggggagtctgaggcaagtagaaccctctagaggaagtcaaattgcctaactcagggctaagaaaggtgttccaggacttgggaacgaaacctggaaagggctcaaatagggctgcctaagaatggaaattctagggacaaagagtccaaatctttttttttttttggaaacggttccctttttttgcccaaggtggaacggaaggggcccaatttcgtttaatcaaaccctccccttctgggttaaaagaaattcccccccctaaccccccaaggaagggggaataacgggatggcccccccttccggggcgattttgtttttttaagaaaaaacggggttcctccttgtgggcaaggggggtccaaacccccggccccaggggaacccccccccttcacccccccaaggggcgaaaataacagggggag

SEQ ID NO: 105252 - DNA, 420 bp, Homo sapiens
aatacattccccataccagcatcagcattacctgagaactagttagaaatgcaaattcctgggtcctagactagatctactgaattagcagagggtgggggtggcaatctatgttttaacaagccctccaggtaatgctgaagcatgttaatttttttttttttttattttttttattttggaaacaaagttttgttccgttgccaaggctggagtgcaatggcgcaacctcagttcattgcaacctttgcctcccgggttaaagaaactttcctgcctcagcccaggagttcaggattgcagggagctatgatcacgccatctgccctccagcctcagggaagggggagtgaaaccccccctttttaatacctaaagacccccgaccgctgtggttcatgcctgtattccccccacttt

SEQ ID NO: 105253 - DNA, 408 bp, Homo sapiens
aatacatggtctgacttgataataagctattttcacccccgcccctcagctttttttttgagacagggtctcgctctgtcacccaggctggagtataggggcacaatcacgggtcactacagcctcgacctctggggctcaagtgattctcccgcctcaatctcccgagtagctggaactacatacagatgtatgccactgtgcctggccaatagggggaatgatttttaattggactcttcttaacttaaatatgttctgtttggcctttatctgaaattcagtaatgatggctggaccatggttacttaaggcagccatatactctgaaatttgtaaactaatactcctcttgattatactgtgtatgttggaatcaaataatccttgcatcatggtgcttaatac

SEQ ID NO: 105254 - DNA, 791 bp, Homo sapiens
tttttttttttttgcacaagtcagtaaaaactctttattcattccttcatgtgacagttggccttgagtagttacaaagacagagcagttcctgcctctcagaattctaagcagacattccagagctctcagatcagtgtcccaccagctgctaccctggaagcttcagggagatggggagcctggagtaggggggtgctgcaggaacccccggcaggcagtggggccaggcttcacaggcacccagggctgagtgcgagatggcagggggcaagcaggcaagcagtgggatggtcttgaggtgtggggtgagggcaggaagcccacggtattcctgacttggagtcgagggagacagaacggaggggcccgagctgaagacagagtctgagggaactggagaggctagaagccagcactcagcttcccaggagaccccaactattgccgggccaagtgtccagggagaacgtcgggtatccaaatgtttcagtggaagattccttttccaaacatgagctggttctttgggtttttaattataaacataatacatggtcaaggttaaaaacattttccaagcaccacataaggatatgaaataaaaattctatccccctctagaccttccagactgggtccagaaggagctgctgtcagtgattttccttacagagagaccattgcagccacctacagtgcaccatggccccgacacagtgtggcatctccccccacacgcacgtgcacgcagcctcttaggagctgccttgctgaaggaggctcgtgcc

SEQ ID NO: 105255 - DNA, 401 bp, Homo sapiens
ggtgcatggaacgagcagtgaccgtgctcctacccggctctgctacacagagcccacctgtgtacgcccctcgggccctcgcccggctttggctaaccgccgcgatgatgatctcgggcttcatcgcagactacgaggcgtgatcctcccgctgcagcagcgcgtgcccggccggggatagcctctcttactaccactcacccgcagactccttctccatcatgggctcgcctgtgggcgcgcaagacttctgcgcggacctgggcgtctccagggccaacttcattcccacggacactgacatgtcgaccagtccggacctgcagtggctggtgcagcccgccctcgtctactccgtgggcccatcggagaccatagcccctcaccctttgggagtcccc

SEQ ID NO: 105256 - DNA, 446 bp, Homo sapiens
ttatcttgcgcgaaacctccacagcggccgcttcgccacgggataataaaaatattcaatgtctttgaagaaacaagagccaacaagcatctgttaggtgtgagtaaattaaagcccagggggtttcctgctttatttttgtctgtttcttcgtttggtcagaaaaaacatgtgccccagtggctgcagcactctcattctcacatactagtcatctcccttgactttttttttttttttttttttgaaaaaaaatttccctttttcccccccggggggagggaaagggaccaaaccccgtttaattgaacccctccccgggggggttaaagggaatcccccccctttccctcccgaggcggcgggacccaggggtgggccccccattgcccaataattttccgcttttttcaaaaaaaaggggttttccccctgcgggcgcgggg

SEQ ID NO: 105257 - DNA, 410 bp, Homo sapiens
  misc_feature (1)...(410): n = a,t,c or g
gtcctgtcgtatgttnggatcctctacagcggccgcaatacaggggtgggctgcgatctgttgggtgtgatctgcaaagcccaacaccaaggggcccctctgggaggtggcctaaccctgctcaagcacgtggtcctggagaagcccaggcgtgggcttggccaggcggtgggccaagggaagccttcagtggccaaggcaggcccccacctctaggtctccatccccaccgacgaaagggagcaggccctcccggacccatggggccctagcatgaggggcagggcagctgctgaggtgcaagctgcaggggaggccttgcctgcaccgcctttccagctgcctccagtccacccatctttggtggcctgactcctcccaacttaaattttcctgaagaatgagaagag

SEQ ID NO: 105258 - DNA, 409 bp, Homo sapiens
aatacaaaggtgcatatacatgggaggctgaggccggagaattgcttgaacccaggaagtggaggtttcagtgagctgagatcgcaccactgcactccagcctgccaaactgcatctcaaaaaaaaaaaaaacaaaaacaaaaccttgggggcggggctaaagcccccctttcattcccaatttcatgggcccaaacttcctttgtttaaaaaggggcctaaaaaggtaaaaccccttccaaaaaccccctgcccaaaacattgatttggcccaaaagccccttaattttggctccaagaaagcccccaagggggtaaaaaattttggggggaaaaaacggaaaccttgctttgggggtggggttccctggaaatttggcccctttctgaacccccccttgcaataagg

SEQ ID NO: 105259 - DNA, 453 bp, Homo sapiens
cgcctaccgaagtttggatcctatacaccggacgcaatacactctttggcttcctccagggtgtggtagtggaaggagtccgcgtccagggagcgcaggagggaggcgtgcaggtgccggctggcctggatgaactgctgcgtcaggctcagctgctgcttcagcacatcatggagtgccagcacggccgggctgtaagcggtcagggcttctattgcatctgcactgataacatgattggcgatgggtgtcgggtccacgtaggcgcctcccagggcaggccccatggctgccatgctggccaccttggtccactcgtaggtgaaggcaggatctggcgtctgcacagctgtgtccttcacaagcactcttgtcacgtgcctgcccgactttttcctaaactcggctgtttgtggaaggtctgtcttcacacttgaagaggattcagacaaa

SEQ ID NO: 105260 - DNA, 414 bp, Homo sapiens
aatacagtggtgcatgagccagaaattctctggcgtattcattgcctggcatatctggtatgctatcttctggcttaacctcatcttcctaaacaaagggaacaaggtgcaaatagcatggcaagacagcactgggattctctcctgcttccctaggagtcaccctcacctggctttttcctggtctgtgggtgccaaggtcatcttaattacccctcaaaactagaaagaaagacagttacacttgatcgaaaaaaaaggaaacaaatgtaccagaagaactataccaaaaacaatgtagctgttcttagagaaaagttactggtgaagcagaaaaatctgtccttatatagcaatgactggtgagctccaaattttgatgtaaattagattctaaggttttttaaaaaaagg

SEQ ID NO: 105261 - DNA, 458 bp, Homo sapiens
gatgcttgacagttagtatagtctacaccgggcgcaatacatggcgttggaaagtgaatccgtggtaaaaattcatgtcggtctaatacttacaaccttaaccaatgaacaggaaagcaactttaaaagctaacggacgccttgacccaggaggtagagattgcagtaagccaagattgtgctaccgcactccagcctgggcaacagagtgagactccgtctcaaaaaaaataatgtacgctcccaaaatccacctgtttaaactcaatcatgtgccattttttaggacaaatcctggatatcgaccaaacaaactcacatttgaaagtcgcacataaataacatacaattaggctgtagtccaaacccataaagaccaggtcagaaaagtaaagtgaccttgggcaaaactatttggtaagtatcatcccaggtttctgcagctccacagagtaaga

SEQ ID NO: 105262 - DNA, 592 bp, Homo sapiens
cccggtgagagccgctctgcctctctgccgtgggtgagggggctgggggctgcagatggtgcctgaagtgccctggccaccccttccccagatcagcggacagctctcccctcgcctcttccggaagctgcctccccgggtgtgcgtgtccctcaagaacattgtggatgaggacttcctctatgcaggacatatcttcctgggcttttccaaatgcggccgctacgtcctctcctacaccagcagcagtggggatgacgacttctccttctacatctaccatctgtactggtgggagttcaacgttcacagcaagctcaagctggtagggaggcttcagcaccaggctggcccttcagatggtgtggttcagcaggtcacagcaccctctgagcctcaggttccttgggtgtaaaatgatcatcatgtactcctggggtcatcatcaagattccatgtgttagatccaaccatatgaaattaccagggcctggcatggtagctcacacctgtaatcccagcactttgggaggccaaggcgggaggatcacttggtccgagtagttcaagaccaggctgggcaacatggcaa

SEQ ID NO: 105263 - DNA, 393 bp, Homo sapiens
actacacgcttactcgagatacatcgagccatcattggtatatggctaatgcgacggataggacgcctatgatgaagagcgtcatggagtggaagtgaaatcacatggctaggccgtacgtcattatgagggatgagagggcacaaaaacaaggcatatacacaaaagtcagtcaagaccactgaccagctatatgactttgggcaaaaaactgaacctgtttcaactgaaaaatatagacaatgatatcttcctcagaggggtgctctgaggaaaatgagatggtgagctgaaagaaatatgaatggcatatggctgtccatcttccacccactgacttccaatgcttgtttatctgctttacctcacgctactatcttctttttctctcag

SEQ ID NO: 105264 - DNA, 422 bp, Homo sapiens
aatacagtgtgtgtgtgtgtgtgtgtgtgtgtgtgtgtgtgtgtggagagaaaagcagggcacagactcacagactcatttcccatccaggcagggcctggcgcccaggcacgcactctctgtctaagagagagcacagggggcgcactctcttcagggttacctgcctcacggtatcaagaccctggaagaggggctttgcacccacactgcgtgtggacacccagaggctggaactggagactcaactacccccctgcgcgctcaccgagcagggaggctgtctgttatttccggcagaccctcaagaaatggcgcagccccagaggacaaggaggacgcatactccgtgtcataagaacagcctccacctttcgcgacacctcctaagagcgactcttatgccccgccacacccaagag

SEQ ID NO: 105265 - DNA, 976 bp, Homo sapiens
  misc_feature (1)...(976): n = a,t,c or g
agatctgtggctgcgggagatctctgcggattggggctccagcctgactgacccgacagtgcgggtggcctagggggaggcgctcagatcgtatttttatccaaaagaaggacctggaggaggatgagagcgttactgctgcacacctaaagtcaaggaacaggagcattgggaatatgtgattcattgagactgctgcttgtatattaagaaaatgagtgaggggctcaaatgatctaggacagaaattctttcttttgaaatcgacagatataattgtatgtatttatcatgtgcaacatgaagttttatggggagaagcccgaggaagattgaccaattttgtaattctagaaacatggtccatggatcagtgacattcagggatgtggccattgacttctctcaggaggagtgggagtgcctgcagcctgatcagaggaccttgtacagggatgtgatgttggagaactacagccacctgatatcactgggaagttccatttctaagccagatgtgattacattactagagcaagagaaagagccctgggttgttgtaagtaaagaaacaagcagatggtatccaggtaagtgagagtaaagcaggcagggggaagccatcattgtcccggacagcccatgtgctcagagaggagtcacacccctgagatgtggtttggaaaactttcttcaataacccaaggtcccccactggacaaaaatgcccaagacctgggaaggaaataagatcactgtaggagctgtccccaaggaacttcatcatttactaatcacctaatttctgttattttcttcctcttttaatgaagtgagcttcctctttctttcccagtgtaaactttaaacagtttttnnnnnnnnnnnnnnnnnnnnnnnnnnnnnnnnnnnnnnnnnnnnnnnnnnnnnnnnnnnnnnnnnnnnnnnnnnnnnnnnnnnnnnnncataatgtatt

SEQ ID NO: 105266 - DNA, 397 bp, Homo sapiens
aatacagtgcctggtggcacccacagaggttctgacagggcattggctgtgtcctcgtgttggggttcaccattaagcggtgtcggtaggagccacctgagaatagggtggggacgggagagagacccttagagcaccagcggatgatggctgcatttgacaagagagagcggagactccattagccattagctgcccacggagctcatccacgtgtcgggggcgtgcaaggcggtatgacggatgccggacgcgcgatggccatcagctgatacagcgaggccagcagcaagagagcagtaggagaacagcccagcccggatcatccaagctttgccgggggcctggcggtcacagacccagcctgggtactgtgggagtgcatggatgctccttg

SEQ ID NO: 105267 - DNA, 554 bp, Homo sapiens
  misc_feature (1)...(554): n = a,t,c or g
cgcttgatgttatagagcgcccgcactacattgngtgcatagctttttcataattagaattggaaggatttattcttatgaatgtgattgctggatgaaaggagtgaagacattggcaattccagatgcgcaccgtcccacggctttccaaaagcaccttggcactcccagctcagccaccctaggcagcagctgtttatttcacttaattggataaatgaagaaatgggaccctacagtctttttttttttttttgaaaccgaattccaatttggcccctagggggggggggaggggcaaaattttggtttattgaaacccccggtctcggggttaccccctttggcctgccctacccccccgaagaggtggaaaccaaagccccccccccccgcccccccccattttttgtttttttaataaaaacggggtcttatattttaacccggggaggtttttaaccttcgaaattggaaattgcccccctcgcccccccaaaggggcgggaataaagggcgaaaccaaccccccccgaggggaacctttatgtttt

SEQ ID NO: 105268 - DNA, 417 bp, Homo sapiens
aatacatgcgggtatagtgacacacgcctgtagtcccagctgaggcctgagaatcgcttgaacctgggaggcggagattgcagtgagctgagattgtgccattgcactccagcctgtctcaaaaaaaaaaaaaaaaaaaaatttcccggaccccacctttaagcccttggggaaaggaagaaaaaacttgggaaaaaaaaatttaaacctttgtgggggaaaaaaaggtttaattttttaaacccaaaaacaagggggggccctaaaaaaaggccggacctaaaatgttttaaaaaaaaccccccccaaagggggtcccctttgggttaacggggccccaaaaaaaaaaaaggtgggggggggcccccctgggcaaaaatttcccccaaaaaccaggtgtttcttttgaggaaatag

SEQ ID NO: 105269 - DNA, 408 bp, Homo sapiens
aatacatgcgctctaagacaccgtgaccatttttctttctggtctgatggaaaaacaaaggaaggagaggagagaatagtccaagaaaactggttaatttcttggaataatttctcagtcccagagacattactgacactttcctgccctttaggtaaggaagggatgccaggtgaggatgggactgcaggtgcgggtaaggttccaggtgaggataagattccaggttaggatggaactgcaggtgaggatgggactgaagatgagaatgggaccacaggtgaggatgagactgcaggtgtgggtaagactccaggtgcgggtgggaccacaggtgaggatgacactgaaagtgaggatgggaccacaggtgaggatgagactgcaggcaagggtgggactgcaggt

SEQ ID NO: 105270 - DNA, 420 bp, Homo sapiens
aatacatgggggcataaacaactgtggatgatataatcactagttggatcaatgtaaaataatgcttatgatgcacataaagtactagaactgctgggcctgaaaaatattttgaaatgtaatgaatttctcctacataaaagatgtaaaaaaggtggaggattcagttagaaaagcatatggagcaacagcacactgaagagcctggactttatcttttagtctaggcatacccagaagtaaaaagactcagaaagcacaaaagcatatattagagataatataagcagtacgaaaaaaaaaaaaagttggccaggggctggggctcacccttgtaatccgagcactttggaaggcaaaggcgggtgaatcacttgaagtcaggagttcgagaccagcttggccaacatggtgaaactc

SEQ ID NO: 105271 - DNA, 443 bp, Homo sapiens
  misc_feature (1)...(443): n = a,t,c or g
accgcgcgtttgcttgannnnacagagcggacgcatacagctcccttctttgagcaaccaggctttgctcacatacacctgtcaagcaaatccaaatgaccactcctcttctcctttgccagacctatccagcaaaggatcagcaaacagaagagaagggcctacaagtagccaggctgaatttggccaactagggcctcagtcccattccccctacaatgcacctcctccctctagtaacttgggcaattcctgaaaatagattacaaagctaggtgttctacaatttttaacaaatgaatacatgcacacacatacaacctgcatatgtacattaagagaaatatttcaggccgagcgcaatggctcatgccttgaatcccagcactttgggaggccgaggggggtggatcacctgaagtcaggagttccagacccgcccc

SEQ ID NO: 105272 - DNA, 439 bp, Homo sapiens
gggctgaaatgggagagttgctggaacccgggaggcagaggttgcactgagccgagatcgtgccactgcgctccaggctgggcgacagagtgagactttgactagcggggagaaaaggaataaatccaagtaagaggatgattatgtgagacataattttagaatggaaggcatcaggatgaagagaaggaggacttgggaaagcatgaaaaggctggttaccagcattgagaagaaccgctgagagcgtgtatggttgattgagcagctttagtacaataagtgctgtcagacatgtatataccgaggcttgagtaccccgtagcgtaaattgattggtgttatactattggactgcttgggagtcgtatggtgctgaaaaattatgtagagaaagattgtgtgtctattttcgatgtaaattagttcagtcgtagcg

SEQ ID NO: 105273 - DNA, 423 bp, Homo sapiens
  misc_feature (1)...(423): n = a,t,c or g
acaacacatgtgcaggatatgaaattgctgaggcatcactgctttcctacttcccttccaagtctcagctcccttattttaaaaaatatttggcctcaatgatcatttctcaacaattcctcaccgcaggagcctctgaagctcccaccaggccagctctcctcccacaacagcttcccacagcatgaagatctccgtggctgccattcccttcttcctcctcatcaccatcaccctagggaccaagactgaatcctcctcacggggaccttaccacccctcagagtgctgcttcacctacactacctacaagatcccagcgcagcggattatggattactatgaaaccaacagccagtgcttcaagcccggaattgtcttcatcaccaaaaggggccattcccgatggaccaaccccaaggn

SEQ ID NO: 105274 - DNA, 383 bp, Homo sapiens
gagagctagcagtgagccgagatcgcgccactggagtccagcctgggcgacagagcgagacaacgtctcaaaaaaaaaaaaagggggcaaaaggggaaaaaaaaacccacagcaagatgggggaccaaatttcaggagccggttgcaagggattttaatttaaggaatggaaacacatgggccggtttggtaacttggccctataactgggctacgggaaatagccccaaaaaaagggaccggtagaaaggatcaaggattaaaattggcccaaaaggagtacaaaaacgtctttatcattatcaataccattaccatcatcatagggggctcaaaggttttggggttttggcacaagtgaaccagattgaaaccttttggag

SEQ ID NO: 105275 - DNA, 383 bp, Homo sapiens
ggcgtggacctgggaggccgagcttgcagggagccgagatcgcgccactgcactccagcctgggcgacagagcaagactccatctcaaaaaaaaaaaaaaaatttgggggttttgtaaccgactcaaaaggccccctaaaggcaaaagcaacaaataacattcccaaaaatactatcggtcaaaaaaaaccccttatgggtacccttccttaaaaacttattgaaagacacattcctgggaagcaggaaataattaaagagtaccggtctaagtaaaaaaaaggggggatatttaaaaaatactggggttaatgctgccttgtaaactatcaaaggaaaaataattggtataagcatatcaaagttgaatgcaaaacccttag

SEQ ID NO: 105276 - DNA, 384 bp, Homo sapiens
gccatcgtcatagaccgtgtactcatcctccggcatagtgaacacgtccccgcgagtcacttggggcttgcactcagccgtatagtctgtgcagcagctctggtagtaagagcagagctcgtccccatttttccacttcgcagtgtcttttaaagatatccaacttgccaagtgaccatcaaacccttgctcctaactagtgtgtagggctccataggtgagcccactgtcttttacttcattttcaaaaagaagttgtcttgagtgagattatgtgttgagcttgagcgtaattatgtgttgagcttgggaatatgtatctcttgcccttacaaagaataggcagattggctgaatgtcaaaaaaaactaaaaaaaaggatct

SEQ ID NO: 105277 - DNA, 1398 bp, Homo sapiens
  misc_feature (1)...(1398): n = a,t,c or g
atttcgtcgggccctcccggaggcggcagcagcagcagctgtagcggctgcagcggcagcagaggcagcagcagtagccaccactnnnnnnnnnnnnnnnnnnnnnnnnnnnnnnnnnnnnnnnnnnnnnnnnnncagtcatggctgctgatggggtggacgaacgctcgcctctgctgtcagcatcccactccggaaatgtcactcccaccgccccaccgtacttgcaagaaagcagccccagagcggagctcccacctccatatacagccattgccagtccagacgccagtggtattccagtaataaactgccgtgtgtgccaatcactaatcaatttggatggcaagcttcaccagcatgtggttaagtgcacagtttgcaatgaagctacgccaatcaaaaaccccccaacaggcaagaaatatgttagatgcccttgtaattgtcttctcatttgtaaggacacatctcggcgaataggatgcccaagacccaactgtagacggataattaaccttggcccagtaatgcttatttctgaagaacaaccagctcagcctgcattgcccaatccaaccagaaggtacaagggtcgtgtgtgggcactgtggaaacacattcctgtggatggaactgaggttcaacactctggcaaaatgcccacactgcaaaaaaatctcctcagtgggtagtgcacttccacgaagacgctgctgtgcatatattaccattggaatgatatgtattttcattggagttgggttaactgttggcaccccagattttgcaaggcgatttcgagcaacctatgtttcttgggcaattgcttatctcctaggattgatctgccttatccgagcttgttattggggagccataagagtcagttatccagaacacagttttgcataagcttgtttatgattcagtaatgcaggtgagagtgtctagcagttcttggtaagctactctggacatctttaaattatttatcctaatggattccattctggtttatgtataatcgtttcaagactttgggagtcttttatgaacaaatgctcattgcactatattatatgcaaattgttttgctgctagggttttcaaaatttgaataattaaagccttttcatgttcttttacatcttcttataggatatttttggggtttgttacccaaacattacatttactctcacccttttattatttttaaataagttatttcattacttgctgatacatgagtattcctaagtgtttataaatatttctataatagtttcacatttatatttacattttaattaaacagtatcaaaattgcttgcttaaaacctaagcaatatgcattttgcttgaactgcttactgtaactttaacctaagatta

SEQ ID NO: 105278 - DNA, 920 bp, Homo sapiens
gcaccgtctcctttgaatcgtctttggtatcctcgtctcccttggacatcagctggctctctgtagactgaaagttaaccacagagggtgtgtcgctctctgaacgccgcagttggggtgcaggccccagcttccttttagattcatgtggctgcaagcggtcttgctagggacagcgtggcatgcagctccttggaaacagctcagggccttggggtagggattgttctttcctccccattgctaccttacccctagattttgcaactggctggatgaatatagggggtccacagtctgcccctgaaataaaatcaaaggatgctcccgagcagaaggaagacacacctttattgcaatcccttctatggacacttccaagccatcactatgcaaatacagttggtggcccaaagccagtcagccaaagcccagcaagcatagcattggctcaagcaagcttcatgccagccattccccaccactgccctccccgcccccacagcagtgcaagccacaacacacaggcattaagttatatggcacaacacacagcagctttcagtgcttcttcaggtccaaactgttaggtcctgttttcacacacgttgtaggtggataagggggccagggttcctgagtctcagatcttcaacctgcctgtaccgcaggtccctgcagggatactggcaaaatcactgggttttgccacctctgtggagcccgtggttctagggagctgaccagccggcccttacataagcttcaggaattctttgacccctctagcccaagataggaactaaaattcagactccacagccttttttcctaatttagcatcctcatcttggcctttgaggatgcagtgctctgaagctgaggagcaaagagagtgaagccaaagggaggtgagcctg

SEQ ID NO: 105279 - DNA, 421 bp, Homo sapiens
agtaaagtgaaagaaattagctttgtaaatggcctggactacacttcctgtaagttcaaaaatcagatctatgacactgcaattatcttattggtgtaaaagcctgagccaccagtggaagacctggtttgggattgagggtctcagggtgagtcagcccccaaactgacagatagggaggataaaatgggaaaaaattttccgccttcagtgagcctataaaaattgcaaacacatgtaacaatcaggagctggattaactctaactggattaacttaaagaattttgttgcaatgtgacattttgttttctctctagtaactggtatgaaccctctgtctccttatttaaatgtggatccacgatacctcgtgcaggtaagattaagattttactagtttggtgcattattttaccatt

SEQ ID NO: 105280 - DNA, 421 bp, Homo sapiens
ggagcctccaagcctgaaccaaagcactacagatcacctgctatcttcatagcaccatgagtgaagaatctgatggaaagcttattgaagacagcctgattcagctgagatgtcactttacatggaagttgttaattgaagcccctgaaattcctgatttagaaaacaggatctgggaagagattcagttcctggacaccaaatacaatgtgggaatacacaacctactagcctatgtgaaacacctgaaaggccagaatgaggaagccctggtcagcttgaaaaaggctgaagacttaattcagaaagaacatgccaaccaagcagatattagaagtctggagacctggggcaactttgcctgggtgtattaccacatgggcagattggcagaagcccagacttacctggacaaggtgga

SEQ ID NO: 105281 - DNA, 432 bp, Homo sapiens
gtgagccgagatcacaccattgcactccatcctgggcaacagagtgagaatctgtctcaaaaaaaaaaaaaaaaaaaagggaagggccaaagggaggcctaggcctggaggcccttacccctccccttaagaacccctttttttgccccctctcctttgccccaaatcctttcccttgcaggggctaaaggacccgggcccggggacggaaaaccggaccttgggctgaaacagggggggttccctgttaataaaaaccgttggccgcaatttaaggctggttgtgcctgcccggggcccaggaccacttcgggttccaaagccaactggaggccgggggtctaattgccctaacaatggcctttttcaccattaatgccctctgaaccctggaaattgcctgaggttgtgcataacgcgtttgaagctttc

SEQ ID NO: 105282 - DNA, 391 bp, Homo sapiens
ggaacgtctgaggttatcagtaagctcctagggcagacgccatgggtcatttcacagaggaggacatggctactatcacaagcctgtggggccaggggaatgtggaagatgctggaggagaaaccctgggaaggctcctggatgtctacccatggacccagaggttctttgacagctttggcaacctgtcctctgcctctgccatcatgggcaaccccaaagtcaaggctcatgggaagaaggggctgacttccttgggagatgccatacagcacctggatgatctcaagggcaccttttcccagctgagtgaactgcactgtgacaagctgcatgtggatcctgagaacttcaagcctctgggaaatgggctgcagaccgctttgcaaat

SEQ ID NO: 105283 - DNA, 425 bp, Homo sapiens
atttcagccctgtgctgcccgtgctgtctggctttccatttaggaaagaagcctaggaaaagctcatgcatttctctttgggcctccacggttttttttttctttcttttttttttttttaaaaagggtgggcctaaaactccggggttaaagcagccttccaacttaaccccggaaatccaaaccttgaggggaaaccgggcccaggatttaaaacccacccgggccaactgggggaaacccattttttattaaaaatccattatttatccggccttgtgggaaaaccctgggaatcccagttattgggaaacctgaaccgggaaaatcattggaccccggaaaggggaggccccagggacctgaggcattgccatggaattcaaccttgggcaacaaacggaaactttgtcttaaaaaaaaaa

SEQ ID NO: 105284 - DNA, 839 bp, Homo sapiens
  misc_feature (1)...(839): n = a,t,c or g
aggaaaggaggtactgtagctacacttctggaaaattcagtatggacagtctccgacttaggatttttcaactttaggatggtgtgaaagagacacccattcagtagaaactgtacttcgagttttgcattttgatcttttcctggcctagtgataatgtggtacagtacactcttgtgatgctgggcagcggcagcgagccacagctcccagtcacccatgtgatcacgggaatcaacaacccatcctctaccgtgtactgtgttgtcagcttttttggatattgtgttttgtgttttcacattccatcatgtctacaaaatgtccatcagtgtctcctgtttctggtgagatgaagaagaggaaggcaattactcttgaaatgaaactcaagataattgcccagcatgaaggtggcaagccagtaatggccattgcacgtgagttaggactttggcaatccacgatttcaaccatcttaagggataagaagcaaatcagtgatgcagcgaaatcgtcagcatcagttaaatccactgtcatcacaaagaaaagggctggaccaattgatgatatggaaaaattacttgttatgtggatggaagaccagatacagaagcgtataccacttagcctactgatgatccaggctaaggcaagaagtctttttaatatgctaaaagaccgtgccagtgatcctacatatacacaaatgtttaaagcaagtcatggatggttccagcgcttcaaaaggcgtcataattttcacaatgtaaagatcactggtgaggcagcacgtgctggtaatgaaggtgccatagnctttaaggaacagctgc

SEQ ID NO: 105285 - DNA, 1431 bp, Homo sapiens
ttttttttttttgctgttacacagaagagactagttaagtgtaccattgaagactattacgcatcacgtgcctacgttcatcaggccttaagccctcaaagaacaacagcatcaggggctctgtgagagccgccacctgagcctcaccgcttagttcataaaacagccctgtgtcctttctacaaagccaggtcgtgttttctacccacagttcaggactccagcgtagacagcaaacacaaaacttgtttcctttttgaaacaaaacagtcttagtagaagcaaaacaaacaaccacaatctaaaccagccgcgaggaaccctttcctagctggaaaggagaatgtgtcgccagcgattcggagtgaaaaggatgggaagatgcctgtgccacacccttgaatgtggtccacagattcaccagctccaaggcagcatctctttccaaagcacctgcagcaggaggctgtgtggggcaacaaagtcactcctgatacagagaatccccccccgcccgccgccatccaaatggctccatgcacagctggcccctccgcttctcaactgtggctcatgtggctttgttagagtcttgggggtgaaaggtgtgagagacaggagggagcgtggctcaagtggggccattcagtcgggcggccgggtgtcgggggccttctcctggacttcatcatactgcggtggaggagtcaaaggctctatcgagggaggagggacgtttttgtctgggaggttgatcctaaagtctttgaggtgaagcttttcagatttaatccttcgaactttcagcggtttcagtcgtttggccaacttagagttctgcctgtcaggggggttcccagggctggcctccacgtcagccctggtggatgtgggggtggtctcgtcgagccccgtcagtgactcataggacgggagagagatgctcaacctcgggttctgctcctctccccttgcttctgagtagtttgtgttcatcacttcctcgtagctgggaacatagtaccttgaggcagcctcctcatcctcctcttcttcctcctggctgtcttcctcctgggcgtgaggcccagcgcctgtcgggtgctggacatgggccaggtcctcgccctgccgctgcttcctatatccctgatactcaggcagatagaaagcagcagcagcatcaccccggccccgaccagcacgtaggccacagagaaggtcttgctcttgaggatgccgccacccacctcggtcttgttgctgccctgagctgttggcttctcggccgcgctgaagccgggtaccaggttccacatggccatgatcaccccaaggaccagcatccccaggccgatggcggtcagcgcatagtgcgagccattggccttggactgggccatcatgtcagtgggaggagggcgaggccca

SEQ ID NO: 105286 - DNA, 434 bp, Homo sapiens
ggcgtgaacccgggaggcggagcttgcagtgagccaagattgcaccactgcactccagcctgggcgacagagcgagactccaaaaaaaaaaaaaaaaaaacccaaggaccagaaaaccgggaggcccctctttccttagaaattcaaccttaactctccaaaaccaaacccctataacctggaggaatataggggttaaaacccaccggccaattttaggttttccaatgtccaataaagttgaaaaaaatatggacaggctttggggaaggaaatgttaatactaaaaagaaataagattattaattaacagtacacaaatattagacacgatattagataagaaattgttcaaagatatactgatgtttattctgaactaaatgatatacaagtatcctgacactatatttaagcaaaactatacttcagcg

SEQ ID NO: 105287 - DNA, 459 bp, Homo sapiens
ggtacagtgcaaaacatggagaaggatacgtagacgcaaatggacaaaatcggttaaaagggtaaggaagagaaagtgaaacgaaaggaggcggagcaaaactttagtccttatgcgcaagataagcaggagaggataaagggaaatgagaatgacgaaaagaccaagcaagggaaggagacaatcatagatattgaactgtttaagggactggatgagactggggagaacatggacagcaccttgacaaggaccccgttcgagccgctggagaataacaagcaaatcctagtgctgggcctggatggagcaggaaaaaccagcgttctgcactctctagcttcaaacagagtccagcacagtgtggcacccactctaggtttccatgcagtttgcatcaacactgaatacagccatatggagttcctggagattggtggcagtaaaccttttcggtcc

SEQ ID NO: 105288 - DNA, 413 bp, Homo sapiens
ggcggagactgcagtgagccaagatcgggccactgggcgtccagcctggcaacagagcaagactccgtctcaaaaaaaaaaaaaaaaaaaaaaattgggcaacccaggcccggggaacccttgcccacccccccacaaatcggccccaggggacccatggggggcaagtaggggaaaaaaccccccccaccagcccatagggcctttttggtcccttaaccctgggcccaggaactggaatttaaccccgggttttgttgccatttttaaggaacgggggctttttttttcggcgggaaaaaggacctaaccctccttgggaaaatcaaaggcaattgggattgggaacccttacccacacagggctaaagtttactggggaagcccctgaactggggctcaaaatagaccat

SEQ ID NO: 105289 - DNA, 625 bp, Homo sapiens
aaaaagtatttatttaaaaatgtgatgatagtgctcaaagatgttaaacatagtggtaggtaatgtatagaatgaacattgaactctcttttaggggcacacagtgttatgactactcgtaatagaattttgtgtaccatcttatgcttataacttttagttttactctattattataatggtctcactctgagaaagattaagctgaggtgaatcgtcctagcagatttttgtccagatagcatctatatgcctttcagatagtatctatatgccttttatgatttgctattagataaaaacctaaaatactgtttggcaatgtttttgcagcccctcatatggaaaatttgaaatgcagaggggaaacagtagcaaaggagatcagtgaagccatgaaggtaaaagctatgtgctaaaaaaaattatcaaatgaacaaaatgtatggctaggtatttgcattcaacattcatatgtgttttagtctgctctaacaggaattctcagcggtcctttaaataaatctttaatgaatttattaagcaacagtaacatttagaatagctgccatttatcaggtacctactatgtgccaggggatatacccggacttctttaaaaggg

SEQ ID NO: 105290 - DNA, 466 bp, Homo sapiens
  misc_feature (1)...(466): n = a,t,c or g
attttgaaatgctttggtgttgtgnngggaaccgncttagnggggggtcttagggggtccctttttggtaactgtggtggatagcgtaggggcaggggtatggggtttgcgcntgggcgagtatttctggggtgggcgcctttcgggtatggttttgggaatcccgttccggggcattgggggtgattcccgcgggtaacccgccggaggtccctaccccacggctttttggaatacttaagaaatgtaggaaaagcaaaactcacaagacaatccttccagccactggtcacaggatggccgttgctgaacttcaacattggccaccaatatctgctgtctgtgcttaaaggatcaaaaatgcagacctcagtcaggcgcagtggttcacgcctgtaatcccagcactttgggaggccaaggtgggcagatcacttgaggtaaggagttcaagaccagtttggcg

SEQ ID NO: 105291 - DNA, 409 bp, Homo sapiens
  misc_feature (1)...(409): n = a,t,c or g
atctttttttttgtcacctatgcaatgtttgacctgcaagtgcttgtatcttttgtaattggtttaaatccctcaaaattttaaatgagtattgaatatattttgggtttttccaaatataagattctataaagaagagaatgatctaacctgatgtacatatgacattaatccaatagacttaggaataagatacagggggttttcctgaatgattcgagtatatccccattcatattaagaaaacaaagtattggccaagcgtggtggctcacgcctgtaatcccggcactttggaaggccgaggccagtggatcacctgagatggactcaacgactctcttaccgtccagctctcaagtcccttctcttgtgaaaatggaaaagttgaactacagttgagatatan

SEQ ID NO: 105292 - DNA, 408 bp, Homo sapiens
  misc_feature (1)...(408): n = a,t,c or g
gtcacagaattactaatatcatattgttaatgatagctagaaagtaagcaaaattagacccaaaaaggcatattttatttttatgtaagtttttaaaaactacatcatggtttttgtacttttctgaaatctcagcattttgtttctatcttatgatcattacagatgggcgtgtgtgtacgtgtttgtattggaagcggttggaaggtgtgagatgtagagttttaaagacttggtttgctacttgctagctcttttggggtgagctacttagctggtctgagcctctgttttctcatcgtttttttttgtttgtttgtttgtttttgagatggagtctcgctctttcgcccaggctggagtgctgtggcgcgatctcggctcactgcaagctccgcctcccgggtn

SEQ ID NO: 105293 - DNA, 448 bp, Homo sapiens
  misc_feature (1)...(448): n = a,t,c or g
cgaggttctttctgcttagctacccggagccgactacggaggaggacacctgagtttacgtctcttccatctgctgctcgcctcagctgcctgggtccccgacgagagccaggtgacacttaactccgccatctgcgttttgagcactgttctcataatggagtttcctgatttggggaagcattgttcagaaaagacttgcaagcagctagattttcttccagtaaaatgtgatgcatgtaaacaagatttctgtaaagatcattttccatacgctgcacataagtgtccgtttgcattccagaaggatgtgcacgtcccagtatgcccactctgtaatacccccatcccagtaaaaaagggccagataccagacgtggtggttggtgatcacattgacagagactgtgactctcaccctgggaagaagaaagagaagatttttacn

SEQ ID NO: 105294 - DNA, 455 bp, Homo sapiens
  misc_feature (1)...(455): n = a,t,c or g
cacagctgcagcctgcaattcactcccactgcctgggattgcactggatccgtgagctcagaacaaggtgaacgcccagctgcagccatgaagatctgtagcctcaccctgctctccttcctcctactggctgctcaggtgctcctggtggaggggaaaaaaaaagtgaagaatggacttcacagcaaagtgcgttcagaacaaaaggacactctgggcaacacccagattaagcagaaaagcaggcccgggaacaaaggcaagtttgtcaccaaagaccaagccaactgcagatgggctgctactgagcaggaagagggcatctctctcaaggatgagtgcactcaattggaccatgaattttcctgtgtctttgctggcaatccaacctcatgccntaaagctcaggatgagagagtctattggaaacaagttgcccggaaactgcgctcaca

SEQ ID NO: 105295 - DNA, 428 bp, Homo sapiens
gacgcagaggcggacaagatggcggcggcagctgtacggggcgggagaagcggtggtagcggaggctgtagtggggctggtggtgcttccaactgcgggacaggaagtggccgtagcggcttgttggataagtggaagatagatgataagcctgtaaaaattgacaagtgggatggatcagctgtgaaaaactctttggatgattctgccaaaaaggtacttctggaaaaatacaaatatgtggagaattttggtctaattgatggtcgcctcaccatctgtacaatctcctgtttctttgccatagtggctttgatttgggattatatgcacccctttccagagtccaaacccgttttggctttgtgtgtcatatcctattttgtgatgatggggattctgaccatttatacctcatatagggagag

SEQ ID NO: 105296 - DNA, 422 bp, Homo sapiens
agaagtcaggcacgtagctcagcggcggccgcggcgcgagcgtctgtgcctctgcgcgggtctcctggtccttctgccatcatgccgatgttcatcgtaaacaccaacgtgccccgcgcctccgtgccggacgggttcctctccgagctcacccagcagctggcgcaggccaccggcaagcccccccagtacatcgcggagcacgtggtcccggaccagctcatggccttcggcggctccagcgagccgagcgcgctctgcagcctgcacagcatcggcaagatcggcggcgcgcagaaccgctcctacagcaagctgctgagcggactgctggccgagcgcctgcgcatcagcccggacagggtctacatcaactattacgacatgaacgcggccaatgtgggctggaacaactccacctg

SEQ ID NO: 105297 - DNA, 473 bp, Homo sapiens
gcgtttctgaggagaaactcttggtgagaattcccagagtgataggggctacctacagcctggcgaacgagagactacgcgctctggaagacattgaacgggaaatcggcgccatccttcagaatgcaggtactgtgatcctagaattgtccaaggaaaaaactaacgagcggctcctagaccggcaggcggcggccttcaccgcttcagtgcaacacgtggaggcggagctgtcagctcagatccgctacctcacccaggtggccacagggcagccccatgagggctccagctactcttcgaggaaggactgtcagatggctctgaagcgagtggactatgcccgcctcaagctcagtgatgtggctcgaacctgtgagcagatgctggagaactaggccagggagatggacccagagctgagagggagaccatcacctgtgccatgggacagaacctgggaacatgtaggg

SEQ ID NO: 105298 - DNA, 423 bp, Homo sapiens
ggcctatgggcccagaaggtgagctgtcaggggttcggggagattgagcggtaggctcaggtggcagagaagctccgtgagcagtaggcagccgatgccatgaagcaggcggaggaggccatgggcgccttcatgcgtttggcctaccaggagctccagattgatcgtttgaaagaggataagatgctactgaatctggaagggaataagcgagagcatgcagaaaggttgggcatgggcttggtatcccgaagctctgtctcccactccgtgctgtctgagatgctggtgattgagcatgaaaccccagtgagtgcaaaatcctctcgctcgcagctggacttgtttgacgatgttggtactttctgctctggaccctccaagtacacggacaatcccttttccttatgggaaagcattggc

SEQ ID NO: 105299 - DNA, 435 bp, Homo sapiens
  misc_feature (1)...(435): n = a,t,c or g
gaaaggtgtgtggagaaagaacatcccttcgagctgtggcttagagctgtgacttggcaccacgtggttagtcacgtttctctgacctttcatgggagtcacatgcagacgcatcacttggtataattatacgtggaggaatgagcaagaggaggctggcgacgggactgctttaaaaatcccttcttctgtggataataggctaatagcggggtgtgctttagaaggtgtggcctccgccaaaggcgtgggaactgcatttgtagaagctgggaggaccacacctggcttgggagacggcatgggtttctgaggtgcctggctccctggcctgtccagtgtggacagcttacgcgcagctaggtgaaatgattgtgcagttgctgagggattgngtggcagagctggacagaatttaggtcttctaacttggac

SEQ ID NO: 105300 - DNA, 440 bp, Homo sapiens
  misc_feature (1)...(440): n = a,t,c or g
ggctgatgcagcagaagtacatgagaggaagggggaaatttgggaggaaaaggaaatcaactttgcagggtataggcaggttgggtgagtgtgaggaaaagctttacagtacaaaagacctttaagctgaatctgaatggataacagggggttggcaggtgaggtggggtgaggatattccagacagatagtaccatatccaaaagccagagccatggccaggtgcagtgactcttgcctgtaataccggggatttagaggctgaggcgggatgatcacttaaggccgtgagtttgagacgttgccatagtgagaatacatctcttanaaaaaattttttttttaaattttttaattagtcgggcatggtggtgtgcacctctagtcctagctacttgggaggctgaagtgggagaatcactttaccctaggaggtcgan

SEQ ID NO: 105301 - DNA, 478 bp, Homo sapiens
cgtcactcctcctcaggccctcaggttcacttctgtaactaaggcttcaggatgggtcattcagcaaccccagagctgccctgcccgtcaagcttgaactctttaaggaaataacatttaaagtggactgtgcccccagcagcccccaagggccaattcctgtccccccagcagcatggcatcgtgtgctgaaccctctgagccctctgccccactgcccgccggggtcccaccgctcgaggacttcgaggtactggatggggttgaggatgcacagggtgaggaggaagaggatgaggaagaggaggaagaggatgacctgagtgagctgccaccgctggaggacatgggacaacccccggcggaagaggctgagcagcctggggccctggcccgagagttccttgctgccatggagcccgagcccggcccatccccggtcccaaaagaatggctggacattctggggaacgggctt

SEQ ID NO: 105302 - DNA, 443 bp, Homo sapiens
  misc_feature (1)...(443): n = a,t,c or g
gtgagccgagatcacaccattgcactccagcctgggcgaggagcgaaactgtctcaaaaaaaaaaaaaggtgggggtctccttgggttacccaggttggtctaaaactctgggcctaaggggaccctccattttggccctccaaaagggtgggaattacgggcgtgacccaccacaccttgccgggtggggacctttttaaaatcctaagttttaaaggtaaaaggctgttttaaaatcccctgtaaaaatccccttatcagggagtttttttattaaaacctttgcattggccctaaattttaaatcctagccattattccgggtttaaaggtgggttaatagtttcctaattctttcatttaaaccccttggaaaaaggaaccagttcttccattttcccgggggggaaaataggcccttgcaaatgttattggccccaan

SEQ ID NO: 105303 - DNA, 389 bp, Homo sapiens
cctgagacccctcgttttgcagtgagccgagatcatgccactgcactccagcttggaggacagagcaagactccatctcagaaaaaaaaaaaaaaaagaatatttttaaaaatggggcaaaaaactatataacttttgaaagggaaaaggaaaggaaaaccaagcaaaggtcagggaggtaggaggaaaaccaaaactgctgggtttcataaaagtcaagaaaaaaacatgtttcaaaaaggagggaaaggttaccttgccaaaagcaaggcaggaaaaggtttaaaaaggggaaacccagccgggtgcaagggctccggcctgaaatcccagcactttggaaggctgcggtggagggataccagaggcatgaagttcaagaccaccct

SEQ ID NO: 105304 - DNA, 449 bp, Homo sapiens
cttttgaaaagcactgaaaaaaagctacaagaaaggccaactgaagcaaatcacgtacaaagactgagacaaatgctggcttgccctccacatggttaactggacagggtcataacaaacgttaccatcattgttcttctgtgggctgtagtttggtcaattactggcagtgaatgactttctggaggaaacctatttggaattataatcctattatattgtgccatcattggtggaaaacttttggggcttattaagttacctacattgcctccactgccttctcttcttggcatgctgcttgcagggattctcatcacaaatatcccagtcatcaacgataatgtgcagatcatgcacaggtggtcttactctttgagaagcatagccctggctatcattctggttcgagctggccttgttctggaatcaaaggcccttgaaaagtt

SEQ ID NO: 105305 - DNA, 417 bp, Homo sapiens
cccgctgttattgaggagtaacggcccagcggaccacgcaggcttgaggcagcggcgggaaccactcggtttgctgcgataccatggaaggaggcgggggaagcggcgacaaaaccacaggggtattggccggctttttcggagccggcgaagcaggttactcgcacgcggatttggctggcgtcccgctaactggtatgaaccctctgtctccttatttaaatgtggatccacgatacctcgtgcaggatacagatgagttcattttacctaccggagctaataaaacctggggcagatttgagctggccttctttacgattggagggtgttgcatgacaggggctgcgtttggggcaatgaatggtcttcggctaggattgaaggaaacccagaacatggcctggtccaaaccag

SEQ ID NO: 105306 - DNA, 417 bp, Homo sapiens
gccagggctggtcttgaacttctggactcacgcgatcctcctgctttggcctcccaaagtgctgggattacagccataagccactgtgttggactttttggtcattttaaatttagttattttcttactactgacttttgaggattctttacattctcaataaaagtcctttatcatttatgtgccttgcaaacattttttcccggtttgtggtttgtttttccattttcataagagtgtcttttgaaaatcagatgtttttaatttttatgaaatctagcttatcatatgatcctgtttatgcttactggatttaaaagctatttctaataaacttttttactaatctaagcttcacaattataatatgatatgactcacttctgtagaaatcaatatctacgttaactttttccg

SEQ ID NO: 105307 - DNA, 413 bp, Homo sapiens
tggccttctgggcaagttttggtagggtgtctgtcattttccctctactgctggaaaagaagtctcaagaggaagaatccaggttttgaggttttgctgaagatattcctgaagaatcatcccaggtgccacactaacagaatgatccagttgacagctacccctgtgagtgcacttgctgatgagccagcgcatatccgagctacaggcctgattccctttcagatggtgagttttcaggcatcactggaagatgaaaacggagacatgttctattctcaagcccactatagggccaatgaattcgctgaagcggacctgaatcatgctgcttcacttggaggggattacttgggagatcttgccctgaggcttttgtgcaccctagagcctgttttcccgcaatcatacta

SEQ ID NO: 105308 - DNA, 411 bp, Homo sapiens
gccttgagtctgtcctggtctctggaatcacggagtctagtaaaggccagcacacagcagatatataaatgtacaaatgagtgaatgaagagaatctgattggccttaaggaacttacgcacttaaaataattgggcataagagaagcagtgaaggagtgcagaggcatcacctgaaagggatcactgagattctgatgaacagaccttctgcccgcaatgccttggggaatgtcttcgtcagtgagctgctggaaactctggcccagctgcgggaggaccggcaagtgcgtgtcctgctcttcagaagtggagtgaagggcgtgttctgtgcaggtgcagacctgttggatcgggaacatatgagttgatgctcaggaggggctgttggaaggctttatatttattcggg

SEQ ID NO: 105309 - DNA, 740 bp, Homo sapiens
tacgtgcggtggaattccaggccccggccaggccgggagtggcgtgctgggcgtgcgcggctgcggtacggcgtgttggtcccagcggttcagctgaggtagggacgtgccgtaggccggaatgttaccggctgttggatctgtggatgaggaagaggatcctgcggaggaggattgtcctgaattggttcccattgagacgacgcaaagcgaggaggaggaaaagtctggcctcggcgccaagatcccagtcacaattatcaccgggtatttaggtgctgggaagacaacacttctgaactatattttgacagagcaacatagtaaaagagtagcggtcattttaaatgaatctggggaaggaagtgcgctggagaaatccttagctgtcagccaaggtggagagctctatgaagagtggctggaacttagaaacggttgcctctgctgttcagtgaagtgaggaatgtgtttactgtgtacatggtttactagaaatgtttattgattatatttccagctttaattttcttgagtaatttaactgaatttacacagtttgcttcattgtattttcaaacaaatagaaaataaacttattaggaagcattttcttaaagaggttttgctggcttttctatctgctctaatggtttgggccttttattgagtttttattgcttttgatgtcagggcttatttaatctctagtgcatgaaagtctcatatgtaacaaatgg

SEQ ID NO: 105310 - DNA, 407 bp, Homo sapiens
cagaagcggaggcactgggagtccggtttgggattgccaggctgagattgtgagtctgaccttgagagcggctgtggcgccccaactcttcgccagcatatcatcccggcaggcgataaactacattcagttgagtctgcaagactgggaggaactggggtgataagaaatctattcactgaccaggtttattgaagtcaaaatgtccaaaaaaatcagtggcggtactgtggtagagatgctaggagatgaaatgactcgaatcattagggaaacgcttaaagagaaactcatttttccctacgtggaatcgcatctacatagctatgatttaggcatagagaatcgcgatgccaccaacgaccaagccaccaaggatgctctagaagcttttaacaaaccttatg

SEQ ID NO: 105311 - DNA, 423 bp, Homo sapiens
cggatcttttctccagcgattgggggaaagaaggcgggttctctgaattcgcttagtgtaaccagcggcgtatattttttaggcgccttttcgaaaacctagtagttaatattcatttgtttaaatcttattttatttttaagctcaaactgcttaagaataccttaattccttaaagtgaaataattttttgcaaaggggtttcctcgatttggagctttttttttcttccaccgtcatttctaactcttaaaaccaactcagttccatcatggcgatgttcaagaagatcaagtcttttgaggtggtctttaacgaccctgaaaaggtgtacggcagtggcgagaaggtggctggccgggtgatagtggaggtgtgtgaagttactcgtgtcaaagccgttaggatcctggcttgcggagg

SEQ ID NO: 105312 - DNA, 424 bp, Homo sapiens
cggttagctgcgataccatggaaggaggcggtggaagcggcgacaaaaccacagggggattggccggctttttcggagccggcggagcaggttactcgcacgcggatttggctggcgtcccgctaactggtatgaaccctctgtgtccttatttaaatgtggatccacgatacctcgagcaggatacagatgagtttattttacctaccggagctaataaaacccggggcaaatttgagctggccttgtttaccattggaagatgttgcatgacaggggctgcgtttggtgcaatgaatgggcttcgggtaggattgaaggaaacccagaacatggcctggtccaaaccaagaaatgtgccgattttggatatggtgactaggcaaggggcactctgggctaatactctaggggctctggcttg

SEQ ID NO: 105313 - DNA, 363 bp, Homo sapiens
cgcctttggcacaatgaagtgggtaaccttggtttccgttctttttctctttagctcggcttattccaggggtgtgtttcgtcgagatgcacacaagagtgaggttgctcatcggtttaaagatttgggagaagaaaatttcaaagccttggtgatgattgcctttgctcaggatcttcagcagtgtccatttgaagatgatgccttttcaacgagtgaagtacctgaatttgctacaacatgtcaagatgatgatcactttgaagaccgatgccgacgggttcataccctagtcgtagtacaattatgcacccctgcaacgcttctagagaccgactactgaactggcaggatgatgagtcc

SEQ ID NO: 105314 - DNA, 359 bp, Homo sapiens
cacgcctttggcacaatgaagtgggtaacggttatttccctggtttttctctttaactctgcttattcccggggtgtgtttcgtcgagatgcacacaagagtgaggttgctcatcggttcaaagatttgggagaagaaaatttcaaagccttggtgttgattgcctttgctcactatcttcatcagtgtccatttgaagatcatgtaaaattagtgaatgatgtaactgaatttgcaaaaacatgtgatgctgatgagtcagctgaaaattgtgacaaatcacttcataccctttttggagacaaattatgcacagttgcaactcttcaggaaacctatggtgaaatggctgactgctg

SEQ ID NO: 105315 - DNA, 349 bp, Homo sapiens
  misc_feature (1)...(349): n = a,t,c or g
ggcgcgatgtctgacagaaagttctccgctcccagacatgggtccctcggcttcctgcctcggaagcgcagcatcaggcatcgcgggaaggcgaagagcttccctaaggatgacccgtccaagccgggccacctcacaggcttcctgggatacaaggctggcatgactcacatcgtgcgggaagtctacaggccgggatccaaggcgaacacgaacgaggtggcggaggctgtgaccattgtggagacaccacccatggaggttgcggacattgcgggctacatggaaacccctcgaggcctccggaccttcaacactgcctttgctgagcacatgagtgatgagtgcn

SEQ ID NO: 105316 - DNA, 349 bp, Homo sapiens
gggcttgtccttgtcctagcatcccagatccaccttctgggaagtcatcagattggaggtgatgttggcagcttttgtaaacaaagggtagtgttgtaagctgttgtgtctgcctatgtgtgtgtttgtgtacttggtctcatctctgcagactggtgacatggcttccagatatgcccgacgatgtcctgtggttgcagtgggtgacctcacaggtgttcactcgagtgctgatgtgtctgctccccgcctccaggtcccaaatgccagtgagcagccaacaggcctccccatgcacacctgagcaggactggccctgctggactccctgctcccccgagggctgtcc

SEQ ID NO: 105317 - DNA, 388 bp, Homo sapiens
tggaactaattcgctgaccgacccagcggccgcagccgtgcgtaccgctcgagcgccagcgcccgcgccccccgatccgcttcccctttctccctcctcagttggccgagtcgtcccgcgcgcaccgcctccgcgcgcctatgagaatgaggtggtaacgggcccccggatgaccccgcgtcaccactgtgaggcctacagctctgccggggaggaggaggaggaggaagaggaggagaaggtagctacagcaagctgggtagcaggcagatccaaaggatatcatgaagtttccagggcctttggaaaaccagagattgtctttcctgttggaaaaggcaatcactagggaagcacagatgtggaaagtgaatgtgcggaaaatgcc

SEQ ID NO: 105318 - DNA, 471 bp, Homo sapiens
gcccgggtgttctgcaagctggtcaaaaaggggaagcggcccagatatgttaagttctatggccgctgcagggtctgtgaaggcggcgttgcaggtggccgaggtgctggaagccatcgtgagctgctgcgtggggcccgagggacggcaagttttgtgtacgaagcccactggcgaggtgcttctcagccggaatggaggccgcctcctggaggcgctacacttagagcatcccatagccaggatgatagtggactgtgtttccagtcatctcaaaaaaacaggagatggtgcaaaaacatttattatctttctttgccatttgcttagaggacttcatgcaatcacagacagagaaaaggatcctttgatgtgtgaaaacattcaaacccatggaaggcattggaaaaattgttctcggtggaaatttatttcccaggctctcctaacgtttcagacacaaatattaga

SEQ ID NO: 105319 - DNA, 377 bp, Homo sapiens
gaaggcatcaaggataacacagaatgaagttttattttaaatgacagaggtaggccctaaatttttttacacatttttacacatttttttctataccattttaagataatagatttcttatatttctttgctaattttcataataactttcttttttagctacaaggctttggccgaccaagtgtgtaccatgctgctattgtcatcttccttgaattctttgcgtggggcctgttgacaactccaatgttgactgtaagtattgctgaactgggtttgtgttttgtaagagaaagagataagttcttaggcacgtatcactgtgtatgtctagatacgtgtttgggagtagctcttgatagtgatttaaaacagct

SEQ ID NO: 105320 - DNA, 517 bp, Homo sapiens
gagaagtggaggtgggagggagcgacaatggaaaaatcacctgaaaactgggacagaggaaggaagctacagttacgaaggagagctgcaaaagttgcagcagaaaggttgggagtcccgacaggttccgtagcccacagaaaagaagcaagggacggcaggactgtttcacacttttctgcttctggaaggtgctggacaaaaacatggaactaatttccccaacagtgattataatcctgggttgccttgctctgttcttactccttcagcggaagaatttgcgtagacccccgtgcatcaagggctggattccttggattggagttggatttgagtttgggaaagcccctctagaatttatagagaaagcaagaatcaaggtatgtggtcgtggcagacggggtctccagaggagacaatgctttcttttttaaactttctttcattgactcttaagtgcagggctagaacacggggaacatacctgcttgcctcaactaaaggatctagtcat

SEQ ID NO: 105321 - DNA, 376 bp, Homo sapiens
gaaaaagaatatataataaggatttttaacattatcaagataaaagaatgagcaaattgaaaacaacaaatatattttttttgttttgtttttgagatggagtctcactctattctattagcaaatctaatagaatagagcatagaatagtgttgcaggaatagctaggactcaattctattagtaaatctggcatgcagtgcagtgatctcagctcactgcaacctccgtctcccgggttcaagtgattctcctgcctcagcctcccgagcagctggtggtgcacacctgtaatcccagctactcaggaggctgaggcagggagaattgcttgaacccaggaagcggaggttgcagtgggccgagactgcgccac

SEQ ID NO: 105322 - DNA, 600 bp, Homo sapiens
gctatgaaaaaaagacgattgccttgctttctccaggaatcttaagaataaagccaatatttctaattctaaacttaccagagatcttcttccaaatggagaacccattttttctaatatgacttgattcccagtccctgaattcctgcactcatttgatgattcagtcattacatgtcagattgtgaaccagacactgagcccagggcaggaagaaaaatgggctcccatggaggatacacggagggtgggagcagtggatggtgggagggaacgcagataataaatggaacaacaactatcttattaaaataagataaaaacagtcaaaaataatacaaagcatataaaaccaggtaagatgataaacatgaatgccgaaaactgcttaagaaaagggtagcagggagttattttctgagtagatgacatttatgctaaacgtggaacaaggagatggagccaaccctgaaaattctgggagaagaggacagaaggcagagggaagagcaagagcaaaaattctgaaacaggagaaattgtgagcatatcagcattaagtaccactgaggtggcaatgcacacttcaacctcttcttt

SEQ ID NO: 105323 - DNA, 349 bp, Homo sapiens
  misc_feature (1)...(349): n = a,t,c or g
gtctgaggttatcaataagctcctagtccagacgccatgggtcatttcacagaggaggacaaggctactatcacaagcctgtggggcacggtgaatgtggaagatgctggaggagaaaccctgggaaggctcctgggtgactacccatggacccagaggttctttgacagctttggcaacctgacctctgcctctgccatcatgggcaaccccaaagtcaaggcacatggcacgaaggtgctgacttccttgggagatgccataaagcacctggatgatctcaagggcacctttgcccagctgagtgaactgcactgtgacaagctgcttgtggatcctgagaactttn

SEQ ID NO: 105324 - DNA, 359 bp, Homo sapiens
ctcctgaactttgctcggtctctcccgtctatgatttggcccgcaacaccagttgcctgcggaacacctctacctagagagctaacactcatccccggtcagtaaatccaaaactaaacccgttgcctcctcctaccaacctgtccctcctataatgcctgtgaagaaaaggcatcactgtgcacactgttgccctctccatgcttcatctaatcagtcatcagatcctataattctaccaccttaaaagtttcaccgtttcttccgtccagtcgcggtggctcacgcctgtaatccctgcactttgggaggccgaggcgggaggatcacctgaggtcaagagttcgagaccagcctca

SEQ ID NO: 105325 - DNA, 372 bp, Homo sapiens
cacaggtgtcgtgaaaactacccctaaaagccctaacgggagaggaaaagactcatatcaacattgacatcattggacacgtacattcggtcaagtccaccactactggccatctgatctataaaagccgaggcatcgacgaaagaaccattgaaatatttgagaaggaggctgctgagatgggaaagggctccttcaagtatgcctgcatcttggataaactgaaagctgagcgtgaacgcggtatcaccattgatatctccatgaggaaatttgagaccagcaagtactatgtgactatcattgatgccccaggacacagagactttatcaaggacatgactacggggacatctcatgctgactgtgctg

SEQ ID NO: 105326 - DNA, 357 bp, Homo sapiens
atctggaaggctgccatggctagcccagccggctcctgggcgcgaccaccgaggcccatgagagaaccccagacgctcgccatgcccacgaatgcggcggaggaccagaagctcaagctggagcggctcatgaagagcccggacttagcagtgacgattccggagaaaatgagtgaatggtcacctggacctcccccagaatttgaccgagatgtcatgggttcaagagctggggccgccagtggagagttccacgtgtacagacttctgcgccggagagaatatcagcgacaggactacatggatgccatggctgagaagcgaatattggatgcagagtttcagagaagactggaa

SEQ ID NO: 105327 - DNA, 335 bp, Homo sapiens
ggaacgtctgatgttatcaataagctcctaatgcaaacgccatgggtcattacacagaggaggacaaggctactatcacaagcccgtggggcaaggggaatgtggaagatgctggaggaaaaaccctgggaaggctcctggatgtctacccatggacccataggttctttgaccgctttggcaacctgtcctctgactctgccatcatgggcaaccccacagacaaggcgcatggccagaaggtgctgacttccttgggagatgccacaaagcacctggatgatctcaagggcacctttgcccagctgagtgaactgcactgtgacaagctgcat

SEQ ID NO: 105328 - DNA, 335 bp, Homo sapiens
ggcaaacagcactgttctaggagctgagccgggtcagctcaactttacaaaatacgagtggagtccagttcgatgcaatttgggacagtgccatctgttaatctgactcagcaccttatacacaagaagtgagaaaataaatgcaattcttgccatgcatcccaatactgaagagccttgagaagagcgtggcgagccacagccaaactgtacattctgacattatctctacggtagaattcaaccacacgggagaattactatcgacaggggacaaggggggtcgggttgtaatatttcaacgagagcaggagagtaaaaatcaggttcatcgt

SEQ ID NO: 105329 - DNA, 337 bp, Homo sapiens
caataagctcctagtccagacgccatgggtcatttcgcagaggaggacaaggctactatcacaagcctgtggtgcaaggtgaatgtggaagatgctggaggagaaaccctgggaaggctcctggctgtctacccatggacccagaggttctttgacagctttggcaacctgacctctgactctgccatcatgggcaaccgcaaagtcaatgcacatggcacgaaggtgctgacttccttgggagatgccataaagcacctggatgatctcaagggcacctttgcccagctgactgaactgcactgtgacaagctgcatgtggatcctgagaacttca

SEQ ID NO: 105330 - DNA, 360 bp, Homo sapiens
agggtagtgaagaagaagggctttcccctaagatcctagaaatcacaacaggaaggcaactatctattttgtccgccagtaaagtcaactgactgagtatgacagaaaattgggttgatctgatgttctcaaacatggccgtggaaatggccttgagagcagaacgtgtgttgaagactagtccaggcattccatcagtccaccagtgaatcagatacaactaggagcttccgtcacagaggagcttactgtagttacaaaaacagccagagtcagccgggcacagtggctcatgcctgtaatcccagcactttgggaggctgaggcaggtgaatcacctgaggtcaggaattcgagacc

SEQ ID NO: 105331 - DNA, 372 bp, Homo sapiens
ggcgtggtagtgcactcctgtattcccagatacccaggaggctgcagtgggaggatcacctgagcccagaaggtggaggctgcagtgagctgtgatcaaactactgcactctagcctgggcaacagagtaagatcctgtctcacacacacaaaaagagaatgatctgagaagtgttaaaaatatggattcttgagttctacttgtacacaatctaattcagaagatctgcagagaagcctagaaatgtgtattttaaccaagtacacagacaattccaatgagcaatcaaatctgaaaaacacaggtctgaattattcatacaaagcctaaaatatcattattcaatttagggaaaatattaaaatcagtcc

SEQ ID NO: 105332 - DNA, 363 bp, Homo sapiens
gagcttcaataccctgatctcaaggagtagcatgtaaggcaacttcttagaaaagacctttttccaatgattaaaaaataattttaggccgggcgcagtggctcatgactgtaatcccagcactttgggaagccaaggtgggcagatcacctgtctcagcctcccaaagtgcttgggattacaggcgtgagccaccatgcccatcctgtacaatttagcacctttactggagataaatgcattataaatttccactgtttttttggaatactgaaaatttagaataattgttttagtgtcagtagcttgtccttgaataaaactactacctctagaggaaatacattaacggacaatcaaaat

SEQ ID NO: 105333 - DNA, 377 bp, Homo sapiens
ggcggagactgcagtgagccaagatcgggccactgcactccagcctggcaacagagcaagactccgtctcaaaaaaaaaaaaaaaaaaaaaaaatgggaaccccgggcccggggaaccctggcccaccccccccaaaaccggccccagggaccacaggggggccaattagggaaaaaaaccccccccacaaaccaaaggggccttttgggccccttaaacaggggcccgggacctggaatttaacccggggttttggggcaatttttaaggaacgggggcttttttttttggcgggaaaagggaccaaacccccctgggaaaaacaaaaggcaattgggattggaaacccttccccacacagggttaaggtttaggg

SEQ ID NO: 105334 - DNA, 373 bp, Homo sapiens
  misc_feature (1)...(373): n = a,t,c or g
ggaggcctgcctgcctctgtagactccacctctgggggcagggcatagctgaacaaaaggcagtagaaacctctgctctcttcagagccagcaggcaggattgtttaagtctgctgaggctgcactcacagccacgccttcccccagatgctctgtcccagggagatgggagtttgatctgtaagtccctgacgggggctgctgcctttctttcagagatgccctgcccagagaggaggaatctagagaggcagtctagcttcaggggtttgccaagctgtggtgggctctgcccagcttgaacttccaggtggttttgtttacactgtgaggggaaaaccacctactgaagtctcagtaatggcgggcaccn

SEQ ID NO: 105335 - DNA, 358 bp, Homo sapiens
acagaagaattgctagaacctaggaagcagaggtcacagtgagccaacgttgcgccagtgcattctccatcctgggttacagagcaagaccctgtctcaaaaaaagaaaaaaaaaaagaagggttttcaacacgtccactgcccgagtggaattatatatagtcagaggtgggttttttgggttgatttttgagggttattttttttctttggacccggagtataattttgacccccagtctaaagggcctggacccaatatggactaatggaaccttaacctaattggaagtttgaggctggaaatagatttgagccaaaaaggttgagggtacaatgacccttgagcatacaatgg

SEQ ID NO: 105336 - DNA, 330 bp, Homo sapiens
gactacagagaacaatggtcaagacaattgacatttataatgggcatgcctaaaggtgttgaagtcataactgatcaggaatctatttcctgcttataaggaaagtgcgtgggcaaatctgaaggtgatttaacctataatccatcacctagatgtctccatctgaacaattctgacactttctcctcctccccagctgtcgcagcatgccatggaggctaaatttctataaaaatactgtgaaaggaccgggcgcagtgggtcacgcctgtaatcccagcactttgggcggccaaggcaggcagatcacttgaggtcaggagttcaaga

SEQ ID NO: 105337 - DNA, 321 bp, Homo sapiens
cttcttatctgtttgggaaaaaaaaatgagccgggtgtggtggcacatgcctgtagtcccatctactcgggaggctgagcagctgggaggattacttgagcctgggagttcagggtccagcctgggcaacatagtgagacccccatctcttgaaaaaaagaaaaaagtggataaagtaattctaataaggggttgggaggtttagatgaggtaatatgttaagcactctggtgtctaacgcacagtgggtcaattaagtgttattattatgattgtgattatttctagaaaataaggactatatttgggccctggtaattg

SEQ ID NO: 105338 - DNA, 344 bp, Homo sapiens
agtagtgtaagtaaacccgggaggcggagcttggagtaagcctagatcgcgccaccgcactccagcctgggcgacagagcaagactccatcttaaaaaaacaaacaaacaaacaaacaaacaaacaaacaaaaaatgtgcaagtgaaataagtgacaaaaagcaaacacaagatattctgttcatacgaaacactgcgaggcgacacttgtgttagtagattgacagaaattggaggtggagttaaagaggtataaactcagtataacattcattgcctcttttgctaaagttgtttcactgcataagaaaaagatactggtcgggctgggtggcctgaaaaaa

SEQ ID NO: 105339 - DNA, 373 bp, Homo sapiens
tagagatggggttttgccatgttggccaggatggtcttgagagtccaggcctcaagtgatctgcctgcctcagcttcccaaagtgttgtgattacaggagtgaaccactgcgcctggcccaaagattgacattttaaaatacagcagctaggtggggtggattctattattatcccattgtacaaatgaagaaactgtggcacagagaaattaataataggttacgtagccagtgtaacccagaacatcttagttcatgttgcatgtctctcatttgctggaagcatatcagtcaacaagaaaattattgttttgcttccagtttgagtaatgttcctgtgacttctttaagtggctgatatttgctgcattt

SEQ ID NO: 105340 - DNA, 391 bp, Homo sapiens
tggagaattgcttgaacgtgggaggcggaggttgcagtgagccaaaggagcgccattgcgctccagcctcggcgacgagcaaaactccgtctcaaaaaaaaaaaaaaaaaaaaaaaaaaaaaagccttttaaaaacaccaaatcccaagggggggaagggaaggagttaaagggggtggaaacctaaaggggggtttggagggaaaaaattttggaaaaaccccccccccataaataaaaagtttaaatgggggaaaaaatttttaaaaaaaaattttttaaaaccggaacgggcttttgaaaaccccgaattttaaaaaaaccccccccccccaaaaaattgatatcatttacccctaaataacccttgggcattgggccttaaaaaaac

SEQ ID NO: 105341 - DNA, 336 bp, Homo sapiens
cacatgtaaaagtgctttgtaagctttgaaatatgggactttaaaggatttaaagtcttaggtaaaaatataggtaggaggatattcattagtacttagtacattttcctttgcaaatacttacttagttaatggtagatttggtgagataaacaaggaaatgagaactttttgcagaatggaaaccaaatgagaactttttgcagaatggaaccacaatgataagttaggcctagggctagggaattctttttttttgagacagagtctcactctggtcacccagactggagtgcaatggcgcgatctcatctcactgcaacctccgcctcccag

SEQ ID NO: 105342 - DNA, 381 bp, Homo sapiens
  misc_feature (1)...(381): n = a,t,c or g
tcgcttccattccatcacgtggccacacctagctgcaagggaggctgggaaatgtagtcttgcatggcccaggaaggctggggatgtagtcctgtgtgtccaggaggaggagatggtttgcaggggctcttggcaatctctttgtatccattcgttcagtgggtgtttgacaagcgcttacaacactccaggcattgggaccatgatgatgaagaggacagaccagccctgtcctcaggaagctgacttcccatttggggcagcaagcagtaagcagataaacagatctgttgtataagaaaaagtgcgggctgggcgcggtggctcacgcctataatcccagtgctttaggaggccaaggcggacggatcacctgcagtn

SEQ ID NO: 105343 - DNA, 359 bp, Homo sapiens
ggagaatgaggtagaaatgaattcagaaagacagaaatattaacaaattactactaaagttttcttttttcttttctcttctttttttttttttttttttttttttttttttttttggaaacgggatttaagttggccccccaggttgaagggaaggggcaaaatcagggcccattgaagtttaaccttccgggggttttagggaccttttaacctaaccctcccaaaaagttggaattacgggtttaagggttggacccattaggccgggtaaatttttggaattttttttggaaaaaaaaagggctcatggggttcccaaggtgggttttgacccctggggttaaagcagccttctg

SEQ ID NO: 105344 - DNA, 357 bp, Homo sapiens
aaaagagtttctgatttcaaggaacttatgataactgtagaaaaatggaaaaataagccttgttggaaagcttgaatgttactttatgggcatccatacgggaagaagagaatccagggagccaaaaatacatctttttgactcttaaggaaaaggtaaagcaagaagtaataaaaatcttttcaaatactctatgaaatattaaaatcctgggcattggaaagagaatttttcaagagggttttaaactatgaaattttgaacgacaaaaatgttggggccagacgcatgactcacacctgtaatcccagcgctttgggaggccgaggtgggcggatcacctgaggtcaggagttc

SEQ ID NO: 105345 - DNA, 363 bp, Homo sapiens
ctggtgcaagaggccgagcttttggcctatctgggctttcaacagtccttcctcaccaagcttaatcatttctagcttttgatctaaggtgagagacttatgactcttctttaaacatgaatatttacaggctgttgtagggttattaattagcctaatttcaatgttattgtgtctcagggaatagggaaggctgaggagagggagagagattagggaggggccggtggagtggtcacaacagacgacatttatcggtaaagttcatcgttttaaatgggtatagttcatggtgccccctaaaattataagagtaatatcaaatatcactaatcaccataacagatagaataataatgaaag

SEQ ID NO: 105346 - DNA, 384 bp, Homo sapiens
aaacatatgtgtgcaggtgtctttttgatataacaatttcttttcttttgggtagatacccagtggtaggattgctgggttgaatggtagttctatttttagttctttgagaaatccaggaaggatttattaattggattatatacagtttgtttaagcataaatatttttattgtaaactgaaacaatatgcagtatgcagtagaattacgtttgagttctagctcaatcactgactaatatattacctttaacaagttcttgggttccctgccttggttttctcatttgtaaaatgaaaataattatgctgatttcctagataggttaggagaattaaatgagatactgaatgaatgtaaaagtattcaataagtgtaattc

SEQ ID NO: 105347 - DNA, 402 bp, Homo sapiens
  misc_feature (1)...(402): n = a,t,c or g
tcatcatttgtgagaagaattgtcctccctttttatgccatcattaacagatgccttccttcctttagattattttaaagcaaatcccagatatcatttcttttcatccgtaaatatttcactgtgtatctctaaatgataaggttttctgtaaaagaaccacaattgatgtatttctatagctgccgagtacctatacattgcctttggttggtatgccttttaaatttctgataatctggctgggtgctgtggctcacacctataataccagaactttaggaggccaatacaggctggtcttggactcctaacctcaggggatcctcctgccttggcctccgaaagtgctgggatcataggcgtgagccaccacacccggcctgttcctttctcaattgn

SEQ ID NO: 105348 - DNA, 381 bp, Homo sapiens
  misc_feature (1)...(381): n = a,t,c or g
cggcacgagcgtccatcctaggtacaatgctcgtacctagatcatagggagatgtgctctgctacaagggtgacgtgtgatgagtgttccttgtattgtaattgttttggggcgccatgagctgtgcccatataagatacaaacgtaattgataaatgttgtgtgtgttcagactaatccactgacaggccgttcttccttctctctccctttccttgggtctctattccctgagacacaacagtgttgaaattaggtcaattaataaccctacaatgggcctctaagtgttcaagtgaaagaaagagccgcacatctctcactttaactcaaaagctagaaatggttaagcttagtgaggaagggatgtcaaaaggcaan

SEQ ID NO: 105349 - DNA, 357 bp, Homo sapiens
  misc_feature (1)...(357): n = a,t,c or g
atggtatgagctacagcataagccatcaagaggaaaactgatcaattattggcttttagaatattgctcattgaacagattattcaagtaatgaaagaggaggggaaaaaaatccagcacattagttaacctggcatcaattaatgaggttctaataagctttgtcttatgatactacctggaggttacagagctggtattctgaggaataagcatcagtgagttggtcagatacaatagacgtttaaaatagggcttcaggccaaacatggtgccccacgcctataatgccagcactttgggaggtcgaggcgggaggatcacttgaacctaggagtttgagactaacctgggctn

SEQ ID NO: 105350 - DNA, 372 bp, Homo sapiens
agcagtatccttacgtatttgttttcttttcactggtaaaaatttcacgtagttgtagtttaaaagttaagatctggtgataacttaagggttaggataggaaaatgaggacaacatactgcaaaataattgccacacttaatgctttttcatgttagaaatagtaaaagttacactgtcttctatgtttttacctctcagagttttttgttttttgttttttagagacaaggtctctctctgttgcccagtctaagtgcagtggtacagtcataacccactgcagcctcaaactcctgtgctcaagtgatcctgccacctcagactccagagtagctgagaccacaggcacaggctaccatgcagggctaa

SEQ ID NO: 105351 - DNA, 377 bp, Homo sapiens
gggctccgtggtcctcgaatgggaaggagaaccgcatcctcatccctaagtatcagctctaaggccaccttctcactgcgcctcccctggctgtgttatcaggccagtctctcatcagactgggagctccacagggcagggggtccatccgttttgttacttaacaccttgatacctggagctggccttggcgcacagggagcacttggtggatgtggaggccaaagcagctccatcttggaggctaattcaccatgctggcttctgattaatcccagttccaggaaggcctccaagattgacagtttgccgggtgccggtggctcatgcctgtaatcccagcactttgggaggccaaggcggatggatcacctgag

SEQ ID NO: 105352 - DNA, 318 bp, Homo sapiens
aactggagaatcgctagaacccgggaggcagaggttgcagtggaccgagatcatgcattgcaccccagcctgggcaatagagtgagactctgtctcgaaaaaataaaaaataaaaaataagccgggtgtggtggctcatgcctgtaatcccaaagtgctgatattacaggcatgagccaccgtgcttggccaggagaacattttaaatgcacttgagatacactaattttacataaattggggaaaataaatgcctttgtaaaaagccggttttccaaataacggtacttcgagaattatttccggggaaccgtttat

SEQ ID NO: 105353 - DNA, 353 bp, Homo sapiens
aaagtatgtatgtgtgtgagtggaattttaagtatatcggactgtgtgtaactatgggcatgcatgtaggtgtggatgtgtgtggacgtgaacacggatgtggtaagaataaatgagggtgtgtgtgtgtgtgtgtgtgtgcacgcgcatgcatgagcatggatagggtagagtcaggtctgacctctggttcactgagttgtgaactccttaactttcagggagcaatcacatagacgaccactttattttacacgtgaggaaaaaggcatgtgtaacgagacctacacactttgttttttgtgagagggagtctgtctctgtcgcccaggctggagtgcagtggcgccatg

SEQ ID NO: 105354 - DNA, 339 bp, Homo sapiens
  misc_feature (1)...(339): n = a,t,c or g
aagcttaatcatttctagcttttgatttaaagtgagagacttgtgactcttcctttcacttgaacacatagaagccattgtggggttattaattggcctatttcaatattgctgtgtctcagtgaattgggaggccagaggaaggggaaagtagacgggggaactgccagtcagtggagcagttagaaaacatacagcatttatttattaagttcattgtcttatgtgggcatggctcatagtgcctgaaagcaattacagtagtttcatcaaagttcacttatcacaaatcatcataataagtataataataatgaaaacgcttgaagcattgtgagn

SEQ ID NO: 105355 - DNA, 342 bp, Homo sapiens
gggaggggcatggaggcacatgcctgtagtcccagccactcaggaggctgaggcacgaaaactgcttgaacccagtgagacagaggttgcagtgagccgagatcacgccactgcactccactccactgcactctagcctgggagacagggcaagactccgtctcaaaaaaaagagaaacatgaaaacccataataagctggggcgaaattttaccagttggtcttcctcaggctcccccggtcatttgaaagtgagccagagcttaaaaacactcaggacagggtttaacttgacttgagtgaaggctcaccctttcaagggttatatgggtggaccccact

SEQ ID NO: 105356 - DNA, 350 bp, Homo sapiens
ggaagacctcagtgagtagttcttactgccctctaccttactacctttccacctttcccatttccattagttagatgatccatttaatctcaaacttacagaaaagttacaaggaactgggctgagcacggaggcacacgcttgtaatcccagcactttgggaggccaagatgggtggaaaacaaggtcagaagatcgagagtatcctggctaacagagtgagatcccgacagtattaatgctacgccgaagttaaccctgagagaagtgaggcatagactgaaccacttatctgccaaggaggtcatcaatgtaggcctggtaacctgaggactagcgggaactgaccc

SEQ ID NO: 105357 - DNA, 391 bp, Homo sapiens
attacaagcatgagccaccgtacccggcctctgtttggtgcttttgaaaaatacgtgtgtctttggtagatttctcattcacatcctgattttttttttctgttttctctgtatttatcttgtatctcactgagtgtctttaaatcagtaatttgaaatctttatctaggcttttgggaatttttgattgggatctgttgctggagacttactatgtttctttggaggtgttatatttccttgctctttcatgtttcctatgtctttatgttattatctatacatctggtataatagttgcgtctttcttttttttaagacagagcctcactttgtcacccattctggagtgcactggtgtgatggcttgctgcaacctccacctcccaat

SEQ ID NO: 105358 - DNA, 364 bp, Homo sapiens
cgaacttctgggctcaagcaattcacctgtctcggccccgcaaagtgctgggattacaggcacgagccactgtgcccagctgagttgtatattttcaataggtgacttgtttggtatgtaaagtgtatattaataaagttgttttaaaaattaaaagtgaaataaagacatgttcagacatgtgaaaggggaaataattcacaacaagcagaccccaatataagaaatgtttaaagtaagtccttaaggcggaagtaaaaagaaggaacagagataaagatgatgtcttatttttcattggaaacaatacaagcaagaagacagcagagtaacatttttaatttcttttaaaaaattgtcaacc

SEQ ID NO: 105359 - DNA, 645 bp, Homo sapiens
  misc_feature (1)...(645): n = a,t,c or g
gtatgtatacatatatgtgtatatatacgtgtgtatgtatacatatatgtgtatatatacgtgtgtgtgtatacatatatgtgtatatatacgtgtgtatatatatacacatatatacgtatatatgtatatatatatacacaggtgaatcagtgggattaatacctataatctctggttttcaaaggtaatatggaatatttgacacttggtaaaaggtgaactacctttgtagtgaatcttttcctcttggtagcatcaacactggggataaatcagaaccattctgtggaatgaaatgtttctcaagagcctataatatagtagatagtgcatattaagatgtctggctgggcatggtggctcatgcctgtaatcccagcactttgggaggctgaggcgggaggatcacttgagcctagaagttggagactaacctggcgagaccctgtctcnnnnnnnnnnnnnnnggggcggcccctttaaaggacccctcggggggcccaagtttccccgggctcgcaacgtcatagctttctccctatagggggccgaattttaagctaggccctggccgccttttaacaaccttggcactgggaaatctgctacctggggatctttggaaaggacccttcctttggg

SEQ ID NO: 105360 - DNA, 384 bp, Homo sapiens
gttgcaccactgcattccagcctgggcaacagagcaagattctgcctcaaaaaaaaaaaaaaataataatattcaaccaaaagggaccatttttgtgggtcacaaattgacccattaccccaaacaaagggaactttaaaccaaaatcaaatggattttgaagtttcccctttaaaaattaaatgaaggcccaccagggattcccccacagcggggcaccgtagaaaccaaattatgcccattgaccaaatgaaaaaccagaggttgacattgaggaaaaaagttgccttaaattttaaataggaacttgatttggatgcaaccttaaagttttgggactttaaagccctttgggccacaccattgggggacacatgacatgag

SEQ ID NO: 105361 - DNA, 389 bp, Homo sapiens
atcgcttgaacccggtaggcgaaggttgcagtgagccaagatcgccccattgcactccaagcctgggcaacaacaagagcaaaactcagtctcaaaacaaaacaaaacaaaagaagttcagggtcttcccattgcaagcagttctagatcgaggagaggggttcctagcatgggacccagcagaaggactgtccttcgctccttcattgtctacgtggacagtggatgaagcccagccgaacctgccttgttcccgttttctgggtcagcagggaaagcctttcacagagtagccaccgtgccatcctgaggaaggccctgggtcagaagcttctgtgcttctttgtaccccgggcgagacacacaggtgctcacactgctctgtagaa

SEQ ID NO: 105362 - DNA, 384 bp, Homo sapiens
caaaagttctttcgaaataaaaatctttctcacactttttttttttacatagaactacacatacacacacacacacacacacacacacacacagagaaaaaatatttttctcaaatagaaagggtaatgttaaattcaaacacacatgctatcccacagcatttcttcttcattcagtgtgttgtaaattcttctgtaacatggcacagaaagagaaacagtttggtgagtggttaaaagccccatttggatttggttgacacctcttggtttatgtagtatgaccttgggcagactgaattgctgatgcgcactggggttttctattttgaaatatgggaattataattggccctaggatttttttgagggcaacattaactg

SEQ ID NO: 105363 - DNA, 357 bp, Homo sapiens
gtgggaggatcacctgagtctggggaggtcaaggctgcaagtgagctgtgattgcaccactgcactccagctggggcaacagagtgagaccacatctcaaaaaaaaaaaaaaaaaaaaaaattgggggaaaaggcccggccagggggggaggaacccttggggcccccctttgcctgggggaaaacccctaaaaagggcttccttgggccctttcccactgggcggttccaagggtcctccccagggctttaaaaaggcccttttttaaaagggggcccaagttttaaaaacctaaacctggttcccaaaacagggtttttaaacccccaaaaatttgggaaacgcccttgggaaat

SEQ ID NO: 105364 - DNA, 332 bp, Homo sapiens
aaatattttaaaatttgaaacttaatgaaataaaacacccttaaatcagcgcactctcttgttggtcttatgctatatggcacctggtggtttttcatggtgtaattgcactttggtaacattttcttttcttttcctttcttttcttttctttttttttttcttttttttttttttttatagaaaagggttttttttttttccccccccctatgttcaaagcccgctatttgtttgtccctcaaactttcgcctggggtaataaacaattttctcctgtgcgctccctaatagggcgggtattctgacgctccccaccggggggggttttt

SEQ ID NO: 105365 - DNA, 341 bp, Homo sapiens
  misc_feature (1)...(341): n = a,t,c or g
cagagcttgtagtgagcccagatcacaccactgcactccagcctgggcgacagagcgagactccgtctccaaaaaaaaaaaaaaaaaaaacttggaaaggtcccttgaagcacatttttagtacccaaaaggcggaaacccccccaaaggcccttaaccgggggagtaaacgggggcccaggggggtaaaggaccagggttactaaaccacctgggagaaatttcacaaacatggctgaccgaaaaaacccaaagccaaaggtagggccacacaaccttggacttcgggaccacagtttcttgggaagggggggccccaattggggccacaaaggattttn

SEQ ID NO: 105366 - DNA, 352 bp, Homo sapiens
ctgacctcgtgatctgcccacctcgccctcccaaagtgctgggattacaggcatgagccaccacacccagccggccatgtatttttataaccaagctgccctcagaattatgaatagtatttctgacatgtagtgtcttttctcatttatcttagaatatatggttaccactctataaacagtttgtctattattctggtactgtgcttagtttaagacacctaaccattaactagttttcagaatggttttgctttttagtgatagttgtgtgagcgcactgttgctctggttgtttttaaatctcactgaggtaggcttcaggttgttaatgtaaatctttatagctttg

SEQ ID NO: 105367 - DNA, 360 bp, Homo sapiens
  misc_feature (1)...(360): n = a,t,c or g
tcttcttcgccgcctcttcctcctccctatatggggctgccccagcctccaggggtggcaccaggtcctcagaggaggcctccgacatggaggcctctgactctgcctctgatgtggactgcaacttttgggggcctctaggcaagtcgagggtgcctggcacaggctgatggctctagaggccttggaagaaggtcatcatcttcagcatcaccctggttcaggcctgcaggctccgtgtccctttttaacatgtcattgaagcttttgtatttattttctgggannnnnnnannannnnaacanannnnaaaaaaaaacaaaacaaaaccaccanaaaaaaaaacaagaccaaaacac

SEQ ID NO: 105368 - DNA, 373 bp, Homo sapiens
gatcacttgagcccaagaggtggcggttgcagtgagctgagatcgcacccccgcactccagcccgggcaatagaatgagaccttgtctcaaaaaaaaaaaaaaaaaaaaaaaaattggaatttttttttaaaccgggggttttttaaaacccatgggttaaatttccaaaacttatggggtttttttggttttatggaaatttcctttaattggtgaaatataaaaatctgtttagtaaagttaaatcctttttccttttaatgatatttgtggtaaactcttctcgattctctttaaacactatatttttaaaaaaattgcataattattatatctagtctctctcctaacactaagatctatagattatag

SEQ ID NO: 105369 - DNA, 308 bp, Homo sapiens
ggcaggagaatcgcatgaacccaggaggcggatgttgcagtgagcagagatcacgccactgcactccagcctagcaacagagcaaggctctgtctcaaaaaaaattaaaaaaaaaaaaggaccaattaaaagggaaaaaaaaaaaaggcgataatttgggataatataaaacccaaacccttatccttaaggaaaattggctacccattaaagtctaccagggtctccaaagttcaggggttctcaggttgggaaatggcaacaggggggaaaaagggctatgacacctaaacgtcaacgcggccgca

SEQ ID NO: 105370 - DNA, 338 bp, Homo sapiens
  misc_feature (1)...(338): n = a,t,c or g
ggcagatatatgaagtcttatggacttgaggtgtcagtggacgtaatcttaaggctgaaaagttagggaggaatccccagaaacaaagacagtacaatgagaacaggccccaaatctgagtaaaatctctggccaaattcttggtcaattatcagttacacaggcagacctgtagtggccaggctgggcgtggtgccttacgccagcgctttgggaggccgaggcaggtggatcacttgaggccaggagttagagaccagcctggccaacatggcgaaaccccgtctctactggaagtacgaaaattaagctcgggtttntnaataaatntttaatcg

SEQ ID NO: 105371 - DNA, 173 bp, Homo sapiens
cacacacacatatatatatatatgtgtgtgtgtgtgtgtgtgtgtgtgtgtatgtgtgtgtgtgtatattagagaaagacaaatatactaaaaaattatgagatactcaacactctataaaagcaaagaagtgggagatactatagtgaccagagaagtgtagacgcgggcga

SEQ ID NO: 105372 - DNA, 334 bp, Homo sapiens
  misc_feature (1)...(334): n = a,t,c or g
cgaaacagtccctaaccataagggacaattaatgatgctataaaattctatctaacattcctagtctacttgttgttttggagggcaggctgccattcctgcctattttaatctttcgaaggtggtctctgctcccatttaaaggtataagcaattaagagatacagaaccctcagaactaccttctataacttacctaatttctaagcttaaaatgtaatctaggctgggcatggtggatcacccgaggtcaggagttcgagaccatcctggccaacatggagaaaccccatctctactaaaaatacaaaaattagccagacgtagtggcagn

SEQ ID NO: 105373 - DNA, 379 bp, Homo sapiens
aaacaatttattcatatataagcaaatggattttggtccctcctgtctcattttaaacactgttctgcaccttgcttttttcatttaacatcttggaggtcaatacataaacacattttcatgttgtcaatggctgtatgctattccattatgtagatgtaccaaaattatttaaacattcccttactgatgaacattaagttatagaattaagactttgataaaacgatgtttaaatttagcttaagtattctgttcccattaagaactgcaagccttggccaggcacttgggatcacacccgtaatcccagcactttgggaggccaaggtgggtggatcactttagaccagaagttcgagaccagcctggccaacag

SEQ ID NO: 105374 - DNA, 326 bp, Homo sapiens
gctatgttggccatgttggtcttgaactcctgacctcaggcgatctgcccgccttggactcccaaagtgctcggattacaggcgtgagccaccgtgcctggctgaggtcttttttttttaactctgagtgaggggacaagctttgggaaggttttgagcaaaaaaggggcttagcctgatgaaatctggctaactttgacctcggtatggaaaatgaatgacggctttgaaggtagggaaaaagggttttaaaggatcctggatatattttggggaatgacccagggggattttttggataaatgggttgtgagtcgacccggccg

SEQ ID NO: 105375 - DNA, 361 bp, Homo sapiens
gaggatgctgggatacagataatggaaatagagtttccttttctttccaaagccagccacacactataccagtaagtcaagccagagctgagaaggccagcttctggaagagaaatcatagttggggctgatgggtctttactttttaaatttggctcatagatcgctttgagaatctgatgaagattaaggatcttcttcacagaaaactgcacatggcacatactcatgaaattttacatgatttaaggggatggatcgcttgaggtcaggagttcgagaccagcctggccaacacagcaaaaccccgtctgtactaaaaatacaaaaattagctgggcatggtggcatgcgcctatag

SEQ ID NO: 105376 - DNA, 368 bp, Homo sapiens
tgacatacaaaatggatacaaatgagctatttatgttattggtaaggcttccagtcaacagtagtctagtggtaactaagttttggggaatcaaagttttgcacaaatttgttattgctcaagggtgggtgccctaggctaatctccatgtggttcaagggtaaactatgtagatagatatagatatagatatagatatagatatagatatagatatatcctattggttctgtttctctggagaagtctaatacagagcccttagtgtattcatcactcttgcttaaaacttccagtctagtaattccaacacctctgtcatatctgagtctggctgtgatgcttgctatgtctcttcaaactgcttt

SEQ ID NO: 105377 - DNA, 350 bp, Homo sapiens
gccccgtctcctgagttcacaccattgtactccagattgagtgacagagcaagactccgtctcaaaaaaaaaaaaaatacatacgggtattatatacttttaaaaaatttttttttttttctagaaaaatgtctacaaagttttgcattgaattacacattacttttccatttgcaataggtacaaacacatacatattgtacggttgcataaaaatattacatctgaacttttgtaagacccccacattaccttttgactgtagtctttccctcacaaaaaatgcctttgaaatataaatgcttctccacttcttttgtagatagcttatctcccattgtatactatgg

SEQ ID NO: 105378 - DNA, 316 bp, Homo sapiens
gtttgaatccaggaggcagaggttgcagtgagccgagattgcaccaccgcactccagcctgggtgacagagtaagactctgtctcaaaaaaataataataataataattgagtattctaatagtaaactggtggacttaggatatgatagtggcaattagagggataaaaataaattgttcaataagtagagcaggaattcccaaacagcacttgatttccacttttctttccctcagagaggacaatacaagcacagaggcaaaaaaatggagcccgacacagaacctggtctgcattcatgccctgaatatctg

SEQ ID NO: 105379 - DNA, 354 bp, Homo sapiens
  misc_feature (1)...(354): n = a,t,c or g
ctgacatttaatgtctttctatggacaacattaaatctccctcccttctgtaattgtttttggattgtgaaattagtcttatttttatatacttaattttttttttctttgaaatagggtctttgttgccaggctggaagtgcagtgtgtgattatggctcactgcaactttgaactcctgggctcaagtgatcttcctgaggcaggagaatcacttgaacccaggagacgggggttacggtgagccgagatcgtgctattgcactccagcctgggcaacaacagcaaacttcatctcaaataaataataaaataaaataaaagcagatacctggaactgacctgtcctttgcn

SEQ ID NO: 105380 - DNA, 316 bp, Homo sapiens
cgagaacccggaagggggagcttgcactgagccgagatagcgccactgcactccagcctgggcgacagagcgagactctgtctcaaaaaatacatacataaaaatttataaaacttttatattacaatttgtcttatttcatttttacttcacagaaagacaaaatctgcactgaaatatagcacagtaagtactatagatgttttataagagacatggtcattttctatgataaattttttaaaaattagggatatattaattctctgatactccaatgaattcatcttctcgaacctctatatatttagctaaa

SEQ ID NO: 105381 - DNA, 366 bp, Homo sapiens
taccagagtggctcatgcttatgatggcagcactgtgggaggctgaggtgggaggattgcttgaggccagtagtttgaggttacactgagctatagttgggccattgcactccagcctggggatagagcgagactgtgtttctttttttttttttttttttggaaaaaaaagttttttttgtccccggggctggaaagcctgggcccaatttttattaatggagaggtcatttccccggggggaagaatttttggggcccttgtctccgggaaaatttgtaatatagggcccccggctttttcctatgatgtttctgggatttttttagggaaacagggtttaaacggttgtcccaagagtggttg

SEQ ID NO: 105382 - DNA, 403 bp, Homo sapiens
cactgagccgtgatgatgccactgcactccagcctggcaagaaagcgagattccgtcttaaaaaaaaaaaggaaaaaaaaaaagaaaccagaccccagtttttgcttaaagggaaaaaggtaaggagaaaggctaaaaggaggaaagggacctggatattgggacctaaacagggtagcctgtaaaagtaaaaaaagccagggggaaatttaggataggctttcccaaaacgggattccctaaacatttaatcccggcccaaaagtcccaatcccagcagttttagcttttaatccttagggcatcagggggtaccttaaaaaacagggaaagaaaattgagggtccaaaaatcttttctctggactatctatatttcccccatgaggccctgaaaactattc

SEQ ID NO: 105383 - DNA, 400 bp, Homo sapiens
aaaagggcggccccccaacccgccccagagcaacgcgatttaaaaaaaaaaaaaaaaaagccgcctttagccccctcctcccttttccggttttgggaaaaactccttccctccttccagttccgccagcccaggggccctttccttggaacccgaggggtttcgttcgcatttcaccgccgccgcttttggcaatatggcaatatgggggaaaagcaaacctgggggaatccgggcagcagttcgaacccgcccccggggacggcgggttccctttccgggaaccggggcccaggctgggggggcaaaattgcggaccgtttttggctttatgccagggacagttttgggcacagccggggcctaaagggctcttgttgccaggcccatttgggcaaat

SEQ ID NO: 105384 - DNA, 769 bp, Homo sapiens
agcggaaagaacagacccggaatgccagggccgaggtgttgcgccaggctaaagccaattttgaaaaagaagaaaggcgtaaagaacttaagcgacttcggggtgaggatacatggatgctacctgatgtgaatgagagaattgaacagttctcacaggaacactctgtgaagaaaaagaagaaaaaagacaagcattcaaaaaaagcaaagaaagaaaagaaaaaaaagagcaagaaacagaaatatgaaaaaaacaatgagtcatctgatagctcatcaagctctgaagatgagtgggttgaggctgttccatcccagactcctgacaaggaaaaagcctggaaagtgaaagatgaaaagtcaggaaaagatgacacccaaattatcaagagggatgagtggatgactgttgattttatgtctgttaaaactgtgtcatcatcatcactcaaagctgaaaaggaaactatgaggaaaatagagcaagagaaaaaccaagcgcttgaacagtcaatggaaatatttcagtcaaaattagaagatgctgaaaaagctgcatccacgaaagaagattatagacgggaacggtggaggaaacccacatattcagataaagcacaaaattgtcaagaaagtagagaatcagacttagtaaaatatggtttttgttcaagggatagatatgctacaacagatactgcaaaaaatagcaataatgaaaaatttattggtgatgaaaaagataagagacctgggtctttagaaac

SEQ ID NO: 105385 - DNA, 404 bp, Homo sapiens
tgaaaattgaattaaactgttggcacacactttatcttaccagaacggtctttatgtgtgtgtgtgtgtgtgtgtgtgtgtttgtgcgtgtgtgtgtgtgtgtgtgtgtgttaagtctacagggacagaaaggttgcaaaaacatttgagctcttaaagcctttttgtgtaacttggtaattatagcaactatccttatttatatatccttgattgattttaaatgtgacaaaaaatgcgcatctgtaaaaactggattttgtgtgagaccaaatctgttctttaatttacgcttttcaaattttttccattgacctccccacttctctttctctctttttctatcccttgtgccctatacaggaactggccaagtactttttggcagagctgctgtctgaacc

SEQ ID NO: 105386 - DNA, 390 bp, Homo sapiens
  misc_feature (1)...(390): n = a,t,c or g
caggctggtcttgagctcctgacctcaggcgatctgcccgccttggcctcccaaagtgctgggattacaggcgtgagcaactgctcctggcccaaaacatctctttctacatacacttgagtaggtggcataaaatgcactgtcaatatatagaaaacatgaaattttccaaatatttccgatcagagaatcacaagagcagcaaatgtggtttcatcaagtgggaagaaagcagcaatttaaaataactttttgggagactgaattgagtaataataaaacttcagtctttcgctaataataataataataataataacaacttattgaatgtggccagctcactagatgaggaaagaggaaggcattttctgcattcttgcctagttn

SEQ ID NO: 105387 - DNA, 398 bp, Homo sapiens
agcactttgaaatttattactagcttgctacccacgatgaaatcaacaacctgtatctggtatcaggccgggagacagatgaggcgagaggaggaggaggaggaggagaaggctctgggctcctctgcaaaaaaaaaaaaaaaaaaaaaaaaaaaaaaaaaaaaaaaaaaaaaaaaaaaaaaaaaaaaaaaaaaaaaaagggggggcccctttaaaaaaacccccgggggggccccacttttccggggggcgccaaaaaaatattccccccctaaaggggggggaattaaaaagagcccccgcgggggattttaaaaacccggggagggggaaaattgcccgtgggggattttttgagaaaaacctctcttgggggggggaaaaataaaacaaacccc

SEQ ID NO: 105388 - DNA, 314 bp, Homo sapiens
gtcgaggctgtagggagccatgattgcaccactgcactccagtctgggtgagagagcaagaccctgtctcaaaaaaataaaaataaaagaaagaatgggagaagagaaattgaggatagccagaatatacagtggtgtcttcccagggaatttagataccataatttccaccctcccatcctatggataccaaaatctgctgattctcttgtagtaagagatgactttaagtcatcttaaagtctctagattacttataatatctaatacaatgtaagtgctatataaggataaatggaatttgccaaggtaaa

SEQ ID NO: 105389 - DNA, 286 bp, Homo sapiens
  misc_feature (1)...(286): n = a,t,c or g
cttgaactcctgacctcaggtgattcccccaccttggcctcccaaagtgctgagattacagacgtgagccaccatgcccggccccacactcatctattaagtagagctaggaattcctatcctaagggacacaaaaatgaaaaaagataaaatttgtgaagaggcacataatgaaagcccatacatgtcactgagttcagaggagggtgggtctgacctcccattggctggtctctgcctgatggacatcgtgaagaagagagccaggactagtgtggctgggggn

SEQ ID NO: 105390 - DNA, 331 bp, Homo sapiens
acttgaacctgggaggtagaggctgcagtgagccaagattgcaccactgcactccagcctgggcgacagagcaagactccatctcaaaaaaaaaaaaaaaaaaaaaaaggggattttacggggggcctaaaaaaaaatgatttattaaacacctaaacttacaataaaaaaagttaaaaacataggaaccccccccattttttatgaacggaaaaaaacaccccaaatttgggggggaggctttttttaaaaacccttttttaaaaaaaaaaagggttagggggaaaaccggcccgaaattccaaaatttagaaccgaaaaaccggaaaag

SEQ ID NO: 105391 - DNA, 309 bp, Homo sapiens
atttgctctgctgtccaggctggtcttgaaatcctggcctcaagtaatcctactgccttagccttccagagtgctaggattataggcatgagccacagcacccagcctgttttttctgtaaacctaaaattgctctaaaaataaagtttattaggaggcggtgcttgcagtgagccgagatcacgccactgcactccagcctgggcaacagtgtgagactccatctcaaaaaaataaataaataaataaacaaaataaagcttattaataaacaaaataaaaataaagcatctttaagtgtaaaaaaag

SEQ ID NO: 105392 - DNA, 356 bp, Homo sapiens
gtgaacccgggaggcagagcttgcagtgagccaagatcgcaccactgcactccagcctgctgggcgacagagtgagactccgtctcaaaaaaaaaaaaaaaaaaaaaaaaacctccccccccttttgacccaaatctgggggaataacggggggaagggacggcccctaccctaaaattttgggctaataggggggaatgggtcaacccggccgaaatttccaaatttttgaatcgaaaatcctgaaaacccccgcaggttcctttaaacggggcatggggccccatttaaatttttttaatttaaacatggtttggcctttttttaggaaactataccccctaaagtttcaatct

SEQ ID NO: 105393 - DNA, 302 bp, Homo sapiens
ccgctgcactccagcctgggcgagagagcaagactccatctcaaaaaaaaaaaaaaaaaaatttaaccttgggggggggcccctgtagccccagttacttaggaggctgagggggaaggattgcttgaatccgggagcaccattgcactccagcctgggtgacaaaccgagaccctgtttaaaacaacaaacggaccattaaaaaagtcttgaaatgtataacccctgatgggaaggggaaaaaggagaaagaggctgaagtaccagaagtaattagatttgaaaaacctttgggccctcta

SEQ ID NO: 105394 - DNA, 315 bp, Homo sapiens
ttttcatgttacttatattaacattgtttcttctacgaaatgacagattggtccaatgtgatgtaaggagttcagttgtgtgtttgggatttttgctcggctggtccgttatcttgtatcctctgatggctgccttcatgcctactatgtggatctttctttttattcttttttctatgctttttttctatgtcttttttctttttctcttgtttttccttttatttctgtattcattcccgttgttttgtttttttttttgtttttatttattcagattctttttcttctttctcatttttttttcatctccct

SEQ ID NO: 105395 - DNA, 325 bp, Homo sapiens
gagactccgggaggcagagcttgcagtgagccgagatcgcaccactgtactccagcctgtgcaaaagagcgagactccgtctcaaaaaaaaaaaaaaaaaaaaaaaaaaaaaaaccccttttttaaacccaaggggtggggggaaagggaaaaaaaaaaatttccccgccaaaaagttgaaaagggggtcggggggggttttttttttttaaaaaaaaagggttcccaaattggggggaaaaaaaaaacggtttcaaaaaaaaggggggagcttttaaaccccccttttcaaaggggggtaaaaaaaaaaaaaactttttttttg

SEQ ID NO: 105396 - DNA, 327 bp, Homo sapiens
  misc_feature (1)...(327): n = a,t,c or g
gaactcttgggctcatgtgatcctcccgctccggcctcccaaagtgctgggactacaggcgtgagccaccatgccacattcttttttataaaaaaatacaaagaagagcatgtcattttaatactctgttaaacagtaaatgtgatactattctttatcagcctactcaataactacgaatgaaacctatatacattatccacccactgaacgaaaaaagagacatccataaaatttaaataggtgttgctcaacatgtctgtcacacttgagctactttaccttgtatgaaagaccaactcaaaaatcctcnaagacaacctttat

SEQ ID NO: 105397 - DNA, 380 bp, Homo sapiens
gcgcctgcagtcccaaccactcggaaggctgaggcgggagaatggcgtgagcccgggaggcaaagcttgcagtgagttgggatggcaccactgcactctagcctgggtgacagagaaaaaaaaaaaaaaaggatggctttcttcccaccttaaaaaattttccccggggaaatccccaatggcacaaagcccaagcccacccagcccttttaatagttcccccggtttccttcacaaaagtgaaaggggacctaagggccagggccttgttcaggggaaaaactagttggccccattaaaaatttaaaccctacctttgccttactttgcccaggaaatcagcaagggggtcttccactaggtctttttaccaccaggac

SEQ ID NO: 105398 - DNA, 367 bp, Homo sapiens
ctcaaactcctggactcaagtgatcctcccgcctcagcctcccaaagtgctggggttacaggcctgagccaccatgcctggcccaatttcttaataaatgatgttggattatctaaatgcattggctgatgttgacccatcatccttatattcctagaactaaaccagcttgctttctgtgaatatgatggtaaatttttatttgattttgcatttacaaattttatctgacggttgccttggtagtaatatttttattctgattttggcataaggttatagtgcctattgctacaataaaacatgcaattcttaatatgtcatccttttattagcatgtcaggaatgtacaggccaaggaaaaagt

SEQ ID NO: 105399 - DNA, 285 bp, Homo sapiens
tgtcagggttagcatgcattctaccatttggtagccagaatgaaagtgacctaaataatccagggactgaaggaaaactttgtcattcctgcttgttttcagatacaacaaatgattttactataatagagatggaaaatgaaaatagataatgtgcttctcccattagaagtcatcaaaaattaaataagaatgggtgggtgcagtggctcatgcctgtaatcccagtaccttgggaggctgagacaggagggtcacttcagctcagaagctcgagactagccg

SEQ ID NO: 105400 - DNA, 320 bp, Homo sapiens
caaggttttaccatgttgcccagctggtcttgaactcctgggttcaaatgatctgcctgccttggcctcccaaaatgctgagcttacaggcatgagccactgcacccggcctatgaagatacttttatatctattcaataataaaaaaagatgattttaaaagacataaaatatatgacagatcaatgtacaggtctctatggatgtaaaaacagaaagcacagctccttcttgttgaatatgttaaacagaaaacacataaaaagctaagcaatcatgaataatgtttccaaacattgataggagaggtatctcaaggc

SEQ ID NO: 105401 - DNA, 307 bp, Homo sapiens
gttgagttgcagtgagtggagatggcacaactgcactccaccctgggcaactgagcaagacactgtctcaaaaaaaaaaaaaaaggcctataggataaaaaaatgtattgggaacttgcctaaaaacaaaggggggagtaataaataagggtataaataaccggttaagggccgtcaattactttataattataaaactttcccatagaaattttttgaacccatttgaaaggggatattttgccaataccaaaaacttaaactttaaggaatttcaggaacccgcacaaaaaaacagcgtattaat

SEQ ID NO: 105402 - DNA, 336 bp, Homo sapiens
caactttttgtgtaactttcacttgggtacccttccatggttttgaatagtttagaatagaatgtatttcttttctattttagaactacttggaaattattaaactcatagttcaataaaatagtgttttgggctttttttctcttgactgtgtaaagtaaaatgaagaaaaagattgtccttagaagaatccctctctgttatttttgataattatatttctcccagggatagcatatttgaaaattcataactgttgggtcagccacagtggctcacacctgtaatcccagcactttgggaggccgaggcgggcagaccatctgaggtcaggag

SEQ ID NO: 105403 - DNA, 311 bp, Homo sapiens
gatgcaatgagccaagaagatcatgccactgcattccagcctgggcaacagagcaagactccgtctcaaaaaacaaacaaacaaaaaaacccaaaacccccacacattaaagaaatatgtcaatgatgttaaaataatgcatggggggaaaaaagacatgaagggaaatatttaaatgtccactatgtctaaataccctttcctactacaacaaaccaggggttccatgggagactgactgactccagaactaacagggaaagtaccagatgaatctggaaacatcttgttgtgtgagaaagtaaagtatc

SEQ ID NO: 105404 - DNA, 289 bp, Homo sapiens
gtttttttttaaggtgtcgatttttaatacaaaaaaatttacattctttatatacaggtaatacatctatacagttcaatggagagaatgaaatgtgaacataatcttcaaaaaaaatagtgtggtctttatttatgtttaaaaaaaattttttttgagacgtaatctcactcaggctggaatgcagtgtggcgtgatggctcactgcaacctctgactcctgggttcaagcgatttccgtgcctcagagtcccaagtagctgggaccacaagtgtgcaccaccatgcc

SEQ ID NO: 105405 - DNA, 317 bp, Homo sapiens
ttttacgacaagagtcttgctctgtcacccaggatggagtgcagcggtgcgatctcggctcactgcaacctctgccactgaactccagcctgggtgacacagcgagagtccgtctcaaaaataaacaaataaatagataaaagatacacaataggaggaatggcctagttactttccctggatctttgtcctatacctgacaataaactgttaactaccagcacgcagcctggtacaagaaatgacggcataggtgactttcttcaatcccaaatagaaaaaatgctggatttgcttcccaggtcgacgcggccgct

SEQ ID NO: 105406 - DNA, 343 bp, Homo sapiens
ttcccaaacaaaatcaaggaaaagatgtcaaattcctatctaaatactgccagagcatgttcatttctaccatacataaacatatatacctaataaaaaccacaaccaaaacattcaggcctgttctttcctgtgcttagcaggaaagcaaactggttatcagcaatttatctctgattcagagtcagtacaaacacaattccgcccacccgctttccaccttttgactcctacagtacagcatccaaaatgaggatgcaggctgggcatggtggcttacgcctgtaatcccaacactttgggaggccaaggcaggcagatcacttgaggtcaggagtttgag

SEQ ID NO: 105407 - DNA, 407 bp, Homo sapiens
ggcacgagcacagggatttatttattctatcccctttgatcctttttcttgcatgcttaggtaggaaaaatcactggctaagctgatcaaagaaatctgagaggcaaaaccaagattcaacgtaaaaatgtgatgcttaatttctgaagaactgagtactctaccttctagctacatctacatttacacatagaatgtttaggccccagaagcagcaaatgttcacaaaaaatggcaaagtcatacaaacaacaatcttaaattactgtggaatgttccaaataaacaacattgcattttaagaactgcatttaaaaataagttctccgaatgcttttacactgtttaagggagtgtaaattagttcaaccattgtggaagacagtgtggcaattcctgaaggatcg

SEQ ID NO: 105408 - DNA, 413 bp, Homo sapiens
ggcacgagtctctctctcttgctctctctgtatgtgtgtgtgtgtgtgtgtgtgtgtgtgtgtgtgtgtgtgtgtgtgttttccttctggcatttctttcctcgaacaattttctcccattaacgcacagaatagttcttggccacagactcacgccgacacagcatatctctagagctttctttctgtgtggttcccaactctctcatattttcccccacaaattctagcctcctcaaactctgaactctgctgcttcaactcaacaagaccatagggcattctttgggtttcccctccagcactgtggtctgaaaactctctaggcagcaagttgggacaatcagagggctcacacccaggtttgtttcttacattgcttttccctctttctctaagagatcactgtcatg

SEQ ID NO: 105409 - DNA, 413 bp, Homo sapiens
ggcacgagggcaggagaatggcgtggacccgggaggtggagcttgcagtgagccgagatcgagccactgcactccagcactctagcctgggtgacacagcgagactccatctcaaaaaaaaagaactcagaagtcataaagaagaaggttgacttgcctgacctcatgaacctgttggaaacagaagacaaatggtaccctaggagaaaccattggcaacatgtaagacagaaagattgtgtccacagtatataaaaaacttgtacaaatcaataaggaaaaggcaaaccacccagaagatagatgagcaaggaatatagacaggcacttcgtaaagggaaacatacaagcagcagctggaagcctctagaaagagcagcagaaggacccagtaagcttgagagtgatcaccg

SEQ ID NO: 105410 - DNA, 389 bp, Homo sapiens
  misc_feature (1)...(389): n = a,t,c or g
ggcacgaggggtgatgagcaaaagacacttgagaaggcatatccagacatataggcaacctaattaatggtggctgtgtgtgtggtttaactttccttttaagagttagatggaaggaatcttaagctacatttagtctgtctcattttgtgaattagatttttaaaaaaggtcatgtggacagactagtggaatagaactaaggtatagacctaagagcatattgaaacagtgtatggtaaacttggcatctcagagcactggggtaaaggtggactttttaataaatggttaaccatttggaaaaaagattacagctggcagtggtggctcatgcctgtaatcccagcactttgggaagctgaggtgggtggatcacgagttcacgn

SEQ ID NO: 105411 - DNA, 317 bp, Homo sapiens
ggcacgagccctgcttgaacccgtccgaccgatctctggcttctttctttcttgtcttctttctcccgctgattccgccaagcccgttcccttggctgagggttcgctggataggacgtagggactgcgggaaactcgttcattgattcatgcacgctactaatcacacgacaaggcatgtggctaccttaagacagtgatagatactgccgacgcttacccgtgcttaatggaatctgttcactttgacattcggagcactgggcagaaatgacatctcgtcagacacccggcgtgagccttcgcgatgctgtggt

SEQ ID NO: 105412 - DNA, 398 bp, Homo sapiens
ggcacgagggctcggcgtggtattcttccaggatcttatagtgcagttctgaagacaaagaagactctttctatcctaggaattctaagaaaaaatgtaaagatttttcaaaacaccaggtgttttgttttgttttgagacgagagtcttgctctgtcgcccgtgctggagtgcagtggcgcgatctcggctcactgcaagctccgcctcctgggttcacaccattctcctggaagggggaggatgcagtgagcctaaatcgctccattgcacctcagcctgagcgacagagtgagaccctcggctccaatagactaagaagatggagaaagaactacaaggcccggcgagggggccacatgcctgtactccaagtactttcgtagggcaaggcgaag

SEQ ID NO: 105413 - DNA, 334 bp, Homo sapiens
ggcacgaggtttctccatgttgaggctggtctcgaactcctgacctcaggtgatctgcccgcctcagcctcccaaggtgctgggattacaggcgtgagccactgcacctggccttgaagttttcattaaacttccatttacagcgatgaaaacattggatgtataacccatgtgacacatactgaatcatgtacatgtcataacgagcaaaccgaatctcaaggcacttgttcagattgccttgactacctatgaagatgccatagctcacacggctgatatgactgtcatccattacccaacagtcgacaaggacctgcgtctagcactattg

SEQ ID NO: 105414 - DNA, 375 bp, Homo sapiens
ggcacgagtcgagaccagcctggccaacatggtgaaaccccgtctctactaaaaatacaaaaattacccgggcgtggtggtgtgtgccttttatcgctggtactctggatgctgctgcatgatagtctcttgctcctgtgatgctctggaccccgtatgcctggattctgttactaccttcgagttccatggcgctcacctctttctttattattagagcttatgtcttttttagggttgttgcctgtttctatatcttgtgctcacggttttgatgtgtagctcttggaacgagctgctattactgatgtgtgctaccttgggcatgtctctagctttgtattagtttttaagatgagtactttttttatcacg

SEQ ID NO: 105415 - DNA, 364 bp, Homo sapiens
ggcacgagctccccgaaccactgagggtcctgtggacagctcaccgggtggcaatggctccaggctcccggacgtccctgctcctggcttttgccctgctctgcctgccctggcttcaagaggctggtgccgtccaaaccgatccgttatccaggctttttgaccacgctatgctccaagcccatcgagcgcaccagctggccattgacacctaccacgagtttgaagaaacctatatcccaaaggaccagaagtattcattcctgcatgactcccagacctacttctgcttctcagactctattccgacaccctgcaacatggaggaaacgcatcagaaatccaatctagagctgctccgcag

SEQ ID NO: 105416 - DNA, 376 bp, Homo sapiens
ggcacgagaactacccgaaccaataacggtcctgcggacagctcacctaaaggcaatggctccaggctccaggacgtacctgctcctggcttttgccctgctctgcctgccctggcttcaagaggctggcgccgcccaaaccgatacgttatacatgctttttgaccacgctatgctccaagcccatcgcgcgcaccaactggccattgacacctaccacgagtatgacgaaacctatatcccaaaggaccacaagtattcaatcctgcatgactaccagacctccttctgcttctcaaactctattacgacaccctacaacaaggaggaaacgcaacagaaatccaatctagagctgctacgcatctccctgctg

SEQ ID NO: 105417 - DNA, 322 bp, Homo sapiens
  misc_feature (1)...(322): n = a,t,c or g
aaatttttttcaaagttttcaacttctttgcctttggtttgaatttcctcctgtagctcggagtagtttgatcgtctgaagccttcttctctcaactcgtcaaagtcattctccgtccagctttgttccgttgctggtgaggaactgtgttcctttggaggaggagaggcactccactttttagagtttccagtttttctgctctgttttttccccatctttgtggttttatctacttttggtctttgatgatggtgatgtacagatgggtttttggtgtggatgtnctttctgttggctagttgtccttgtatcggacagg

SEQ ID NO: 105418 - DNA, 353 bp, Homo sapiens
gaacacctgacctcaaatgatccgcccacctcggcctcccaaagtgttgggattacaggcgtgagccacctcaccaggccccgttgcaatcttactccacttcgttttcacagcagttccgggacatgcccattattatgcctatttgatagatgatactgaggctcagattcggctgtcacacgccaatgccacaccgctagaacggctctagacccagtccagatccagtcctgttggtggcctcttgctggcgtgaaacttgggcgaaatgacgtcttatatctgctcatgatcaccttatatgtactacgtcttattccatttctactcactttcctcgcagttggtag

SEQ ID NO: 105419 - DNA, 354 bp, Homo sapiens
ggcacgagaaagacttctcagggaggcagagaatccactgagacatacgtagtgtgcgttcagtccctgatgtaccagagctcagtatttcctgcttccttcttgtgagaccctctctgcctccagggatcatggagaagaacgaatctccccagacactccaaaatccctttggagatgctacccgcgaattagtacatgttttcttggtaattataacagggaaataaaagttttaaaaatataatagcgccctggctgggcacggtggctcacgcctgtaatcccagcactttgggaggccaaggcgggaggatcacgggtcatgagatcgagaccattctggctaacatg

SEQ ID NO: 105420 - DNA, 352 bp, Homo sapiens
ggcacgaggctagcaccatgagcttcaataccctgtctctattttataaatttttttatataattaaaaaaaaagactgacagtctaacaagatgaatttatatgagtgtaatggaacaatcaccataatataatggattacattaaatttcccacagtcgagaaatctttgtcttcctaggataaactccccttggttataaatttttttagcctgtttccttatctttagaatggcacctactatttatggtgcttcaaagactgattaagaaaatcttaaaacaggccagatacaatggctcacaccagtaatcccagcactttgggaagccaaagcaggcagatcact

SEQ ID NO: 105421 - DNA, 736 bp, Homo sapiens
  misc_feature (1)...(736): n = a,t,c or g
agccagggttttctaccaccgatgtcatgtgtgtgcgcatgcctctgtgaatgagtgcttggggtgtgtgtgttgagtgtgtggccttgtgtgtgcatatcagacggagtggctgacattgctgcagcatctgccagaagggcctggctccgggggtggaaggcagcacccagttccttctttctgtgctgtcgggggagtggcgggtgatgaagggcattccctggaagtcctataatctcagacacactgctcggggaaaactgaaaactcacacggaacaaatagtgacagaaaccaggtgcccaccgccctccacaagaggccatcttctccagcgcgtttcctaactgaagctgtgcctgtcccccccgtggattatttacagtctgtggctgcttttgctgtttcggctgtggcttcccagtgggagaggaccggcaaaccatttaatccactcttgggagaaacgtatgaattaatcaggtaaggggggaaaggcccatcataaatatcttgtaaatggaattccttggatgacagataagtttgattctttcactagcattgattcctctgctctgagaataaactgtttgaattaaaanaaaaaaaanaaaagggttttttatttaagcggccgaaggctaattccctttagggggggtaaattttacttgtgccctgcccgctttttacaacgccgggangggggggaaaaaaaaatatttttttt

SEQ ID NO: 105422 - DNA, 346 bp, Homo sapiens
ggcacgaggcaaactcccttaaataatctctgaaacaagatactgattgacaaataattatacttgtttcacatttttcaactcaaatttatgtcagactgtattcgcctcatttcaatcaacaaatatttactgaatgttgcttatcatgtccaatatgatacagttgttaaaaatgcattgtctaggaccagacacggtggctcacacctgtgatcccagcactttggggggccaaggcaagtggatcacctgaggtcaggagttcgctccatttcccacttctattctaagggtttataggtactttgcccctctaatgaacttgaaactgtaccgtatggta

SEQ ID NO: 105423 - DNA, 332 bp, Homo sapiens
ggcacgagccccgaaccactcacggtcctgtggacaggtgacctactggcaatggctccaggctcccggacgtccctgctcctggcttttgccctgctctgcctgccctggcttcaagaggctggagccgtccaaaccgatccgttatccaggctttttgaccacgctatgctccaagaccatcgcgcgcaccatctggccattgacacctaccacgagtttgaagaaacctatatcccaaaggaccagaagtattcattcctgcatgactcccagaccttcttctgcttctcagactctataccgacaccctccaacatggaggaaacgca

SEQ ID NO: 105424 - DNA, 330 bp, Homo sapiens
ggcacgagatccaatggtttcagtccatgttctgcacccgtattgatgacctgtcatgttccacacactttaagtattgtacattcttttaatgctcacaacattctcccctatctccgcaccccctgccctgctcctttttctttttttctttttttttgagacagaatttcactcttgttgctcaggctcgtgccactggactccagcctgggcaacagaacaagactcttgtctccaaaaaaaaaaaaaaaacatttgaggttggccccggggtttaacccttgaaaccctaacattgggggagcccaactgggccaattcccttgg

SEQ ID NO: 105425 - DNA, 360 bp, Homo sapiens
  misc_feature (1)...(360): n = a,t,c or g
ggcacgaggcctaggaggttgaggctgtagtgagctgagatcacaccactgccctccatcctgggcgacagagcgagaccctgtctcaacaaaaacctaaacaaaacagaggaagaagagaaagatattttactgcctgtagtaattaattactgggaaaatatctctgctaaatatgcattaaaaggaaatgcttaaattaccaacttcacccgagggcatgattctaggtatttgaaaatttggtttgtgcttctgggtagcatgaactctttgtgtcccattgatttctctcttggtttcttagtaaggctttatatacattttggggntgaggtggggcaggatctctctctgttg

SEQ ID NO: 105426 - DNA, 334 bp, Homo sapiens
ggcacgaggcggtgtgtaagtagggtgttaaaatattcaataattttacttccaagtggaattccaagaatttatactaagggaataattagggtctcaataaagcttagtgtatatagaacattcattgtaatattacagattatgtctaaaagggaatagttcaataaattatgccatagccagtctccataatattttctagtcattaaaatgatttcgaattagtatcgggaagattgttaggacaaaataggaaaaattagagctgggtgcagtggctcacgcctgtaatcctagcactttgggaggctgaggcaggcggatcacctga

SEQ ID NO: 105427 - DNA, 356 bp, Homo sapiens
ggcacgaggacacatatgcacacacgtgcacacatgtacacacggatacacacacacacacacacacactgcatatctgagcgcgcccctcgcactgggtcttaccttgcaccttcttcaggagtttatatgtgaagagatttttatatagatttttttcctttttttccaaaacactttatactttaaaaaaaaacttgaagaggcaattccggggggctgggctcttaaaaccatggtccccgtttgtttccagccaccctaggatgggccttgtaagctggtgcccctggcccaaaggtttggcggagcccaaggcagcaaccatggcggggtgtctgtacggggaaaaggcg

SEQ ID NO: 105428 - DNA, 320 bp, Homo sapiens
ggcacgagctcaaactcctgacctcaggtgatctgcccaccttggcctcccaaagtgctgggattacaggcatgagccactgtgcctggccccttcctgtaaaatttttaaatggagaattgggtgcgagatgtggtttccagcctggtgcctggggtgctgagctagtgagtggtgcagctcacgacacctttgctttatctcacttacacggtcacctggagccggctcaagtggctaaagcatcctggggcccatagccagacgataggctgctctggacgactggacagtggcagtctgtgaattccacctgagcc

SEQ ID NO: 105429 - DNA, 330 bp, Homo sapiens
ggcacgaggaactgagcaggtgataataaggttccacatgagaacggctctaggatcccaatggccaactacccgaaccactcaagggcctgtggacagctcacctagtggcaatggctccaggctcccggacgtccctgctcctggcttttggcctgctctgcctgccctggcttcaagaggctggtgccgtccaaaccgttccgttatccaggctttttgaccacgctatgctccaagcccatcgcgcgcaccaactggccattgacacctaccacgagtttgaagaaccctatatcccacaggaccagaagaattcatttctggatc

SEQ ID NO: 105430 - DNA, 344 bp, Homo sapiens
ggcacgaggggagtcgaagcgagggtctgaagttcacgactactagaaggggaggggagtggaaaggctctcaatgaaaaatgtatggaacccttcagatcaaagcttaccaatagattcagtatgtaaaacagattaacgaaactgaaatgaggaacaatgagagttatctcaaccatacatcactcactattaccattcacacgctttgcctaatgggaagctacctagagcacttccaaaaccaatgtaaaggccgggcacggaggctcatgcctgtaatcccagcactttgggaggccaaggcaggcagatcacctgatgtcaggagttcgaaaccagcc

SEQ ID NO: 105431 - DNA, 968 bp, Homo sapiens
  misc_feature (1)...(968): n = a,t,c or g
ggcacgagattggcttgttttacaagtcagctttccttgttaatgagctttgcttgttgctcacagcttattgtccatgtagtgagtacagttgagaaatctggctgttatttatgacaggggtacccaatccctgggccatggactgataccagtctgtgccctgttaggaactgggttgcacagcaggaggtgagtggcgggagagcgagcaaagctatagctgtatttacatcagctcccatcactcccattaccgcttgatttccatcttttgtctgatcagattctcacaggagcacaaaccttattgtgaactgcacatgcgggggatttaggtttcacactccttatgagaatctaatgcctcatgatctgtcactgtcttccgtcaccctcagatgagactgtctagttgcagaaaagcaaactcatggctccaactgattctacattatggtgagttgtataattatttaattctatattacaatgtaatattaatagaaaataagtgcccattaaatgggatgcgcttgaatattcccaaacccttttcccgccaggtccatggaaaaggtctttttcatggaaccagtcccttggtggcctaaaaggggtggagaatgggtgattttatgaccttatttaggccgatttatggggcccaaaattggcccgaccctggggccagggttttgcattgggccaaggggttaacccggaaaggccccttttgggccttancgagagctcaaggtcctcgctggatactaaaaatcccgttttcttctcctttccgtctcttccccctcattccactcgtttttttgtataattccccccctttgttcccccccttcccccgaaccaacgccacaaacaactccccttttcccccccccctccctcccccccttcccttctctcctccccctcctccctccccctcccgccccccgccctct

SEQ ID NO: 105432 - DNA, 1000 bp, Homo sapiens
ggcacgagggtgattggccttgatagaacatttggaaaatctgagcatttcttgcaattcagaagaggaaaatataagaaactgtagttttctagctgttgcttgtaagtttcaatgtgaagttaaaataatgtcattatgaaggtatttttttccctgagtatctctagttttatggttaaaccataaataatctttcatagttttatgggtaaaccatctcaaattagttgtttttttttttttaaattctgactacaaagactgaaaagagaaaaattatttttttattggtttggttttttgagacaatgtttgctctggggcccaggctggagtgcagggccccaatctgggctaagggcagccttaatctcccaggttaaagggatcctccggactttgcctcctaagaacctgggactacgggtccgtgccaccacttcagttaattttttggaaactttgcgtaacccattgtaatcgaaaaaaaaagggttgttttttagggccccgttcatgggccgattggcaccctgtccacccaacagttctaagggagccataggaccccctaagcttatgggggacaccgagtgtttccaaggccgcccggccataactcccgggtttaaattttggggttcttaagacttaaactactttatgcccctttcgactcattagttccggagccgaatatctttttttttcctcttttttatatgatgaatggatggattatattagtattaggtagtggagttagtgtggtattgttgtttattttcccccttttttcccctcccctcccctcctctcttcccccccccgcccccctcccccccacactcctttccccccccctctcccttccgcccccccctccctctcgcccccacgcgccccccccctcccttctccttgttccaggcaccgcctctcctcccctctttctgctcccctcccccccccccccccccctccctttcttttctcc

SEQ ID NO: 105433 - DNA, 361 bp, Homo sapiens
ggcacgaggaagagaccagcatgttaaatcattggggatatttattaaagtttgaaggtctgatgcagtctgattgcagtgaggacttaaatttatgctgtcatagagactattgactaatcctcaaataaatataattacttcgatgtgtttttttgaatgaaaatatatatagtgtcattctttatttgtgctgtgtgtatgcccaactaacagctgtgaagtatgtacaaacttttcatttatccaatatgagtgttttggaattttaacctaaacactcctattttttttttttttttttgaaatggagtctcactttgtcgccagggctgaagtgcagtggcgtgatcttggctca

SEQ ID NO: 105434 - DNA, 454 bp, Homo sapiens
ggcacgagtgaagccttcttctctcagctcgtcaaagtcattctccatccagctttgttccgttgctggtgaggaactgcgttcctttggaggaggagaggtgctctgctttttagagtttccagtttttctgctctgttttttccccatctttgtggttttatctacttttggtctttgatgatggtgatgtacagatgggtttttggtgtggatgtcctttctgtttgttagttttccttctaacagacaggaccctcagctgcaggtctgttggagtacccagccgtgtgaggtgtcagtctgcccctgctggggggtgcctcccagttaggctgctcgggggtcaggggacagggacccacttgaggaggcagtctgcccgttctcagatctccagctgcgtgctgggagaaccagtgctctcttcaaagctgtcagacagggacattta

SEQ ID NO: 105435 - DNA, 343 bp, Homo sapiens
  misc_feature (1)...(343): n = a,t,c or g
ggcacgagcgcaccactgcactccagcttgggcgacagagcaagactccgtctcaaaaaaaaaaaaaaggttttttaaacggggaaacccattgacggggaaactccttgggcaaaaaaaaaatcccaaaggggaggtcttaaaaacttcttgccagcatggggggggacttggttcttttgcaaattttgtttatggaaggggaaagggttttaagcaaagcccgtcaggaccccaggggacacattttgaaaatgacagatttaaaaatttgaaaaaggcaaatccattcttttttaaagagtttctgaaaaccaaaaacctgggcctttcgaaagaggan

SEQ ID NO: 105436 - DNA, 462 bp, Homo sapiens
  misc_feature (1)...(462): n = a,t,c or g
ggcacgaggtgagccaagatcatgccactgcactccagcctgggcaacagagcaagactctgtctgaaaaaaaaagaaaaaacccacacaccccccctttgaaacttgaaagggggggacactgggatcataaacagagggcttaaattccaggaggggggttcctccaggggaaaatgaaagggagctctcactctgttttaacgtatgcccaaggctctaaatgggggcacagggttttgcaaaaggataagggaaataattgaaagtaatgaaaatgaacccaaatctctttccccaaaaccttaaaaaacctgattcaaaagtcccccaaaaatatgcaaagaaaggggaatcacatcaccagatgatgggataaaaaacatgtggaatgtatacataggggaatactattcagccactaaaaagatggaaaccatgttttttgcacaccctggaggn

SEQ ID NO: 105437 - DNA, 331 bp, Homo sapiens
ggcacgaggccgagatcgcaccactgcactccagcctgggcaacagagtgagactctgtctcaaaacaaaaaaaaaaaaaaaaaaaaaaaaaatgtaaaaaaaggcctttaaagaaaaacctttaaaaaaaaaccaaatttaaaaagagggaaaaccatggaacctttaatgggttgggaatttaaactataatttaagggcttaaaaaagttagcctctgaaaaagggattccaacccaataggggaaattcaaaaccctgacctttgcctttgccccggaaaacggaattttgccttttccaaacccggttaaatctccaatccatgcg

SEQ ID NO: 105438 - DNA, 339 bp, Homo sapiens
  misc_feature (1)...(339): n = a,t,c or g
ggcacgagggaggttgcagtgaaccaagatcacaacactactttccagactgggtgacagaataaggcacctcaaaaaaaaaacaaaaaaacaaaaaactatcaattgttgagttcaggaactttgcattttatattttccttcaccaaagtcattacaagttttttttttttcccttccttcaagaaaaactaacttgggctaaaacttactaaaaatgttttaaggtgggtaaagtctataaacttaacagggaaaccttttatttggcacaaaatttctttgaccggaattgggcgacccagaaaatggttgtaaaaactcttttagagctaatcn

SEQ ID NO: 105439 - DNA, 340 bp, Homo sapiens
tggcacgagtctttggagaaatgactgttcaagtcctttgtgcattttggaattgtgctgggtgtctttatgttgctgagttgtacgatattgttatatatttatatattttggatactagttcctaaccacagatatgatttgcaaaacattaaaataaattatatgctgtgtttctattcctactaggtcagctatcacattgaaatgagcttctttgaagtatataatgaaaaaattcacgaccttctggtttgtaaagatgaaaatgggcagagaaagcaaccagtaagattaaaacaatttattatttgttttgaatttctgttcttataaatgg

SEQ ID NO: 105440 - DNA, 352 bp, Homo sapiens
  misc_feature (1)...(352): n = a,t,c or g
ggcacgagggaaaggaagtggcttcaggtcagttatttagcatggcagagccagagctatgagctgtaagatctttcttgcactcagttctctttttcacatcctagtggtgccttttttctcttgtattgagagttactatttcacgtattcatgagccacgtgtgagtgcgttacatgcatagaacatggaatgatcaaggcagggtacgtggggtatccatggccttgagtgtttttttgtttgtttgtttgttttgttttttgagacagagtctcactttgtccccaggctggaatgcagtggcgccatctcggctcactgcaccctccaccttccaggagaattggn

SEQ ID NO: 105441 - DNA, 371 bp, Homo sapiens
ggcacgaggccaagactgcgccattgcactccagcctgggccacagagtgagactccgtctcaaaaaaaaaaaaaaaaaaaaaaaaaaattttgccaaaaattttaaaaaaaccttttttaaaaaaaaccccaacgggaaaaaaaaaaatttttttccacggtttataaaaaagccaatttgaaaggcttccccccaccccgaaaaaggttttctacaaaatgggggaaccccctggattgaaactttggaaaaaaacccgggcaaaaccaaattaccctgggggaatcccttttttttaaaaaccaaaaccggccaaaaggcccggggggcaaatggggtaaaaacttgaatccccaactttttgggagg

SEQ ID NO: 105442 - DNA, 336 bp, Homo sapiens
ggcacgagtgcagtgagccaagatcgcaccactgcattccagcctgggcgacagagcgagactccgtcaaaaaaaaaaaggtatgtaaagtttttgaaatttgtaaatcctcaccaaatttcactataatatttttaaccatactgttccaatccaaagggaagccctttttttagggtgaccaaaaggggttttttgttgaggaggaatttggaaaagctcttcatatttatttaaaggaccattgggtaagttatctcttacattggattaaacccggttccatccaaaaattttactaagggaatttaaatcaaaaaaaaaaaatggccctgg

SEQ ID NO: 105443 - DNA, 375 bp, Homo sapiens
  misc_feature (1)...(375): n = a,t,c or g
ggcacgagattagagttgcatgctgaactagctgcttttttatggaatactattttacctgaagaacaactgacaaattacagttgttcacacttgggtatttggcagtcattttcttgagaatgagtaaagcaaacctgtcacataaaacaagtgacagtatttgttgccagtgataaagtttaagctttctagtgaaaaacagaattttggaaaacttgtattcatgtgcttgatagcttcccaatacttagtcttttctgaagattggtaatattaacaactgacatttaaaaaatattttttaggctgggcgcggtggctcacgcctgtaatcccagcactttgggaggccaaggcaggtagatcacctgn

SEQ ID NO: 105444 - DNA, 356 bp, Homo sapiens
gaactaagtcgtttcgaggccagacgttcagctcgcattcctgcgcacatagcgggaaccccacagggccagggatttgagggctggaaacttggggctatggcgcgcggacctgggaaactttgggcggcgcgaccttgactagaagtgtggggcccttatcgctgagattgaggtcccccttttctctgagctgcgtgacttcctgttggcctacagtcggatgactgaactctgctttaagcgctgtgtgcccagtttgcaccaccgagctttggacgctgtggacgatgattgtctgcacagttgtagctgtactgattatcctataaatcgctcgctcatgaacgcttacg

SEQ ID NO: 105445 - DNA, 433 bp, Homo sapiens
ggcacgagtggcattgctgtaacctgggaggtggaggcttcagtgaactgagatcgcaccactgcactccagcctgggagacagagcgatactccatctcaatcaaccaattaaaaaactcacataaaattgacagtcactgaactttgttcatttctgtatctaccatatgtattaatcgttatcactttctatgtgccagacacttacaaaaaccaggtgaaataggtgctattgatttcattttgtatttaagaaatctatacattctaaacctgcttgttgaaaacgtaaaggaataacaagcataaatctccaatgttaacattagctggtaaataagaggtcttacatggatattatccaggtttggtaacagaacagaaaaggtactatgggattgtattctgtaatgggtaaagcagcacagcat

SEQ ID NO: 105446 - DNA, 361 bp, Homo sapiens
ggcacgagttcttgcagtgcctttggctgtcatatctggtcccttttagagtagtctggtgcttgctgggtttctttgcttctcttgagctcacttcccccatgtccccaaaggctccattgctccttagtgcaaaaaaatgattctctttgataggaaacagaggtgaaaaggcctgagggaattctgctttctctgttacctccaacctgacccctcaggcccaaagaagcctagctttttctttgttcttgttgcaaatataatgctttttaaattgtccttcggggggcgatgtggctcacgcctgtaatcccaacactttgggaggctgaggagggcggatcacctgaggtcagga

SEQ ID NO: 105447 - DNA, 348 bp, Homo sapiens
ggcacgaggccaaaaaagcattcgctatcaaaatgaaatttttttttttttgagacaagagttttgctctttttgcccaggctgaagtgcaatggcgtggtcttggctcactgcaagctccacttcctgggttcaagcgattctcctgcctaagctacttggaaagctgaggcaggagaattactggaacccggtaggcggaggctgcacagtgagccaagattgcaccactgcactccaggctgggcaacaaagtgtgactccgtctcaaaaaaaccaaaaccaaaaacaacttatccctcctccacagactcctccctggtcaccactagggatccaccttatgga

SEQ ID NO: 105448 - DNA, 342 bp, Homo sapiens
ggcacgagactccccgaaccactcacggtcctgtggacagctcacctaggggcaatggctccaggctcccgaacgtccctgctcctggcttttgccctgctctgcctgccctgtcttcaagaggctgctgccgtccaaaccgctcctgtatccaggctttttgaccacgctatgctgcaagcccatcgcgcgcaccagctggccattgacacctaccaggagtctgaagaaacctatatcccaaaggaccataagtattcattactgcatgactcccagacctgcttcaggttctcagactctattccgacaccctacaacatggaggacacgcaacacaaa

SEQ ID NO: 105449 - DNA, 332 bp, Homo sapiens
ggcacgaggctctataaatgtagtcacacaaaaacgtgctcctcacatggtaaaagaaaaataaaatgaaacaaataggtgagtgcaaaataattgcagtttttgaattgttggaatttgctgtataatactggaatacattcttaaataaatgtggttatgttatacatcattttaatggacatttctcgctttatgtttgctaatgacttatcacttgctgtttattttatgtgtatttaaactatagaaatgatgttagacataaagcaaattcaagtgattttcttattcgagttcaaaatgggtcgtaaaatagcagagacaactcc

SEQ ID NO: 105450 - DNA, 340 bp, Homo sapiens
  misc_feature (1)...(340): n = a,t,c or g
ggcacgagagtagtcacaatctgtcaggtacagcttcatgcttatgcacattttctttatttttttgagatggaggctcgctctgtcgcccaggctggagtgcggtggtgcgatcttggctcactgcaacctccacctccggggnnnnnnnnnnnnnnnnnnnnnnnnnnnnnnnnnnnnnnnnnnnnnnnnnnnnnnnnnnnnnnnnnnnnnnnnnnnnnnnnnnnnnnnnnnnnnnnnnnnnnnnnnnnnnnnnnnnnnnnnnnnnnnnnnnnnnnnnnnnnnnnnnnnnnnnnnnnnnnnnnnnnnnnnnnnnnnnnnnnnnnnnnnnnnnnnnnnn

SEQ ID NO: 105451 - DNA, 394 bp, Homo sapiens
cagcactgctcaggcaatcctctcacctcagcctcatgagtagctgggaccatagttggacaccactacactgaggtcttttggtttttttttcttacttttttttttggtggtggtggtttagtttaagcagcaccttgcgaaaaggtatctttaaaattcaccccagtttaaaggagggtaagatataatttaggggttttataaggaaacggcttctcagaatattttgtaaagggcaagaatcacgttttctatttcatgtgtcctttaacagttctaataagcaattaatgtttattatgattgaggtatgctgggtgcagtggctcatgcctgtaatcccagcactttgggaggcctaggtgggtggatcacctgcagtcaggagttc

SEQ ID NO: 105452 - DNA, 346 bp, Homo sapiens
ggcacgaggtggacccgggaggcggagcttgcagcaagccgagatagtgccactgcactccagcctgggagacagagcgagactccgtctcaaaaaaaaaaaaaaaaaaagttctaactgaaggtggaacttaacccctcaaaatacgaaaattgcaaaaaacgctgaggcataccggtaatttgaactagtgtgaaacccgtgctgttcgaaaagctggggctgaacacggggcctttcgtttaaacggtgaaataacctttttgtcttaaaaactggacaacaggaacgaaactaaaggggaggacccacgcaaactgcctttttgggcaacacaaccaaagga

SEQ ID NO: 105453 - DNA, 320 bp, Homo sapiens
gaataatgatgtatgctttgtttctgttgagtgtgggtttagtaatggggtttgtggggttttcttctaagccttctcctatttatgggggtttagtattgattgttagcggtgtggtcgggtgtgttattattctgaattttgggggaggttatatgggtttaatagtttttttaatttatttagggggaatgatggttgtctttggatatactacagcgatggctattgaggagtatcctgaggcatgggggtcaggggttgaggtcttggtgagtgttttagtggggttagcgatggaggtaggattggtgctgtgg

SEQ ID NO: 105454 - DNA, 391 bp, Homo sapiens
agaatgaagactattctcagcaatcagactgtcgacattccagaaaatgtcgacattactctgaagggacgcacaggtatcgtgaagggccccagaggaaccctgcggagggacttcaatcacatcaatgtagaactcagccttcttggaaagaaaaaaaagaggctccgggttgacaaatggaggggtaacacaaaggaactgtctaccgatcggactatgtgcattcactgtcacaacatgatcatggtagttatccatgtatggtaatgcattgctatgctggtctagtcgatcatgagtattcttcgagatggagttttactcttgttgcttaggtaggagacatgcttgagccccggaggcagtatgtggcaggacccgggatcgg

SEQ ID NO: 105455 - DNA, 309 bp, Homo sapiens
ataagattacttcttttttagatgggtcacattggcataaagaaatgctactgacttctggatgttaattttgtatcctgcaactttactgaatttgtttataagttctaatttcttttgtggagcttttcctttttttcatttttattccttttttgagataaggtctcattctgttgcccatgctggaatgcagtgacaggatctcagctcactgtagcctctacctactgggctcatatgatccttctgactcaggctctcatgtagctgggactacaggcacatgtcactatgcctggctaagag

SEQ ID NO: 105456 - DNA, 314 bp, Homo sapiens
ccaaaatgccagctgcttttgttggtgttgctgttgttgcagaaattggtgacctgatcctaaaattcatataagaatggaagggatccacaacagtgaaaaagttggaggactcacgcttctgattttaaaacttactacaaatctacaataatcaagatagtatataccggcctaataataggtaaatcaatagaataaaactgagggtcaagaaataaactctcgggccaggcgcagtggctcacgcctgtaatcccagcactttgggaggccgaagtgggtggatcacctgagatcaggagttcgagacc

SEQ ID NO: 105457 - DNA, 294 bp, Homo sapiens
cgtgaacctgggaggcggagcttgcagtgagccgagattgcactgcactctagcctgggcgacagagtgagactctgtctcaaaaaaaaaaaaaaattttttttaatagttaaatctcattgtcttctcataaaagggggggtttcttaaatacatgcattaaagttcatttgtcgttaaacaaagcccatttttgccattaaatccctaaatttaggaaaaaggggctttttacaaaataaaaaaaggaatcctggaaaggctacagtcaatataaagcgcgacgcggccgca

SEQ ID NO: 105458 - DNA, 289 bp, Homo sapiens
gtttgcagtaagccgagatcacaccactgcactccagccttggtgagagagcgagattccgtctttaaaaaaaaaaaaaaaggctttttgcagtaacttgaatggagctggagggcattattttaagtaaagaaatacaggaggggaaaacaaaaatttgtatattctcacttataagtgaaagctaatttatgggccccctggctaacacctgtaatcccattttgggaggccaaggggggcggatcacctgattccgggatttccgagagcagcctgaccaacttgg

SEQ ID NO: 105459 - DNA, 273 bp, Homo sapiens
aaacaattaccggtgaactttctgaactgggttagattagaactcactggcttattgtgcactttgaatttatcaaaaccatgtatgatttttataatattggtcatagtaaaatactggtttcttttattctgcaatatttttaaaaatcacattttcagccaggcgcagtggcccacgcctgtgatcccggcactttgggaggctgacatgggtggatctcatggatactggatcacaaccatcgtggacttcatgtgtgcaaccctgact

SEQ ID NO: 105460 - DNA, 356 bp, Homo sapiens
cacgaagcggacattgcagtgagccaggattgtgccactgtactctagcctgggcaacagagcgagactctgtctcaaaaaaaaaaaaaaaaaaaaaaaaaacaaccaacagggctttagggaattatggaatcgggaaaaaaagggaaaaaattagggggaaacctgatgttaagggtggttttttcctggggaacttttgaaagtcccaaaaaagctagctgaaaacctaaggggcttttttaaagggctaaaggggtttggaggccaaatttaaagcccaaaaaccccccaggggttggaaaaattgggaaaacttaaagccctttttggaggaatataccatttttatgggc

SEQ ID NO: 105461 - DNA, 314 bp, Homo sapiens
gtgagccgggagtgtgcctctgccgtccagcctgagcaacagagtgagaattccccaggagtgcagaggttctcagaactgcaatactctgagatgaattttgaaagctcaagcaacagtggggatcagcatcaacttggattcgccttttacaagtccacctctcagagaagaaataatggcaaataacttttccttggagagtcataacatatcactgactgaacattctagtatgccagtagaaaacaatatcactttagaaaggccttctaatgtaaatctcacatgccagttcacaacatctggggatt

SEQ ID NO: 105462 - DNA, 309 bp, Homo sapiens
ggtttcaccatgttgggcaggctggtctcgaactcttgacctcaggtgatctgcccaccttggcctcccaaagtgctgggattacaggaatgagccactgtgcctggcccactgcaattgactttttttttttttttttttttttttttgaaaaggattttttttttaacccccggggtggatgcccttggggaaaatttgggcattgtaagcctttttcccccgttttatagaaaatgtccggccaaaatttaccggagacttgttactacgaccgtctacaaattggcccattaaatttttttattt

SEQ ID NO: 105463 - DNA, 372 bp, Homo sapiens
gccgaggtcgcaccatcgcactccagcctgggaaacagagtgagactctgtctcaaaaaaaaaaaaaattaccaggaggacccctgattggaaaaccccaggttttgcttccaattaggggaaaaaagggccttttaaaatccctgacagttttaagggctgaaagtgggtattggccaatggctggaaaccactgggggataattttggggtcttgggttttttaaggctttcggttaaattcgggccttacggaaatcccttttttttggcagcaataacaaaaccttctttttaaaaatttacactcctgacctggcgcggggctaacccggggctaatgcttgtaatcccagcactttgggaggctga

SEQ ID NO: 105464 - DNA, 278 bp, Homo sapiens
ctcagtgatcctcctacctgcacctcctgggactgcaggtgcgcgccaccaggcccggctactttttgtattttttgcagagacagggttttgccatgttgcctgggctggtcttgaactcctactcttgagctcagatggtttcctcaccttggcctgtcaaagtgctaaagtgctaggattacaggtgtgagccactgtgctcggccaagacctgtagtttctgtacctttttaatttatttttatttatttatttatttattttttttgagacag

SEQ ID NO: 105465 - DNA, 305 bp, Homo sapiens
  misc_feature (1)...(305): n = a,t,c or g
ctctcttcagtttttctttttcttctttagatggagttttgttcttgttgcccaggctggagtgcagtggcatgatcttggctcaccacaacctccgcctcctgggttcaagcactctcctgcctcagcctcccaagtagccgggcgtggtggcaggtgaatcttgtggtcttgcagtataaactaactagaattcccaatcaggagcagttccatataggtggagagaagtcaggatacgaagacagaataaaagcaactactccaaacagccttctctcacactcacaggcttcttaggcatn

SEQ ID NO: 105466 - DNA, 240 bp, Homo sapiens
ttttaaaattatatggggtacaatgtttaaatttgttggaacctcaggcataagtataatttgagtatttattaagtccacgaggtttctcaattggtgcattttggcaaatgttaaagttaatttagagctttcagttctggccaggcgtggtggctcacgcctgtaatcccagcactttgggaggccgagacaggcggatcacttgaggccaggagttctagaccagactggcgaact

SEQ ID NO: 105467 - DNA, 317 bp, Homo sapiens
  misc_feature (1)...(317): n = a,t,c or g
ctcaggaggctgaggcacaagaatcgcttgagcccgggaggcagaggttgcagtgaggcaaggttacgccactgcactccagcctaggtgacagagtaaaactatctgaaaaataaaaataaaacagcacttgtcaaacattagtgttcataaaagttacctggagttcatgtcgacgcnnnnnnnnnnnnnnnnnnnnnnnnnnnnnnnnnnnnnnnnnnnnnnnnnnnnnnnnnnnnnnnnnnnnnnnnnnnnnnnnnnnnnnnnnnnnnnnnnnnnnnnnnnnnnnnnnnnnnnnnnnnnnnnnnnnnnnnnnn

SEQ ID NO: 105468 - DNA, 301 bp, Homo sapiens
cggggccgcgtcgaccttgaacacgggaggcggaggttgcagtgagccgagatggagccactgcactccagcctgggcaacagagcaaaattctggctcaaaaaaaaaaaagaaaaagaaacaaagaaaagaatttttataaccccatttttctgggaaaaaaaacccttaggccgaacccatacccttgtgcgggttttaaaaaaacttttggggttttaaaaacccagggggatgataagctttaaaaatccgtggaatatgcggtttaaaaaaaggcggacttgtgaaattatagggc

SEQ ID NO: 105469 - DNA, 363 bp, Homo sapiens
ggcacgaggatctttatggctcctcacccacacacacacacacggcacacacgcacacacacacacacacacacaggtgttctcaatccgatctagggccatggacatgccactctcaggggtctgtgtgttctgtcactttttttccatatcccagccccatctgtgagtggcaccagtgatgctgaagagtgctgtctgtgtgtgatctatagactcatctgtgggtacattagtaggaattgtctctattttagtgatcatagatgaatatggcccgcgaggtgtataaaaagttctatggtgtttgttttcacgctatatactccttgagggtttataacttgtccctaggtattcact

SEQ ID NO: 105470 - DNA, 292 bp, Homo sapiens
ctccccgaaccactcagggtcctgtggacagctcacctacaggcaatggctccacgctcccggacgaccctgctcctggcttttgccctgctctgcctgccctggcttcaagaggctggtgccgaccaaaccgttccgttatccaggctttttgaccacgctatgctccacgcccatcgcgcgcaccagctggccattgacacctaccaggagtttgaacaaacctatatcccagaggaccagaagtattcattcctgcatgactcccagacctacttctgcttctcagact

SEQ ID NO: 105471 - DNA, 365 bp, Homo sapiens
  misc_feature (1)...(365): n = a,t,c or g
ggcacgaggtctcaggtgatctgcccgcctcagcctcccaaagtgctaggattacaggcgtgagccaccatgcccagcccatctggtatttttaaaaaactcaaaatatagggtacaaaattcatcttaagtgcttggtacatctttagcttggtaggtctctgacatagagtttaatagagatttttttagtattgagaacccatttgtccccacagacatattttctgcgtgtgattgctctgtgtgtatgtgaatttttaatttctttcttagatgagaggcattagtctgtttttgagcttatgccatcttcttggaattaagatttagctacagaagtttgtattcttattaatgcaggn

SEQ ID NO: 105472 - DNA, 375 bp, Homo sapiens
ggcacgagcaaaaggcagacattgcagtgagccaagatcgcacccttacacttgagcctgggcgaccgagactccgtctcaaaaaaaaaaaaaaaaaaccctggggtgggggcttgcacttgaagcctaagtcctaaggggggttaaggcggaaggatggttaaacccgggagggttaaagttgttggaacctggaatggccccagggaactcaacccggggcaataaggcagaacttggtttaaaaaaaaaaaaatggaccttgagggaatggggaacaaaggccagggtaaagaaaaggggccagggtggccctaataggggaatccgtgccaaagtttggaaccaggtgaggaaccttgcccaggtcttgag

SEQ ID NO: 105473 - DNA, 358 bp, Homo sapiens
ggcacgaggacggattttcgctcgtcacccacactggagtgcaatggcgcgatctcggctcactgcaacctccgactcttgcgttcaaaccattctcctgcctcaccctcccgatcagctgtgaggccgatttgtgcctatcacaaggtcgacagttcattaccagcctgaccagcacggtgactccccatctccaccatgttcactgcaatgagctgtttgtgatggctctctcctgtacccccactcactcagaaggctgatgctagagaatctcctgaccctgtcatgctatgtcgccatgagcctatacactccactgctaccagtctcttgacacttataccccttctcaccg

SEQ ID NO: 105474 - DNA, 357 bp, Homo sapiens
ggcacgagcacacctgtaatctcagcactttgggaggctgaggtgagaggagtggcttgagcccaggagttcaagatgagcctgggcaacatagtggtacctcatctctacaaaaaattttaaaattagctgggcatggtggcacgtgcccgtagtcctgtgtcaggctaagtctcactaatgcaggcctccataacagctgtttcaatactgactgactggctaagtgacatactaacatttaaacaatgcactactagtagtaatggctatatgtgaatctaacagtatcaaaagtgatggcttacatttataagttctttcaatcataaatttctcgaatttatttgctctgcg

SEQ ID NO: 105475 - DNA, 347 bp, Homo sapiens
ggcacgaggttcatcagttgtaatagatttttgctgcagtctttacgtttttccaagttaaagatcatatcatctgtaaacaaggataattgcacttcttcctttccaatttggataccttgtatttccttctcttggctgattgccctaactaggacttccattgccgagttgaataacatcggtgaaagtgggcagtgtctggccatggtggatcatgcctgcaatccgacatcttctgtaggctgacgcgggagaattgcttgaagccaggagtccaatgtcagcctgtggaacatggctcacccctgtctctacataatgtatcaggaaacgggagggagccc

SEQ ID NO: 105476 - DNA, 463 bp, Homo sapiens
ggcacgagactggagaatcacttgaacctgggaggcagaggttgaagtgagccgagatcgcgccactgcactccagcctggctacaatgcgagactccgtctcaaaaaaaaaaaaacccaaaaagaagggccttttgggggaagggttctgaggaaccttaagggagggtttttccaatttccccaaaacctcatttaatccaaaaaaatatccttatggactttcttaaaaatttaataaaaaaaccaattaattccacacccatttaccattttcttttttaaacctcaaaattaattggaaatttccctggggaaaatttttcggaaattccattttggggaatatttttaaaaatggctagccctattcctttggccttttaaaattaaatttcccatctaagtaaatatggcggttttaattccctcattctcggatatgggacaagttattgccaag

SEQ ID NO: 105477 - DNA, 378 bp, Homo sapiens
ggcacgagccgtgtgaatgaaactgagtaatagaaggctcatggccagtagtcgtagctactagggagactgaggcaggaggatcacttgagcctaggaagttgaggctgcagtgagctgtgattgtgccactgcatttcagcctgatgacagcaagaccctgtctcaaaaaaaaaaaaaaaaaggaaaaaaaagggaacccgggcccccattaggcccattttttaaaaaacctgaggcggaaggattgtttgaccttaggagtccaggtttaccctaggcaacttatggaaaccttgtcttttaaaaatatccctataatttttaaaaatcctttaatttttacataaagggaaacggggtttcattgtgtggccg

SEQ ID NO: 105478 - DNA, 376 bp, Homo sapiens
ggcacgagaggttgcagtgagccgagatcacgccactgcactccagcctgggcaggagcgactctgtctcaaaaaaaaaaaaaaatttagtagggttttcacccatgataaaaaatctttaaatggatcaaagcccacattgaggcatcatatcccaggatcggaggcccttacccactggccttttaggcaggagctccacccgaaattgcccctgctctgtcctggaagcacagtttaggccaaactcttgtaaaccatgttaatcctgtaaatgagaattctgttgacattgacctatccgtgataaggtgcgcctgtaataaccatacctttcccaaaccttaagaggaatactttggggccctttcttacg

SEQ ID NO: 105479 - DNA, 356 bp, Homo sapiens
ggcacgagcaatgctctaagacagaggccagaagcaagggccaggtggtccgagtggggcctcatgtcgtgccctttttctagctgtgtggacttaaagagctgcatgagctctttgaatctgttttgtcatttttaaaagggagtggcgggatgacaatttttaaactttttttaaaggaagtggctaatttttgtattttttgtatagaagggttcttgccatgctgcccaggctggtcttgaactcctgacctcaagcaatgctaagttctggcattacaggcatgagccaccatagctggcctacttttaaatgggatccaacttagatcagagggaatacccagactgtgg

SEQ ID NO: 105480 - DNA, 364 bp, Homo sapiens
  misc_feature (1)...(364): n = a,t,c or g
ggcacgaggcgcacccctgtagtcccagctacttgggaggctgaggcaggagaatcgcttgaacctggaaggcagtggcagaaggaagatcatgccactgcactccagcctgggcaacacagcaagcctgtctcaaaaaaatgaaggggatggggaggtgtggtggntcctgcctgttttnntantactcttttacgcttcggtgtgacacagtgacttacgcccgtgctcaacaataatcggcgttaactatgcaaacctcatagcaaaacccttgtgcggtgggccattatcttctgctgcttctgacacgatgagttatgagtatacaggtccctgcttgatgctcaggccaatatcgccg

SEQ ID NO: 105481 - DNA, 353 bp, Homo sapiens
ggcacgaggcagaggagtgagccgagatcgcaccactgcactccagtcttggcaacagagcgagactccgtctcaaaaaaaaaaaagaaaaaaagaaaatggcccacacccttacttcagggtactcacaggctgagggataaggaaaacccaagtaagactattacagggtcccaactgctgggggactccaaagcaggggtcagcacgccttttctgaatagggcctgatagtaaatattttcaactttgtgccaagtaatccctgtcgcaacaattcaattctgctgttatagcacaacagcagctgcagacgacatgcaaatgaaagcatgtgaggcatcaggactaac

SEQ ID NO: 105482 - DNA, 475 bp, Homo sapiens
aatacatcacgagcggcctgccttttattaaaaaccacattaattgccactgtatgttataaggcgggcatgacgcgaccaggacgagtaagaccctatggagctgtactaattattcgcgacagtgcctagcaaacccacaggccctatactaccaaacctgcattacaaatttgggatgtttgcgaactgagatcacatcccggcctccgagcagtacgtgctaagactttaccagtcttagcgaactactatactcaattgatccattaacttgaccaacggaacaagttaccctatggataacagcgcaatcctattctatagtccatatcaacaatagggtttacgacctccatgatcgcgaatcattcccgatggtgcagccgctattaaaggttcgtttgttcaacgattaaagtcctacgtgatctgagttcagaccggagtaatccaggtcggtttctatctactt

SEQ ID NO: 105483 - DNA, 331 bp, Homo sapiens
atgttggccatgctggtttcaaactcctaacctcaggtgatctgcctgcctcaacctctgaaagcactgggattacaggcatgagccaccacaccaatcctattacattcttaaaaaaatgtttgtttgtttgtttttgtagagatgaagaatcacctgaacccaggagatgaaggttgcagtaagccgagatcacgccactgcactccatcctgggcagcacagcaagactccatctcaaaatatatatgtatatatagatatctatatctagatatatatttgagcaaattagtggtcagactaagaataaaccaacttcccaacagtg

SEQ ID NO: 105484 - DNA, 358 bp, Homo sapiens
attacatgacctgtgactgtatcattaactgcttttgttttgcttctgtaagtttgcctataaaaaccacactcagtctttgttcaatggtcagcttttcagatacaaatccactgagccggtgtacatctaaataaatcctcctgtttcccgaaaaaaaaaaaaaaaaaaaaaaaaaaaaaaaaaaaaaaaaaaaaaaaaaaaaaaaaaaaaaaaaaaaaaaaaaaaaaaaaaaaaaggggggggcctttaaaaaaaaccccggggggggccccatttttccgggggggggaaaaaaaattctttttccttaaagggggggtattaaaaacccccgggggattttttggaaaaaacc

SEQ ID NO: 105485 - DNA, 402 bp, Homo sapiens
  misc_feature (1)...(402): n = a,t,c or g
cgctggccgtgtgacggctcgctgttgccctgaaggcaggcgagccagctgcccaggaaaggtggaaagtggtagaagctgacccctgagccctggcaggtctttaagtgcgtttgtgcagccgatttcaaggctaagagagaaagactgcctctgatccctgaaggaagnnnnnnnnnnnnnnnccgggaaaaaacctcaccttggaaaatgtccccagggaaaacaaagttggggaaaaggccccagggcaaaatgaaccccccgttttaggagggggggaataccaggaccctggaggaaatgttaagggggttgggcctccccctgccccgggttttggaaaggatgggcccaaaaggcttgccgatacctttgatttgatagagggagatggagatg

SEQ ID NO: 105486 - DNA, 376 bp, Homo sapiens
cttacacttaggagatttcaacttaacttgaccgctctgaccaaaaaaaaaaaaaaaaaaaaaaaaaaaaaaaaaaaaaaaaaaaaaaggggggccccttttaaaaaaccccctggggggccccatttttaccggggcccccaaattaaaatttttccccttaagggggggttttttaaacccccctggggattttttggaaaaacccttttttttggggggggaaaattttgggaaaaccccccccaaaaatttaaaccctttgggggaaaaaaaaatttttaagggtaaaagggggaaaaacccccttaaatccccggcttttaaaaattttttcttccggggttttttttaaaaaattttttccccccggggc

SEQ ID NO: 105487 - DNA, 255 bp, Homo sapiens
gagaaggcttagaagaaaaccccacaaaccccattactaaacccacactcaacagaaacaaagcatacggcattattctcgcgacggactacgaaccacgaccaatgatatgaaaaaccatcgttgtatttcaactacaagaacaccaaaaaaaaaaaaaaagggggggccgttttaaaggacccctgggggggccaaagtttacgcgggcttgcaacgtaaaagctttttccttatagggggccgtattataac

SEQ ID NO: 105488 - DNA, 363 bp, Homo sapiens
  misc_feature (1)...(363): n = a,t,c or g
atcgcgtacgcgtgatcgtacgcgtgagccttgacctgctgctaaaagaataagtaaagaagatagagcctgtcttaaatacctggaaggaacaacaaaataaccttaactacgatttgaaatgatcattccatgaactttcatcagacattttacttgacagtaaatgccatgtgaggacttatggagaaagcagccaccattggcaagccaagagagagccctcaccaggaacgattggaccagcaccttgatcttggatttcctagcctccagaactagatgacttacacaatgacgattgtacatgcactatgggcttctgtatgcctgctgcttaatcatgcccatgaccctcttaan

SEQ ID NO: 105489 - DNA, 329 bp, Homo sapiens
cagaaatgtactttctggggcataaagaaatcttgaggactgtgtttaaaccttccataaaaaaacaattttcggtttctcgggttctctctctctctctctctgtctctctgtctctctgtctctctagctctccccctatctctgtatctctctacttcactctctgtatattgcattcctgtccagttggaccacttgcccatgaatcttaatatcacagacagccctggttgtgcgctcatcactcactgttgcgctttgggtacactcatggtctctgtatctttgagaactataaacctctacggggacctggaacgggtagc

SEQ ID NO: 105490 - DNA, 333 bp, Homo sapiens
ttttcgacgtcttttagaactttgcttatcgttatgggtagatagatagatagatagatggatagatagatagatagatagatagatggatagatatagatatagtttctctgaaatttgctaggacaacggggtttgggggcaatgaaagaaggttttatatttatgtttaggatgatagggacattgagagatactgaacacaaatttataatgaagttaagtaatttaaaagggttttcctgtaatttttatatgatgccttatataatttgcatccacaggtataaaacattaattctatgtgcttaaacatttgcctatacattttaa

SEQ ID NO: 105491 - DNA, 357 bp, Homo sapiens
ggcacgagcttgaaaccaggatgcggaggttgcagtgagccgagatcacaccactgcactccagcctcatgacagggtgagactttgtctcaaaaaaaaaaaaaaaaaaattaatatcccccatttccatccaggttgttgaaaagcccataatctcattctttgtaacggccaactatatttccatttggatgtgtgtaattaatattattataattaaatatatttatcaataattttataatatatttacatccatattcttatatattaacctattattatatcacatatttcatcatatactcctaatctatacaataattaaattattacaaactcaaacttattaatccg

SEQ ID NO: 105492 - DNA, 403 bp, Homo sapiens
ggcacgagttcccaggagtccttcggcggctgttgtgtcagtggcctgatcgcgatggggacaaaggcgcaaggcgagaggaaactgttgtgcctcttcatattggcgatcctgttgtgctccctggcattgggcagtgttacagtgcactcttctgaacctgaagtcataattcctgagaataatcctgtgaagttgatctgtgctttctatgacttatccttcttctcctctagtttctcttatttttttcatttatctttctttatttattatccttattatttatttgtttcatgcttcactttttatattgttattcttctatcttttatttactctcatcatctctcttcagtgtcatattattcttatgtcttactcatatatacttttattttat

SEQ ID NO: 105493 - DNA, 398 bp, Homo sapiens
ggcacgagcagcgagagagaaggggccagggtataaaaagggcccacaagagaccagctccagcatcccaaggcccgactccccgcaccactcagggtcctgtggacagctcacctagcggcaatggctgcaggctcccggacgtccctgctcctggcttttgccctgctctgtctgccctggcttatatatgatggtgcctcccatatcgtatccctcttcatgctttttataatattttagctctctattctcttgtttctcttaattatgacttctcatctactttcggatgaatattctttcgatatttgatttcctttgattccttattcgacatttctttttcttatcgtatatgtcctcatatctttagattgtacttctcattgtcttgg

SEQ ID NO: 105494 - DNA, 299 bp, Homo sapiens
  misc_feature (1)...(299): n = a,t,c or g
ggcacgagtcagcacagagggaggaaagacagcagaactggcagtcacagtagctctgatcatcctggagctaagctcctctccacagaagagaagcaggcagcagagaccatgaggcccccctcagcccctccccgcagaggatgcatcccctggcaggggctcctgctcnnnnnnnnnnnnnnnnnnnnnnnnnnnnnnnnnnnnnnnnnnnnnnnnnnnnnnnnnnnnnnnnnnnnnnnnnnnnnnnnnnnnntggactgttggaaaaccattgttacattttgaaatgtgagaaa

SEQ ID NO: 105495 - DNA, 490 bp, Homo sapiens
  misc_feature (1)...(490): n = a,t,c or g
gtgtgtaaaattgaaatcgatatccctngcacattcaacttgcagatgactatacacacacacacacacacacacacacacacacacacacagttatatatattttttatatgatcacattcagcatgttgacaaggataaagagaactatgacccttaaacatgtcaggtagaacgtcaggtaaaatggcaaatgcaccatctttctgaaggtaacatgcctataagcatcaagaatcaagaaccttaataattttcagttcccttaaatttacttttaacttatttaaaaataattataatttttggaaattatttcaaggaattaagagagggatatgctttatgtgtatttctttcaaagtaattttttaaataaccagtaattatctggctttttcagagcactaagtgaatccccagcatatatgatgaacgcaattagcaaagctctgagttccccacagatgttggcccgtggtctgtgtat

SEQ ID NO: 105496 - DNA, 417 bp, Homo sapiens
tacgcaatccagccagttacacaaacataggtcatttcataacttgttttcatcagctgggctcccttttaatgaaaaaacaaaacaaaaacaagacctagaacttttccaaggctgctatttgtttctcagataacttgtgaaaataaatcaagggcagtatttcctttttggagttaaggaataccagactagcactcttcttcctcaaccaccccttcccaagacacacacacacacacacacacacacacacacacacacacacacacacacacaaaattccccagagagaacttttgccaagtgtaccagactgagacatttctcacatcagagaacttttaccagaagagactgagattcccaagctagcctcaaacatacctctatagcgctctatacgggaaatttaag

SEQ ID NO: 105497 - DNA, 344 bp, Homo sapiens
cttgaacccaggaggcagagactgcagtgaaccgagatcgcaccactgcactctagcctgggtgacagagtgagactccatctcaaaaaaaaaaaaaaagggaaaaggggaaaaaacaaacccgttttaccaaggttagaaaaaggttggccaacccgcccgaaatttccaaatttaggaatcgaaaaacctgaaaaacccggaaggtacattacactggggaatgggccaccatctaaatacttttaattaaaacacgcgttcgccttttttaaggaagcaatactcctctaggtttcaatatgggccatgaacccgggaattaataaaagtttaaaaaggcg

SEQ ID NO: 105498 - DNA, 380 bp, Homo sapiens
  misc_feature (1)...(380): n = a,t,c or g
caagatcatgccattgcactccagcctgggcaacagagcgagactctgtctcaaaaaaaaaaaaaaaaaaaaaaggggattttccttggtgaaaaacttttttttggaacttttttaagccaaaaaaagggggtaaaactgaaaaaaaaaaaacaattggcccgggaaaattggttttcccttttaattttttagcccctttattcaaaatatttattccctttaaagggcttcccaaagggggggcgggttggaaaaaacttaaaaattcccaagcccttttgagggtggaattctttttttggagaccaacttgttgaactaaaattatttttttccaatgttggaaaaaaattaacttttgcccacaaatggaggcn

SEQ ID NO: 105499 - DNA, 395 bp, Homo sapiens
cagggtttctccatgttgaggctggtctcgaactcctgacctcaggtgatctgcctgcctcagcctcccaaagtgctgggattataggcgtgagccaccgtgcctggctaattataaattcttttaaaggtactgattaaaatagttaaatggtagtaggttaataatttaaatttgttcagcagctctcatttttgcatttataacttcttgaaaaatgaggaagtgcatttgatttgttgtagatataaatactggtttaagatcaggaattctatttttctttcctctgagaaaggtgttctttgatgtacatctcttgcaactctgatacttggaagttggattttagaagctatttgaaacattaaaaatattaaaataatggtaatacg

SEQ ID NO: 105500 - DNA, 421 bp, Homo sapiens
tttcccacatagcactgattttttgtaatgctgcttgtatctggaatgtgttaatttgtttttgtttgttttgagacggagttttgctcttgtcgcctaggcggaggttgcagtgagccgagatcacgccactgcactcctgcctgggtgacagagtgaggctctgtctcaaaaaaaaaaaaaattgtcaaacagatccggatttgaattccaaagctggcccttatttatttacggtttgaccttgggcaaattaatggaatccctgcaaatgaaaataatgacccctgtctcataggattcaagataggtagggatttaaaatattttaagataatttatgtaaagggcttaccaaagtgcatggcataagggaaggcttttattatggatgtcgagtcgaacatttccaatttgcccg

SEQ ID NO: 105501 - DNA, 461 bp, Homo sapiens
cggacgcgtggggtcgagtagaaggaccgccgctccggcctcccgcgacttctcgaaggtgggcaggtcccaccttgtggaggatggaggtgaccggggacgccggggtaccagaatctggcgagatccggactctaaagccgtgtctgctgcgccgcaactacagccgcgaacagcacggcgtggccgtctcctgcctcgaagacctgaggagcaaggcctgtgacattctggccattgataagtccctgacaccagtcaccctggtcctggcagaggatggcaccatagtggatgatgacgattactttctgtgtctaccttccaatactaagtttgtggcaatggctattaatgagaaatgggcatacaacaattcaaatggaggtacaggttggatttcccaagagtcctttgatgtttttgaagcttacagtggggcaaccttgctgtttttcttc

SEQ ID NO: 105502 - DNA, 407 bp, Homo sapiens
tgaaaatttgatgctgaccctttcgttcttccatagtgggttataaattttagcagtcagtacaaactttttcctttaagttttgttttcttgatggactgtattcaaaataaatacctgaacaaataccaactatataacatgaagccataaaacttggtctttatatataaataaagtttatcttggggtcagatgtctgtgctgttttctatatttttttatatccaatagtttggtctttttcctttcagttttgtatgcttttcttgtaatcgagccttggaagagacagagccactgagcccaaaacctagctttgtggtcggctgtggtggctcatgcctgtaatcccagcactttgggaggctgaggcgggaggattgcttaaactcaggagtatgaga

SEQ ID NO: 105503 - DNA, 441 bp, Homo sapiens
atttatattgaattatgtacttttttcaataaagtcttatttttgtggcaaaaaaaaaaaaaaaaaaaaaaaaaaaaaggaaaaaaaaaaaaaaaaaaaaaagaaaaaaaaaaaaaaaaaaaaaaaaaaaaaaaaaaaaaaaaaaaaccccctaaaggggggaaaaataaacgcataccgggacccttttggaaaagaccccaaaattcgggggggaacaaaaggggacaaactcccctaaaaattttaaagcctctagggaaacaaaaaatttttaaggggaaaaaggggaaaaacaacctaaaaagccgtgcttctgaaaatttcgcaacacgatcttaaaataagaatattttttcccccggtctcaaagtttcccgcagcaaggatcggcatcaaaatagttcatcatacttatatttgaccccagtcctcaattag

SEQ ID NO: 105504 - DNA, 385 bp, Homo sapiens
gaggcacctcccagtagaggctgactgacacctcttatggccaggtgcccctctgagacaaagtttccagaggaacactcaggcagcaacatttgctgttctgcagcctccgctggtgacacccatgtaaatagggtctggagtggacctccagcaaactccaacagacctgcagctgagggtcctgaccgttagaagaaaaactaacaagcagaaaggacatccacaccaaaaccccatctgtacgtcaccatcaccaaagaccaaaggtaaataaaaccacaaagatggggagaaaccagagcagaaaagctgaaaagtctaaaaatcagagtgcctcttctcctccaaaggaatgcagctcctcaccagcaatggaacaaag

SEQ ID NO: 105505 - DNA, 442 bp, Homo sapiens
  misc_feature (1)...(442): n = a,t,c or g
atcggaggtctgagaatgtcgaattggaggcgctcccggagtggtgaagtgtgcttggtacatccacaaagactcacgcagaacttggttcctccccaagctgagtctccagcagtccacactgcaggccttatgagaacgttctataaccacccatctgtcactttttaacagacctgattggcaagcacttgtaacaactgacatctgttcatgcttattgatatgcagatttatggtaattgctatgaacaataagacacaaaattacctaaggtgaacattaaattaaattttcatgcccttaaaaaaaaaaaaaaaaaaaaaaaaaaaaaaaaaaaaaaaaaaaaaaaaaaaaaaaaaaaannnnnnnnnttaagggggggcttnggggggccactaattggcggccaaggaaaaaaatttttcctcttatattgtg

SEQ ID NO: 105506 - DNA, 402 bp, Homo sapiens
aatgtatcatcatgtaaacttgtaacagtcctctgaggagttggtgaaactctcccagttttaaatgtgaggatgctgagactctaaagggtacttatttcaaaaccagatagccagtacctgccagctttgagatgtgatcccaagtctgacatcaaaggctattcctatttactgtacaatttcattcattgatgtgaggtgaacggtacatgggggcttgatagcatctggcttttgtttgcttgtttgattgattgttagtgtgattgattttttgagatggagactccctctgctgcccaagcttgagtgcagtggcatgatctcggctcactgtaggcttcgcctaccgggttcataccattctccggcctcaggctgccagctactagggaggct

SEQ ID NO: 105507 - DNA, 427 bp, Homo sapiens
gcggaggttgcagtgagccgagatcacaccactgcacttcaggctgggcagcagagcgagactccatctcaagaaaaaaaaaaaggggaaggggtgggcgccaggccagctttaaaaaggccctgggggaaccctttaaagggctgggggggaaaaccccaaaaaaaacggggacggaggaaacctcctcgtaaaaaaatttttttcttggggaatttgtgttttaaagggccaataccctttttaatttttttcccccggaaaagaattttaacataattttggcggggggactgtttaaacaataacccttctttaaaagtggcccatgggaatttactacggccttcttaacaaatttttcaaaattgccccccaaagggggcccctaaccctgtatccattttaatacccaatccctgtggtt

SEQ ID NO: 105508 - DNA, 422 bp, Homo sapiens
tgagccaagatcacgccactgcactccagcctgggtgacagagcgggactctatctcaaaaaaaaaaaaaaaaaaggggaaaaaaaaaggtttttaaaatagaaacggccaaaaattattgaaaaaaaaaaaactttcgggaatggggaaaaacccggcccctggggctggaaaaaatccttgaaaatggctttgttctcccaagtttgggcccttcctttaataagttgattggcctatgaaaatgggaagggtggctgggttgcttccccacaaaattgtggagggaaccatggcttttggggtcttttaagccgggccattttattataaaatcacttttttaggcggaaccggggacctcaaaggggttccaaatccccctggggaaaccacctcttattgggttaataatttttata

SEQ ID NO: 105509 - DNA, 387 bp, Homo sapiens
  misc_feature (1)...(387): n = a,t,c or g
cggggtttcaccatgttggtcaagctggtctcgaactcctgacctcctgatctgcctcagcctcccaaagtgctggaattataggcgtgagccacgtaaggtctatcatttatttttctttaagttgcctatatcttctagctgtaactttaaaaagagttctttctaatgctttttttttttttacccccacccccccctttttttttttttttttttttgggaaagggccttttttttttcccccccgggggggggggagggggccaatttttttctattggacccccccccccccggggtaaaaaagatccccccccctcccccccaaaaatgggggggaaacggggaaccccccccccccccggttattttttttttttttgn

SEQ ID NO: 105510 - DNA, 369 bp, Homo sapiens
cccaacgtgttttccaatataccgcttaattctagtgatttcagaaagcttcacttctcagattcatataatttaaattggtttaaatatgtttatttcccatacagcactatggtggagattatggctccagaaaggtttggggacacatcggtagacttcagaagggtactaaaagaattagagtcattgttctaatgtaaatcattaaaaactatccctaaggtacactgaatttgttaacttacaaaataaaatcctggtcaggtgcagtggctcactataatcccagcactttgggaggctggggcaagtggataacttcaggtcaggaattcgagaccagcctggctaatgtggtgaaacccc

SEQ ID NO: 105511 - DNA, 372 bp, Homo sapiens
aataagttaacctttgaaaagattctcaacagtatggaggaagtacaaaataagtgctgaccaagattattagaatgatgtactgtatacttataaatctgtccatcaaaagtgaatggaatacacctggaacaaaatggcaatgtcatataatttgcacatttatcaaacatataaaaactcggtaatagaacaccctactggtgttctaccacacagtagggtgattatggttaacaatattgtgttgtgtatttcaaaacagctgaaggagctactcagaaggctgatgtgggaggagcatctgagccctggaggaggaggttgcagtgagccgagatcgcgccactgcactccagcctgggcaacaat

SEQ ID NO: 105512 - DNA, 410 bp, Homo sapiens
  misc_feature (1)...(410): n = a,t,c or g
attttttactctctctacaaggttttttcctagtgtccaaagagctgttcctctttggactaacagttaaatttacaaggggatttagagggttctgtgggcaaatttaaagttgaactaagattctatcttggacaaccagctatcaccctatagaagaactaatgttagtataagtaacatgaaaacattctcctccgcataagcctgcgtcagattaaaacactgaactgacaattaacagcccaatatctacaatcaaccaacangaaaaaaaaaaaaaaaaaaaaaaaagagaaaaaaaaaaaaaaaaaaaaaaaaaaaaaaaaaangggggggggggctctttaaaaaacctctgggggggccaaaattaccggggtggaggaataaatattttttttttttaa

SEQ ID NO: 105513 - DNA, 421 bp, Homo sapiens
  misc_feature (1)...(421): n = a,t,c or g
aaaaaatcccaaacatataactgaactcctcacacccaattggaccaatctatcaccctatagaagaactaatgttagtataagtaacatgaaaacattctcctccgcataagcctannaaaaaaaaaaaaaaaaaaaaaaaaaaaaaaaaaaaaaaaaaaaaaaaaaaaaaaaaaaaaaaaaggggggggggctttaaaaaaaaaccctgggggggccaaaaataaaggggggggaaaaaaaaaaatttttttttttaaagggggggaaaaaaaaaaccccgggggaatttttgaaaaaaaaactttttttgggggggggaaaattggggcaaacccccccaaaaaaaaaaaagccttgaaagaaaaaaaaaaattttaaaggggaaaggggggaaaaaaaagcgaaattgggggggggg

SEQ ID NO: 105514 - DNA, 424 bp, Homo sapiens
  misc_feature (1)...(424): n = a,t,c or g
atagacccctaacctgtttacgtgtttcctcccctctacaataaagtttctcaatacaattgccgganaaaaaaaaaaaaaaaaaaaaaaaaaaaaaaaaaaaaangggggggggccttttaaaaaaattctttggggggccaaattttaacggtgttaaaaaaaaaaaattttttttttttaagggggggaaaaaaaaaacacttggggaatttttgaaaaaaaactttttttttgggggggaaatttttgggacaaccctcctaaaaaaatttaagcttttggggaaaaaaaaaaattttaaggggtaaaaggggaaaaaaaaattttttttttttttttttagaaaatttttttttttgggtttattttaaaaaaaattttacccccgggtttttgtgtnnnnnccccnnnaacattccat

SEQ ID NO: 105515 - DNA, 443 bp, Homo sapiens
aaggggcatggagttttcatgccttctccagctatgccacgctctgggaacctgcatgtgttaatgttatccagaagcccacaaaacagtcctttagaatttttatggaaacttgtttacttaggaatgattgattaaatcattggccattggtttatcgactcaaccttcagctcctctccccttcctagaggttggagtaggaccgaaagtttcaaccctctaattatgattacaaacagaaaggaatagtaccaacatcaaagaccaaaggtagataagtccatgaagatggggagaaaccagcgcaaaaagtctgaaaattccaaaaaccagaacacctcttctcctccaaaggatcacaactcctcaccagcaaggcaacaaaactggatggagaatgagtttgacggattgacagaagtaggcttcagaaggtggga

SEQ ID NO: 105516 - DNA, 877 bp, Homo sapiens
gcgatctgcttacgccaatcttggtacgaggggcataaatattctaacggttaattttagacatctacttgactggattaagagacacacatagctggtcaaacatgatttcagccatgaatcaggcataaatattctgatggttaattgtagacatctacttgactggattgagagacacacatagctggtcaaacacgatttcagccatgaatcaggcataaatattctgatggttaattgtagacgtctacttgactggattgagagacacacatagctggtcaaacacgatttcagccatgaatcaggcataaatattctgatggttaatcgtagacatctacttgactggattgagagacacacatagctggtcaaacacgatttcagccatgaatcaggcataaatattctgatggttaatcgtagacgtctacttgactggattgagagacacacacagctggtcaaacacggatttctgggcatatctatgagggcgtttctggaagacactgagataaccatgacccaatgtggatgggcactgatatggtttggctgtgtccccacccagatcctcatctttgaattgtagtttcctgtaaatacctacatgtcgttgggagggaccccaatgggagggtgacctgaatcgtggtggtggttaccgccatgctgttctcattgacaagttgagttgaggttctcaatgatctgatgggtttttataagggggcttttcccctttgggtcagcacttcttgttgctgccatgtgaagagggattagctttgcttccccttctgccatgattgtgaggcccttgcagccatgtggaactgtcagcccattaaacccctttgttctttat

SEQ ID NO: 105517 - DNA, 414 bp, Homo sapiens
  misc_feature (1)...(414): n = a,t,c or g
tgtaaaccggagatgaaaacctttttccaaggacaaatcagagaaaaagtctttaactccaccattagcacccaaagctaagattctaatttaaactattctctgttctttcatggggaagcagatttgggtaccacccaagtattgacttacccatcaacaaccgctatgtaaaaaaaaaaaaaaaaaaaaaaaaaaaaaaaaaaaaaaaaaaaaaaaaaaaaaaaaaaaaannggggggggggctttttaaaaaaaatccgggggggccccaaatttcccgggggaaagaaaattttttttttttttttttggggggggtatataaacccctttgggggtttttggagaaaaacccttttttggggggggggctatatccgccccccccccccccaaaaatttgaggtgtgg

SEQ ID NO: 105518 - DNA, 489 bp, Homo sapiens
  misc_feature (1)...(489): n = a,t,c or g
cggagtgccaggggtgnccnnaattgagnccncctagntgnctgcgcaccggcccggaaatccgggnagacccacgcgtccgctcacgcgtncttatttaactacttttttataaaaacaatttgggacgtacagaaaaaaatgttgtactaggactatccagtgataaaatactatttttattttattttatttttatttttgtaagacagagtctgcactccagcctgggcaacagagcaagactccgtctcaaaaaaaaaaaaaaaaaaaaaaatcctccccggaaaggcccccttttggcgtaaggaaaaaacttgggggggaatcgggattttttttttttggcccaaattccagtttttaaggaagtcttgccccttttgtttcaaaaaaaaattaaaaggtggaccttttttgccctttttttttactccaccctgggccaaggggttgggttttttgcacccctttattttttgttttctg

SEQ ID NO: 105519 - DNA, 418 bp, Homo sapiens
tgagccaagatcatgccactgcaccccagcctgggccaccaagtgagaccctgctttataaaaaaaaaaaaaaaaaaaaaaaaaggggggttttctgggaatttttttttaattcggggaaaatttcaaaaaagttgggggtgggaaaaaactccaaaaatttttttgccccagggggcccacgggatgggttggaaaaaataaaagggtttaaaatctggtaaaaaaaaaaaaatttgttttttaaaccaaaaaggcgggggtttgagggggtttaaagaaaagtttggccctgccttttgagggggaaaaattttttgaaaaaaaaaaaaaaaggggtaattttttgaccccctttaaaaatccaaaagaagcgggggcgcccaatagtgtaaacaaaaagggaacttgggttaag

SEQ ID NO: 105520 - DNA, 987 bp, Homo sapiens
cgtgatcactcctagctgctcagcaaaccactgaggttcctgggaaaaaaaaaaaatatctcaagggtgtgttaacttgggacactcgttaactgggggaccttcttgaggcttttttccttctttttaaaaatcatctttgattattcttcttttctagtaaaataatatttagaaaaaataatgtcagagcacagcagaaattcagatcaagaagaacttctcgatgaggagattaatgaagatgaaatcttggccaacttgtctgctgaagaactgaaagaactgcagtcggaaatggaagtcatggcccctgaccccagccttcccgtgggaatgattcagaaagatcaaactgacaagccaccgacaggaaacttcaatcataaatctcttgttgattatatgtattgggaaaaggcatccaggcgcatgctggaagaggaacgagttcctgtcacctttgtgaaatccgaggaaaagactcaagaagagcatgaagaaatagaaaaacgtaataaaaatatggcccagtatttaaaagaaaagctcaataatgaaatagttgcaaataaaagagaatcaaagggcagcagcaatatccaagaaacagatgaagaagatgaagaagaggaagatgatgatgatgacgacgaaggagaagatgatggtgaagagagtgaagaaacgaacagagaagaggaaggcaaagcaaaggaacaaattagaaattgtgagaacaactgccagcaggtaactgacaaagcattcaaagaacagagagacagaccagaggcccaagaacaaagtgagaaaaaaatatcgaaattagatcctaagaagttagctctagacaccagctttttgaaggtaagtacaaggccttcaggaaaccagacagacctggatgggagcttgaggagagttaggaaaaatgatcctgacatgaaggaactcaacctgaacaacattgaaaacatccgcaag

SEQ ID NO: 105521 - DNA, 389 bp, Homo sapiens
gctcgagagacggggatttcgctatgttgcccaagctggtctggaactccggagctcaagcagtccgcccgccttggccccccaaagctctggaattacaggcgtaatgcactgtgcctggccttttaaaaaaaaattgaggttattttggggacagtagagcgtccagacacatcctaatttgcgtagctgctcagttttaaaaaatgcaatgcatttttacctcttagggtatgtgatttctggctgtacagaacctgctaaggccatcaaacctattgatcggaagtcagtccatcagatttgctctgggccggtggtactgagtctaagcactgcggtgaagaagatagtaggaaacagtctggatgctggtgccactaatattg

SEQ ID NO: 105522 - DNA, 387 bp, Homo sapiens
gcttctatgcataacctgggaaggcatattttagctttttacttccctcccaaagaaaggagcataagaggagaaccaaatagccaagatctagaacatgaaactgttgtatccattgcgtggattcagataagcctccacccaaaatatgggtcaaatgttaagactaatgagcagccctacacttctctctctctcactttcacacacacacatacacaaacacacgcgcatgcacacacacacacacacacacacacacacatatacccctaccaagaaagtatgaaagcatgtgttacttataaaactatgaggttttctggggagagcagagcaggcctccaaacgtaaactgaaacaggaacatgttaatttattacggag

SEQ ID NO: 105523 - DNA, 395 bp, Homo sapiens
ggagaattgcttgaacccaggagatggaggttacaatgagccaagattgtgccactgcactgtagccggggcgagtgagactctgtctcaaaaaaaaaaaaaaaaaaaaaaaattcccctttttttatttattgggaccaataagggggggcaaagggaaaccacccaaaaattttttcccccaaaagggcccccatccctgggggtttttaataaggggccccgggctttttaaaaaggggaatttctcccgggggggggggttacccctggaatccccagctttttaaaaggtggagggggggggttcctttggggcagggagttgaaaccacccggcccaaattgaaaaccatctccaaaacaatagggatgggggctgatcactccagagg

SEQ ID NO: 105524 - DNA, 131 bp, Homo sapiens
tttattctgagaacttcttactctgaggtccgggctggtcttaaactcctggcctcaagtgatgctcctactttgggctcccaaagtgctggaattacaggcgtgagccactgcacccagcctatatacat

SEQ ID NO: 105525 - DNA, 849 bp, Homo sapiens
gtctcgagctcccgacctcaggtgatctgcccatctcagcctcccaaagtgatgggattacaggcatgagccactgcgcccggattaattggccttttagttaaaaatattttttttaaggggcaagcattaagttcttttagtactcagtaaaatacaggtaggtgtatatcagtatgaagacacttgaactacaaacttctctacccaaagcttcattttgttccagttgtcaaagtggtgatcaaaatctgttagcttgggttacctctggctgttgggtacctgcttttctgtttgaggaagactggaacatgtactaggtgatgagtaaaggtgcgtgttttcagtactgataagtgtccaggtttttaacctgatagtgactgaagatccgaagtcatttccctcctttcggctatcaagaagttaactcatacattcattcattcatttacttgttaacttagtcaacaaatatttgagggtcttaccatgtgccaagtacagttctaacactgaggatataatatagaattaataacaggcttttttagaataagtataggatttcaagtggtagtaagtattcagaaagacaacatggagtcataggatagagttccaaggtagggttggggtgggtgatgtttttagatcggtggctggtgtaagaacctgaataaagaatattctagtctaaatgagcttgggataaggctagtatgtctgaagggagcacagctggtggtcaagggcggtggttgttagaaacatattgggaaattccggcaagaaccagattggggtaaggtcttaacggtgcaaggagaggagtttgaatttatt

SEQ ID NO: 105526 - DNA, 427 bp, Homo sapiens
cttgaacccgggatgtggaggttgcagtgagctgagattgcaccattgcactccagcctggccaacagagcaggactccatctcaaaaaaaaaaaaaaaaccttcggggttccaggcatggtagatgatacccaatcttcccccttattgggggagggggtataccttaccccaaaaaaattggcggacccttcccttactgtgtgtggggaaccttaaacctttttttacaaaggggattcctcttgcctccccaaaggtggggggagggggaaaaggcccctgggggaagccttggcaaattggggggaatcttttaaaaacccccatttttggattggaaagggaagggggtgcccccggaaacaaaacccacattttttttccagagagggcaaaaaaaatttggaaaatctgcccaaaaaag

SEQ ID NO: 105527 - DNA, 413 bp, Homo sapiens
aacgcgagaggcagaggttgcggtgagccgagattgcagcattgcactccagcttgggcgatggagcaagactctgtctcaaaaaaataaaaataaatcaataaataaataaaaataaagaggcaacacacacaaagaaaacatttgtcttagtacctaaaaattatttcttgtttttttcctttcttcttgtcagatgggtaagtgccgacgtcataacaaggtttgaaggtggcacacctcacacaactgtgtgaaaacccaatcatcacacttagaaaccacagaagatcataaaaattatcactaaagtgtaaaaatataactttactcctctttgtcttaaaataacaatagttttaaaacaacgctcaattaggctttcatctcaggaatgcaaagaaataagattg

SEQ ID NO: 105528 - DNA, 399 bp, Homo sapiens
  misc_feature (1)...(399): n = a,t,c or g
tcgcggacgcgtgggtctcaagtgatctgcctaccttggcctcccagagtgctgggattgcaggcatgagccactgcacccagcccaaagtatgcttttaaaaatatgtatatatataaaatttttgaaaagcaaattatgatataattcaagtatcaaattacttcatgctgtttcattgttcctattcacatgcgaaagcatgtgatcaattattgctgcatcacatatagactcattaggtggaaattatggcctcttctgtaaaaaagtaaggacattaaaatgtaagatgcttgatgaaaatctaagtggagaggctctttgtggctaacttattgagtgatgtatgaggtcgatgttcagagtaatatgcctctgtattatagtggtagaaan

SEQ ID NO: 105529 - DNA, 556 bp, Homo sapiens
attgatttcgttccctagtccgtgtggtggaattcgaagcttcaagactttgacatgtgtgaaaacatgaaatgacccttggctcttattgttcttgctggtgtggtatgttcacggctgaaaagatggtcagaaggggaaaggaggaagtgagaagaaagaaacagggaaatgacagagtgttgctcagttacccaggctggagtgcaatggcatgatcttggctcactgcagcctccacctcctggggttcaagcggttctcgtgcctcagtctcccaagtagctgggattacagcaggctgaggaattaccaaggaggcaggaggtggagcaaaacacaccaagcctggtgccaatcattgacaatattatggaactgactcagcgcaagaagacagcttcgactccttgtgatttcatccctaaccaatcagcactcctggctcactggcttcccccaacccaccaaattgtccttaaaaactctgctctccaaacgctgggggagactgatttgagtaataataaaaccctggtctcctgcaaaaaaaaaa

SEQ ID NO: 105530 - DNA, 416 bp, Homo sapiens
  misc_feature (1)...(416): n = a,t,c or g
cttcattctgtatgtgactatttatataacattagataattaaatagtgagacataaatagagtgtttttcatggaaaagccttcttatatctgaagattgaaaaaaataaatttactgaantaccnnnnaaaaaaaaaaaaaaaaaaaaaaaaaaaaaaaaaaaaaaaaaaaaaaaaaaaaaaaaaaaaaaaaaaaaaaaaaaaaaaaaannngggggggggggccctttaaaaaaatccttgggggggccccccccccccgggggggaaaaaaaatttttttttttttttaaagggggaaaaaaaaaaaccccggggggtttttttaaaaaacaccttttttgggggggggggncttttcccccccccccccccaaaaaaatttacgccttgggaaaaaaaaatttttttgtgg

SEQ ID NO: 105531 - DNA, 421 bp, Homo sapiens
  misc_feature (1)...(421): n = a,t,c or g
cggacgcgtggggaaaaatgtgggaaacaatttcctcacaagtgaccagctgcaaatgttatttgtattccattaaccaacatttattgggtgcctgttatataaaagataaaactgggttctgccttcaaagagttcacttgaaatttaaaatttatgtgaaaatttagcacttcctacagtgttttaatagctatttcaacagtgttggtgttgtatgacaaggtgataaatttcttgacaataacaatagcacaattctgtatatggaaaaaaaaaaaaaaaaaaaaaaaaaaaaaaaaaaaaaaaaaaaaaaaaaaaaaaaaaaaaaaaaaaaaaaaaaaaaaaaaaaaaaaaaanannnnngggggggggggtttttaaaaaaattttgggggggggatttttttttttttttgtt

SEQ ID NO: 105532 - DNA, 426 bp, Homo sapiens
  misc_feature (1)...(426): n = a,t,c or g
gtagctcaggagactgagttgtgaggattacttgagctcaggaggtgaaggctacattaagccatgatcacaccactgcacaccagcacgggctnnaaaaaaaaaagaaaaaaaggaaaaggggattccacttaaacacttggccttacttgacttttataaaaaaatccacccaaaaatagccagctttccccttcaaccttaaaaaaaaaaaaaaaaaaaaaaaaaaaaaaaaaaaaaaaaaaaaaaaaaaaaaaaaaaaaaaaaaaaangggggggggggggttttaaaaaaatttttggggggggcaaaatataaggggggggaaaaaaaatttttttttttttttttgggggggaaaaaaaaaacccctttggttttttttgaaaaaaactttttttttggggggaaaaaaaaaaaaaaaa

SEQ ID NO: 105533 - DNA, 453 bp, Homo sapiens
  misc_feature (1)...(453): n = a,t,c or g
cttcttctctcagctcatcaaagtcattctctgtccagctttgttccattgctggtgaggagctgcgttcctttggaggaggagaggcgctctgctttttagagtttccagtttttctgctctgttttttccccatctttgnggttttatctacttttggtctttgatgatggngatgtacagatgggtttttggtgtggatgtcctttctgtttgttagttttccttctaacagacaggaccctcagctgcaggtctgttggagtaaccggccgtgtgaggtgtcagtctgcccctgctggggggtgcctcccagttaggctgctcgggggtcaggggtcagggacccacttgaggaggcagtctgcccgttctcagatctccagctgcgtgctgggagaaccactgctctcttcaaagctgtcagacagggacatttaagtctgcggaggg

SEQ ID NO: 105534 - DNA, 198 bp, Homo sapiens
gcggaggttgcattgagccgagatcatgccactgcactccatcctgggtgacagagggagactctgtctcaaaaaaaaaaaaaaaaagggcgggccgttttaaaggacccctcggggggcccaggtttacccgtgcttgcaacgccatagttttttccttatggggggcgcctttataacctacctgggaattttggg

SEQ ID NO: 105535 - DNA, 399 bp, Homo sapiens
cgcggccgcgtcgaccttcatttgtactccggaggtggaggatgcagtgagctgagaccacaccactgcactccagcctggcaacagagcaagactccgtctcataaaaaaaaaaaaaaaaaaacaacccccccggaaagcccaaacccaagggttggaaacaccgaacccccctcactgactttctagaggtgctggggcccccctctattttcctttatttaaaaaccccgttggccctttttaaaaaaataacacccagaaaaggtcaaaatggggccatgccccctggatttattagaatttttatagcgcctagaaaaacgccccttcttttttttggcccaaactttttaatgaaatttttgtccgggggtctgttcaaaaccttgcattctt

SEQ ID NO: 105536 - DNA, 401 bp, Homo sapiens
  misc_feature (1)...(401): n = a,t,c or g
gaaatcttacaagtatgatattgtctttgtcaatacctcatttgtaaaacagacccattagtcgtgaatttccagctctttcaaaaataaatgtttatgtgagaaaaaaaaaaaaaaaaaaaaaaaaaaaaaaaaaaaaaaaaaaaaaaaaaaaaaaaaaaaaaagagaaaaagaanaannnnnntgggggggcggggggggacctccaaatatattaagtggtgtttttgaaaaccccccggaggcctttttttggggtggggggcccccaataaaattttttttttttaaaaaaggggggccccttttttttaggaaaacccccccccaaaaaaaaaatggggggggggggcccccgggaaaaaaaaaatttttaaaagggcaaaaaagagcccccttt

SEQ ID NO: 105537 - DNA, 387 bp, Homo sapiens
gtcgaacttgactatctagaggaagtgatgtgaacagactaaaatttattgtatataatttctggggctaataaagaattggaggtatttgagaaaggaattaatttgggttcttttaaacctatctgctaactcatttggcttagagtagtcacatgttataatacttatagttgatcaaaaaattgattcctaagtgttcttattaaagacacacacacacacacacacacacacacacacacattctctctctctctctctctcacacacacacacatgcacacacacttatgtactttcttgctttttttgacctaagatcttagataactattacagattaaatactaatccactggcagacttcagctaattagaacactg

SEQ ID NO: 105538 - DNA, 347 bp, Homo sapiens
  misc_feature (1)...(347): n = a,t,c or g
gggtttttaaaattcattattctggccaggtgcaggggctcattcctgtggtcccagcactttgggaggctgaggtgggcggatcatctgatgtcggaagtctgagaccattcttaccaacatggagaaaccccctcgatagtgaaaatacaaaattacaggagtgtgccactgtacccagctaatgaacgtggatttagcagaaacctaggttcacaatgttgatcgaattggtcatgaactcccgacctcaagctatangaccagttgcacctcccaaaatgcttggagaacaggcatgagccactgggacccgcctgcctttgtgttttaaattaagcttgaag

SEQ ID NO: 105539 - DNA, 329 bp, Homo sapiens
gcggcggcggcgaggaggggaatttccttgtgcctccattcccgggaggggggagcggcgttggaggccaccgtttccagagtttcactctgtcacccaggctcgagtgcagtggcgtgttctcggctcactacaacctccgtcctctgggctcaagcagtcctcgcatctcagcctcccaaggagctgggacctcagggttatatcctgtgttgtgacctcatggtttaagtgggaataaagatgagtataagcagtgatgaggtcaacttcttggtatatagatacttgcaagagtcaggattttctcattcagcatttacctttgg

SEQ ID NO: 105540 - DNA, 411 bp, Homo sapiens
  misc_feature (1)...(411): n = a,t,c or g
ggggacagcactgtgaagatttgacaggctagctacctggacccctttcaacatcaatgcccatttggctaagaatggccaataaagcagggtcccctttatagttacctcctgaagtgatcacatgtgatagagctggagtgggtatggagttctgaagactttcaaatgcaaataattctggggtacaaacaagacattaagaacaatagctgaattcaccgattagcttaattttagagccacgaggcccaggctgaggacggcacacagaaagggaggtcggcctggcgtggtggctcatgcctataatcccagcactttgggaggccaaagcagggggattgcttgagctccaggagttcgagaccagcctgggaaacaaagcgagaccccttctcataaaacaan

SEQ ID NO: 105541 - DNA, 393 bp, Homo sapiens
cttgaccaaacaccaagaaggcatctacaacaccatctgcctgggagtcctcctgggcctgccactcttggcgatcatcacactcctcttcatctgttgccattgctgctggagcccaccaggcaagaggggccagcagccagagaagaacaagaagaagaagaagaagaagaagaagaagaatgatgaagaagacctctggatctctgctcaacccaagcttctccagatggagaagagaccatcactgcctgtttagataggcaggaagcagaggtgtttcctttctggggctaagcctccttctgaccacacacagacatttcaggaacccctgaaataatgcactatgtccatgtccacagagtaactactcaaccaaggaacaaacct

SEQ ID NO: 105542 - DNA, 440 bp, Homo sapiens
  misc_feature (1)...(440): n = a,t,c or g
gaggttgcagtgagcagagatcacaccactgcactctagcctgggtgacagagcaagactctgtctaaaaaacaaaacaaaacaaaacaaaacaaaaaaacctcttaatattctggagtcatcattcccttcgacagcattttcctctgctttgaaagccccagaaatcagtgttggccatgatgacaactacagaaaaaccagaggcagcttctttgccaagacctttcaaagccattttaggctgttaggggcagtggaggtagaatgactccttgggtattagagtttcaaccatgaagtctctaacaatgtattttcttcacctctgctactcaagtagcatttactgtgtctttggtttgtgctaggcccccgggtgtgaagcacagaccccttccaggggtttacagtctatttgagactcctcagttcttgcn

SEQ ID NO: 105543 - DNA, 418 bp, Homo sapiens
  misc_feature (1)...(418): n = a,t,c or g
ttgcatccttggagagagctgagagctcgagagacggggatttcgctatgttgcccaagctggtctggaactccggagctcaagcagtccgcccgccttggccccccaaagctctggaattacaggcgtaatgcactgtgcctggccttttaaaaaaaaattgaggttattttggggacagtagagcgtccagacacatcctaatttgcgtagctgctcagttttaaaaaatgcaatgcatttttacctcttaggtacagaacctgctaaggccatcaaacctattgatcggaagtcagtccatcagatttgctctgggccggtggtactgagtctaagcactgcggtgaagaagatagtaggaaacagtctggatgctggtgccactaatattgatctaaagcttaaggactatggn

SEQ ID NO: 105544 - DNA, 436 bp, Homo sapiens
aatgagccgagatcgtgccactgcactccagcctggtgacagagtgagactccatctcaaaaaaaaaaaaaaaaatgggaaataccttacttaaatgggcttatagggttaataaaagcccttcctgaaaatcataaatcccccaacttttgttttcaccaaaatttctttttttaaaaagtaccagtttttcaaactattcgggaaaaaaaaaaaaaaaatccactttttttttttttagaacaaccaaaaaaaaacccccggattttttggagggggtttggaaaacccagtaccaaagcctctttggggggttacccccctaaaaacccctttgtttttgggaggtttcttagtttaaaaaaaaactcctaaaacgaaaggacaaaaaaaaaaaatttaaaaaattcttcgggggggccgtttttttaaaaat

SEQ ID NO: 105545 - DNA, 522 bp, Homo sapiens
  misc_feature (1)...(522): n = a,t,c or g
cttaacattcacaaatgttacgttntaacttctcagggataactgtcaagtagtacaaatgccagttatccctgagaagttaaaacttaacattcacaaatgttacatagcaccttcatttataatagccaaaacccggaaacaacctggatgtccttcaaaaagagtgaatggtttagtatgtccacaccatggaatactaaatagtaatatgaaggaacaaactactgatacatgtaacaaattgcatggacctcaagggaattatgcttgggtggtttggggggacaatcctaaagttttacacactgtatgaatctgtttttgtaacattcttaaataataaagctatagagatgggagaaaaaaaaanaaaaaaaaaaaaaaaaaaaaaaaaaaaaaaaaaaaaaaaaaaaaaggggggccctttttaaaaaattcctgggggggccccaatataccccggcgtgaaaaaaaaatttttctttttattaggggaggatataaaaaacccgggggggg

SEQ ID NO: 105546 - DNA, 436 bp, Homo sapiens
gaggttgcagtgagcctagaacatgccactgcactccagcctgggcgacagtgcaagactccgtctcaaaaaaaaaggagaaaggggaaaaaattttttttttttccgggaaaatagaaaggtttaaaattttccctgcccccctaaaaaaatttttttttttccgggaaagtttggggtaaaaaatctccttaaaaaaaaaaattttttttttttaacgggggggggaatcccttggggtgggtccccaaaaaaaagggtaatggcccggcggggaaacccctttgggggaaaattgggggggttttaccactttttataaaaaaaaaagggcggcaaaaaaatttttagggtggggccccctttggccattttaaacctttttaaaaaaaaaggctccgggaacaacattaaagagaaaagggggggttatatt

SEQ ID NO: 105547 - DNA, 417 bp, Homo sapiens
ccatgttagccaggctggtctcgaactgctgacctcaggtgatctgcctgcctcggcctcccaaagtgctgggattacaggcgtgagccattgcgcctggccagaaaaatacctttaaaaagctgggcctgttggtgtacctaaaggataatacagatgttcctctcaacttagcatggggttgtgtctcaataaacccatttttaagttgaaaacgttaagtggaaaatgcatttattatacctaacctactagacctcgtagtttagcctcccttaccctacaggtgctcagaacacttagtagcctacagttgagcagtcatctaacacaaaacctattttatagtaaagtgttgaatatctcaagtaatttattgatgttccactgaatgcgaatcacttttgcaccgttgtt

SEQ ID NO: 105548 - DNA, 423 bp, Homo sapiens
  misc_feature (1)...(423): n = a,t,c or g
acgtttgttaatacaaatgtgcattgggctgggcacagtgactcacacctgtaatgccaacagtttgggagactgaggtgggcaggtggctgaagcccaggagttcaagaccagcctgggcaagatagtgagactccatctccgtttttttaaaattagaaaaaaaagtgcattgacatttggattaggtaattaatatatagagtagaaatgagtaggtgagtgaatctgaaagtatcagtatttaagaatggatgcatatatctatattctgtaataggagcatttttttttttttttcagtttcaaagggggggtttaaatcctgaaccacaaaaaaaaatacggcattcctttcccctagggttccacattggcggattcacccacctccggatcaaaatttttcgggaaaaaaaaaan

SEQ ID NO: 105549 - DNA, 556 bp, Homo sapiens
taacccataatttttaatgtctatgtatgaacagaccttcacctgtggtggtcagtttctttggcagtttccagaatttccctattgccaatagcaaaataatgcatctttttgtatgtgaatctcacaatatctgttttattaagatagtaaagaagacttttttactacaatagggttttgcagtagggagagagatctggctcaattccttcacaatgcctttctgagagaagataatcctcaatcccattcttgcccaacaagcatttgttattaagtttttcaacactttcatcacttggtagggaggtctccattcaagatatgtgtcagggaacatatcaaaagcagccattcccctttccccttccccatgtttttcacttaagtataagagatggtgagctctgtgttggtagggatgttcatcttacgtgccagactgacctagcacaggtgtttgtttgtttgtttgtattgggagttttgctctcgttgcctagggccggagtgcagtggtgccatctcagctcactgcaacctccacctcccg

SEQ ID NO: 105550 - DNA, 299 bp, Homo sapiens
tgtttcacttcttcagaaagcctccggaatctaaaaagccctcagtaccagagacagaagcagatggattcgtccttttaggagatacaacagatgagcaaagaatgacagcaagaggcaaaacttcggacatagaggccaaccaacctttggagaccaacaaagaaaattcatccagtgtgactgtatcagaccctgagatggaaaataaggcaggccagactctggagaacagctcattaatggccgagcttctgagcgatgtgcccgtcaccctcgccccgcatgtgctggcagga

SEQ ID NO: 105551 - DNA, 470 bp, Homo sapiens
  misc_feature (1)...(470): n = a,t,c or g
agacgccgctaaaancacagtcagntggctnagnannggcncgaanctcggncgaccacgcgtccgggttactgaagtgaaatatcaagtgtttattaccattttaagcctctgaaccctaggtagagctctttaaatgcttagtctagctacagaatttgacagtgaatcttacagtcccacgagttactttctagttatttttgctattcttgccttcccaactaaattataaattccttaagggcaaggatcacatattatattttatttatacagttggccctccatatccacagcttccacatctgcagattccaccaaccgtggatcaaaaatatccagaaaaaaatgaaaataaaaaataggccaggcactcacgcctataataccattactttgggaggctgaggcaggcgcatcacctgaggccaggagttccagatcagcctggccaacatgatgaaacn

SEQ ID NO: 105552 - DNA, 411 bp, Homo sapiens
caacaacaatagcaacaacaacaacaacaatagcaacaacatcaaaacttgagcgtgtatctggaccacctgcaaggtggtcctctccactatttccagttctgaaaatagcggagaggaccaacctcttcagggtgtagggtcctgcccggtgcgtggacggagggggtggccgtgaggcgcgcatcagccagaaggtggcgccaaggtaacgcccgaagaccctggcggcggcttgggctccctgagtaaagttgggtttgctgactcgccccacacccgcccacacttggaagaggagacctttcttcccttgaccccatcagcctgagcctcctgaagcttctactctgcaacttcatccattcccaggtctcatccttgtcatgaatacttccttccttaacaaaa

SEQ ID NO: 105553 - DNA, 416 bp, Homo sapiens
  misc_feature (1)...(416): n = a,t,c or g
ggaggcggaggttacagtgagccgagatcgtgccattccactccagcttggacaacaagagcaaaactccgtttattaaaaaaaaaaaaaaaaaaaaaaggggccnttccccgggggggggggggggttggcccaaggcccaaggggggttttttttgatgttaaaaaaacccccagggaccttggtttcaaggggggaacatccccctgccgggggcggggtttggggaccccacttgggcccaacaaaaaaacccccctgttttttgggttttttgggaaaaaaggtgggggtaaaaagggccttttttttgcccgtaaaaggtcaaaatttggaccctggcccaaaaaaaaaaaaaaaaatattttttgtttaaaccccaggccctaccaaatggccccccgggacctccatg

SEQ ID NO: 105554 - DNA, 436 bp, Homo sapiens
tgttgcccaggctggtctcaaattcctgggctcatgcaattctcctgccccagcctgccaaagtgctgggactataggaatgagccaccgcacccaacctgggtatgtattttttaaatattttgctaacttcaaccaagtttttgattaaagctgaacagcaaacaattaaaataagatcacttttgaatacttgaaggatgacagatgtctagttcattatttgaaagacaattcatatgtattatgtagtttatgtacataattttgtctgaaagtttaataaattcatctctgagtgctgcttagccacacagaaactctgaagacagtatttctagaaaataagtcctaagcataatcatttacaaaataattggcaagaaatatttaaaaaggaaaaggctcctagggaatctttggattttttataaag

SEQ ID NO: 105555 - DNA, 414 bp, Homo sapiens
gcggagcttgcagtgagccgatactgagccactgcactccagcctgggcgacagagcgagactccgtctcaaaaaaaaaaaaaaaaaaaaaaaaaaaaaaaaggggggggggccttttaaaaaaaccctgggggggcccaaatttaacggggggggggaaaaaaatatttttcttttaaaggggggggtaaaaaaaccccctcggggttttttggaaaaaaacccttttttttggggggggaaaattggccccccccccccccaaaaaaaaaaacttttggggaaaaaaaaaaaattttaggggtggtagggggaaaaaaaatgccatatttctgtgtttaaaaaaattttttttttgtcggtttctctttaaaaaattttccccccgggggccggggggatataaaggttttg

SEQ ID NO: 105556 - DNA, 382 bp, Homo sapiens
atcctcctgcctcagactctcaaactgctgggattacaggcttgaaccacgagtgtgttttaaattttgatagtgcataccaaattgtcttccagaggccatgccggtttaagttcacaagttttcagagtccctgtttcctcacacccttgccaacacagcgtgttatcaaatgttttgttctttgccaatctgataggtggttttaatttgcattcctcttactgtatttcattgattctaagatgtcactgattctaagatgcatcctgatttcagaagttcacatgtaaaaatgtggctgggtgtggtggctcacgcctgtaatcccagcactttgggcggatcacgaggtcaggaattcaagaccagcctggccaac

SEQ ID NO: 105557 - DNA, 390 bp, Homo sapiens
gtaatctcagctactcaaggaggctgaggcacaagaatagcttgaaccgggagatggaagatgcagtgagccaagatcacgcccctgcactccagcctgggcgacagagactccgtcaaaaaaaaaaaaaaaatacattgagattcccagggggggtatgtggggtttttccaggaaggggctgaaaatataacccaggcctttgcgccaccccttgggagagaacactccggggctcacgcctttgcattccagggttgacagttaaaaatatactttgtaaaataccaacaccttattcacaaatattccaactttctaccacctccaatgagcttgttgaggaggggtttgaccccagtctagggggaaagaatctaaaacacaagt

SEQ ID NO: 105558 - DNA, 406 bp, Homo sapiens
ggacaggcagtgtcctcaggactctggctaatgggagaagttgacatttttgacattgcagtgcaatagtcatattagcacagatgtatgtggcaacagccacctcattctaagaaggggaaggaagcttgagtcaggccttaatgttgaaaagtcagggagctgttgaggtatggaagggcactcagcaggaagcaggttaaggggaagaaaacagtgtccttgaggcagacagtgatccaaagcttaattacgggcatcatgctatgttagcgagtggaactggattgtgaaggcccttacataatgagatttttattgataaaggttgcttaaaggctgggcgttgtggctcacacctgtaatcccaacactttgggaggccacagtgggcagatcacctgag

SEQ ID NO: 105559 - DNA, 399 bp, Homo sapiens
tgagccgagatcgcgccactgcactccatcctgggcgacagagcaagactccgtcgcaaaaaaaaaaaaaaagggggggcccaatggtttttttgggggaaatgggaatccataccccttttaaagggccttgggtttaaacccctttttttttgcccgggggtgggccttttttttgtggtcaaaagttttttcccggcccaaaggggaatttttggaacctccctttgtaaaaaatggctggttccccccccttggggcccgggttgggtttccctttaaaaggccaccaaagaaaggggctttttttttacctttttttggggaccccggggccccccatttccccttttaaaagagtttttttttctcggaactttacccctctggccaaaaaac

SEQ ID NO: 105560 - DNA, 370 bp, Homo sapiens
ggaaaatcccattgtcacactttacagagtaacaactgaccacactcattcagaaaatcaatggcagagtaagtttgatttgaagaaatggagccgaactcaagacccctctcgcaggtcagacccaaatcacaatcaactgtcgttatagttgggtcaccctggtcctaggtgatttggaatctatattgtgttggcacatttttaaaaaaactaacttgtttatatgtggctttttttcttcttttttattgggggctgggaggatgaagtctcactgtgttgtcaggctggagtgcaggggcatgatctcggctcaccgtaacgtctgcctcctgggttcaaatgattctccttgctcagccttccc

SEQ ID NO: 105561 - DNA, 410 bp, Homo sapiens
ggcacgaggcgtgaacctgggaggtggagcttgcagtgaaccgagattgcaccactgcactgcagcctgggcaacagagcaagactctgcctcaaaaaaaaaaaaaaacggatttcctttgtttccccctgccttggcccaagaagggtttttgaaaagaacaaatgggtattcgcccattttccccctgctttagggaaactccccaaaacggggtattttataaataaaaaaggttcattgactcccggttcaacatgggggggggggcctccggaaacttccatttatggtaaaaggggaaaaaccacatcttacttggcggccaatgaaaaaaagcttccctaaccggggaaacctgccttataaaacccccaaatcttgggagaactccttatcccaaaaacagt

SEQ ID NO: 105562 - DNA, 659 bp, Homo sapiens
attcggcacgcggagccaggcagaggcaggcatctatagtcccaaagtgctgggattacaggtgtgagccaccacatctggcccaagtcacccaaattttttacagcttggtttggaaggcaatgtagtatattaaaattatgggccctggagtcagaaagatccaggtttgaatacagagtccgtcatttattagctttatgaatttgagcaatttcgtctcacttgtaaatatagggaatagctcctacctctcaggtatgttgcaaaaaactatataaaagcacttagcatagtggccatgacagagtaagcactcagtaaatcatgccatttatctcatctataaggcatgaaagtagaattttacaagttgtacagaaatagaaggcttggagtggacactacattaaaaggataaaaaaatggagccaggcacaggcaggcatctatagtcccagctattgaggaggcctgaggctggaggatcccttgaacctaggagtttgaggccagcctggacaacaatgtgagattgtggctccaaaaaaataataaaaaataggctgctctgcctatggagtagccattcttttattcctttacttttttaataaacttgcttttactttatggaaaaaataaatttttaaatgaca

SEQ ID NO: 105563 - DNA, 391 bp, Homo sapiens
ggcacgaggcccaactccccgaaccactcatggtcctggggacaggtcacctagcggaaatggctggaggctcccggacgtacctgctcctggcttttggcctgctctgcctgccctggcttcaagaggctggcgccgcacaaaccgttccgttatccaggctttttgaccacgctatgctccaagcccatcgcgcgcaccagctggccattgacacctaccaggagttagaagaaacctatatcccaaaggaccagaagcattcattcctgcatgactcccagacctccttctgcttatcagactctattccgacaccctccaacatggaggaaacgcaacagaaatccaatctagagctgctccgcatctccctgctgctcatagaggg

SEQ ID NO: 105564 - DNA, 435 bp, Homo sapiens
acagcgtatatggaaaattcaagttgtttttaacatattcaagtatgttcagtataaaataagttaatcccatttcataatgtaaatcatatttttgttatttgccatattttatttgaagtgataaaattttataactcaaatttgaatgtcatagtacattgtgtgctaaccatggcaagcaaacatttacatttgttttttacaataaatttcttttaaaatatactttctatttttctgtactgacatatgcaataaattggtacattaaaaatttgattaatgtcttcaaaaaaaaaaaaaaaaaaaaaaaaaaaaaaaaaaaaaaaaaaaaaaaaaattttaaaaaaaaaaaaaactaatttatttaaattccctttccaatacaccttaaaaaaaaaaaatcattaactttgtgggggggggtgctgt

SEQ ID NO: 105565 - DNA, 433 bp, Homo sapiens
ctttaaattttcaaatacttcaaaactagttagtattactatgcctaaagcacagtgcagtccaacggaatatgtgagccacatatataattttaactaggccagtagtcacattaataagaaaaagataaaattaattttagtaacattttacttaacacaatatataggaaatattatttcaacacaaaaataatccaatgtatattttgtatttgcagtacatagtagtttggactacacacacctcaagtcacatgtggccagtgactaaatgtccattttagatctgagtaaagcaaggaatttctttctttcttttttagaaacaggatcttgctccatcacccaggcaggagtgcagtggctcaatcatagctcactgcagcctcaaactcctggcctaagggatcctcctgcctcagcctcccag

SEQ ID NO: 105566 - DNA, 553 bp, Homo sapiens
gagaatctcttgaacctaggaggcagaggttgcagtgagccaagattgtgccagcctgggcgacagggtgaggctcttgtctcaaaaaaaaaaagtccacatcttcatgaaccctcaaactctggagttgggtgtcggcttttttagccagcttttgtgggaattgcctttgacctattaaagaaggaaagtgggtaatggagtcccagccactcaagagactggatatcccccgagaatggcttgggttaccagctatggacccttggaagatgaatctaatccttctcactggtttttctttgcaaattcatttgcttttatttttctaataacaataaactctattttccatgttctcagggcccctgggtagacagacacagcttgatttcagagcagacataggcgaagaaaacatggcattgagtgtgctgagtccagacaaatgttatttatatacacatccaaatttgaagagaaaatgtatttctttaggtttcaaacactgtaatagatataaagcaaaaataaaaacctgttgcaaagttaa

SEQ ID NO: 105567 - DNA, 408 bp, Homo sapiens
gaggggagtgggtgagttaaacacatttttcccaatctgccaggtttactttgcagaatttgtattgtctttcacagataacataaccctcattcccagcacaccacaaccaagctagctagctggctcagctcacggtgtccttcggccacatcgggactcagcatggtatatgttctggtcatcacccagagaattctagctattcattttgactcttcagtttcgctaagatgactgcatgccagcaattttaacttatttattaatttgaaaataatgtgtggctgggccgggcacagtggctcacgcctgtaatcccagcactttgggaggcccaggcaggccgatcaccagggccagaaaatcagaaccaccctgactacaaggggaacccctggccttaca

SEQ ID NO: 105568 - DNA, 442 bp, Homo sapiens
  misc_feature (1)...(442): n = a,t,c or g
aaaagtgccggttagtcaggtttgttgaaaatacagtagaaaagctgattctggttatctctttaaggacaattaattgtacagacacataatgtaacattgtctcaacattcattcacagattgactgtaaattaccttaatctttgtgcagactgaaggaacactgtagtataccccaaagtgcatttgcctaggacttctcagcttctcccataggtagtttaacaggcattaaaatttgtaattgaaatgttgctttcactgaaaaagtgtcttgatgtttcagttatttttaatcgccataaaaaaatagaactattnnaaaaaaaaaaaaaaaaaaaaaaaaaaaaaaaaaaaaaaaaaaaaaaaaaannannnnaaaaaaaaaaaaannnnnnnngaggaaaaaannnnnnngccgcggcgcccctctctaaaac

SEQ ID NO: 105569 - DNA, 448 bp, Homo sapiens
  misc_feature (1)...(448): n = a,t,c or g
gggagccttggccctgaacaaaacaactgctgatgtctggaggctgaatttcctggtctctggtctccactggaaaaggtggttacaacaaacctccttgtcaaagtgggtaaaaataaaggaatgctccatcctaaaaaaaaaaaaaaaaaaaaaaaaaaaaaaaaaaaaaaaaaaaaaaaaaaaaaaaaaaaanaaaaaanannnnnggggggggggccctttaaaaaaaaccttggggggcccaaaaaaaaccgggggggaaaaaaaaattttttttttttttaggggggggaaaaaaaaaccccttgggggtttttggaaaaaaaacatttttttgggggggggcgttttgggcccccccccccccagaaaaatatccctctgggggaaaaaaaaaaattttttgggtggagggggggccaacccccaccacattcgtttggtg

SEQ ID NO: 105570 - DNA, 445 bp, Homo sapiens
cccacgcgtccgagaatctgtttcacacaacaactgctatttgaaggaaaaaaaaaaaaaagaagcaagggatcccaaaacaggctcttaacaaaaatccaatcaccaaatgtgtccggatgaaaatacggggagatgagtcaaaacccggccagggggggtcccaaattttccaaaaaccaaaagtactccgaacatttaagaatacattgttgcccgccgttcactttcttaatttccaaaaaggaaataggggatcgaaaatacagcatttgtaaaagcggttgtttttaccaaaaaaaagaggaggactggttttgttgcccctgccaaaaaaccaaaaccagccgccgggccaagtcccttaaaaggcccaagcaaaagccagttgcgccccccgggggggtaaaagcgccagccaagccacggtcccttccgaggtttg

SEQ ID NO: 105571 - DNA, 429 bp, Homo sapiens
  misc_feature (1)...(429): n = a,t,c or g
cgcagaatctgtttcacacaacaactgctatttgttggaaaaattaaaaagaaagcaatggatcccaggacaggttgttaccaaaaatccattcaccagatgtgtccggaggaaaatccggggggatgagtcaaaacccggccagggggggtcccaaactttccaaaaaccaaaagtcctccgaacatttaagaatacactgttgcccgccgttacctttcttaatttccaaaaaggaaataggggatcgaaaatacagctttggtaaaagcggttgtttttcccaaaaaaaaaaggaggactggatttgttgcccctgccaaaaaaccaaattgaaagggaaaatcaggccacccccaaaaaaaaatggcccaggggggagtttaaacggaaggacaacctgggtttcgggactatttgttcacaacn

SEQ ID NO: 105572 - DNA, 500 bp, Homo sapiens
gcggccctatagacatagcgcatccgcccggacttccgggtcgacccacgcgtccgcccacgcgtccgattattcttcatgctttatccgttgtgaactttctcaattgacaccttgatatgagtattaatatgttacatcacttctgtttcccatgtcttcttactatctgttatatttatgaactggaataatacaactgattctttatgctgtatttctttaatttttggtagcatctcttgtctttccatttagtaagatgtgaatattcttgcttctactctttctagtatattttctgtcctgttttggcctctatgttctctcaattgcaatagaacctttgcagtgtcaaatatgtcagcctttatatttaattaaataataataatgaagtcgctcttaatgtatctaaagtctgcttgtaaaagttgaaaagcagtggccgggtgctgtggctcacgcctgtaatcccagcactttgggaggcccaggcg

SEQ ID NO: 105573 - DNA, 496 bp, Homo sapiens
caatcgctctttttgtttatttgtttgtttgctttcattaaccaaactcaggggaatgtcatgatgtcaccaaggccaatgggtagagaaataaaaaccagccatccataattgaatctgtaaagtcagtgaacttagccttttcaggttcaaaattacacaaacacaaggattttcttatctttcacctttcaaaggttttctttttattttgccacctgttttccaaataagaagtgggaagcctcttagataaattgtgataaaaatgtctctttgtttggcgtgagctatcaaattagctttgtgtgtccactgagccatcaaattaggctttggctgctggaggcctaggttctagctttggtcacctatcagaatcttactgttacgctgggcatggtggcatgtgcctacagtcccagctatttgggaggctgaagtgggtagattgcttgagcccaggagcctgtgcaatatggtgagacccatctca

SEQ ID NO: 105574 - DNA, 433 bp, Homo sapiens
cccacgcgtccgaataacttgaccaacggaacaagttaccctagggataacagcgcaatcctattctagagtccatatcaacaatagggtttacgacctcgatgttggatcaggacatcccgatggtgcagccgctattaaaggttcgtttgttcaacgattaaagtcctacgtgatctgagttcagaccggagtaatccaggtcggtttctatctacttcaaattcctccctaaaaaaaaaaaaaaaaaaaaaaaaaaaaaaaaaaaaaaaaaaaaaaaaaaaaaaaaaaaaaaaaaaaaaaaaaaagaaaaaaaaaaaaaaaaaaaaaaaaaaggggggggggggggttataaaaaaatttttgggggggcccatttttgggggggggggaaaagaaaaattttttttttttgggggggggtttataaacg

SEQ ID NO: 105575 - DNA, 464 bp, Homo sapiens
cacgcgtgcggccacgcgtccgatgaacataagtgacccaccctccttggcctcccaaaaagctggggttataggtgtgagccactgcgcccggactccatcccttcttaagctgacccaggggtctggtaattgagtgagtgtgatggctcaatgttacccacctcctctggcatcaggatgtagggaccagtccgttggtatgcagaggtggtggtacccagcctggcatcagcgatgctgggaagagggaatgctgttgcctgtctgctgctgtgggaatgacagaaagggctggaaggagtggcctggcagggatggaccccagggcccgggccttccttgtgctcactgagcaaacgaagcaggattcactccctgctgggagagggagattagggttagggagcacagtgttgtgctcttagatttgaggatttatcaataaaaatcaaaaagtattt

SEQ ID NO: 105576 - DNA, 444 bp, Homo sapiens
  misc_feature (1)...(444): n = a,t,c or g
cccgctttgagttgcccctcctttctgaaccaaagcagcgtatttcttaaatgtatttgattgatgtctaatgcctccctaaaatgtctaagaacaagctgttccccatcaccttggacacatgttctcaggacctcctgagggtcattcatatttagcttagaataaatctcttangataaaaaaaaaaaaaaaaaaaaaaaaaaaaaaaaaaaaaaaaaaaaaaaaaaaaaaaaaaaaaaaannggggggggcctttttaaaaaaattcttgggggggccaaatttttccgggggaggaaaaaatatttttttttttttttggggggggaaataaaaaccctctgggggttttttggaaaaacctttttttttgggggggggttatttgggcccacctccccccaaaaaattttcggcttctggagaaataaaattttttgg

SEQ ID NO: 105577 - DNA, 410 bp, Homo sapiens
  misc_feature (1)...(410): n = a,t,c or g
cccacgcgtccgcttaactagcctgtaaggggagaaatgttagtatcccactgtatagatgaagcagccaaaccatagacagattagctggcagacacagaattacattctgtttgatcccaaatatgtaaactactgtgtgatggaagatggtcttctgttaaacaccaatttccaaaaccgctgttgttcgtggttctatgaaatttgagtcttcttacggcaaaagactctaaagagtgatatacactttacaggacttattgtcttgttgtcaaattttgctaaatgttagaaccacttacctaggaaggtttttatttattaattaatttttttttttattttttttgagagggagtctcactcagtcgcccaggctatcgtgcaatggcacgatctcgggtcan

SEQ ID NO: 105578 - DNA, 440 bp, Homo sapiens
tagagttcaggggagagtgcgtcatatgttgttcctaggaagattgtagtggtgagggtgtttattatatatattacattattatttttattttttgagacgaagtttcgcccttgtcgcccaggttggagtgcactggcacgatctcatttcactccaacctgggcaacaagagtgaaactccatctcaaaaaaaaaaaaaaaagggggggccgttttaagggacccttgggggggccaaagtttacgggggctggcaaggtattagttttttccttatggggggccgttttataacctacctgggatttttggggagggacctttcttttgggggggggacttattgggccaacctccctacggaaattaaaggctttagggaaaatataaatttttaaggggtatagggggtaaaccaaccggctttgcctggcggt

SEQ ID NO: 105579 - DNA, 420 bp, Homo sapiens
atggggttttcatgtggatgtcctttttgttgatgttgatgttgatgctattcctttctctttgttagttttccttctaacagtcaggcccctcagttgcaggtctcttggagtttactggaggtcgattccagaacctgtttgcctgggcatcaccagtggaggctgcagaacagcaaatattgctgcccgatctttcctctggaagcttcatctgagaggggcacccacctgtttgaggggtctttgctccccttctgggagatgtctcccagtcaggctacacagggttcagggacccacttgaggaggcagtatgtctgttcttggagctcgaatgccatgctgagagaaccactgctctcttcagagctgtcagacagggatgtttaagtctgcagaatctgtctgttgcttttc

SEQ ID NO: 105580 - DNA, 418 bp, Homo sapiens
  misc_feature (1)...(418): n = a,t,c or g
ataaacgtcccaaaattagaagataaaaagacatgagggatccattctaatttgggtttggagtgtaatggtccagctccattcttctgcacatggatatccagttttacacaacactgtgaatgtaatgaatgccactgaatcatacactcaaaaatagctaaaatggcaaattggctgttatctctttttaaccaccatttttgaaaattaattataccaaaaaaccattgaatagggcactttatttatttatttattgggtgatttatttatttattttagaaataagagtctcactttgttgcccaggctggagtgcggtggcgtgatcgtggctcattgcagcctcgacctgctgggctcgggctatccttccatctcagccctcccgagtagctgggactgtanggtggcc

SEQ ID NO: 105581 - DNA, 409 bp, Homo sapiens
cccacgcgtccgcccacgcgtccgttaggtttattccatgtctttgctattgtaaatagtgctgcagtgaacatatgtgtgcatgtgtctttatgacagaacgatttatattccccagtgtattagtctgttctcacactgctataagaactacctgaggctggacgcagtggttcacgcctgaagtcccaggacttgggaggctgaggcaggctgatcacttgatgcctggagtttgaaacccgcccaactttcttggagaagccccatttttacttacaatgcagagtttttttgggtgtgaaggcccagatttttttttcttctttttgttgttggctggtcggagaatattataattttctggggggggccggtttagattccctctatggtgctatctttaccg

SEQ ID NO: 105582 - DNA, 441 bp, Homo sapiens
cgtttgcacggagtgcaatcactgcgcccttacgggggttgcaaggcgtccgaagtatgagtccactaacaaaagtccagaaactcgccagctaatagtattgtgtctcttcaaaatatcggagaataatttctttctcgctgatcgcctaacttctactgacgaagcttggaagccgcaaaagatggagttcgctcttgttgcccaggctggaatgcaatggcatgaccttggctcactgcaacctctgcctccccagttgaagtggttctcctgcctcagcctcccgaggagctgagattactgaaacacagaaaaaatcctaaaacttgggtggaactacaaaagacattaaataatcaaagtactcttgagcaacatggacacagctggaggcatcactctacctgattttgtaatccattatcagaaaactgtggg

SEQ ID NO: 105583 - DNA, 446 bp, Homo sapiens
atcgcttgaacccgggagggggagtttgcagtgagccgagatcacgccactgcactccagcctgggggacagagcgagactctgtctcaaaaaaaaaaaaaaaaaaccgtttttttattaaaaaaaggtgaagggaggggggcctttttttaaaaacccctttggcctggaccttatgggaaccggccacccttatatccaaaaaggttccaaaggggaatagggggggggaacaattggaaccggggttttcttgccccggggggaaggggggggaaggtaaaaaaatttcttccccctcctaaaagggggccccatttaaaaacgaaggaattattttttccgggattttccaaggaaaaattttggaccgggggtcccccttgaatagctgaacctgaaaaaaaaaaaacccggggttagggaaaaactaccgggatttttaa

SEQ ID NO: 105584 - DNA, 458 bp, Homo sapiens
  misc_feature (1)...(458): n = a,t,c or g
gtttaataccttagtacaggttaaaagcttcattaattgtgttagttttgatgaaaaatgtaagttataatcttatttaaaaaacagacaaaccacagacttgcacttttatttgccctgggctgaaaatgtgccaaagtcccacttaaaattttttttttaatgcttgaagcttttctgaccatttgatcttgggttggattgggttttgtaataatctaagcaagattgctttatgctcttccccaattaaaaacaagaatgatgaccttcaaaaaaaaaaaaaaaaaaaaaaaaaaaaaaaaaaaaaaaaaaaaaaaaaaannaaaannnnnnnnnnnnannaaaannnnnnnanaggggnngggcccaaanccccnnaaaannaaaanannnaaaaaattttnnggcccccgnnaaaccaggggggggggggggggggtaaaanttggtgggaa

SEQ ID NO: 105585 - DNA, 397 bp, Homo sapiens
cccacgcgttcgattttctaccttttaatatattctggaataatttataggggtttaaattaaccaaaagggtgggacccaaagttcactggagagacagcgggaaccacattatctgctttctttacggttttcaggctatgaagatattctgttggtttttgagacagctctgcttttatgtttttctaagaagacatctatttcatttgaggataaaagtaatataggtggcctgccaggcgcataggctcatgcctgtaatcccaacactttgggaggctcaggcgagtggatcgcgaggtcaaaagatcaacaccagcctgaccaacgtggggaaaccccgttttttcttaaaatgtcgaaaatttgcccgggcgtggtgtgggcagcctga

SEQ ID NO: 105586 - DNA, 219 bp, Homo sapiens
acagaggttgcagtgagcccagattgtgccattgcactccagcctgggtgacagatgagactccatctcaaaaaaaaaaaaaaaggttccccgggcccccttttgttttggcccggcctttgttggggcccgggccccaagggaaacccccacggggcggggagcccaaaaaagggcccccgggggataacggggggggggggcccagaaaacacgggg

SEQ ID NO: 105587 - DNA, 392 bp, Homo sapiens
  misc_feature (1)...(392): n = a,t,c or g
acacttcctttctttctcagtgaaggcagaagtaaaaccattatctgaaagtaaagtgtgtgtgtgtgtgtgtgtgtgtgtgtgtgtgtgtgtgtgtgaaaaacacaggaatatttgaaaaaaagggaggtatagaatgatctccagggaatactgtaagattgccttccaacactaaaggcgcacttgaggttagtcgtcatatattgaaaaaaagtgtgcttggggagctgcctgtttcccctcaggtgtgcttatctgcatgcatgcagagggggagtgagtcctgtctggtaaccccaagttcaagagggaatgggtaacgcaagatgagagcgcaagagggagaggacaaactctcanaagtcaaatctttctgtttttacactgtg

SEQ ID NO: 105588 - DNA, 376 bp, Homo sapiens
cggacgcgtgggcggacgcgtgggcggaggttgcagtgagtcaagatcaccccactgcattccagcctgggagacagagcaagactccgtctccaaaaaaaaaaaaaggttaacctttgggtttaaaaccccccgggataacccctgaaaaaaacttttaaaatttcacaggggaaaaattggctaagaaatttttttttcccccccaccaaaaaaaaaacttttaaggtaaaacaagggggtataaagggccaccttaaatttttcccctggccccgggaaagttttgtgggcccctggcggttggttttaacgggctaaccttaaaaacactttccttggatggagaaaccggcttttgtcaaagttgaaaatt

SEQ ID NO: 105589 - DNA, 444 bp, Homo sapiens
  misc_feature (1)...(444): n = a,t,c or g
gaggcggaggttgcagtgagcaaagatcgcgccactgaactccagcctgggcgacagagcgagactttgtctcagaaaaaaaaaaaaaagtccagggcctttatttaagccccaaacattggtttttaaaatatgggccctagcaattttaaagattaatggattctaaatctgaaaaaccataagcccttttctgtagttttaaaacagtttcttatttggaaaaactccccaggtacccccctactttgggtctcatgggacttaaaaattttgaaaaaatattttcaatggagggccccaaaagtcaaatttatggccgggggcgggggttcacacgggtaatcccggcccttttagggaggaggnnncnnnctnncnnnncctgngnncccnctaccccccaggtccagcgggaaaatccctgatctctaagacgcaagg

SEQ ID NO: 105590 - DNA, 393 bp, Homo sapiens
agtgggccaagatcacaccactgcactccagtctgggtgataaaacgagattccgtctcaaaaaaaaaaaaaaaccggccaaaccctttttggcaagggggggccccctttttattttccccccccctgaaaggaaggccccaggggctattttttgcccctctttggaaaattttttaagtttaaccctttcaaggggataaaaggaaaaaatgggggggtttaaattggcttttttgggagaacaaaaaccttaaattttgaattcgggccctggggggcccctcattttttgggagaaaaaccggcccaaacaattggcttttttttttttttaacccttaaaaaaaactttttgccaggccccagggccaatgcctggaaaccaaatta

SEQ ID NO: 105591 - DNA, 411 bp, Homo sapiens
  misc_feature (1)...(411): n = a,t,c or g
ttgagaaagccatgttgttagacatgggggcatgagttagcagttcttgtgagctttctcggtaaataaggggtcgtaagcctctgttgtcagattcacaatctgatgttttggttaaactatatttacaagaggaaaacccggtaatgatgtcggggttgagggataggaggagaatggtgcctcagtaaatatgttattaaatatgtaaaaaaaaaaaaaaaaaaaaaaaaaaaaaaaaaaaaaaaaaaaaaaaaaaaaaaaaaaaaaaaaaaaaaaaaaaannnaaaaaaaaannnnnggggggggggctttttaaaaattttttggggggcccccttttttcgcggggggggggagttttttttttttttttttgggggggaaaaaaaaaaaccctcggtggggtta

SEQ ID NO: 105592 - DNA, 398 bp, Homo sapiens
gcggagcttgtagcgagcccagatcgcaccactgcacagtagcctgggcaacagagcgagactccgtctctaaaaaaaaaaaaataaaaaaaacaaaaaacgcgggcggggggctttttattaaaagcgtttggccacttttttttttggtgaaacaaaaacccccttttttaagggggatgcgcccccatttttagaagggatcgccccgcaaaattttccctttaaggagcgtgcttgaaaccaccctcctgaccagctgggacggaataaagaacattctttttcctgttccgggtcccttaaagagagaaccggggagcaaaaaaaagatgccttacctattctaatctgggcggccccaactgggaaaaaacctttttttttcagaccgtttg

SEQ ID NO: 105593 - DNA, 383 bp, Homo sapiens
  misc_feature (1)...(383): n = a,t,c or g
ttcactctgatgatagtttcttttgctgtgcagaagctctttagtttagttagagcccatttgtctattttggctttcgttgccattgcttttggtgttttagtcatgaagtctttgggcctgagcttttctgctgatacatcaacaaaacatcactgctttttgcataaaacttcctgggcttttgagtcctttccaccacccttgttattcctcagagcatactgctttcagggagatggtatcaatccccctatgttcagaatgagaatccagcagggaatgggtcagggaacttctgggtgatcactcactcccatatcccattagagtttgggagtgggggtctggcttatcctgcactgtggggccaggtatgcacn

SEQ ID NO: 105594 - DNA, 389 bp, Homo sapiens
cccacgcgtccgccgatagaaaccaatactaatgccccataaacaggacaatgcttagaagaaaactccacaaaccccattactaaacccacactcaacagaaacaaagcatacatcattattctcgcacggactacaaccacgaccaatgatatgaaagaccatcgttgtatttcaactacaagaacaccaaaaaaaaaaaaaaaggggcgccctattaagaggaccctaaaaggggccaaaattaaccccacctggcaagggaatggttttttccttatgggggctgaaataaaaaactgtttggaaactttggaaagaacccttcttttgggggggggccaaatgggcacaacttcctaccagaatttaaggctttctagggaaaa

SEQ ID NO: 105595 - DNA, 466 bp, Homo sapiens
  misc_feature (1)...(466): n = a,t,c or g
gccggtannntttgatcgcctcggaccgcccgaatccttgagaccctgcgtccgcgcttgaacccgggaggcggagattgcagtgagccgagatggcaccattgcgctccagcctgggcgaggagagtgaaactctgtcggagaaaaattaaatagtaacatactgaccctgggagccttccatcttaaacctacccctacaggtgaccgaatgcagctggagaataactgcttgttaaaaggcggcaaaaccttgggttttgtggggaacatcagctatcactacttagagctcttggccatatgacagactaatcattagggtcgcagttattcttccaggggtcagatggggtgctcacatgctgcaggttccttacatgtgcttgtttccttccctaaactgaaggtgccttgaaggcagtctttttctacatccatcaagttctctggggaagagcacttt

SEQ ID NO: 105596 - DNA, 384 bp, Homo sapiens
aataaaacaagagtggcatgaacccgggaggcggatcttgcattgagccgagatcacgccactgcactccagcctgggcgacagaatgagactccatctcaaaaaaaaaaaaaaaaaaaaaaattttttaaaaaacccccaattaaaaaaaaaaagggggggggaattcaagggaaaattttttttaaccaaaaaaaaaaaccggttaaggcagggaaatttcccccttttaaaaaacagttagaaaagttttttttaagggggcccttttgggccgcctttttttttaggggaacccttttttttgaaaaagggggggtccctttttcccaaaaaaaaaaggggaaaaccattttttttgaaactttggtaaagggggaaggg

SEQ ID NO: 105597 - DNA, 356 bp, Homo sapiens
cagctactcgggaggctgaggcgggagattgcttgaacccaggaggtggaggctgcagtgagctgagattgtgccactgcactccagcctcagcaactgtctcaaaaaaaaaaaatacagcctcaattgggactaaaaataaaattatttataatttgggttttccaagggtttgaggaataactatgaggctgaggccatgaccaaatgtatatccccgcatggtttttttttttttttttttttgaaaaggggccccccttggccccccggtttgggttgcaaggggccaaactaggttaaagggggccttggcccccggggttaaagggaattcccccccccgccccccgggg

SEQ ID NO: 105598 - DNA, 381 bp, Homo sapiens
cggacgcgtgggcggacgcgtggacggacgcgtgggcgagatcccgccactggactccagcctgggcaacagagcgagactccgtctcaaaaaaaaaaaaaaaaaaccgggcggcccctttaaaaaaacccttataggggcccaaatttaacccggccttccccagctgaagtttttcccaaagggggccccccttaaaaacttgatgggggattttgggaagaaaccctttttttgggggggtgaaaaaaaggccaaaccaccttccccgaattgaggctttaagggaaaaaaaaaatttttaaagaaataaatgcgtaaaacaaccgagatttattgcttgttaaaaactttggcttccggccaaaaattttgaaaaat

SEQ ID NO: 105599 - DNA, 518 bp, Homo sapiens
  misc_feature (1)...(518): n = a,t,c or g
gcggnnnnnnnnnnncctagaactgcgtagcactcggccggaacccccgggncgacccacgcgtccggcaaggtggtggttgcagtgagccgagatcctgccactgcactccagcctgggcaaccaagcgagactctgccttaaaaaaaaaaaaaaaaaaagggggcccatatcccccatggaatactatgcccccataaaaaaaaaggggatcttgtcctgggcaccaccggggagggagctggaaccctttatcctaaaggacctccctcaaaaccaaaaacccaaatcccacttgttctcacttataagtaaaacctaacctttgagtccccttggatccaaaaaagggacccgcaaaccctggggcctacctgaggccggaccatggaaggagggtgaggatcaaaaacctacctatcgggccctatgctttttatcgggaggaggaaataatcgtgacaacaaaccctggggacatgcattttacctatatagcaggcctacacatgtgcccc

SEQ ID NO: 105600 - DNA, 403 bp, Homo sapiens
caagctgagaagatgctcgttacgggaacgtccggatcatcctcagagagggaaggaggaggacaagcccatggtacctgttccctgtaactgtacaagaaactgatggatggggacatggggctctctgcctgtgctcctcacaacaagatccacatgtcccccaaggagccccaggttacacagaagaacgggggcaaccatttggattttttttcgattgtttgagacaggcactgtgttacccatgctggagtgcagcaccgtgatcatggcgcactgccgcctgcaactaccaggctcaagcagttctcccaccatagcctctcaagtagctgggactaaggcacacctgtctgattgttttgtatactagtggagacaaagtctcgatatgctgtca

SEQ ID NO: 105601 - DNA, 343 bp, Homo sapiens
acttaacgtaaatgacgagttaatgggtgcagggcaccaacatgggacatgtgtacatatgtaacaaatctgcacgttgtgcacatgtaccctagaacttaaagtatatatattaaaaaaaagatagttgaatgctcacctaatttcctaagaagattaacaatttttattttacttttttgcaggatccaactggaatattctcactagataaaaccattggccttggtacttatggcagaatctatttggtaagttgacttacattatttattcattcttcattttctaatgacaacaaagattgtgagtcaaacactgcaaatcacataatgccacaata

SEQ ID NO: 105602 - DNA, 369 bp, Homo sapiens
gtggggcttgcagtgagccaagatcgcaccactgcactccagactggtcgacagtgcaagactccgtgtcaaaaaaaaaaaaaaaaaaaggtttggaagctttcttttgaagaaacccaagggctttggaaaaggagggtattttaatttttttcagaacagggacctttccattagggtttttttcccctttaaaaaaaaaccggggacctttatattttgggttaatggggttttttaaagggtaaccatttttaaatttctttatttttacccaaaacctttttggcttttttttttcacttaataaccggattggccaaaaaatcccgggaagaaaggtaaaaatctttcttaagtgaaaaattt

SEQ ID NO: 105603 - DNA, 372 bp, Homo sapiens
  misc_feature (1)...(372): n = a,t,c or g
gcggagcttgcagtgagccgagatcgcaccactgcactccagcttggatgacagagcgagaccttgtctcaaaaaaaaaaaaaaaaaacgctcccctttatattttgggggcccgttaaaacccctttaaaacccccgatgtggcctttttatccccccccctttttttttggcccctcccccgggcctttttttgccctggggtgctccattctctttttccctttattaaaaaacggggaaatgtctaccctttctttaaagactttttttttttttttgtggtncctggntttacttacaacttttttttttcttttagaacctcttacgcggatttgtcttttcgattttcaaacaaaaaattttctt

SEQ ID NO: 105604 - DNA, 351 bp, Homo sapiens
tggtttttgtctttgggtctgtttatatgctggattacgtttattgatttgcgtatgctgaaccatccttgcatcccatggatgaaccccacttgatcatggaggatgcgctgtttgatatgctgttggattctggttgccagccttttattgaggattattgcatctacgtacatcacattaattccagatggattaaagacttaaatgttagacctaaaaccataccaaccctataagaaaacctatgcactaccattcaagacataggcatgggcaaggacttgctgtctataacaccataatcattggcacaaatgccagatttgtccaatgggatctaattcaact

SEQ ID NO: 105605 - DNA, 360 bp, Homo sapiens
cttgaactcgggaggcggagtttgcagtgagctgaggtagcgccagtgcactccagcctggacgacagagcgagacttcatctcaaaaaaaaaaaaaaaaaaaaggggaaaaaaaaaaccattaaggcccccatttcctaattttttttggaattggcaaacacacccttaaaggggggaaaaaaaatttttaggggggacccggaaaaaaaacccctttaatgggggaaaaaattattccaggccctaagaaaagggctttcaacccgggggggggcaagggggcccaaagccacctaagaaaaaagggttggagcccttcgcccatttttttccccccaaaagggctaataaaaaccc

SEQ ID NO: 105606 - DNA, 358 bp, Homo sapiens
gtgccactgcactccagcctgggtgacagagcaagactctgtctcaaaaaaaagaaaaaaatcatctttccagtgcccttgtgaggccccaggcttgtttgatgacagtgctgatgttacagcctgccacacgacatattttgaggaagacaggatggagcaagataagggttcagatctatccccaagcccagggtaggtgtgtaggagccctgagcggatggatgaaagctgtcctggtctgagtgcagagaatggggtgttcgggttctccatttgagtcttccactgcccaaacctgaggcccctttaaggttgccccttaaagttgccacacccagaaattgggccaaagaag

SEQ ID NO: 105607 - DNA, 383 bp, Homo sapiens
gggctctgtgccagcatggtgaaagagaggacaggacaagtttctcccctggaaaagacgtgaactcctgttagggaaagagatttgaatgcatgacagcaacagagaatgatgcttcattcactgtccaaccggggtgagcacagccgagggccgcaggtgcagggccacacaagagccagaggccagtttgctgccagaaggactccctggctggctgtggctcttgcagatagagccaaggattataagacctcgatagtggccaggcgcggtggctcacgcctataatcccaccactttgggaggccaaggtgggcggattgtgaggtcaagagatcgagaccatcctggccaacatggcgaaaccccatctctactaa

SEQ ID NO: 105608 - DNA, 379 bp, Homo sapiens
cagggtcctgtggacagctcacctagcggcaatggctgcaggctcccggacgtccctgctcctggcttttgccctgctctgcctgccctggcttcaagaggctggtgccgtccaaaccgttcccttatccaggctttttaaagaggctatgctccaagcccatcgcgcacaccagctggccattgacacctaccaggagtttataagctcttggggaatggaagcctatatcacaaaggaacagaagtattcattcctgcatgactcccagacctccttctgcttctcagactctattccgacatcctccaacatggaggaaacgcagcagaaatccaacttagagctgctccacatctccctgctgctcatcgagtcg

SEQ ID NO: 105609 - DNA, 389 bp, Homo sapiens
gccccgaaccactcagggtcctgtggacagctcaccgaggggcaaagggtgcaggctcccggacgtccctgctcctgggttttgccctgctctgcctgccctggcttcaagaggctggcgccgtccaaaccgttccgttatccaagctttttgaccacgctatgctccaagcccatcgcgcgcaccagctggccattgacacctaccaggagtttgaagaaacctatatcccagaggaccagaagtattcattcctgcatgactcccagacctccttctgcttctcagactctattccgacaccctccaacatggaggaaacgcaacagaaaaccaatctagagctgcttcggatattcctggtgctcatcgagttgtggctggacccg

SEQ ID NO: 105610 - DNA, 386 bp, Homo sapiens
gcgcggggagccgcagcggttccgagcggggcccaacatggcggagagagaggtggagtccggcccccgaaagagggtctgctggagtttgctggaggtctactgcaaaccctgtttgcctgggtatcagcagtggaggctgcagaacagcaaagattgctgccttctccttcctctggaagcttcatcccagaggggcacctgccagatgccagtcagagctctcctgtatgagctgcctgttgacccatgctgggacatgtctcccagtcaggaggcaatggggtcagggacccacttgaggaggcagtctgtcccttagcaaagctcaagcactgttctgggagatccactgctctcttcagagctggcaggcagaaacgttt

SEQ ID NO: 105611 - DNA, 371 bp, Homo sapiens
agcctaactcaactaaccactcagggacctgtggacagctcacctagaggcaatggctccaagcttccggacggacctgctcctggcttatgccctgctctgcctgccctggctacaagaggctcgagccgtccaaaccgtttcgttatacaggctttccgaccacgctatgctccaagcccatcgcgcgcaccagctggccattgacacctaccacgagatagaagaaacctatatcctaaaggaccagaagtattcattcctgcatgactcccagacctccttctgcttctcagactctattccgacaccctccaacaaggaggaaacgcaacagaaattctatctagagctgctccccatttccctgc

SEQ ID NO: 105612 - DNA, 359 bp, Homo sapiens
cactcagggccctgtggacagctgacctaggggcaaaggctccaggctcccggacgttcctgctcctggcttctgccctgctctgcctgccctggcttgaagaggctggagccggccaaaccgttccgttatccaagctttttgaccacgctatactccaagctcatcgcgcgcaccagctggccattgacacctaccaggagcttgaagaaacctatataccaaaggaccagaagcattcattcctgcttgactcccagacctccttctgcttcttagactctattccgacaccctccaacatggaggaaacgcgacagaaatccaatctagagctgttcagaacttccctgctgctc

SEQ ID NO: 105613 - DNA, 363 bp, Homo sapiens
ccccgaaccactcaagggcctgtggacagatcacctaggggcactggctccaagctcccggacgtccctgctcctggcttatgccctgctctgcctgccctggcttcaagaggctggtgccggccaaaccgttccggtatacacgctttttgaccacgctatgctccaagcccatcgtgcgcaccagctggccattgacacctaccacgagttagacgaaacctatatgccagaggaccacaagtattcattcctgcatgactcccagacctgcttctgcttctcagactctattacgacaccctacaacatggaggaaacgcaacatacatccaatgtagagctgctacgcatctccctgct

SEQ ID NO: 105614 - DNA, 393 bp, Homo sapiens
cggacgcgtgggtgaatatccattgattacctcactgtatgccagccattctggtagacattatgatatggtggcaaatgggccaagcttgtcctgcattcagggcacttagacccttgttagggactgctgaggtcagtcctccaggaagactcaggatactgagcagcacttgaatggagtcattgctaacttttcatgctggccaccaggaagctcagagctactgatagcattcttcagggcttctaagctgtcaaaagcaaaagggggcagggggagaataaggggtaaataaaaatgttggaaatgaggccaggcgtggtggctcacgcctgtaatcccagcattttgggaggctaaggggggcagatcacttgaggccaggagttc

SEQ ID NO: 105615 - DNA, 392 bp, Homo sapiens
gaccatgaaaagacttggcatgaactgaaacaggctttcatttccacagaattcacaggagcatggttcctaataatagcccctgatagcctgctctttctttctttttcttttttttttttttggaaaaaaaattttgtttttgccccccaggtggaagggcggggggggaatttgggttaatgggaaccccggtttccggggtcaagccttttttttggcttcatcctccaaaaaaccgggaatggggggccccccccttacccccgggaaaaggtttgtttttttaaaaaaaaaggggttttccccggggggcccaggagggtctaaattctctgccccggggacccccccaactggccccccaaaagggtgggaaataccggctaaag

SEQ ID NO: 105616 - DNA, 386 bp, Homo sapiens
cccacgcgtccggtgggcgcctgtcggctactcgtgaggctggggcggaaagttgcttgaactcaggaggtggaggttttggtgagctgaaatggcgccactgcactccaacccgagcgacagagcaagattccgtcccaaaatgaaaaagcagtttttgccatcagcaaggatatctcctccactttaatggacaggcctcatttttggcagctatgctgtttgagatgtagactgactatccgatgctcctccctagctcaagtttttacttgtgattacacacaccactttgaattctgctttcataggcgaaaatttgggcttgatatctaatcagcaaaagggcctgtgcagcaattcccttcattttagactcatatgac

SEQ ID NO: 105617 - DNA, 338 bp, Homo sapiens
gtttttgtggctttgaaatttttgatgtgcttactatccgtttgtatattctctttagagaatatctattcaaattccttgccccaaaaaaattgcttgcctttgatttttttctttttattttttgagatggaggcttgctctgtcacccaggctggagtgcagtggggagatcttggctcgctgcagccaccagtctcccacttgaacttgggaggcggaggctgttgtgagccgagagaatgccactgcactccatgctccaggccaggcgacagagacttcgtctttaacaagaatactatgatccaggataaccaccttatggagttgacaag

SEQ ID NO: 105618 - DNA, 315 bp, Homo sapiens
gcacgaggagagagagagagagagagagagagagagagagagagagagagagagagagagagagagagtggggcgcactgtggggggggtgggcgaaacctataaagcggagttgccgcgcgtggggggcgccgcgcaaaaaagggcgcacttttctgcgcgggggcgtctctttatggagatatgtggggatatgtgtggggagaaaccagggaaacccccacactctctcactgaagagtgtctctcccggtgtggagagcgcttttttgacacctctctcgctatcaccagagggtgtgcacagagtgtaga

SEQ ID NO: 105619 - DNA, 307 bp, Homo sapiens
gcacgagcggcacgagctctctctctctctctctctctctctctctctctctctctctctctctctctctccccgcgccgctcgtgctctctgtcttccacccccctcttgtggatctggcgaggggggggataaaaaagagggggggaggctgtgtctctccctgaaaaaagtctgtttctttgtctcacccccctgggtattatgcgctctcacacacgagagtgttttctgtgcgctaaaactctctcttgtgggggcgctccgaaaaagtcagcgctctaaaaaaaacgcgcgctctctcttt

SEQ ID NO: 105620 - DNA, 329 bp, Homo sapiens
aacgttctgcagccttcgctggtgatacccaggaaaacagggtctggagtggaccttcagcaaactcgaacagacctgcagctgaggggcctgtctgttagaaggaaaactaacaaacagaaaggaatagcatcaacatcaacaaaaaggacatccacaccaaaaccccatctgtaggccaccaacatcaaagaccaaaggtagataaaaccacaaagatggggagaaaccagagcagaaaggctgaaaattccaaaaactggaaagcctcttctcctccaaaggaacacaactcttcaccagcaagggaacaaaactggatggagagt

SEQ ID NO: 105621 - DNA, 351 bp, Homo sapiens
gagaaatgcggaacctggtaggcagaggctgcagtgagccaatactgcaccactgcacaccagcctgggcaacagagaccccgtctcaaaaaaaaaaaaaaaaaaaaatttttgacggcaggttttttttttgctaaaaaggggaatattttgccaaaaaaaggtttttttttttatttaaaaaatctataaaaaaaaacagggatggctttagtttaaaaaaacaaactttataaacaattttttttaaaatgagattttttttaccactttttaaaaaaaagaaaaagtttttttacttgaaatgggccttgaaagttaactttgccaaaagtggaaaagcaccccgaa

SEQ ID NO: 105622 - DNA, 388 bp, Homo sapiens
  misc_feature (1)...(388): n = a,t,c or g
ggcacgagggcgtgatgaacccgggaggcggagcttgcagtgagtcgagatcgcgccactgcactcccgcctgggctacagagcgagactccgtctcattaaaaaagaaaaagaaaaagaaactgggtcaacttcaagactttaagtcgtaaaggtttccatcagtttggtataagagttgagtttccagactaatcagagggagggtgttaattgcaaattgtgtgtccaagctcttcctagtatcctttttgtgccttaacagagcagaataggaaaggaaaaaaatccctcattgcccccaaaaaataaaatactggttgttttcttctgtgatcagagttgagtttcatcacttcttcccttctagggtcacctgcctgggtan

SEQ ID NO: 105623 - DNA, 314 bp, Homo sapiens
  misc_feature (1)...(314): n = a,t,c or g
ggtgatgctgccaacttactgatttagtgtatgatggtgtttttgaggtgctccagtggcttctgtttctatcagctgtccctcctgttcagctactgacggggtggtgcgtaacggcaaaagcaccgccggacatcaacgctatctctgctctcactgccgtaaaacatggcaactgcagttcacttacaccgcttctcaacccggtacgcaccagaaaatcattgatatggccatgaatggcgttggatgccgggcaacagcccgcattatgggcgttggcctcaacacgattttacgtcacttaaaaaacn

SEQ ID NO: 105624 - DNA, 408 bp, Homo sapiens
gaggttatcaataaggggctattccaggggccatgggtcatttcacagaggaggacaaggctactatcacaagcctgtggggcatggtgaatgcggaagatgctggaggagaaaccctggaaaggctcctggttgactacccatggacccagaggttctttgacagctttggcaacctgtcctctgcctctgccatcatgggcaaccccaaagtcatggcacatggcaagaaggtgctgacttccttgggagatgccacaaagcacctggatgatctcaagggcacctttgcccagctgagtgaactgcactgtgacaagctgcatgtggatcctgagaacttcaaactcctgggaaatgtgctggtgaccggtatggcaatccatttaggcaaagaattcacccctg

SEQ ID NO: 105625 - DNA, 370 bp, Homo sapiens
gccgaaatcatgccattgcactccagccttggcgacagagcaatgctctgtctccaaaggaaaaaaaaaaaaaaaaaaaaccctggccccccctggagggggcaaaacatcgacaagcttttacaagtcaataataaaacaccacccccacgggaaaagggacaaaggacctgaccattctttctccaaaaacaaaacaaaagggggcaacaagcccctgcaaaaaaaacccacggccaaaccctccttcacacccatggggctttaatggacccagggaaaactgaccctacaggggccccgggacaaagaaatcggacccctcacaccctgttggggggaagggaatggtcccccccccctgaaaaat

SEQ ID NO: 105626 - DNA, 373 bp, Homo sapiens
gcagaggatgcaatgagccaagatcacaccactgcactccagccttggcgacagagggagactctgtctcaaaaaaaaaaaaaaaaggggggccccggccccttaccctttgccttggccccccccaaaaacccaatttagggggtggttttccttatcccacaaaaaaagggctggggttacccaaggacccttttgttttaaaggaaaaaaaaaaccgggggtccttttggcctttcccggggacttttgttttttaaccattttttttttggggggaaacccaagggggttgggtaaaaaccttaaaaaaagggttttttttatttttgggggagtgggaaggggcccctttcccagccccccttggggg

SEQ ID NO: 105627 - DNA, 473 bp, Homo sapiens
  misc_feature (1)...(473): n = a,t,c or g
gtaggcgggggttttnatacggatgngcttgaggaacntgcccgnaanccccggnncgacccacgcgtccggcagcagcggaccacagctcactgcagcctcaaccttcctgggctccagcgaccccccagcctcagcttgccaagtggttgggactacaggcatgcgccactgtgtgccacccaaaaaatcttagcataccgcgtagcacaaagggagcgttcagcacatgggagctattaccaggcgtcttaatccattttgtgctgctggtacagattaccacagactgggtaatttataaagaaaagaagcttatttggctcacagttctggagactgggaagtccaagagcatggtgcaagtatctggtgagggtcatcctgtgtgaggcagaaggctcacatggtgagcacgtgcatgagacagacagcatggcagcagaactcatctttttgccaggagcccaccn

SEQ ID NO: 105628 - DNA, 447 bp, Homo sapiens
  misc_feature (1)...(447): n = a,t,c or g
cggttttnacgatgccnnnaactgagaccatgagnacntagacncacgcttggacgaggccttaacatttaatttgcattcatcattgctttaaaatgttgcttgtgattaaacctacagctagaatttgttactcagtgtttttttgttgttgttctgttttgttttgtttgaggcaggagaattgcttgaacccgggaggcggaggttgccatgagccgagatagcgcaattgcactctagcctgggcaacaagagcaagactccatctcanaaaaaaaaggaaaggaaaaagaaagaattgggggaaaaggggtaggtgaggaccctaaaatccccagggctaaggagcggtttccaaaaaaaaactttgaaaacctttcaccctgtgctttggactccaaagcgtggattcaagcccagcttttccatttaattcatttaccg

SEQ ID NO: 105629 - DNA, 470 bp, Homo sapiens
  misc_feature (1)...(470): n = a,t,c or g
tgattgcacggggccnnnnncctaaagacccaaatgnacccgnaaccaccannacgcnaagnttgggacgagggacagcccatagaaggctttggagacccttgagtcggccagcgagcagggtttcttacttgagcgccgccacaaataaacgctccttcgctcctccgtcgcgtgcgtttccctgggataataagtgggaaagggggggcttttatttttttgagacagggtctcaccgccgtcgcccaggccggatggagtgcagtggcgcgatcacggctcactgcagcctcgacttcccaggctcagagatgggtttcaccatgtttcccagccttgtctcaaactcctgacctcaagtgatccgccgtcttgggtcttcgaaagtgctgggacagcaggagtgagccaccgcatctggcccggaaagtgttttggagcgtataaaaatgcaaattatagggctg

SEQ ID NO: 105630 - DNA, 368 bp, Homo sapiens
  misc_feature (1)...(368): n = a,t,c or g
ggcaaaaagcagcagaaacttctgcagacttaaacatccctgtctgacagctctgaagagagcagtggttctcccaggatggtgttttagcttggagaacagacagactgcctcctcaagtgggtccctgacccccatgtagcctaactgggagacacctcccagtagccgactgacacctcatacaggcaggtgcccctctgggatgaagcttccagaggaaggatcactcagcaatatttgctgttctgcaatatttgctgttctgcagcctctgatggtgatacccaggcaaacaggtctggagtagacctccagcaaactccaacagacctgcagctgagggacctcactggtagaaaggaaan

SEQ ID NO: 105631 - DNA, 446 bp, Homo sapiens
gctacttgggaggctgaggcaggagaatctctttgaacctggaaggtggaggttgcaataagccgagatagtgccactgcactcccagcctagataacagagcaagactctgtctcaaaaaacaacaacaacaacaacaaaacaattctatgactgaaagtgactaaaaagctggctttatgccattaacactctgtactttgcagccaatcagaactgacgcagtctgggtgctagctgcttcaaaagcaacccacaccacacttttaccatttccatacatcaactgctgagaatatgaaaatgcacagtgacaggttttaggatcctgcttcaggatttccttttcctggtttggtcactagagttggctatttatctgtttctaaacaatagctattttatcgaatagtttagagaccactattaaatattgtgactgatga

SEQ ID NO: 105632 - DNA, 436 bp, Homo sapiens
  misc_feature (1)...(436): n = a,t,c or g
ctcagcaaactccaacacacctgcagctgagggtcctgactgtcggaaggaaaactaacaaacagaaaggacaaccacaccaaaaccccatctgtacatcaccatcatcaaaaaccaaaggtagataaaaccacaaggatggggagaattcagagcacaaaagctgaaaattctaaaaatgagagcacctcttctcctccaaaggaacacagcacctcaccagcaacggaacaaagccggatggagaatgactttgacgagttgagagaagacttcagaagatcagtaataacaaacttctctgagttaaaggaggatgttcgaaccctttgtaaagaagctaaaaaccttgaaaaaagattggatgaatggcgaactagaataaacagcatggagaagaccataaatgacctgatggagctgaaaaccatggcan

SEQ ID NO: 105633 - DNA, 430 bp, Homo sapiens
ccaggctggccgtgaactcctgtgctcaggtgatcctcccacctcagcctcccaaagtattgggattacaggagtaagccaccgcacctgacctagatgtcattttaaatcagtcttatttttccatttacagagctgtgcatgtgggttattaaaattcaaacagtgcagaggcaaagcatacacatctcgatttggtcccaattcttcatatttgtatttatcccaggggccagatagtaaatattttagcagttgctggctggctctgttatctgttgcgatgattcagtcccgccaccataggacaggagcagccctgagtgatatgtaaatgaagaggcgtggctttttggggttaaccaggtggcaggtggatttagccaggaaaagggtggtttgctcacccctggtctatgttaattgatat

SEQ ID NO: 105634 - DNA, 406 bp, Homo sapiens
  misc_feature (1)...(406): n = a,t,c or g
caggctggtcttgaactcctgacctcaggtgatccacctaccttgacctcccaaagtgctgggattacaggtgtgagccacctcgcctgacccaatggcaactcttttataactgttaactatgatacacttagactgtgctcacagagagaatgcatgtgacactgtgtatgtaatggaaccttgaatgcatgcacacacagacttcagacagtatagtaaaaacggaagaattcagcgaacaccagtcagatgaggcatgagattatcacaggtggaaactagcagaatacagttataacatatgccaactatccagcctgggcgacagtgcgggactccgtctcanaaaaaaattaaaaaaggaattttaacccggggttgtgcgtgcttttttaaaaaacaa

SEQ ID NO: 105635 - DNA, 433 bp, Homo sapiens
  misc_feature (1)...(433): n = a,t,c or g
agaggtggaggttacagtgagctgagattgtgcgactgcacactcaagcctgggtgacagagtgagactctgtctcanaaaaaaaaaaaaaaaaaaaaaaaccccaaaaaaaaaaaaaaaaagccccccccaaaaaaaaacccttgggggaaattttggaaaaaaaatttaaaaaaacgggaaaaaaggggaaaaaaaaaacccccccccgggaaaaaaaaaaaaaaggggggggccccaaaataaaaaaagggattcaaaaaaaaaaaagggaaaaataaaaaaaaaaaatttctaagaaaaatttttttaaaaaaacccaaaaaggggaaaaaccccttattttttgtttttgggaaaaaaaccccccccccttgggaaaaaaaaaaaaaaaaagggaaaatcctttcccccccccccccaaaaatgggga

SEQ ID NO: 105636 - DNA, 405 bp, Homo sapiens
tggaaaagatcatgtgattttacagttgattttcatgccaaagttttgagtaacagataatatcagaaattattctcaaccttgtttcaggtttttgttttattttgtttacagagttaacttcaatgcccaaaagaactggaaataaatagattcagaagtcaaatgtattcactaactgtattcaagagtagatgaggccgggtgccgtggctcacgcctgtagtcctgacctcaggtgatccgcctgcctcagcttcccaaagtgctgggattacaggtgtgagccaccgtgcctggcctctgttttttcttttgttcttttaggggcggctttataacattaccttctttaacccaatctttatatctatcgtttaagactattaaatttatactgtgaat

SEQ ID NO: 105637 - DNA, 381 bp, Homo sapiens
tcctgatataggaaacaacgggaatgaaccttgaagatatcatggccagtgaaagacaccagacacagaaggccacagagtgtctgattccatttctctgaaacgtccagaaaagacaaatccatagagctagaaaatggattcgtgcttcctcggggctgagggcaggagaatgggagcaaatgattaatggataaaagagtttccctttggggggatgaaaatattttgaaagtagaaagcaacagtggttgtacaacattgtatttgcttgtttgttttgagatggagtctcgctctatcacccaggctggagtgcagtggcgtgatctcagctcactgcaacctccgccttctaggttcaagcgattctcctgtctt

SEQ ID NO: 105638 - DNA, 474 bp, Homo sapiens
  misc_feature (1)...(474): n = a,t,c or g
aggtngcagnnnnntttgagtacactacatcgngcggnggaantcgccccaagaaggcttccagacagaacccggcactgtagagctacagagttccttctcacccagacacactagtgctctccagaatctctgcccaggaggcaggggaaaaatctcctttctgcttcccagagagggtctggccttgcccaaggccactcagtgatttaggaagaaggctgaagctagagtgtggacctgacctgttggacagtacttttctttctttttttttcggggaggggttaaagacaggatctcactctggcgctctggagtgcagtggtgtgattagggatcattgcggactctgcctctcaggctcaggtgatcctcccatctcagcctgcctccgagtagctgggactacaggtgtgagtcaccactgtattttttgcagacaggatctccctggttcctaggctggnctcn

SEQ ID NO: 105639 - DNA, 543 bp, Homo sapiens
  misc_feature (1)...(543): n = a,t,c or g
ncgtggggccctcgactctattccgcgtggcggaattctggagtagcacttctaattaccttcaagaaacgttgctttgcattggcaactaagcctaagtggtgcaagaggcctagcttttggctgatctcagcttttgacatgccttcctcactaagcttaatcatttctagtttttgatttccagtgagagacgtgtggatctttgctctacttgaacactgcagaagtcactggaaggttattcattggcctaatttcaatactgttttgtctcagggaatagagagacccaaggaaagggagagagatgggggaacagccggttggttgagccgtcagaatacatgcatttattgggtaagtttgccatcctatgtgggcgtggttcatggtgccccaaaataattacagtagtaacaacaaagattaatgatcacaggttaccatangagatacaataatgaaaagggttgaaatattgggtgaaataccaaaatatggcacagagacatgaagtaagcacatactggntggaaaatg

SEQ ID NO: 105640 - DNA, 519 bp, Homo sapiens
  misc_feature (1)...(519): n = a,t,c or g
tgagtcaggnngngnnnnaatcgaacaccatcgatgtgcntgaagacagctcgcagngagctgagattgcgccactgcactccagcctgggtgacagagcaagactctgtctcaaaaaattaagaagatataaaactatgttttagggatgaaaataaataaaacatgctccattaaagaaaatttaaaaaatacagaaaaatgttgagggagaatcctcccataggtgagctgtcatgatcaaatgtgctcatgacatggcgctgcatccaggcctttcttcctcccgttatctacaggatcaagtccacgcatcccagtccttgctggcacagctccagggcccctctccattttcctcggccatatccctcttcattgccgggttgaccagtcccaccaagtatctcgccctcattccaggacaccacagcctcctcgctggtctctgggcctctggcaagctcttctctccctcttgtctccttgacagacttgactcacccttcaaggccctgn

SEQ ID NO: 105641 - DNA, 393 bp, Homo sapiens
aggttccaaaatatgtaaaaatgataataataaaaaaagattaacaaaaaaaaaaaaaaaaaaaaaaaaaaaaaaaaaaaaaaaaaaaaaaaaaaaaaagggggggggcctttaaaaaaaacatggggggggccccatttgtccctgggcccaaaaaaaaaattttttcctttttgagggggaataattaaacccctggtggtttttttggaaaaaaaccttttttttggggggggaaaaatgggccaaaccccccccaaaaaaaaacaggcctttgggaaaaaaaaaatttttaaagggggttggggggaaaaaaacccccttttctcccttggggaaaaagtttccctttcggggggtttttaaaaaaaattttccccccgggtcttttag

SEQ ID NO: 105642 - DNA, 369 bp, Homo sapiens
cagatctataacctctccctatatattctgcatgcattgaagtaggctcaaaccctcagggacctggtatagacgcaaaatctgtttcacacaacaactgctatttgaaggaaaaaaaaaaaaaaaaaagcaatggttcccaaaacaatcttttaccaaaaatccatacaccaaatgggtccggaaaaaaaaccggggaaaaaattcaaaacccgcccagggggggccccaaactttccaaaaaccaaaagtactccaaaaatttaaaaaaacattgttgcccgcggttaactttcttaatttccaaaagggaaaaggggaatcgaaaatacacctttggaaaaagcggctgtttttaccaaaaaaaat

SEQ ID NO: 105643 - DNA, 514 bp, Homo sapiens
  misc_feature (1)...(514): n = a,t,c or g
cgggcggcgcggagtactaagggattagtaatcgcgacaactcttcctttcccctcaagaggccggccnnnnnnttttgaacctcgagaacatcgcccggccncccgggcgacccagcggccggggggngcatagnagaagagcgaaggngagagctaaggccggggcggcgaagcaaagggcgaaggcagaaggggcgggnnctaggggctctttggggaagagcnnaatggcgtcagcgaagggttgtagtagcccgtaggggcctacaacgttggggcctttgcgtagttgtatgtagcctaaaatttttcgttcggtaagcattaggaatgccattgcgattagaatgggtacaatgaggagtaggaggttggccatgggtatgttgttaagaagaggaattgaacctctgactgtaaagttttaagttttatgcgattaccgggctctgccatcttaacaaaccctgttcttgggtgggtgtgggtataatactaagttgagatgaacc

SEQ ID NO: 105644 - DNA, 399 bp, Homo sapiens
aattgctgtgctcaagcgatcctcccaccttggcctcccaaagagttgggattacagacatgagccaccacgcccagcctatattgtcatcaaagtatactatccagaggcacatgctgtcagtttgagccattattggccatgttagctgacttcaaatgctattggccaggtttctccactggaaagctactgtcttccttttcacagttacatttgtggggaagatactctgagactttgtaaatatcctgctcatcgtccattagttttagcaaccaccagttcctgtctattcatttattctgggagacgccaaagggcgattttttaattttgctatagtttgtttattacttggattactgacataaggaatagcttgccctttgccctcat

SEQ ID NO: 105645 - DNA, 422 bp, Homo sapiens
atcgcgagcgccgccccatcatactctttcacccacagcaccaatcctacctccatcgctaaccccactaaaacactcaccaagacctcaaccccatggcctccatgactttttcaaaaaaaaaaaaaaaaaaaaaaaaaaaaaaaaaaaaaaaaaaaaaaaaaaaaaaaaaaaaaaaggggggggggccctaaaaaaaaaaaccggggggggccaaaaaaaaccggggggaaaaaaaaaatatttttttctttaaagggggggaaaaaaaaaaccccggggggatttttaaaaaaaaaaccttttttggggggggggaaattgggcccccccccccccaaaaaaattagggcgggggagaaaaaaaaaaatttttgggggggggggggggaaaacaacgcgcccttcccctgtgtaaaaaa

SEQ ID NO: 105646 - DNA, 319 bp, Homo sapiens
  misc_feature (1)...(319): n = a,t,c or g
tccctcggtcccctgaatgaggccggtctcccggcgaaagtgagcgaggattgcccggagcgcgcacgaggggaaaatgcctagaaaatacactggggctaggaagaacgctgagaaccgcccacaacgtgaacttcaactaaaagcatcaagaagcactatagatttagctgaacatgcatgtaatgctttatggtatcagctttttttgatatcagttggtagttggaaaaactatatactattttatctgacgtatacctgaataaaattttagtgaagaccccnanaaaaaaaaaaaaaaaaaaaaaaaaaaana

SEQ ID NO: 105647 - DNA, 343 bp, Homo sapiens
gtgagccgagatcccgccactgcactccagcctgggcgacggagcgagactccgtctcaaaaaaaaaaaaaaaaaaaagggatattcggaaaaattttgggaaagaaaacccttcttttttataccggaaaaaaatttttttttacctggaaaagggccccagggttcctttaaaaaaaccggttttttgactaataaaggcggttttttacaccggaggctaatagtatagaaaaaaaagtggggcagttttaaaagggccctaaaaatggatttttttcccccaaaaaggttggggaacaaaacaaacttttttctgggtggagcttaaactgacaatcaa

SEQ ID NO: 105648 - DNA, 347 bp, Homo sapiens
aggaaaactaacaaacagaaaggaatagcatcaacatcaacaaaaaggacatccacacagaaaccccatctgaaggtcaccaacatcaaagaccaatagtagataaatccacgaagatgaggaaaaaccagtgcaaaaaggctgaaaattccaaaaaccagagtgcttcttctcccgcaaaggatcacaactgcttgccagcaaaagaacaaaactggacagagaatgagtttcacaaattgacagaagtaggcttcagaataataacaaactccgttgagctaaaggagcatattctaacccaatgcaaggaagctaagaaccttgaacaaaggttagaggaattg

SEQ ID NO: 105649 - DNA, 342 bp, Homo sapiens
ctctggagcctgaggaacgtgaatcgcttgaacccagaagacagaggttgcagtgagctgagatggcactattgcactccagcctgggtgacacagcaagactctgtctcataaaaaaaaaaaaaaaaaagggaaaaaaaaaaaggagggagggccccaccccccctaaaaatttacccggctttttcacaaaaacccttgttatttccggaatttccaaaaaaaaggacccttccggcatttaaatttataagaaaagggttttttgggcccctaaaaaaccatttttttttaattttttggaccttggttaaaaaagagtttccaaaattttggaggggg

SEQ ID NO: 105650 - DNA, 317 bp, Homo sapiens
gccgagatcacaccactgcactccagcctgggcaacagagggagactgtctcaaaaaaaaaaaaaaaaaaaaaaaaaaaatcccccctttttaataaaaaggcccttttaaaacccgggaataacccgaacaagggctttttaaaaccaaaccatttttttttgcccccccaccaagccttttttaaaaaaggaaaagggcccccccccacggcttttcccaaaaaaagagaaaaaaaaaaaccccggggtgggaagggggaattttttttttcggggcggggccccccccccccctccctaaaagggaactccttg

SEQ ID NO: 105651 - DNA, 314 bp, Homo sapiens
attacagatgcctaccaccatgcctggctaatttttgtatttttagtagagacgtggtttcaccatgttggccaggctggtctcgaactcctgaggacaagttattttaactaatctctgagcctcagtttgctcatcttataaagggaataattgttgtcttgtgtacttcatgagtttttgagaggtccaaattaagtaataaatgtggcagactttgaaaacactaaactgccccataggcagcttaaaaaacgttaagtaaatctgtgatgaatacttttgaaagcaaagattcactttctaattagttt

SEQ ID NO: 105652 - DNA, 296 bp, Homo sapiens
gcacgagctctctctctctctctctctctctctctctctctctctctctctctctctctctctctcacgcgcgcgggctctctctctctctcgcacgtgcactctcactaaaaaaaaaaaaaaagagagaggtggggggtttttcttttcccgccttttcggtatgaaagagtctttttcaccccctttctttgtgactctctggggggggggggctttccctttttcgggggggggtttaaaaaaaaaagggggaccccttttttgcgcgtgtgtgtttattttttttttttttt

SEQ ID NO: 105653 - DNA, 356 bp, Homo sapiens
  misc_feature (1)...(356): n = a,t,c or g
gcacgagctctctctctctctctctctctctctctctctctctctctctctctctctctctctctctctctctctctctctctgtctctcacccacccccccacacacacaccctcacacactcatttacacacaccctccctcccaccccccccttngtgcttttcttccccctccccacggttccccatatgcccccgcgtgtacacgtgctcctgaacgcgagagagatagtgacctcaagtgtgctccagcgcgtgtttagacacccattctcccacagcgcgctctctaactcaaacacacactcccgctcgaccattctctctctcacactctctcattttttctctcct

SEQ ID NO: 105654 - DNA, 266 bp, Homo sapiens
gcacgagactctctctctctctctctctctctctctctctctctctctctctctctctctctctctcaaacaccctgaccctcaaaagggccctgttgtcgtttcgaaatttagtgcatgttgcttaaaatcaacctggaaaggtacttactcacatccgaacttacatatttgcactgccaaaggagcctctgggggttaaagaatgggtctaatttgggtggtgaagccctataatgcagagttgaccgacccaccttatgagt

SEQ ID NO: 105655 - DNA, 351 bp, Homo sapiens
  misc_feature (1)...(351): n = a,t,c or g
ggcacgagcaggtgttaactgtgctttttctttcaggcattggaagnttttttttttttttttttttttttaaaaaggggccaaaaattgttcccccggggggggggggggggggggaccctatttttttggaacccccccccccccctttaaaaaaattttggggcccccccctccgggggagaggaaataaagggggggggccccccggttgggtaaattttgggatttttttaaaaaaaaagggtttaccttgggggccggggggggtaaaaaccccggctttcaagggatcccccggccccacccccccaaagggggggaataacaggaaaaaccccccgccctggt

SEQ ID NO: 105656 - DNA, 366 bp, Homo sapiens
  misc_feature (1)...(366): n = a,t,c or g
ggcacgagactcacggtcctgtggacagctcacctagtggcaatggctccaggctcccggacgtccctgctcctggattttgccctgctctgcctgccctggcttcaagaggctggggccgtccaaaccgttccgttatccaggctttttgaccacgctatgctccaagcccatcgggcgcaccaactgggcattgacacctaccaggaggatgaagaaacctatatcccaaaggaccacgaagattcattcctgcatgactgccagacctccttctgcttctcagactctattccgacaccctccaacatggaggaaacgcgacagaaataccatctagagctgctccgcatctccctgctgctn

SEQ ID NO: 105657 - DNA, 339 bp, Homo sapiens
  misc_feature (1)...(339): n = a,t,c or g
ggcacgagcagccactctggagggtgagacaggagaatcacttgaaccagggagtcggacgttgcagtgagccgagatcgtgccactgcactccagcctggtgagagagcgagactctgtctcgaaaaaacaaaagaaaagagagacggggttgtgctgcatcacccaggctggtcatacactcctaggctcaaggatnntnctnctgtttnantcttcccagtagctggaacaggaggaggatctcttgggcctaggagtgtttgttttgcccgttgcggattcctctgtctttcccaccctgggtgtgggggaacttaaattttcattcgttatggg

SEQ ID NO: 105658 - DNA, 375 bp, Homo sapiens
ggcacgagttctataccctgtagggctttatttaaagcagccactaacatacatgaaagttctttgaattctcctggctcatgtgaaaaattcacacaaatttcactctagttcatacccatgtttatattaaaaaaaagcatgttctcccctctcccaaagctttacaaattgatgtttaaggcagatgtgcctgaaggtggccttatccttgggaagcggcctccaactcctgaggacctgtatgctaacttcacggcctgagttgaactagaataaagaggtgtaatggaggccgggcacagtggctcacacctgtaatcccagcactttgggaggccaaggcgggtgaatcacctgaggtcaggagttcga

SEQ ID NO: 105659 - DNA, 350 bp, Homo sapiens
ggcacgaggattcacttgactagccttaaaaatatctatatctatatatagagagagaaatggccaggatccagatgaagaaaagcaaaattttccatgataaaaaataatatattaactacatgatagactattttacaaattaaattatgaatttaataaacatgggatttgttttggaaactgacaaacttaaaaaaagatttatatttttctcactattaataccataatggatttaatcattcctttcttgctggataacatactaggtttttggctgggcgctgtggctcatgcctgtaatcccagcactttgggaggccgaggtgggtggatcacgaggtcag

SEQ ID NO: 105660 - DNA, 378 bp, Homo sapiens
ggcacgagggccaactccccgaaccactcaagggcctgtggacagctcacctactgggcatggctccaggctcccggacgtccctgctactggctattgacctgctctgcctgccctggcttaaagaggctgttgccgtccaaaccgttccgttatccaggctttatgaccacgctatgctccaagcccatcgcgcgcaccaactggccattgacacctaccaggagatcgaagaaacctatatcccaaaggaccagaagctttcattcctgcatgaataccagacctccttctgcttctcagactctattccgacaccctccaacatggaggaaacgctacataaatcccatctagagctgctccgcatctacctgg

SEQ ID NO: 105661 - DNA, 369 bp, Homo sapiens
ggcacgaggtgagccgagatcataccactgcactccagcttgggctacagagcaagactccatctcccaaaaaaaaaaaaaaaaaaaaaaaacccatttttgaaccccggcccattttttgggggggccccccccccccccaggggaccccaaaacttcccagggccttggaaaaaccaaaggggtttgaaaaaccccggggggaaaagggtgggaaaactaaaaacccgaaaaaaaaaaagaaattttttgccaaaaagggggaaaaacccttcccaaggcccggaaaaaccgggggggttttttggggggacccccgggaaaaggccccaaaaaaaacaattggaaaaaaaaccgggccggggaagg

SEQ ID NO: 105662 - DNA, 360 bp, Homo sapiens
ggcacgagggcatgaacccgggaggtggagcttgcagtgagcagagatcgcgccactgcactccagcctgggcaacagagtgagactccgtctcacaaaaaaaaaaaaaaaaaaaagggggcccaaaaacttaaaaaaaggggtttttattttacccctttggggggggggaaaaaaaaaccccaaggacccccccttttcccccccatgggggggggggggccaaaaggggaaaacctaaaaaaaagggtttaaaaaggggggggaaaaaagaaaccccccccaatttgggggaaaaagggaaaaaggggccccccctttgaaaaaattgttaaaacttttttaaagggaaaaaaaaag

SEQ ID NO: 105663 - DNA, 357 bp, Homo sapiens
ggcacgagggcgtggagattccttatagaactaaaagtagaactaccatttaatccagcaatcccattactaggtatctactcagaggaaaataagtcattatacgaaaaagatacttgcacaggcatttttagcagcacaatttgcaattgcaaaaatatggaaccagcctgaatgcccatcaatcaaccagtaaagaaaatgtgtgtgtgtgtgtgtgtgtgtgtatatatatatatacacacacccctatatatacgtgtatatatgtatatgtgtatgtatatatgtgtatacatacatgtctatatatggatgtgtatatatatacatacacatgtgtctacatatgtatgg

SEQ ID NO: 105664 - DNA, 362 bp, Homo sapiens
ggcacgaggatggtttctgcctgtttgtgaattgagatcatacctacatgagtgggagggaataacatatttgcagtgaggctgtaacataaatacaggttgatcatacctaatccaaaatcccccagaattcaagatgctccagaatctgaaacactccaaaatcccaaacgtttttagtgccacaagtgaaaaattccacacctgacttcattgtatcacacacaaaattatttaaaatattgtataggccaggcgtggtggctcacacctgtaatcccagcactctgggaggctgaggcgggcggatcacctgaggtcaggagttcaagaccagcctggccatggtgaaaccccgtctt

SEQ ID NO: 105665 - DNA, 366 bp, Homo sapiens
ggcacgagctatagtaattttttttttgacagaatctcgccactgcactccagcccgggcgacagagcaagactccgtctcaaaaaaaaaaaaaaaaagggggggcggggggggttttcccaataatccttttacccaaagggccccccctttctttttaaaaaaaacccccacccaaaaaatttggggggttcccaaaaagcctttgacccaaaaaaaaccccctttttttggaaacggcccaaaaaccccttaaaaaagccccaaacccttaaggcctttttaaaccctcccctacggaaaggctgaaaaggcccccgaagggggggccccgggggattttaaccggagggccttgggcaggga

SEQ ID NO: 105666 - DNA, 366 bp, Homo sapiens
ggcacgagttcttttccagaagtgttcatcttctccaactgaaactatgtatctcatgatctcttgatacaaataattacaatacaaattccagttcacatggcatttcttaggatttattaaagatttcagtagatagaagtttatgtctcttaaagagagtttagaaagatgacattaaatcaatatctttaaactctttgtagaaactcattgtgaaaccttgcttggagtaatatgctacaaatatatttggccatattctttcttaaatatttatttatttatttatttatttatttgagacagaatcttgctctgtctcccaagctggagtgcagtggcccaatcttggccgactgcgac

SEQ ID NO: 105667 - DNA, 366 bp, Homo sapiens
ggcacgagagggggtggaggttgcagtgagctgagatcgcaccactgtactccagcctgggtgacagagcgagactccatctcaaaaaaaaaaaaaaaaaaaaaaaaaagggtttttttttttttttaaaggcccgttaaaattaaaaaagggttttaaaaaaaaagggggttttatttaaaaaaaaaaaagggtttttttttgggaaaaaaaaaaaaggccaaaaaaagggggaaattttaaaaagttttttttttttaaaaaaaaaaaaaaattgggaaaaacccaaagggcttttaaaaaaaaaaaaaaaaaagggccctttttggaaaacaaggggttttttggaatttgaaaaaaaaaaaa

SEQ ID NO: 105668 - DNA, 334 bp, Homo sapiens
ggcacgagagtgaaataagccaggcacagaaagacaaactttacatattctcacttatttgtgaaagctaaaaattaaaacaatgtaactcatgaacatatagagtagatggaaggttactaaaggctaggaaggacagtgggtgggggaaatggggatggttaatgggtacaaaaaaacagaaagaataatatctatttgatagcacaacagggtgactatagtcaataataatttaattgtacattttaaaataactaaaagatgctggacacagtggctcacacctgtaattccagcactttgggaggccaaggcaggaggatcatctgag

SEQ ID NO: 105669 - DNA, 407 bp, Homo sapiens
  misc_feature (1)...(407): n = a,t,c or g
ggcacgagtgcagtgagccaagatcgcaccactgcattccagcctgggcgacagagcgagactccgtcaaaaaaaaaaaagtttgtaaggttttgggaatttgggaatcctcaccaaatttccttttcattttttaaacttacggttcccaagcaaagggaagccctttttttaaggggaccaaaaggggttttttgttgaggaggaagttggaaaagcttttctttttttttttagggagccctggggtagctttctcctacttttgtttaaacccggaggcaggcaaaaaccttagtaagggaattcaaatcaaaaaaaaaaaatggcttgatgtatggggaaaaactcagggaatacaagttttcttttaagggccttttgttgatttggaaggcccaaatttn

SEQ ID NO: 105670 - DNA, 364 bp, Homo sapiens
ggcacgagaactggagaatcgctagaacccgggaggcagaggttgcagtgaaccgagatcatgcattgcaccccagcctgggcaatagagtgagactctgtctcgaaaaaataaaaaataaaaaataagccgggtgtggtggctcatgcctgatatcccaaagcgcttaaattacaggcgagagccaccgtgcccggcctggagaaaatttttaatgcactgaagaagaactctttttttatatgatgcggtttaatcttagtgcattgataaaaattgatcctttctctaacctgttactctctgagaatttatgttgtacatgttatttcttatttgaggggaacacttctttatttcggtg

SEQ ID NO: 105671 - DNA, 279 bp, Homo sapiens
tagacaaggtcgcaccactgcactccagcctggacgacagagcgagactccgtctcaaaaaataaataaataaaacagtagccctcattaatgggaataaagtatcatctgagagtcatcccaaagcttactccctcgttgagccgatgggctgactgagactctggaacccacgggtcactggggtgtgttagtgctcactgaggagacagagctgttgcaatactgagttcaagcagcacgactgactcacataatgtgaagtgaaaccagacagag

SEQ ID NO: 105672 - DNA, 346 bp, Homo sapiens
ggcacgaggcgtggatgttattatgagttgaatgtttatgtcccccaaaaatgcatatgttgaagccctaacccccagtgtgatggtatttgcaggtggagccttggggaggtgattaaggttagataagatcatgaagatgggtccctcctgatggtattagtgcccttataagaagaggaagaaagccaaccaggcaaagtggctcactcctgtaataatgctctttgggaggccaagacgggtggaccgcccgagctcaggagttcaagacaagcctgggcaacatggtgagaccccatccctaccaaaaatacaaaaaaagagccaggcatggtggtgtgcg

SEQ ID NO: 105673 - DNA, 411 bp, Homo sapiens
ggcacgaggggctggggtgggaggatcgcttgggcccgggaggttgaggcagcagtgagccataatcactgcaccccatccagcctgggtgacagagcgagatcgtgtctcaaaaaaaaaaaaaaaaaaaaaagggggggggggggggcctttaaaaagggggttacctttggaaaaaagggatttttaaaaagggttttaaatttgccaaccccggggcattaaaaaaggcctgggaaattaaccaaaattaaaatttttttttcaagaaccctggggaaattttcccccactccggggaacgggggccaaaaaaaagctttttttttttggaaatttttttggccaaaaaaaagccgcaaacgcccgggtaaaaaaaaaaaggggcaaaaggaggaaacccacaccctg

SEQ ID NO: 105674 - DNA, 394 bp, Homo sapiens
  misc_feature (1)...(394): n = a,t,c or g
ggcacgagagcctagatcacgccactgcactccagcctgggcaacagagcgagactccatctcaaaaaaaaaaaaatttaccctaaaaaacgggcactatttcgcttttttccaaagaactttaatgtttgacttcttaccaaacggggcgattttcataccgcctttcggattcaggcgggggccctctcccccccggggtctattggggaaaatcccccagtcccaatgtgaaaaaaggggagcaaaaatggtaagccatgtttcaaatttaagaaaataggtgtgacttttcggggctcccttgaaagggttttggaaaaactgcctcatttttccctgatgacgtaaatgcaaccttcccctgaaggcatctttatccttgaaattcaan

SEQ ID NO: 105675 - DNA, 360 bp, Homo sapiens
ggtgagccgagatcgcgccactgcactccagcctgggcaacagagccagactccgtctcatataaaaaaaaaaaaatacacccccaaatttttggcccccaagagaaaaaaggggaaggtaattcccaaacccccttttctggggtgggggactaatattttttttaaccccggctttgttcaaaaaaggattttgaaatggttccccacatgccacccatttttcaaaaataaaaaagaaaaaacggggggggggggggggctccctctttaaatcacacaatttgggggggccaggggggggggacacctggaactcaggatttgaaaaccacccaaccccctgtgggaaaccccctt

SEQ ID NO: 105676 - DNA, 372 bp, Homo sapiens
cgggaggcagaggtcgcagtgagccgagattgcaccactgccctccagcctgggtgacagagcaagactccgtctcaaaaaaaaaaaaaaaaaaaaattgggatccttggaaaaacctaaaaaacttgaaaggaaacccccccatttccaaaaaagctgccgcactaaaaggtttttgaaacctgcctgctcccagatttttttttagggtctggtttgcccaaaatttgcaaacacagaatttcttgcaccaccagggccccttgggaaaggggccccatgaccaccccattgggaggccacacgtgataactgaggttttttaacacagaagggttttgggggtaatacccagggcacacgcgtttgcag

SEQ ID NO: 105677 - DNA, 407 bp, Homo sapiens
ccgccactgcactccagcctgggcaacagagcgagactccgtctcaaaaaaaaaaaaaaaaaaaaggggtttaacctggggggggggacctcgcagggacctaatttcgcccctttgctttccacctggggcaaaaaaggaaaattccttttaaaaaccaaaaccaaaaattttaccatttttttgggtttagggcaacctttttttttgggcaaaaagggggattatcctttaaaaaaggctgatggtccccaccaaatggtttttaaaataaaaaaatttgggaagggggagggaattcaaattagcgccaaaaggccgagggtttttcttttctagtttacccggttgaattttaaatagaaaaaaaccttctagaaatacccccccaggtgttgaattactta

SEQ ID NO: 105678 - DNA, 372 bp, Homo sapiens
acacttcctttttttctcagtgaaggcagaagtaaaaccattatctgagagtaaagtgtgtgtgtgtgtgtgtgtgtgtgtgtgtgtgtgtgtgtgtgagaaacacaggaatatttgaaaagaagggaggtataaaatgatctccagggaatactgtaagattgccttccaactctaaaggcgcacttgaggttactcgttataaatagaaaaaaagtgtgcttggggagctgtctgtttcccctcaggtgtgctcatctgcatgcatgcagaggtggagtgagtcctgtctggtaactccaatttcaagagggagtgggtaacgcaagatgagagggcgagagggagaggacacactctcataagtcattt

SEQ ID NO: 105679 - DNA, 491 bp, Homo sapiens
  misc_feature (1)...(491): n = a,t,c or g
cccccccaaatgattccctgagcgcntgcgggaccgtcccggaatgacccacgcgaccgaggggctcatagctctaatccttgcactttgggaggctgagactgggggatcactggaggccaggagttccaggccagcctgggtcacacagcaagacctcatctctgcaacgaagataaaagaaagggactgccaagtgcctaacgtattgaaggaaggcagaccccataattgtgaaatttcagaatacacaataaaccattaaccctaaacatttccagagaggaaaaactaggtcacacacaaaggatctggaattaaaattgtttggcttctcattagcaacaccggatgcagagagggagcagtcaccttcaaagtttgtggtgaaaattgttaccaacttagatacccagccaaactatcagttaagtgtaggtagaataaagacattttcagacttgtaaggtctcaaaaagagatttttctgg

SEQ ID NO: 105680 - DNA, 413 bp, Homo sapiens
  misc_feature (1)...(413): n = a,t,c or g
cggacgcgtgggctcaaaagaaagaaagaaagaaagatagatagatagaggctctttctcaaaagaaagaaggaaagaaagaaagatagatagatagatagatagatagatagatagatagacagacagacagacagacagacagatagatagaagcaaactctgtataccaagtgtggtctaatgaatccagaagaggactgttctaccttattttctggatattgttcttcagtgtgcatcctcattactgagcctcaaattgaaaaatacaccagctaaacaagttcctttttcagagtttttactggaatcagaattccttatctgattcttgtgcagttgactacttgggccttaacacttagccttgtgaattgtactttcgttaatcttggccctttattctaccn

SEQ ID NO: 105681 - DNA, 404 bp, Homo sapiens
  misc_feature (1)...(404): n = a,t,c or g
cccacgcgtccggaataacaaatgatgggcttatgaaagcagctctgttctgtattgagggtttgtccttcattgtataccacacggctagtaacagtgtggtcctcttcctggtgctgctgggttctccatggtgcctagcagaaagtcttcctggtgttgtccctggcctgatgctttagacaacgcttgggagttgattctgtgtgtactagttggggagtagcatggccatgtatgtatcttttgtttttgtttagtttctcataaagtagcattgttacaagtttttacaaattctcatttataactctaccaccagaacccatggttgtattccgttttcttttttcttgagacagagtcttgctctgttgcccaggctggagtgcagtggtgcgatn

SEQ ID NO: 105682 - DNA, 519 bp, Homo sapiens
ccgtgcggtggaattcctgatgtctgcaacttattttcaaatgattcaggaaaaatcacattcatatataaagcaaatggtcaaatattagcagctgttgaatctgggtggaagatatgcaaagttttttgactgttggttttgggtttttggaaattatttttggtcagattaattaggtataatttacaaagtaaaatgtacccatttaattgtaaagttttatgaattttgacaaacacatgcaattgtataactaccatcataatcaacacatagaacagtttatcatccctagaattctcccttgcccctttgtagtcatctcctcaccctaccccctaccccttgtaccactgatctatgcaacatttctatagttttgcctttcccagaatgtcatacaaatggaagcacatagtatgttgccttttaagtctggcttctttcacttatacattagtttgctagggctgctgtaacaaaacaacacaaactgggtgacttcaaactatagac

SEQ ID NO: 105683 - DNA, 405 bp, Homo sapiens
cccagagctggagtgcagtggcaccatctcgcctcattgcaaccttcacctcccgggttcaggagattgggctccctcagctactctggagggtgaggcaggagaatctcttgaactgggaggcaaaggttgctattagttgaaatcatgccgctgcactccagccgagggccacagagcaggactccctttgtcaaataaaaagaaactccccattccccccccaaggaaaccttttttaaaaaaaattttttttttttcaaagttaccctttgatataacccaaacaaagttttttcctgattgaaaaaaaaaaatacccccggcggggttttgttaataccccctttatcccctttttttggggggcccaaaacccccccacctttttttttttgttttctg

SEQ ID NO: 105684 - DNA, 393 bp, Homo sapiens
aaggcaggtctattcctgttatcttgggactcagcagggcagccctgttctttaacaagacaatctttcaatttatgtgacttgcatattttaaaataaattctgttaatatgcaagcactaatactgtaatacaatcatttctacttcctgccagtgttttatgtctaaggcggcagctcagtgcagaaagaaatttaggtaggcaagggaataacactgctttcccttcatgctcaacaatgtgccacctgacatgggattcttttcagttcatttgtttgtaatttaaaccaattcctgtctcagcattggctcatgcctgtaatcccagcactttgggaggccgaggtgggaggatcacttgagcccaggagttcgacactagcctgga

SEQ ID NO: 105685 - DNA, 393 bp, Homo sapiens
agatcatgccactgcactccagcctggcaacagagcgagactctgtctcaaaaaaaaaaaaaaaaaaaaaaaaaggttaccttggttgaacccccaggggaggggcccttcggggggttttaaaggggggtttccctggggggaaatttacggggggggtctttaaattggggaaaaaaattttttttccctttttaaaaacccttttcaaaaaattcccctttcaaaattgggggttttttaccgggggttttaaattattttggggaaatgggaaaaaaaattttttttccccccccccccaaattttttttttttccccttttaacccggaagggggaaaaattgttttggtttttaagcccccccttaaaaaagggggttttttttttg

SEQ ID NO: 105686 - DNA, 394 bp, Homo sapiens
  misc_feature (1)...(394): n = a,t,c or g
ccagttgatcgcatcggctcctgaggcttctgcattcttcacgtagttcttgagccttgggtttcagctccatcagctcctttaagcacttctctgtattgggtattctagttatacattcatctaaatttttttcaaaggtttcaacttctttgcctttggtttgaatttcctcctgtagctcggagtaatttgatcgtctgaagccttcctctctcagcttggcaaagtcattctccatccagctttgttccgttgctggtgaggagctgcgttcctttggaggagcagaggggctctgctttttagagtttccagtttttctgccctgttttttccccatctttgtgggtttatctactcttggnctttgatgttggtgatggacagatgg

SEQ ID NO: 105687 - DNA, 467 bp, Homo sapiens
  misc_feature (1)...(467): n = a,t,c or g
actgaagctgtagaccggctcgaatcccgtgtcgacccacgcgtccggatagttctagatcgcgagccgccgcctgatactggcattttgtaaatgtgggctgactatttctgtatgtctccatctattgatgagggtcttaaaaaaaaaaaaaaaaaaaaaaaaaaaaaaaaaaaaaaaaaaaaaaaaaaaaaaaaaaaaaaaaaaaaaaaaaaaaaaaaggggggggccccttaaaaaaaaaccctgggggggcccaaaaataccgggggaaaaaaaaaaaaatttttttttttaaaggggggaaaaaaaaaacccccggggggatttttaaaaaaaaaccttttttttggggggggaaatttgggcccccccccccacaaaaaaaatcgggcccggggaaaaaaaaaaatttttttggggttgggggggaaaaaaaccccctatctcccccctaaaaaaaaaan

SEQ ID NO: 105688 - DNA, 409 bp, Homo sapiens
cttaggctttcttccttctgtgttcacagaaccaaactagtacacagatacttaaataggtaaccaaagtttatcaaataaatagaagataaatgaaaatttccactgaaaaatttctggtcttagctgtgagatcagacctgtgtataagaatccaggggagtatccatgtcaaaattgtcagggattatgagctttactattcatttatttacatactggcatagagatggggtcttcctgtgctgcccaggctaatcttgaactcctagtctcaagcaatcctcctgccttggcctcccaagggactgggattataggtgtgagccattgcgcctgacctgatatgagctttatatgaaagtgtgaagagaacctaaacaatgaggtacttggatgtagtgagttt

SEQ ID NO: 105689 - DNA, 347 bp, Homo sapiens
cgagaagtcaatacaaataaatagtttataaaatacacttattaaactaaaaatactcacattctacacttgttttgatgtttgttttctatagtcgtccaatttctgtaagactggggagtacattacttatatttaaaatttaggccaggcacagtggctcatgcctgtaatcccagcgaggccgtgggaggccgaggtgggcagatctcttgcggtcaggagttcgagcaattcaccagcctcggcctcccaaagtgctgggcctacaggcccgagccaccacaactggctgatgtttttacaactactgacaagactttaacaaaactaaggaactccactac

SEQ ID NO: 105690 - DNA, 357 bp, Homo sapiens
cactaatgtccaaacatgcagcttgggttcaacaggctgttctacaaaggtggaagttagaatacctgagagtctcaaaaagaggggcaacaaataaatgtattacccaataataatacctatctgcctcattccttaaaaatgtgacatgttaagtcaccatattctacttttattacaccccactctgtccaaacatgatgtaatatagtttatgtcaaaaggtatgcagaaaattcaaattaaaaacaaattcaaggccgagcgtggtggctcacacctgttttctcaccactttgggaggccaaggcaggcgaatcacctgaggtcaggagtttgagaccagcatggccaaca

SEQ ID NO: 105691 - DNA, 367 bp, Homo sapiens
ctgaaggtcaggaaagtgaagaacatcctccaagatgaggccacacatttcacaggggtgagccttcttaggagaaacacctgccctaagagtcctgctctgagactctctttgtacagaaattctctgcttacaaggtgcctcctcatcttttgatccacaccaacaacctgaaagcaagaaaatgctggtcaagtgcaaagtacctccggcgggaaggcacagcccacccacaagtacgtctcacagattgaggaattaatctatagaaatatttgcaggaacacaatgctggcttcaagttgaagatggggctgctggctgggcatggtggctcacacctgtaatcccagcactttgggaggct

SEQ ID NO: 105692 - DNA, 379 bp, Homo sapiens
ctgaaaccatcctccacccctggtacatggaaaaattgtcttccatgaaatgggtccctggtgccaaaaaagttggggactgcaggagtactgtattaattatagtattaaaatacaaaataatttttgtgtatattgataatggctaaattgaatactatagaaatatttaaaattgatgagatatatttaagttgaaacaagatgttcatgctctattaagcaataaaaagaggcttctttttttgagacggagtctcactctgtctcccaggctggagtgcagtggcgcagtctcaatcccctgggctcaggtaatcctcctacctcaacctcccgagtagctgggactacaggcatgagccaccatgtctggctt

SEQ ID NO: 105693 - DNA, 409 bp, Homo sapiens
gcttgaacctggcaggcggaggttgcagtgagccaatatcaagccattgcactccagcctgggcgacaagactgaaactccatctcaaagaaataaaaaagaagaagaaatggataacgcataccagctaattttactcggatttataatcaaatttctccttccaagtaaattattagtgtgtggtatcaaatgtgtctggcgaattgagggatctttaaatatcattaagtctttaagactcatagtcggccggcagctgcctgcgtgtctggctgaagccttcctgaactaggctggctctttcttgctcggtttggatgataccaagtaattcaaagtagcgtaacaggggagtgacttaagtctcctaagaattagaaagttgccttaattctcacagcctcat

SEQ ID NO: 105694 - DNA, 379 bp, Homo sapiens
atcgcttgaacccgggaggcagaggttgcagtgagccgagattgcaccattgcactccagcttgggcaacaagagcgaaactgtctcaaaaaaaaaaaaaggggttttttggctttaatcctgggctttatttaaaattgggaaggggaaagggtttttggcaagttttttttttttggcctttttgatagggaaaggaaaattttttatttctaaacagttttcatggaaccttttaaaaaaaaacccccaaacggggggcaggggctaatgcttgaaaccccacccttttgagaggccggggcgggcaaatccctggaccccaggagttggaaactaaagggggcaactgggcaaaactttgtttatacaaaaaaat

SEQ ID NO: 105695 - DNA, 416 bp, Homo sapiens
tgaaaacctataaacattcagtcactgctgatcttttgatgtaaagccaagccctttgctttgagtgtgggcccacagactgaagttcccagacgtctttcttgcataaaccctacccataacacagcctccacaatttctaaagcaaagtaagaacttcaagacatcagtaaagcaatcaaagtacagaatccttctagatgtttatgatcttcctctaatgtttaactgtcatctcgctcacacctaatttgacagcaatgtttttagcaattcacatttagcaaagcatttaacttagttttcataaaaccttcttttcacatttctttttatagaacacattatagccaggcgtggtggctcacgcctgtaatcccagaactttgggaagccgaggcgggcggatcacctga

SEQ ID NO: 105696 - DNA, 327 bp, Homo sapiens
cgcggccgcgtcgacggttgacttcctctcttcctatttggatgaccttgatttctttttcttgcctgattgccctggccaggacttccaatactacgctgaataggagtggtaagagaaggcatccttgcagagaccttattttgtttgaagctgtatcctcagcaactagaacagtgcctagcacatgttagatgttcactaaatatttgctgaatgaataaatgagagaatgaattggaatcaaggtgtatttacctccagagtccatgttcttaaccacatcttgcataaccagatgcaaattagagctgtcagactgtttct

SEQ ID NO: 105697 - DNA, 341 bp, Homo sapiens
  misc_feature (1)...(341): n = a,t,c or g
ccaggctggtctcaaactcctgacctcaggtgatccacctgcctcggcctcccaaagtgctgggattacaggcgtgagccaccgcacctggcctctccaccaggcatgtcttttgcagtcccaatataaaaggcagagtcatgagaacttcacactgcaatggtgaatggacgaatctttgtagtggtatagtctctgcaggtattgaggctaattgtaagggagctgtgttccttgaactgggttctagtcttttgagagttactgccaactgtgactggggcaggaggagttgaatattgatgagagtgaagaatccaacctcccaagcagagggatgn

SEQ ID NO: 105698 - DNA, 346 bp, Homo sapiens
gtgagacagctgactcctcttttcatttgaacacttaagaggccattgtagggttattaattggcctaatttcaatattttgtgtctcagggaatagggaggcctgaggggtaagagagagagagctgccattcagtggctgggcagtcagaacacatgtgtaccacatttatcgattatgtttgccatcttatgtgcgctttctgacaccccaaaacagtttcaatagtaacatcaaagatcactgatcggctgggcacagtggctcatgcctgtaatcccagcactttgggaggccgaggcaggtgtatcacctgaagttaggagtttgaaaccagcctggcca

SEQ ID NO: 105699 - DNA, 349 bp, Homo sapiens
gcacccttccttctgctttcagcatagcaacagccaggacattggcaaagaaccattggtggcccaactatgaattgttcccagacttcctgcagggaacacgattctcttgcacaactcaatattagctacagaacgagccactgagctcagaatatctttgctaactagtccagtaggctagctttacaatttagctctggactactgccttttcagataattgactttaagggttttcccccttttatgatttttgtttgtttgtttttgagacggagtcttgctgtgtcgtccaggctggagtgcggtggcacgatcttggctcactgcaacctccaccacccgg

SEQ ID NO: 105700 - DNA, 360 bp, Homo sapiens
ctttgatccagtcaggcaaagttgagcattttcttatctgtgcctcagctttgcagtaactcccatgttgctttaattatcaggtttatgttttatctctgtctctcctactcagtggtgagcccctgggagtagaggctgaattttttttatttttatttttttgagaccgcgtcttgctctgttgcccaggctggagtgcagtggcatgatcttgcccactgcattccagcctgggagacagaacaagactccatctcaaagaatacggtgcaaaaaagaaaaaaaaaggtcacccgggccggaatttcaaaaactaaaaatgaaaatttctgaaaacccgccgaggttcatttaatc

SEQ ID NO: 105701 - DNA, 344 bp, Homo sapiens
caggtttctcccacctctctgcaagttgctgagtgtgattcccatcaagaggtacaatgtctttttatttttattttatttattttatttatattgcctatgttgtctaggctggttccaaactcctgagctcaggtgatccttctacgtcagccccccaaagtgttgggattacaggcatcagccactgcacctggcccagatactttttcttgagtaggaatttcgagtcaccctgaacattgcatgccttcgtagtggggaagacaataggaaaccacaggctgtaggctaaaatgggttgtgtttcttgtaacgtcatgacaaggcataacccatcttgg

SEQ ID NO: 105702 - DNA, 285 bp, Homo sapiens
tttttttccagaaaatgtttcgattgcaacctgatagcagttccccccacaacataaatagtacattccttttttttaaacctttgcatcatcatttcatttgatgatacaatgccatgaaaaacaggtttttgaagactattttaaacaataaaaacagcatcggctgggcacgatggctcatggcagtaatcccagcactttgggaggccaaagcaggcagatcacctgaggtcaagagttcgagatcaaggccgggcgcggtggctcaggtcgacgcggccg

SEQ ID NO: 105703 - DNA, 364 bp, Homo sapiens
cgggtggttgctgccgaaatgggcaagttcatgaaacctgggaaggcggcgcttgacctggctggacgctactccggacgcaaagctgtcatcgtgaagaacattgatgatggcacctcagatcgcccctacagccatgctctggtggctggaattgaccgctacccccgcaaagagacagctgccatgggcaagaagaagatcgccaagagatcaaagatcaaatcttttgtgaaagtgcataactaccatcaactaatgcccacaaggtactctgtggatatccccttggacaaaactgtcgtcaataaggatgtcttcagagatcctgctcttaaacgcaaggcccgacgggaggccaagg

SEQ ID NO: 105704 - DNA, 331 bp, Homo sapiens
ggagcctgcagtgagccgagactgcaccactgcactccagcctgggctacagagtgagactttgcctcaaaaaaaaaaaaaaaaaaaagggttaaaaaagccccccaaatttgggtttaaaaaccattggccaaaaaaaaagaaacaaaacttcttggaaaaaagggtggatttaagaccccaacaaaaaaaggtcaacccgcccgaaaatccaaaattaagaaatggaaaaaccggaaaaaccccgaaggttaatttaaagggggaagggggcccaattaaaatttttttatttaaaaaacggttgggccttttttaaggaaaaaaaacc

SEQ ID NO: 105705 - DNA, 334 bp, Homo sapiens
ggagcctgcagtgagccgagactgcaccactgcactccagcctgggctacagagtgagactttgcctcaaaaaaaaaaaaaaaaaaaaaggttaaaaaaggcccccaaatttgggtttaaaaaacaatggccaaaaaaaaagaaacaaaacctcttggaaaaaagggtggatttaagacccccaccagaaaaggtcaccccgcccgcaattccaaaatttataaatggaaaaactggaaaacccccgaaggtgcctttaacgggggcagggggcccaatcaaaattttttaaattaaaacacgggtgggccttttttaatgaaacaaacccccc

SEQ ID NO: 105706 - DNA, 327 bp, Homo sapiens
  misc_feature (1)...(327): n = a,t,c or g
ctcctttgcattctcagtggcctgtttgttgtggtgcatgatgcccaaggtggggaacacccaggtactggctgggggcactatatcggaatcagcaaagctcacccactgcaccacctgggctgctgcctctggagtacttcccaacaatagcagaatgtgacccaggagaaagtaggacaaactcagcagcttggtgatagctgaatagcagctgaacggagagaggaanttnnnnnnnnntnnnnntntnnncnnnnnnggnnngtttntttttttttttgtttctntgnaattttttgggttttttttttttttttttttttt

SEQ ID NO: 105707 - DNA, 354 bp, Homo sapiens
cttgaacccacgaggcagaggttggagtgagccaagatcgcaccattgcactccagcctgggcagcagagtgaaactccttctcataaaaaaaaaaaaaaaaagttttgggggaaaatctaggccaaaaaaacatgcaggcaaaaaatagggccaaaaacccttgaaaacctaaaacttcaccatagcaaaagttcaaaagcgggggaaagattaattaacccaaaccaaaagaattttggccctttataaaatacccccaaaaataatccaattggcagctctcactattggggcccaccctaaaaacgcggggcggacccccactttgttttttttgagcacaaacaccctt

SEQ ID NO: 105708 - DNA, 329 bp, Homo sapiens
  misc_feature (1)...(329): n = a,t,c or g
gtcaggtatgtcaaagaacattggcggagtcgaatagcatctatccagcgagtcctgtaagacttcatgctcttccacttccattagcacaccgctgagcctggaaaagcagactaaactatggaagcggccccggaaaatcatacaccacagagccccactagatttcagagagcacgtatggaaggggcctgaaaagaaaaggatagatccattagatgcattaatgaggtaaaaaaaaaaaattattgcctttatttggggatagaaaagggccaggtngaaaacattgaaggagaaagacagagagaccgagacagagaccgaga

SEQ ID NO: 105709 - DNA, 339 bp, Homo sapiens
ggagattgagactagtagggctaggcccaccgctgcttcgcaggcggcaaagactagtatggcaataggcacaatattggctaaaagggagtgggtgttgagggttatgagagtagctataatgaacagcgatagtattattccttctaggcatagtagggaggatatgaggtgtgagcgatatactagtattcctaaaagatgcttttgcaacctgatgaagcaaccgaggagaggtggtgaaggaaaggctttttttttttttttttaaaaaaaaaaaaaaaacaaaaagtttcctgcttgaaccctaaaaaagcattcccccctgggcccccatgg

SEQ ID NO: 105710 - DNA, 372 bp, Homo sapiens
tggagagaggcacagttatttttctctatgtagggaatgagaactgttttattagtttttttttttttaacctctgcctttgtttgaagctaggcagctggacatcttgtctttatgggtaaggcaaatcataaacagaatcttggtttgagaggtttaacattagatttcaggacaggaccttttaaaggagacaaagagggtcaaacggccatttcagcaagatgatgtaccatttataaatatatttgtccccacccctggagccccaagatccttaaggcaaattttagaactaaggggaaagacagaccccagtccaatcatagttggagacttcaacactttgttttcagcattggacagatctag

SEQ ID NO: 105711 - DNA, 339 bp, Homo sapiens
ggaggcggaggttgcagggagccaagatcgcaccactgcactccagcctgggtgacggagtgagactccgtctcagaaaaaaaaaaaaaaaaaggggcaaaaatgttgaatttcaagagaccttacggttattttaaggggcccctaaaaaaactttcttaacccaaaattttccagggagctcatttaaaactacctttaggagccctttaaaatgtaggaaaaatatgatttttcagggctaatcctagcctaaaatcccattaaatttccaagcacatgccaacaatggggtttaaaaaagctgaacacttaaaaaaccttttccccctgaaatag

SEQ ID NO: 105712 - DNA, 121 bp, Homo sapiens
caacaacggatgaaacagggccagctggagggacagattctattatttccgaccccgggtctcccatgtatccgacggccgcgctgactgcaccactgttcgctgacgcggccgtgaatct

SEQ ID NO: 105713 - DNA, 325 bp, Homo sapiens
gccgagatcgcgccactgccctccagcctgggcaacagagcaagactcggtctcaaaaaaaaaaaaaaaaaaccttttaaccccttttccaaaaacaaacttgaaaatcccgccaacgcggccgaaattccaaaatttataattcgaaaatctggaaaacccccgaaggtccctttaactggggcttgggccccctttaaaatttttttatttaaaacatcgtttgcccttttttaaggaaactatcccccttaaagttaaaatttgggccatgaaccctttgatttataaaatttttaaaagaacaaaaataaaggcccttctt

SEQ ID NO: 105714 - DNA, 352 bp, Homo sapiens
gccgatatcacgccactgcactccagcctgggcgacagagcaagactccatctcaaaaaaaaaaaaaaaaaaaaaaaaaaaatttttttggggggcaaaaatttttccccccccccccccaaaaaaccccaatttttagggttttttaggggaaataaaaaaaacttttccaagaagggattttaaaaaaaattcccagaaaggcccaaggggaaaacctttttatttttccaaaaaaaaaaaagggaaaaattttttcttttttaaggttttatgggggccccccaacttttggagggtttttttaaaaaaaaaggggggggggggtttttttttttaaaaatataaggag

SEQ ID NO: 105715 - DNA, 353 bp, Homo sapiens
  misc_feature (1)...(353): n = a,t,c or g
gtcaattttggcttttgttgccattgcttttggtgttttagacgtgaagtccttgcccctgcctatgtcctgaatggtattgcctaggttttcttccagggnnnnnnannnntacccctcctcctttttgcctatacacaatcttatttttttcttccctatgacaatcatctttttttactacatgctatttttatatccttcacttttcatactggtgttcttcgcgaggtttttttgcattgtctttgaacgtctttataatttttttaaattagtaaatagatttcacattgtttgtttgggcactttagtagatttaggtattattatctggcgttgataccatatag

SEQ ID NO: 105716 - DNA, 351 bp, Homo sapiens
ctcctgcagcatgtgtcagaggctggggtgtgccattgacctctaagggcctgattctcaagacctagacctgcacagtccagtgtgacagccacatgtggttactgagccgttgaaacatggctagtctgaattgagatgtgctacaagtgtaaaattcacactagagttcaaacgcttagtacaaagccaaaaaatataaaatatctgactcataacctttgaaatattgaatatatgtttaggtgataatattttggatctaggcctggcacggtggctcacgcctgtaatcccagcactttgggaggccaaggcgggtggatcacctgaggtcaggagtttgagatc

SEQ ID NO: 105717 - DNA, 363 bp, Homo sapiens
taactcggccccggaggcggggagctgctggaagatgaaggtgaacatctccttcccagccactggctgccagaaactcattgaagtggacgatgaacgcaaacttcgcactttctatgataatcgtatggccccagaagttgctgttgacgctcttgttgaagaatggaagggctatgtggtccgaatcattggtgggaacgacaaacaaggtttccccatgaagcatggcgacttgacccatggccgagtccgcctgctactgagtaaggggcattcctgttacagaccaaggagaactggagaaagaaagagaaaatcacttcgtggttgcattgtggatgcaaatctgagcgttctcat

SEQ ID NO: 105718 - DNA, 386 bp, Homo sapiens
atagcctagaatttttcgttcggtaagcattatgaatgccattgcgattagaatgggtacaatgaggagtaggaggttggccatgggtatgtatggtattgccatggttgcaatcatgagtatgtaatataggactcttacccctggcgttcgtgtgtttgtctgttgcatagtgctgcctcgctattttaatgcctcccctggcccatcatgtgaatgctggcctgcataactgtgccctacggtgttgggctcactgcatagttccacttctccctactgtgagaaacacagctctaaacacctctgcatgcattgctcttttatttccttgtgatgtcttttgggactggagttcttggccaagaaatgacaatatttggggc

SEQ ID NO: 105719 - DNA, 341 bp, Homo sapiens
ctttctgactaggctagtcgagtaactattcgggtcatggcgtcaaactcaactaagtctttcctggcagatgccggctatggcgaacaggaactggatgccaactctgcccttatggaattggacaaaggcctaagatctggcaaacttggtgaacagtgtgaagcagttgttcgctttcccagactttttcagaagtatccattccctattcttatcaattctgcattcctaaagttagctgatgttttcagagttggaaataatttcctgaggctatgtgttcttaaagttacccaacaaagtgagaaacatttggagaagatctaaatgtggatgaa

SEQ ID NO: 105720 - DNA, 330 bp, Homo sapiens
caagaccctgtctctaaaaaataaaaaaataaaaataaataaataaaaaaaagacaaagccttctggacacttcgatggagagtccagaggtggaatatacctcctacataaagtcccagaagcagacaccccccctgctcttcctcctctaaggagctgaaagaccctgtgctccccatcgcagccagccatcctcatctggggctgcccaactgctaagaactactgaatggacacagatgaaatttatctgggccgggcgccatggctcacgcctgtaatcccagcactttgggaggccaaggcaagtggatcacctgaggtcagga

SEQ ID NO: 105721 - DNA, 325 bp, Homo sapiens
cagtgagctgagatcgcgccaccgcactccagcctgggcgacagagcgagactccgtctcaaaaaaaaaaaaaggggggaagcatttcccctttcagcctttttttttttggccccctttggaaaacgggctggtttccctttcccctttcccccaggatggaaggtttttgggggcctccccacccatgcttcttgtacagctgggggaacggagccaataaacccttttttttttataaataacccggtctcgggcccttcaatttaatttttaattaataaatttttttggaaacaaagtctggtttttgttttgtcacccg

SEQ ID NO: 105722 - DNA, 315 bp, Homo sapiens
gtggcacatgcctatagtcccaggtatttgagaggctgaaatcggaggatcactggagctcatgagttcagagttacagtgagccatgatcatggcactgcaccacagcctgggcaacagagcaagatcctatctcaaaaaacagcaatagaatgtttaaaacgtttggcttttcgtaaagagtaccttgtacatataaataatgttgaaggtgtttttaatgactaccattacgtacctatccattgtttttttaaagggaatttacctttatcaattcccatatattcttatgaattttaaatagacttaatt

SEQ ID NO: 105723 - DNA, 361 bp, Homo sapiens
  misc_feature (1)...(361): n = a,t,c or g
tctgcgtccaagtttccctctccttataagggtgccaggcactggattcggggccatcctaacacggggtgacctcatcttagctgcatctgctaaaaccatttccaaacaaggccatgtcctgaggctctgggcagatgtgattttgggggtataccagtcaccccgatacagtgtctattatcaattgtttaaacaattatggaatactatgcagccatgaaaaagaagagtgaaagccctttgctccatttccaaggaaagaaattaaaccaagatggtggctgggcatggtggcccacacctgtaatcccagcactttggaaggctaagacaggaggatcacttgagcccaggagtn

SEQ ID NO: 105724 - DNA, 357 bp, Homo sapiens
cttgaactctggaggtggagggtgcagtgagccaagattgcaccactgcactccagcttgggcaacagagtaagactctgtctcaaaaaaaaaaaaaaaaaaaagccccgggggggggggttaccccctgaaccccaaccttttgggaggcccgaggggggggataaaaagggtaaaaaaaaaaactttctggtgaaaagggggaaaccccctcttttataaaaaaaaaaaaaaattttgtggggggggggaaccccccctcgtatcccccgttctttggaaggttggggacaaaaaagggaagaaaccttgggagggggactttcgttggaccctatattccccccgtgccttccg

SEQ ID NO: 105725 - DNA, 338 bp, Homo sapiens
ggctggtctcgaactcctgacctcaaatgatccacctgcctccgcctcccaaagtgctgggattactggtgtgagccactgtgccctgcctttttttttttttttttttttgaaaaaaaaattttgtttttcccccacaccggaggggaaggggggaaatttggctaactggaacctttggcacacagagagttgttttagtctatctctttctattcgaatgcccttctttcacttctttatttatccatatttaaaaacgcccctcattgactcctgttccctctttcacacttaatctacactgtctattatttctccaccccctcctctatctc

SEQ ID NO: 105726 - DNA, 401 bp, Homo sapiens
gtcgacgcggccgcgagctctgtcacccagctggattgcagtgagccaagatcacaccattgcactccagcctgagcaaaagagcgagtctctgcctctaaaaaaaaaaaaaaaaaaaatgggaagaaaaaatgacacctgaaggaacatatttggggaccggggcaaaaaaatgggcaccaaatttaagaggaggttctccctgctgaaggctgctggttattgctgaggaaaaggctcaaaagttcgggaatgaaagaggaattaaaaatatttatttccacctttaataatatcagttgggatcatttcggggatttcaagtgccttaattcaacagcaggctcactgttttctttagttggaactaaatgaaaggcggcccaaaaagcttgatctag

SEQ ID NO: 105727 - DNA, 356 bp, Homo sapiens
  misc_feature (1)...(356): n = a,t,c or g
gggaaggacaggaacatcctctccagggcctccgcaccatactcgccagcgtgcgcgccgaccttaccccaggcggccttgacgttggtcttgtcggcaggagacagcaccatggtgcccccacaaaaaaaaatactgaaaactcccccccgcctcagttacacatccaaactctacatttacaaaacgaattcagggtgaggaagtaaaaacaggtcatctattcacaaaactgaaatacttcattaccccaactaaacatacaaactgcttacagatttgctgaaattgtctcaatttggctatcaaattcatttggttttcctcaaattcgtgtaaaaaaaaaaacccacaan

SEQ ID NO: 105728 - DNA, 338 bp, Homo sapiens
tttgacttcttcctttcctatttggatgtcctttatttctttctcttgcctgattgctctagctaggactttttactatgccattttatataaggcacttgagcatctgtagattttggtgtctatgggattcctggaaccaatcccctgtggatactgaaggacaagtgtataatgtgtacaggcaggagggtaaactgctttcctaaagagatgattttaggtggaacaagaatcaactttgtatttattttagtcaagatatccttttctgtctgttttggctcagatagggagtacaatgtatagttaagtactttaaagtatatcctggaacc

SEQ ID NO: 105729 - DNA, 411 bp, Homo sapiens
  misc_feature (1)...(411): n = a,t,c or g
ggcggagcttgcagtgagccgagatcacgccactgctctccagcctgggcaatagagggagactccgtctcagaaaaaaaaaaaaaaaaaaaattttcccgggccccaaggaaattacctggccgcctttttaaaaggcggggactggaaaaaaatgnnnttttcccaataggtttaaatccttccatttaaggggacccccccctttttcaaaaattacctttggaaaaggtttaaaaaattaaaaaaatcaaccttttaccctgcctttcctatataaacgggatttcaaaacaaccaaatggctgatatggaaaaggtctttttttacaagattcccactttgtttgaaaaaaaagggatagaatcaaattttccccattttataccctttaattaatgaacagatag

SEQ ID NO: 105730 - DNA, 388 bp, Homo sapiens
gggggtggggctttaggtgatgtgcctgtcattgacttgcatggaaggagaattggtctgagtaccctgggcagaggttggtcaggggtctggaacagaaacaattgaaaataaaagactaaagggtctgagttagaagaatgtggttagacacatgagagttggtattcagtatgcctactagaaaggattcaccatggaagaggtacgaaacaactttgcagacaaaatgactcagccagttgatgtcagccaatcttttttttgttttgttgtttgaggcagagtttcactctgtcaacaggctggagtgcagtggcatgatctgggctcactgcaacctccacctcccgggttcaagtgaatctcctgcttcaacctcccaagt

SEQ ID NO: 105731 - DNA, 453 bp, Homo sapiens
  misc_feature (1)...(453): n = a,t,c or g
aggggagggcgggcgcttttccctgagnactgatgtccctncgannacgnccagcttggcacgagggcgctgtaagaagcaacaacctctcctcttcggctccgccattagcttggcaggcgccaagcagcatccatgcgtgagggcatctccatccacgttggccaggctggtgtccacattggcaatgcctgctgggagctctactgcctggaacacggcatccagcccgatggccacatgccaagtgacaagaccattgggggaggagatgattccttcaacaccttcttcaatgagacgggggctggcaagcatgtgccccgggcagcgtttgtagacttggaacccacagccattgatgaagtttgcactggcacctaccgccagctcttccaccctgagcaacttatcacaggcaaagaagatgctgccaataactatgcccgaggg

SEQ ID NO: 105732 - DNA, 443 bp, Homo sapiens
  misc_feature (1)...(443): n = a,t,c or g
cccccccgtgggtggagtacgttgatctccgaaccaccannacgccaagcttgggacgaggaaactacccctaaaagccaaaatgggaaaggaaattactcttatcaacattgtcgtcattggacacgtggattggggcaagaccaccactactggccatctgatctataaatgcggcggcatcgacaaaagaaccattgaaaaacttgagaaggaggctgctgagatgggaaagggctccttcaagtatgcctgggtcttggataaactgaaagctgatcgtgaacgtggcatcaccattgatatctccttgtggaaacttgataccagcaagaactatgtgactatcattgatgccccaggacacagagactttatcaaaaacatgattacagggacatctcacgctgactgtgctgtcctgattgatgctgctggcgttg

SEQ ID NO: 105733 - DNA, 386 bp, Homo sapiens
ggcgcgaagcagccaccatgcgtgagtgcatctgcatccacgttggccacgctggtgtccaaaatggcaatgcctgctgggagctctactgcctggaacacggcatccagcccgatggccacatgccaagtgacaagaccattgggggaggagatgattccttcaacaccttcttcagtgagacgggggctggcaagcatgtgccccgggcagtgtttgtagacttggaacccacaggcattgatgaagttcgcactgggacctaccgccagctcttgcaccctgtgcaacttatcacaggcaaggaagatgctgccaataactatgcccgagggcactacaccattggcaaggagatcattgacctcgtgttggaccgaattcgc

SEQ ID NO: 105734 - DNA, 386 bp, Homo sapiens
gggctggggccacttacatcgaccggctaagagtcgcgctgtttgaagcaacaacctttactctttgggtccgccctgagctgagcagtggcgaagcaacaaccatgcgtgagtgcatgtccatccacgttgggcaggctggtgtgcagaatgggaatgcctgctgggagctctactgcctggaacacggggtccagcccgatggccatatgccgagtgacaagaccattgggggaggagatgatgccttgaacaccttcttcagtgagacgggggctggcaagcatgtgccccggacagaggaagtagacttggaacccacagagattggtgaagagggtactggcacgtaccggcagctcttccaccctgagcaacatatgatg

SEQ ID NO: 105735 - DNA, 385 bp, Homo sapiens
ggggtcgtgccacttacatcgaccgcctaagagtcgcgctgcttgaagcaacaacctctactcttcgactccgccgtgagctcggcagtcgcgaagcaacaaccatgcgtgagggcatttgcatccacgttggccaggctggtgtccaaaatggcaatgcctgctgggagctatactgcctggaacacggcatccagcccgatggccaaatgccaagggacaagaccattgggggaggagatgatttctttaacaccttcttcattgagacgggggctggcaagcatgtgccccgggcagtgtttggagacttggaacccacagacattggtgaaattaggactggcacctaccgccagctcttgcaccctgagcaacttattat

SEQ ID NO: 105736 - DNA, 381 bp, Homo sapiens
ggcatgataacacacgccggagggtcgcacgcgggttccagttttgattgctggagttgtgtattgccaggaggctctccgagattgggggcgggtcactgcctcatccaccggagcgatggcgtttctccgaagcatgtggggcgtgctgactgccctgggaaggtctggagcaaagctgtgcaccggctgtggaagtcgactgcgctcccccttcagttttgtgtatttaccgaggtgggtttcatctgtcttggcaaggtgtccaaagaaacctgtaagttcttaccttcgattttctaaagaacaactacccatatttaaagctcagaacccagatgcaaaaactacagaactaattagaagaattgcccagcggtg

SEQ ID NO: 105737 - DNA, 509 bp, Homo sapiens
gtcattattaacgttcgaccatgaccactccgtttaacgtctgacctgcctacaccttcttggccgaggttaccaaggccgcaaaccaaacacactatatatttttagaatattttcgtcacctcagagaaaaccccaaaccctattatggagacactcctcctttccccctcttctcaaaccctaccaaccactaatctgctttttgactctatggttttgtcaactctgtacatttcatataaaggaaatcataccatatatgggcttttgcggccggcttctttcacttagcatgatgtttctaagggccatcatgatatagcatggatcagtacttcattcctttttattgccaaataatgcacctctgtttttttttaaagacaagagtttcgctcttgtttccttggctagagtgcagtggtgccacctcggctcactgcaacttctgcctgctgagttcaagcaattctcctgcctcagcctcccgagtaactgggattacg

SEQ ID NO: 105738 - DNA, 400 bp, Homo sapiens
gggcaacaacctctcctcttcgtctacgccatcagctcggcagtcgctaagcagcaaccatgcgtgagtgcatctccatccacgttggccaggctggtgtccacattggcaatgcctgctgggagctctactgcctggaacacggcatccagcccgatggccagatgccaagtgacaagaccattgggggaggagatgattccttcaacaccttcttcaatgagacgggggctggcaagcatgtgccccgggcagtgtttgtagacttggaacccacagtcattgatgaagttcgcactggcacctaccgccagctcttccaccctgatcaacttattacaggcaaagaagatgctgccaataactatgcccgagggcactacaccattggcaaggagat

SEQ ID NO: 105739 - DNA, 399 bp, Homo sapiens
ggccgcctaaaagtcgcgctgtaagaagcaacaacctctactcttggtctccgccatcagcttgggagtcgcgaatcaacagccatgcgtgagtgcatctccatccacgttggccaggctggggtgcatattggcaatgcctgctgggagctctactggctggaacacggcttacaccccgatggccagatgccaggtgaccagaccattgggggaggagatgattccttcgacaccttcttcagtgagaccggggctggcaagcatgtgccccgggcagtgttagtagacttggaacccacagtcattgatgaagttcgcactggcacctaccgccggctgtttcaccctgagcaacttatcacaggtccagaagatgctgccaataactatgcccgg

SEQ ID NO: 105740 - DNA, 402 bp, Homo sapiens
accaaggaggaggagctttgcctagcttgcaggcaacgcagggcagacggcggctggagaagccagatgaatgcaggctcagatcctgtgggcatcgtctcggcggcgcggaccatcataggttccttcaatggggccttaactgctgttcctgtccaggacctgggctccactgtcatcaaaaaagtcttgaagagggccactgtggctccggaagatgtgtctgaggtcatctttggacatgtcttggcagcaggctgtgggcagaatcctgttagacaagccagtgggggtgcaggaattccctactctgttccagcatggagctgccacatgatctgtgggtcaggcctaaaagctgtgtgccttgcagtccagtcaatagggataggagactccacg

SEQ ID NO: 105741 - DNA, 400 bp, Homo sapiens
ggaccgaccgcctaagagtcgcgctgaaaaaaacaacaacctcttctttttgttttccccatcacctcggcagtcgcgaaacagcaaccatgcgtgagtgcatctccatccacgttggccaagctggtgaccacattggctatgcctgctgggagctttactgcctggaacacagtttacaacccgaaggccaaatgcccggagacaagaccattgggggaggagatgattacttcaacaccttcttcagtgagacgggggctgtgaagcatgtgccccgggcagtgtttgtagacttggaacccacagtcattgatgaagttagcactggcacctaccgccagctctttcgccctgagcgtcttatcacaagcaaggaagatgctgtcaatatctatgc

SEQ ID NO: 105742 - DNA, 398 bp, Homo sapiens
gggccgctgtgctctggatcggaatacttttattttcgcccgctttggatgctacctaattgccagcggccacccgggggaaaaattgatggacatggacatgagccccctgaggccccagaactatcttttcggttgtaaactaaaggccgaaaacgattatcactttatcgtggctaatgatgaaaatgagcatcagatatctttaacaacggccagtttaagggctggtgccaacgatgacatgaacattgttgaagcagaggcaatgaattacgaaggcactccaattaaagaaacactggcaactttgaaaatgtctgtacaggcaacagattcccttgggggctctgaaataacaccaccctcggtgttaaggctgaagtgtggctcacggg

SEQ ID NO: 105743 - DNA, 405 bp, Homo sapiens
ggcccttccccgaggagctgagtatggctttcgtctacggctccggggtgtaccgccaggcagggcccacttcagaccagaagtcatatttgacggcagcttccagaacatgctggctcccatatccacagagcacttttctccaacacggctccctacccttccctgtgcttcccccagagctttcagcaagtctgtttaattcacgtgtccttcaagaatcatatgtgtcatctctaggagaatttctccctgctgtgcccctgatctgaaccctatgctgagtgcgaatgctatgctggactttgtgttcacagtagaagaccctggcggatgggattcaaagaacctgcagaaaaaatggagtcactactctttcctaacaggtataaggcccaagattat

SEQ ID NO: 105744 - DNA, 397 bp, Homo sapiens
ggaataaatatgttctaagacaaagaaaaagctgcaaggtgttaacgcctaacacacaagtatgttaggcttccaccaaaggcctcaatatacctgaatacgcacaatatcttaactcttcatatttgggtttgggatctgctttgaggtcccatcttctaaaaaaaaaatacaaaaacctacctacccgtacgcatacatacatatgggtatatatttggaaactaaacaaagatcgcacatcataaagcaggctttgctttaatttccaaaaaaattacaaaaaatttaaagatgtttttgtcaaaattcctgccgattcatgccctttgggttacggggtcctcagggatgcaaccctaccctttggtttggggacattatgatttgggtaaaa

SEQ ID NO: 105745 - DNA, 399 bp, Homo sapiens
  misc_feature (1)...(399): n = a,t,c or g
ggggggggttcctcactgtgtgtgggcgaccgcctggggcatgagaccaggacttccaggccccacagggttgtgcgctcagacctcaagtaggggccagaagagtgtactgaaacagaaggaatcttgtggaatttggcagttgtaccattttcttagcagaaaacaggagcccaggtgggagccatgtgtgtcgggttcctcgtcaggtgacggtgctgttgcggatctcgcggatgagctgagggggtatccagctttgtgctgcacgcttcctgtccactcatacaggtcgtgggctggtatccgcccccagatcatgaacgggcccctgcacccccgccccctggtggcgctgctggacggccgcgactgcactgtggagatgcccatcctgan

SEQ ID NO: 105746 - DNA, 414 bp, Homo sapiens
gggcggatcaaaacccgagctgcgcttgtggctgcggttgctaactggctgtgcacagaagctgagaaaagagggtgggaataagcacttttgcctcagtctgaagccttgcaaggagctgtcaccatgcctcactcgtacccagccctttctgctgagcaaaagaaggaggtgtctgacattgccctgcggattgaagccccgggcaaaagcattctggctgcggatgagtctgtaggcagcatggccaagcggctgagccaaattggggtggaaaacacagaggagaaccgcctgctgtaccgccaagtcctgttcagtgctgatgaccgtgagaaaaagtgcattggaggcgtcattttcttccatgagaccctctaccagaaagatgatcatggtgttcccttcgtccga

SEQ ID NO: 105747 - DNA, 407 bp, Homo sapiens
gggcggagcagaacccgagctgagcttgtggctgcggctgctaactggctgcgcccagaacctgagagaacagggaggccctagggacttttgcctcattctgaacccttgcaaagagctgtcaccatgcctcactcggacccagccctttatgctgagcataagaaggacgtgtctgacattgccctgcggattggatccccgggcaaaggcattctggctgcatatgagtctatgggcagcatggccaacccactgaaccaaatgggggtggaaaacaccaaacaaaaccgccggctgtaccgccaggacctgttcagagctgaggaccgtgagaaaaagagcctcgcaggcgtcattttcttccatgacaccctctaccacaaagatgataatggcgttccctt

SEQ ID NO: 105748 - DNA, 406 bp, Homo sapiens
gggcggaacagaacccgagctgtgcttgaggatgccgctgctaactggctgcgcacagaagctgagagaacagggcgggaataagtacttttgcctcattctgaagccttggaaggagctgtcaccatgcctcactcgtacccagccctttctggtgagcacaataaggagttgtctgacattgccctgcggattgtagccccgggcaaaggcattctggctgcggatgagtctgtaggcagcatggccaaacggctgagccaaattggggtggaaaacacagaagagaaccgtcctctgtaccgccaggacctgttcagtgctgatgaccgcgggaaaaagagcattggaggcgaccttttcttccatgacaccctctaccagaaagatgataatggcggtccct

SEQ ID NO: 105749 - DNA, 394 bp, Homo sapiens
gcactataaagatgaaaaacaatgtttatgataacaagagaaacaaaataaacttttttttgagccagagtctcgatcttgtcacccaggctggagtgcaatggcaaaatcttggctcactgccacctcggcctcccgggttcaagcgattctcctgaaccagggaggcggagcttgcagtgagccgagatcgtgccactgcactccagtctgggctacggagtgagactccgtctcaaaaaaaaaaaaaaaagaaattataaaagttttctcttagggcaagaaatcggggcctattttttccccgaatgttttgctttacaataggggacaaaaccccttttatttgtcaacccggccgcaaattcaaaatatataattcgaaaacctggaa

SEQ ID NO: 105750 - DNA, 289 bp, Homo sapiens
tactaaaaatacaaaaattagctgggtgtgggtgtgggtacctgtattcccagttacttgggaggctgaggtgggaggatcttttgaacccaggagttcagggtcatagcatgctgtgattgtgcctacgaatagccactgcataccaacctgggcaatatagcaagatcccatctctttaaaaaaaaaaaaaaagggacgggaccttttttactcagggaattagccatgtttttttagagggacggacttattgggatccttgtttttaaaagggccgacgcgcccg

SEQ ID NO: 105751 - DNA, 252 bp, Homo sapiens
cccgtctctcctaaaaatacaaaaattagccagtcatggtggcgggcgcctgtagttccagctactctactcagaaggctgaacccaggaggtggaggctgcagtgagccaagatcgtgccattgcactccagcctgggcgacagagtgactctgtctcgaagaaagataaaacaaataaaccaataaacaacaaaaaatactcttctctgcattcccattagctagacagcactcagagtcgacgcggccg

SEQ ID NO: 105752 - DNA, 297 bp, Homo sapiens
ccgacaagtgatgatgactctgtctccaacagatgcagacacggcgggtggagactgggtcatctggatgtcgcatctggaacctgggaaccagagcagcaggagccccaggagctgagcggggaccctcatgtccatgctgtgacctgactgggtctgactcctttcacccttagtctttgctatcttagtaaatctacccaactgctcaaaccataaacctaggagtcaaccttggttttctcttttcctttactctccacagcaaatatatcacaagccctgtcgacgcggccg

SEQ ID NO: 105753 - DNA, 338 bp, Homo sapiens
cgggaggctgaggcaggagaactgcccgaacccgggaggcgaaggctgcagtgagctgagatggcaccactgcactccagcctggcgacagagcgagactctgtctcaaaaaaaagaagtctctagtttttacctatttccccagggtcaccaaattctctttttagatacaaaacaaacacggtaaaacaaaaaacttgccctaaagaaatcgccactaaactgttcaaagaacacagatacaggaaaagaaatatgggctggtcagaatgcagtggggtttacaactaattgatcacaaccacttaagatttctttgttccttctcccctcccact

SEQ ID NO: 105754 - DNA, 352 bp, Homo sapiens
  misc_feature (1)...(352): n = a,t,c or g
gaaaaggaaaggtggaagtgaggacgacaagaaacaaacaatacaattccatgctgttaaaaataagagttaaaagggatggaccatcagtaaacagcgtgctttcctcttcctttattcttagtgaacgagctacagtaactgtgccttccaagtgtactgcctctgcagaaactgatgtcagagaagaaagaagcgtaagtttgaggtgaccaaacttatacttaagaaccttanaggccaggcgcggtggctcacacctgtaattccagcactctgggaggccaaggcaagcaaatcacttgaggtcagaagtttaagactagcctgggccgggcacggtggctcacgn

SEQ ID NO: 105755 - DNA, 359 bp, Homo sapiens
gtctaaaacaaaacaaactatgttttggcacagcaacatataaaaataaaacaggaaagcttagcagcagattcacggatatacggaaatacaacataatgaagatgacccacaaatcaggaaaaaatgtatccactatttgtggatggtactgtaaaaattgtctccaaaaaaaaaagtaaataaataaacggctgatgaaaaaaacaacaggggccaccaatgaaaatgtaaactgataaagccatttcaaaaagggatttatcagtacttagggaaataattttttttgaaatggagtctcgctctgttgccaggatggagtgcagtggcgtgatctcggctcgctgcaacctcca

SEQ ID NO: 105756 - DNA, 431 bp, Homo sapiens
  misc_feature (1)...(431): n = a,t,c or g
tgcatttctttgtactaagagcttaaaaagaaaaaaggaaacaaaaggtcgcaatccagctgccatgaatcccacttccagcatcacacctgttagtgcatatctttcttagcatattcccttgtggtcctagaacaaaatgacaaaactactactaggtattacaaataaactctggtgagcaaagccaccaagttcctggcactaacagttttcaggtattccttttgaccaatataaatgtggttttaaaaattatatatatatatatatatatatatatatatatatatatatatatatatatagaaaatatacgcgcgcatatacaaagagatatatgtgtgttttctctcgtgccacacacaacattgtgtatctgtgtgcatatatatntatgggcgcatactttatactcacagcgctgttct

SEQ ID NO: 105757 - DNA, 423 bp, Homo sapiens
atgataagaaataaccaaaattagagctgaactaaagaatataggcattaaaaaaacattcagaagatcaaagaatccaggagctttttttttttgaaaaaattaattaaatagatagactgctagctagatcattaaagaagaaaagagaaaagactcccgtaagaagggcgtgaacccgaaagggggagctggcagtgagccgaaatcgggccactgcactctagcctgggggacagagcgagactccttctcaaaaaaaaaaaaaaaaaagggggaggggcgggggggtttttcccccgggccccccaaaaatcccacccccccttaaaaaaattttttaattcctttttggcccaaacccaaaaaattttaaaaaaaggggaaaatttcggggccaaaaccccctcccaaaaaggaacg

SEQ ID NO: 105758 - DNA, 422 bp, Homo sapiens
cggacgcgtggggactagttctagatcgcgagcggccgccctttttttttttttttttttttggggaaaaggtttttttttgttcccaggggggaatggggggggtaaaatttttttaaccggaaccttctttttccggttaaaagaaccccccccccggggccctcgggaaaaggggaaaaaaagggcgcggcccccaggggggggaaatttttgttttttgggaaaaaggggaatttaacattggcccccggggggttttaaaccccggaactaaagggggtttcccccctttccccccaaaaaaggaaattaaaggggggaaaaaccccttttttttttccttcaaaaaaaaaaaaaaaaaaaaaaaaaaaaaaaaaaaaaaaatattaaaaaaggggggcggcgctataaaccctcct

SEQ ID NO: 105759 - DNA, 375 bp, Homo sapiens
aagtggaatatttggcaatatatgggtgagagggtgttcaagagggaaggatggatgagcatacacaatttccgaacagcaaacatttattaagcacctactttgtgctgggtgctgagaatacaggagtagactagatccaatccctgttctcaaagagcttcccgtgtactggggaaacagaagtgtaaacatacagttacaatagagcatgatgaattgtaagggatatccagaagtgaccaggggagatttctaggaaaaagtgacatgtagttggacgcagtggctcacaccagtaatcccagcactttgggaggccaaggcgggcagatcacttgagttcaggagtttgagatcagcctgggcaatatg

SEQ ID NO: 105760 - DNA, 404 bp, Homo sapiens
  misc_feature (1)...(404): n = a,t,c or g
cttgcagtgagccgagactgcgacactgcactccagcctgcctgggcaacaagagcgaaactctgtctcanaaaaaaaaaaaaaaaaaaaaaaaaaaaaaaaaaaaaggggggcccctttaaaaaaaaccctgggggggcccaaaataaccggggggaaaaaaaaaaaaatttttttttttaagggggggaaaaaaaaaacccccgggggaattttggaaaaaaaccttttttttggggggggaaaaattgggcccaccccccccaaaaaaaaaaaacccttaaagaaaaaaaaaaatttttaaggggaaaagggggaaaaaaatcctttaattttttgtttaaaaaaaatgggcnnnnnnnnncccccccccccccccnccccccgcggggacacccaacaag

SEQ ID NO: 105761 - DNA, 361 bp, Homo sapiens
gaatcgcttgaacctgtgaggcagaggttgcagtgagctgagatcgcaccattgcattccagcctgggcaaaagagcggaactctgtctcaaaaaaattaattaattaaaattaaaattcacttcaattttaaaaaactcagactttaactgcagactcagttaaaaaactgggactgcagccggttctaggggagagtgaaggccactccagcacgggtctggagagaggtactccccaaggccaggagaaatgacctcatccaatcccctcctcccagcccagatgtagacagggcacccatgagctgtgggaagagcatcccccagggtagatagcgtctctgctcccagcctcagcc

SEQ ID NO: 105762 - DNA, 343 bp, Homo sapiens
ctttttaaaaatctaatattcctgaggcaggagaatggcgtgaaccccgggaggcggagccttcagtgagcccagatcgcgctgctgcactccagcctgggcgacagcgagactctgtcccaaaaagaaaaaaaaaaagatcctttaagatatattcttatggccgagtgcgggggcctgatccaggacctcacagccgctgtgagtacggtctaacccgcctgctttgggcggttgatgcccgtggcacaggactatccttcctttatgatatggccactgggaaacttgaccatattcaagcttttgtaggtgcttgtatgaaaccctggaaccggcattc

SEQ ID NO: 105763 - DNA, 368 bp, Homo sapiens
gtttcaacatgccttcctcactaagcctaatcattcctggctttagatttaaagtgaaagacacaagactcttcctttcacttgaacacttagaggtcattgcgggattattaattggcctaacttcaatattgttgtgtctcataaaactggaaagctttctgaggcgaaagagagagagagagagagagagagagagagagacactgggctttggctttcgggggaacagttacaacataccccacatttatggactacctgtactgcctcatatgggcatagctcttggtgcccccaattacaatagcaacatgagagatcacccgccaccataacagactctataagagggagaaagatgtaaa

SEQ ID NO: 105764 - DNA, 380 bp, Homo sapiens
  misc_feature (1)...(380): n = a,t,c or g
gaaatgcctcagacttttcttgtagggatcaaaagttatagtattggttaaaaaaaatagagacagaatgtgtttctacagtatctacatagttcctgccttcaaagtggctaatctcaaatgattcatttaacaacacccatcaaatgtttattgagcacttgttatgtgccaggtgtgctgagcccagtcctcaagctccacgagtttatggtttataaaaaaggcatatgtaaacaaactgcagtatagtaaatgagggtttccagagaggtgggcccaagagatcangtgagagggctgggcagggtggctcacacctgtaatcccagcactttgggaggtcaaagtgggtggatcactggaggtcaggagtttga

SEQ ID NO: 105765 - DNA, 364 bp, Homo sapiens
gtcttgaactcctgaccttaggtgatccacccactttggcctcccaaagtgctgggattacaggcatgagccactgtgcctggcccttaatgacttttttaatgcgtccctaggggttattttgaagaaaaaaaaaatttaattaacaacataacagaattagtttaataagtgaattgttattaacatctgtcttctctttttagttaaacaagaacacatattgatctttcaaaacttttaatgtgatgaataagacctataaaataatataattcaatcaatgcatttaatacctcctctaacaataaccatttgtatttctttgcacataaggaatacttttaatctggaagtatcaaaa

SEQ ID NO: 105766 - DNA, 291 bp, Homo sapiens
aaagaagtgatatggttggagaggccttggtgaagtcctccaaactctggatggtttgtggttgggtgcaggggaaaaatgaaggcctctaacatatgatattactcctctagaattgttgacttttttatttccttggagtctctcaaatcaaggttttattaattaattaattaatttctatttttattttttgagacagtctcactctgtcacccagactggagtgcagtggtgcaatcttggctcactgcaacctccgcccgcggcgcgtcgacgtcgacgcggccg

SEQ ID NO: 105767 - DNA, 382 bp, Homo sapiens
  misc_feature (1)...(382): n = a,t,c or g
cagatacctatttatggcagagcaggatgaagaaagtttcctctaaggcatagaagaaagataattcactgctctaaagcctcccaaaaagagatgtttaagaaagtcataccagtatcatcctgcttttgacttttgtaactactgcaaacaagaacccagggtcctcatatcccaataatttcttcaagtcaaaagtagtggttttccattcaagtggtggtggtaacaaaatcactgtcttatgaatatataataacttacatatattgcattatttatttttttgagacggagtctcactcttttgcccaggctggagtgcagtggtatgatctcacctcactgcaacctctgtctactgggttcaagcgattctctn

SEQ ID NO: 105768 - DNA, 179 bp, Homo sapiens
  misc_feature (1)...(179): n = a,t,c or g
gcatgccaactttttttctttttaaaaaaatttttttcgtaatttttatttaaccaaaaagggggtttcatcgggttacccaggagggtctcaatctcctgaccttgggatccccccgcctgggcctcccaaagggctgggatcacaggcaggacccattgcccgtnaacccggccgca

SEQ ID NO: 105769 - DNA, 359 bp, Homo sapiens
  misc_feature (1)...(359): n = a,t,c or g
tttcagcattatatttttattattattatgttattattacactgccctnangacaccgactggaggtcgggttaaattcaccatggcttcttttgacatcgcgggggaaacaacatgatcacctactatgattatgtggtgggaaaagaaatctgagttgttctgaactaaaggcaggctaatccaaggcagcctgtacagtaagatttaatttatccaactaagagagagtaattttcaaaaaatttgaattttaaaatctacattaataggcaccggccgggcacggtggctcatgcttgcagtcccagcactttgggaggctgaggcaggcagatcacctggggtcaggagttcga

SEQ ID NO: 105770 - DNA, 358 bp, Homo sapiens
cgcggccgcgtcgaccaagaaaatagataggccaggctcagtggctcacacctgtgatcctagcattttgggaggccaaggcaggaggatcacttgaggtcaggagttcaagaccagcctggcctatttattttcttgtgcttttggcgtcatatctaagaaggttctgcctaattcaaggtcactcagatttactttatacttcttctacaaggggttcatagctttagctggcacaggtagggctatgattcattttcaattaatttttttgtatgggctgaggactaaccccacttatttttttacattggatatctagttattacacaccatttgttgaaagactttcatttct

SEQ ID NO: 105771 - DNA, 155 bp, Homo sapiens
gttcataaaattttcattgcttacaaatatagtgggtttcaaaccgtctttagaggacgggcatggtggctcacgcctgtaatcccagcactttgggaggccaaggcgaacagatcaccagaggtcaggagttcgaggtcaggtcgacgcggccg

SEQ ID NO: 105772 - DNA, 420 bp, Homo sapiens
ttgcagcaagccgagatcgcaccattacactccagcctggcgacagagcgagacccagtctcaaaaaagaaaaaaaaaaagaggttaaattagagggaaaaaaagattcagggaaagaaagaatttgagtccctggaatagaaactcagttcctgaaggaaggttaaaccagatgctgagaaacttagaacaaaggtcaagtcaggacaaacagtaaagccagaaggctcctgaattaaagctctgcatactttatcagcctggggccaaggttgggatcaaagcgaagggcaggccagggtcactggagggcgattaaaataacctcaattaaaacatgaggcctaggtagaatgtttcactatatatatataatttttctctgaaatcctactgactgtaccagtcagagtttggtgg

SEQ ID NO: 105773 - DNA, 415 bp, Homo sapiens
cccacgcgtccgcccacgcgtccgcccacgcgtccgtctcgagctcctgacctcaggtgatttgcccactttggcctcccagggtggtgggattacaggcgtgagccactgtgcctgaccttatacaaagttttaaataacatggccttctgactttaacttagaaaccaaagagtggtaggagtagggggaaggtattaaataacagaaactatctttggtgattaaaaagttgggtacctactattctaataacttttaagggctcttctgtaggttagcgtaaaagtaattgtggtttttgccattaaaagtaatggcaaatggcaggcgcttgtagtcccagctactcgggaggctgaggcaggataatggtgtgaacccgggaggcagagcttgcggtgagccgagatca

SEQ ID NO: 105774 - DNA, 493 bp, Homo sapiens
  misc_feature (1)...(493): n = a,t,c or g
nattggagactcgatgnctatcaggaagaggacacctccggcaagccctgccgctttctgcatcagcacatcatcttcaggctcttcgtcagcctcgcgccggttcagcagactgaaatccagcggatgcatatccggatcgctgaaaaacaggctgagcacggtgtacgtcagcccggaaaagtgcatatccagcagaacatcatgaaaataatgggtactgtaaaagcggtgccagtcggcatactccgtggatgacatcccggcaagcatggcacgccagtcgggtcgccccatctcacgcgccagtttcagggcaaaactcagctcaccgtcgaacactttcccgcagaaacaggctctgcgggcccggcgtcctctgtctgttcaggggcattattcaccacaaactcatacataccagacagccggtacaccacgttttcagcatgagaaattgcctccgtgggccaggtggtaagcacttcctgct

SEQ ID NO: 105775 - DNA, 415 bp, Homo sapiens
tttcgtagaaggaaaactgatagagaatttagcctgttcaactaacaaatacaggtgttgcaaatattgaatactgatatgttattcacagtaaaaataatcttagttgtaagaagtctatttgaattataaaataaatatatttcatacctgtcatggattaaaaaaattttttttaattgaacccgggaagcggaggttgcggtgagccaagatcgcgccactgcactctagcctgggtgacagagcgagaatccgtttcaaaaaataaaataaaaataaaaataaataaacaaatagaagaaggtttcctttttcaaccttttggtcaaggctttatatggtgttattttcctgcaaaagagttcataatagcactttctaaaacataatctttcataagcatcggtatccg

SEQ ID NO: 105776 - DNA, 443 bp, Homo sapiens
  misc_feature (1)...(443): n = a,t,c or g
gccataattcggcacgagccttgatacgacagctgacctgatttcccgataccttttcccccccgaaaagtacaacatctggcccgccccagcccgaagacagcccgtcctgcctggacaatcagacgaattctccccccccccccaaaaaaaaggcatccccccggtttggcccgggggaaatttggcccccgggaattggccaaagcggggctggcaaaggagtgtccggcaggagggccaacgcccgctgttcggtttgcgacacccaccaggggggggggggggagggttgccggttttcaaacaccaatgggaatcccaatggggaaggcgaggctggggcttttaacctttttgggcttcgcctcgggctggattggtgcttaccgccccagggagaccctgtgcgggggggagctggtggacaccctccagttcgn

SEQ ID NO: 105777 - DNA, 411 bp, Homo sapiens
  misc_feature (1)...(411): n = a,t,c or g
gagcgttccctgaaaatgccgccaccggctctaccttccaggatccagttccggcctccaaggggcgggcagaagttggaaacatgcggctgtcggtcgctgcaccgatctcccatggccgcgtatttcgccgtatgggcctcggacccgagtcccgcatccatctgttgcggaacttgctcacagggctggtgcggcacgaacgcatcgaggcaccatgggcgcgtgtggacgaaatgaggggctacgcggagaaactcatctactatgggaagctgggagacactaaccaacgagccatgcgcatggctgacttctggctcacagagaaggatttgatcccaaagctggttcaagtactggcccctcggtacaaagatcaaactgggggcttcacaagaatgctgcaan

SEQ ID NO: 105778 - DNA, 414 bp, Homo sapiens
  misc_feature (1)...(414): n = a,t,c or g
ccaagaattcggcacgaggaagagggcaacctttatttcccttctttttttctttagctcggtttattccaggggtgtgtttcgacgagatgcgcacaagagtgaggttgctcatcggtttaaagatttggcagaagaaactctcagagccttgacgctgattgcctttgctcactatcttcaccagtgtccatttgcagatcatgtaaaattagggaatgaagcaactgaatttgcaaaaacatgtgttgctgatgagtcagctgaaaattgtgacaaatcacttcataccctttttggagacaaattatgcacagatgcgcctcttcgtgaaacctatggtgaaatggctgactgctgtgcaaaacaagaacctgagagaaatgaatgcttgttgcaacacaaagatgacan

SEQ ID NO: 105779 - DNA, 415 bp, Homo sapiens
ccaagaattcggcacgagcgctgttttgccggaggagcccctcaggccgtagtaagcattaataatgtctttcatctttgaggggatctacgatggcttcagcagtgtgctccagttcctaggactgtacaagaaatctggaaaacttgtattcttaggtttggataatgcaggcaaaaccactcttcttcacatgctcaaagatgacagattgggccaacatgttccaacactacatccgacatcagaagagctaacaattgctggaatgacctttacaacttttgatcttggtgggcacgagcaagcacgtcgcgtttggaaaaattatctcccagcaattaatgggattgtctttctggtggactgtgcagatcattctcgcctcgtggaatccaaagttgagcttaatgct

SEQ ID NO: 105780 - DNA, 728 bp, Homo sapiens
gtccccggctcctgatggaggcggggccgcatccccggccggggcactgctgcaagcctggggggcggctggacatgaaccacggcttcgtgcaccatatccgacggaaccagatcgctcgggacgactatgacaagaaggtgaagcaggcggccaaggagaaggtgaggaggcggcacacgcccgcgccgacgcggccccgcaagccagacctgcaggtgtacctgccgcgacaccgagatgtctctgcccacccacgcaacccagactatgaagagtccggtgaaagcagcagtagtggaggctctgagctggagccttctggccatcagctcttctgcttagaatacgaggcagacagtggagaggtcacatcagttatcgtctatcagggtgatgacccaggaaaggtgagtgagaaggtgtcggcacacacgcctctggatccacccatgcgagaagccctcaagttgcgtatccaggaggagattgcaaagcgccagagccaacactgaccatgttgaaggcgttctctccaggctggattcactgcactcggaagaattctgcccagggaatttagtgtgggggtaccaggaccagtttgtctgatcttgagacccccagagctgctgcatccatagggtgttgcaggactacacctggcctgccttgcagtccattctttcttatatgttgacccatttgcccagcctgatattctggaa

SEQ ID NO: 105781 - DNA, 417 bp, Homo sapiens
  misc_feature (1)...(417): n = a,t,c or g
gaggcagagcttgcagtgagccaagatcgtgccactgcactccagcctgggcaacagagcgagactccatctcaaaaaaaaaaaaaagggggggtccaaaccccataaaaaccaccttccaaaaggggccccaaatttttgtttttatgggaggggggggtataaaaaaaaggcccctttattttaggggggaaagagggtttttttagaaaattttacctaaggcgggacccctacttcatccctgtactttcattcccccaaaaaaaccctagtgggttttatggaatggaaggtaccaggggaacccgggaaagttttaaaaggaaataggtaggggttttaaaagtcttaggctaggaaaacccttgttaagtccaacccaaaaaccagaaccttaaaaaaaggacttctaan

SEQ ID NO: 105782 - DNA, 400 bp, Homo sapiens
atgactgtcacctatcaaatgcctcctgtgtacctggcactaagttgattagccagaaacccccagctggttggggccagtaaggagattttattttattattattaaaagtgtttggaagtggaaaaaaaaaaaaaaaaaaaaaaaaaaaaaaaaaaaaaaaaaaaaaaagggggggggccttttaaaaaaacccttgggggggacaaattttactggggagtgaaaaaaaaaatttttttttttttgggggggagtaaaaaacacccttggggattttttgaaaaaaaacttttttttgggggggggaaatgtggggcccccccccccaaagatatttcatgtttatggggaaaaaaaaattttttaggggccattggggaaaaaacttgctgctgtg

SEQ ID NO: 105783 - DNA, 402 bp, Homo sapiens
gaggcagagcttgcagtgagccaagatcgtgccactgcactccagcctgggcaacagagcgagactccatctcaaaaaaaaaaaaaatggggtggccgaaccccttaaaaaccaccttccaaagggggccccaattttttttttttttgggaggggcgatttgaataaaaatgcccttttattttaggggggaaagagggtttttttaggaatttttacctaaggcgggatccctactttttccttgtcctttctttcccccaaaaaaaccctagtgggttttttggaatggaaggaaccaggggagcccgggaaagttttaaagggaaataggtaggggttttcaaagtcttaggctaggaaaacccttgttaagtccaacccaaaaaccagaaccttaaa

SEQ ID NO: 105784 - DNA, 378 bp, Homo sapiens
tcgacccacgcgtccgcccacgcgtccgtaattacatgctcttcagacataatttttatgtgattctcacttctcaccccctctagattaatttacttcattgaaaagcaagaactttgaaaaaattatgaacttaacgaaaaatgttcggttttgagtcctactggattaggaaagggatggtatcttttttatttaaaaatcttccaaaagccagtggcttggttatttatttattgggttgcttatttatttatttataaaattttttttggagacgaggtcttgctttgtcacccaggctggtatcttagctcattgtaacttaaaactcctgggctcaagtgatcctcccacctcagcctcccaagcagccgg

SEQ ID NO: 105785 - DNA, 378 bp, Homo sapiens
cggacgcgtgggttcatgacttggctgtttggcatgagaggcatagctttcaacctgtcatgcgtttcaacattccttcttcactaagcttaatcatctctagccttggatttaaagagagatgcggccgggcatggtggcttacgcctgtaatcccggcactttgggaggccgaggcgggtggatcacctggtctcaaactcctgacctgaggtgatctactcaccttgacctcccaaagtactgagattacaggtgtgagccactgctcctggcttaacttcttgtatgttgagaatatacacaagacagacaagcctccatgaaatgataagctctaataccctcttcctttattaatgtgagattgctcacccg

SEQ ID NO: 105786 - DNA, 465 bp, Homo sapiens
  misc_feature (1)...(465): n = a,t,c or g
ggaggtcccccacggcccttcaggatgaaagctgcggtgctgaccttggccgtgctcttcctgacggggagccaggctcggcatttctggcatcaagacgaacccccccagagcccctgggatcgagtgatggacctggccactgcgtacgtggatgggctcaaagacagcggcagagactatgcgtcccagtttgaaggctacgccttgggaaaacagctaaacctaatgctacttgacaactgggacagcgtgacctacaccttcagcaagctgcgcgaacagctcggacctgtgacccaagagttctgggataacctggacaaggagacagagggcctgacgcacgagatgagcaaggatctggaggacgtgaacgccaaggtgcagacctacctgtacgacttccagaagacgtggcagaaggaattgacctttacggcagaaagcgagccggtgcctccn

SEQ ID NO: 105787 - DNA, 404 bp, Homo sapiens
agtgagccaagatcacaccactgcactccagcttgggcaacagagcaagactccgtctcaagaaaaaaaactttattggatcacagtcacattcgttagtgtattgtttagggctgctttgggctacaacattaaaggttagtggttgtgacaaagcctaaaatatttagtgtggcattttacagagtttctcagttctgtgtttagagctttgctttatcaatctgattaacacaacgttgtatttgtggagaatgggaataagcacctcaaaagattcactgaatgatgtgtgaatgcctgtaactggcaagcacagaaaaatttgttcatatctatgtcaaattccttgaaagtcacatagtgaaaagtcactacttccaaggttagcaagaacctatttg

SEQ ID NO: 105788 - DNA, 420 bp, Homo sapiens
caacttccaatcgccggccatgatgctcctcatcttcaaggctctcatctcctttgcaaaacttcttgaaccaccactgcactgtcactttgttagcagttcccgggccagatgtgttgttgatgttgcaagttgtctctgctactgcatgacccattttgaacttgaatgagaaaattgcttgaatttcctttttgtctaacattattcccatagtttaaaataaatataaaataaacagcacgtaataagtctttagcaaaaaactgtaaagcatgaaatgtgcattaaaatggtgtataacataaccacatttatttaagaatgaatcccaatatcaaatggcaaatttcaacaatgcagaagctgcaatatcttttgcaccaaagtgcaagcttgccaaggaatcagtatgggaaa

SEQ ID NO: 105789 - DNA, 390 bp, Homo sapiens
  misc_feature (1)...(390): n = a,t,c or g
ctcatttagcagctgatttctgatctcagggctcagaatggatatgagtatttttaagtttggaaatgcaagctttaaaaataacagatttgtaactgattttaagcaactgtccttgctcaagtttgcagtaattgatgtagcgtgccatgattgttacacttgattttgtggaatgttttctacttacttgatttggatcagatactttattaactagaaatgatgaaaatgttaatttggtgctttgccaataactacttgtaagtttggaaaaaaaaaaaaaaaaaaaaaaaaaaaaaaaaaaaaaaaaaaaaaaaaaaaaaaaaaaaaaaaannnnannnnaaaaaaaaaatatatttaaataaaaaaaattattaatttaattt

SEQ ID NO: 105790 - DNA, 409 bp, Homo sapiens
  misc_feature (1)...(409): n = a,t,c or g
aaaaagttttaatggccacatcattacctttgaacactgcctggtgcctagaacataaaataagattcacttactttagcagaaatgttatactgtcacgatgactaacatgacattttgtataaacgactaggtctgctattagggatcaccttataaatcagtttgggtttgggttagaaggagaatgaaataagagagattgtatttaaactagcctaggaaaatggtgcactgaaataaaggttactgcaggggttttccccatgacaagcanaaaaaaaaaaaaaaaaaaaaaaaaaaaaaaaaaaaaaaaaaaaaaaaataaaaagaaaaaaaaaaaaaaaaagaaggggtttaaantaaccctagaaaaaggggccctgaagtaatggttattgttggggtt

SEQ ID NO: 105791 - DNA, 402 bp, Homo sapiens
taagtattatttttagttactttttatttttgagacctagtctgtctctgtcgcccaggctagagtgcagccgagatggcaccactgcactccagcctggatgatagagcgagactttgtctcaaaaaaaaaaaaaattaaaaataaaaacccctaacctttgaaaaaaaaaaatttttttggaaaccccctagggaaaatcacaaaaactccataaacctttccctttaattaattaatttttaaaaccatagggttagaaaaccctacctttcaaagggttggaagcacataaatttaaaccttttttaaggaatttaaggtagtcccttgggcaaaagggaaataagggcctttcttttaatcctccctttccctttaattataattttcttttggaca

SEQ ID NO: 105792 - DNA, 408 bp, Homo sapiens
aagatggcggagtaaggcgtgccgctgcaaactggcctctgggccgggggcgaacaagccccgggggggcgattgcatctgttggaccgtgcgaggagaaaaaaaaaaatatcggccagaggagaggaactaaccgaacattcttcctccctaccttatagaggggagtgggcatctacactaaagcaaagtgttaggcgcgtccgtgcgaagagaccaccaaacaggctttgtgttccttatcacaggaagaaaattttccttgacctttaggtgcttttatattcatctcaaaaacaaaattctgaactcatgacttggcaagctgaagtgcaatggggcagtctcgggtcactgcaacctccgcctcccgggttcaagcgatttttctggctcagcctcctagtg

SEQ ID NO: 105793 - DNA, 925 bp, Homo sapiens
gagatcaggtccggaccatgagctgaccctggactcaggcaagggctgtacaagaagcatggtgccagcatctgctgctagtgaggaccgcaggaagcttcctatcatagtggaagatgaaggggggccgacaagatcacgtgcgtgctcgtcccccgcgcggggctctcggccgccgccctcggccatcggctgctccccggtggcccaggcttcggactccgcggccggcccggcgcggcgcaccgcccttcagtcacttagtagctggctcggttatcagatcgaccgtcacagtgtcccagtgtatgtgttcaagtcacccttattttccgtcataatggccccaaagcacaagagtagtgatgctgggaatttggataggccaaagagaagccgtaaagtgcttcctctaagtgaaaaggtgaaagttctcgacttaatcaggaaagacaaaaaatcctatgctgaggttgctaagatctacgggaagaatgaatcttccatccgtgaaattgtgaagaaggaaaaagaaattcgtgctagttttgctgtctcacctccaactgctaaagtgacggccacagtgcgtgataagtgcttagttaagatggaacaggcactgcatttgtgggtggaagagatgaacagaaaacgtgtccccattgacagcaacatgttgcgccagaaagccttgagcctataccaagacttcagcaagggatgctctgaaactgacaccaagccatttactgcgagtaagggatggttacacagattcaggcatagattctcacatcattacaagaagaagaagaaggggatcatggcccaggtagcagtgtccaccctgcctgttgaagaagagtcctcctcagagaccaggatggtggtgacattcctcgtgtctgccctcgaatccatg

SEQ ID NO: 105794 - DNA, 272 bp, Homo sapiens
  misc_feature (1)...(272): n = a,t,c or g
ntttgacctggctgccgctcatggtttccacgtacagctctgaaccaggggaatgtgattaattccaggcattcaacgttctctgcaccacgatcaaccaaatcgcccaccgagataagcaggtcttttttgttgtcgaatccaatcgtatccagtttgttcatcaggttcgtgctcatctttccttcccgttcttccctggtagcaaaccggtaatacaccgttcgccagaccttaccttcgataaccagaagacctgcccgtgccatttt

SEQ ID NO: 105795 - DNA, 478 bp, Homo sapiens
  misc_feature (1)...(478): n = a,t,c or g
naatagatgatctntcggacnatggagngccatncgaagctcacaccgtccctaacatccctgctgcgagacccgcaggctgtggaatctcgcacgtcacctggccccagcagggcggccagctgaggggttgattttattttatttttttgaagtaaaggctgaatctcggcttcagggcttttgccaacgtctccactgacaggaaccagcaaacttcaggacccaaatgagcatcttaatttattgatgctaaacagagtttcactcttgttgcccaggctagagtgcaatgacacaatcttggctcactacaacctccgcctcccgggttcaagcaattctccagactcagccttccaagtagctgggattacagaaagcttcacatgtgagataaatgcactcaaagattcctcacaagtagctctttggagcttcagatgtgaaatggatcattcctcaatctgtaatagaa

SEQ ID NO: 105796 - DNA, 498 bp, Homo sapiens
  misc_feature (1)...(498): n = a,t,c or g
naatcgtagaccantagtccagngnggngatagagctgcgtctccagcctcaagacagagccttcgacccttgatcatatctggagcccaagagacggngcccgctgctcgcacttctgtttggatctcagaagacgttcctctgcctacaattaagtctgaagcccacgagatcgagtctcctgtcccccggttctgccgggaaccctgaaaacgaagccccctgcccacaattaaatccagaagctacaagtttaaaaaaaaaaaaaaaaaaaaaaaaaaaaaaaaaaaaaaaaaaaaaaaaaaaaaaaaaaaaaaaaaaaaaaaaaaaaannngggggggcccctttataaaaggggccccttaaaaccccgggaaaaccccctggggggtttttttttggcccccccttttgggggggcccccccccccggtttttttttgggggggggggggcccccccccttttttttttttaaaaaaaggggggaagggcc

SEQ ID NO: 105797 - DNA, 412 bp, Homo sapiens
atgcaatgagccaagatcacaccactgcactccagccttggcgacagagggagactctgtctcaaaaaaaaaaaaaaagggggggcccggccccttaccctttgccttgtccccgcccaaaaacccaaattagggggggggtttccttatcacacaaaaaaaaggctagggctacccaaggacccttttgttttaaaggaaaaaaaaaaccgggggtccttttggcctttcccagggacatttgttttttaaccattttttttttagggaggaacccaagggggctgggtaaaaaccctaaaaaaagggttttttttattctggggggagtggggaggggtcacattcccagcccccccttggaagggctttgggggacctgggaacaaggttttttttactacatagggcg

SEQ ID NO: 105798 - DNA, 499 bp, Homo sapiens
  misc_feature (1)...(499): n = a,t,c or g
ggggaagggnnnngnnaatgcgaccntcgnattagatcatcggacangcggaggaantcgcttcctcacagcatggccaccttatggcagtgagactgcttacatggtaagtctgggctccagcatgaatgttccatcaagcaaggtggaagtcgcatggccttttctgactcagccttataagtcacacaactttacttttcccacattccattggtaacaaactagacacaaactcacaaattcaagaagtgggaggactgggctccaaatcttgataaaggagcagcacagttctggaagatggtgtgggacaggagatattctatggcaatctttggaagatacaatctgctacagtgtccccaaatccttattggattttttattatttatttattttgagacagagtctcactttgtcaccaggctggagtgcagtggtgcaatctcagctcactgcaacctccgcctcctgggttcaagcgattctcctgcg

SEQ ID NO: 105799 - DNA, 399 bp, Homo sapiens
cttaaacaactccttcaccagtgtccagatgacacacaggaggtcagaagcctctcctactttaaaataacatcacccatttgccagtgttctccctggtggaagggaaagaatgaggtggggcaagaggagacctgcattctcattacttatggaatgaagtattaggagcattagtaaatgatgcattttccttcaaacctgatatgtctttcaggaggcagttatgcactacttagaagaattttggggttcagatgcctctgttcaatttgttcaattggctgttcatttaacacaatttttttttttttttaaagacagagtcttgctctatctcccaggctggagggcattgttatgatctcagttcaccacagcctccacctcccgggttca

SEQ ID NO: 105800 - DNA, 452 bp, Homo sapiens
catcgcgatccctagtgcatgtcgtggaattcaaacgtaccacctcctcgttttcttttctcatcagatgttattttactccgtgttctaggtcattgataaaaatggggatggtggtgggtcggggtggagggatagaattctatggcatgttttgttgaattgaattgaatttgctgtcttgaaactggcagttgctctcctgacttttttcaccagcttaatttcagttaatggcttatcttacattcccatgtattctgtgtggtacctgaagttacttgcttttcttctgttctggaagaaaaaataattcacagtaaaatttaacgtactttaaaactggtctcctggtctcaagcaatcgtcccgcctcagcctcccaaagtgctgggattacaggcgtgagccaccgtgcctggccgggttactggcttatttatttaggcgca

SEQ ID NO: 105801 - DNA, 473 bp, Homo sapiens
  misc_feature (1)...(473): n = a,t,c or g
ggagggcttttaattgaaacccattgagangcgtggaattccccggctcgagcggcccaacccttccctcaccctggcaccagacacccaggacttatttaaactctgttgcaagtgcaataaatctgacccagtgcccccactgaccagaaaaaaaaaaaaaaaaaaaaaaaaaaaaaaaaaaaaaaaaaaaaaaaaaaaaaaaaaaaaaaaaaaaaaaaaaaaaaggggggccctttaaaaaaaaagggccctaaaaaacccggaaaaaaccccgggggggttttttaaaggcccacccttttggggggggcccccccccggggttttttttggcgggggggggggcccccccacttttttttttaaaaaaaaaaaaaaaaatgttcttctttttggggaaggggggttttttttttggggncnnaacaaaaaacgagactcgagatatctctaaagaagaatagtaaatn

SEQ ID NO: 105802 - DNA, 468 bp, Homo sapiens
  misc_feature (1)...(468): n = a,t,c or g
ctgaccgccctggnnatgagantcatatccagtgtggtggaattcggggaagggggttatatttcgatgacgtactgcttttgcatgagctgcgaactctttttgttttttcattttttccatcttttaacctgtaaacagttaaatataaatagtatctatgatcatatgacctggttttaattggttttaatgtaaaaaagtaggttnntttttttttttttttttttttggggaaaaggggtttttttttttttccccccgctggaaggccgggggggaaattcggtttattggaccccccccccccgggggaaaaaaaattttcctcccctgggtttagggaaaatggggaataaccccccccccccccccccccggttttttttttttttttttaaaaaaaagggggttttttttttggggccggggggggttaaaaccccctccctaagggaaacccccccg

SEQ ID NO: 105803 - DNA, 478 bp, Homo sapiens
  misc_feature (1)...(478): n = a,t,c or g
naggcgggccgtctgtnnnnnnaagcctttagnanagactnnncnntnnnttnaangaaccngacgcaggagaattgtgtgaacccangaggtaaaggttgctttgtgctgagatcgngccactgcactccagcggggagacagagtgggactccatctcaaaaaaaaagccgtaaagatcaagatcaagtagcactgggctaggcttatgtttctccctggcaaaaatcagctggagctgggtttcagtggggcattactggaggtgctattcagttcatcacagtcctttcttgactcagttccttgtgtgcattatgtgtctggtccctttaagtgttttaatttttgcctcctgacctaaaatggtagtttctattttaaattgtgttttagggtcatgtgggtgctgaaaaagaaaagggtctagttgagtgcttttaaaaggagacaattcaagttgtgtctatcanacagt

SEQ ID NO: 105804 - DNA, 491 bp, Homo sapiens
  misc_feature (1)...(491): n = a,t,c or g
cgagnnnagcgcgngccnnnnnaaaatcgagaactgagatctatcgcggaggaacncctagaactcctgaccttaggtgatctgcctgccttggcttcccaaagtgctgggattacaggcgtgagccactgtgcccaaccttccggcttcttagattgcttataaactatatagtcttgctttcgtaggtctgaaataatgatataaattttacttttaggtaagtaggttgcagtttgcatttttccataccttttgggtgtttagaagtaagtctgatcctttatttcaattcaaagaccatgaacagttgctttttataacacttaacagatgagtgttcagcttattttagctggggtccctgaacttcattatcttagggttcagatttgtttttgctatggactttatttctggcttattttatatcctaggtttaggatgtgctatttactttgtaacacgtattactgtagtttcaattgttt

SEQ ID NO: 105805 - DNA, 472 bp, Homo sapiens
  misc_feature (1)...(472): n = a,t,c or g
tggagcaaccgggngtgcnnnaccttgaaangcatacgatgngcagnggaaaanccgcgagngngtgtgcatgcacttgtgtgtgtgtgcacgtgtgtgtgtgtgtgtgtgtgtgtgcatgtaacacttgagcatgtatcacgccttattggattcactgccaaaaattggacttattctctttcagagatgaaaagattaatacgcagaagggatccagagagaggcctatatgcctagatttttttaaatatacatataacacgctagtgtcagatgaaaatactctttgagggaagaactactcaagaagcaaagataaaatttgattagcgctttttactctctataaaaaaagagaacatgctctctatgacacaagaaattgaaaaaataagacaagccaggcgcagtggctcatcgcctgaatgctggcactttggcaaggcaaggcaagaggattgcttgcccn

SEQ ID NO: 105806 - DNA, 443 bp, Homo sapiens
caggaagtggaggttgtagtgaaccgagatcgtgccactgcactccagcctgggtgacagagtgagactctatccaaaaaaataaaaataaagagaatgaatgaagctgagtgaagtaactgttgcaggacttcctctcccctcaccgtggatgggatggggatggtggggaggggtttatgtatatgacggtgcagaaaacccccccctggtaaattgccccaccacaggatccatttgggctggggtcctctctgactcagcttatccctgtcacaccacctccccagagaaaggccacgcctacctgctgcaggagctgaaagcattgctgacgaccccaccacgtgccctggagctgtaagacgggggtgggggccatctgcccgtagaggtgtcccgacagaagtaggcgggctggcactatggtcccattattgaca

SEQ ID NO: 105807 - DNA, 466 bp, Homo sapiens
  misc_feature (1)...(466): n = a,t,c or g
tgccnntnnnnnnnnncccaaaagactagcagaagncncgnggaatttctgaggcaggagaatcgcttgaacccaggaggcagagattgcagtaagccaagatcgtgccattgcactccagcctgaacagagcgagactccgtctcaaaaaaaaaaaaaaaaaaagggggccgttcaattttaaggggccttttaaaaccccttgaaaaccctgaaggggccctttaaggagacagcattctgttttttcccccccccccgccctttttttgaccctggagggggccaccccaatgggcttttcttaaaaaaaggagaaaatgggctccctttgttggattgggggtgttattcttccgttggggaaccggccgtcttgcaaggactccacccggatcccaataattgacaacatgttttgggctgtttttttttcaagccgcctttgttagctgtgaggacgagg

SEQ ID NO: 105808 - DNA, 564 bp, Homo sapiens
atgcgggtctcagaaagttttggctggactgatgagggcttcctgaacaaagtcactggtatgctagtttacaaggactctagatgccctgggagcttcaaaatgtttcaccaattatcagaggaagttactgggagggggcttgctgtggccccatctgggagagttgagccctggtccagccccgcgcaggaagggaggctgtaaccgtgccagcctgctgcagctgcagtgatgttttcctgtatgagacaaacaaagtcgcccggatccaaagcatcaattatggcaccattaagttcttccacgtgatcgtcttttcctatgttagcaaggaacatttgaaaaggaaattggaaaaataattccatttaccatagcatttaagagagctgaggctgtggagccagatggctgcgttcagagctggcgctgctgtttaccatgtgaccttggacaagcttctcgcttcattcataccacagtttgttcggctattaagtggaggagctgtaagggggagaggaactttgctgaaaggcacatcctccctgcagagcttga

SEQ ID NO: 105809 - DNA, 453 bp, Homo sapiens
  misc_feature (1)...(453): n = a,t,c or g
nctcgatagcactacccagngggnggaattcgtgcctgtagtcccaactacttgggaggcttagatgggaggattgcttgagcccaggaagttgaggctgcagtggagctgtgatcatgttactgcactccaactggggcaatagagtgagacactgtctcaaaaataataaataaaaactgcattttatcaggatccacagctggtgccttgcaccttgaatttgagaggaactaggataaagtccaaatgcaaacttggggtgcaagaacttgtaccttgcctagacctcacctagacagcctgctttctcaaggccgagccctggctgtaccaaaattctcactgtcccccgagcaaggcctgctttggtacatttttgcccccacctttccctctgtctgaaatgtcctttgcctgtccgttcactcagcatcttccgagaaccagttc

SEQ ID NO: 105810 - DNA, 459 bp, Homo sapiens
  misc_feature (1)...(459): n = a,t,c or g
ntcgagttccctatcccttgtggnggaattcgatgcagtgagccaaaatcatgccactgcactccagcctggaccacagggtgagactctgtctcaaaaaaataaataaataaaaataaagaacgctgaaccctaaattaccaatggggaaagatgaaagtaacccagtttatgctgcagaacccccaatggctcagtgattatctgcagataccgaggtgaggcggagctgatgacagcagagtgcttcccttcccttctttgccttccctgcgcccagttactgtgtctgatggaaacactggtgaggtctgaggcgcaggggtgagagaggctgtcccctctatgggcacatgcagctgctgtggtgccaggcactctgatgggctccaggtgtctggggtgggggagagtggcagacacagaaggacagccgaagtgggtctggcccaggagatg

SEQ ID NO: 105811 - DNA, 455 bp, Homo sapiens
  misc_feature (1)...(455): n = a,t,c or g
tgggccccngggggggcaatgaaacccctngactgagancatcgccangncgnggaattccgcctgtagtgctagctactggcgaggctgaggtgggaggatcacttgagcctaggaggttgagactgcagtaaaccgagattgtgccactgcactccagcgtgggctggaccagtgagaccctgtctcagctcagtgagaccagtaagaccctgtctcaatcaatcaatcaatgcagtgagttagagagcatctattgagcatctacggtttgcgggtcacttccagcaccattttgagatgcggaaactggctgaagttgggtgattgattgaccaagttcctttgggaaattaataaagtcacactgaagcaataaactaccctcacctccaccaccagctttctcaggagaccccttcccattgcctgccccagacctcagggaccatggc

SEQ ID NO: 105812 - DNA, 494 bp, Homo sapiens
  misc_feature (1)...(494): n = a,t,c or g
agggggggnnnggactgagtccctaggcagngngattgaaatccctagtccgtgtggtggaattccagggcttcagtgagccgggattgccccactgcactccagcctgggtgacagagtgagaccctgcctcaaaaaaaagatagaagtttgaattgaaaagctgccttctaaatagcttgaaaggaattaattgcttgaagcagagaggaaacatggtcatgagaaagctttatgatgggtgattcttgtgttccagctatgcctatgatgatcattttctaagacctttctttcctatccatctaatcttagatattactgccttctcccaagataccatcatttcaaatttgttatttcaagatgcatgttctgtccctaagaaagcagcaaatcttggccaggcacagtggctcgcgcctgtaatcccggtactttgggaggccgaggtgggcagattacttgaggtcaggagttcgagaccagcctgg

SEQ ID NO: 105813 - DNA, 446 bp, Homo sapiens
  misc_feature (1)...(446): n = a,t,c or g
gaggcgctnnnnnncccaggcatcgcagcacgtctgngcaattnnggntaangcaggatacagggctgcagttgttgggtgaagctttgcccgaaagttgagaaatgggtgcagcgcacggatgcagaacaggagtcgcagaccaaagcagagatccaggatatgaagcaagagttatccgcggtcaatatgatggacaagtttgccagatctgccaggctggaaagaaagatcaacaagatgatgaataagctcaaaactcatgtgaaagtacagacagctcaatcaggaatgctaaaatgggttataagtgttgctttctacaaattgccaggtaccgtgatcaggctataaggcagtcttgtggggttatccattacttgacagggtctcgctctgttgcccaggctggagtgcagtgggccatctatgctcactgtagcctc

SEQ ID NO: 105814 - DNA, 447 bp, Homo sapiens
  misc_feature (1)...(447): n = a,t,c or g
gggattgagnccnttgnnnnncactgatgtctctctatccagctggtggaattcgctggtctcgagctcctgacctcaggtgatccgcccacctcggcctcccaaagtgctgggattacaggcagaagccaccgtgcccagccagtaaagtactttagaatagtgcctggcacgtagtaaatgctactaagttttagctaatgttattattacctaataaggttaggagtttcatcatgtataacctgtaaagtgcctgaatgtatagtaataggcaattactggtagctactattattagtagtattataattatttcactcgtcttgctccaaaaagagattggagtctacttgtaaaatagaacagcattttaaaaaatcagtcagaaaattgattgcaaggctttctgagttctggatagaatttcttgtggcagtttaagtg

SEQ ID NO: 105815 - DNA, 476 bp, Homo sapiens
  misc_feature (1)...(476): n = a,t,c or g
agcgggannnnncctgatggacatcactagtgcagggcggtggaataccgcacattccaccccagcccagtcctcgtcctccacgccagccccaagcatgtgagtaacccaacttctccctttctcctccccagactctgcgggtccttttctgtcccctttctctctctctctctctctctctctctctctctctatctctctctctctccatggagaaaaatatatccacgcgcctgcttttacagcggggttgcccactctctaaaacccccctgtgtgggcgagaagaaaacggtgcctttctcacactctcacaagaaggacagactgtctgtggatagctaagccccactctcacacaatctcatctacacaccgtgagcgccctgagaggcccgtgtgctcacactgaaaagaaagtggatacatcagaatccccttggaccccggtacacgccactgcggtgaaccga

SEQ ID NO: 105816 - DNA, 442 bp, Homo sapiens
gtggcatgcacctgtgatcccagctacttgggaggctgaggcgggagaattgcttgaacctgggaggcggaggttgcagtgagccaggattgcaccactgcactccagcatagacaatgaagcaagaaaaaaaagaaaagaccttgtctctaaaaagagagagagagaaaccctgcatggacctccattcatatggccgttctgttactagaagggtccagaccaacacaagagcactaggagccaaagatgaaattcacaaaagagcaattatgagaaatgggagaaagatggagggactgcaacatagggctaatggaagttttaaaaaaacagcagaaaatcacagagaagcaatatatgatggacaatcaatgagaattttcaaaaactaggctgggcgttttggctcatgcctatagacccagcactttgggaggct

SEQ ID NO: 105817 - DNA, 501 bp, Homo sapiens
  misc_feature (1)...(501): n = a,t,c or g
ccccccccccgnnnnnntttgaactgagtancctaggacagngccgnggaanttggnggaaatacagtcctgggccctggcctaggaaaggcttctacaaaagtttgctttaatgggatgttctctgctgtgtgcagaggggcacacattccaccagggtgaagctggtggggtgagctcaggaggtccaaattcagccccaccctgctcagcaagctgtgcggccataaaggtcgtgggagggacaggccttgcatggcagtgacccccttgcctcctgcaccaggattcagagcaactacatggcactgcagaggatcaaccaggagctggaggacaagctgtaccgcatgggccagcactatgaggaggagaagcgtgcgctgagccacgagattgttgccctcaacagccatctgctagaagccaaggtgaccatcgacaagctgtcagaggacaacgtgagtgccgcacacacttggcccatggaagactgccggt

SEQ ID NO: 105818 - DNA, 455 bp, Homo sapiens
  misc_feature (1)...(455): n = a,t,c or g
ntttgagaccctgatcacgtctgggaannccgncaaccaccagcttcctgtagccagaggccccatcgctggctcagtggcctgagaccttcccacttttcctgtccctccacaccctggattttctggccccctcctgggccaatcggagcttccatccaactgtcagactggtggcaggagtcacctgtctgtttcagtgctttgccctacccttgccaccactccccttggccttgatttccccacctgcggcaccagccagctgcccttggggcctttgcagctggcccacaggagtgagcttgctggtctatcacttcctggcctctccaccaactgtacctcccaaaggctacctgaccgccctcacagacactcagacgcaccacacacacatacacacacacagacacacacacacacacacacacacacaccagcgactgtgacca

SEQ ID NO: 105819 - DNA, 545 bp, Homo sapiens
  misc_feature (1)...(545): n = a,t,c or g
ataccatagctaacaatttctactataaagttaatataagctagttactttatcctaagtaggaanggacagacnnnnnnnaattgacgccntctttgacggaccttaaaaccggcncgacccacgcggncggacagcttttaaaggaaaaggngtactgagccttctgactatgccttgttttcttttgagatatatattttcacagtcttttctagatatattattgctttaacttaacaaatcttagcaatctctcaatgccttttcacttatttttttccaagttatgattctttttcctcacagccttttttgttccatagcaatgagggtgtccatttgataattttaacaaacaatgtaagtttaaaattgaggctaaggtaacatgaaaaagcagggaatctcaaactttatttcatatatatacacacacacacacacacacacacacacacatacatacatatatatatatatacatatatatacatacacacatacatataattttttttttttggagagggagctccactctc

SEQ ID NO: 105820 - DNA, 401 bp, Homo sapiens
  misc_feature (1)...(401): n = a,t,c or g
cggacgcgtgggcggacgcgtgggctagttctagatcgcgagcggccgccctttttttttttttttttttttttaaaaaaaaaaggggttttattgggttaacccggggggggggaaacccccaaccctaaaaacccccccccctccccccccaaaggggggggaataacgggggggaccccccccccccgccttaaaatggcttttttaaaacccttaattttggacaaaaccaatgtcctaaaaaaaaggggaaaaaacggaaacttttttttttaaaattttggtaaaaaaaaaaaaaaaacggggggggttttgaaccggaacctttaaaccttggttaaaaaaaagggcaaaagggaaaccccggttggaaaaaaaatttcccacctaaaaaaggn

SEQ ID NO: 105821 - DNA, 454 bp, Homo sapiens
cggacgcgtgggtgggaggctgaggcaggataattgcttgaacctgggaggtagagattgaaatgaaccaagatcgtgccactgcactccaactgcactccagcctgggcaacaagaacgaaactctgctcaaaaaaaaaaaaaaaaaaaaaccccaaaaacttcaacttgggcggggggggccccaaccctttggataaaaaacctttaataaaccaccttttttacccgggaggtttttttttaaccaattttttggggaaacttaaggcccggcctccaaaccagggtttttaacattggaaaatttttttcttttcttaaggttaggggggaaaatttttattaggaaaaaagaacttatgaacccccccgcctttgccctcccattgccttggaaaaaattgggtgcttaaaatttgccgggggaagggggctaaaacttttggaaagg

SEQ ID NO: 105822 - DNA, 429 bp, Homo sapiens
gcgagcgtaagttaacttgacaggtctgagctaaagataaccccacacccactccaccttactaccaaacaaccttacccactacatttacccacagaaaggatacgcgatccaaatcgttacctggcgcactagagattggaccgcaagggacagatgagaaaccatcaccatgcgtaacatagcagggactaacccctataccttctgcatatgagaattggctccacttcaaagcctccggaaggggccaggcctgctgagcccccccagagcctgccctgttcctacccctgctgtcagccgtaccctgctgggcaactttgaggaatcattgctgcgaggacgttttgcaccatctggtcacattgatggctatacagcagaaattggagctagtgggtcatactgcccccagcacgtcacact

SEQ ID NO: 105823 - DNA, 402 bp, Homo sapiens
agtgagcagagatggcgccactgcactcagcctgtgcgacagagtgagactctgtctcataacaaacaaacaaacaaacaaacaaaaaacagggtaccatggagtggtttttgagtgtgcctggaaggggtacctagtccatgctccagccccatccgaggcctccatggtgcccaactttactgagaagtatgctctgctcttatttctttagggataatccaggaaagtcatgggtgttggattaaatgctagtctgttttcctagcaagagtacccacaatggtcctctaaaatgatttaccctcatgaactggctaggtggtctgctaatcacctttggctacacgatctgctaattaccttttctcactaagattaataagattctctctccttttg

SEQ ID NO: 105824 - DNA, 406 bp, Homo sapiens
cccacgcgtccgcccacgcgtccgcccacgcgtccgctggtctcgaactcctgacctcaagtgatctgctcgcgtcagtctcccaaagtgctgggattataggcttgaaccaccacgcctgaccaaaacataatttaaatcagatatgctttgctctaagaatataagaaattacagaaatatactttgcattaaataaactgcaatgaaaactgatttagcaggtgcgagacagttcaacttctccattcaagaacgtactcaaaaaaaaaaaaaggaaaattgaaattaaaatttaaaattaaaccaaccaaagaaccttcctcaggccaaggacgggggttaatgcttatacccccaccccttaaggaggttgaggcaggtaaactgtttgtgtccagagatc

SEQ ID NO: 105825 - DNA, 407 bp, Homo sapiens
cacaaggtcaagagatcaagaccatcctggccaacatggtgaaaccccatctcttctaaaaatataaaaattagcaacacttaactgagcactgacctgccaaccactgtcccaaaaggacaactaatagaacaccttggcatgtagttgggtaaaccttagcaagggagcttttctccacccagctgtgatcagaaccatttctaagccatgggtgcccaggtggcctccttaccactctgccctagagttttcttgaccaggcagtgctaagtaggtccctatgcgctcacactgaccctgtcctaaacagtttctccataggcctgaaagatcacccagaattagcctaatggtgataggcaaggtagccatgaatctccttgactaccagacttgaataggaa

SEQ ID NO: 105826 - DNA, 495 bp, Homo sapiens
  misc_feature (1)...(495): n = a,t,c or g
agggatgtcccnnaggttgcncccctaactgaccgcctgcttgaattccgctcgagaggcagcaatatttgctgttctgtagcctctgctggtgatacccaggcaaacagggtctgcagtggacctccagcaaactccaacagacctgcagctgagggacgtgaccattagaaggaaaactagtagacagaaaggaatagcttcaacatcaacaaaaaggacatccacaccaaaaccccatttgtaggttaccaacatcaaagaccaaaggtagataaaaccacaaagatggggagaaaccagagcagaaaagctgaaaattctaaaaatcagagcacctcatctcctccaaaggatcgcagctccttgccagcaacggaacaaagctggacagagaatgactttgacgagttgacagaagtaggcttcagaaggtcggcaataacaaacttctccgagctaaaggagcatgttctaacccgtcgcanagaagct

SEQ ID NO: 105827 - DNA, 503 bp, Homo sapiens
  misc_feature (1)...(503): n = a,t,c or g
aggggcnnnntttgcatgcgctcggctgcacgaattcggcacgagaaagggcacagttcggcattaaggtagaaggcaaagccctagaggatcaactggtttggtggaagtgaggtcaccagaagccctgtccagccagagctgggtgctgggaatgccagggccaccaggctcccacttcctgcccctgccaagctggcattggcaaggggagggggaagggatctgagcacccggagcaaggaggttgatgccagggagttggggccgatgatctccagtcccaggcagaaatccagtgtgaactttgtgctgagtccatcgatcgatttgacattcttttttttttttttttgggacttgggcccccacacaaaaacccccccccccccaccccccaaaagtggaagcctggtaaagctcctcctttggccctttgggatatcccgcggggcgccaaagggcctggaaggcaaccggggaggcctgcaatacacacgtgc

SEQ ID NO: 105828 - DNA, 471 bp, Homo sapiens
gaggattgcgctctgcccggctgtacgaattcggcacgaggagagagagagagagagagagagagagagagagagagagaccccaggacacacacagctgtctcccggtgcgagaagaacacccccgcttgagagagagagggcgtttaatgattgctttagtttgaactaccctggcaacctctgcccaggggacttgatcgaagtgttccgttctgtctatcaacactgcgccctgtacttgggtgatggttactttatcaacataacacctgtatatggcattcctgcgttctttacaagcgccaagtctgtattcttcagtagggccctggagaaaacgcatctcttgaaagatgttgtgggaagtgacacatacagaataaactatatatgctatgaaacgctcccctctctctctgtggaagaaattataacgcggtcagagtttgtaattggacaggaggcgtt

SEQ ID NO: 105829 - DNA, 499 bp, Homo sapiens
  misc_feature (1)...(499): n = a,t,c or g
aggggnntnnnnttttatgaccgcctgcagaattcggcacgagatgggtcgggggctgctcaggggcctgtggccgctgcacatcgtcctgtggacgcgtatcgccagcacgatcccaccgcacgttcagaagtcggcacttccccactgactacagtaaggatgtaagaaacaccccatagagttgatacaatcaagtttccttctgccggaatgtcagcatctggaatggcaccaaaggatttgagaagaatgatgccaggacaccagattttcaaacaagcatctatcagccatggtatttttcagttaaacaatatatgtgtaagaggctttagctatcaaaaaatttaaacattttctggaactcaatagcttttatcgccagaaaatcggtaccaacacagacctatttcacagtgtgctgcacacaaaaaacattcaataaatataatattgttcaataaaaaaaaaaaaaaaaaaaaaaactccagggggg

SEQ ID NO: 105830 - DNA, 671 bp, Homo sapiens
  misc_feature (1)...(671): n = a,t,c or g
gcgcctgtaaacctttctactcggggccttggcagcagaatcacttgaacccggtaagcggaggatgcagtgagccgatatcgcgccgttgcacttccagcctgggcgacagagcatgactccctctcaaaaccaaacacacaaaaaaacctcaagtgcctgcaaggccaagcagatactgtagatgtgtaaagggtagcatagattggcagggttgggagttgggggcaggctgggcaaactggagtgagcaaggcctacttatattttaatactttaaagttatttttattaaactgtctgctgtccaaacataatacatgttgtaggccaaaatggccatgaagctaccagtttgcaaaccctgaactgtgaaatcttttagccacttccctatcttctctgttggagccatcattagtacttaaaaaagtacctttgagtcagggagttctattctactctgtgtttgtgagaaatacggccctgcccnnnnnnnnnnnnnnnnnnnnnnnnnnnnnnnnnnnccactcatgtccacttcccaaccccagtgccttgtggtgagactgttgctccggggatgacggtcccgcccctcctttcaggaacaggcctttgagagcagccagaagtacaaagaggggaagtacatcattgaactcaaccac

SEQ ID NO: 105831 - DNA, 464 bp, Homo sapiens
catagagattcgttggcagtgcggggaattccgagccgctcttgtcctgttagcaactgtatttatagccacttacacccacttttaattagatgcaaattaagaagcaggctaatgcaaattgaggggcaggttattcctaactttctaggaaaggggcagtaacttcctggtcattgccatagcatctgtaaatatgccccagaggaagtatcttatgctaatgaccagtgagggtagctagggatggtttttgttgccatctgctggttcctgccggtttcttcattttatctaagcggcaccttgggagctggaaataattcctgccagtcccctacttcattccccctcagagattagatactcctccttaatcttaaaggggcggccaggtgtggtggcttaagcctgtagtcccagcactttgggaggccaaagcaggtagatcacttgaggccggg

SEQ ID NO: 105832 - DNA, 460 bp, Homo sapiens
  misc_feature (1)...(460): n = a,t,c or g
natggagattagtaggcagtgcggnggaattcggcagaggttgcagtgagacgagatcacgccactgcactccagcttgggcaacagagcaagactccgtttcaaaataaataaataaataaataaataaataagtttattcctgatattgtcaacttgtgttcatttataactggcttatttaggagtctgttgtttagttcctaaatataagaggatttttttttctatctttttaatttgtgattgcccattgaattccattgtaatcacagaaaatactctataattttaattcttttaaagttattgagacttgttttatcacccagcttcatctatcttaatgaacatatcatatatgtgaaagattttatattctgcagctgttgggtgttgtgttctaaaaatatcaaataggttaatatggttgataatgttgatcagattttctgtgtat

SEQ ID NO: 105833 - DNA, 458 bp, Homo sapiens
  misc_feature (1)...(458): n = a,t,c or g
cttgactacctaacctaggccgnngcgnggaattctgcagggagccgagatcgcaccaccgcactccagcctgggcaacagagcaagagtccatctcaaaaaaggtgtcagcaggaccacactccctctggaggctctacgggaggacccttcctgcctgttctagcttctggggctccaggtgttccatggcctgtggccacatcactccaatccccacctccatctttattcacgtgccgccttctctctgtgtgcacatgtctcttttccttttataaggacgccagtctttggatttggggcccacccttgtccagtacaacctgatcttaactgactacatccccaaaggccttatttccaaacaaggtcacattctgaggttcgcggtaagcatgagttttggggagcacgaatgaactccccactggaaatgcctctctttgtaattntgn

SEQ ID NO: 105834 - DNA, 467 bp, Homo sapiens
  misc_feature (1)...(467): n = a,t,c or g
cttcgaacattcgagcatccactagtccagagaggaggaattccccctttttcctttacctacccaaatcttataaaacggcctcacgcctatctcccttcactgactcccttttcggactcagcccacctgcgcccaggtgaaataaacagccttgttgctcanaaaaaaaaaaaaaaaaaaaaaaaaaaaaaaaaaaaaaaaaaaaaaaaaaaaaaaagggccccttaaaaaaaaaaaggccctaaaaaaacccggaaaaacccccgggggggtttttaaaaacccaaacattttggggggcccccccccccggttttttttttaagggggaaggggcccccccccttttttttttaaaaaaaaaaaaaaaaaatccccccctttgggggaaaggggggtttttttttttggggnnnnnnnnnnnnnnnnnnnnnnnnnnnnnnnnnnnnnnnnnnnnnnnnncn

SEQ ID NO: 105835 - DNA, 508 bp, Homo sapiens
  misc_feature (1)...(508): n = a,t,c or g
agcggctaagnnncnccaaatgataccccttatangaggcctgtagcggaaacggaacttgtgagtatttagattcatgcgccattttgagcattctattttgagaatttgtccttggattcacagttatgtgcctattccatatgtttatcagccttgtatcttcattgaagacccagctaactgtgctcttacctagtctttgcccttcttcatattcttccaagaagtgaaaatttggggtgattttgataccgaaaatcactttgtattttaagataggaggaaaaaacaatatctgaagtggaaactcgatagtcactttgtagctccatctgcctaaggcctccatcctgctagtctgtaagcatctcctgcgggcttgttagaaatgcagcctgtcgggcccaacctcaggcctgccagacttcacatgatccagctgactgtcacgagtggacaggtttgagaagctctggtctgtgtgacttaatgcttataggtttgg

SEQ ID NO: 105836 - DNA, 456 bp, Homo sapiens
  misc_feature (1)...(456): n = a,t,c or g
ggganatgccccatagcggaaaactgagnccatttagattgggaagnaacncctnanattaangangcatttcttcttttcccaaatatttgccaatacttcataactggctgaatctaagaggtgctaggttaaaaaatgaagactcaggagcttaattgtgccatttacaaataaaagcatttaaagtacaaatgaaaagctctgtttagatctcaagaggttcaaaaattacgttttcttaattcttttctttttaaaacaaatcatctcttatactcactccgttctcttccatcacagtaaaaatgccttagcttatcttaaaatattttatgtatgtatgtatgtatgtacatatgtacgtatgtatgtatataaagtcttgctctgtcgcccaggatggagtgcagtggtacgatctcggctcactgcaacctccacctcctgggttag

SEQ ID NO: 105837 - DNA, 473 bp, Homo sapiens
  misc_feature (1)...(473): n = a,t,c or g
agcggnnnnnnaggattgacgtcattagtccagtctggtggaattcgaaaagcactgattgaatctagattccttgagtccaagtgtcagatctctgcttactagctctgggatctcagatgtttcgttgattggatttctttgtgctcatttgtgtaaacaggaatgcccgtctttaaagactattaaaatgaatgtgagttaacacacaagaggtcttcaaaaagttgatggaaaatgcatattatgaaaaaaattatgcatagatttcaaaaatctttgcagcaaaataaactcatcattataacatgtctgaacaggatctagtttgaggcactaagaaggatatcagtttaaatagagcccctgtcagaacaatatgaattctgctaaaactgaagcaagaacaaacatcaaatttatggcaaagcttatgtggaagaatggtgcaatcattgatgctttgcaaaagt

SEQ ID NO: 105838 - DNA, 466 bp, Homo sapiens
  misc_feature (1)...(466): n = a,t,c or g
agggcgcnnnnnaattgagnactgagnaccttcgtccangcggtggaaatcgctgccttagacacacttgaccacccttccttcttggcctagtgtttttctgggattgtccgtaacaccaaatatttctctaaactcactaaacatctctttttaatccccattgcaaaatcctttttgtttacctgtacttattttttaactttcattttgaaataattataagttcacaagaaattacaataataatatactgggaggacccaagtgtctagtgtccttcagtggtaacatcttgcatagctatagttcagtatcaaaaccaggaaaaatgcattgggaaaactgcagagcttattaagatgtcatcagttttatttgtacgtgtgtgtgtgtgtgtgtgtgtgtgtgtgtgtgtgtgtgtgcacgcgcacctatgcaattttgacatgtatagctgtgtaan

SEQ ID NO: 105839 - DNA, 452 bp, Homo sapiens
  misc_feature (1)...(452): n = a,t,c or g
agggtgccggntnncnnnaaatgaaaactacgntcatncnggnggacttncccatattggccaggctagtcttgaactcctgacctcaggacatccgcctgcctttgccttccaaagagctgggattacaagtgtgagccaccgtgcctggccactttttgcttcctaatgcgttttcacaccccttaattattgtggtagctaacattttgaaaaatatctactgcatgtcagatactgggataacaaagatgaaatgagagccttgctctccagaagtttaaagtctagagggaaagagagagaagttaaaataggctattacaatcagtgcagtaaataactctgaaagaactactggtgctacttggagtatatattttagtgctgggcatggtaactcatgcctgtgatcccaacactatgggaggccaggagtttgacaccatggn

SEQ ID NO: 105840 - DNA, 449 bp, Homo sapiens
  misc_feature (1)...(449): n = a,t,c or g
tgagagggggcccggnnnnccctgacatccgatcctcggacancnggnggaattcctgcaacctccacctcctgtgttcaagtgattctcctgcctcagcctcctctgttgctgggactacaggattctttccttcctcaagagattatcatcaaagtcgagggagaagacactgggtctctgaccatcccatctcaggaaggagtgaacttcaaaattgtgactgtggacttcacacgggaggaacagggtacttgcaaccctgctcagaggaccctggacagagatgtgatcctggagaaccacagggacctagtctcttgggacttggcaactgcagttggaaaaaaagattcaacttcaaagcagaggatttttgatgaagaaccagctaatggagtgaagatagaaaggtttacaagggatgatccttggttatcttcatgtga

SEQ ID NO: 105841 - DNA, 428 bp, Homo sapiens
  misc_feature (1)...(428): n = a,t,c or g
nattgatagcctncgctcagagnggnggaattcgtcaaaaagtgggcagactttgctggcagacctgagccacttacctgtaagggctgggggcattttttctttcttaaacaaatttttttttgttagagatggggtcttgctatgttgcccaggctggtcttgaattcctggtctcaagtgatcctcccacctcagcctcaagtgggagccaccttcgggggcttccccaatcctccaggtcactggaagctcttggggggcatatcttcaggagaagaagcaggtgttgaggaggcagaagaaggtcaggccctcggcttccttggtcagttcccaccctccagcccccagctcctcctgcagacaagctggtgtctaagaactacccggacctgtcgttggtctctgctctggaaagcccacaa

SEQ ID NO: 105842 - DNA, 463 bp, Homo sapiens
  misc_feature (1)...(463): n = a,t,c or g
agggcnnagnnnccccccttctgtagaccactattcgagtgcggtggaattcatcttactattttgtgttttgcccaggctggccttgaactcctagactcaggtgagtctcccgcctcggtctcccaaagtcctaagataacaggtgtgagccactgcacctggcccaagtcagacttctgcgtcttatgcatacctggtcatatcctttttccacttcctatggtgtccttgcccttcctctactctgccatgatggttcctgttcattttcatatccgtctaatggacaccattcccacttccatccccagtgagcatttcccttaacagtggaatctttaattcatcacttcctcctttgaatttgttttttaagtgctttttgttttcattgaaacatttttaacaatcagcaaattgaaagggatctttaaagtaatccagtttaatcttgaacaca

SEQ ID NO: 105843 - DNA, 470 bp, Homo sapiens
  misc_feature (1)...(470): n = a,t,c or g
ggggggggaggnngngccnnnnttttgtagaccttgatgaccatctagtccagtgcggtggaattcgtaaagatgacagattccactcatcactcacttttgtttgcagatattgcctaaggtcccttgtgaatatttaggtcagggctgcttttttgagtttttttttgtttgtttgtttcttgtttttatttacaaagcaatcttgtggaaagaatccaaagtgtctcccccatttaagaacctgtaaacagggagaccagagtctggagtcctggtctggtttccacaccttccttagatttctctgtgtgtaaaatccaacaacaatctttgacaaattgcctcccccaggggagagatggaggaagngttcactttgcctttttttttctttcttttttcagacagagcctcgctgtgtcgcccaggctggagtgcagtggcgccatctcagctcacttcaacct

SEQ ID NO: 105844 - DNA, 512 bp, Homo sapiens
  misc_feature (1)...(512): n = a,t,c or g
agggggntccagggnggnnccnnnnaattgagnnccatcgaganccagtatcagtgtggtggaattcgttaattgttatttagtattcttcactgtgaattactttgtgggtgactgtaaattactagattctattttaactaaaggagccaacacagcaaatttatgttctgttataaattaagtaacgtgatgacatatgcttagtggttagactgacatgcaaaataaatcagatgtaatcatgtgaatataagtttgagatacaaaatagccattatggggttgaaacaaaagacagaaccataggagtagtagtttgccaaagcacaaataagctaattctgcttgcagtcagcaaaagaaaaataaattagatatttttcttcttctttgagtaccaccaacagaagttactaactcagatgtgaggccaggtgcggtggctcacacctgtaatcccagcactttgggaagccgaggggggcagatcacctgaggccaggagttcg

SEQ ID NO: 105845 - DNA, 379 bp, Homo sapiens
gtttgaacctgggaggcagaggttgcagtgaaccaagactgcaccattgcactccagcctgggcaacagaacaagactccgtctcaaaaaaaaaaaaaaaaaaaaaaaaacccccaaaaacaaaaaaacaaaacccccccccccaaaaaaaaacccctttaaaaacccccggccttgggaaaaatttttgacccccccaaaaactttgggtttttttggaaagggcccccttttataaaaaaattatttaaaaaagggacctggggccccccttgcccaaaaaaattaatttttttggaaagggggggttaataaaaaaaaagggttttccattccccctgaaaacttttaaggggaaaaaaagtcaaggccctttaag

SEQ ID NO: 105846 - DNA, 123 bp, Homo sapiens
cgatggtgcagccgctattaaaggttcgtttgttcaacgattaaagtcctacgtgatctgagttcagaccggagtaatccaggtcggtttctatctacttcaaattcctcgtcgacgcggccg

SEQ ID NO: 105847 - DNA, 362 bp, Homo sapiens
ctggagtggacctcaggaaaaccccagcagacctgcagcagaggagtctgactgttataaggaaaactaacaaacagaaaggaatagcatcagcatcaataaaaaggacgtccacacagaaaccccatccaaaggtcaccaacatcaaagaccaaaggtagataaatccacgaagatgaggaaaaaacagcgcaaaaaggctgaaaattccaaaaaccagaatgcctcttctcctccaaaggatcacaactccttgccagcaagggaacaaaactggacggagaatgagtttgatgaattgacagaaatagacttcagaaggtgggtaataacaaactcctccgagctaaaggagcatgttc

SEQ ID NO: 105848 - DNA, 373 bp, Homo sapiens
ctggcatattgttctatctgccgtagccactcaggaaggcaacggaaggattcctcacaggtaatgccataggcgaggatcaaggcattggcgcttcggtagtaactctgggcaatggaccgaaatctctcttgacctgctgtgtcccacatctgtagctgtaaaggcataagataagaatcaggcgaagaacgatcacgttgtacaaaaaaagaaaaaaaaagctttgccttgctttggtttgaaaatgggtacacctttacccaaacaatttcatgggtattttctgccctacaagagaaaaagcaaaaaacaaaatgcctttgattaaaaaaaaaaaaagccttggggggtgcctctatgttaggggaaa

SEQ ID NO: 105849 - DNA, 365 bp, Homo sapiens
ggctgggtgtggtggtgggtgcctgtaatcccagctactcgggaagctgaggcaggagaattgcttgaacctctgcctcccaggtcgatttgatatttttaatatcttatatcttgatatctactttactttttgaatgcaatacagttacaattattggtttaatatccttgtctgctaattgtgacatgggtgcaagttctgggtcagtgtggcttgattgattattctcattatgtgtcctattttcctgcttccttatatgtctgataattttttactggatgccagacatgaattttactttgttgaatgctggatattttagattccctagcctttttcgtcgacgcggccgcgaattc

SEQ ID NO: 105850 - DNA, 342 bp, Homo sapiens
gccaggctgggctcgaactcctgaccttaggggatctacccgcttcagcctcccaaggtgctgggattacaggtgtgagccaccgttcctggcctgtaatgtatttttgaattaaaaagagttaatataggcttaatattgtggattcatatgcaaatgtttggtgaagctgaaagtcactaaaaggaagactctattaaggtcatagagaacgatggacctacttaagctacttttaaccttttctaacccattggaatacctaaaatcctttcccttcttggatgctatttgcagatgcacaataaattatatgttacatctgaaaccaaatcaattttt

SEQ ID NO: 105851 - DNA, 385 bp, Homo sapiens
gcaaactaaaaatgaaggttgaatttcttcaacttgacaaaggcacctattacaaaatacctatagctaacacttaactgtagaagactaaaaatatttcccccaaaatggggaacaaagcaaggacatccacttccactgttacttttaacattgcactcaaagtcctagacagtgcaataaagcaagaaaaattaaaagcatattaatgggaaggtaagaagtaaagctgtctttatttgcagatgataccatcatctatagagaaatcacaaggaatgtacaaaaaagctactagaggccgggcacggtggctcacacctgtaatcccagcactttgggaggctggggcaggcagatcacctgaggtcaggagttcaagacc

SEQ ID NO: 105852 - DNA, 369 bp, Homo sapiens
gaaaagtatctctagtcatagatggcatattatttataaagaaaatcccaaggaatctaaaaaaaaaaaaaattcctaaactaagtttaaaaaagttgttgaatgcaaggtcaatatacaaaaccaactatatttcttactaccaattaacaagggaaagttatactaaaaaaaaggtatcatttaaaataccctcaaaaggtaaaaagagaaagaaggaaaataaatgcttaagcataaatctaataaaaatttgcaagatttgggccaaatgcaggggctcactcctgtaaacccagtactatgggaggctaaggtgggcggatcacctgaggtcaagaattcaagaccagcctggccaacatggca

SEQ ID NO: 105853 - DNA, 548 bp, Homo sapiens
ttttttttttttggcggaaggcagtcatagcaccatttattgtccaaagtacacacacctgagggcccctccccacacagggaaacaggagaaacaaatgacaacaaaacagattctttggaaccgagaggggaaggggaacggggaggggagtttcttccttccctcagctttcgcctggaagcctagaactggcttccagccctagcccctcagtgggcagactggggtcagcggcttcacagagaagtagaggtgggcaggagaggcccaaagcccagctccggaggcccccgaggccctcttcttcccccaggctgaggggcagggagaactgtgcccaccatgcccggactcccggcggcattctagacaggccaccgcccactctgggcaccaacctccttaagggagggagaccagcctggatggcggggaaccctccagaagcccacaaaactgcaaatggcccaggggagcaagcatgattcctggagtggggcatccaggagcaaagggaggcattgggttctgtttgctttacaaaa

SEQ ID NO: 105854 - DNA, 476 bp, Homo sapiens
  misc_feature (1)...(476): n = a,t,c or g
tgtgctgnaatgagacctttgatagccgtgcggaannccagncanaanaggcttcacagaagtttgatgaatggataagattttgagggccagtggttgggataataacatttaaggtgagaggatcgcttgagcccaggaattcaaggctgcagtgagctatgatcatgccactgcacccccaaccggggtgacatagtgagaccctgtctcaataaaaataaaataaaaacagagtatcatataatgaggcacattaggagatgaagtttattcttcaggttgggaggctccaacccatccatagccttaggttctctttgtggagagcacgaaccgagcatccaccaccctaaactccagcttagatcccagttccttgtccactgacctaggtcctacagggtggagtgcagtggctcgatctcggctcactgtaatctcgggctcctggggtcaagcaatccctcctcctc

SEQ ID NO: 105855 - DNA, 476 bp, Homo sapiens
  misc_feature (1)...(476): n = a,t,c or g
cggaaaactgagactgaggacgtacgaagngncgnggaanncaaggacacatcctaaggttagattttgctgacatttattaagcatacattatgctccattaacaatgatcatcatattatgctgagagtctagaaaatgtgaagggctgtgaatttgtcctgatacgattctgcaagattgtttctctggctgtgctcagcagcctaaataagtaaaggagaagggaagatggattataagattgatccagagttgggagcaagctagataaatgcagtgggaggaatatgtgggatgccaggttgtttgagattttggtgacagaatggtttggttgattaaccctcagttcttacgaggttaagggcccatagatgtcatccagattggggtctttagaagtaggaattttaggtcgggcatggtggctcacacctgtaatcccagcactttgggaggccaaggagggtggg

SEQ ID NO: 105856 - DNA, 472 bp, Homo sapiens
  misc_feature (1)...(472): n = a,t,c or g
agtggaggagnccattgataccntngaaatgagaccctaggccatngcgtggaattcaattgcttgaagcagggaggcagaggttgcagtgactgagatcgtgccattgcactccagcctgggcgacagaacaagaatcagtttcaaaaaaaaaaaaaaaaaaatttcaggagggccccagcaaaaaataaaaaccagttttggaacttttaggacgggataatgaggctggctctgcccatttggggggctttaaggaaacaaaaaataaccaaaaaacctctccttttgattggaacccccctcaccatatttttttacaaaaaatgctgtaggctgggggggggccctggggggaatccaacctgaagttcggggggttccctgcctttcaaatggctggtttaactcagcttggcaggccctatcccaaaggggctatggaaaccaaaaatgcaaaatcttcgtcaac

SEQ ID NO: 105857 - DNA, 470 bp, Homo sapiens
  misc_feature (1)...(470): n = a,t,c or g
agtggtgggnccactgagaccctggaactgagtnctcacggaagngccgnggaattcgagatggagtttcgccgtgttggcgaggctggtctcgaactcctaacctcaggtgatctgcctgcctcggcctcccagagtgctgggatcacaggtgtgagccattgcgcctgacctgacctgcttatttttatgtagaaatttggaggggttcaaaaactgcgctggcattgctaccaaccatcttcccagccagttcagtatttttgatgccaggtgccatactgggccacaaggaagaggagatgtaatgataactgtgtgtaaaagcgtgtaaagtgtccggtcatcctaagtgtcctgtaacccagctgatcctgccttccgctgccctgcagctaaaagcaggctgcctgagccagcagtggcaacccactcaggtcctcttccacactgtggaagctttgtttttt

SEQ ID NO: 105858 - DNA, 412 bp, Homo sapiens
gggcttgcagtgagccgagatggcaccactgcactccagcctgggcgacagagcgagactctgactcaaaaaaacaaagaaaaaaaaaaagaaaaccaaaggtttttaaaggaaaaaatgaggaggattacataagggttttgaaaaaattatccttggctacaaatatcaataacaaaggtcacaccaatccaaggttggacaggcagttgctaggcaaatgtctttgcaaaagtaatttttgtgtgaggttgcagcaccctatgtgcaaggttgtaatttttgcaaaaacttttgggaacatttttggtattaggcatacaagcatgaaaatccccttttcatggcctccccagctctatttggcatggtttgtttttttaaaacactaatgactctatttgaattctaa

SEQ ID NO: 105859 - DNA, 419 bp, Homo sapiens
ggattttgctcttccaaaacctcacaagacgaaattactgttttctttttctttttttttggggcacagtctcgctccagcctgggcgacaaggcaggacttcgtttcaaaaaaaaaaaaaaaaaattcctttttccccggggtttgtatttaactgaaagggaccggctttgggggaaaggcttgaaaactggttacccaatcctacccggcccaacccttggtaaatttgggcggctataacaaaaacccaaaaacgggggggattttaaccaccggaattttttttttcacggttttgggggctgaaaaacccaaaaaccaggaaccgggcaatttaattgtcgggggaggcctgttccctggttcgaagggggggttttttatttgggcccccccatgatggacactgggcaaaa

SEQ ID NO: 105860 - DNA, 399 bp, Homo sapiens
agattcgcacccccacgactaataaacttgtgttttttcaacaaagttgcaggcatcccaccttgtgcgggctgccctcgaactcctgagggcttgagaaccacccgccttgacctcccacagctctgggattacagacgttacccactgtgcccgacctatattgtgtattttaagcacttataatataatactagaataatatgtgttcattggagataacatgaaaaatgctgacctacactaaaaaaaaaaatcatttctaattttaccagtgtttatcattaatgcgtgccatggggatatttcctttctagccccacacacccaagcaccttcctgttttttaacatttatttaacacatgggtaatgacttgctactatgctgcaggaattg

SEQ ID NO: 105861 - DNA, 429 bp, Homo sapiens
ggcacgaaactagcttcaatgtggacctggtcatagtcccagcaaggaattttgttagtatcattaactgaccctaaagtttacatgagaatgtaggagacccataataggtccactgggccacctccttctgcctctcctggggccgtttgtgtgctcattcattctgagcagacctggggcctcattggtgaagtatcagctgaggagactccagcactcgtggggctgatgaaaagcccaaggaaggagtcaagactgataataacaatcttattaatttgaaggtaatggggcaggattgttccatggagcagtttaaaattaaaagtcatataccggccgggtatggtggctcacaccgtgaatcccagcactttgtgatgccaaggtgggcggatcacctgaggtctggagtctgagaccacc

SEQ ID NO: 105862 - DNA, 479 bp, Homo sapiens
  misc_feature (1)...(479): n = a,t,c or g
agaggagccngnngcccccnnnncctagggggcctgnnaagtcatgacagngcggnggaattcactcggtggtggcggagtctacggaagccgttttcgcttcacttttcctggctgtagagcgctttccccctggcgggtgagagtgcagagacgaaggtgcgagatgagcactatgttcgcggacactctcctcatcgtttttatctctgtgtgcacggctctgctcgcagagggcataacctgggtcctggtttacaggacagacaagtacaagagactgaaggcagaagtggaaaaacagagtaaaaaattggaaaagaagaaggaaacaataacagagtcagctggtcgacaacagaaaaagaaaatagagagacaagaagagaaactgaagaataacaacagagatctatcaatggttcgaatgaaatccatgtttgctattggcttttgttttactgccctaatgggaatgt

SEQ ID NO: 105863 - DNA, 439 bp, Homo sapiens
cgctcggtggaattcggtgtgggcactgcagcgtgaagagttctctcacccattgctctgtcctcctgcgtttggattctcgagaaacggactgttcttagaagctgaaagtccagccggatttacagacatccaagtaagagtctgtgagaaccgaaattgaaaggacatgcactttgtggggagttgactgttggggattttcctgtttatcaagacaggaaactaaaggagcttgaaagtgctggttcctccacaccagactcctgaaactcaggtttgttggtggaagggacttaccatgtctcagatgaaactttggactgtgaacttttgagttaatactgcaatgagttaagactggtgagtgttcaatagcaaagacttggaaccaacccaaatgtccaacaacgatagactggattaagaaaatgtggcc

SEQ ID NO: 105864 - DNA, 499 bp, Homo sapiens
  misc_feature (1)...(499): n = a,t,c or g
cggtgtnccnnnnaggannnnnnaaatcgatanccatttgattgagcngcaatncgnggaaactcatattagaaggacaggtgcttgagctgaatgtcaaaagtttgcaccattaggaagacggaggtatttaacgcactgcagatacatgagcaagacccggaggtgtgagattacctggtgcagctgaaggagtattgagagatgaggctggggcaagcaaggaggaacgtgttgggattttaatgtgggaagtagcatgaacatatgtctgtgatggaggacagtggataggagaagtttactcctcaaaaatgagagatcagtaagaaaaccagtgcaaaagtctagctaagacttgttagaccagggcacagtattttgttgttgttgttgggatagggtcccaatgtgtcaccctggagtgcagtggcatgatcatggctcactgcagccttgacctcctgggctcaagtgatcctcccacctcggcctccca

SEQ ID NO: 105865 - DNA, 469 bp, Homo sapiens
  misc_feature (1)...(469): n = a,t,c or g
accgtgcgactgataccctgtcgagngccgtgaanncggctggtcttgaactcctgacctcaggtgatccacccgccttgacctcccaaagtgctgggattacaggcttgagccagtgcacctggccaggaaacttttaatgatggcagaaggcaaaggggaagcaggcacatcttacatggccagagcaagaggaagagagagaggggaggtgccacatacttttaaacaatcaaatcttgtgagtactcactatcacaagagcagcacgagggggaagtctgcccccaagatctagtcacctcccaccaggtcccacctccaacattggagattacaatttgacatgagattggggcagggacacagacccaagccacatcagtagcaaatccttacttatcagtactaacacaatgtaaatggactcacttctccaatttaaaggcagacagtggctgaatggatc

SEQ ID NO: 105866 - DNA, 456 bp, Homo sapiens
  misc_feature (1)...(456): n = a,t,c or g
natcgtagaccacttttgcagngcggtggaattcagctggaatttaggcgcccgacatgatgtacttgcttatagatagattgatctttgcagtagcacttttcgttgccttcacgaacttatgctgttcatctacaacttggctcacatgacacagaatgcccaggttttggcctgtcttgattttcgacatgccttcctcactaagcttaattatttctagcttttgattgaaagtgagacaaatgcgactcttccttttacttgaacacttacaggtcattgtagggttattaattggcctaatttcactgttgttgtatctcaagaaatagggaggcctgacaataagtaaaaagatgaggaaacaacctgacgatgaaacagtcagaaaactcacattaagtttgccatcttacataggtgcggctcatgcaccccaaaatagatgcaatg

SEQ ID NO: 105867 - DNA, 412 bp, Homo sapiens
cccacgcgtccgcccacgcgtccggtgagctaggatcaagccactgcattccagcctgggcaacaaagcaagatcctgtctcaaaaaaaaaaaaaaaagtttttttaaaagggaaatttaattttgccaaaaatggacttttgcctttccctaaacctgggcccatttggggggagaaaacccccttcctttagggggtcccccatttctccctttctttggttggaccttatttaatccccttggggtaatccttttttttaacttccacccggtccattaacaaaaggtgaatcttgcttaaaaggattaacccaaaatcttcccgttttatttaccaccaaattcaaccccctttcaataataatattcattggcgggaagggtggaagccccctccacccgtgtttcc

SEQ ID NO: 105868 - DNA, 411 bp, Homo sapiens
acacgcgtaacgaccacggtgtggagagaatgttattatatctttagaagaagatacaggagtgaatgttcataaccctggattatgcagtggtttcttagatatgacaccaaaagcacaagcaacaacaagaaaaataaacagataaactggacttcatcaaaattaaagacttgtgtgctctcttcaaaggacaccatcaagaaagtgaaaagtcagcccccgaatgggaggaaatatttgcaaatcatacacaaatgacctccaacttatgatggttcaacctgagttttttttgtttttgttttttgttttttgagacagagtcttgctctgtcgccaggctggagtgcagtggtgcaatctcagctcactgcaacctcacttgaatcactgggttcaagtgattct

SEQ ID NO: 105869 - DNA, 425 bp, Homo sapiens
acaattaacagcccaatatctacaatcaaccaacaagtcattattaccctcactgtcaacccaaaagaaaaaaaaaaaaaaggaaaaaaaaaaaaaaaaaaaaaaaaaaaaaaaaaaaaaaaaaaaaaaaaaaaaaaaaaaaaaaaaaagaaaaaaaaaaaaaaaaaaaaaaaaaaaaaaaaaaaaagggggggggggggtttaatgggaacgggggggggggggcccttttgggggggggggtttaatttttttttttttttttgggggggggaaaaaaaaaaacggggggttgttagggaaaaaaaattttttttgggggggggggaaaaaaaaaggaccctttcctttttgttttttgtttttggaaagaataattctggtcggggggggggggggggtttccccgggggggggtggggggg

SEQ ID NO: 105870 - DNA, 401 bp, Homo sapiens
tgaatttatataattctaatctggattatgagctcagaatttacggttctaatattctatgcagtgattctgagtgtaaagcctctaaaacagcttctcagcagtttgggaggctgaggcaggtggactgcttgaggtcaggagtttgacaccagcctggacaacatggcaaaaccccatctctaccaaaaatacaaaaaaaaaaaaaaaaggggcggcggttttaaaggacccttgggggggccaaatttaacccgggcttgcgacgaaatagctctttccctatggggggccttattataacctacctgggaattttggggaaggacccttcttttgggggggggacaaaaggggccaacctccctccaaagatttaaggctttagggaaaatataaat

SEQ ID NO: 105871 - DNA, 387 bp, Homo sapiens
cccacgcgtccgcccacgcgtccggctaacattaccataattttggaaaaattagactgacctaaaagcagctcctctgctccttttcaaatctcctcctggttcagcctgcctgcctccacttctgcctccaccatgtccatcagggtgacccagcagccctacaaggtgttcaactctggcccctgggccttcagcagctcctcctacatgagcaggcccagtgcccacatcagctccttgattgtctcccgagtgggcagcagcagcaccagcttccagggtggcctgggtgccggcatgggtctgccactgcactccagcctggctaacagagcgagactgtctcaaaaaaaaaaaaaaaggggcggccgttctaaagaaccc

SEQ ID NO: 105872 - DNA, 390 bp, Homo sapiens
attgagtgaaatctgggaagcagtgctctgatcattccacctgtctgcttaaaattcttcaacgacaggcacgtttttcaggataaaaatcaaattcattaacatggcatacaaagctgtctccagtacttcaaaaccccaattcccaagttagctagctgcacccctgagtccaatcattgtaacttcatcattcaacagttcaggtcagggaggaggaacacaaaagtcttcacactcaagtgcacacacacacacacacacacacacacccacacctggttataatgtcctctcattcttaggttatgacccaatatcagaaaggggcaaaaataaattctggtcaaaatgtggcaggatttgaaacataattcatgatatcagcta

SEQ ID NO: 105873 - DNA, 391 bp, Homo sapiens
cccacgcgtccgctttgatagagtaaataataggagcttaaacccccttatttctaggactatgagaatcgaacccatccctgagaatccaaaattctccgtgaaaaaaaaaaaaaaaaaaaaaaaaaaaaaaaaaaaaaaaaaaaaaaaaaaaaaaaaaaaaaaaaaaaaaaaaagggggggggggcttaaaaaaaaaatttggggggggaaaaaaataacccgggggaagaaaaaaatttttttttttttttgggggggaaaaaaaaaaccccgggggggtttttggaaaaaaaattttttttgggggggggggaatttgggcacacccctcccaaaaaaatattcgcgcttggggaaaaaaaaaattttttaggggggtagggggccc

SEQ ID NO: 105874 - DNA, 443 bp, Homo sapiens
  misc_feature (1)...(443): n = a,t,c or g
ctcctaagtactgtagtctctgggagtcgggggtggccagggcggaggcggagtgcatttccatccttgtaaacccttcatagtactcagtcctgtatcgctcagtaaacattgctcttacttannaaaaaaaaaaaaaaaaaaaaaaaaaaaaaaaaaaaaaaaaaaaaaaaaaaaaaaaaaaaaaaaaaaaaaannggggggggggcccctaaaaaaaaaacccgggggggccccaaaacctgggggggaaaaaaaaaaaattttttttttttttagggggggaaaaaaaaaccccctttttttttttaaaaaaaaaaattttttttggggggggaaaaattgggccccccccccccaaaaaaaaaattgtttttggggaaaaaaaaaattttttgggggggggggggggcaccccccctttttttcctttctttaaaaaa

SEQ ID NO: 105875 - DNA, 405 bp, Homo sapiens
  misc_feature (1)...(405): n = a,t,c or g
ttgattccaggcctgatggatgactatgagggcttatgatgtcaggggaggaaggccctgcagatgtggctgaaatcacacgactactagaattataattagggccttaaggagagatgaaattgctgtacactcatgaagaaacttgtacaaatagggagttgcttcttatgccgagcaaagaaaatattttcttgagatggagtattttccagggggagaggctatcagcattgttgaaatgacaacagaggatttacattattccataaacctagatgataaagcacctacagggtttgagagggtttactcccattttgaaagaacttgtactgatgataaaatgctgtcatactgcatcacatgctacagggaaatcttttgtgaaaggaacaaacttcn

SEQ ID NO: 105876 - DNA, 364 bp, Homo sapiens
ttatacggtgccacttgaagctgggttcaagcgattctcctgcctcagactccccatagctgggatcacaggtgcccgccaccaggaccagctaatttttgaatttttagtaaagacagggtcctcaagtctgcctgccctagcctcccaaagtgccgggatgacaggcgtgagccaccgtgcctggctggccccaccaatctatgagcagaggttgcagtgagccgagattgcaccactgcactccagcctgggtgacggagcaagactctgtctcaaaaaaaaaattaaaaaaaaaaagggggggaacggcccgccttttcctgcgttccttgagaggtccccccaaaaaaaaagcgcaccc

SEQ ID NO: 105877 - DNA, 381 bp, Homo sapiens
  misc_feature (1)...(381): n = a,t,c or g
tctctggcttttgagacttcagggcacccctttcttggagagaaagatactcctttatcaggccagagagctgaagacctgttgggcttggggccactccctttaataaagaaacccacatcctatttgcttcacagccgctctcccttaaaggttttgcaagagtttaagtgtttgaagcaggtcatgcctggctgcaggagaacctgacctctccagatttttggggcttttctttttttccaacagacacaggcatgctggaaaaaaagaaaaaaaaaaaaaagaaaaaaaaaaaaaggaaaaaaaaaaaaaaaaaaaanngggggggggcctgtttaaaaggatcctggggggggccaaatttaaggggggggggaa

SEQ ID NO: 105878 - DNA, 436 bp, Homo sapiens
agatcgtgccaccgaaatccagcctgggtgacagagccagactctgtcaaaaaaaaataaaaaggagggaaaagggaaaccccttttcggaaaaaaaaaaaaccaacccccggccggggggtaaaatttaacaaaaccttttttggggaaaaaaccttttgttacccaaaattgccaaaaacctctcgggcctcattattgggaaaacaaatgccctaccccaatggaaaaaatctgaccaaacttttccccttaaaatccggtgggccaatccttaaccccttttttcttctttggggaatggtaatttaaacccccatggaaaccctggccctggcctataaaaatagctaaatttaaaaagacggcccttcctaaacttgggggaaaccacaagggaccgggatggctattatcctgcggtggaaaatccact

SEQ ID NO: 105879 - DNA, 416 bp, Homo sapiens
ccttggcctcccaaagcgctgggattacacacgtgagccaccgcacctgcctctgcaactcattttttatttctgctattctctaatttccaaaattctgttctcttgatgtacctttactgtggtattgtttttcttggttgcagaaagctctcaacttttctaagggtactggtgattgatatttttgtttacttttgcctgtgcagtctgttttcaacttgcccgtttccattttaaaattcatattgagactgcccttagatgtctgataatccttagttgtccatttacacacccattatataaaatgtatagggaaggccaggcacggtggctcacgcctgtaatcccagcactttgggaggctgaggtgggtggatcacctgaggtcaggagtttgagaccagcctgtt

SEQ ID NO: 105880 - DNA, 409 bp, Homo sapiens
  misc_feature (1)...(409): n = a,t,c or g
ccctcgcgtacggcttccacgacagaactacatacgacactccttcagccctcatgatggtactgctggtcgatgaactgatcactggcaataagaatggcagtggggaggctcctgaataccttcctgaggatttcagagatggtgaggatgatgctgctgttactttagagaagcaggaggatctgaccacacttgtaaccctccctgtgaccctgggggagcaccagaggcaacgcgagacacagctcgaggcgaagctcctaaagaaaagactagagcttggatcattgcttgaccttgtagaagaccttgaactgatcattcaactgaaaaaaaaaaaaaaaaaaaaaaagggnnncctttggggggccccttttaagggccccttgggggcccccatttttcg

SEQ ID NO: 105881 - DNA, 401 bp, Homo sapiens
  misc_feature (1)...(401): n = a,t,c or g
cccacgcgtccggggaaacagcagtgattaacctttagcaataaacgaaagtttaactaagctatactaaccccagggttggtcaatttcgtgccagccaccgcggtcacacgattaacccaagtcaatagaagccggcgtaaagagtgttttagatcaccccctccccaataaagctaaaactcacctgagttgtaaaaaactcaaaaaaaaaaaaaaaaaaaaaaaaaaaaaaaaaaaaaaaaaaaaaaaaaaaaaaaaaaaaaaaaaaaaaaaanaggggggggggttttataaagatttttagggggcccccccctttggggggggaggaaaattttttttttttttttttgggggggggtttaaaaaccccccggggttttttttgaaaaaacttt

SEQ ID NO: 105882 - DNA, 435 bp, Homo sapiens
  misc_feature (1)...(435): n = a,t,c or g
atgatttgcccacctcagcctcccaaagtgctgggattacgggtgtgaaccaccacgcccagcctgtaatgctgtttaatgacatcaccttggtatggaaacctgtgaataacatctataggaattttcttcccagttaacttgcactagagtatctgaatcaccaaattactttaagagtgaccaggagagaattaagagtaatatattacccctgacatttttggtgcttgtggtgatgtgtaaggcaactaaccctcttattccaagtttgcgtaactatcttgcttcgaggtgtgttcctacttcatgataaagatggcattagtcatgtttgtacgcagngaatattttctgtctattctaaaatggaaagcctgttttggttgttatttatttaacacacaataagatttttggtcagtggccacgtgg

SEQ ID NO: 105883 - DNA, 232 bp, Homo sapiens
  misc_feature (1)...(232): n = a,t,c or g
aactcccaacctcaggtgacctgcccaccttggcctcccaaaatgccgggatcacaggtgtgagccaccgcgcctgaccttgtgcttttttaaaaattttttttaacttcccccccttcctcttttcttgttcacagtccgaatagaaaagagcaaggaacaaaccttttggctgctttgtttcagtactataaaaatgtaaaatctaaagtatagatttctaaagtaaaan

SEQ ID NO: 105884 - DNA, 443 bp, Homo sapiens
aattgattgccttctagtcgagcgccgtggaattcctttgacattcgcttctcatgctttttaaagtacttgcgttttcgagcctgtaggttgaaccaagtataggcaattgcacggacatgtggaagaagtgcctcgatgaatgggtgaaattcatcctgtggaagacagaggggtgaggaaaagatgtgcatagtcagtttaattttaaaagctcaaaaaaaaaaaaaaaaactgggttgtttccttggcctccgggagggcccagaaaggggagctttaaaaggatgggaagttttaaaccctgaatttgttttttaaagcccttacccccctccttattatgattgggggggccaccctttagtttcctccttctcccaccaagattatgaaaacttcagctgatagctgggggctccccaaatgaggatgcagggttt

SEQ ID NO: 105885 - DNA, 411 bp, Homo sapiens
cactaatctgctgattcatctaacactaaaatgtatcgcatcttttggttaaaaaattattaatgctttacttatatttgagaatttggcagctctggttaagtcataaaagcaatgtgactgatttgtcattctggaatttggaggatgtatagagttagggtgccttcccatgtaggattaggatgtacctttgatgttccattggttgcatctgcattctgatttcagaattattagtacagaaattggggtggagactgtgggcaagagggttcttcatattagaatattattattattattattattattttttgagatggagtcttgctctgtcactcacgctggagtccagtggtgcgatctcggctcactgcaagctccacctcccgggttcacgccattctt

SEQ ID NO: 105886 - DNA, 388 bp, Homo sapiens
agataacttatttgccatgtatactttgattttaagaaatttgttcaatttgatcagcctgtttataaactacttgcaaaaatcaagtagcttataaactactcatttaataaatgaatttacaaatcaacttgttttgcaggtagtttataagcaggctgatcaaaatcacatatgtatatatatatatataatcacatatatgtacatatatagactcattttcttttggaagtgcgtagacaaaacatcattgaaagtttttattttgtcaagctgaaggatacttttcttttttttttttgaaacaaagttttgttctgtcccccaggctggagtgcaggggcgcgatctcaactcactgcaacctccacctcccgggttcatg

SEQ ID NO: 105887 - DNA, 377 bp, Homo sapiens
aggttgcagtgagccaagatcacaccacgacacgccagcctgggtgacagagcgaggctctgtctgaaaagaaaagaagacagaggtgggaattttgatgtcctttctggagaagagaagagggctcgaggcagagcctggcaggatgggaacttgcgtaacagataggagagtttactcccaaaataagcgagtcatcttccctcctgttcaccaattattttggggggctttccccaggcaccaaggcctgaatcctattatcagaactttcatgttctgttggatctcctcttgaactgcatttcccctaaaaggggcataggaagtcccatcttacagaaatggatacctcatggccttgggagtggctgatg

SEQ ID NO: 105888 - DNA, 450 bp, Homo sapiens
  misc_feature (1)...(450): n = a,t,c or g
atcgaacaacttttggctaccgcaagagcnaccgaaactgaattcccgggccgacccacgcgttcgtctttggctaacaaagtgctgggattacaggagtgagccaccgcacctggcccattttgtggttggtatttatttatttacttacttattgctattgagtcggaggggtttcttatatttttcggatattaaacccttatcagacatatgatttgcaactattttctcctatcccacaggtcgcctttcagttctgttgactatttcctttgctatcgagaaatttatagtttgataaaaactctcaacaaactgggtataggaggattttttctcaacataataaaggttatgtatgacaaacctgcagctagtattatacgcagcagtgaaaaacagaaagcttttcctctaagatcgggaacaagaataagatgccccctg

SEQ ID NO: 105889 - DNA, 407 bp, Homo sapiens
cggaatttaaggaccatagtacagctatggatactgaaccaaacccgggaacatcttctgtgtcaacaacaaccagcagtaccaccaccaccaccatcaccacttcctcctctcgaatgcagcagccacagatctctgtctacagtggttcagaccgacatgctgtacaggtaattcaacaggcattgcatcggccccccagctcagctgctcagtaccttcagcaaatgtatgcagcccaacaacagcacttgatgctgcatactgcagctcttcagcagcagcatttaagcagctcccagcttcagagccttgctgctgttcaggcaagtttgtccagtggaagaccatctacatctcccacaggaagtgtcacacagcagtcaagtatggtccaaacgtctatc

SEQ ID NO: 105890 - DNA, 366 bp, Homo sapiens
cggacgcgtgggcggacgcgtgggggttgaggctgcagtgagccgagatcgcgccactacactccagcctaggtgacggagcagactctgtctcaaaaaaaaaaaaaaaaaaaaacccttttggaaattctttttcaaccttttttggcattttgggggggggaaaactttttcgggccctgggggcgggaaaaaatagggtttggccctccgtccccctttttcaggggggttttggcttgtccacccctaaccttgttaaaaggcctttttttggttaaaactttggtgggaaaacaatttttgccccttgaataggggggggggggttttttttgggggaaaggggggaggcttccaccctgc

SEQ ID NO: 105891 - DNA, 380 bp, Homo sapiens
  misc_feature (1)...(380): n = a,t,c or g
gtcaaaaaactgagaaatcagacttttggaatgatcatctctctggatattgaaatcaccaaggattatgacagtggtagtgtgggactgaatccaaaattaaatcttcagacaactactagaatgatgtgggattgatttatgagtctaagaaagagggataatgggtcttacagactgatccatatattttgctatattttgaacaatgctgatgtaaatgttctggcacagatcttctgacatatatatgtggaagagtttctttgggatatgcttctttttctttaaaaatgttatcgctgggcacggtggctcatgcctgtaatcccggcactttgggaggccaaagcaggcggatcacttgagcccaggaattn

SEQ ID NO: 105892 - DNA, 396 bp, Homo sapiens
  misc_feature (1)...(396): n = a,t,c or g
cccacgcgtncggtggatgagagacatatacgattgagtgagatggcctgggttgccctctacctactgagccttctctgggctacagctgggactagtacccagacccagagttcatgctgtgagtatgatgtttttccaaggaggtcagggaagcagctgccctggggaaggggctgtgacctctgacactgagtggttgaaaatagcaatcactataggaattccaaaatgggtaagtctgagtgtgattgtgtgctgttcattcttcctgacttaatagcataagttctttgagagacaagtctatatgttttttattaagagagatggggccaggtgcagtggctcacacctgtaatcccagcactttgggagactgaagcaggaggattg

SEQ ID NO: 105893 - DNA, 409 bp, Homo sapiens
  misc_feature (1)...(409): n = a,t,c or g
tttactgtgaattttacctcaaaaaataaaaatgaacagaacttagtgtaggttaaaagcatgcatggtatgaatcagacatggtactgaatactggttctgccatctgttaatcctgcaactttaagtaaattaccttgaactccctgttttataaaataggcatattggtactctcaggatttttatgaatagtgagacagtatatgtgaaatgcttagcactcttagtaattacctagtaaacattantattactgctgttattgctgctgctgctgctgttgttggtgttactattattatgacgaattttcgctcgttgcccaggctggagtgcaatggcgcaatctcggctcaccgcaacctcttgcttctgggttcaagtgattctcctgcctcagcctccn

SEQ ID NO: 105894 - DNA, 423 bp, Homo sapiens
agcagccccagctaatttttaaattattttttgtagaaacagggggcctcattgtgtttttcaggctggtcttgaactcctgacatcaagtggtcctcctgccttggcctcccaaagtgctgggattataggcatgagccactgagcccggccttagatgttaactttaaagccatgctattagatgagatcaccaaaggaggggaggaaggacgggagaaaaagagagaaagagggagacgagagagagagaaccaaaggccaaggctccacaaattggacctagaaaagaagactgagaaggagcaattaatgaagtaggagaagaaccaagagagggtgatgtcatggaagcaaagagaagggttatcaagaaggagagagttaccaaccacatcaaatgctgctacagctcaaataaga

SEQ ID NO: 105895 - DNA, 420 bp, Homo sapiens
cacaaatataactggggtaagatgtctttctcagagttatgaagatcttttaaactccttatcttgaaccgtaagaaaatcacaaattaatttttgacaaagtgttttcaaattaaataaatgctgctctacaacatggatgaacttggagggcattatactaagtgaaacagacacagagaaaactattgcatgatttttacatgttctctaataaataaaaacaagagagtagaaaggtgggttaccatatggtgggagtaggggacacttatgtcaaggaatacaaagttgcagttatgcaggatgaataaatctagaactcttggccagccatggtggctcacacctgtaatcccaacactttgggaagccaaggcaggtggatcacttgaggccaggtgttcgagaccagcctgg

SEQ ID NO: 105896 - DNA, 412 bp, Homo sapiens
tgttcttgattatcagttttgaaggagaatggtatgaacccggaggtggagcttgcagtgagccgagatcgcgccactgcacttcagcctgggtgacagagcaagactctgtctcaaaaaaaaaaaaaaaaaaaccctttggcccatttttttttttaagggggcggggggattccctataatggggtttgaaaggttttttatccaatgggaacacaggggctttaccaaataggggattggcaaatttttttttccagtgggggctggtttttttattttttaaacagggcctttaaaaaagcaggggtttaaatctaagggaaatccagtttcccaggcgttggttttttttttaataaaccttccacctggcctcgtaatgggcaggagggcgggggaccaataaggg

SEQ ID NO: 105897 - DNA, 422 bp, Homo sapiens
  misc_feature (1)...(422): n = a,t,c or g
aaaatgttattttactcacaagagggctttggaaaggaagatcctgcccagcagagcctacatgcgcagacaggacagaggacccttaaggatcaatggtcttgttgccggaaatggatgtctggcgcaacccccggagctagttttggggaggccgccttgttgactgtgcactggaaaatgcacattgctttatcgtgagctctcggtgcacagtgtggtttccaggctctgagtggccaataaagctggtgctgtcttaaaaaaaaaaaaaaaaaaaaaaaaaaaaaaaaaaaaaaaaaaaaaaaaaaaaaaaaaanngggggggggggcccttaaaaaaaaaaaaatttttagccggggggggggaaaaatttttttttttttttggggcccaaaaaaataaatctgggggggggttt

SEQ ID NO: 105898 - DNA, 379 bp, Homo sapiens
gctggtcttgacctcctgacctcaggtgatctgcccacctcagcctcccaaagtgctgggattacaggtgtgagccaccatgcccagcccaggatgggggcatggcagaccacagtggtcttggaaaatgcaacagttaggcacaaaagcaggagtgcctgtcctcacctaggtctgtaggagtggagccccagccaggacctgcctttctctacccagcacttccccgtacccgctcccatatcttctgtactttagtgaaacctgatttgatagcatctgtctgccatacctgagatcccactctatgataattatagtgaccagttctggctgttgagacactgttttcccttgggatatttccagagtgttcaac

SEQ ID NO: 105899 - DNA, 379 bp, Homo sapiens
tcgcttgaacatgggaggcggagattgcagtgagccgagatcacaccactgcactctagcctgggcaacaagagcgaaactccacctcgaaaaacagctatgttatatgctacttataggatataaattttttaattgcatagtatgaaaacatgtcaaacattaaccatgttgattaggttgagcaacattaatataagaaaacttagaattcaaggtaaacagtgttaaaagggacaaagagggatatttcctgctgaaaaggaaggctctaccaagaaattacaaggcataatcagtataccataaccaagtagattgaatccccgaaaatgtaaggatggttcagaattacactatgaaaaaatcaactcctatg

SEQ ID NO: 105900 - DNA, 411 bp, Homo sapiens
ttctgtttatactattccaactcttactgaagcagcagtgttagaatgtcagccagatgctatagtctgaagtaatgtcatgagaccgttttagaaatttacctgccactttcacaagcccgggaggcgggggcgggagtgttgctgagcccgggagttggagactgcggtgggctatgatcgcgtcgctgcgccccagcttgggtgatggagcaggaccctgtctcaaaaaaaaaaaaaggggtagggggttcctattaattttttcccccccccctttaaaaaaaaaaaaaaaaaaaaaaaaaaaaaaaaaaaaaaaaaaggggggggccctttaaaaaaaaaaaaatttaaccccgggggggggggaaatatttttttttttttgggggccaaaaaaaaaaaaccggg

SEQ ID NO: 105901 - DNA, 411 bp, Homo sapiens
cgacctcaggtgatccacctgccttggcctcccaaagtgctgggattacaggcatgagccaccgcgcccggcctgttttatgttttttatgaaaacatataacatttacaagtgggaagagctgaatacaaagtgctacaaactatatggcttaataaaaatgcctgcatatggaaatacactagaaggtgaatatgaaacactgaaaacatcaaattaaaaatccttagaattaactaatattagatgtcccaatccttggaaatgaactaatattatgtcctgtttctgaaagcagaggctacaataaagctccactctatttcttgcctgtgtcaagtagaaagctcaagtgttagaaaaagaaatgaaaatttgatattccatgaggaaaaagcctagagtcaatgg

SEQ ID NO: 105902 - DNA, 367 bp, Homo sapiens
  misc_feature (1)...(367): n = a,t,c or g
ggcctcgagtcatcaagctcctgtttcaactctgccacacggagcgccagttcttctttcgtccccgtcaggctgacatcacggttcagttgttcacccagcgagcggaggcgggcaatcagttcatctttcgtcatggactcctccacagagaaacaaaggccccgaagggccatgattacgcccgttgtacggacacgaactcatcaaggtgagccagcagcatcaccggggctgactgaagcatggagaactcacgcgccggatcgccggtgggcacccaaattttcgggtgaccggcagaggcgntaatgccttcacgctgtgcgtccgcatccctgcaaggctcaagcctgtcgacaattag

SEQ ID NO: 105903 - DNA, 386 bp, Homo sapiens
ctttttttttttgagacggagtctcgttttgttgccagcctggaatacagcggcatgattttggttcactgcaacctccgcctcctgggctgaggcaaaaaaataacttgaacccgggaggaggagattgtagtgagctgaaattgggccactgcactctagcctgggggacagagcaagattccttctcaaaaaagaaagaaagaaacaaaatgcttattccttggggctgcaatgaaatagcactcaccataaatttaactttctcagcaaggcaattttacttgctgcataaagggtgctcctcgcagatggaacaatggtgagagcacacctgaacaagggaggggaaggggttcttattcctgacacaggtagcccttatg

SEQ ID NO: 105904 - DNA, 392 bp, Homo sapiens
cggacgcgtgggtctgatattaatactttgtatcttgtttttttattcttttgtcagaggtttatcaataaaggttagctagaggtttattgattttctttttctttttttgagatgcagtctcgctctgtgtcccaagctggagtgcagtgagccgagatcgcgccactgcactccagcctgggcaacagaataagacttcgtctcaaaaaaaaaaaaaaaaaaaaaaatgggggccgtttttggtgggccaaaattttttgaaagggcaaaaacgggtggttggggggttttttaaaaacgggtttcttttttgattttcccccccccttttcttccctttctggaaagaaaaaaaaatggaacttttaaaaattatggggggttttttc

SEQ ID NO: 105905 - DNA, 391 bp, Homo sapiens
  misc_feature (1)...(391): n = a,t,c or g
agaatggcgtgaaccgaggaggcggaacttgcagtgagccgagattgtgccactgtactccagcctgggcgacagagcaagactccgtctcggaaaaaaaaaaaaaaaaaaaatgaccttttgatcagtgtaacaccatggataaatctcaaaaactttataccgagtgaaaaaaggtttatttaaaagtggtacatactggcagatcccagggatattaagctttcgaacatgtcaatcccatttatagaaatagggcgatcttcaagggaaggggcatgtaaaagttttttggggagatggaattttttgtctcaatctatatgttgcttgaagggccaaccatatctaaaattaatcattagggctaggctcagtagctcatgcctgn

SEQ ID NO: 105906 - DNA, 399 bp, Homo sapiens
  misc_feature (1)...(399): n = a,t,c or g
ccctgggcaggtgccctccctgtgcttcagtttccctacctataaaatcagacccaccccatacacttggttgtcaatgaagacaacctggtacctgcaggatgctggcagtgccttgtccctgggggtgagttgtgacaaatgctgtgttctctattgttactttttctccttctgtttgtcattccgaagtcgccctggcagcatacaagtggctggtttgctacctgctccgagagacttatcaaaaattaaaccaagaaataaaacctcccactttgtctgtgnnaaaaaaaaaaaaaaaaaaaaaaaaaaaaaaaaaaaaaaaaaaaaaaaaaaaaaaaaanaaaaaaaaannnnnggggggggggggcttttaaaaaaacctcttctttcccc

SEQ ID NO: 105907 - DNA, 392 bp, Homo sapiens
caaaaacagcctgggaagagccccaagctgccagactgccaaaggaacccaggggcttagacttctctaggaaaatgtaagtgatggagtcccaggattcccagctctctcgggggacctgtctaagagcacatctgactttgagctgcactttggttttttggctctgtctttagctaaagagttttctacgagatcaaccctttgactcttggttggagcttttatggcacaagtattgggtgtgtaatcccctgttgacctcactactgccagaatcagcctcaggccaggcgcagtggctcacaccagcactttgggaagcagaggcgggaggatcacttgagcctaggagtccgagaccagcctgggcaatatagtgagacccctgg

SEQ ID NO: 105908 - DNA, 388 bp, Homo sapiens
cttgaactcctgacctcaggtgatccacccaccttggcctcccaaagtgctgggattacaggagtgaggcactgcacctgaccttctttattttgagataagttcttgccctgtagcctaggctggagtgcagtagtacaattgcttatagcttttggtgcttctcaaactaaaattctaggacaggttttaagaagcccatatcctaataaaatttatttttttatcaaataatataacagtgttctaggatatcttcttgaactaaagtattatttctttcctggagaatagatggatgtaactttatattttcaaccattatgtaagagcttaatgtatgttaagtgtataatttttttaaagacattaagttttttttgtcagc

SEQ ID NO: 105909 - DNA, 386 bp, Homo sapiens
  misc_feature (1)...(386): n = a,t,c or g
gctggtctttcccatgctattctcatgatagtgaataagtctcatgagatctgggtttatcagggcattccactcttgcatcctcattcatttctctcttgctgctgtcatataagaagtgcctttcaccctccaccatgattatgagactgcccctaccgtgtggaagtccaattaaacctccttttcttcccaaaaaaaaaaaaaaaaaaaaaaaaaaaaaaaaaaaaaaaaaaaaaaaaaaaaaaaaaaaaaaaanaggggggggggcccccttaaaaaaaaaaaattttccccccgggggggggaaaaatttttttttttttttgggcccccaaaaattttttgcgggggggggttttaaaaacggggggggggaaaaaccg

SEQ ID NO: 105910 - DNA, 379 bp, Homo sapiens
ttaaaagcatgttgaaacttttttatttcctctttaggagagatctttgccttctgttttgctaacaaacataacgctttagaatttcctcctgggaggcggagcttgcagtgagccaagatcgcgccactgcactgtagcctgggcgacagagcgagactccatctcaaaaaaaaaaaaaaaaaaatttccctccgggaaaataggggaaaggttttaaaatctcaggggagttcccaaaaaaaaactgggccgggcaccccccccccccctccagaaaacctctccttcgggtggtcctgggggcagccacacccctttgggttgtttttttccaaacattttaagtcccgggttttttgccttctccttacttgga

SEQ ID NO: 105911 - DNA, 401 bp, Homo sapiens
ggaggcggagcttgcagagagccgaggtcgtgccactgcactccagcctgggcgacagagcaagactccgtctcaaaaaaaaaaaaaaaaaaaaaagggggggatggtatttttttggaaaaaaagaaaaaaatcctttttttaaaaaaggaaaaaagcccctgttctttttttggagggaaaggccaagtttccttttaaaaaaagggttagggttggaaaatttgggtttatttggggaggacaaaagacacaaaccgggggaaatcttgttttttttatgtttttgggaaaaaaaaaaaatatttttatttgtgtttaaaaagggaaaattctcttggaaaataaggccgcgttttggttttttttttaaccctatgggaaaaaaatcccgggttggg

SEQ ID NO: 105912 - DNA, 399 bp, Homo sapiens
  misc_feature (1)...(399): n = a,t,c or g
cccacgcgtccgcccacgcgtccgcccacgcgtncgggaggttgcagtgagccgacgtggtgccactgcactccagcctcggcaacagtgagactcccatctcaaaaaaaaaaaaaaggcccttttaaaatccttttcttttggggggggccccaaataaaaacggggggggttttgttttttcccctggcccggaaaaagggaaatttcctttttaaaatttccctctttaaaaagggaaaaaaagtttttttttttttttttattgggcgggtaattttttattgggggggttgggactttccggcaaaaaaaaacccttttgtttttgggggccgaaaaagttgggttttgttttttaaaagccggggcacccaacctggacctctaaaaaattag

SEQ ID NO: 105913 - DNA, 390 bp, Homo sapiens
atcgcttgaacccaagaggcggaggttgctttgagctgggatcatgccactgcactccagcctgggcgatagagcgagactcagtctcaaaaaaaaatgtgtttttctttattggctttaggttactgttaagaatttatggttattgataagtctctggtccatagtaagcactcaataagtggaagagaggctggctgtcaccctctcacccggtctgttctgagcattctcctctttttcacttttattctatgttggggccttctgaaaaggctatacttaacagaagacaacttattgagggggagggggtcatggggtcaatgacagggaatataaagccaattaagcttcattcatgtacctaaacaaaattggtgttttctt

SEQ ID NO: 105914 - DNA, 400 bp, Homo sapiens
  misc_feature (1)...(400): n = a,t,c or g
cggacgcgtgggcttttgcacaactctctttaagtttcctttatttcttttttaactcattctgattttctgcattgtgtttgggaaataaaatgaaaaaactaagaccaatagaaactggttttcaaaaaggcaaatacactcccatctgtttcagatgctgctgagcatttcagcagtgacagattcaaataataagctaatttttggagaaaggattaaaagaaaaaaaaactttgtaatatttatcacttgcaagctatgtttaataaagaaaggaatggtttctaaaaaaaaaaaaaaaaaaaaaaaaaaaaaaaaaaaaaaaaaaaaaaaaaaaaaaaaccaaaaaaaagaaaaaaaaaannnnctttaacacggggggggggggtgccttttt

SEQ ID NO: 105915 - DNA, 415 bp, Homo sapiens
cctcctccctccatcccttgctcaggctcccgttgcaggatgcaaagctgacaaggcctggcttcaggggcctacagtcctggacaccaggtccttgaggactggagagctacatctggttggggtgggtggtgactgaaggactggactcctgggtcctgggaggctgcaagggcctccatatgggtccagagaatacaaggggtctggattattggatctaaatgcctcgctgcttgatccagaagtctgggcaccttctctctcaggaccagagaccaagcccccagcccattctccttcagacccaggagttcactcttcttgctctgcttcccaagggtcccaggggcctggacctttaactcctagctcaaggatccatgaaccaaagcccccaggacctttctttaag

SEQ ID NO: 105916 - DNA, 506 bp, Homo sapiens
tttcgtgcctctgtctgagacggaggctcccggctgctccggctcccggccccctgagctggagccagagcgcagcctgggccgcttcagaggccgcttcgaggataaggacgagcagttggaagaagaagaggagctggaggaggaagaagaggaggaggaggaggacatgagtcacttctcgttgaggctggagggaggccggcaggactcggaggacgaggaggagcgcctgattaatctctctgagctgaccccatacatcttgtgttccatttgcaaaggttacttaatagatgcaactaccatcacagaatgtcttcataccttttgtaaaagctgcatcgtaagacatttttactacagcaacagatgtccaaaatgcaatatagtagtacatcagacacaacctctttataacataaggttggaccgacagttacaagacatagtgtacaaattagtgatcaatctagaggaaagagaaaaaaagcaaatgcatgatt

SEQ ID NO: 105917 - DNA, 419 bp, Homo sapiens
tttcgtgtacccagctgtgcgaggtgtcagtatctgcccctactgcggggtgcctcccagttaggctactcgggagtcagggacccagttgaggaggcagtctgtccgttctcagatctcaagctgtgtgctgggagaaccactactctcttcaaagctgtcagacagggacatttaagtctgcagaggtttctgctgccttttgtttggctatgccctgcccccagaagtggagtctacagaggcaggcaggcctccttgagttgcggtgggctccacccagttggagcttcctggccgcgttgtttacctactcaagcctcggcaatggcaggcacccctcccccagcctcgctgccgccttgcagtttgatctcagactgctgtgctagcaatgagcgaggctccatgggcgtaag

SEQ ID NO: 105918 - DNA, 414 bp, Homo sapiens
tttcgtgggatctcttggaccgaatggaactttttgctgcctgcttttgctgctgattctgtcagtggacaaggaaaaaggcttcgaaggcagcagaggcgcaggggaggtggagaaagaggtggaggaagaggacgaggaggaggaggaagccgaaggggctcggcgcgtgtgtgtgcatgtgtgcatgcgtgtgtgagtgcatgtgtgtgagtgctgccgctgcccgcgacccctggccccgaaggtgttggctgaaatatggagaatagtcttagatgtgtttgggtacccaagctggcttttgtactcttcggagcttccttgctcagcgcgcatcttcaggtaaccggttttcaaattaaagctttcacagcactgcgcttcctctcagaaccttctgatgccgtcacg

SEQ ID NO: 105919 - DNA, 404 bp, Homo sapiens
tttcgtctgcagggggagctggggaagagccgcgcaggtgccggaggaggccgtgggaggtgacgtagctgcggggggagctggggaagagccgcgcaggcgccggagagtcttgcggagcatccccctgtgctgagtcccggattcattccttggttttacagacgaggaagctgaggatctgagagctgtacagtagtggctgaggtgggggttgcagtgaaggatgtgacacaccccagatggagctgaatgggcgtgggacctcaggtcttggccacaggggcctgctgtgcattgatcctgctacagagtgtccgttatcagccaggcgcggtggctcacgcctgtaatccctgcactttgggaggccgaggtagggcggatacctgaggtcgggagtt

SEQ ID NO: 105920 - DNA, 477 bp, Homo sapiens
  misc_feature (1)...(477): n = a,t,c or g
attgagatcgaggctatggcacgnctcnaannntngngngacgatntcgttgcctctgcaacttnnnnnncccctaggaagagttctccatagagcagggatatgtcaccaggactcctgacaaccaggaaggaggcattgatggccttccgggatgtggctgtggccttcacccagaaggagtggaagctattgagttctgctcagaggaccctgtacagggaggtgatgctggagaactacagccatctggtctccctgggaattgcattttccaaaccaaaactcatcgaacagctggagcaaggcgacgaaccttggagagaggagaacgaacatcttctggacctttgtccaggctggagtgcaatggcatgatctcggctcactgcaacctctgcctcctgtgttcaagtgatttctcctgcctcaccctcctgagtagctgggactgcaggtgcccgccatcatgcccaa

SEQ ID NO: 105921 - DNA, 474 bp, Homo sapiens
  misc_feature (1)...(474): n = a,t,c or g
aattgaaaccctatcgtagaccctagtccatgtggtggaattcgcgtccgcacgccggcggggcgaggcggcccggccctgcgcgtcaggcctgagacctgggaggaagctggagaaaagatgccctctgaatctttgtgtttggctgcccaggctcgcctcgactccaaatggttgaaaacagatatacagaactgtttcatcaccagaaagatctctctcctgcctctcttctgccaccatctannnnnnnnnnnnnnnnnnnnnnnnnnnnnnnnnnnnnnnnnnnnnntactgtgagattaccaagtgatatgtgaccttcggaaatgattttctttactcagcataatgccctcaggtccgtcaaggtttgttgagtatatcagtagctaaactgggcccatttatttgtctcttcatctaatcatcaattaaaaatgaccacgccgagaaactaaaaccgctcgtaaa

SEQ ID NO: 105922 - DNA, 381 bp, Homo sapiens
  misc_feature (1)...(381): n = a,t,c or g
gggaggtttatgttgcactgagacaacatgacaccactgcactccagcctgggtgacagagggagactctgtattaacaacaacaacaacaaaatactcatcgtacccagaaccaggaagacctctaactaaatggaaaaaatatatatatcaatagtggtcaagattgacatgacacagttaatacattagcttacaaagattttgaagtatccatgacaaacttgtccaacttgtggcccacgacatctttgaatatggcccaaaagcaattcgtacactttcttaagacattatgaggctggntgttttttttgtgattcttaaaaatctcatcagctatcattagggttagtgtattttatgtgtaattcttcttcc

SEQ ID NO: 105923 - DNA, 426 bp, Homo sapiens
tttcgtcagcgacttgctgctcaaaaagaataagaaccagggtttttgtttgtttttttttttttaattaggggaaagaaaacccccctttttttttgggggacccggaaaaatccaaaaagtggaaaaccccttttcacgcccccgggaaaaagccccagcgaacccccaaaaagcaggggggggcccctgtttttccaaacccggagccgcctgaccccccaatcctggtttggaggggcacccaaaccccccctggggggggaaccccccaaattttgggaggcgggcctcggaggggatccccccacccctagggccccccacagggcggaccaaacgttggaacagcccatccaggcgcccacccggataattcaaaacgagcagtgggccataaaacccttccagcctatgccggggggc

SEQ ID NO: 105924 - DNA, 435 bp, Homo sapiens
tttcgtgcgaggccaggagcggggccagcgtccggccgaagccgcgggaggccccggtcagcaagcacacagcacgccccagcccgccctccatgctcctgttctccgccggcggcgctggcacccgagaccagagtctcgctctgtggcccagactgaagtgcagaggtgtgatcacagtttactgcggccttgaattcttgggctcaagcaatccttccacctcaggctcctgagtagctgggattacagagatggctcttgctgtgttgcccagtgtggtcttgaactggactcaagcagttctcccatctcagcctcccaaagtgcagggattataggtgtgagccaccccacctggccaacagtaactcttttaaaaagatacaaatgcctgaaagatcactggaacaacacaacaacccatgtgatttg

SEQ ID NO: 105925 - DNA, 428 bp, Homo sapiens
tttcgtccgggatggtgagtttcagagttaggggtattgcagtgggggtcctgggctgaggctggggcccaattccgagcactgacgttactgtcttgtccccacagaagccgatcctactgcagggccatgagcgggccattacgcagattaagtataaccgcgaaggagacctcctctttactgtggccaaggaccctgtgagtgttggctggagggggtccgggaggggcgggatccttctgccaggacgatgggtggacacgccagttttgccgttagcggggaaccaaagagcatcccattgtgagaagtagggagaggccatgccgggggtaggttggcgaaagtattctaccgggaaaggtggggaagaactctattggccgagtgcggtggctcacgcctgtaatcccggcactttgagg

SEQ ID NO: 105926 - DNA, 402 bp, Homo sapiens
tttcgtttagaattcaagtccaaggaaatcatacttccaaacattatccgaagattcaatattcagaccaggcacagtggctcacgtctgtaatcccagcactttgggaggccaagacaggcagatcacttgaagtcaggagtctgcgagctttccgagccccatgagaaggacccacgccgatcaggctggacgaacgctcctggcctacagccatagagaggatttatacccccgagctattgcggagtggtttttcgagccgcggtgaggggactagagcaggccctgggataccagacttttcaggtggaaccccacctggggctggtgccatttttaggaaacccacgagactgcgcgcactgatggtggtcgaccacctcgcagacactgtttgag

SEQ ID NO: 105927 - DNA, 402 bp, Homo sapiens
  misc_feature (1)...(402): n = a,t,c or g
tttcgtgcttctagacctgtggcctcagggtgggaattctctaggggcaggtccacgggaaatggagtctgtgggcaccaggctcagcccccacctctggcctgtgcgttctgcacccacttactgggctcttgctggtggccgtcagcaaggcaggccctggggtacagtgggggtcgggggtagagagggccctgattgcttgtcctgcaggccgccgtggccctgcgcagatgacggcccctctctgtgatgtgcggacgtctcacctccattagggtagaggattctggggcaagatgctggttttatttatttatttatgagacggagtttcgctctgtcgcccaggctggagtgcggngacgtgatctgggctcactgcagactccgccttctggt

SEQ ID NO: 105928 - DNA, 433 bp, Homo sapiens
  misc_feature (1)...(433): n = a,t,c or g
aattcttagggtagacagcaagaaaaggggtctcatgacttccagccaggttggctctgtctttgcaatgtcctttctctggaattggaattcagaaagcttcacgtacttcaacattccccaaatccgatcaacatgctttgtgatcaaagaattaggaaattagagcccaagatcccagataaatagtaattattagccaaaataacactaataataatatgtaatatttcctgaattcttactgtgtgccagatactttaggcacttcacatgcaaactctcctaatatcttcatatcaaccctattagtgatattattgcctccactttcagattaaagtaaagcttaaggctgggcgcagtggttcatgcctgtaatcccagcactttgggaggccaaggcaggtgtatcacctgaggtcaggagttn

SEQ ID NO: 105929 - DNA, 382 bp, Homo sapiens
caggtgtgaaccaccgcagatggccaaggtggccttttatattatcaacttaaaagatgatcctgcaaaagatgtaattttcatatttatgtcatttttttctcagtgttttattttcttatgaaaatgaatcatactaagaaaatcaaaaaatgggaagaaacaaaatgcattaatttttaaactccattttgtttcagtggaacttagtgaccatcagtaggttcttagagttagttgctcatagtttacaatatgatgctattgccggacgcggtggctttcacctgtaattccagcactttgggaggccaaggtaggcggatcaccagaggtcaggaattcgagaccagcctggctaacatggtgaaaccccatctct

SEQ ID NO: 105930 - DNA, 413 bp, Homo sapiens
agcagttctcctgcctgggcctcccaatatgctgggattataggtgtgaaccaccatgtctgacccacactcctggtttttttgtttgtttgttttgttttttaattactacctgtttaaaactcaacagtttctgaaccctgtggcttcttgaaaggctcattgctccctgtgtggttttcttagttgtggatcctgggtaggcgttgctaatgacagagaaccttggtatagctcctttcattcattcatctttagactatgctgggggaattacctctctgcttcatggaagtctgtggggttcacagagggcctgagttgggtttcttctttggtgagaaagcagatcaaaggcctggcgtggtggctcgtgcctgtggtcccagcactttgggagaccaaggcgggtg

SEQ ID NO: 105931 - DNA, 401 bp, Homo sapiens
agaagtttgttattaccggtcatctgaagccttcttctctcaactcgtcaaagtcatggggcatccagctttgttccgttgctgccaaggagctgcattcctttgaaggagaagaggagctctgatttttagaattttcagcttttctgctctggtttctccccatctttgtggttttatctatctttggtctttgacaatggtgacgtacagatggggttttggtgtggatgtcctttctgtttgttagttttccttctaataggcaggaccctcagctgcaggtctgttggagtttgctggaggtcctctccagaccctgtttgcctgtgtatcaccagcggaggctgcagaacagcaaatattgcaagacgacagatgttgctgcctgatccttcctg

SEQ ID NO: 105932 - DNA, 422 bp, Homo sapiens
cgccattctcctgcctcagcctcctgagtagctgggattataggcgcccaccaccacaactggctagataatgaactcttaaaaatactttgtccacaccccctttcatttactcccatgtattactaatcctgctgaggccgtcttggtgtgacctccttcctcaccactgaccccctcttttctctctcagaacttccttactttaacaatccagttgaacacatatgccaccttattcagcagttgaatctcaacctgagagattctagtgttcattcttcagttccacacataaccatcgtgagtaagagaggctcattcccatagaaggatgaggtttaagattgctccagtcattaacagtatacaagatgtcagatagcgttttactgggtctaagataaattacgctgtaacca

SEQ ID NO: 105933 - DNA, 412 bp, Homo sapiens
cttaactttcagaagaaagagtatcggatttgatatttagaaatggtataaaagctagtaattaaactaagatggggaataattgctatacaacacaaaattatgtgtcaaagccaattataaaaaagtaaaatgccagcaaatatatcacgagtactataacgttgcatccttattaacttcatgttgtttacttcttttctgtaggtgattttcttccacccccacctccacctctagatgattccagtgcccttccatctatctctggaaactttcctcctccaccacctcttgatgaagaggctttcaaagtacaggtaagagctgaagttaaagtcatgttaggtaagagctgaagttaaagtcatgtttattagccatcctagggagctcatgaatttcatgattg

SEQ ID NO: 105934 - DNA, 411 bp, Homo sapiens
ggatggagcgagcgccgagccgggtcagagttgaacaatgaccatagttgacaaagcttctgaatcttcagacccatcagcctatcagaatcagcctggcagctccgaggcagtctcacctggagacatggatgcaggttctgccagctggggtgctgtgtcttcattgaatgatgtgtcaaatcacacactttctttaggaccagtacctggtgctgtagtttattcgagttcatctgtacctgataaatcaaaaccatcaccacaaaaggatcaagccctaggtgatggcatcgctcctccacagaaagttcttttcccatctgagaagatttgtcttaagtggcaacaaactcatagagttggagctgggctccagaatttgggcaatacctgttttgccaatgcagc

SEQ ID NO: 105935 - DNA, 386 bp, Homo sapiens
tcttttccctggaaatatacatttttaaaagttagatatctttactccaagaaacctgtatttattctgtctacaacagttccttcctctgcagattttgtacttgtctcttcctttagacactgaacccgctaagagcagggattaaacttcattcattttttacattgccaatgcctgctataaagaatcacataaatgtgtgaatgaggttaagtttacaccttattcctgctcggtgtgtattatttagtttatgaggacatcttgtggctagatcatttattgctataaacagacgatcataggccaggcgcggtggctcacgactctaatcccatcactttgggaggccaaggtgggtggatcacctgaggtcaggagtt

SEQ ID NO: 105936 - DNA, 404 bp, Homo sapiens
ttgcccaggctagtcttgaactcctgagctcaagcagtccacccacttctgcttcccagagtgctgggattacaggcgtgagccactgcacctggcctgtttgacttttttaaaaaaatagactatccaggcaagaattacatgtaataaaattcccccgtttttaatgtagagttggatgagttgcagcagatttttatacccgtgaaagccaccacctccacatgcagtatccatcacccctagaagtcctctcatgcccatcttctagagcatcagtcttagctgtaacccaggtgtaagagcccttctggacttgctgttgtcatccagcattacctcatgaaggccttgctgtgtctccactgtgtgcaaattgtccctttcaaaagttatatgatgtt

SEQ ID NO: 105937 - DNA, 415 bp, Homo sapiens
tttgttcttggctataatacttgtgactcatgaagaattatgttgacaaacaggataaattccacatgcattttatttcccagtgagttgtataaactttatttttgttgaaggttgtatgttaaatcaatgttacattcttatatcacttcttgagaaggaagttccgatttgaaattgtatcatttccttcaaaatgaagggcagtgcttagttaaataaaagattgatgatatcttttataaaaaaaaaaaaaaaaaaaaaaaaaaaaaaaaaaaaaaaaaaaaaaaaaaaaaaaaaaaaggggggcccctttaaaaaaaaaaaaattttaaccccggggggggggaaaaattttttttttttttggggccccaaaaattattttccgggggcggttataaaaaaagggggg

SEQ ID NO: 105938 - DNA, 404 bp, Homo sapiens
  misc_feature (1)...(404): n = a,t,c or g
actgatgctttcatattaaaattgttttcaagatagagagccgactccactttcatagttattggttctggtcactatataggcatcacatttttgtgtggatatgaaacttaggaaggatcctcttgactccttgtgatgtggcaataaattttttttaaaaaactgaaaatacttaggaaggatccgcataatttttttctgcaacttaaatgaaatgcatcattcttgttaattataccatggtgaattaatcacttttgaagcaatatcagttattttttgaataataacttttctaaagccttaagtcttaatattaaatatatgattagccaggcacggtggctgacacctgtaatcccagcactttgggaggccaaggtggggggattacccgaggn

SEQ ID NO: 105939 - DNA, 390 bp, Homo sapiens
tgagccgagatcgcaccactgcactccatcctgggcgacagagcgagactccgtctcaaaaaaaaaaaaaaacggagggccccctaactttggggccaaactcaaccctttaacataaaaaccaaaccaagagacccctttttgggcccccaggaaaattaccctttgaaaaagggggaaaaggaaaaaatttgtagggccctttttgggaaagccataaacagggtctatggggtttttgtggactgccaaaactttttccttaatttcctgctcatgggctgctttcgggaggggggaaactgctaaaaacctcagggcggggggggggagctgttctccaagctttttaggaggtaggggaaatacaggttatgcatatgaggaggg

SEQ ID NO: 105940 - DNA, 416 bp, Homo sapiens
  misc_feature (1)...(416): n = a,t,c or g
atatttgattgtgacagctgttttaaatttatttttatttaaaaaatttttccaactcttttgaaaaataatttcaacttttaagttcaggaagtacgtgtgtagatttgctacaggagtatattgcatgacactaaggtttggggtaaaaatgatcctgacacccaggtagtgagtgaatatagtacccaaacagtagttttccagccctttcccccttgcctccctgcactaatagacctagtagaccctggtgtcttattgttcccatctttatgtccacacacatgctttaaggatgcttttaaaggaatatncaaggccgggcgcagtggctcacgcctgtaatcctaacactttgggaggccaaggcaggtggatcatctgaggtcaggagttcacgaccagccccacca

SEQ ID NO: 105941 - DNA, 417 bp, Homo sapiens
  misc_feature (1)...(417): n = a,t,c or g
aatcgcttgaaccagggaggtggagggaggttgcattgagccaagattgcaccactgtactccagcctgggcgacagagagagactgtctcaaaaacaaaacaaaacaaaaaagaacaacacactcaacaatggcatatccattttatagaatgagcaactgtcaacagttatccttcttgtcagcagaagcaccagagggttaagaaaaaagtttcagatgccttctctgcccaccaggagtttgacattcttgttctctaagggcagcattggtgttgtggaaagagccccgagtcaacaaactcgagttttattctttgcagtgctactaaatacctctgtgactttacacttgtcatttaccttctttgggctggtggnttcctgtttgaaaaagaaaaaattggggccaagt

SEQ ID NO: 105942 - DNA, 392 bp, Homo sapiens
ctcaaactcctgacctcaggtgatctgcccacctcggcctcccaaagtgctgggattacagatgcgagccaccgctcctggccgcatttcatcttcttaaatgaatatcggccactctatcttctatataagcctcagattagtacagatgttgagtcatagcagctcctcaaaaccctcttcaccagaggctttaaactgtgtaattacattacaggtcagtctcctcagccctggaggtcgactgctcagctttttcctagcatacagtctgagagcagaggctgaagtaaggggagttctaatctttgggtcagttgccctctccctgtgtcatttcttatgaaatagaagttatgctattcccaaaatacatacagcactaggcaaag

SEQ ID NO: 105943 - DNA, 407 bp, Homo sapiens
  misc_feature (1)...(407): n = a,t,c or g
tgacctcaggtgatccgcccacctcggcctcccaaagtactgggattataggtgtgagccaccgctcccagccgcctggctgtttcttatacctggtctcttaattctagtaacatcctttcagaaaacacacaagctatctttaggtgctaaaccttcaggagaattgctgactatgaattcttacaaaccacaggggcaatcattcaaataggggtttttctccctagatgggtttcagcaatttatggacactctaaaattgtacacaaaaattttacctgtatatgtgtatttttccagagtgattatccacagttttaatcagatcagcaaagagctatatgatccccaaaaagtcagcaacacatggagcaggagcacatatggctttgctgtggataaan

SEQ ID NO: 105944 - DNA, 386 bp, Homo sapiens
tgcgtcccttatcttccctcctgacgtgctgctccctgcccttccccagcacagcaggtgataccgtggttcacccagctgtctacaccggaaactaagcattatccttgactcataagtcccagctgccccatgtggccctcaccacatggccctacctggctctcacgcctcatctcccagcattccccctcaaacctaaaaaaaaaaaaaaaaaaaaaaaaaaaaaaaaaaaaaaaaaaaaaaaaaaaaaaaaaaaaaaaaaaaaaaaaaaaggggggggggggccttttaaaaaaaaaaattttttcccccggggggggggaaaaatttttttttttttggggggcccaaaaaaaaatttggggggggggaataaaaaaaaa

SEQ ID NO: 105945 - DNA, 383 bp, Homo sapiens
  misc_feature (1)...(383): n = a,t,c or g
ggtctacagggcaatgtctggacccgggaggtggagcttgcggtgagccgagattgcaccactgcactccagcctgggcgacagagcgagactccatctcaaaaaaaaaaaaaaaaaaaaccttcaaaaaaaagctttaagggggccttttttttttcggggaattttttttcttttcctcctgggcccccaatttaatttcctgtttttttttttccctttttcaaaagagttttgctttgtggcccagggtgaaagaaannnnnnnnnntttngtttcttaaaccttttttttcccgggaaaaagaagggacccccgaaggtgaacctttggaaaacccccattttccccaattatctccgacttagggggacggagaggg

SEQ ID NO: 105946 - DNA, 409 bp, Homo sapiens
  misc_feature (1)...(409): n = a,t,c or g
ttctagatcgcgagcggccaaccttccttgcttcttatcattacctttaatagngtcaaaaggaaggaaaaaaaaaaacttttaaaggggggcttttttttcccccaatttttgaaaaaattccccaaaatttttctcttgacttagcccggggaacccccaggggaaaaaggggagggggggaaaggaaaaaaacccggggggcggggttggggggaacccccttgccggggggggtttaaggaaaagtttcccagggggaaggaaaaggccccccctttaaaagaaaattcaagggaaaacctggggtggggaacaaaaattccccctttggggaaaaaaaaacccccccccccacaggaacaggaaatgatcctgggcccaccacaattttgattgttttttaagg

SEQ ID NO: 105947 - DNA, 389 bp, Homo sapiens
atgaaacccaaagagagagagagagagtgtgtgtgtgtgtgtgtgtgtgtgtgtgtgtgtgcgcgcccgcacaaaacacggggaaaatttctctcagtgtttattttcgccgtgcctctcacaaaaaaagagcgtgtgcgcgtgtgtgcacacatgtgtttgcttttggagagggacgcctgcccaaaagagggggggggtatctggggacacccccctcccaagaattggggagactgtgctttctttctcaagaacaatcctagatgcctgtgagtgcctacttctgtggagggggggttacatgattctctccttggccccctgccagagtctgtatgtacacagaaaaatgttgtttaataggactgctctcctctgacacagat

SEQ ID NO: 105948 - DNA, 764 bp, Homo sapiens
  misc_feature (1)...(764): n = a,t,c or g
cagattttgttttcaaaaggtttattaggccatatccgtagcccttgttgaagacattcctggcagatttgccaagattggcatacttgggtggcacagccatcttctgctcagaggtggtggtggcaggcttggcggcagctatgatgggggcttcatcagggaggcatggagcaaagcaagcagccggtgtgtagtgcttttaatggtgtttcattatatacctcataaagtcagagtccatgtctgtattgctcaccattgtatccttatcnnnnnnnnnnnnnnnnnnnnnnnnnnnnnnnnnnnnnnnnnnnnnnngcatctttgaatctcctcccagctcaatttgctattaactaagagaaaggcttttttatcagaagagacagaagtgaacctgcacatctaacctttgacgtttttccaatgatttaaagatgtttttcacccaaaatctcagtaggtgttatcttctacccttaatagtcacagatcagtcaacatctaaaaggccccgtctggagcaaatcactctgccattctagtttccacctaatttctaagtcctatagttctgcttaaatatctcttaaaccattttccttctctccatcttcattgttattaccttaaccaaacttttatcagctttannnnnnnnnnnnnnnnnnnnnnnnnnnnnnnnnnnnnnnnnnnnnnnnnnnnnnnnnnnnnnnnnnnnnnnnnnnnnnnnnnnnnnnnnngagtctcctgcctgatgc

SEQ ID NO: 105949 - DNA, 391 bp, Homo sapiens
tctggttgcactttctcatcaaattaatttttcaggaagatagccatgcatcataaggagtggtgttttccccctgtttcaatctgctttccagtccttttgatttttgctcacaaactgggggaaaacaccaaaaggactggaaagcagattgaaacaggggactttttaaagtagaagaaagtttcagtattccctgttctgtgaggtgttctatacatccatctgcacttgtctctccaactccacctacaactgatacaactaactgggctcttttttttgagactgagtcttgctctattcaccagactggaatgcggtggcgggatctcaacttactgcaacctctgcctcctgggttcaagcgattctcctgcctcaacctccg

SEQ ID NO: 105950 - DNA, 383 bp, Homo sapiens
cttggacctgagaggcggaggttgcagtgagttggattggcatcactgcactccagccgggcaatagagcgagattccgtctcaagaaggaaaagaaaagtgaaatttctaaatgaaaaatgcttgactatatttgtcttgtgggaattatcgtcaataataagaagctttttgagtgcttattatgttccaggcttatacataattactcatttagtgcacacaaccactatcttaagctgtctatttttatcatcattttacggattgagaaaataggggctgggcacggtggctcatgcctgtaatcccagtgctttgggaggctacttgagctcgggagttccagaccaccctgggcagcgtggcaatagcccttctct

SEQ ID NO: 105951 - DNA, 392 bp, Homo sapiens
  misc_feature (1)...(392): n = a,t,c or g
ataacaattaaaacagctaatatttattgagtgttgactacaggcaagccactgtagcattttatacacattatcacatttaattttcataagaacctaagataggtaccattataacccctatgttatagaagagaaagctgagacacaaagcagtaaagcaatttgccgaaaggcacatggccaataaaaaacagcagaatgtgaatctaggtagactatcttaaaagactgcacatttaaaatgatttgtttaagccaggcccagtggcatatacctgtagtcccagctacttgggaggctgagtcaagaggactgcttgagcctangagttcaaggacagcctangcaacataatgagaccccatccctganaaactttttttanaaa

SEQ ID NO: 105952 - DNA, 391 bp, Homo sapiens
gacaaactctcatgtggacaactctatcacccagaagccagagttttgtattcctcgatgctgtggttatatagtttgccaattgcaacttgtggagagggcttttatttttaatttcttttttttttttttaaaacggagttttgttttgttgcccaggctggagggcaggggggcaatttttcgggttacccaggagggttccaacctcctgactttgggaccggcccccctcggcctcccaaagggttggaattacaggggggaccacccgggcccggcctatttttattttttaatggggaaaaggcttttacaaattcagggggggcgggggctaaaaaggaacttgctgtgaaactttctctggggctcccaggagcaaggaatc

SEQ ID NO: 105953 - DNA, 409 bp, Homo sapiens
ccaggccaagatcatgccactgcactgcagtttgggcgacatagcaagactctgattcaaaaaaaaaaaaaaaaaaaaaaaggggggggtttttttaaaaaaatttctttttaaaaccggccccccacccaaacaatttttttttgggggaattttttttttttttccaaaccgcttttttaaaaaaaagggccagaaaaagcccctaaatcccaaggattgtcctcgggggaaaaattttcaaaacttgaccccccccagtttaggccccggcgggggggcctttttaaaaccccttcccaaagtattcacaaaaaaggaaatttggcttttggcttttcttcccctaaaacaaccaaagcctttttcccggccttttaaagggggaaaaaaccggagggaaaccctt

SEQ ID NO: 105954 - DNA, 362 bp, Homo sapiens
tgctcccaggtacttgggaggctgaggtgggagaattgcttgagcctgagaggttgaggctgcaatgaaccttgatggcaccactgcacttcagcccaggtgacagaaactctgtctcaacaaagaaaagaaaacaaaacaaaatcttcgaaatagcactagtggatttgggcgttacatggtgtcttaggatacctttagctgactcagctggcttaaacaatagggaactatattagctcactttacaagtcagattaggccggcaggagggttgattctgtttcaagaactagggatttttctctttactctgccatcctcatagtctgttttatcctaaagtattatggtcacatggc

SEQ ID NO: 105955 - DNA, 442 bp, Homo sapiens
  misc_feature (1)...(442): n = a,t,c or g
aacaggtgaactatgccatccgtcncgncnnnnncnntnnnnnnnnnnggnccgacccacgtgtncggtttagtatcacangnncacaccgcttatcctttaccttcgggagtgactaaagagggagttagatgtattcggtaccctgagtaacacctcccaacccccaaatatcactttccttcctgcacacatacatgaactcttttgtttattttatatttgatttacattggtagggattttttcattctaacctatactggggacccattcacttcctcttcctccagcattatcggtcacttatttactccctcaccattaaagaattgttgagggctgtttgtttgtttttttgtttggtttttggagacggagtcttgttctgtcacccaggctggtgtgcactggtgtgatctcagctcactgcaaccatcat

SEQ ID NO: 105956 - DNA, 467 bp, Homo sapiens
  misc_feature (1)...(467): n = a,t,c or g
tggagtcacggattgaaaccctttgagacctataggcagngcggtggaattcacggtggctcctgtaatcccagcactttgggaggccaaggcgggtggatcgcttgagcctggggtttcagaccagcctgggcaacaaggtaagactccagctctaacaaaaaaaaaaacagaaaaaaaaaaaaaaaaaaactcgccgccctcttacaaaaaagggccccgaaaaaccccctgaataacccccggggtgacttttaagggcacccccttggggggggggaactcccccgggcttttttaggacggggaggggcgcccccccaatcttctttttaaaaaaaaaaaaaaaaaccccaccattttttacgaagggggccactattatgtggcgcagaacaaccaccacacatacatttttcaacaatctcattaggacaagaaacatactgagaaactgacgaagcttg

SEQ ID NO: 105957 - DNA, 468 bp, Homo sapiens
  misc_feature (1)...(468): n = a,t,c or g
ggagcgtgcggcaactaaacccctanatactngaaagcccggaanctacccggacttgatgtagctcatgtgtcagttccaaacctcagtctccccacctgaagaagcagggtgacaggatgggtgcccacctgatctcaggtggctgcaccgaggctacagcaggaaaaggcatgagaaagtgccttgtcgcctggtccacctgtgcaggggcacgtcctccaagcaggaacagagggagccagggccacagcgccaggttccaggggccccgcctcccgacagtggtcaggctgccccccccccccccccaagccaaacccttttgtaaaaaatggatgctggggggcccaatttccattgagcccaaaccacagcacccccctgggccggggaaaaaaaaatgggccggaaaggctgccccaaggctggtccccacttaacccttaagaaggggccaaggggccn

SEQ ID NO: 105958 - DNA, 379 bp, Homo sapiens
  misc_feature (1)...(379): n = a,t,c or g
ngtgtggnnaaactgaancctggtacctcacggaagngccgnggaattcgaacagcattcaaaattccccgtcctgtcagngnnnnccttcgcacccctgcttctctccgaggaggttgagctcttgagcaagttgggacttgggccggggcctggaagaatgattggctgggaggccgcgggagggaggccaggaggcccggaccagttgggaggagtgagcaggccccgggggagggggatgagcgcagtttgctcgctttcctcccctgccggccccctccgcccccacacacactcgggacgtcttcattgaagattcacttacaaaggaatgtttcactaaataaaagaaaaccagaaaaaaaaaaaaaaaaaa

SEQ ID NO: 105959 - DNA, 421 bp, Homo sapiens
aagtggtcacgtgagcatttaaatgtttttaagcctcagcctactccaggcccttagcgtgttttgtactgcgttttcctggtctttcccagtgtttattagatgtctatagtgtccagacaatgttaggcagacgggacacaagggtgcacaaacaaacagtctgtgcccttattggaacctgttaatccctaaagggctaagcctccctgcagcaagaaccctgttagtcacctgtgtatccccagcatctagactctccacgggcatggcactatgctgtaaaaaaaataatccctgaccctcacggctatgggaaagcatgccttttaaagcataatccggctgggtgcggtggctcacgcctgtaaccccagcactttgggaggctgaggcaggtggatcacctgaggtcgggagg

SEQ ID NO: 105960 - DNA, 393 bp, Homo sapiens
ctggcacaccctgggaccaccactgcctgttcccaagtcacacacgcatacccctgccccggctcacatgcaggacagctcattctctacgagccagctgcctctgcaagcgccccacactcctgcggtctctcagtctgtcctcattttttttacggctgtcactggtgctcccccctgataagctgtgggctcatggtgctcacagtgatgactgcaaggttctctgcctccatccagaggcttccctactcttcaaagccagattcattctcctaaaataccatcgatcattatgttactcagtggctcacgcctgtaatccgaacactttgggaggccgaggcaggcagatcacctgaggtcaggagttcgagatcagcctggccaaca

SEQ ID NO: 105961 - DNA, 399 bp, Homo sapiens
cttcgaactgtaaagacaatcttcacatgtcaatattgcctgagcccacctaggggatagaagagtcctaggcagcagaagacctggattctggtcctaaaattctgccactgcatagctttgtaaccttgggcaattcactttcccaccttggccctcagttttgccatctgtaaaataacaataatgtctgacttcctttccagatccatgaagcaagtgggtgagaagatttgaaggtgccagaaacctcacccaggtccctaaaccctctgttctctgtcctctgcagagagcatcatccacagttacccggagtttagctgtaaggacaattatctcatgacccacaatgaagcgtataaggcttgcatgcggagggcatttcacattccgctg

SEQ ID NO: 105962 - DNA, 468 bp, Homo sapiens
  misc_feature (1)...(468): n = a,t,c or g
gcgccccatganatcgtatgacattagtcagtgcggtggaattcggcttgagccactgcacccagccctggctagaatcttaaaaaataaccacactggcatttcattaaaaaattctttacatatggcatcttaatcagtccaccaatcaggtaaagaagtaattcatatttactggtagggaaacaggactaaagtcctattctgagaggcagtccctgatgagaccagtcatccaagcccagcagattccttttctacttccagtaatttggcttgtggaactcatcatttacgtagattactaaagttgtacgtggaggaggagttagaatactaccctagaaaaatacaatgttttcacttttcttttttcttttttgagagccggagtctccttctgttgcccaggctggagtgcagtggctcaatatcggctcactgcaacctctgcctcctagggtcaag

SEQ ID NO: 105963 - DNA, 488 bp, Homo sapiens
  misc_feature (1)...(488): n = a,t,c or g
gatgggttnnnnnnattgagncccttttcgagaccactgtccgtgtggtggaattcanaacctccaaatacctttattggtttttaaaatttcaaatgctatgtaatatttctgataaaatttcagatgtaatcggagtggtcatcatgagtggccagaagctcctgaagtcctaagtgacctagagatgggccctgttgaccccgcagcatctgctaagcgtgtggcttttgtgcagctccctggagagctggagtgcagtagccacagcccccacaccagcagcaggaactgaagagtggctttctcgaaacacaaccatgttgcctttcacttaatttgtttgatccaaataattattttctcgggagaatttataaacgataacttgtctctttcaaaagtgtcagaggggccgggcacggtggctgacgcctgtaattccagcactttgggaggccgaggcaggcggatcacaaggtcaggag

SEQ ID NO: 105964 - DNA, 395 bp, Homo sapiens
gctgtgaagacagaaagggatggccccggttctaccagggccccattccagtgaatgaaggcaaagagcctgcctgagcaaggagtcactgcagtactggagagtcccagaagggggcagtcttgtctcagcaccccccgacatggattcaggtgcagccatccaagccaatttgctttggaaaagtttatgtgactgtttacagatttaacttatttttattagccactgtaccatggtacacaaagtaattacaaactcaagattaaaattaaggccatgttgtaaaaactaaaaaattaaagctaatttttgttttttttgagatggagtcttgctctgtcgcccaggctggagtgcaatggcacgatctcggctcactgcaacctccacct

SEQ ID NO: 105965 - DNA, 472 bp, Homo sapiens
  misc_feature (1)...(472): n = a,t,c or g
ngtggtnnnnnaatcgagaccatagataaccgcggnggaangcggagggacgaggaggaaagctgggcatggtgatgtgtgcctgtagtcccagatactcatgannnnnnnnccaccctgggcaacataatgatatgccgtctctaaaataaataaacaatgaagaaggcagtgtgaacgaccaactgtgtcaaacaccgctgagaggtcatgtaagacaaggactaagaatggaccattggatttttttgtggggtaaaatatacacaaaacttaccatttagccatttttaggtgtacagttcagtagcattaaatacattcacactgttgtgcaaccatcaccaccaaccatctccagaagttctcacctttcccaataaaaagtgcagaggcgcaatcttggctcactgcaacctccacctcctgggttcaagcgattctcccacctcagcctcacgagtggctgggn

SEQ ID NO: 105966 - DNA, 512 bp, Homo sapiens
  misc_feature (1)...(512): n = a,t,c or g
tgggcggnnaagggaaaacccttgaantttcgttncacctattccgagnggaggaattctcgtgatctgccctcctcggcctcccaaagtgctgggattacaggcgtgagccactgcgcccggtcaccaagtcattacatttttaaccaagttggttggcctgtatgttcttcttatctgtgtaacaggcatttttcctaaggatattgagtgtgcttacacataaaacttaaagtgaaatttcattgtttcttgatagatttaagacagggcttagtagctttcaaaagaaaacttgatttaaagcatagtagttgaactggatttttcctgactgtgggaataaatagatattttatttacatttgaatacagtgcaataccttgtgtttgggtagtacgtatttacaaagcatttttacatctactcacatacttaatcttcacaatgcccttgaaaagaaagtaggacccattttacagttaaggaagctgaggctcaaagagggttn

SEQ ID NO: 105967 - DNA, 511 bp, Homo sapiens
  misc_feature (1)...(511): n = a,t,c or g
tggccggnanannnaaaacttgaagngctttcgagantcntannnagngnggnggaattctgtctttgaagctgggatgcatcttacaattcatagcatgtcacactttaattggcagcatgtttctcttgtggtacataaaattatggcagacttacagtcataagcaccttagattctttgaagtacagttgtcttctgttgtggtgttcatttactttcaggccagggcacattgacacagaaattccacacttccttaggaggcattccttttcatttcaacgaaaacttcagacaactgacggggttttgcagatattgagtagaggaggtgcagcaggtaaaaacgattccagaaaaccagggcaagaggggcatgcaggcctgctgtagtgcaaaggactttgtgatgagcacacaggtctttttttgagatggagtcttgctctgtcactcaggctggagtgcagtggcgccgtcttggctcactgcaaccttcaccccccgg

SEQ ID NO: 105968 - DNA, 407 bp, Homo sapiens
  misc_feature (1)...(407): n = a,t,c or g
gccaagtggcaggttggggaggatggctgcaaagaagtatgaggaaactttctccaatagatgagaattttccgtatcttgatctgagtggcaaattgtaaacttaaaatatatataaaatttattgtatgaaaattaagcctcaataaacgtgattataaaaaacaagtctgcaaggaaaccaaaaaaaaaaaaaaaaaaaaaaaaaaaaaaaaaaaaaaaaaaaaaaaaaaanngggggncnaaaaaaaaaaannnggggggggnccccgaggaccccaanccccccccctttttttagggaacaaataatttttttttgggggccccttttaaaaaccggggggggggggaaacccccgccgnnaccccaatattcctggttggnnnaactctttttngnnttc

SEQ ID NO: 105969 - DNA, 405 bp, Homo sapiens
  misc_feature (1)...(405): n = a,t,c or g
cttacttctgaggtttagtcaagagtttgtacagctctaaatccttggatagaaggttttaataaaaatgccaacttttaattaaaaatctctctcttgattcagttatcttgcccaaacttggaaactcttcttactactgtatataataattcctgttaaccagatgttgtttgatagctcagtaataacaaatggagggtacttgtcctaacctgatttacattctttccttttgatgtgtagcatatgtggagcagtcagctaaataaaggtcttatcaataagaaaaaaaaaaaaaaaaaaaaaaaaaaaaaaaaaaaaaaaaaaaaaaaaaaaaaggggnnnnnnnaaaggggcgggggnnnggnnaggggggggggaaaaaaaaagatttttttttta

SEQ ID NO: 105970 - DNA, 388 bp, Homo sapiens
aattgttttagtcaatgaattaactctttttgtttgttttttgagacatagttttgctcttgtttcccaggttgcagtgagccaagatcgaaccactgcactctagtctgggtgacagaggagcaagactctgtctcaaaaaaaaaaaaattttataatttttatggaaataataaaaaactacccttagcttacgggaaattttctagtttagaaacttatttaaaaacaatttttggacttttttagtaataacgtagctaaaaacacaccttgcatagctgtacaaaaagattttccttatatccttattaaaaaagcttttatctatttaaatttggaatttttaaactttttggtcaaaaaccaggacaaaccctctagcctg

SEQ ID NO: 105971 - DNA, 398 bp, Homo sapiens
cgggaggttgaggcaagagaatcgtttgagcttgggaggtggaggttgcagtgaggtgagatcgtgccactgcactccagcctggcaacagagtgaggctctgtctcaaaaaaaaaaaaaaaaaaaaaaatttgccttttttttgaaattggtttgcccccaggaggaaaagtttttataaagttgaggccccctttgaatcccaccttgagaaaaaaaacaaatttttttttaaaaaaaaaaaaaagggggggcccttttaaaaaaacaattttttacccccggggggtggaaagttttttttttttttttgggcccctttatttttttttgggggccggttttttaaaaggggggggggggaaaaaccggggggtcccccattttattcgttgggg

SEQ ID NO: 105972 - DNA, 379 bp, Homo sapiens
cccacgcgtccgcttcaagattttttctctttttgtgtttagctgttaggttatgatgaatccaggagtttatcatggatttgtttgtgtttatcctgtttggggcaattactgagcttcttgaatctgttggtttatgtcttttgtcaaacttgtgaagtttgcttccattatttctttcagtatttcagtacactctttctcctcaccttctgggactctaatgtcctgaatattagacattttggtattgttcctcaggtccttgatgatctggtttttttttcccccaataaggaaatttttttaggccagttgcagtggctcatgcctgtaatcccagcattttgggagcccgaggcgggcagatcacccgagg

SEQ ID NO: 105973 - DNA, 390 bp, Homo sapiens
cggacgcgtggggtcgcttgagcctggaggttgaggctgcggtgaaccatgatcgccccactgcattctggcctgggcaacagagcgggaccttgtctcaaaaaaaaaaaaaaaaaaaaaaaaaaaaggggggggggggaaaaaaaaaaaggggtttttttttttgggggggggggggaaaaaatttttaaaaaagggggggaaaaaaaaaaaggggggggttcttaaaaaaaaaggggggaaaaaaaaaacttttttcaaaaaaaaaaaggggcttagcccaaaaaaaaaaaagggccccttttaaaaaaaaaaaaaaaaaagccccaattccccccccatttttttgaaaagggggggaccccccccccgggggggaaaaggccttcc

SEQ ID NO: 105974 - DNA, 432 bp, Homo sapiens
cttgtacctgagaggcggaggttgcagtgagctgagattgcaccactgcactctagcctgggtgacagagcaaggcgtggtctcaaaatagaaaaaacaaaataactgaaaaggggggggggcccttaatggttctttttttcaaaatttttccccacccatgggggataaaaaagattggggcccgggttaaaaatttttaaaaattggaaccaaattgaaccccccaaaataaaacccccccaatttggccaactgttttttgaaaaaaaaccccaaatctttccgggggggaaaaattttttttttaaaaaatttttgtggaaaaaaaaaataattttttgccaaggaatgaaggggaacccttaccttccccccgttccaaaatttacctaaaagaatccaatctttcccttttaggggaaactttta

SEQ ID NO: 105975 - DNA, 418 bp, Homo sapiens
  misc_feature (1)...(418): n = a,t,c or g
gtggcttgtaaggaacccaagaaaaagtgatgccgcctggcagactcgccatcccccaacgacacagggcaggacagcagaggacgtgctgggattaaacacattccccctctaaaaaaaaaaaaaaaaaaaaaaaaaaaaaaaaaaaaaaaaaaaaaaaaaaaaaaaaaaaaaaaaaaaaaaaaaaaaaannnggggggggggcctataaaaaaaaaaaattatttgggggggggggggaaaaaaaatttttttttttgagggggccaaaaaaaaaaaaccgggggggggtctgaaaacacctcagggtgaaaaaaacgccccctcaaccaaaatataaatgctgtgggggagacnnanagttacttttccctgtgatttaaaaaaaaaaaaaaaagggcggccgttttaaagaact

SEQ ID NO: 105976 - DNA, 413 bp, Homo sapiens
  misc_feature (1)...(413): n = a,t,c or g
cggacgcgtggggaaaattgttagtcaacctaatcaggtaaacctggaagaaattactagatgtttggcaggggattcagaaactcaattttggacgggttaacgatgcctatcaggttaaaattggagctgtcaactagacatgaggcagtagtgtagagagaggtctggtttgggagacaaacacttgatagtcatcagtgtactatatagattgaaagtcatgagactatatgagatcaccaaagaaatccaggaagataaaaagatggtgaggtacaagagcttagcttagctctgagatgcttttgttttgttttgtttattttttgagatggagtttcacttttgttgcccaggctggagttcagtggtgcgatctcggcttactgcaacctcctcttcccgggttn

SEQ ID NO: 105977 - DNA, 409 bp, Homo sapiens
cgcttgaacccaggaggcggaggttgcagtgagctgagatcacaccattacactccagcctgggcaacaagcgtgaaactccatctaggaggaaaaaaaaaaaaatactactcctccaaaaaagggggtttaaacgcggaattttttttccccacgggggggtaggctggaagcccaaaaaaaaggggcctttgggggggggtcccaaaaaaacctccttttgggggttgaaaaaaagggcctttttaatgaaaccccccccggccttcctttttttggggcaaaaaaaaaggaaggggcaaggggtcatttaaaaaaagggccccccccccccccaccaaagggtgttaaaaaagtcggggatgcttttaacaatttaaagaaaaccatagggggggggggggggccc

SEQ ID NO: 105978 - DNA, 404 bp, Homo sapiens
cttgtagtgagccaaggtcgtgccactgtgctccagcctggacgacagagcgagactctgtctcaaaaaaaaaaaaaaaaaaaaaaagggggccccccctttgggggtttcttttttaaaaaccccggaaaaaaaaaaaaaattttttttggtggggggacaaaaaaatattttttggggggggtttgaaaaaaaaaattttttgaaaccccggggggggggcccaaataaaaaacaaaccccccccctgccttttccgggggggaaaaaaagaaaatttttcctaaaaaaaaaaaaaaaaaaaaaggggggggactcccccccgggtgtttttttttccccccgaaaaaaaaaatttgaaaattctggggcccaaaaaaaaattcttttgggttggaaaaaac

SEQ ID NO: 105979 - DNA, 392 bp, Homo sapiens
cataatcacaccactgcactccaggctaggtgacagagagagacctagtctttaaaaaaaaaaaaaaaaatcaaaaaaatttaaaaggcgtgaccccccatgctcagctgacataatcttttttaaaaaaacctaaagactctaccaaaaacctgttaaaactgataaatgaattcagtaaaggttcaggacccaaaatcaccatacaaaaatcagttgcatttatataccccaacggggaacattctgaaaaaaaaatcagggaagtaatcacttttacaatagctgcaaaaactataaaatgccccccccaggcatgatgactcacaattgtaatcccaaaattttgggaggctgagggggaaggattgcttaaccccaacagttcaaag

SEQ ID NO: 105980 - DNA, 397 bp, Homo sapiens
acctgccttggcttcccaaagtgctgggattacaggcgtgagccaccgggcccagccaagagttcttaattttaacgaagtccaactttttgattatttctttcattgattgtacctttaaaaagccatctccaaacccagggtcatctagattgtcttctgtgttattgtcttaagagttttatagttttaccttttacatttgggtctttaatgttattttttgtgaagagtttaaggtctgtgtctagactgatgttttttgcttgtggatgtcaaattgttctagcacttttttttttttttttttttggaaaaaggggcccattttttttccccagtgggaagaaaggggggggaatttgggtaaattggaccccccactttcggggaaaag

SEQ ID NO: 105981 - DNA, 1204 bp, Homo sapiens
agcggggccggggctgcggggcgagttgtcggccctgggccgggagctggagtcccagactcataggtcccggcccagcccccgaagagccgcctcagccggggggagttgctcggactcaaacgtccagtcctcgtgcgaccgcgctgggtcggaagtgagcaggctgaggccaccatggagcagtgtgcgtgcgtggagagagagctggacaaggtcctgcagaagttcctgacctacgggcagcactgtgagcggagcctggaggagctgctgcactacgtgggccagctgcgggctgagctggccagcgcagccctccaggggacccctctctcagccaccctctctctggtgatgtcacagtgctgccggaagatcaaagatacggtgcagaaactggcttcggaccataaggacattcacagcagtgtatcccgagtgggcaaagccattgacaggaacttcgactctgagatctgtggtgttgtgtcagatgcggtgtgggacgcgcgggaacagcagcagcagatcctgcagatggccatcgtggaacacctgtatcagcagggcatgctcagcgtggccgaggagctgtgccaggaatcaacgctgaatgtggacttggatttcaagcagcctttcctagagttgaatcgaatcctggaagccctgcacgaacaagacctgggtcctgcgttggaatgggccgtctcccacaggcagcgcctgctggaactcaacagctccctggagttcaagctgcaccgactgcacttcatccgcctcttggcaggaggccccgcgaagcagctggaggccctcagctatgctcggcacttccagccctttgctcggctgcaccagcgggagatccaggtgatgatgggcagcctggtgtacctgcggctgggcttggagaagtcaccctactgccacctgctggacagcagccactgggcagagatctgtgagacctttacccgggacgcctgttccctgctggggctttctgtggagtccccccttagcgtcagctttgcctctggctgtgtggcgctgcctgtgttgatgaacatcaaggctgtgattgagcagcggcagtgcactggggtctggaatcacaaggacgagttaccgattgagattgaactaggcatgaagtgctggtaccactccgtgttcgcttgccccatcctgtatt

SEQ ID NO: 105982 - DNA, 395 bp, Homo sapiens
cggacgcgtgggccgagagaaatataaaggaccttctacatgttcatcaggtgacatcattacctgggagtggaaccccatttgcttttgaacttttgatccctttggtcctcttccacaccataaattcctgggagtcagggattctgtcttataaaacagtcagcactccatttattgaataaaagctctttttcttttctctcttttattgagacgcagtctttgtctgtcacccaggctggagtgcagtggtgctatctcagctcactgcaacctccgcctcccagattcaagctgaggcagaagaatcgcttgaactcgggaggcagaggttgcaataagctgagagctcatcactacactccaggctgggtgacagagcgagactccat

SEQ ID NO: 105983 - DNA, 413 bp, Homo sapiens
gattacctaattttcatttcttatttttttacacatttgtttattcaacaaacatttttgcttactacctctacagtagaatacagtaaatggacacgaagcaaatacctagtgctgcagatagctagtgccagggtgtgtgttggatgctagaagagtaagataattaaagtagaagagattgctttgtgaaaagaccattgcaggacagtgtgatgagaactgtaagatttaggtacagtagtgcttagtttttttgtttttgttttgttttgctttgttttttcgagatggagtcttgctctgttgcccaggctggactgcagtggcctggtcttggctcactgagacagggtttcgccatgttggccaggctggtctcgagctcctgacgtcatgatctacctgccttg

SEQ ID NO: 105984 - DNA, 372 bp, Homo sapiens
aactcctgacctcaggtgatccacctgccttggcctcccaaagtgctggaattacaggcatgagccactgcgcccagccaaggtgacactttagaacgctagttgggcatcttctcgctttgctgggtctccaattaaaacctgctttttcctcccaccaatcttgactgcaccactgcactccagccctggcgacagagtgagactttgtctctaaacagttaatttcaactgtttcttttgactttttcagtatgactagtcgaaatgtttaaatgacttgcatggctcacgttggtggcttgcatgatttttctgcgggacagtgctgtctctgtgatcacagtctgcccctaccagctgctgcagcag

SEQ ID NO: 105985 - DNA, 400 bp, Homo sapiens
aatcctcctgcctcagcctcccaaaatgctgggattacaggtgtgaaccagcatgcccagccctttaatggtcttattcttaaaccccttattttcacattatttcctcaaaccaaagctctgagtttcttttcatgctcttttctcccccattcctgtctgcccaccttcagtacagtttcctccagggtatctttttgagcgtgtctttcagccattaagtgttcagtcgtgccttcttcctaagattgtgcctcctaacctgctgctacttaagagtttttctaggagcatttgtcttttgcacacacattcctagacagcaaagactgtcttcgatttaatgagcttagtcattattagaacttggccggtattagtgagtcattttcatatggtg

SEQ ID NO: 105986 - DNA, 379 bp, Homo sapiens
tagaattgcttgaaccagggaggcagaggttgtggtgagccgagatcgtgccattgcactctagcctgggggatgcagctctctctgtgggcttctcttggtgcacggttctgcctctggacactcaaacctttttagggcgtgtgcagggctggggccagtggacctgacagtaccttacctggctctgagaaactcgcaatcctagtttgcacaaatgaatagtttgctcttttgtgaaaccagaatgagaattcaggttctaaggactagaggtctccctacaaatgaagacttatctcagggccctagaaagcgctacgaggaagaggttaaaaaaaaaatttggacgcgttgcgaactattataaatgattggc

SEQ ID NO: 105987 - DNA, 387 bp, Homo sapiens
ttttcatccagttacaatttcacagcttttctatgttgtcaattctgatagccactttacttgttttgagggcccaatttatccacagagccattgtaacttttacaacttaggaattactaaccaagactgtcattaattaaacactttcacactttgctcctccttctacatgtactttaccctcaactctcaagagtaagagtctttgcttctccatgacatcatttatccagggagatgaaatatgccaattaataccagcaggaatctttttcatgcttatttatttttatttttttattttttattttttatgacacggagtctcgctctgtcgcccaggctggaatgcagtggcacgatcttggctccctgaaacctccg

SEQ ID NO: 105988 - DNA, 382 bp, Homo sapiens
gaggcggagcttgcagtgagtcgagatcgcgccactgcactccagcctgggcgacggagcgagactccgtctcataaaaaaaaaaaaaaaaaaaacgccccttttaaaaaaaaaaaaacaacccccttttgggaaaatccaaaagggctttttaaaacctttgggggtttttgggcttggggattttgggggggggggcccccttttccctttttaaaaaaaaaaactttaaaatattttttaaaaaaggggttttttttttttgccccggggaaggttttccccaatatttatttgtccccccccccccgggggggaaaaaacccccccggcctaaccctaaaagggggggggggtaaaggccacttcctttaggcccggg

SEQ ID NO: 105989 - DNA, 416 bp, Homo sapiens
agaattctaaagaaaatgctttggtttctgctgtctcaaataagtggcatttaaaaacaattattaataaatatttttaatggttttaactcagtatttttttttatttctttgtcactctttacagcttttgaagaccaaactgcaaatacattaccagggatggttttgtgttgtcctatagacttcttaaatttgacaaaaaatttagcagaacttgtaaccaacagctttgtctgaacttgaagtcaaaatgtgttgttaataagagattctaactattgcttttaccttcagggtgaactagtgtggtaacaactttgaaaaggcaggccgggtgcggtggctcacgcctgtaatcccagcactttgggaggccaaggcgggtggatcacttgaggtcagaagtttgagac

SEQ ID NO: 105990 - DNA, 386 bp, Homo sapiens
  misc_feature (1)...(386): n = a,t,c or g
cttgaactcctgggctcaaataattttcccaccttggcctcctgtagtgctgggattacgggcataagccactgtgtcaggccccatgtatgttaatagtgaatgtttggcttttcatttgttactttcagctattaaaggatacctattacagacacaggaatttacattttcaaagtcatttttgacacatcagtgctgcatctacttttctccttttagcacatttgatattgatacttcagagaaacttttttaactacccttaaaatcttgtcaatgaccattaactgccaatcatcacctcatttgctttttttgacaacatactactagaaacctaggctgtgagtgtaaaaccataactgttagaatcatttttttgn

SEQ ID NO: 105991 - DNA, 388 bp, Homo sapiens
catcacaggaaatgtaacacaaacagcttaatatttggttttatggaggtgatttagggagcaataggaagtaatttattgataataaaaaagccgttaattttataattgtaaagaatgttaaggaatttgtggtcttcctgagtaaattacatctacttaattaaattcatcttttattcccacatttgtgtattaaagagcatagcaagctccactttggaaatggtggctgctaaaaaatgcttctccttctgtccttgagggctatcctggcttttcaggaggcctggacatttattttattttattttttttgagaccatgtctgtctccatcacccaggctggagtggggtgctgtgatcttggctcactgcagcctccac

SEQ ID NO: 105992 - DNA, 366 bp, Homo sapiens
  misc_feature (1)...(366): n = a,t,c or g
tgatcccggttcactgcagcctctacctcctgtgttcaagcaatcctcccacctcagcctcctgagtagctgagaccacagagaacatgtgcccatgtctggagagttttggttgttgcagctggaggaggtggtgctactggcatctaatgggtagaggccacggatgctgctaaacatcctacaatgccccggacaacaagacaaagtaatgatccagccccaaatgtcaatagtgctgaaagtgagagaccctgattccatcttagagcttagagatcatccaagcacatttggccaaattgtttttgctactgtcccatgaagaaaagacagactcatgactgatggcaacatcgatgggan

SEQ ID NO: 105993 - DNA, 467 bp, Homo sapiens
  misc_feature (1)...(467): n = a,t,c or g
natagaacccctcgaagcgctccggnnggnnnccggcccccacgcgtccgaaaaaagaagaagtctctagaactaagtagtctgtaacagtcccataacctttaatactcaaaacttatgtttggtgactgttatagcttttgcaaacttaaaatcctttgaaagcagaaactaagtcacaaaagctctttaaagcttgtagtgagccgagatcgcgccagtgtactccagcctgggcgacagagtgagactctgtctcaaaaaaaaaaaaaaaaaaaaaaaaaaagggggggggcctttttaaaaaaacaaatttttcgccccgggggggggaaaaaaaatttttttttaaggggcccccaaaattaaatcccgggggcgggttttaaaaacgggggggagggaaaaacccgggggccccccaatttaatccccgtgggggggnnnngggggggcttcatccacta

SEQ ID NO: 105994 - DNA, 464 bp, Homo sapiens
  misc_feature (1)...(464): n = a,t,c or g
gtgcgtgnccaacctgatagacctcgacgacctaccagnnccgaattnccgggtaggcccacgcgtgcgcccacgcgtccgccccagttcttggtaagcaccattctactttctgtctctatgaatttgggtactttagggaccttggatgaatagtcatacagtatttgtcctttgtgactgactcatttcacttaacagaatggcaacgctcgtccatattggagcatgtttcagaattttctgacttttaaaggctaaataatattccattggttggcctgcattttggttattcattcatcttttgatggacatgggttatttctgcctttggctgttgcagatagtgctgctgtgaaacattcgtgtacaagtatttgtttgaatattgagtatattcctgggaatggaattgctgggtcatgtggcatttctgtgcttaactttttgaggaactgccn

SEQ ID NO: 105995 - DNA, 492 bp, Homo sapiens
  misc_feature (1)...(492): n = a,t,c or g
tgtgcccnncncnngcgcccaatagatgntcgttcgnatagaacacccgtnccggaannccagggncgacgcacgcgtccgattatttaacaattcttttgcccaggctggtcttgaactcctgagctcctgtgatctgcctgcctcagcctcccacagtgctgggattacaggcatgagccaccatgcctggccaaaacatttttaaaaaaatgatttcctttcctttcctgtatccacacccttatgaaatcccctctcatgtggactttgagcttggccatatgacatactttggccagtgagactactgcaaacatgatggaagcggatacttaaaaagtacttgcacactgggacttgccttctcttgctactcttaagccctttctgactaccatgtgaagaggcctggtgcatatactaagtgagaagatacatgtgacctatgcacctttgtcatcaagccaacagctaacactgggaggtagc

SEQ ID NO: 105996 - DNA, 374 bp, Homo sapiens
agaggttgcagtgagccaaaatcatgccactgcacttcagcctgggctacagagcaagagtcaatctctgtaaaaataaaataaaataaaataaggaaaaatgttgaaaatagttggatacatggcctttgtattcaaaaaagtgataagaaccttttactaatttttttccttaagcatcatttataagtttgccattgtgtattcactattctgaaacaaatataaaattacaaattgacaaaaggattttaccaagagggaatgagaaggatatatatatatatatatccataaggaaaatagtcaaaatatccaataattttttcctctcagaaacatatatattattttgcagaagcatgcaacagtta

SEQ ID NO: 105997 - DNA, 404 bp, Homo sapiens
  misc_feature (1)...(404): n = a,t,c or g
cggacgcgtgggggccaacacggcgaaaccccatctctactactttaacacagttcttgaagtttttatgtattccttccaggatcttattttgaaaatttttttcattgtgaaatatcacacacagacagaagtaatgcatgaacatacatgtacagcttaataaattattataaggcaaacagtcacgtgaccaaggtcaataaacacaatactgctaggttccttgagagccttctgtgtgctcatcctaaccctccaataaagctaatcatctctttgcttttatgngaaaaaaaaaaaaaaaaaaaaaaaaaaaaaaaaaaaaaaaaaaaaaaaaaaaaaaaaaaanaaaaaagggggggggctttaaaaaaaaaacaatttttaccccgggggggggg

SEQ ID NO: 105998 - DNA, 416 bp, Homo sapiens
  misc_feature (1)...(416): n = a,t,c or g
agaaagctgtgaacaggctgggctgctggagggggggcgaggcangccgactgtactaaagtaacgcaataaacgcattatcagccaaagctggaatggccccagcagaaaaccccagtcctcggccttgctatgtggtcttgggcaccttactagcggtgtcagggcccgagtttctcctgtccaaggttgcctggtgaggattaaaggtggttccggcccccnnaaannaaaaaaaaaaaaaaaaaaaaaaaaaaaaaaaaaaaaaaaaaaaaaaaaaaaannnnnnaaaaaaaaaaaaannnaaaaggggggggccctaaaaaaaaaaaacaaatccccccggggggggggccaaattttttttttttttgggggcgaaaaaaaaaaatagggggggggggtttaaaaaaaag

SEQ ID NO: 105999 - DNA, 405 bp, Homo sapiens
  misc_feature (1)...(405): n = a,t,c or g
cgtgaagaagggtttacttcagtggtgtgctagagccagcttgcaccagctcacaagaaccaactgggcacatctccccacagtccggcattcactgactccagtttggtagtttattgttgaccatggtgggagtttttacaccatagaaattgtcagatgtggccgggcacggtggctcacacttgcaatcccggcactttgggaaaaaaaaaaaaaaaaaaaaaaaaaaaaaaaaaaaaaaaaaaaaaaaaaaaaaaaaaannnnnnnnnnnnnnnnnnnnggggggggggggaaaaaaaaaaaaannnnnnnnnggggggaaaaaaaaaaaaaaattttttttttgggggggataattaaaaaagggggggggggaaaaaaagggggggaggagaaaattt

SEQ ID NO: 106000 - DNA, 424 bp, Homo sapiens
  misc_feature (1)...(424): n = a,t,c or g
cagagagctgggattgcaccactgcactccagcctgggcaacagagtcagactctgtctcaaaaaaaaaaaccaaaaaacaaaacaaaacaaaacaaaacctgagctgcaggaggtcagggcccacacctaccatgtccataatagttaatccagcaccggttcagggcctcacacacgggggcctcagcaggactccaggctttggggtcaaaaggaacaaatggattgggtcctgctgcaacagggactttgggcgcagggctgactgtttcaacctcagttttcatatttataaaggggagataataataatatctcactatggagttgttgcgggaagttaatgaaattagtaaacaccaaacaggggctcagtaagtgttaaatgttggaggaaagcatgaaagacacttcgacaaaan

SEQ ID NO: 106001 - DNA, 421 bp, Homo sapiens
ctcggtttcaccgtcttggctaggccggtcttgtacacctgacctcgggtgatccacccgccttggcctcccaaagtgctgggattacaggcgtgagccaccatgcctggtcaagaaagacacattgactgcttctaaaggctctttgtctagtcccagacctctctcccaagcggcatatgtgttattccaataatctgctgtgcataccagtgtggtcatcactcttcttcaacccaaacctgccttctgttcctgtcttagtgtggtgggtgttgctagaacagaatacctgaggctgggtaatttacaaaaaaaaaaaagggggggccgttttaaaggatccaattttacgtccgcgggcttgcagaggaatagtttttttatggggccacctaaattaaatccacggcccggcgtt

SEQ ID NO: 106002 - DNA, 583 bp, Homo sapiens
gctccatatttctttcagataaaaagccaaaagccttttgtagactacaacttcccttctactcagtagcacagttactatgtctcagagctcacctcgtaagttcttgtcctctctggttctactctggccacattggcatttttactgtttctcagttaaccttccctctttgagcctttgtgttgtttgttttctttgtcaggaatgtttttcctccagctatctccaagggatagctcccatagatcctttaggtctttgctcactaataccttgtcaatgaggtttaccttgaccaccctttaaaaaattgtacccccacttatcttgctatttaaaaatttttttacagcatttatttatttattgtttactatgtaaaatgttatctaaaggtacataagggtaggaagcttttttcactgatgagtccccgagtacttagaacagtatctggaacagccaggtgtggtggctcacacctgtagtcccaacactttgggaggctgaggcgggtggaacacgaggtcaggggtttgagatcagcctggccaacatggtgaaaccccgtgtctgctaa

SEQ ID NO: 106003 - DNA, 405 bp, Homo sapiens
gacttattagctgggtgatctctgggtgtttcttcattggcagatacttctatcctccttctcccctcctccctgtattctttccttcctctcttctttcctccctctatcctttcacttcttaccttcctgcattcatcctttctttcccttccctctctcccaccctcccttcctctctcccttcttttcttccttcccctatatttgagggtctctgatattccaagcattgtgctaaataaaacagaagtttgtgcattcatggagcttactttctagttggtgacagagagaaaagaaacaggcaggttttaaaaatagctttattgagatataactcatatactatataattcacccatctaaagtatacacttcagtgcttttgagtatattcacaga

SEQ ID NO: 106004 - DNA, 422 bp, Homo sapiens
ctctatcaaatgacaattgattcagaacagaaatcccaagacaggggaagacgaaaaggagaggaataatgggagcaatgaatcttgcaatatatgtattattaaaattaattagataataatgatgtgactaggactttgtaatataaatgctaagtagggattctttaaagagaagagtcattcttgaaagaaaaatttattagtaaccttgacctaaaacttccattgtgtttggcgtaaggagaggtatgagcaggtaaagatttttggtgcatggttgtgacatttatatttgcataaatatatacacacacacacacacgcacacacattctcacacacatacgtagaagaagattttttgacagaatataaatatggcgctctatatgcatgtatataggcgactcatataaatc

SEQ ID NO: 106005 - DNA, 485 bp, Homo sapiens
  misc_feature (1)...(485): n = a,t,c or g
agggagaatggagctctntcgccagcagatcgaggaccataagaaccgggccgacccacgcgtncgcggacgcgtgggcggacgcgtgggggcaccggacgttcggagcctcagtttcctcatctgtaacacagggctaagaacagcacctgcctcagggacaagttactgcccagaacgggcctggctcacttccttccacctccaaagctttccttgacccctgacttggagaagtcttggacgttcttgcagtccgttaagcagtggtccttttacgaggacagggctgggtctgccttgggctcgcacagcctgacacaggcccatatgcagtaagtgcttaacaaatgcctgaactgatgccaggatggactggtgctatcaggaaggaaccggaagccaggcctggtggctcacgcctgtcatcccagcattttgggaggccgaggcaggcgggtcatttgaggtcaggagtttgaggc

SEQ ID NO: 106006 - DNA, 393 bp, Homo sapiens
tcgcttgaactcgggaggtggaggttgcagtgacctgagatcataccactgcattccagcttgggtgacacagcaaggctccgtctcaaaaaaaaaaaaaggtggatagcccttttttttttggtacccaaaagggggaaacaactcaaatccccaccagcggaaaaggggttaaataaaaaaataaaggggggtttatccaaacaagggacggttctgcattaaaaaggaaggaaatcctgatatggctccaatagggaggacccttgaaaactttatgctgaaaaaaaaaaccaggccacaagggccccatttttaagggtttccctgacttgcccaaaacaggcaattttataaagccaaaaagtaaattaggggtgggaggggatagag

SEQ ID NO: 106007 - DNA, 394 bp, Homo sapiens
aggcaccagaatcccttgaacccatgaggtggaggttgcagtgagctgagattgcgccactgcattcagcctgagtgacagagtgagagtctgtctcaaaaaaagaaaaaaaattagtactttttacaccttcatcaaggacattcctcagtgaaactggacatctctccttcccgtgagtgtgtggtccgaggatagtgtttgatgctctggccttgactggggctgaggcttcagcagctagttcctcattgcttttgtgccatcagggcaaatgtcaacatagtgaaagggaaagcaacattttagtatcataattttagtatcatgattagttacgacctcgtggatcccccatgggtctcaaggacgtccaagggtcagaggatgcaat

SEQ ID NO: 106008 - DNA, 388 bp, Homo sapiens
cggacgcgtggggtcagcaaggagcaggcagtggagcagtcaaaagatcctgcctgaatgttggaaagaggagggaagagcagcagagtcagtaaggagaggtgagaggctcctggatgaagagggaagtcagcagggggcaccagtgaaagtcccggttatgggctgacttgtctccccccgaaattcatatgctaaagacctaaccccagtaccttagaatgtcactgtacttagagacaaaaacctttaaagaggtgattaaggtgagccctaatccagtttgactggtttctttataagaagaagaaatgaggagcctggccaacatggtgaaaccccgtgtctactaaaaatacaaaagttagctgggtgtggtggcgtgctc

SEQ ID NO: 106009 - DNA, 413 bp, Homo sapiens
taacttaaaatacaatcatatttataatatcatttcagctagttttataggcattttgatttataatatatagaaacttcaaataattcttagaattattaaaacatgtagcatttaaattattttaaaccttgagcttaaaaagccaaacactttttaccaggtccagcatgtttattttttaaataaaagttttttaaataatggaatttatttgtatatctttatcaaacacataaatacgctcgagtatattcatacaatataatattatttaccaataagaaaagggctattggccaggcagagtggttcacgcctataatcccagcagtttgggaggccaaggtgagcagattacctgaggtcaggagtgtaagactctccttgccaaaatggaggattacgtctcg

SEQ ID NO: 106010 - DNA, 399 bp, Homo sapiens
agatatttggaggtggggatcaatagagggggaaatagaatgatcagtactgcggcgggtaggcctaggattgtttctgtcctgtgtttagaaaggcttcttcagtgtctccagatgggtcaaaagaacgtggatcgtactaaggtaagggttcttttgacccatctggagtttctgtcctgtgtttagaaaggcttcttcagtgtctgcagattcccacagcacccaggccgcaggccccgactcacagcctggctcggagggcctgacccccctttctggggttctgccacttcagccaaacacagaaccctgaaggcgggggtgtgtggccttaggcacgcgctgccttctgtggagctgccttgtggggggtgggaaaacatttttttttttttg

SEQ ID NO: 106011 - DNA, 478 bp, Homo sapiens
  misc_feature (1)...(478): n = a,t,c or g
agtgcaggcgnccgcaactaagngcctacngatcctcgganncgcannncngggtngacccacgcgtccggaaagaaagaaaaacttagctactcgaatgtaaacaaaatacatatattcatgttaagaatcagaacaacaacaaaaaaccaaaaccatgtaacctgtatttttctgaatcaactttcaaactttttgtttgaaatacaggagatcatgggtagaaaattattgcaatcttttaataactttttaatagacattgagatatatatataatttacataccatacaattcacccatttaaggtgtacacttggttttagtatattcacaagattgtgcaatcatcatcccattgtaaatttagaacatttttgtcttcctaaaagaaaccccatgccagtcgcagtggctcatgtctgtaataccaacactttgggaggctgaagcaggaggatcacttgagcccaggag

SEQ ID NO: 106012 - DNA, 416 bp, Homo sapiens
aagcaggatacgtttttctgttgggcattgactaaattgtttgcaaaagtttcgcatcaaaaacaacaacaacaaaaaaccaaacaactctccttgatctatactttgagaattggtgatttcttttttttattctgacttttaaaaacaactttttttttccacttttttaaaaaatgcactactgtgtgctgagcgcttttctgatcctgcatctggacacggtcgcgctcatcctgtctacctgcagcacactcgatatggaccagttcatgcgcaagaggatcgaggcgatccgcgggcaaatcctgagcaagctgaagctcaccagtcccccaaaaaactattctgagcccgaggaagtccccccggaggtgatttccatctacaacagcaccagggacttgctccaggag

SEQ ID NO: 106013 - DNA, 918 bp, Homo sapiens
tttttttttatcaataaaatatttttaatgcctacaatttcttgtatacataaattgcaaaactttcacctgtatatgcaaaagtatattctcttgcaggtcaacagcaccagaaaacaagctaagctatctaaaaatttttttaacttgatttgtccattgtgtaaaagacaggatggatttaattactccaaagaaatctctatctcactcttaatcatacactaaacgtctgaatatttaatcacatccactcagaaaataaatagtagtctaatatattcaatacattgaaaataaaacaaccagtctctcttcatatatttattctctttccaaacatgttttggtctcctgctatatctcagaaatttaccaatagctgcttttaagttacaaaatacaaaacaacaatttatttcttggagaaaatcttggggattacattaaaaatgaaaatttgagttcccacattctttttttttttgacatggagtctcgctctgtcacccagcctggagtgcagtggtgctatcttggctgactgcaacctccgcctcccaggttctagcgattctcctgcctcagcctccccggtagctgggattacaagaattgcttgaactcaggaagcagaggttacagtgagccaagatcacaccactgcattccagcctgggtgacagagcaggactctgtctcaaaacaaaacaaaacaaaacaaagtgcataatatataaggaagtatttgtcatataaagttatatgaccagcccagaataaataatgcatacaaatataatatttaaaaagaaagtttatacatcaaaatgttaaagtgattgtagtttagactgagagattttggttttcttttttcaaaaaaaacccataaacacgaattttggtagctttctg

SEQ ID NO: 106014 - DNA, 413 bp, Homo sapiens
gagaatcgcttgagctgggaggcggaagttgcagtgagccaagattgcgccactgcactccagcctgggcaacggagcaggaccctgtctcaaaaaaataaataaaaataaaaatataacctcaattaaccaatactaactggagatcatctggccccatgcccttttccagcctacatcctaatctagtctattggcatcaggtgttttcatggtccagcctgccagcctgctggcagcctggtggctagcttcagggtaccacataccaagctttatcatcccattttacagaaaagaaaacaggctcagagaggtgaggtaacatacccaaggacatataactggtcttaacacaggccactgactccagagggcaatttcttaaccccctaccctatgccttgccccag

SEQ ID NO: 106015 - DNA, 417 bp, Homo sapiens
  misc_feature (1)...(417): n = a,t,c or g
cacatatggtataattatatttatataaaatgtctgaaataggtaaatctatagggacagaaagtagattagtggctgccttgggctggagggataggaggatggagggccaccataacggtatgagatttcttttggaggcgataaaaatgttctaaaatttactatggggatggctgcatgactttgtggatatactaaaaaaggattgaattgtacttaaacagctgatttttatggggtgaattatatttcaataaagctattaccaaaaaaaaaaaaaaaaagggggggcccttttaaagaatcaaaatttacggccgcgggcttgcaaaaaaatattttttttttgggngcacctaattttattgccctggccgtggttttaaaacggcgggactgggaaacccctggggc

SEQ ID NO: 106016 - DNA, 410 bp, Homo sapiens
gagactgaggtgggaggattgcttaagcctgttagttaaaggttgcagagagttgcaatcacaccactgcattccagtctgggtgacagggtgagaccctgtctcaaaaaatcaaaacatgataaacatggtcaacatacagtgaacaagttcattccacttttactggttacagcctcagttctgggctatgtgtctttttctatgtctttttcacattaaatgaagtgaggtaacacatgtaaatgagaaaaaatagcaatcagttctattaatttgaaatgagtggttgtggttccttgcaattgcgttcatatgaaaagagatctatcagtcaggatagggaaagttatgcacagtaacaaacaatcctcaaatcatggtgacttttacaacatggtttatttctg

SEQ ID NO: 106017 - DNA, 398 bp, Homo sapiens
cccacgcgtccggcactccagactgtgtattatagcgagactctgtcaaaaacataaataaataaacaaacaaataaatctgaggctcccacctccatatgaaactcagttgtcacccccaaaaattctgggaccctgagcatctcatgaaatcatgagaggcagtagaacttaatagttaaaatcccataattgagacccagacaccctaggttcaaatccaaaccctacaatttatattgtatgtgaccttgggcaggacatttgacctctctgggcctcagtctcccgatctttaacatagggatagcaggccaggcatgttggctcatgcctgtaatcccagcactttgggaggctgaggcaggaagatcacttgaggtcaggagttccaaacc

SEQ ID NO: 106018 - DNA, 366 bp, Homo sapiens
cgagatcatgccactgcattccagcctcggcgacagagtgagactctgtctcccaaaaaaaaaaaaaaaaaaagggggcgggggccctcctttttgaaaaccaactttttcccctgggggtaagggcccaaccggaaaattggtttaaaaaaaacttttggggggtgaaaacccaaagtttgttggcgccccaaaccacaagccctttcttttaccacctttttaccatttggggcctgggaacttggcctaaattaaaaaataccaattttggggagaaatttttgttttttgggggaacccccccggcctgggagaccattaaattaacccctccaaaaccctgagttattggggggccacctg

SEQ ID NO: 106019 - DNA, 368 bp, Homo sapiens
ggagttcgaggctgcagttagctgtgatggagccactgcactcagcctgggtgacagagggagaccctgcctcaaaaaagaaaaaaaaaaaaagccggggacctgggggggaaccaagggggtaaggccacatggcaaacccttctacaggacattgtacaaaggaacacccttcccgctcccattctttccccaaaaaaggcatccttaatccctgctgagcaggaaaactgggccctgccatgaacctgtcatttaacctgggacgggtttcctttccttccaaacctaagggctgcctgtaaaataggccaccctgcggttttgcggggtggtgggaaaatcaaatgacatcttgtagggggggg

SEQ ID NO: 106020 - DNA, 391 bp, Homo sapiens
  misc_feature (1)...(391): n = a,t,c or g
attttctcaataatgtcctctgacacatgaaaaattttaattttgataaagtgcaatttatatattttttcttttattatttctgctttaggtgtcatagctaagaaactattgtctgatccaagctcatgaagatttacacttatgtcttcttctaagagttttatactatttgttcttacatttaggtatttgatccattctgagttagtttttgtacatggtatgaggtagtgatccaaattaattattttgcacgtggatatatagctgtgcaagcaccacttgtttgttttggttttttcgagacggagtttcactctgtcgcccaggctggagtacagnggcacaatctcatctcactgcacactcctcctgccaggatcaagca

SEQ ID NO: 106021 - DNA, 402 bp, Homo sapiens
  misc_feature (1)...(402): n = a,t,c or g
tttttttttggatggagtccagcctgggaaacagagcgagactccatctcatagatagatagatagatagatagatagatagatagatagatagatagatagatgatagatagataagatagatagatagcctggtgtgggtggcctatggctgtattctatgttacttgtcggtccacctcttcctcctgttccccgcttctgtgggttgccagggtccagcacagtgatgtgaatttcaccggagaatcaccagagggttagagagatggaccagggcagggcccaagggaaaggctgcccaggaggggtcaggaccagcaagatacgagaggagtgaagtggcgtangttgaaaggcggaagggcgggcccctaaggctgggtccaaacgaggaggctg

SEQ ID NO: 106022 - DNA, 407 bp, Homo sapiens
ctgctctcaaactcctgacctcaggtgatctccatgcctcggcctcccaaattgctaagattacaggcatcagccattgcacctggcataagttcgtattgttttcagtatcacaaccacatacatgttcaattgcacatatactatgttctctacaaatgtgcagtttggacctgcctcatcttggtactctacaacaagagcattgcattgtcacacatgtagacaatgaattgactcagaatcacaaatacttgtactggggacctgtagggagaagtcaagccctaggaagagtaccaggtcatcatctgggaaaggaaatattaggagtatttggggtgtgaatagtactgtattgaattccaattcatttcaaaatatatttcacagattatcacaaacca

SEQ ID NO: 106023 - DNA, 386 bp, Homo sapiens
ttgcagtgagccgagatcgtgccattgtactccagcctgggcgacagagcgagactccgtgtcaaaaaaaaaaaaaaaaaaaaaagggaaaccctttttttttaaaaagaaaacccctggagggaaaccccgggggaacgggaaaaaaaacgggggaccccccttggggggggggttctcggcccccggctaaaaaaaaaaaatcccccaaaacccccccctggggggggggggggggaaaaaaaaggcccaaaaaggccccttaattttggaaaaagagggggacccccccaaaaaagggcggggggaataaaaaaaaaaaagcggaaaattttttttttgaaaacaaccgaaaacctttgttttaaaagggggaaagagccctt

SEQ ID NO: 106024 - DNA, 422 bp, Homo sapiens
aaatgaatctggaaaagtttcttttataatgaaggtgtttgccactcagcagtcatgcatgtttgattgaatgaaacaggaacgtatgggaagacctgtggacaaatacggttacatgtagacaaatacggttacatggggcactaacatgaacaccagtgccagcaagaaagcaagcagcagagcaagtaagaacgggattttgaaaattcttatggaaaaaagtctgcagcatttccagaaactttcttaattagaagaaaacatgaaagtaaccgttgcaaatcaattgtatataaaaatgaatggtcttctattaaaatgtagagggagattttttgcaaaggattaaaaatattaggtattggccaggcgcagtggctcacacctgtggtcccagcactttgggaggccgaggcggg

SEQ ID NO: 106025 - DNA, 403 bp, Homo sapiens
attgcttgaacctgggaggcggaggttgcagtgagccgagattgcactactgcattccagcctgggcgacagagttgagactctgtcataaacaaacaaacaaaatctatcatgtcactcctgtgctcaagagctttcaaagacttcctatcactcagtaaaggttgaagtgcttacaatggcccatatagaccctacataatctgtcccctgctacctgtctgacctcatcacccacaaccttatccctaactctagtccagaatcacttggaggtcttgttaaaacaaagttgttggaaacaactttaccacagttggtagttggaaaacacagccatggaagtaggaatctgctaaagagcgtacaactcaccttctgaaaacaaaaacaaaaacaaaaa

SEQ ID NO: 106026 - DNA, 411 bp, Homo sapiens
acgaatactcagtttcttattaaatatttttagataggaataactattttgctaatgaaagaagaagctgtgcatatctcattttaagcatatggtgaatggatatttgttaatatatgcatgtatacaaatgtgtgtgtatatgcacactcatatattccctatattcatttggaaaagttaagcgatggaaaatataggtagaaagcagagtatgaaatggggaaagtaaggagtcacaagctgagaagagcagttaccaaaaggcagaaacattgatccctatccaggtgaggtatagacacacacacacacacacacacacacacacacacacacacacagtggactattgtattatcttcccaaaggcaaacaatcacatgagttttgttggtgatgctgtttctt

SEQ ID NO: 106027 - DNA, 399 bp, Homo sapiens
ctttactattcatatattcttttgtctaaaacacataaataagatcccatttgctttccttacctatacctaattttcttttggatactttttttgtttcttttctattacattttacttgatctttcatagtcttcttcctcatcccgtttttcctaattaaagtccagaagtacacatccacaaaatgattttaatgcttaatggaactgtactgggtacatgtagtataattttattaatcttcccattagatacctagattgcctccaaattttcactattataaacatccacacttgctgtgtgtgtgtgtgtcagggtctagctagctctgcaggccaggctggagtgcaatggcataatctcagctcactgcagcctctgcctcccatactc

SEQ ID NO: 106028 - DNA, 393 bp, Homo sapiens
cggaggttgcagtgagccaagatcgcaccactgcactccagcctcgtgacagagcaagactctgtctcaaaaaaaaaaaggaatctcaacatcttgggcaaagttaacaaacacttacccttgtgaaccccctggcgggccccttttggaccacgggagggtcctaaaaccttaagctttgttaccttcacagtaaacccaaatgtatccttgcctacctgataggactgggagggattaaatgacctcatatttgacctcctaaaacagggtctggcacaaaataaccccctcgaaagaattggttttcattcttattgccctcagggttcctgggagcattaaacatttgcagatggcccaagtaacatcaaacgtggggtgggcagatgg

SEQ ID NO: 106029 - DNA, 404 bp, Homo sapiens
aagaagagctgtgtgttgtgtgttcctacacttgcagctgccccaagttgacctttgtgtccatctgctaacatgcctctctcccgggctaatgctgaccatttattcccatgcttgatgttccgcaaagtctcttgtatatggtgatgagaaggtatgcctcaccttccagggagtcacagctctagcaacattctgaagagaggaagggagagtgggagggaggcagggaggaaaggaaggaaggaaagaaggaaggaaggaaggagggagagaagaaaggaagaagagaagaggggaaggggaaaaataaggaggaggaaggatagaggagagaatgaagaggaggaaaacaacagactgagcagtaaggtatctttagagatcagcacctgtccctgacc

SEQ ID NO: 106030 - DNA, 408 bp, Homo sapiens
cccagctactcgggaggctggggcaggaggatcgcttgaacccggaaagtggggaggttgcattgagccgagatcacaccgctgcactccagcctgggcaacagagaaagaccttgtctcaaaaaaaaaaaaaaaattactgcccacatactgggggcaaagggaaagggccttacatgacccacctttttcgatccttgcaacacaggtatgaattataattcctattttaggctggacacgggggctcacacttggcctcccaaagggatgaaattacgggcatgacccaccgggcccggcccaaatgtgttttaaaaaaatagattttcccagcgggataaagaagagggggcaccaagagagaccagcagggagataaacggggaagtttttgtaaaaagttca

SEQ ID NO: 106031 - DNA, 377 bp, Homo sapiens
agcccgggaggcggaggttgcaatgacctgagatcaagccactgcactccagcctgggcaacagagcgagactccgtctctaagtaaaaaaaaaaaaaaaaggaagagggggaacctaaatttttcgggaaatgggaattttaataatctaacgggacttcagaaaacgtttttattttgttttccaggttcatggttttatctgaaaaaaaaagaaacttcagccacttttttagggtaacaaaattaaacctttttttttttcttttccttccttttggggaaagggggtttaaccgaatgggccaggagggtttaaatttccggacctggggacccccccggctgggcctccaaaggggtggaaaaggcttaac

SEQ ID NO: 106032 - DNA, 398 bp, Homo sapiens
  misc_feature (1)...(398): n = a,t,c or g
agtatctgggatagtgtgtgtttgtgtgtgtgtgtgtgtgtgtttcggtttggcgtgtgttggaggttgcagtgagccgagatcatgccactgcactccagcctgggtgacagagtgagactctgtctcaaaaaaaaaaaaaaagccctgggctttgcctgctgctttaatgcaggctacacacaacctggttctgccggcagtgctgagaggacaagcccagaggggtacttgggagagctgtttatcatccatcagtgggcaacgggcaaatgctccatataatccccaggaacatggaggcagctatgttctaaagcttctctactcaaagtgcagttcccccgccccaacagcagcatcacctcacctaggagcttgaatgcagaaatctctgn

SEQ ID NO: 106033 - DNA, 372 bp, Homo sapiens
aacccgggaggcggagcttgcagtgagcctagatggcgccaccgcactccaacctgtgcgattgagcgagagtccgtctcaaaaaaaaaaaaacgtgatttgccagtgaaaatacctacgtaggtggtttttttctgttcccttatgtgaactgaggtatttattattgacgagaggaccggtcttatctcactggtatttggggggagaattttctttacacctaacaatgttggggttgatgaaataaaacacggcccactgaaaatcccctcctttgggaagggggaaaacatttttttttgcccttttttagggacaattgcaaaaaatccttagttaaaatttttttttgggggttttgtttagaga

SEQ ID NO: 106034 - DNA, 377 bp, Homo sapiens
  misc_feature (1)...(377): n = a,t,c or g
gtttcaccgtgttggccaggctggtctcgaattcctgacctcgggtgatctgcccgccttagcctcccaaagtgctgggattgcaggtgtgagccaccgcacccggcctcagagagatattctttgactggtgctgtatctgttgggagtgtcatcacctggggagtggtatggcccatgactcaattgccctcttgcagccttggtacccagaggtaaggactgaattgccctcttgcagccttggtacccagaggtgagaccttgaggctgttctgcaggtaagggaggtaacagttccaaggtcccagttctgtgcatggctggaagcagctgcctggccggctgccttgctgggctgctctgcatactcaacn

SEQ ID NO: 106035 - DNA, 419 bp, Homo sapiens
tgagccgagattcagccactgcattccagcctgggcgacagagcgggactctgtctcaaaaaaaaaaaaaaaagaaaatttttgccggcccaaggggattccccttggagcccagggccagttttttgccttaaacttggcccttccaattaatagttccccagggatttattgaccccctgttggggccccgcccttgctaagggctttgggaattgggcggggagaacaaaaaacccccctcctcagggggcggccttttttttggggggagacgggggataaacaaaaaatgtacgccgcgggggcgggggggttcacccctgtaaccccagcgttttggcggggggggagggaaaaatttttttgggaccagggggggaaccaaagaaactttgtctccccagaaggttttttaa

SEQ ID NO: 106036 - DNA, 418 bp, Homo sapiens
cttttcaagaggtttacactttcttacagtcttcaagagtaatctcatcatgtaagtaaaatttaagagaattttgctgctccaacttctagagttgctttatttatgggtgtggaacaggtttttccattcttagtaggataatctggcattgtttgtgtcagagagaagacagttgtaacaatgtggaaggataggaaaggtgagtttaaagtattgaagaaaagctgaaagactggaggtttttttcagaagactctgccagagagctttgagacctttcccccattgcctagcagcagctcccatgcccttaattgttttaaaaaagcccattctaggccgggcgtggtggcttacgcctgtaatcccagcactttgggaggctgaggcaggaggatggcttgagtccaggagt

SEQ ID NO: 106037 - DNA, 392 bp, Homo sapiens
ttttcagcctactctaagctgccatggagtgtatgggaaactataggaaaaattgggattaagactcaaaaatctggattaagaagggcaggccttgcatgtgtcctaggctcagcaaaagggtaagaactgggagtacagaaaggcaaaaagttcaaactgggactggctctacttctaggctggaatacaaaactcattcccaggtatgagagggtccttgatttataccgagtgagcaaagtgagtaaacttctgatctagggcagaagctgttgacctctgggtcgggtgcggtggctcacaactgtaatcccagcacattgggaggccttggccggtggatcacctgagttcaggaatttgaggccggcctggccagacatggcgaa

SEQ ID NO: 106038 - DNA, 408 bp, Homo sapiens
aaggccaagaaaaatagcacaaagatgtaggagtggtgaggaatgaagatgcacgtgcacgcgccctgcagtctcagtcaatgcgctctttagggtttagtttggaaaaccacagtgtcgtgtcttatgtaaccaatttcttttcttttcttttcttttctttttttttttttttttttgggggggggggtttggggttttttttttccccccgggggggggggagggggttaaatttgggttgtttaaaccttccccttcccgggtaaaagaatttttttttcttaactttctgagggggtgggaatggaaggccccccccccccccccggttttttttttttttttttaggggaaaaggggttttcccgggggggcccgggtagggaaaaatttcttgacttgggg

SEQ ID NO: 106039 - DNA, 408 bp, Homo sapiens
catgagcccaggaggcggagcttgcagtgagccgagatcgtaccactgcactccagcctgggcgacggagcgagactctgtctcaaaaaaaaaaaaaaaagggtcggggccggttttttttataaaggttaggcccaaaaaccccccccttttttttttttaggggcacaaaaaaactggggggaaaattaataaaggggtttttttttgggcggggaggaaatatcctggggcttgggaaaccaccgggattaatttccggggttaaatttggccccccccaaaacaagggggggggggggaaaacaggcttttcattcaaaaggggttttaggggggcctccccgggagcctaagggggaagggcccaaaaggggaaaaaggctcataaaggggcccggccgggcg

SEQ ID NO: 106040 - DNA, 417 bp, Homo sapiens
cccacgcgtccgcccacgcgtccgcagtgagccaagatcacgccactgcactccagcctgggcaacagagcgagactccgtttcaaaaaaaaaaaaaaaaaaaaaaaaaaaaaaaaaagggaaaaaaaaaaaccaaattccggccttagaaacccccccaaaaaatggccaaaagatccggggaaagaaaaaaaaaaaagggttaaaaatggcggggtccttttttaagggattttggaaaagggaaaaaaaaaaaaactttaaggggttttaaaggaccggggggttaaaggggggttaaaaaaaaaaaaccccgggggggggggggggaggaaaaatttttatttttggatggggggaagggtaatggaaaccggttgggcgggcccccaccaaaatctaatctgaaatggaacc

SEQ ID NO: 106041 - DNA, 478 bp, Homo sapiens
gcggccccccgccccccctttgaaagctgtcatcgaaggttctgggccggaagacccgggacgacccacgcgtgcgcccacgcgtacgcccacgcgttcggcttgaagccgggaggcggaggatgcagtgagccgagattgcgccactgcactccagtctgggcgacagagcgagactccgtctcgaagaaaaaaaaaaaggaattaagttttttcaaaattaaagggagctttaccaatttatctcaattcatcttttataaagaacttaaaagacaaagccccatatgcagaaggggacaaggaaacacagcaaatgggtagccaagattactcattcattcaaaaattcactgggttcctgttatatagcaggcatcggcctaagtatataccatatactcaaaaaattcagagcatgggggaggaattagatttataaccggataattaaaatccccccgggtaaaaatatgcg

SEQ ID NO: 106042 - DNA, 483 bp, Homo sapiens
  misc_feature (1)...(483): n = a,t,c or g
agagacgatgactcgttgcagtaccgcaccggaattgccgnttcgacccaacccacgcgtgcgattaggtatcactatcttgcctaggcttttcttgtactcctgagctcaagagatctgcccgcctcagcatcccaaagtgctgggattacaggtgtgagccactgcgtccagcccaagtcatttgtttactgaacaagtacatactcaggttttaaaaaacagctaataaattagtgtgttaaattttgaagtgacattcaggcagctggggttagaacatattaaaagtaactatttgcatgctctcctgattagacactacaatgtatttccttaggctgtaaaagaatataccaaaaacatttttgtcatttttataggtaagngatttgctactgctttctgaattttccttcttttgtctcctgtaatataaaccagntcagggtctgataaaacaacacatgcaaagtaatgaaa

SEQ ID NO: 106043 - DNA, 428 bp, Homo sapiens
ctttatattttaaatgtgtgcttatataatgtcttcccccattagaattacatttctttttttcttttttttcgagatcacgccactgcactccaacctgagagacacagcgagactccgtctcgaaaaaaaaaaaaaaaaaaaaaaaaggacccccctttaacaaaaccccttgggaattccccaaagttaaaaaaaaaaaagggggagcggaaaccaaaaagttggaaaactttttcttgggggaaaacaaagtggaaaacaattttggtaaaaaaaccgggaaaaacaaagtttttaaaggaaaagtggggggttataaaagcaaaaaaatgcccggaaaaaaggcccgggataaaagttttaaaataatttgaatttgggaaacaaataataagccctaagaaaaaatttttgtgctaaggggg

SEQ ID NO: 106044 - DNA, 426 bp, Homo sapiens
  misc_feature (1)...(426): n = a,t,c or g
nnnnccgaaatgacaaaattttagaaatgtagaatagaaaatattatggttatcaggaggtaggaacaagaagggcagggaggtatgagttaggtccatgtggtcataaaagagaaaatggggaaggaatcttcttggtaacaaaactattctgtgtgttggatgtggtaggggatatatcagctcagacaggaaaatactgaatacaactaaatacacacacacacacacacacacacacacacacacacacacacacacacaaatgaaactgggaaaatgtggatctgaaagagatacatagcttgtatcagtgtcagtattcttattgtgttattgcataacagtctcgcaagatgttatcattggggaaactaaatagggggtgtgctggatctctctattctatttattaacagtgcgtgt

SEQ ID NO: 106045 - DNA, 412 bp, Homo sapiens
  misc_feature (1)...(412): n = a,t,c or g
cttgagaagattaagtgagataatacaggtgagtacacagaactgtgcttggcacatcagtacaaaggaggtattttgttataatcatgactgcaagcatttctttctccaaagtctttttgcataaagattttctaatttttttgttgttttttgtttgtttgtttgtttttgagacagagtcttgctgtgtcgcccaggctggagnncaannnnacngtctctgctcactgcggcctctgcctcccaggttcaagcgggtctcctgcctctgtctccaagcacttttggagggcggggagggcgggtcacctgaggttaggagttttacacccggctgggcaacatggagaagacccgcctcttgtaaaaaacttaacattatagggatggggggggcccccccctgcta

SEQ ID NO: 106046 - DNA, 382 bp, Homo sapiens
aagtgaaatgcggagctggtgtggtggttcatgcctgtgatcgcagtactttgagaagccaagatgggaggatcacttgagcccaagggtttgaaacctgcctgggcaacaaagggagacctcatccctaccaaaaaaaaaaaaaaaaccccccccccaagggggaatttggcactttggggggtggggcttttttttttttaagggggccaaaaagggggggggcccccccccccaaaaaaaaaaggggggggttttttttttttttaaaaaaaaaaaaacgccccggggggcaaaagggcgggacttctttttaacccaattttttaaaaaagggggtttttttttttttgtatcccccccccttttagcccaagggggg

SEQ ID NO: 106047 - DNA, 398 bp, Homo sapiens
tgacagagtctcgctctgtctccagtttgaggcaggagaatcacttgaacctgggagaatcacttgagccgagatcgcaccactgcactccagcctggtgacagagcgagactctgtttccggacgcgttgagatgcgaagattacttgggttctgcggtttttgtttgttccggtttcctacgggtggcatctcggtttttttacagagagaggttctcccttttgataaatccactattctaatgttctttgttgcccccaccttttttttttccctcgctttttataatgggagtggggcaatcgtgaggaaaacatatgtttttatggatcgattttatttggggggcctccttcttgtcccgcgctattaaccctttccctccctttttgggg

SEQ ID NO: 106048 - DNA, 388 bp, Homo sapiens
tacatatgaagtcttcaaagaaagttagttgatggtgaaaatgcctttcataaagttcagggcagagaatactcttatgagcacatttaaaatatctaagtttaaacctaactcagaagtcagagtaagccaaaatgtttattgtattgatcttctttttctgtagttggcatttgctcctgactgagtcattagtattcatatatatatttaagagttttgaaagcatagttgctgggtgtagtgactcacaactataatcctggcactttgggagatcgaagcaggtgtattgcttgagcctaggagttcgcaaccagcctgggcaaaaccctgtctctaccaaaactacaaaaattagccaggcgtggtggcatgctccttggga

SEQ ID NO: 106049 - DNA, 391 bp, Homo sapiens
ccccaaccccatgacccctcatcttttctgtggcaatcttgcatctgttcaggacaacatccctgctgctctttaggaagcaggaccctgtctaacataaattctgtacacaaaataagaggtccctcacaggcaggcagccctccactggtgactaggaagaattcagtcactgcctgggctgtgtggttctgggccttcctgtggagctgagctgcctgaattatcatgactctgaacttggaaggatcattaagtgactgtagcctacactccatgcttccttcatattggaagaaaagtttctggtagagagtcggccgggtgcactggctcaagcctgtaatcccagcactttgggaggctgtggcaggtggatcacctgaggtca

SEQ ID NO: 106050 - DNA, 424 bp, Homo sapiens
agaatcatttgaacccagcaggtggaggttgcagtgagctgagatcatgccactgcactccagcctgggcaacagagcgagactctgtctcaaaaaaatatatacatatatgctagaagaaattctatgaatcaggtcctgaggccggggaactactaaaatagcatgaccatgagattacaactctggagagttatagttatctaatggtctctagagacattttctctgtagttgtgtctaaatcccataaattccaagaatttgaagtaatctcatcatttggatcttagatttataaagctactcttctttatttctaataaatctcctgagatcagtaattgttgctcagtttagttccttgtttgatagctttttaaaattttagttatggggggtggaatagtctacattcacagct

SEQ ID NO: 106051 - DNA, 387 bp, Homo sapiens
cggacgcgtgggcaggaggctgaggttgcagtgggccgagatggcgccattgcactccagcctgggtaacagagcgagactccgtctcaaaaaaaaaaaaaaaaaaaaaaagggggccggggggccccccagttgtaccccaacccccccaaagggtggggggggggggatccttgggggttggaacttttttgggcttataaaagacccctggctttccacctggctggagggggagggattttttaaaaaaccaaaaaccaaaccccccccccaattttcccggcacctggggggcctggttccccattggaaacggggaaccccttttttttttttttccccctggggggggggaaccccgggccgccccctcatggagagctt

SEQ ID NO: 106052 - DNA, 381 bp, Homo sapiens
tgcacattcactagaatgattttaatgcataatgatagacagtacaactggaatcttcatacactgctggtgggagtgtgaaatggcccacccattttggaaagcagtttggcagtttcttttttttttttttaaaaggggagtttatttttttttcccgggggggataaaggggcccggttttgggttaagggaacctttgccccccgggattaaaggggttccccgccctaaccccctgggggggggggatttgaggccccccccccccccccccattaatttggggttttttaagggaaaaggggttttcatggtgtggcccggggtggggaacttcttaatataggggaaccccctggcctaaccctctaaaggggg

SEQ ID NO: 106053 - DNA, 954 bp, Homo sapiens
tttacaggatgatgaaacatggtttcaaacgagttctttcttgttactttttaaaatttcttttttataaattaatattttattgttggatcctcctcctttctctggagctgtgcttggggctactctgacactctgtctcttcatcaccagccaaggaaaggggctttcgggtagggcgtagctgcagggcctccttgaagtacttgggaaggaggaagccatcagtattccctggagtcagaatcaccccattggcagagcggaagaagggtattccatctgccagagccaggggtccatcgatgaacacagctatttcacaacgggaccgcatgccactgatgataccggggtctccaggcagtcctggggccaggtgaatgtgcgtccttccctggcaggacaggcctttgagtaggatggatggccagtgcttccagaatgtaccatggactagcatcgggggcagggcctgcggtgtctccaggggcatcagctccaacttaggtacctgcagggaatggccctggttggcccggatgagaaggccagtgctgggatcccccagctgcagggcgaaccgctgcttcctattggtgtccaccacgcgctgcacatcttcagcagagaagccgcggaactggggcaactgcaggagggtgcccaggggcacgaagccatcagctcccatgggaagccccagcttcaaggccccatggcgcagggcataggacagagccttggacagctgcacgtctcggtcctgttctcggggtctgggagcccttctacccctggaccctgctgcttcctgcctccctcctccagagaagttcatggttaagacccaaggtcacaccgtcagccaggagcgcagggaggccgagccccgcaccccagatcgctggtgcgccccgcagggtggtccgggaggaattccaccacactgac

SEQ ID NO: 106054 - DNA, 452 bp, Homo sapiens
  misc_feature (1)...(452): n = a,t,c or g
gagggaattgaagccgtatcgatgacttccggaccggaattccnnnntnttcccacgcgtccgccatattggccaggctggtctcgaactcctgacctcaggtgatccaccagccttggcctcccaaagtgcagggattacaggtgtgagccactgtgcctggcctggtttattcttatatccttagtagttaaagatagtccttggcatatggtatgcctttgggaaaatttggcataaatcattctcttggagccctaatttcttttctcttttttttttttgcccatttattctgaaacggggtttcgttttgctgcccaggttggtttaaaattccgggcctaaagccatcctcttgcctaaacctctttggagctggaataacaagggggaccccccgcatcgggttcggccccctaattcctttttttttttttttttttattggg

SEQ ID NO: 106055 - DNA, 421 bp, Homo sapiens
  misc_feature (1)...(421): n = a,t,c or g
actccagcctgggctccagtgcgagactccattgcggggggcgggggggcagctagtgtgagggtgcatgcttgaacccaggaacttcaagctgcagtgagctgagattgtgccactgtactccagcctgggcaacagagcaagattctatgtcaaaacaaataaacaaaaaactattctgctgtcttagctgaataattcaaacaaacaacaacaacaaaaaaccctgacctagacttttaaactgaaaatgaaggttttagtgcacaaaaatattcttagatgaatacatagattagagggtagttgttgaaacatagggcaagatgaagagattagtacatttcttttttttttctgtttttggagacaaggtcttgctgtgttgtccaggctgcagtgcagtgatgagaacatgccn

SEQ ID NO: 106056 - DNA, 423 bp, Homo sapiens
aatcagaccattgcactccagcctgggcaacagagcaagaccctacctcaaaaaagaaaaaaaaaaaggaaaagaaggaattcccaattaaacaatgggcaaattactgaccacctgtatgccctttggaaaaaggtttattccaataatttgcccattgtttaatggggatagacctttttccagagggcatacgggggggcagtacccagatgaaaggttgctcttgattaagtcttattagggaaaagcatatcaaagcgcgttcaaatctgccatgctctaggatggttatagtcattaaaatgcacaaaataacactggttgggggtttggaaaattgtgagactaaggaaaccgccattgggattgtaaacagggcactattttgaaaaagttcgggcagttttaaaataataagtt

SEQ ID NO: 106057 - DNA, 408 bp, Homo sapiens
cggacggtgggttgggaggcccaggcgggtggaactccccacctcaggtgatctgcccacctcggcctcccaaagtgctgggattacaagcgtgagccactgtgcccggcaccagttacctcatctttaacatgaagaaaataagagctacccccagggctgttttaaggagtaaatgaataatggacatgaacatttaggtaaaatgctagtgtttagcatagtgttgtgcatatagtaaatgtttactattactagtattagtgctatctgttatagtattaataaatgacatagcacccataactttgtggtgtcagttacttaaaagttggtctttctgttgtaagcttgctggtcatacccaaatcctaaagaggattgacagtggagggagctttgtgagac

SEQ ID NO: 106058 - DNA, 338 bp, Homo sapiens
cggaggttacagatctgagatctttccattgcactccagcctgggtaacagagcaagaccccgtctcaagaaaaaaaagaaaaaaaatgaaatacagatagtactaaaggaaatgacgtatttttaagtatatttttaatctcatgcataaaaaattaatgagtggaatgggggcagggtggcaaccagaaaatagatttgtggagcacttactgtatgccaggtactatgaaaaattacatatttttatgtaattttcacagtaaccctgtggtgtaaatattaactctacagataaactgaggttcagagagtaatttccgtagaatcacagtttc

SEQ ID NO: 106059 - DNA, 405 bp, Homo sapiens
cttttctcagtctttatctatctactgttggggtaataatctttttctttcatctcttatgtccctgattagttactttttgaggggatcttctctgataccactttttctttgagtcgtggaaaccagaatgcacacaatacttctgttggttatgagggttggctattttcatcctgtaaagccaataattaaaatcactattttaagataaactgtacatttctcagtacctaatttcatatttgcttatttatattgaaaaatcaagtgagcaaaatgtacacacatactgtttcatgttctttgttagaaatcatatactgttgcctgctgcagtggctcacgcctgtaattccagcactttgggagaccaaggtgggcggatcacttgaggtcaggagt

SEQ ID NO: 106060 - DNA, 425 bp, Homo sapiens
tgggcatggtggcacacacctgtaatcccagctactcgggaggctggggtgggaggatcgcttgagcctgggagatggaggagatcgtgccacagcactccagcctgggcaacagagggagactccatgtcaaaaaaaaaaaaaagtaatggggaaaaggggacccttgaccaaggcggaaactgggttattttaaggaaccctgcaaggggccactgggaaagggccctccccgggaacccccgcccttttttttgggcggggaaaaagggttttttttttttttgaaaaaaaaaaaaaaaaaaaaaaaaaaaaaaaaaaaaagggggggcccttttaaaaaaaaaaaatttatccccccgggggggggaaaaaaaatttttttttttggggcccccaaaaaaaatagcgggggccgggttgag

SEQ ID NO: 106061 - DNA, 427 bp, Homo sapiens
tctcgaactcctgacctcaggtgatccacctgcctcggcctcccaaagtgctgggattacaggcgtgaaccactgaggccggccaaaagtattcattcttaattcagagtacttattttgttaatgtggagttattctttttaatggtttaaagctatttttgttcattaatgattttattaatacatggcaaattgtatatactaatgtatatttaaaatgatatacaaaatataataatgtataatgcacaaatatgatatatgtgtgtattcagttcactaaaatttatgtaaacttgtaatactatgtaaataaccttttaaatataaataagacacagttcttcaaaaattttctaattgaagtctataccaagaaattctctaagttatgatcttagtttccttggacaaggcacataaca

SEQ ID NO: 106062 - DNA, 420 bp, Homo sapiens
agctgagattgtgccagttcattccaccctgggcaacagggtgagactctgtctcaaaaaaaaaaaaaaaaaaaaaaggggggccccggtttttggggacccttaaaaacccccgggggccgggcatttttttttttttttagggggccccaagaccaatttctcgcccccggggtaaaaccccggggggggggggaaaacgggggaaacccaataaaaatggtttgggggaaaacccctttttcccaaaaggggttaaagggaaaaatcccccaatttttttccctttccttggacaaaatgggcccacccccttggttttgggttcggccaacatggggttttatttatacctaaaaagaaaaggccccggcaaagggcgggaagctttaagggcggaaccgggccagcctttttact

SEQ ID NO: 106063 - DNA, 404 bp, Homo sapiens
ctgacctcaggtgatccacccgcctctgcctcccaaaatgctgggattacaggcgtgagccactgcacctggcctccttttcattttttaaggggcctaaataaaatgttacttacataaaaattgccccagctttcccctgaatgagataatactcatctgtattcccacagctctttagttcatttttctattatagcatggaaccttttgcatagtaaataactattctacagtctctcccacaacattttgaattatttatgggtcttcaccatgttaacttggtatcttcaggatcaaatataatatcttggagagtgtaggtatacatgattgattgttggctggctgaacaaatgaattgatattttatttatatttgtaacaacgtaagaggaaaa

SEQ ID NO: 106064 - DNA, 415 bp, Homo sapiens
  misc_feature (1)...(415): n = a,t,c or g
tcgcccacgcgtacgttcaaggtcacatgcttgttcatggtctgggctgctgattgataaagtcctggcagcacagacaagaatatgtctccctgatgtcttttatttttttcccctgccatatttggtaccagagccagagatcccctgggaccacacagattatcctagaaatttctgatacagggaagaataagtacttcaattgtactggaagtcatagaaaacacacacacacacacacacacacacacacacacacacacacacacgcgcacacacacacactttnaatatatatttattttatagagggtgtgtgcaaactatatagagagagtgtgacaggttatttcagagtgagtggaaagactttcaaaagaaaatttggagacattctaaaacttttttcttt

SEQ ID NO: 106065 - DNA, 428 bp, Homo sapiens
  misc_feature (1)...(428): n = a,t,c or g
ctaggatatggcagtatcaagtcaaaatcctaaatcttaacaacttaaacaccccaaatctcatcatctaaactaacccattcaaattaggtaaaaaggaggctccatgtttaatccaccctggaatacattgctctctatgaacctgtgaaaattaagaaacaagttatctgctccctaaattcactggtgaaacaggcatagaataacagttatagacattcctatttaaaaagggagagaagccaggcgtgatgtttcactcctgtaatcccagcactttgggaggccgaggcaggcggaccacgagttcaggagattgagatcatcctggctaacatggtgaaaccccatctcttctannnaaangnnnnaacctgnatttaaaactcttcaaaaaagaataaaaaaaaaaaaaaaggggcgca

SEQ ID NO: 106066 - DNA, 478 bp, Homo sapiens
  misc_feature (1)...(478): n = a,t,c or g
gacagcccccnnntaatgaaatagagcatccgcngcccnccggncggaatcccggtcgaccccgcgtcgctcagcttaagcagctgctctttttcatgagccacacacgtctgaccgttccctccctcctgtgggtatccaagtggtcactcccaccatgttgttcgtctttcagttgggggaggaggtttacatagcggctctttcctagactgagagggtatgggtgttcccctgcagactaggattctgttttctggatgagcatttatacgaaatagctctgaccaggcaccgtggctcatgcctgtaatcccagcactttgggaggcccaggctggtctcggactcctgggctcaagagaataatctgccttggtctcccaaagtgctgggatttcaggcgtgagctactgcccagcctaccctgtctcttaatttttctttaaggacttgctactcagatggggtggaggtn

SEQ ID NO: 106067 - DNA, 396 bp, Homo sapiens
aatcattaagggttagaggctctaagccagcttctgaggtgcttagaacaaagtatgatgatggcagacagaagtaagtctctatgacctcatgaaggacttgtttctctgctttcccagaggctcctagaattgaaaccaactaaagacctgaaagggcactccaagtgcatctggcccaacgctccctgattttagttacaggaaatccgaggcccaaggaggggaaaaatttgataaggttacagcttaaagaaaaataatgactaaaccatttcttttctttctttcttttttctttttctttttttctttttttttttttggcggaaatccggaagggaatccaggttttctcaaaaaaaaaaaaaatataaaaaaaaaaatatatattat

SEQ ID NO: 106068 - DNA, 396 bp, Homo sapiens
tgaatttcctcctgtagctcagagtagtttgatcgtctgaagcctttttctctcaatttggcaaagtcattctccatccatttttgttccgttgctggtgaggagctgcattcctttggaggaggagaggcgctttgatttttagagtttccagtttttctgccctgtttttttcccgtctttggggttttatctacctttggtctttgatgatggtgaggtacagatgggtttttggtgtggatgtcctttctgtatgttagttttctttctaacagacaggaccctcacctgcagggttgctagagtctgctagagggccactccagaccctgtttgcctgggtatcagcagtggtgtctgcataacatgcattttttggtgaactgctcatgc

SEQ ID NO: 106069 - DNA, 389 bp, Homo sapiens
acagaagttattagtgcgaccaaggaaacaatagctaaaattattatgtctaaggctctacagacatgatgagtaagctcagttagaagaagtttcacaaaatgcaaagcaggtgtggcagcccaagcctcggacagattaacaggaatacatagcccagggatgtggcctaaaatcatcaaagtagagatattatgtgtttgcaatgtgctatgattaatgcagtgatataattggtaagatttacaggtcagttgggtattgtttacctggagctggtccttcttagctgtcaaaaagacataaggatacaccatggaatactatgcagccataaaaaaggatgagttcatgtcctttgcagggacatggatgaagctggaaaccat

SEQ ID NO: 106070 - DNA, 429 bp, Homo sapiens
ttgtgacttgaccatctttcctttgtatctgtgtctcttttcctcttcttataaagacaccagtcataatgggttaagggcccaacctactccagtatgacttcattgtaatttacatcttaattaaatctacaaagactccatttccaaatagggccacaatcagaggaaccaggggttaagatttcaacagatcttctggtgagcaaaaatttaatctataacacacaaatgatagtcaagatatggaattaacctgtgcatccatcaatggatgaatgaatggacaaagaaaatgtgtgtatgtatacacattgtatacatacacaacagaatattattcaaccttaaaaagaaggaaatggccgggcacaatggctcacgcttgtaaacccaacactttgggaggccatggtgggtggactgctt

SEQ ID NO: 106071 - DNA, 423 bp, Homo sapiens
  misc_feature (1)...(423): n = a,t,c or g
tagaaactcatgcttgtgtagtttcttccaatatttctttgatactttccttctttgtatattctctgttctttatttctggaatgctgttttggacagcatctcaaatttccttgtctttcctattttctgtttttatttttggntctcctttctgtggtatttgctcgactgtcttctaaattctctgttgaattctttaatttttatgaccatgtaatttctaagacctttctagtttctgattatttccttcacatagcattctgttcttgtttcatggatgcactatcttaacatactttaattaacattctttaagaatataacaggattttttttttttttttttgaaacggagttttgttttgtcccccaggctggagcccaggggggcgatctcagttcattgaaagctccgcc

SEQ ID NO: 106072 - DNA, 474 bp, Homo sapiens
  misc_feature (1)...(474): n = a,t,c or g
cattgcacgccgtatgaagctgtacgcgcgccgcaccggccgggaagagccacgcgtacgcccacgcgtncgaaataatgagtcaaatcctgattaggatgtggcagagggattgtgaaataccagacaaaaaactggagatattgggctaggaaccagaagatctgggatcacgacttgctaccagtcagctgaatgacccggagcaagccacttaagttctttgggccagtttcctcatctgtaaaatgagacaactggactagaatagatggtctcttggggcttatccagagcaaaaattccttgggttctttcttttttttttttttttgaaaaaaaatcccatttttttttccagggtggggggcgggggggcgatttaagttgggaacagcctttgcctcccaggtccaagggattttcctgtttcaccctcccgagtacccgggattacaggcccgcagggccccc

SEQ ID NO: 106073 - DNA, 410 bp, Homo sapiens
  misc_feature (1)...(410): n = a,t,c or g
cggacgcgtgggtttctcatggtttaacaccatccccctgggtgctgttctcatgacagtgagtgagttattgtgagatctgattgtttaaaagtgtgtgccacctcctcccactttcctcctgctccagccatgtaagacaggcttgcctccccttcaccttttgtcatgattgtaagtgttctgaggcctccccagccatgcttcctgtacagcctgcagaactgtgagccaattaaacctcttttctctattaaaaaaaaaaaaaaaaaaaaaaaaaaaaaaaaaaaaaaaaaaaaaaaggggggnnanaaagaaaaaggaaaaggggggcccgcgggccgcccaaaaatctgtcctattttatgggcctatcaattatacgccgggcgctcgtgatattaagtggt

SEQ ID NO: 106074 - DNA, 390 bp, Homo sapiens
caagatcatgccactgcactccagcctgggcgacagagtgagactccgtctcaaaaaaaaaaaaaaaaaaaaggggggggaatttttcccaggtttcccatttggagttgggaaacccccctccccttttttggggaaaaaaagggggccccaggcccccccccttgggggggcctttcccggggaaaaaaatggaaaaaaagggagttcttggggaaaaggggtaaaaaaaaaaaaaggttttttttttttgaaccccggggggaaatggggctccccccgggggggaaaaaattttgaacaatttttttttcctccaagaaaattggggtttggaattaaaaattttttttttgggaaaaaaagggaaccttttttttttcccggttg

SEQ ID NO: 106075 - DNA, 412 bp, Homo sapiens
tcgaaaaatctcctgcctcagccctccaagtagctgggactacaggcatgtgccaccatgtccagctaatcaatttttaaaaattacatattggagtctcttttccaatgctgagttgccacgtttttccttggtgggagctgagggctctaaaatgactaacagatactcagggaagctggcagatgtgacttttagatggtggcacggagaatgaattctgatgcttactgctcctcccacttcattagggctgctagaactcccagcctgcttgagaaagagtcagaatagactggcgcaagtagagaataatataggatccatgttatctgcaactggaggtctggctgaatgatctttcacagactgagtctatgattctttgtactttcttaaataactaagttaa

SEQ ID NO: 106076 - DNA, 425 bp, Homo sapiens
  misc_feature (1)...(425): n = a,t,c or g
gtctctacgtaaatagaaataaaaataaaaaaaataagccaggcatggtggcacatgggaggctgaggtggaaggattggggaggttgaggctgtagtgaaccatgatcatgccactcctgttctgcctgggcaacagagtgagatcctgtcttaaaacaaaaaaaaaaaaaaaaaaaaaaaaaaaaaaaaaaaataaaaaaananaagggggnnnnnnnnnnnnnnnnnnnnaaaaaaaaaaaaaaaaannnnnnnnnannnnnaaaattaaaatatatttaaatttttttttattaataattaantatttttnnnttgataaaaaaaaaaaaaaaataaanattttatattantttttttttttttttttttttaataatataaaaaaaaaaaaaaaanaannnnnnatattattannnnnnt

SEQ ID NO: 106077 - DNA, 400 bp, Homo sapiens
ccgagatcacaccactgcactccagcctgggcgacagaacaagactctgtctcaaaaaaaaaaaaaaacatggcttggccaaggggttttttttaagggttcccaagggggcccccttcacggggggccggggggggtcccctttttccccggggggtacctaaaaaacaaacggggggttgggggccaggggccatggtttttcaaaaaaaaaattggggtggttaaaatggattccagggggttttattggattttgacggagggaagtttttccttgcaaaaaatttttcccagggtgggggccttctcttaagggggtttaaacttcctgccccaataacttaaaaatttttttttttaaaccggcgggggacaaatttaagggctggttatttgg

SEQ ID NO: 106078 - DNA, 408 bp, Homo sapiens
cggcgtgaacccaggaggcggagcttgcaatgagccgagatagcaccactggactccagcctgggcgacagagtgagactcagtctcaaaaaaaaaaaagaaaggaaggaaaggatggggcggcttttaaaggactaggtggtttgggagggttcccttttaagccctgttttggtggaaacttgattttaaaaaagggggccccacccttttttcccaaaggggttgtttttaaaaaacggggcccccaatttggtttggtcggcaccacctgccataacctcggggtggaaatgatttattttggaaaaaaggaaaacttatactgggcaaaactttattgagacgggaaaaacccccattgtcttgtttgacaaaggattgttttatggaaccaccgcattgctg

SEQ ID NO: 106079 - DNA, 397 bp, Homo sapiens
tgttgcacaggttggttgtgaactcctgggctcaagtgatcctcctgcctcagcctcccaaagtgttgggattgccaacatgagccaccatgcccggcctgctatttactattactgggtaaattaagaacaattaaatatcatgaaagttgtgctatggcaggtggaagataaactgaatgaggaaaacctagtggctaaaagactagctgctgcaatagttcgggcaaaggtaatgatctgaaatagagtagtggtgatggagatgcaacgaactggttggcttcggaagtcatctttggtatttaaatgccaggatttggtggctaattgaatgtgagggaattctgaaaagactgagagaacagtaacatcattaatctggattagtcatgta

SEQ ID NO: 106080 - DNA, 424 bp, Homo sapiens
  misc_feature (1)...(424): n = a,t,c or g
tggatgttgcagtgagccgagatcacaccactgcaatccagcctgggcgacagagcaagacgtcatctcaaaaaaaaaaaaaaaaaaaaaaaaaaaaaaaaaaaggggggccccccttaaaaaaaaccaaattttaccccccggggggggaaaaaatattttttttttttgggcccccaaaaaaaaaaccccgggcccggttttaaaaaccgggggagagaaaaaacccgggggaaccccaaataaaacggtttgaaaaaaaccccctttttcccgggggggaaaaaaaccaaacccccccnnnnnnnntgngggcgtgtggaaaaaaccccgtcccccatcaaaatatatctagtaaaaatcaccctcatctcctagcgcgggcaacacaatatcctaccacatcatttttaatataaaatcc

SEQ ID NO: 106081 - DNA, 398 bp, Homo sapiens
atataaccagagaaattgacctgcccgagatgaggcgggcatgactcaactggacgagaagaccctatggagctgtaatttattaatgcatacaggacctaacaaacccacaggttctaaactaccaaacctgcattaaaaatttcggttggggcgacctcggagcagaacccaacctccgagcagcacatgctaagacttcaccagtcaaagcgaactactatactcaattgatgcaataacttgaccaacggaacaagttaccctagggataacagcgcaatcctattctagagtgcatatcaacaatagggtttacgacctcgctgttggatcaggacatcccgatggtgcggccgctattaaaggttcgtttgttcaacgattaaagtcctacg

SEQ ID NO: 106082 - DNA, 416 bp, Homo sapiens
caattgtaggagtcacattgcatgcagagcagttcaaaaattgaatggttgtttgtgtgtgtgtgtgtgtgtgtgtgtgtgtgtgtgtagcaggggaggctcagagttttggcctctggctgtatggctgtatgcttgagagtatcctttgtctgaaacctgatgatgcaggaatttacatcttggaatgggagttggtttaaacaaggaaatttattcatcactgaattctcctgagagttcagcagctcctgtgagcatggaagcgcccccgtctcaatctttttggacaatgaagatgcatgttccaaaggatagatctctctgaaatgactggtttttcaagatagtaagaaagcagtattggccacagagatccaggtggctgcatgaacaaaaatgcaaccttgattata

SEQ ID NO: 106083 - DNA, 384 bp, Homo sapiens
caggaggcggaggttgcagtgagccaagattctgccactgcactccggcctgggcgacagagcaagacttagtctcaaaaaaaaaaaggggttaacatgaagtttttctgttggcactttggctatttgctcaaaaggattcttttaggatgttctactgagagatgcctttatagactcggtaaccaatttattttcttgggcaatagagttggaattacattaaagattaattttttacatgctttagtaagaataaataaccaaaatattgaaaaccagggtttccccctacaatccacaagcataaacattaaggaacacagctttgaagggtgtttatatgggacagtgtttaacagaaagccctattacaatattacc

SEQ ID NO: 106084 - DNA, 420 bp, Homo sapiens
attttaggacactcggacaaatgggtgtcctgtgtgcccactctgcagcccgggaagctgatgtgcagccaagctctgcacagaggctcacacggcagcctctgcagacacgcacaccagcccccacgggagcgtctccgggctcttttgctttcacttccctcctcacagacgagaacagagaagccgcccaggcaggaagccaggcgcccacaggttggcaggaagagcacttagtcaaaaacctgtgggctcgggggccacacctcacaacctgcaccatcagattcgcacacaaacaaacggactcatccaattactaggagaccgccaggcgccatgggtcacacctgtactcccagtgctttgggaggccgaggcaggaggatcacttgaggccaggagtttgagaccagcctg

SEQ ID NO: 106085 - DNA, 492 bp, Homo sapiens
  misc_feature (1)...(492): n = a,t,c or g
ngtnnnagggatggcggggnnnnnnnnnncctcgatgaccctagtccagngncgnggaattcgccaccaccgccagctccttcgcagagaacttctccaccagcagcagcagcttcgcctacgaccgggagttcctccgcaccctgcccggcttcctcatcgtggccgagatcatctatagctctcatcaccttctatccggatcaaccttgtggtttgagttttaacaacctggcctggaaacagaatgttttgtgtttcaaggagagattattggagaaaatgttcagaagaatccaggttctggggctgctggtatggacgcttattgctggaactgagtacttccgggtccccgcatttggctgggtcatgtttgtagctgtattttactgggtcctcaccgtcttcttcctcattatctacataacaatgacctacaccaggattccccaggtgccctggacaacagtgtgcctgtgctttaaacgg

SEQ ID NO: 106086 - DNA, 410 bp, Homo sapiens
ccgtcttcaagggattctctctgcagggttcttggttcctggcgacacctctgtttcctcccctaggccacgtgctgctgggtctcagtcctccacttcccgtgtcctctggaagttgtcaggagcaatgttgcgcttgtacgtgttggtaatgggagtttctgccttcacccttcagcctgcggcacacacaggttagaagtaaacctttcagatgcaaaaaggcttgcctgtagcttcgctggggaaagatgttatctagagaagtttccttgtcagaaagcaaagtgtgggccgagctcggtggctgccggctgtaatgttagtacttgagagccctaggcgggtggattgcttgagcccaggagtttgagaccagtttgggcaacatagagagacccacgtctcta

SEQ ID NO: 106087 - DNA, 346 bp, Homo sapiens
gggaaaattgcccgcctgaggtaacccggcatctgatgccgttaacgatttgctgaacacaccagtgtaagggatgtttatgacgagcaaagaaacctttacccattaccagccgcagggcaacagtgacccggctcataccgcaaccgcgcccggcggattgagtgcgaaagcgcctgcaatgaccccgctgatgctggacacctccagccgtaagctggttgcgtgggatggcaccaccgacggtgctgccgttggcattcttgcggttgctgctgaccagaccagcaccacgctgacgttctacaagtccggcacgttccgttatgaggatgtgctctggccg

SEQ ID NO: 106088 - DNA, 376 bp, Homo sapiens
  misc_feature (1)...(376): n = a,t,c or g
gtaagaagcccactagtctctgtggtttaataggatactagtgggacgtctctttcatatatatatgtatatatatatgtgtgtgtgtgtgtgtgtgtgtatatatatatatatttggtggnnggcnatggctgacacaagttctccctctggcatccagactgtagagtctagaggcaaaacacagctcattgcactatggatctgtcgggtgaaggtatgcttttgtctcatgcttgcggttatttggcctcaccggggccttctatgccatgataatcgtctaagtcctattgagaaccgatgtggcctaaatatgtgtgctcagcttctgttgtttcctgtggtacgcggtactcccaccttgggctcccag

SEQ ID NO: 106089 - DNA, 395 bp, Homo sapiens
ggaggtgatccacccatctcggcctcccaaagtgctgggattccaggcgtgagccaccgcgcccagcccctgcaatacgtcaacagtccctagattcaggcaacatggagttgcagccaaggaactttgaggtagtgaccaatgcagggaggtctgacagagaatcagcaggatccatttcatggccaccacacatctgactgactccttcttgggctaagcaaatacttttgtgggcagtgacactggcagctgctggggtcttggcaggaggttggatggaggtcttctcccagagcagtgtccagcttgcaggaatgctccctgcgtctcagttgtgcccattccaggtccaggggaaagaagtgacccgcttcccctctgaaagcagatgt

SEQ ID NO: 106090 - DNA, 401 bp, Homo sapiens
ggggagaggcggatgttgcggtgagccgagactgcgctactgcgctttggcctggtgacagagcgagactccgtctcaaaaaacaaaaacaaaacaaacaaaaaatgactaagtactaatacatgctacaatacggctgaacctgaaaacatattaagtgaaagacttcaagccagtcacaaaagaccacatattttcacaaaagaccacatttatatgaaatgtccagaacagttaagcagtgtagtggttgcctagggctggggagtagctgggagagaaatggggagtgactggtaatgggcacaggatttcttttggggggtgataaaaatgctctaaaattgtagaatagttgtagaactctgcaatatactaaaaccactgaattattttaaatg

SEQ ID NO: 106091 - DNA, 477 bp, Homo sapiens
  misc_feature (1)...(477): n = a,t,c or g
cgagcgttttggnnccgaattcngcnnactnctaacnncagnnnggangagggctagccatgaggaaaacgtaagcctgagctgtttgctggctatctttgtttccacatggggatggcctgcctgggaatgaagccacacagagaaaacagaagagcagtgaagagaagggtaaaaggagagatcccatgacatgatttgcactcttagatccagttatgcctgatgcaggacccaccccttggacttcccatttccaggagctaaaactagactgagttgagtttctgtcactgacagttgacagaaaatatcaacaatccagccacatggagcctcatggcagtaccactaaccctggtcaccacatgaatactgaccagagatggagtttcgctcttgcccaggctggaatgcagtggcacaatctcggctcaccacaacctctgcctcttgggttccagngattatcctgcn

SEQ ID NO: 106092 - DNA, 574 bp, Homo sapiens
  misc_feature (1)...(574): n = a,t,c or g
gagcgtcgnnnnnnnnnncttggaccaccgtttcgagtggcggaattcctctgtcacccangctggtgtgcagaggtgcaatctcggctcactgcaacctctgtttcccaagctcaagtgatcttcccaggtactttaaaagatagaaagatgctcatcctagtgacagaccaagagacaatacaacccaaattggacaattaaggtgccgtgattccctacaagtattgctttattcccctctgttgccaaagtcctatactgagacattcataagtccctcatggggactaatagatcaatttaaagaataataaataagaagtcaggaaatattcagtgaaatatagaaaatattttttctgtatcccctaacaattgtgtacttatttatcctttaaacttgaatatggcatatattacagactagcccaaatctaaatgtactttcaagagtcttgactcttaagtagctatttgaagntaataagatgtgggtacaggggtctttatgtcttattacatgcccctatacatgacatacttaaagtccattattaaagtgacatcaagt

SEQ ID NO: 106093 - DNA, 448 bp, Homo sapiens
  misc_feature (1)...(448): n = a,t,c or g
ntcgagatccctagaccagcgtggtggaattcccgggacaggggatctgttgcctcggcaccgtaatccatctctttctttttcaagtagaggagtgagctcctgtggaatgggagcaccattcatggtctgtaggtgggggtgtcagccccaggccctggccacaccccggcctctcagccttttcctgaccctgggagacggaggcccacaggtgttggtttcctggctataaacaaagtctctgcagcactgtgacacattcatgatggccatgacgcccacactggaaggttgtgggtttaccggaatgagggcaaggaacacctggcctacccagaatggaaaaccgcttaaaggcgttcttaaaccacaaacaatagcctgagcgatctgtgccttaaggacatgctcctgctgcagttcactagccagagccaccccttta

SEQ ID NO: 106094 - DNA, 445 bp, Homo sapiens
  misc_feature (1)...(445): n = a,t,c or g
ntcgagatccctagtccagcgtggtggaattccggngtttcaccgtgttggccagtctgacctggaactcctgacttcaggtgatctgcccacctcatcctcccaaagtgctgggattacaggtgtgagcccttgtgctcagtcagatttagcattttaaacgagttcccagctgatgctgatgctgctggatcaaggaccacgctctgagaagcaagggtttatggggctttcttggactgcactctggccaaacgcagtgactccagtaaggcgtggcctttgcaaccacaggaagagcagaagtctgctgtggagccgcctgcatccaagtccagctctgctgcttgatgggaatgggcccttgggacagattcttctcttggaatctgagtgttctcagaggaggcagaggatgttgacacaaacttacagactgggactn

SEQ ID NO: 106095 - DNA, 495 bp, Homo sapiens
  misc_feature (1)...(495): n = a,t,c or g
ggcggccccccctgaaaaccagttangcccgcanggncncggaanagnnacctntatggagatgttctcttttctgaactccagctctgctattttctttcattcatattctactgcctcttcagttgctacttcaaaatcaacatgtccaaaacgaatttattctctacttccaaactagcccattgtcagtattattttttcttttttgtaaatggacttaatttcactgagacaacactttgactagaaatctcagttaccttcagctgttcttttggctgtctgcccaagaaacatatacatacacatacacacacacacacacacacacacacacacacacacacacacacacacacctatatacgcacaatatatactactttggcgagaccgctgagtgcgctacacaatttttaactctattctgtggggaacacagcgtgcctttatatctgaattaacaggcatataaagagctttatgatgtgg

SEQ ID NO: 106096 - DNA, 474 bp, Homo sapiens
  misc_feature (1)...(474): n = a,t,c or g
atcgagaccatttgaagncgcnggaannnnnnnntgcagtgagttgagatcgcgccactgcactccggcctgggcgacagagtgagactttgtctcataaaaacaatttaatccaattatatatgcttttcaaaaatgcagaaaattgcaaaaggaaaaaatagttaatgagctcaatacacacagacagcagttgacattaccagtttctcaaggttttactctatcacatattttggtggctattttcgccacaaaaactgttctgtagtctacctctccactcagtaccaggtcttgaatgtcttcctatatcggtaagaaccagctgttttcaataataatttggtaattggttataaaatgagtaattaattgcactacgttattatccctttggtggttaaagccaccttcagcagcaggaacaagcatcagatattaagtgatttaaggatcagtttcctgagatgt

SEQ ID NO: 106097 - DNA, 466 bp, Homo sapiens
  misc_feature (1)...(466): n = a,t,c or g
cttgatagcagtccctaggccagngcggtggaattcaaaaactgaaaatggatcccttccttacaccttttttgtatttttagtagagaacaggggtttaccgtgttggcaaggatggtcgatctcgatctcctgacctcctgatttgcccgcctctcggcctcccaaagtgctgggattacaggcgtgagccaccgcgcccggcctgcctccctcttctttcccacccctctcccccaccccacttctccttcctctccccttttctctcctttagtttaccctgctccccctttctttacattttctttcctcccccactcctgccaatcagtctccgttggcgtctcatccctgagggcagattcatggcacctttatgtctccaaatgcctttaggccacgatacatagttcacattccctttattgaatttttttgtttgtttgaagagacaggatctccc

SEQ ID NO: 106098 - DNA, 467 bp, Homo sapiens
  misc_feature (1)...(467): n = a,t,c or g
cttcgaatagcactacgccagngcggnggaattccagcactcttagcttcccagctactttctctcccattttctttttgagctccttctcccattctgcccccaagccgtcttggcttggcctacctctccacctgtcctgtctggatgtgggaaaagcctggggattaggaggactttggagtcaggcagttcttagtttccatcctagttttggttgtgcggggctgtggacaagtaacattacctctaagacagattctttatttgtaagatggggttagtaatagccgtctcatagtggtgctataggaagtaaactgaagtgacttacaaagtgcttggcctggggcctggcatacagatgctatcagtggattagtagttattacttttttttgagatggagtcacactctatcaccaggctggagtgcagtggcgcaatcttggctcactgcaacctcc

SEQ ID NO: 106099 - DNA, 472 bp, Homo sapiens
  misc_feature (1)...(472): n = a,t,c or g
ctcgattgcagtccactaggccagngcggnggaattcgatttttatcctcttcagaggtttaatagccatttataatcatgttaattaacatattttgcttattttgggtttgtctccctcattagtatataagaaccaaaaaggcccaaagtgcacctatcttatgtgctgtaatagcccagtgcttggcacaataccacaaaaagcaggtgctcagaaaatgcctgtcaaatgagtggatcaattgacgctgcactggcacatagaagtccaaaagtagagggggcaaaaataaacccttgtgaaaagcagcaatcccctgttggggaggggtaaaaataaaagttcctaccatttgacccagcagtctcattactgggtatatatccaaaagaaagtaaatcgttctatcaaaaggacacatgcacccgtatgttcattgccattctattcacaatagcaaacacatgg

SEQ ID NO: 106100 - DNA, 422 bp, Homo sapiens
aggtttcagtttacttgactgcatacaactgcctaaggttatgttggagaaatggtcagtaactagtaagtctaacgtataactggtcctggggaaatgccatatttttaatcttgaaaagtcgactcattcattgttatataagataatcctacttcctttttttgtttgtttttttttttttttggaaacggagttccgttttgtggcccaggggggggggcaaaatgggaatttggccccatggaaacttttgcctccggggggaaaggaattttcacccctaaccctcttgagaggggggaacaaagggcccccccccccaccccgggttattttttgtttttttaaaaaagggggggtttcccctggtgggccaaccgggcttaaaattccggacctcgggggtccctcccccctac

SEQ ID NO: 106101 - DNA, 510 bp, Homo sapiens
  misc_feature (1)...(510): n = a,t,c or g
tggtgcnccnnnatcgtagtctctagtccgtgtggnggaattctgatacagtggtcgggtatacactcagagacgccagaacattctcattgcgttttcactgctttggttaacatcttggtctcctgtccgcactctaaagaaccatttgaggactcaggggagtcatgtcctgggagtgactatgggtcctaggccacagcccccactctctcagcctaaaccactcaaaggcactcagatccggatttgcaaaatattttgcaaaacttgcaaaaaccccaccagttttagattttgaaattgttggcacaggcaaccgtctacaatcatgaaattctcatgagtgaggtggaacagatttctgtaaacaaagcaaactccagtctctccagcctgctgtagaaatatttatacccggccgggtgcagtggctcacacctgtgatctcagcactttgggaggccgaggcgggtggatcacctgaggtcaggcgttcgagaccagcct

SEQ ID NO: 106102 - DNA, 463 bp, Homo sapiens
gccccccctttgaaaccgtatagatagacgttccgcctgccagtaccgggccggaatatccgggtcgactatttcgtacaagagcgaagctccatcttaataaataatttaataaataaacaaataaacggtacatcttgtgaggcacttaccatgaatgaagcttgtaggactggaagttgctctgggtgagtcacaggagtaagtggtgagtgaatgtgaaggcctaggacattactgtacactttataaacactatacttaggctacactaaatttactaaacatttttctttcttctataataaatcttagctttctataactttaatttttttgactcttttgtaataacacttaaaacacaatcacatggctgggtgcagtggctcacgcctgtaatccccacactttgggaggcccaggtggacggatcacctggggtcaggagttcgagaccagc

SEQ ID NO: 106103 - DNA, 473 bp, Homo sapiens
  misc_feature (1)...(473): n = a,t,c or g
nattggaagctgtacgcctgacgtacatggacggctttcccgggtcgacgatttcgtgaacatgggaggtggaggttatggtgagccgttattgcgccattgcactccagcctgggcaataagagtgaaatttcttctcaagggataaaaataaaattaatcagaaaaaataagatacatcagtagcaatcacaatgcagttctttatgaccagatagcaacctctatgtacctactaatctcgtcttcaatggacacaattccttacgttaaaaagaatctaatgtaccaatttaaacttgcatttattatattaaggcaatagtcatgattagaaggaaggcaaaaaaaaattattcccatattaggaagatgaagtatgtctgttaccggggcaaactatcaaactgaatttcaaaactgacaggctctccctgaagtcctagagaggatcttgtgttcactaattcaga

SEQ ID NO: 106104 - DNA, 592 bp, Homo sapiens
  misc_feature (1)...(592): n = a,t,c or g
tttcgtggctggcagtccgtctgtccaccccgccgcgccggggcagtctaggcggagcgggggctcaggcggcggcggcctcgacgcgagtgagtgccgtggttggggtgctggacccagagtgcctaccctcgcctgcnnnnnnnnnnnnnnnnnnnnnnnnnnnnnnnnngtgaccatccctgccctgctggctgccaggagcggctgtgagtcttcaggcgtggatgcagcctgggggaagccatagggcgctttcacaggcctggccttcaccatggcgggagggagaccgcatctgaagaggagtttctccatcatcccctgctttgtcttcgtggagtcggtgctgctgggcattgtgatcctgcttgcttaccgcctggagttcacggacaccttccctgtgcacacccagggattcttctgctatgacagtacctacgccaagccctacccagggcctgaggctgccagccgagtgcctcctgctcttgtctacgcactggtcactgccgggcccaccctcacgatcctgctgggagagctggcgcgtgcctttttccctgcaccacctttagccggcccagtc

SEQ ID NO: 106105 - DNA, 413 bp, Homo sapiens
tttcgtggggaggccgaaagtttctctgcccgcctcggtcattgagtgggagccgggagctgcatcccgcgcagggggaccggcccggcccgctcagcagctctggaaaaagagagacgggaacacaccgggaaacactgggaaaaaaaaaagtctcaagtgcgcccgaggcgcagggggcaggtctacggctctcgcaggctctgggagggctttgctatgacctcagtcccctcacggagccacgactgccccttgctgccacagcctttccaagaccctgcccggccctgccccatcctcagccccgagtcaccatgggcagcgtcagtagcctcatctccggccacagcttccacagcaagcactgccgggcttcgcagaacaagctgcgcaagtcctcccacctcaag

SEQ ID NO: 106106 - DNA, 411 bp, Homo sapiens
  misc_feature (1)...(411): n = a,t,c or g
atcgcgagcgccgccccatcatactctttcacccacagcaccaatcctacctccatcgctaaccccactaaaacactcaccaagacctcaaccccatggcctccatgactttttcaaannaaaaaaaaaaaaaaaaaaaaaaaaaaaaaaaaaaaaaaaaaaaaaaaaaaaaaaanngggaagggggccccaaaaaaaaaaatcttggggggcccaaaaaaaacacggggcaaaaaaaaaaaatttttttttttatgagggggttaaaaaaaaaactcggggggttttttgaaaaaaaaattttttttggggggggggaaattttccaaaccccccccccaaaaaaaaaaacccgcggaaaaaaaaaaaaatttttaggggggggggggggaaaaacccccccccccccca

SEQ ID NO: 106107 - DNA, 882 bp, Homo sapiens
atagagttcgatacacaagcggaggaattcctggagcgttcggcggacagtgagcatgcgtaccatatctgaagttcgtaaattgaaattgaacatgcgtaattaatctttctgaataggaaaaaatatatacacaacaaaactctccgtttatggaacatgcgcatttgttctcagtaagtttttcgttttgaaagtgagcatgcgcatggtgagtaggttggtccgaagtttgaaccggacagaagcgctggtcggcgtctggcggttgtttttagaggtaatacacctagtttgtggctcagcatgtcaattgtaacagtgcaacttggtcagtgtggcaatcagattggttttgaagtttttgatgctttgcttagtgactcacacagttcccagggactctgctctatgagagagaatgaggcatatcaagcatcttgcaaagaaagattcttcagtgaggaggagaatggagttccaattgcccgggctgttcttgttgacatggaacccaaagttatcaatcaaacgctgtcaaaggctgcccagtctggccaatggaaatatggtcaacatgcatgcttctgtcaaaaacaaggttctggaaacaactgggcatatgggtaagaataatttcttgtgattttcagtttagtgacagctacacagtcaattaatagatagcaaagttagaactgtatagttgatataccaagcacataatcttgaaattgctgttttagatttagaattttattttacccagaagaaactttcattccatgcctatgtctgtacttaaggtacaggtaatgttgaaatgaaggatatctttcagcagggttttccatcttctcactgtcatgctgcaaactaact

SEQ ID NO: 106108 - DNA, 483 bp, Homo sapiens
  misc_feature (1)...(483): n = a,t,c or g
acgcgccatagatagcactccctcgtgcggngcaattcggcactccatttccagataattgaaaagacatagggccttgctctggattaagcgttggcttgatggtatgttataacttgtttgatattctatatgaatcactaaaatgttctccatatcagcaataaggctgtttggctttctcaatatatatgtgtttagtgaagtaacacttttaatttttttcaagaacttttcctttgcttccacaactttgctatttggtgcaagaggcctagacttcagccactcagcctgccatgtgccttcctcactaagtttaatcattttgagattttgatataaggtgaagaaagtgcaagtcttcctaccacttaaacaactagaggccatttcaagattactgcgtctcctatattcagtatgtttctgtctcaagcaatanggaggccctatgtggagaaagaagatgaaggaccactc

SEQ ID NO: 106109 - DNA, 1327 bp, Homo sapiens
  misc_feature (1)...(1327): n = a,t,c or g
cggtggaattccaggcatgagctactgcgcccagcctgattgtttgacttatgaagtatatacctatctatgaacaagaactgaaggaactttaccccagaatgaagagtttcactggatggaacggcagagtcggaggagaattattcctttaatttttatttctgttgatgttgcaattgtttttatgcagtgcaagnnnnnnnnnnnnnnnnnnnnnnnnnnnnnnnnnnnnngcatgcaagctgtgaatgtttatgcatactcaggaggaagccttctcagggtcactgtttccggaaactgaccttgaaaacagacctgcatttaaatatcacagatgtactttgacgaatgaggaagtaagagacatagaatggtaactaaattcatcagggtattatatattgagcaactgattcttctgggaaaggttgcacccagtttctttttgaggaaacacctctcttcccccactgtcaggccatgttctctatagagttctggtctcctgagtcatgttaatcaataaattctcatttttgtttaagccagtttggattcgatttcccatcactctccactaggaaatttttactgattcaggatagttagccagctaggaagagccagctctgcagcccactgtgggtgacagcgcctaggtcaggagatcttatcaagcctgcagataggggcagcagagggaagctggggcaagtggcttcattcataaaggggaagactatcaggaaggcaagcagagcccgtcagaagccagacctggaaaaagaaaaaggctctaggtcagcaagtgaatgtgatatttttcactttgaagatgggagccaggggaatgaaaggagaaaggaagaaagaaatcaaacccatgacataaaaagaatgcctatgcccttctgagtcagacacttacaggtaatccaaaaacttgagaaaaaaattgctgttatacattaccgttctgtcaacaaatcccttgtagctttgaatatactgggtaatttcctctgaggatttcttactccgaagaaattcacatctgtaattaataaatataattaaaatttaccccagtactgtgatagagctgtcctatatcacaatgaacatttataaagacgtattgaattgttgaattttattatacttcaataaaattgccaaaaaatttaccacaaaacttaggagcattaccattattctcatataattatttgttatttctattagtggcaacatgtgtagttatttaaaattaaatcttcaggttaacttttttcttgaaataaaacatgcaatacaatca

SEQ ID NO: 106110 - DNA, 347 bp, Homo sapiens
ggcaatggctgcaggctcccggacgtccctgctcctggcttttgccctgctctgcctgccctggcttcaagaggctggagccgtccaaaccgttccgttatccaggctttttgaccacgctatgctccaagcccatcgcgcgcaccaactggccattgacacctaccaggagtttgaagaaacctatatcccaaaggaccagaagtattcattcctgcatgactcccagacctccttctgcttctcagactctattccgacaccctccaacatggaggaaacgcaacagaaatccaatctagagctgctccgcatctccctgctgctcatcgagtcgtggctggagc

SEQ ID NO: 106111 - DNA, 205 bp, Homo sapiens
  misc_feature (1)...(205): n = a,t,c or g
attgaccccccattgannnccnttgcagattattctgttttccatctaggttgttggggagagtgatagacaaagttctggattctgggcatcgtcggcgcatgcttgtaatcctacttgggaggttgagacaggaggatcacttgaggctaggagttggaggctgcagtgtactatgttcgcatctgtgaagtcgacgcggccg

SEQ ID NO: 106112 - DNA, 329 bp, Homo sapiens
ccctttcgtacagggaggaatttgaagtagatagaaaccgacctggattactccggtctgaactcagatcacgtaggactttaatcgttgaacaaacgaacctttaatagcggctgcaccatcgggatgtcctgatccaacatcgaggtcgtaaaccctattgttgatatggactctagaataggattgcgctgttatccctagggtaacttgttccgttggtcaagttattggatcaattgagtatagtagttcgctttgactggtgaagtcttagcatgtactgctcggagggtgggttctgctccgaggtcgcgtcgacgcggccg

SEQ ID NO: 106113 - DNA, 455 bp, Homo sapiens
  misc_feature (1)...(455): n = a,t,c or g
nttgatttcattacagcttgacctgattacnnnnacttggcacgaggagcacatacactaaaattggaacaatacagagattagcctggcccctgtgcaaggatgacatgcaaattcgtgaagggtttcatatttattttattaaaaaaaaaaaaaaaaaccggccccgggggttaacccctggggccctgaccttttgggaggcccaggggggggggtcatgatttcaggaaatcgaaaccttcctggccaatagggggaaaccccgtttttactaaaaaacgaaaaattggttggccttggggggccccccctgttttcccggccaatatggggaaaccccgtctttactaaaaaacgaaaaattggctggccatgggggggcccccctgtattcccggttactcaggaggctgaggcgggggaattctttgaccccgggggacagaggttgc

SEQ ID NO: 106114 - DNA, 459 bp, Homo sapiens
  misc_feature (1)...(459): n = a,t,c or g
nttgannnttgtaagacactcttgaccatcattannacagcttggcacgaggcgcacatccgtcgagcccgaggggagatttgccggttcaattttaactgcgatattgatcttgggggtgactgtccctggccggctgtcgggtgggagtgcgagtgtgcactcgctcggaagtgtgtgcgagtgtgtatgtgtgtgtgccgtgtcgggctccccccttccccccgttttcccgtcgagtgatgcacttggaatgagaatcagaggatggaaatagtctgggaggtgctttttcttcttcaagccaatttcatcgtctgcatatcagctcaacagaattcaccaaaaatccatgaaggctggtgggcatacaaggaggtggtccagggaagctttgttccagttccttctttctggggattggtgaactcagcttggaatctttgctctgtggggaaa

SEQ ID NO: 106115 - DNA, 454 bp, Homo sapiens
catcattacgccaagcttggcacgaggtggcacgaggaaaatataacatacaaaggagaaaaacacactttttacattcatggtaaaatcaactatacattaaaatgaatcactgtggaaaacatcagtaattcaacaaccttgctgctgacctcttattcagttaaatgagagcaagtgttgaaacagctggtggtggttcacatcaaaatcaagaggaaggtgctgttgtatgcagattactcttctcaaatgtcatagatttcttctgtacttgcttaattagtagttgaaatgatagtaattgtactttttgttatttccatttcaaatcataaatagaatggttttgttttttgttttttgttttttttttgagacggagtctcattctgtcccccaggctggagtgcagtggcgcgatctcggctcactgcaggctccgcctcctggg

SEQ ID NO: 106116 - DNA, 459 bp, Homo sapiens
  misc_feature (1)...(459): n = a,t,c or g
ggggtgataccgttgaccagttgacacgtttgaccaacgacgggagcttggacgagcaaaggatcggnatatatggaatttgaggctagctaagctgtatttagttaggaacattgaatttttacctaaaggacccttttttcatccaaaggtagacattttattgccattatgaagggtactccccatttagaccaaaatagtgagcttttaagctgtgccagggacttaacaatagtaaaagctattgtatagatttttattcaatgggacctataatacatttctgattccttctgtattgaatgtcccagtttccatattaagtgctatgccctgtataacattaatgaatttaatagtgtacaattttgggccaggcatggtggctcacgccagtaatcctggcactttgggaggcagaggcaggcagatcacctgaggtcaggggttcgagaa

SEQ ID NO: 106117 - DNA, 531 bp, Homo sapiens
  misc_feature (1)...(531): n = a,t,c or g
gagagtncccnnnaatttgataccctttccaagnggcggaatttctacatgcatgccaagctgcgttcgaactcctgacctcaggtgatctacccgcctcagccttccaaagtgctgaaattacaggcgtgagccacctcacctggccatgttctttatggaagactacaatgtgttgtcacaggatttgttattcagatgtcaatcatttttatttatatatttctgggtaaaacttattagtggtgtgaggagtgcagaatatggaagcttacctaaattctttttctgccagccaacattttaaaagacaaatgatgcatcctttctcaatgctgctaattctttaaattttacatgtcccaatttattccatttgagatttattttaatgttttcaacccctgtgtaacatgtatcatgaggagaaagcactatcattgatcatcactatggattaaaatataggaatattttacagggcagtatgggtgggggtgggagacatattggaatcgtgttttcttggat

SEQ ID NO: 106118 - DNA, 626 bp, Homo sapiens
ttggcgatcactaggtaaaaccacgggtgcaggtgtcatggcggccccaggtagaagctacatttgcataacaaaaaattagggtgggagggccagtctttagacgggctatgtaaatgattcacctggtcaaaccagtcccctgggccctatgtaaatcaccgcctcctcaagcctctgtacaaaatcgattgcgtttcaccccaaacccggagaccctctcttgggtgatatttctcagcgtgaggaacctttccctattaaattttccgctcctaaacccactccttgtgtgtgtccatgtcctgaattctttcttggctcgagacaaccacgggtgtatcccccaggcaatggagccatttcattatgaggtaaatactataaaaatcatttttaaatttttttccaagagatgggattctcaactgtgttccccaggctggtcttgaactgggctcaagtgatcctcctgcttcagccttcagagtagctgggactacaagtgtgtggcaccattcccagatataaaaatcctaattttatgaaggataaaactggtgcttgaacacaggtactcaaaagcaggttctgtgctttccccttcactagagagcctgttaaac

SEQ ID NO: 106119 - DNA, 380 bp, Homo sapiens
cggacgcgtgggcgtgtcgcgtgggcgggaagtggaggttgcagtgagccaagagtacaccactgcactccagcctgggcaacagagcgagactccgtcttaaaaaaaaaaaaaaggaccccctttttatggccctaatcatcccagttggggccagtcctggggggggaaagcccgttttaaaccttaaaggtggaaaacccctgaaagatcttcccccccacccctttgttgttccagaccaaaagacagatgcccaaccgggagaggccctttgcccacggtcatacggggggtggccacaaaaccaggaggggggcctttcctaggggggcctcactgcctcttccagagccggggggccccataaaacccacttt

SEQ ID NO: 106120 - DNA, 374 bp, Homo sapiens
cgggaggttgaggcttgagaatcgtttgagcttgggaggtggaggttgcagtgaggtgagatcgtgccactgcactccagcctggcaacagagtgaggctctgtctcaaaaaaaaaaaaaaaaaaaggtttttcccttttttgggaaattgcttgcccccagggggcaagggttgtaaaaaggtggagccccccttggggcccggcctgggggaaaaaaccaaattttttttaaaaaaaaaaaaagggggggcctttttaaaaaacacaatttttttagcccggggtggggggggaatttttttttttgggggcccctaaatataatcttggggcggggtttaaaccggggggagggggaaaaaccctgggggc

SEQ ID NO: 106121 - DNA, 413 bp, Homo sapiens
cggagcttgcagtgagccgagatcgcgccattgcactccagcctgggcgacagagcaagactccgtctcatagaaaaaaaacaaaaagatttccttcctgaattttggaggaataatggcacttaatatctccaactttttttaaaaggggtcaaaaaaaaattattattttacttttgtttggccagaaaaaaagggaaaaaaattttgagggaaaaaattttgggggaaaattttttataggggaataggaaagttttttgtttatttttatctgggaggtggaatttttttcaaaaaaaaaggtttatttgttttgtcttccaacccccccaaattaaaaatttcttcgaaatttggaggggggctgggggggggggttccccccaataaccccatttttttggggggcc

SEQ ID NO: 106122 - DNA, 418 bp, Homo sapiens
cttgaatctgggaggtggaggttgcagtgtgccgagattgcgccattgcactctagcctgggcaacagagcaagactccatcgcaaacaaagaaacaaaaacaaaacaaaaaacaaacaaaagctgtttcagaaaattggaaaagaaagaatgcttcttaattaactttatgaggttagtataatcttgtttggtcaagggcaatatgagaatattataggcaatctcatttgtgaagagaaaggcaaacttcctaaatgtattagcaaactgtatatagatacacacaccagggatacaaggacagtttaaaattagaaaacctaaagtaatttgccaaattaatgaagtaaagaagaacaatcatataatcatctcaacagatgcaagtagaaaaagcatttgataaaaattccgt

SEQ ID NO: 106123 - DNA, 475 bp, Homo sapiens
  misc_feature (1)...(475): n = a,t,c or g
ggaagcgnggcagaaacaccgngangaaagatgcgggtcgacccgcgcgtnctagagaatgccagcagctggcatatggtgattgctgaataagctgcccgctgacacatgcctcctgcaggcgcagagaactggtttgtatgggtgattctgaatcctcattttattattgtttcaaagatgcatttctgtggctatcctgtgccatagagaagagagggaagaagaaagggaatgaatgaatgaatctgattctgtctgttggggcaatggctggggtgagcagatagacattttataccttcataatgattcttttggtcctgttcatcctttcagcagggatttggtggtggtattactattattattattattttgagatggattctcgccctgtcacccaggctggagcgcaagtggcgtgatctcggctcactgcaaccttcaccttccgggttcaagcgattcttct

SEQ ID NO: 106124 - DNA, 404 bp, Homo sapiens
catgcaggtgcttgcgcatacacacacacaaacacacagacacacacacacaccctgtggtttgcagtcacacacttgcctatagacactgagctctgctcccatgatcagggatcccattcacatgagagcctcgccatgggctcacacatatatagaacccccacatgaggactctaatgacccttgacccagaaagatgcaccctaccctccaggcctctataggctgggaggccccgtggtgaatcagggagccatcactgagtacctgccctctggccccactgccagcctgtgactcaagacagaaccatagactcctggtgccagggcccaaatcacaggctatgggagtggtagagcacccctgccatgctgcccccttttcctcccaccctataa

SEQ ID NO: 106125 - DNA, 498 bp, Homo sapiens
  misc_feature (1)...(498): n = a,t,c or g
agtggacggggnnnnnnaaaactgaagccttgagagtcgtccgccggaccggatggnccggaacgacccacgcgtgcgagcaggctgggcatagtggttcacgcctgtaatcccataactttgggaggctgaggcagccagatcacttgaggtcaggagtttgagactaagctggccaacatggtgaaacatcatctctactaaaaatacaaaaacaaaaaaaaaattagcccaccaccactccttggtaatttttgcatttttagagagacaggatttcaccatgtttgaccaggctggcctacaactcctgaccttgctgggattacaagcgngagccaccgagcctgcccactaagggccctattttttttgatacaagaatgaacccaattgtcctcttaggtttattagtagaaaggcgttgcaaatgtataaaattacaattgatttctgtatgttgaccatgtatcctgcaacattgctaaactcattcat

SEQ ID NO: 106126 - DNA, 419 bp, Homo sapiens
ggaggcaggaggaacgcatgaacccgggaggcggagcttgcagtgagccgagatcacgccactgcactccagcctgggcgacagagggacagagcaagactctgtcttaaaaaaaaaaaaaatactcagggcaggaacacttcctccaggaagccttctttgctgttctggggcctcctttgggcacctgcaggcccttcggggatctgattagcatggattattaccaaattaccatagcggttaggctcttggaaaaaccaaatttcctggtttccagtcccagctttgacacttaccagcgggggggcttccctgaatacttaaccctttctctgctggggctcccttatctgaaaaaaagggtagtaggttgccatgaggactgagttaaaattaagtaagataaagcaaagaag

SEQ ID NO: 106127 - DNA, 419 bp, Homo sapiens
gaggcaggaggtagcagtgagctgagatcacaccattgcactccagcctgggcgacagagtgagactctcttctcaaaataaataaaaggggttttaaaatttgttgtggggggcggggaggattggtaaaggctaggaaattcatttaaaaagaagacccaatgtttgtcatggcatcttcaacttccaccctcagggatggagggagatgtgcacttggccttttctagttggacaggtgtgcaggtgagggcaggactcctgggggctttaatcggccagggtttgcctggtgcacactgccaagaaggtgaaaagacgcaggatagggatctcctataggcggtaaagggatgggtcaggtgtaagtcatcacacgctcctaagccctgagcaaatcacccaggatccggtggag

SEQ ID NO: 106128 - DNA, 390 bp, Homo sapiens
  misc_feature (1)...(390): n = a,t,c or g
aggaggcacgtggctgtggtcccagctttttggtataggtggggtgggaggttcacctgggcctgggaggtggaggctgcagtgagctgtgatcgcatcactgcattcgagcctgggtgatggagaccttgtctcaaaaaaaaaaaaggaaaggaaaggatccccccttttttgggcctggggggggataaatattcaaaattattaaaaagagttccggtttaaccccaaaatcttttgggacagaaaaccacggggggactttgggaccataaacctccctaggatgggttggggttatgactaggggggaggtaaataaccaggnaccatatgtaattagggatacagggccttctctctttgccttttaattttcttaaatgggga

SEQ ID NO: 106129 - DNA, 406 bp, Homo sapiens
tttatgtatttcattgaaggagaaattgattctgccacccgccccgcggaagacggtgtcttgctctgtcacccaagctggagagcggtggcgtgttctctaaaaacacaaaaattatacatgggggtgtacacctgtaatcccagctagctactcgggaggctgaggcacaagaatcacttgaacccgggaggcggaggttgcagtggcacgatcatggctctctgcaacattctccttccgcgttcgagcagttctcccacctcagcttccaaagtagctgggattacaggtgcctgccaccatgcctgttgcttgcgttattttctttactagagtgtctcatattacacattgtttgagaggtaattgctcagtaagtatttttaaatctatgaataggtat

SEQ ID NO: 106130 - DNA, 402 bp, Homo sapiens
gacgaaagtagagagaaggggagaaatattggggagtgaattttgagccaaggcttaaaattaaaagtgggggaggtagagcccagcagtagtaggtggaggagaagggctcctggccgggggtgaggattcctcctgagaaccatagtgtccaagctagagggaaacatggggtccactagttctcgacaagtggaacaggtcacttcccatcatgccgtccaggagcaagagagactcttagggggttgtgcccctccccacccccaatacgcagattctgtgtaccatttacatccagaacattggttaaaacctgaattctggccctgcgtggtggctcatgcctgtaatcccagcactttgggaggcggaggcgggcggatcgcctgaggttgggaa

SEQ ID NO: 106131 - DNA, 394 bp, Homo sapiens
cccacgcgttcgaaatttttttcaaagatttcaacttctttgcctttggtttgaatgtcctcccgtagctcacagtaatttgatcgtctgaagccttctctcagctcgtcaaagtcattctccatccagctttgttctgttgctggagaggaactgcgttcctttggaggaggagagacgctctgcgttttagagtttccagtttttctgttctgttttttccccatctttgtgggtttatctacttttggtctttgatgatggtgatgcacagatgggttttcggtgtggatgtcctttctgtttggtagttttccttctaacagacaggaccctcagctgcaggtctgttggaatgccctgctgtgtgaggtgtcagtgcgcccctgctggg

SEQ ID NO: 106132 - DNA, 365 bp, Homo sapiens
cgtctttaaaccctgcgtggcaatccctgacgcagcgccgtgatgcccacggaagacagggcgacctggaagttcaactacttccttaagatcatccaactattggatgattatccgaaatgtttcattgtgggagcaaacgatgtgggctccaagcagatgcaacagatacgcatgtcccttcgcgggaaggctgtggcgctgaagggcaataacaccatgatgcgcaaggccatccgagggcgcctggaaaacaacccagctctggagaaactgctgcctcatatccgggggaatgagggctctgtgttcaccaacgaggacctcactgagatcagggacatgttgctgggcaataaggtgcc

SEQ ID NO: 106133 - DNA, 410 bp, Homo sapiens
agccaccgtgcctggccaccctttgtttttgaagtgtctgtcctaaagcactttgggaagaacttgggtaccttctatttgtgggtgctctaaaaactatttaaaattagttcatcaacctaaaatattttctacttattttattaagttcttttatttttaatttgtttttaatatgatataaattttaaaaagtttttggtttttaattttgtattattacatacttttttaacttcttatatgggcagagatgaatttggattcagaagtttaattttcatttaagaatgttactgctggccgggtgtggtggctcatgcctgtaatcccagcactttgggaggctgaggtgggtggatcacctgaggtcaagaggtcgagaaccaccttggccaatatggtgaaat

SEQ ID NO: 106134 - DNA, 276 bp, Homo sapiens
gtttagtttttattttttaaattgtgtttttccttttagaaaagcaggtttattggtcgggctgctcaccaggacacagcaacgtgagaggttccccaagcccacagaaaactgccatctgccccacagctcaggccccttcaggccatcagcaccaagggaccttgtcccccacaatccccccaaccctcccctcggccagaggggtcttcagcccattccagaggagagaaaagaacccgagaaaggggaaaggaagaaaaaagaaaaaaaaaa

SEQ ID NO: 106135 - DNA, 621 bp, Homo sapiens
  misc_feature (1)...(621): n = a,t,c or g
gacaggcatggtggcgcatacctgtagtcccagctacttgggaggctgaggtgggaagatcacttgagcccgggagttgaggctgcaatgagccggaatcacagcactgcactctagcctgtgcaacagagaccctgtctgaaaaacaaaaaaagttggtcctccagggagtcagtgcttcctgctcctcttgtgttactttttcctctcctgtctgaaacctccttttactgttgtcctccactggttaccatcatcatcttcaagtatttgtacgatacctcctggtctgtctatactctaacatcctgataacactttttctgttacattaggcctcaccaggccttcatttctgcatcaacaaactgtgttccccctccagaccatttctccattgaaactttatgtagggggaaaagctgtaattgcctctaaccctaggattttagtccacaaatcactatggcatagaggatgagtactttttttaggaacagagcacatccaggccgggtcagtagctcatgcctctaatcccagcacgttgggagntgaagcaggaagactgcttgagcccaggagttcaagactgacctgggcaacantggtgaaacccca

SEQ ID NO: 106136 - DNA, 414 bp, Homo sapiens
ggaggcggagcttgcagagagccgagatcgcgccactgcactccagcctgggcgacagagcaagactccgtctcaaaagaagtaaggaatggcaagtgctcatcctagcacctttgacaaaaacaagacctagtagttgcctctttcagtcatttcaactgccagttaatgccccgcattttccaggtgtgatggcttttgtcttggctataatcaagcccgggaaaacctctttcctttctagggtgcagagttgagcttactgagatcacaacagggaacccaggcacagtcctggggtgtgttcacatgtcaggggcttcggttcacacaggaaagataatatctgctaagctgcccagctgagggccttacacacacgcaccccagctcactttagctgggggtgcttca

SEQ ID NO: 106137 - DNA, 411 bp, Homo sapiens
ttgcagtgagccatgatcacaccattgcactccagctgggtgacaagagcaagaccctgtctcaaaaaaaaaaaaaggaaaaaaaaatttctttgggaggggccccttttttgaaaaaacaaaacttaggggaatttttttgtttaaacccccccaaaagggttttaatttcgggggggttttttttttacaggggcggggatggggttcttttttaaaaaacccttaagagccccccattcccaaccccttttgggggtttccccgggaagttttttatcccggccccccccccttttttgggaccaggaaccggtttaagggaaaaccatttttccataaacccgggtgggggggggggggggtttaaggaaaaaccaagggccataaatttttatgggcccttatatt

SEQ ID NO: 106138 - DNA, 396 bp, Homo sapiens
gaggttgcagtgagccgagatcgcaccatggcactccagcctgggcgacagagtgagactcccgtctcaaaaaaaaaaaaaaaaaattttttttatttgggggccccgatttttgtttatcccccggggggggccccttggggggacccttggttttggggaaacctttagggataatttggggaaggccgggtaccaaaccggggggggggacttactttttgaaaaaggacttagggaaaaattccccaaaaaaaacctaaaccttggccattgtttcccttgggaaaggggggaaattgggcccaccttttttccctctttctgggaaaaaataaggatggggatggctttgtgcggaaaactccttaaaagaaaaggctagtgtaagtgtta

SEQ ID NO: 106139 - DNA, 430 bp, Homo sapiens
  misc_feature (1)...(430): n = a,t,c or g
aagctctgcgcctgaannnnnnaccgacgttttcggcccgtctttactaagaatacaaaaattagctggacgtgggggcgagcgcctgtaatcccagctcctctggagtctgaggcaggaaaatcgcttgaacctgggaggcggagattgcgccactgcactccagcctgggccacagagtgagactccgtctcaaaaaaaaaaaaaaaaaaaattttgtttttggggctaagggggttttgggggggggcctccaccatttttaatggtcctcacccccaaaggggttcagggattaaatttaaaggggccaccaaaaccccctccccttgaaaaaaacctttttccagtgaccgtggaggggggcctttcttttttaaccttttttggccgggggggggttttttttttcctccccgggccaaagggg

SEQ ID NO: 106140 - DNA, 440 bp, Homo sapiens
  misc_feature (1)...(440): n = a,t,c or g
tcatagataactctgaccggnccgnnnnnccgggtcgacgatttcgtggtgaagcgaggatggggtttcacccgttgaggatgaatttgctgggttactttaaactggaactgttcttttcagaaatgagtgaagcaggaagggaaagacggagcttgtctggctgggtcggatgaccccctttgccaggccgtcacccctctaggttgagttagctcagaataacttagctgtgctatagctttgcataattgcaaggagctttgtttcgttttattttgcagggaattttttttccccccttagctcttcctcctggggtatttgtagaaatcagcttcatcatggtcatttaacagtaagggctgggggtggtggctcacgcctgtaatcccagcactttgggaggccgaagtgggaggatcacttgaggtcaggag

SEQ ID NO: 106141 - DNA, 427 bp, Homo sapiens
  misc_feature (1)...(427): n = a,t,c or g
tttcgtagaggttgcagtgacccggggtcgtgccactgcactccagcctggacaaggagtgggactccgtctcaaaaaacaacaacaaaaaaacatcgactagagcagtggctgtggttttggacccagtgtgtcttcagaagcacccagggtatcattataggctgccactataaccatgtacaatggaagtgagcaatgtgtaaccatatgtctcagtatttgctaggatcatgatgctatgaagcaattgatagtcacccttttcacttattccccttgctattccacatcactgcttttcctcatccgtcgatgccataaacagtttgtctgatggctttctgattcatgaagatggtaaaagccaaggccctcaacctaccatatctataaaatctgtatttgcatccttttttattacatn

SEQ ID NO: 106142 - DNA, 432 bp, Homo sapiens
  misc_feature (1)...(432): n = a,t,c or g
cagtgagccatgatcgcaccactgcactccagtctgggcgacagagtgagactccatctcaaaagaaaacaaacaaaaaaaaatttaactgtggttataattggtatttgaatacgcaaagataaatatatgtattactaaagatttccttgctcagtaaattttttttttgtaggattaaaacaaattgttatggaagtctatgattttattcctccaataggcaaaattttgattagaaatgtttactgatattgcatattttaaatgcttattagaaatggcatgatatttgatgcatgaaataaaccttttacccatttaaccatcattatatttttttctaaccattctttttggtaaaaaatggaaaaagnagtaaaatgtgtaatacacctggggaatattaggtttactaaactctaaattgaa

SEQ ID NO: 106143 - DNA, 416 bp, Homo sapiens
cccacgcgtccggacctgaagaactctcgaaggacccatccctggtgagccaaggacaaccacacagaaagccaggattgaagcggtgctcatccaggcccctggggcctccggacaaacttgggggtgaggggaagcagggcctcttgggatttactctgtggctctcagggccaataaagccatgtgatgatgaggaaaaaaacaaaaaaaaaaaaaaaaaaaaaaaaaaaaaaaaaaaaaaattgggggggggcccttttaaaaaaaaactttttttccccccgggggggggaaggaattttttttttttgggggccccaaaatttttttgggcggggcgtttttaaaaaagggggggggggaaaaacctgggggaaaccaaattttttggtcgggggaaaaaaaaaggcggg

SEQ ID NO: 106144 - DNA, 417 bp, Homo sapiens
  misc_feature (1)...(417): n = a,t,c or g
cattcttcaacccatataatctccatatttgttgaatgaatgaatgaatgtgaaagccatcctcacatgtctgctcaggtgtattgatgtagaatagaaggtggggatgtctctggtgccctaggcatgtgagggtggggtgggggacagcaccaggatcatccccttttcctgtccaagcctctcctatttctggcctctacaccctaagcttagcaccctggccacctcctgactcagccagtttttcaggtagaagcaattacatttattacagggaaggctgttctcaccttcctttctgcccagcatctcaaaactctttttttttgagatggagtctcgctctgtcacccaggctggagtgcaggggtgcgatctcgcctcattgcaagctccgcctcctgggttcacgcn

SEQ ID NO: 106145 - DNA, 403 bp, Homo sapiens
actatgttggccaggatggtcttgatctcctgacctcgtgatctgcctgcctcggcctcccaaagtgctggattacaggtgtgagccaccgcgccggcctttttttttgagacaagttcttggtatgttgtctaggctggtctcaaactcctggcctcaagcagtcctcctgcttcaggctcccaaagctagaattataagcattgagccactacacccagccaccttcttccatcttcaaaatattttcatttatcttacaaataatacatgcgtttatcatttcaggatttggtgatgttcaaagatgtggctgtagacttttctcaggaagaatgggaatgcctgaactcatatcaaaggaatttgtacagagatgtgatattagagaactatagcaact

SEQ ID NO: 106146 - DNA, 426 bp, Homo sapiens
attttaaaaaagcacttggttgaaaattgtacttgaatacatacatgcatgctgctaaactagaactttaatttttccccataacttttataagtcccatttataaacccacttttaaaaataacaggtccaagttagagtgatgtgtgtatattattcaaaaaaaatgtactggtgtgatatcttgtatgaatgatcatttaaatacagtacattactgtagaagctaaattgatctttataattaagcagaaattacaaaactaggaataatcaacattgtaagatatgttaataaaaacctgctgtcatttggtttgtgaaaaaaaaaaaaaaaaaaaaaaaaaaaaaaaaaaaaaaaaaaaaaaaaaaaaaaaaaaaaaaaaaagggggggggccctaaaaaaaaaaccccttccccccccg

SEQ ID NO: 106147 - DNA, 417 bp, Homo sapiens
cgccattgtaactggtgtgaaatagtatctcattgtggttttgatttgcatttgtctgatggccagtgatgatgagcattttttcatgtgtctattggctatttcctttagaggctactgagtcacttcattctggctggtcccctctacaccttcatcaccatcctggagatttccttcccattttctcccatattggatctcctttttttctggagtcgatgccttttgtttccttggtttagtctcttcttttggtggaacacaccttccagttagctccctgtaaaaggaagctgtcagaaaatgtctctcttctattctcatacctaattgatcatttttggctggatacagaactctagctcaaacatgattttccctcagaattttgaaggcattactccattggcttct

SEQ ID NO: 106148 - DNA, 415 bp, Homo sapiens
  misc_feature (1)...(415): n = a,t,c or g
agagatcacaccactgcactccagcctgggcgacagagcgagactccatctcaaaaaaaaaaaaaaaaaaataaaaaaaaaaaaaaaaaaaaaaaaaaaaaaaaaaanggggggggggcccttttaaaaaaaaaattttttttccccgcccgggggggaaatttttttttttttttggggcccaaaaaaaaaactgccggcggggggataaaaaaaacgggggggaaaaaaaacccccccccccacaaaaaattttcggggggaaaaaaannnnnnnnnntntttttataaagtactaagtatttttgttataaaaaattgctccccttttctctaaataaaatacttcaccttctcaattattcctccccctggccataaaaaggaacatgactttcccatttttggataaact

SEQ ID NO: 106149 - DNA, 396 bp, Homo sapiens
ctccaattcctgacctcaggtgatttgcctgcctcagcttcccaaagtgctgggattgcaggggttagccactgggcccggcctgcattagtttttaaattgttactgtaatttttctagtgataggattctaacctctgtgcccatacttttcagtttaattcaaggtattttccctggggcatttctaaggattcttaaagaagttgagatctgatttcttattttgttcccatgctgaaaaacaaaatatgacagtactgctaaataaagcaattttgggggagaaatagtaattcggaagggtcaaatttatgtgtcgttgcataaaatatagctactagcaaaatagaatattttattcacaacctgagtgcaatacaaatacagcctttg

SEQ ID NO: 106150 - DNA, 420 bp, Homo sapiens
ggaggcggagcttgcagtgagccgagaccgcgccactgcactccagcctgggcgacagagcgagactccctctcaaaaaaaaagaaaagtaaccgagtgtctgaaagctttgttttttctgagttatcctgtggcggctcaaatcctggtgtcatttgtgccccttcttgccagttcttagaaaagcagcacattcaggatttcatttaccttttctaaagcagggttgatgccattcaatcaatggaattcactgttgtcctggcataaagcccacatgcttttgtgtttgtgtgtgtgtgagtgtgcgtgtgtttgtttgtttgtttggagacagtcttagaaagacggagtttcaccacgttgcccagtgtggtcataaaattgcgagcctaagccgtgtgcccaccttggcctcca

SEQ ID NO: 106151 - DNA, 426 bp, Homo sapiens
  misc_feature (1)...(426): n = a,t,c or g
ctgaggcaggagaatcgcttgaacccgggatgcggaggttgcggtgagccgagatcgccccattgcactccagcctgggcaacgagcgaaactctgtctcaaaaaaaaaaaaggggggggccctttaaagggaaccattttttccccccggggtggggaaaattaatttttttttttgggggccccaaaaaaaaatcccggggcccgtttttaaacccgggggggggggaaaaccccgggggtccccccaataaaggcctgtgggaaaaaannnntnntgtggttgtggttaagaaccacctctgccatccgttggaaaatccctcttctctcctttctattttaacattacccgctggggtggtgtgcttcctttttcccctatctcttggggggttaggcatcatatctaatctcatcccgctc

SEQ ID NO: 106152 - DNA, 370 bp, Homo sapiens
ctgtgagtctctggaatctagtttttgtggaactactaccctctagcttctgaaacaactttagatgattccttttaaaaattattttcttttattccaatcttaacctgttaggtatctgatccttgcctattcttggcagataagcatatccaatagtgtattttattaaataatcgtgctctttgataagaaaataaagaataagtttttcagggacttagatttacttactttgctttaatttcacttttgtgtatgtgtgggtgtgtgtgatggagtttcactctggtcccccaggctggagcgcaatggtgtgatcttggctccctgcaacctgcactttccaggttcaagagattctcccgcc

SEQ ID NO: 106153 - DNA, 251 bp, Homo sapiens
atgatgcagctggctttgcagacactgctgtcccccaacaccccctgtcactaggccatggtcatcccgactgtgcccttcaacatcaccatcaacagcaagcccttaggacacatctcctttcagctatttgcagacaaatttccaaagacaggagaaaactttcacactctgaacaataaagacaaaggatttggttcctgctttcacagaattattccggagtttatatgccagggtgatgacttcac

SEQ ID NO: 106154 - DNA, 394 bp, Homo sapiens
cgtttcgccacgttggccaggctggtctcaaactcccaaccccaggtgatctgcccacctcggcctcccaaagtgttgggattacaggtgtgagccaccgtgcctggccgtaaaacactatacttctaaccacatgtatctgagtctgaattcgtagaacatgaatcaaaattgcctagaaatgcttaaaacaaagaaagaaaatcaatgactcgttgccatgaagacttagtaaatttggacatgaatctctaatatgatcatgtgagggtaatgtctcatccaaaaggaagagagctgtataaagtagaagtggatacactggacaccaagaagatgcatccttctgtgcaaacgcactgcctgacattatcgtgtggacaggactgatgtg

SEQ ID NO: 106155 - DNA, 382 bp, Homo sapiens
catagggttcggcgtggcagcgggagcctgtaatctcagctactcgggagggtgaggcaggagaatcgcttgaacctgggacgcataggttgcagtgagctgagatcgcgccaaaaaaaaaaaaaaaatttttttttttagggggccggggtttttttttttttggggggggttattttaatttgggattgggccttatttttaaaaagggggattttgaaaaaaaattgaaaagggtaaaaagggaaatttaaggtatggtatttttctttcccgagaggggtggagtttttttgtttttgacaaatttggctttggtgatttaaaatatgaaaatgaactgaaaatttaaaagcggggggggcggggagatttttttagg

SEQ ID NO: 106156 - DNA, 380 bp, Homo sapiens
cacacgctcgctctttctctgcctgactcttcattcctgcctcacgggagatggaggactgacctctccactcattacaccctctcttcccaggatctgtgtgctggagtttgctggaggtccactccagatcctttttgcctgggtatcacaagtagaagctgcagaacagcaaagattgccacctgctccttcctctggaagctccatcccagaggggcacccacctgatgccggccagatcgctcctgtatgaggtatctgtcgacccctgctgggaggtgtcttgcagtcaggagccacgggggtcagggacccacttgaggaggcagtctgtcccttagcagagctcaagcactgtgctgggagatccactgctt

SEQ ID NO: 106157 - DNA, 393 bp, Homo sapiens
  misc_feature (1)...(393): n = a,t,c or g
agaattgcttgaacccaggaggcggaggttgcagtgagccgagatcataccactgcactccagcctggcgacagagcaagactctgtctcaaacaaaacaaaacaaaacaaaaaaacccctcagcttgctctcttggaaaatgtttttcattttctaactactggatagctatgccaaaaaaaaaaaaaaatgggccaaaatttggtaaccgggccccaaccaaaggggaaaggaaataaataccgggaatatattggtatacccttaaccaaataaatataccctttaattcccaaggccaaaaataaaaccttcccctaaaatcggtcccagggccaattttaaggaaagcccacccaatttgggggttggccctaaaaggaggctacttn

SEQ ID NO: 106158 - DNA, 369 bp, Homo sapiens
gtgaacccgggaggtggagcttgcagtgagccaagatcgtgccactgcactctagcctgggggacagagcgagactctgtctcaaaaaaaaaaaaaaaaaaaatttttttttggcaggaaaaaatctttagaaaaacccttggggggggctttaattgaaaaaaaaattttttaaacgaaaaagcggcattgggacccccccttttggtttttaagaaccaaaactggggggtttttggtttccctatttaccgccccttataaaaaacccttttttgggaaatttaaaggttgcccaaaaaaagtttaaaaagccccggtatttttaaagggggttaacaaagttatttttttaaagggccacctaag

SEQ ID NO: 106159 - DNA, 336 bp, Homo sapiens
agccgagatcgcaccattgcactccagcctggatgacagagcgacactccatctcaaaaaaaaaaaaaaaggaaaggaatttctcttcggggcccagggggccaaaaaagggggggagaattttagtacttggcccggggtttaagaaatatggcgcggtggaaaccctccccgagcaacaactatatgggggtttcccggggaaaaccttttttaaagaaaagggcggggacccaagttttttctgaaaaaaaaaattgcatactttatatttggagctttttttagagaacccgcgggtatgaaacacaaaatttttttccggggtcgaaacag

SEQ ID NO: 106160 - DNA, 557 bp, Homo sapiens
  misc_feature (1)...(557): n = a,t,c or g
ttgaatatgctgttgtttgtgctttaaaattaatatattccaactacacttcaataaaataaattttttttgtgtgacaaggtctggccctgtcacccaggctggagtgcagtggtgtaatctcggctcacagcaacctcagcctcttggntncaagcaatcctcccaccttagccttctggtacaaaaaaaaactgaaacagctaatgacttcaatgctgggtgtggttttaggagctaaaatgttgatagtagggagccagggcatgggtgggtacccgtctcttaattccacctacttgaggaggtgaggtggggaggaatcactttgaggcccagggagttccaagggccagcatggggccaacatagttgaggantcccacctntttttgnaaaagggatttgnntagtngaactattaagtncaggggcaccaaaaaaaaactgnaaacagcttannganttccattgccggggtttgggtttttagggggcctaaatntttgttagtngggggcccggggcttggtgggtnccccgtttnttaattcccc

SEQ ID NO: 106161 - DNA, 357 bp, Homo sapiens
  misc_feature (1)...(357): n = a,t,c or g
gcgtcgtggcgggcacctgtaatcccagctactcgggaggctgaggcaggagaatcacttgagcctcggaggcagagattgcagtgagccaagaccaagagtgaaactctgtctcanaaaaaaaaaaaaaaaaaaaaattttttttttatgggggggggggaaaaatcctttttgggggggtgaattttaatttggcccggggccgggttttaaaacttttggggggggaaaaaaaaannggaaaaaaccatggggaatatttataaaaaaggttttagtggaagggggaaaatcagggcctttattgaaaaaaagagggtgaatgttttgtccagaaatttttggaaggggggttg

SEQ ID NO: 106162 - DNA, 377 bp, Homo sapiens
ctggtattactatacttgaattactagaaatgagaaagagctggcaaggcagtcttgcagacacaccacacagcgagaatacaggcctttttattgttattggacaggactgccaataacaaaggatcctgtggaaaacatgctgctgattacatgaaaacctgatcagtttttagctccgggagatatactctcctttattttgattctataaatttgaatgtaggaacagagcaagaagacagagcaaactggcacagctcttaaaactcacgtgaggccaggtgcagtggctcatgcctgtagtcccagcattttgggaggatgaggcagaaggattgcttcagcccagcagttcgagaccagcctgggcaacg

SEQ ID NO: 106163 - DNA, 411 bp, Homo sapiens
cgtgaacccattaggcggagcttgcagggagccaagatcgtaccactgcactccagcctgggcaacagagcgagactccatctcaaaaaaaaaaaaaaaaaaaaaaaggggggtcttctaaagggggtaaaactaaaaaaaaggggggggattcttttgaaaaaccccccggaaattaagggggggtaaaaccccccccgagaaaaaaaaaaaccgctttttttaaaaattttatgggaaaaaaaaaaaacccctttggggggttggaaccccaaaatgggaaaagagaacccggggggtttttttaaaaaaaaaatttttttttaaaacggggtttggttttttaaaaaaatccccccccggcgcgaattttttcaaaaattttgggtggtgaaggggaacccctttttg

SEQ ID NO: 106164 - DNA, 374 bp, Homo sapiens
atcttttgctgttacatctgcatcatgtattggctggctgttcaaaagtatcctctctaggcaaataacgagatttcgccagcaggatctcccgttaaaggcgtgcatgtgtggctttgtagacacgtatgtgtgtgtgcgtgcacacctgcctgcccttgcacagtgggcactgtttccagtgtgcagtgaggccctcccttcgtgtagaacaggacaggacaatgacaaagttattcaattaataattgaagcttgccgggcatggtggttcacgcctgtaatcccagccctttgggaggccggggcaggcggatcacctggggtcggaagttcgggaccagcctggccaacatggcaaagccctgtctctg

SEQ ID NO: 106165 - DNA, 363 bp, Homo sapiens
ggcgtgaacctgggaggcggagcttgcggtgggccaagatcgcgccactgcacttccgcctgggcgaaagagcgagactccatctcaaaaaaaaaaaaaaaaaaacccaaaaacgggccgggaaacttttacccttcccccaaaaataaaaggttctaaaggcctttccaaaacccaaaaaaaacccaggttttggctttggggaccccctttaaaacccgggcccaataaaacctttttttttttttagcggggggaaacaaaccaaccaaaaagggagaaaacctttttttttttttgggggggcgcgcccttttcctttttgggggggggagtttttatggggcccgggggggggatttt

SEQ ID NO: 106166 - DNA, 343 bp, Homo sapiens
ggcgtgaacctgggaggcggagcttgcggtgggccaagatcgcgccactgcacttccgcctgggcgaaagagcgagactccatctcaaaaaaaaaaaaaaaaaaaagcaaaggcgggccgggaaccctttaaccttcccccaaaaagaaaaggttccaaaggccctcccaaaacccaaaaaaaaccccgccttagtctttggggcccgcctttaaaacccgggcccaataaaccctttttttttttttaaaaaaaaaaaaaaaaaaaaaaaaaaaaaaagaagaaggggttttttttagggggggggggggttttttttttttggggggggggaaatttttgc

SEQ ID NO: 106167 - DNA, 370 bp, Homo sapiens
ggctgaggaagaattgcttgaacctgggaggcagagagtgcagtgagctgagatcacaccactgcactccagcctgggtaacagagcgagactccgtctcaaaaaaaaaaaccctttcagttctaatggaaaaatggcctaattttcccctcaggccactagccctgtccagaaaaaaatttcccaggggcccgtttgaacaggtcacccaccttgtgaaggaagttgtttctttgaccaaaccctgctgtgcggaaggggctgaccttgattgttatgaccccaggacctcaccattgtttgccaagtcctgggaaagaaattttcctttccccgttcacccaggccctgttgagggctgccccaaaag

SEQ ID NO: 106168 - DNA, 400 bp, Homo sapiens
ggcacgagtcggcgtgaacctgggaggcggagtttgcagtgagccgacgtcgtgccactgcactccagcctgggcgactgagagagactccgtctccaaaaataaaaaataaaataaaaaataaatgaactagtacagttgatggtgatctgcaaaaccaaaatcatatagttattttcataaggaaattctaaaatgaaaatgggttagactgattcataatttaataatctcaaataacaaagtgtgctaataaaatagacaaatatttactacaaacccacaatgtaccctatacctagactctagagtcataccactgctttctaatcccagttttgctgcttactagccaggtaactggggaaattggttaacttcttcataaatacctctggtt

SEQ ID NO: 106169 - DNA, 399 bp, Homo sapiens
  misc_feature (1)...(399): n = a,t,c or g
cggcacgagaagacatgctcctttagattggaggagtttgtgattacccaccttctgaagcctacttctgtcaattcatcaaactcattctccatccagttttgttcccttgtttgtgaggagttgtgatcctttggaggaaaagaggtgttctggtttttggaattttcagcccttttgtgctgattttttctcatccttgnggatttatctaccttttgtctttgatgttggtggccttcggatggggtttttgtgtgaacgtcctttttgttgatgttgatgaagctattcctttctgtttgatagatttccttccagcagtcaggcccctctgctgcaggactgctgctgttttctggaggagcattccaaaccctgtttgcctggggatcacca

SEQ ID NO: 106170 - DNA, 378 bp, Homo sapiens
gtgaacccgggaggtggagcttgcagtgagccaagatcgtgccactgcactctagcctgggggacagagcgagactctgtctcaaaaaaaaaaaaaaaaaaaattttttattggcaggaaaaaaacttaagaaaaacctttggggggggctttaattgaaaaaaaaattttttaaacaaaaaagcggcattgggaacccccattttggtttttaagaacctaaactggagggtttttggtttccaaatttacccccccttaaaaaaaaaccattttagggaaatttaaaggttggccaaaaaaaaaataaaaaggcccggtaattttaaagggggttaaaaaagtaatttttttaaaaggcaaattaaaccccccggt

SEQ ID NO: 106171 - DNA, 376 bp, Homo sapiens
  misc_feature (1)...(376): n = a,t,c or g
cttcctctgctctctgctaaatattaccgctctagtggtacattcctattggcatactaactgctgctatttcttccatcttgaaaacaggaataacaaattaacttatcatgattctacttcccctacagatactagtccattctgggactttttgttttttgttttttggttttgagacggagtttcactcgacgcccaggctagagtgcaatggcgtgatgtcggctcactgcaacctctgtcttcctgttaaganannnnctgcctcaacctcccaaatatctcnaataccacccctccataataaaaaagctaaattaaccctgataaaaggccttacctgtcaccctttaatcttagctgttcacaatat

SEQ ID NO: 106172 - DNA, 428 bp, Homo sapiens
gggaggcggaggttggattgagccgagatcgcaccattgctctccagcccgggcaacagtgcgagactccgtctgaaaaaaaaaaaaaaaaaaaattggcctttaattttttccaggcccccccggaaaacttaaattttttttctcgggcggaaaatttggtaaacccccaaaggggtgggggaaaaaccccgggttttggacccaaccaattaaggttccagctcctttcccccttttcttgataagcagttaacagggtttttaagggcggggagcctgtttttttactacaaaaaatttcagggggttgggattataaagtggttttttttgatccaaaaaccaatctttttgctttgctttttgggacggtttctctttatcctttaacctccccttaaaacttcccaaatccttaaaaaaaa

SEQ ID NO: 106173 - DNA, 700 bp, Homo sapiens
atggttacccttctgctgcgcgggtcaagtagcttcttctggagggcgcaaggcgcggcgggggtgatgagcccttgggttctcgctccgactgctaaattcgcttggccgggtccaccttctcgtggcctcactcgccacacggatcagaatccggagcaggcagttctctctattctgaggctcctgcggctgccgcgctgacttccctgtgtgcgggagggaactctgggcaggctggttttcttggaatgtgtttacgatgttgaatgggacttgaacaggaagctggacgctgcagctggaactagcgtgccaagttatttatgattccatctgatatacataggagagaaactgatagaagaattctgatggcaactgtatgatagaagctatataaagtcaagtgtccattttctttcaactatatttgagcatacccaggatttaagtcgtggaactgaacatttatttggctgatcctcatcatggaaccgtgcttttagcaggaagaaagacaaaacatggatgcatacacctgaagctttatcaaaacatttcattccctataatgcaaagtttcttggcagtacagaagtggaacagccaaaaggaacagaagttgtgagagatgctgtaaggaaactaaagtttgcaaggcctatcaagaaatctgaaggccaaaaaaaaaaaaaag

SEQ ID NO: 106174 - DNA, 427 bp, Homo sapiens
gtttctgtagggacagagttttgccatacacccaggctggtctcaaattcctaggctcaagcaatccacccacctcagccttccaaagtgctgctgggattgcaggtataagccaccatgcctggccaatacctgagtttttaaatgccttttgcatgctctgtaaaatatccggcttagtctgtgatgtggctgagtagaaatcagctggaaggttgggcaggggccaggggaatgtactggataggaatgcatgttcgaatatgttgtttttcatttgtgtcctaacttttggctgagttcatttgagatcctctgggtggatgatttttgctttattcataattcttggttattagaaaagcaaaccccatcacctctccccattcccccctcagatttagagttacaaaagtggagcacaagt

SEQ ID NO: 106175 - DNA, 379 bp, Homo sapiens
  misc_feature (1)...(379): n = a,t,c or g
gctcctctctctctttgctctctttctccctcccctaccagcctcattcttcctccggtagcctctcccacctaacctctgcatcccccagcctcatgtcctgccccatccctatcctgcctgatccctggatctccctcagatcccctcttctcagacagcgccaggccggggtggggccggggttggggccgagccccacagctgcccccctcccctccctttttgtataatttaataaagaaatggtcgcgcttctgttannaaaaaaaaaaaaaaaaaaaaaaaaaaaaaaaaaaaaaaaaaaaaaaaaaaaaaaaaggtttttttttttggcgcgccccccctttttttttttttggggggggttttttttccg

SEQ ID NO: 106176 - DNA, 376 bp, Homo sapiens
  misc_feature (1)...(376): n = a,t,c or g
tggaggttaaaaaaattacagaaatccttacctgtgttactgagtagcaatactatttattatgtatgtattttaaaggcattaacattttttatttttcaggattaattggaattcttcaaaatgtcaggtgtggtacccacagcccctgaacagcctgcaggtgaaatggaaaatcaaacaaaaccaccagatccaaggcctgatgctcctcctgaatacaattctcattttttaccaggaccccctggaacagctgtccctccacctactggctacccaggaggcttgcctatgggatactacagtccacagcaacccagtaccttccctttgtaccagccagttggtggtatccatcctgtccggtatcagn

SEQ ID NO: 106177 - DNA, 398 bp, Homo sapiens
cttgaaaccaggaggcggaggttgcagtgagccgagatcacaccactgcactccagcctcatgacagggtgagactttgtctcacaaaaaaaaaaaaaagaaaaaaaacccccaattccaatccgggtggggaaaaggcccaaaattaattctttggaacggcccaaaaaaaatccaatttgggggctccaaggaggacgggggggggggttaaaaccccccaaattttttttaaaacccccggaaaaaggggaaattgggttggtcccctttttttggaacccaaaaaggggggggaaaaaacggggggggcaaaattttttttaaaaaaaggattttttttcctttgggaaaatcccaaaagggggaaggggggcaaaaaggggaaaatttttttt

SEQ ID NO: 106178 - DNA, 820 bp, Homo sapiens
  misc_feature (1)...(820): n = a,t,c or g
tttttttttccgatgggcacagctttattctggaacggtgaacccagtggggaggatcctgcaggcggacggcagttggggtactatagatgactaagtagggtccagtccatcgaggttgtagagtttgaggggtcaggttcttaataagaactgatcgtccagctagggtgtcttcatatagttgggaatccgatttgaaattcatgagatgttccttgggctggttggtctgaggacctgaggtcgtaggtggatctcctcacggagtgagggcaaggacaggggacccgtctcctgaaggagtcctcctgtcccgggtcttcagcaccaaatgtcacacgcgtccatgtgaagagactaccaaacaggctttgtgtgagcaacaacgctgtttatttcaccagtttgatagcatttgagctgaagacatctcttcctttttctgcaaaatatctcagtagctaatatgttgctcttcatcactcaataagcagcaaaaccaacccagcacaatctaacacaacacctcaaacagagcctgtgaacctcagtggctacaggtggtgggatcgaagctgcccagctgaaattccaaacaggtgatacagatgctgctggtcctccatccatacttttttccnnnnnnnnnnnnnnnnnnnnnnnnnnnnnnnnnnnnnnnnnnnnnnnnnnnnnnnnnnnnnnnnnnnnnnnnnnnnnnnnnnnnnnnnnnnnnnnnnnnnnnnnnnnnnnnnnnnnnnnnnnnnnnnnnnnnnnnctaatcacactttgaataggtaaagtcgcagagtcctgggtc

SEQ ID NO: 106179 - DNA, 374 bp, Homo sapiens
tcggtgtggaggagcataaccaaagtatgtacaagttatctagaagattacataccaaggtgacatctaaggatgggatggggttttgagttttttaaatttttctcaacttttcactaataatacataatgcttttgtaatttttccttctgcaaagatagcaaaatgctaccctgaaacttagtcatcatgatacacagataactgagtcagcaaagctcttctgcaaaaccctaagcaaaaactgggcccttctcttccccaagagcaattcagaactaaacagaatcaaggaattggggctgggcgcagtggctcacgcctgtaatcctgccagcactctgggaggccgaggcaggtggatcaccagagg

SEQ ID NO: 106180 - DNA, 387 bp, Homo sapiens
ctaagttatgtcttcttaaaccactttttgtttagaatactttctatgcttttgagtaaagatgaaattatatgtcttttttaattttttaaattgaatgatgttcaagggaaaagctacccagtttccatttgtgtgaaatttatgtatatttttggttttgtcttgtatatgagtaaataaacgtagtttctaccctttttctaccctttcccattgaagttacaggtttatctacaaaggggtgatggaaatactttgtgtaactattttccttagtcaatataacactctgaggccaggcctggtggctcacgtctgtaatcccagcattttgggaagctaaggagggcggatcacctgacgtcaggagttctggactagctc

SEQ ID NO: 106181 - DNA, 407 bp, Homo sapiens
aatcgagagagagagagagagacggtgttctagctatgtttcccaggctgctctcaaactcctgggctcaagccatcctcccacctcggccccttagtggtggattacaggggtgagcctatattttcaattatcaatagccttttaagaggttttcataaagaaagccgggtgcagtggttaaacttacaaagttataaactgagtcaaaccacagaatcccagaaaggctcaaaagttgaagggactggtgtatatacatatatacgtatacatatacgtatacgtatacatatatatatatatatatatgtatatatgtagatatatctccctgacggtggtatatacggtgaactcgaaagagaaggggctggacacagcggctcacacctgtaattccagag

SEQ ID NO: 106182 - DNA, 389 bp, Homo sapiens
aaactataacaattttatatgcaacgctgaaaaagttggactttgaattttcttaactttgggatgttacagtaaaagtaaatagtaaattactgtctctcttgattttatacagaaaaaatgtataaagttgcactaatatcttttaaagtatttttatgtgaaaagcctattttggccttgtcctgttggattttctggcctgagctgccctactgtagttgaccacgggaagtataatgggaaatttctcttttcttattttggtttatacaagaaaagtaatgggcagcgtgcagtggctcacggctgtaatccctttgctttgggaggctgaggcaggaggatcacttgggtcaaggagttcgagaccagcctgagtaatgtag

SEQ ID NO: 106183 - DNA, 387 bp, Homo sapiens
atactttcagtgtatattatatctacatgcatacattgtgtatgtatgtagatgtatatctacatacattgaaagatatatatctacatactatacaatgcatgtatgatacctttggctactacatccttcttaaatttcctgttgccacttatgacctgatttccttgaccagttattcctccttcaaacatccctcttacatgtgatagtcctcagcatttagtttccccaactttcccctaattatcagttgactcaattaccaccaaaatatcaatgacttttttgagacagagtctcactctgtcaccaggctggagtgcagtggcacgatcttggctcagtgcaacctctgcctcctgagtccaagtgattctcctccct

SEQ ID NO: 106184 - DNA, 383 bp, Homo sapiens
ctggaagattttttttttcctcaagtcaggccctcgctgtcacccacgctggcgcgcaggggcgtgggctcaggctcactacagcctcagcctccccggctcaagggatcgtcccacttcagcctctgtgaagggctaggactaaaggcgcgcaccaccccggccggctaatttttggatccgctatgatgcccaggcagatctcgaattcttgagctccagcgatcttcccgcctcagcttccaaaagggctgggattataggcgggagccactgagcctggctctggatttttttttattgggtctagttcatataacacgagatgaataaacacagcgaacattcttggaagccctacattaaataactagtccacattt

SEQ ID NO: 106185 - DNA, 372 bp, Homo sapiens
catcctttgtcaagtcaatttttaatgtgggtggtgcgcacctgtagtcccagcactttgggaggccaaggcaggagaatcttgaacccgggaggtggaggttgcagtgagccgagattgtgccactgcgcttcagcctgcctcggaagaaaagaaaaagaactacctgagattggtaatttataaagaaaaggggtttaactgactaacagtttctcatgactggggaggcttcatgaaacttatggtagaaggtgaagagaaaaaaagcaccttcacaaggcaggagagagagagtgagcaggggaagtgccacgcttttaaactatcagatctcctgagaactcactcagtatctcaagaacagcatag

SEQ ID NO: 106186 - DNA, 403 bp, Homo sapiens
aatacacggacggttagggacagacgccatgtacttacgtttacctcggtgattgctatatcaacaatgctacccacaacaatcaaggcgtcaaatgtattccatgcatcacagaaatagtgctgcatggggcagagcagccggggagagagagaagaagaaccaacaagaaaggacaaagcaaaacaaaagggaagaggaaaaatgaaaaaaaaaaaaagggttgggaaaaggggggagaaaaaaaaaaaatggaaaaaaaaagggggttccggggccatataaaacccttttttaccattttacggtttgggcggctaaacccggaataaccggtttttcccagggggcaaagccctaacaaaacctggtttatttaaaagggggcgggggcctgggcccc

SEQ ID NO: 106187 - DNA, 420 bp, Homo sapiens
aatacaggtgcccaatgtcctctggagttttccatccaagaactccagcttctttttttgggggggggggaggacggggtttcactcttgttgctcaggctggagtgcaatggcgcgatctcggctcactgcaacctccgcttcccgggttcaggcgatcctcctgcctcagcctcccgagtagccgggattacaggcgcgtgtcgggatcacacgtgtgagccaccacgcccagtccccccatcttcttaaaggggttaatttcttggctcttgcattttgacttttccatcattccaattgccatcctgtgtcctgctctttcccaagggttgcattcttactctgctgaatgctatattattggatttatgaacaattgttaatgtattataattgtctgatactttgatttaccag

SEQ ID NO: 106188 - DNA, 404 bp, Homo sapiens
aatacaggggagaagttaaaaggctgtctgtaattactcaaacacgtggagaatacattctgcaacaggtagatgttaatattccaattttccagttgaggaaactaaggattgagaagttgtatactaataaaactagtccatgttaagtaatggagatgggaaagtctaatgccaggatggatttaaacttttttatgttgtgggactctgagagaatcccatgaaggttatcatctctttccccagtgactgagtttggatgtttgtcccctccagatctcatattgaaatgtgatccctggccgggtacggtgactcacacctgtaatcccagtactttgggaggtcgaggcgggtggatcacccgaggtcaggagttcaagaccagcccggtcaacatg

SEQ ID NO: 106189 - DNA, 580 bp, Homo sapiens
ggtgaaaaatgatgattgtggcttccttgctaactgggttagagaagtgatcaagtgtgaaccgggacttgaatgagaggagtgacttagcatttggtgactgtccttaacgaagaactgtgcgctcctgggcgaagaaacaatgatggagcaggaaatgacccggttacatcggagagtgtcagaggtggaggctgtgcttagtcagaaggaggtggagctgaaggcctctgagactcagagatcccccctggagcaggaccttgctacctacatcacagaatgcagtagcttaaagcgaagtttggagcaagcacgaatggaggtgtcccaggaggatgacaaagcactgcagcttctccatgatatcagagagcagagccggaagctccaagaaatcaaagagcaggagtaccaggctcaagtggaagaaatgaggttgatgatgaatcagttggaagaggatcttgtctcagcaagaagacggagtgatctctacgaatctgagctgagagagtctcggcttgctgctgaagaattcaagcggaaagcgacagaatgtcagcataaactgttgaag

SEQ ID NO: 106190 - DNA, 462 bp, Homo sapiens
acgatggaagtgctctcgacatgcgcgcggatcctctagagcggccgcaatacatgtcctgtgggtcatgcgcgtctcggatgtgcttgatgaggttcttgacgtcagagtacttcttcttgcagaagcggcagtgctgcttgatcttcttgtgcactcgctcgatgtgcaccttgaggtggcccttgctcaggcaggtgaacgagcagtagtcgcaggcgaacttctctccagtgtgcttgcgcaggtgcacattgaggttggccttgatggcactggcatagctgcactgggggcacttgtatggcttttcattggtgtggatcctcaggtgggcctgcagcgagtgcttgaacttgaagaccttgttgcagtattcacaagtgaagattttgagctgagtgggacctaacctgcttgacttcattgggtgctcataaagcgtctgctgaatggcgcatt

SEQ ID NO: 106191 - DNA, 413 bp, Homo sapiens
aatacagtgtgtgtgtgtgtgtgtgtgtgtgtgtgtgtgtgtgtgtgtatatacacatagaggctcagtgaacgctgcactcctgagattttttggacaacagtcccatcttcttcactggagagaaaggaccctatccatcaagagccacattttatacatctctcttgtccccacccctgcaagaaacaacagagcacgcatctgctgtctggtcaacattagactccgagcctcagacacgccggccgctgagaggaaccactgagacattgtgtctccttcccaccaactcagaacgttctcatgacagaagacagtccttgtatcactctacgagtttccaccgtatcgtctggaggtggccagtggaagcggggggggtatcttgacgtttggtctcgcctctatcg

SEQ ID NO: 106192 - DNA, 378 bp, Homo sapiens
cccacgcgttcgcacatcttgaactctttatctttattgatccacccgtctcggcctcccaaagtgctggggttatgggtgtgagccactgcacctggcctaaggctttcttatattcctttcccccccatttgcagcataagttgtacaaggcgattaatatttcttctttttaaaatttttgttaggagacagggtcttgctttgttgcctgggctggacttgaactcctaggctgaagcagtcctcctgccccagctttcctaatggtaatagctgggactacaggtgtgagtcaccatgccaagctattatttcctaatatcactcttagcttacaggtaggtcaaataaagttcttgactttttgaatggctc

SEQ ID NO: 106193 - DNA, 394 bp, Homo sapiens
cacgccactgcactccagcctgggcgacagagcaagactctgtctcaaaaaaaaaaaaaaaaaaagttttcggggaaaaaaaaaactttccccccaaacccttaaagcccccgggggggccccttttaaccctttttttttaaccaaaaaaaagggtttcccccaaagggaaaggccttttttaattaaaatagggggtggcaaaaattaaacaaaaggaaaaccggggaaagccccaaccccccccccccgggaactgggaggggccattccccctttttaacccctttttttaaaaaaaaatgggtttttttcccccccccaaattttattttaaatgggaacccccccatggcgggggggggccccctaaaactggcccggcgggagggac

SEQ ID NO: 106194 - DNA, 460 bp, Homo sapiens
  misc_feature (1)...(460): n = a,t,c or g
ttagcattcctcctgccgnaccggttnnnnnatccgggtcgacccacgcgtccgcacagaaccatggatttcttggaggggaaaacagtccacaccatattgtccttctaaacccaaaccatctggtatgtttttgccatatgtgcaatgaaaaaacctagagaaaaaaaaaagggacttttttatgtggggcttgtcgatgatcaggacagggaaatggagagatttgccatccacgggggttctgcactcttcccaaggcaatttccagtttactcattgccagggtttgcttaaagcacttcaacaaaggggtggccagtttaagtcaaacagcaaatggttgtttttttgagggtttttctgagacagagtctcgctccgtcatccaggctggagggcaggggggcgatcctggctcactgcaacctccacctcctgggtcttgcctcagcctccc

SEQ ID NO: 106195 - DNA, 389 bp, Homo sapiens
cagtgagcagagatcgcgccactgcactccagactggtgacagagagagactccgtctcaaaaaaaaaaaaaaaggggggaaaagttgggggaaagggaaccttttggcccccgattattttggttgggggaaagggaaacccccaaaaaaaaaaccccgccccctttttagtttcccaaaaagggggggataaaggggcagggaaaaataatgggtttttttggttgggcccaaaaatacaccttgggcccttctttcggggggccccatttttaaaaaagggtttttggaaaatatttttaaaaaggggccttttttaaggcccttttttggttaaataaaatttttttcctttttaaaggcctttttgggcaaaaccacacatttt

SEQ ID NO: 106196 - DNA, 368 bp, Homo sapiens
  misc_feature (1)...(368): n = a,t,c or g
cccacgcgtccgagtgtgngtgtttgtgtttgtgtgtgtgtgtgtgcgtgtgtgtgtgtataaaacaaatgggggggtgatgtaaagaggattgtacactccctgaagacaagatttgtgtctaatggttctttataaccttaacctcaaacctgactattttttttgacaagagagggaactgagcaggattcaacaacctgcccaataccacacagatggtgagaggcaaaaccaggaaatgatctctatcttttaagaccccaaaacaggctgcctctgtggagttgctttgctggcctagtggagcgacaaaaatagctcccctggtagaaagtgctctagactgagattccctgaccagcgca

SEQ ID NO: 106197 - DNA, 830 bp, Homo sapiens
tcaaaaacagcaacagagagcaggacgtgagacttctacctgctcactcagaatcatttctgcaccaaccatggccacgtttgtggagctcagtaccaaagccaagatgcccattgtgggcctgggcacttggaagtctcctcttggcaaagtgaaagaagcagtgaaggtggccattgatgcaggatatcggcacattgactgtgcctatgtctatcagaatgaacatgaagtgggggaagccatccaagagaagatccaagagaaggctgtgaagcgggaggacctgttcatcgtcagcaaggtgcaatggtgcatttggcttgccttcaacaccattgtgccaaagagtcaatggcagagcctgcaaactccacaaagatgctagtgttcattgagagaggtgcggcattttcttgggaagtagagaaagagaaaacacccaaacagccctccagagaagaaagttgtgcaaagatttgcatatttaccctccaagtgcccaggcccacaatgggcatcttggcttttgtactgagctccacaaacgtggccatggttggtgcggaaatgattctgagtgagcaggtagaagtctcacgtcctgctgtgtccagagttggttccttccagagggttcgtggtctcgctggcttcaagaatgaagccgtggaccttcacagtatgtgtctggagtttctcccttctggtgggtttgtgatgtcgctgacttcaagaatgaagccgcagactgtcgtggtgatcgttgtagctcttaaaggtggtgtggacccaaagagtgagcagcagcaagatttttcgtcaagagg

SEQ ID NO: 106198 - DNA, 413 bp, Homo sapiens
  misc_feature (1)...(413): n = a,t,c or g
cggaattcccgggtgnnnnntttcgtccggtttcttgaaggcagcacatacttgtttgataaattcttatccattctgcaattccgggtcttttaagtggagcatttaggccatttatattcaacgttagtattgagatgtgaggtactattccattcatcacgctatttggtgaaatacttctcccgtgatctagaccttcaggttccccagtgagggtctgtgtttgggggcggatgatccccctttcccacattcacagtttgggctctcacagtatttgggctgtctcctgggtcctgcaggagcaatctgctaccttcagagggtctgtggatcctcttggctttcctggtatattcctgcagtagttcttggagcaaaagttcatgatgctagtctctgcatgatgc

SEQ ID NO: 106199 - DNA, 433 bp, Homo sapiens
  misc_feature (1)...(433): n = a,t,c or g
nnnatcagactgaaggccagagcccattatcttgtcaccatcctggggagcatcatggcacacaacaaccagagccaaggtgattgggcttgggggctcaggaggaggcagaaaagagagaagagctcaatatgggcctgaagatgtgcagctgcattcgttattgttcagctaagatgcattgagctctgcgtggggcactgtgctaggcactcagataccatcccacttcactgagatcctgatgctatctcctcctgcctgggggagttcatccctgactcaaaccttgttttatgtacccagtggtgccaaaaggactgggtcttatgtattagcaagagtaggacagaagtataagaccctctggctgggcgcggtggctcatgcctgtaatcccagcagtttgggaggccgaggcaggtggatcaca

SEQ ID NO: 106200 - DNA, 410 bp, Homo sapiens
cagaaaacttggttctgcgtctacaatgcagccttaactcctccttgtccacagactagtgacttttaccacaaacaagggagcgtgaattttgttaggaatctgcccgtggggggtgaggttggcttcggagggggccgccccagtggggatttggtctaccctgaatgaaggcaggcgtcaggccctttggctgcggtcataatacgttgtatgacttccggcagctccttagcctctctgaacctcagtgttctatctggaaaatggggataataatacctcaaagggttgtcgtggttactaagtgagcccatatgtatagaacttgtagcagaggctgggtgtcctggctcacgcctggaatcccagcactttgggaggctgaggcaggaggatcacttgagccc

SEQ ID NO: 106201 - DNA, 289 bp, Homo sapiens
cagtatttgagttcctcagtagaaagctatcatatatactcagaatgttttggacgtttaaagaatggttctggttggaaagattctggcttcctccaacaataaagtggtcagatcttgaggatcacgatggactcgtctttgtaaaaccttctcatttatacgtgacaattccatatgcttttctcttgctgattatcaggcgtgtatttgaaaaatttgttgcttcacctctagcaaaatcatttggcattaaagagacagttcgaaaggttacaccaaatactgg

SEQ ID NO: 106202 - DNA, 432 bp, Homo sapiens
  misc_feature (1)...(432): n = a,t,c or g
aatnnnnaagcacatttggaaaggtttttttctttgttttggggacgagcctaggaaacagatttttctgtagccataggggcttctggaatagatgcacaaactttgatggcagtttggggcaaatttgtgtaagttggagagtgttagctttgaggaaatgagaacagacaagaaaaacgcagtgttttgagaaagttatttatgtattgatttggtaggagcttgataaaaaattataaaagttgtggagagattttgaatagctaaagtgggagatatcatggaagtgatttatgaagctcttttttttctttttcttttttgagaggcgatcttgttttgttgcccaaagtggaatgcagggtggttataacgcctcactgcaacctctgccttttgggtcaagcaatttttctggcttacctctgg

SEQ ID NO: 106203 - DNA, 376 bp, Homo sapiens
  misc_feature (1)...(376): n = a,t,c or g
cccacgcgtncgctgggaggtggagtttccagtgagctgagattgggctgttgcactccagcctgggcaacagagcaagactcaagtctcaaaaaaaaaaaaacagcgtaaagtaaaatgccaagatagggtttcccttcaaaaaaaaaagtctgtcttgtgaagcgtttcagggcttgacagatgtggaggcagcacagggggagggggtctgcatgtccacatgtggcatttggggactaccaagggaaatctctttgttcaagggggggagaaagatttccagagccagtacagcaatgcttacccccagaccctgggtatggacccctctcatatggagatgaattctaaaaaacagccatagctgtgacaa

SEQ ID NO: 106204 - DNA, 400 bp, Homo sapiens
tgagcatcttctgggcctccttgcggctgcgcgtgaactccctggtggcgcggtacagctcatccagcacctcactgctggtgtcatccaccagcacggccaccactgccttggacgccatcttactcaggagcttcttctgcgcctgcagagccaggctcttggtgctgaaggtgtccatggcctgcgggggacacagaccagccctcagttttgcacgttggggcactcctcacacagaagaggtgacaacaccacagaccccagagggcctaacggaatttgtttctttaaaaagtgtcatgccggacgcagtggctcacgcctgtaatcccagcaatttgggatgcctaggcaggcggatcgcctgagatcgaggttaggagtgcgagaccagcct

SEQ ID NO: 106205 - DNA, 419 bp, Homo sapiens
ttccttgtgggttgctggaatgagagcctcagtccctcactggctatctgtttgctggaggcctccctctgttcctgggcacgtggacttctccatagggcagctcacatcatggttcttagagcaagcaaacgagaaaatgatcaagagcaggtagctaagatggaacggaaaccacagtcctttgataacctggtattggaagtgacatcttatttccatcatctttcattaattagaaatgagaaatggctgggtgtggtttttcccacctgtaaacccaacactttgggaaacagagggagttcgggatcagcctgggcagcatgaggagaccctgtctctaaaaataatttttaaaattagccggcatggtggcatgcgcctggggtcccagctgctcaggaggctgaggcagg

SEQ ID NO: 106206 - DNA, 392 bp, Homo sapiens
tgcttgtaatcccagccacttggaagggtgttgcagaattgcttgaacctgggaagcaatggttgcagtgagctgaaatggggccactgcactcctggctgggagacagaaggaggagactccatcaacactaataataataaagtaaataaaagggcactaaccctactcaggaagccttcactctcatgacataattacctcccaaagtccgcacttcctaatgttaccactctggaggttagaatttcaacatataaattttggggggacacattcagaccacaataatgttttataatgttcattttgctttaacaagagacacatgtcagatagtagacatgatctgagaagacacaaaacccagcgtggtgattttggcagccttg

SEQ ID NO: 106207 - DNA, 403 bp, Homo sapiens
cccacgcgtccgcccacgcgttcgggtggagcttgcagtgggccgggatcgcgccactgcactccagcctgggcgacagagcaagactccatctcaaagtaagtgaataaatgaaacataaatgaattttatatttagacttgggtcccatccccaagatacctcattatgtatatgcaaatatttcaaaatttaaaaaattctgatgaatgaaacacttctggtctcaagcattttggataagggatgctcaatctgtatctctttatttactcctaaaatcagccaaggaaatgggcatctctccgttcccccccttcctttttttttttttttggtggaaacaggagtggaacgggtttcatttaattggacagggttttgttaaggacaaaacgtgatt

SEQ ID NO: 106208 - DNA, 413 bp, Homo sapiens
  misc_feature (1)...(413): n = a,t,c or g
attttttgtagagaaggattttgccatattgcccaggctggtgtgctgggcaattcctgggctcaagtgatctgcccacctcggcctcccaaagtgttgggattacaggtgtgagccacttcacacggcctatacctttaacttgaaatttactttttaaaaaataggacaaaataattttaaaatgtggtaggattctgttgtaatgcaatggaataacagctatatcagtaaaactgttgaggctgttcatttatttaaaaacctaagcaattgtggtgtgtataccaggagcagcaaattctgataatttatagttgggagaataattttcctctgggctggtctagagattatatttatagggaccctctgaagattcaaaaataagaattgtcaagaggggataatcn

SEQ ID NO: 106209 - DNA, 419 bp, Homo sapiens
aggcaggagaattgcttgaacccgggcggtggtttttgcagtgagccgagatcgcgccactgcactccagcctggcgacaaagcgagactccgtcacacacacacacacacacgaaataataatatatgtaaagtggaattagctcctaggcatagggaaggtgcagagtattgccgtgttgtcatttacagttctgttgatgtcgataacgtttgtgggtgtaatgggtagtgttctgtccctccaagtcgttaataaaacaaagcaggccgggcgtcttgttaaatagttgtatcaatgacttgatttaaattaatgaggatatatttttcaaatttatgccttttacaaaatttttaaagagtaggtaatgtcggtgatagatataaagaaaggaaaagatctccagatgtggaat

SEQ ID NO: 106210 - DNA, 421 bp, Homo sapiens
cccatatttaagaagaaaaaggatttattctgggctccaactgcgatataagcagtcctggatcatttcagtagtttatttagtatcatagaaaagatcatttcaggtttctctgcttacttgctacaggtggggaaaataataaactgcatgtcctatgtaacagcatagggaggtgaggaggggaaaccattgcagctattcaaaatagacttgttttaaagcttttattttaagtacaggggtacatgtgcaggtttgttatgtacgtaaacttatgtcatggaggtttgctgtacatattatttcctcgcccaggtattaagcctggcaccctttaattattttataattcgtcctgatcctcgtactgatcctcgccctgatcctcgtcctgatcctcgtcctgagcctcgacctg

SEQ ID NO: 106211 - DNA, 395 bp, Homo sapiens
caggtgatctgcccaccttggcctcccaacgtgctgggattatatgcgtgagccactgcacctggcctttcccccggcccccgctcctttggaagccttgtagctcaattttttttttaattgattggtttcaaggagaccagagatcagactctgaatttctcaagggagagattctggagacataaaatctgttttgaaagttttaaactatatcttacctttgcaagatgcctgatgttttggatctcagccctatttttttgagaattcaccatacgttcacagacatcatctctttgttccttcccacaatatctggctggctcagtgaacccattctcccaacctggaaatagaagcctaaaaaaaggctggctgggggcttgcatcta

SEQ ID NO: 106212 - DNA, 389 bp, Homo sapiens
agatccgtaaatattatggtgccttgtttttgttttaaaagtttatgcgcatggtcaggcggggaggctgacacctgtaatcctatcctggataccttgagtgaaggagtttgagaccaatgtgaacaacatagtgtgaccctgtctctacataaaataaaatattaaccaggggggggtgtgcacacctgttgtcccagctactacagaggctgaggctggaggagcacttgagcctgcactgatctgtgatctcaccagtgtactccaggctgggccacagagcaagaacttgtctcaaaaaaaaaaaaaaccgcgaagaaaacccctggggaatttggtttcctggcgccattccattggtgttttggtaaaaaaaaggaaaaatc

SEQ ID NO: 106213 - DNA, 396 bp, Homo sapiens
agggtctcaaggccaggcagctgcccctgtgggaaggtgtatcggaaacaatggagacttggctggaagggtacactctttggggccagcagacctgagttccatcccccactggcctgtgagctgccctgtgacctcatgcaaggcagcctcccttttagtctgcaaaacggggctgacacctggctttcccagctctggggggtaggaatcccagggtgagtcaggtgatgtccatggagcaggggtctcgtagatgggactggttgtacaagactttctattgtggtgaataaataataagagttaggggtcgagcgcagtggctcacgcctgtaatcccagcactttgggaggccaaggcgggtggatcacctggggtcaggaaatcgagac

SEQ ID NO: 106214 - DNA, 381 bp, Homo sapiens
tgccaatgatatgagtttttatttgtatagtggttagaacagttcctggcaggttgtgctttataaatgttagttctaatggggaaatgggggcacagagaggttatgtgacctgccccaaagccacacagcttatgagcagggatttgccaccaggtcagtctctgactgccaagctgtgctctttctgttcccagagctagcctgtacattgaaggtagacagcagtgtagcctctgcccagtggaagcccctcaatccacacggacctcatctgtggccttccatttcttattccttagaagttccacctggtgccaagcatcaacaccatgagtggcagtcaggagctgcagtggatggtacagcctcatttcctgg

SEQ ID NO: 106215 - DNA, 386 bp, Homo sapiens
gcatgcagccaccagtccattctgtttgctaccagttcggggttttgtgtgtgtgtgtgtcgataagttttctccttggctggcagtcaagcctcttctgtggttttttttggttgttggtgttgttttgttttttgggtttttttttttaaaagggggtcatgctttgttgcccagttggtctaaaactcctgacctcaggggatccgcctgcctcaccctccaaaagtattggaattacaggcgggacccactgaatacggccaaaattccataaatttttttttttttttgagacaagtctccttttgtcgcctcacctgaaatgcaggggggcaattataactaattgcacccttgaacggggggcctaaaaaaatccttag

SEQ ID NO: 106216 - DNA, 388 bp, Homo sapiens
tgctcacgggtggtcccagggaactattattgatagtaacagaatagcaattaggtaatggaaaggtccggctactgtaccaaagacattcttcatcttttttttttttttggggagaggggttccccccgggcccccaggggggggggggggggccaaatttgggcccccgggaatcccccccccccggggttaagggaaccccccccccttcccttttggaggggggggaacccccggggccccccccccccccgggtaatttttggggtttttggaaaaaagggggtttgccgttgtacccaggggggccccccacctcggggcccaagggagaggccccccccacccccccaaagggggggggggggataaagggccttccttc

SEQ ID NO: 106217 - DNA, 411 bp, Homo sapiens
  misc_feature (1)...(411): n = a,t,c or g
cccacgcgtccgctgttctcgaactcctgacctcagacgatccacctgccttggcctcccaaagtgctgggattacaggcatgagccactgcgcctggtttgtagctacctttcaaagtaggtgcagagtgggacggcataccttaactctttgctgcctgaataattttttttttttttttttttttaaaaaagggttttttttttgccccccgggggggggggcgtaatggaaatatgggttactgggacctttaccttcggggcctaaacaattttttttggcgaccccttatttccttttgttaaccaagttttgttataatttttgggggccggggttaaattaaaaaaaagggggcctatttcnaaagacaaataaatttggtgttaaaaaaacaaaaagggggg

SEQ ID NO: 106218 - DNA, 401 bp, Homo sapiens
  misc_feature (1)...(401): n = a,t,c or g
cttttgaaggataatttccctgcatctagaattctaaattggtcacttttttcaacattttatatattttacttcactttctttattaatgtacggtttctgaagagaaatctgctgtatttcatcctgttctctatggttaggtgcttccctgccctggctctggctttttcaagattttctccctgtctttggtttttctacagtttgaatacaatatgcctaggtgttgtttgttttgtttttttgtaaggagtggcatgtatttatcttcttgatactccctgtgtattctcanaaaaaaaaaaaaaaaaaaaaaaaaaaaaaaaaaaaaaaaaaaaaaaaaaaaaaaaataaaaaaaannnnnaaaaaaaaaanagggggggagggggggctcttg

SEQ ID NO: 106219 - DNA, 387 bp, Homo sapiens
aggcaggagtattgcttgagcccgggaggcggaggttgcagtgagccaagattgcaccactacacactccagcctgggcaacagtgtgagaccctgtctcaaaaaaaaaaaaaaaaaaagggggcaaaaaaaaaaggggaacgggcccaaattttgggggggggaaaagccaatttgttcaaaacccttccctgttcttaaaaacatgggaaaaaaaaaagtttttgggggaaacgggcgccccctttttttttccgttgaaaaaagaatttttaataaaaacgcaaggggggaaaaaaaaaaaaaaatagggtttttgaggaatttggaggcccttgaacaaaaaaaatcggaaacgggggccccaacctcgggaattttggtaag

SEQ ID NO: 106220 - DNA, 473 bp, Homo sapiens
  misc_feature (1)...(473): n = a,t,c or g
ngactaggctgacagtgcggtggaattccaggaccgaggggccttagttggtgggcaagtcggggatcccagaaagataagcgtttcccggaagcggaaacgggtgtccgtccgagctccggcctgccagtgagcttctaccatcatggacctattgttcgggcgccggaagacgccaaaggagctactgcggcagaaccagagggccctgaaccgtgccatgcgggagctggaccgcgagcgactgaaactagagacccaggagaagaaaatcattgccgacattaagaagatggccaagcaaggccagatggatgctgttcgcatcatggcaaaagacttggtgcgcacccggcgctatgtgcgcaagtttgtattgatgcgggccaacatccaggctgtgtccctcaagatccagacactcaagtccaacaactcgatggcacaagccatgaagggtgtcaccaaggccg

SEQ ID NO: 106221 - DNA, 463 bp, Homo sapiens
  misc_feature (1)...(463): n = a,t,c or g
ctaacctcctgggaattcagcccagcaggtctctgcctcattttacccagcccctgttcaagatggagtcgctctggttggaaacttctgacaaaatgacagctcctgttatgttgctgctgctgccgccaatggacagcctttaacgtgcccgccagccctgctccaccgccggcctgggctcacatggccccatccctcctcgaacctcctagcctgttagttactcaaatctgcaagctctctgccttctcagggccttcaataaatgcatttcttctgtcaaaaaaaaaaaaaaaaaaaaaaaaaaaaaaaaaaaaaaaaaanngggggggggcccctttaaaaaaaaaaaaatattccccccccggggcggcgaaatattttttttttttggggcccacaaaaatattttgcggcgggggtgtaaaaaacgggggggggagaaaaacccccgttcttc

SEQ ID NO: 106222 - DNA, 441 bp, Homo sapiens
  misc_feature (1)...(441): n = a,t,c or g
ccggaggcccgtaaantccacnncnggngggaccttttttggggcggtcttatcacaaggncaagagatttagatcattctgtccttcatggggaaaccccggctctactaaaggtacatttgtgagcttttagtacagncacacaacaccacacctggctattttttgtatattttggagagacaggggtttcgcctcattgcccaggatggtctcgaactcctggactcaagtgatctgcctgggtcccccaaggtactgggattgcaggcatgaaccacctttaccagctgatagtggcttttaaataatgttgggagctacttaaatggctggtgtgcttcctctgtcacataataaaaacaaataactgttgggcgcagtggctcacgcctgtaatcccaacgctttgggaagccgaggtgggaggatcacttgag

SEQ ID NO: 106223 - DNA, 400 bp, Homo sapiens
  misc_feature (1)...(400): n = a,t,c or g
nttattcgtccggttccgggtggttgtgggcttggcggttcccagactcggagccgctggcctgccctgctggccccaggcagtgaggggcttagcacccaggccagcagctgtggatggtgcgctgagtctcccagcagtgctggcccaccccaccagcactgtactcgatttctcgccaggccttagctgcctccccgcagggcaggccttgggacctgcagcccaccatgcctgagtctcccctgctgccgccgagggctcctgcgtggcccaagcctctccgacgagcactgccccctgctccccggtgcctgggcccatcgaccgcccaagggctgaggagtgcaggcgcatggtgcgggactggcaggcatctccacctgcggccccagtgcac

SEQ ID NO: 106224 - DNA, 399 bp, Homo sapiens
catttttattataaaatatgccatgattcaggtccttacacaagagtaagttgctgctttctggacatttattttgcatctggcccttactgaaccatctaactaggtctaatggtttcttaattgattctgttgggtcttctgtataaaaccacattatctgcaaataatgacaattttggtagtcacacctcctatttctattttctgtttcactgcaattggctagaacatcctggacaatattaaaaaatagtggtgatattgtaatgttttctcatccgttatgatgtggctgtcagattaagaaatacgaggctggacgcagtggcacgtgcctgtaatcccagcactttgggaggccgaggcaggtggattgcctgaggtcgggagttcaaa

SEQ ID NO: 106225 - DNA, 390 bp, Homo sapiens
aggagtcccgtgtttctaatgcgtacttgccatacacaaagggacagcgtctgcataattgcacttgtgtgaggtttctgggggagtcaaactcatagacagaagcggaatggtggttgccagggcctggggacagaaggaatggggagttagtgtttaatggggggagagtgttcgttttgcaagttgaaaaatggtctggagacggatggtggtgatggttgcacgttatggatgtgtttagtaccactgagttgtacacttaaaaatgattatgagggtagatttttggggtgttaattaattcatttatttattttgagacagagtctcgctctgttgtccgggctggagtgcagtggcgcgatcttggctcgctgcagcctccgc

SEQ ID NO: 106226 - DNA, 418 bp, Homo sapiens
ccgggaggctgaggcaggagaatcacttgaaccggggaggcggagattgcagtgagccaagatcatgccactgcactccagcctggtgacagagcgggacgctgtctgggaaaaaaaaaaaaaaaaaaccccaaaaggcccttttttgggcctgggaaaaaaaaattgggtttttgaaccccccaccaaaaaaaaccctttaagggggggtttttttttaggggaccccctcccaccaaagaaaaaaggcccctgcccctatgcaaatttccggccccttactaaaaaaaccaaaaagggtttttaatcccccccccctaacaaaaaaagggctttttccccccccttgcccgggtaaaaaagccgaaattgggggggtttttcttttttataaaccgggtgggccggcccaaaaaaa

SEQ ID NO: 106227 - DNA, 422 bp, Homo sapiens
ctcaagtgatccacccgcctttgcctcccatagtgctgggattacaggcataagccactgcacctgcagagctcaggttttcaaaagactagtttcagccctagtacacattctcaatgtgtatagaatgagtatctgtatttcaacaatcccaccaaagcctgaaacatagaacgcaagaaatcctcgttgagtgactaattcctcccgatgtgcatggtgctttgtaaagatcattcagtgctttcacgaagatgtttatctcttctaacattctatcagtcctcaggggtggggtattatccctacttcacagattaggagccaaatccagagaggttaagtggctgtgctccaagtgctagaacaggaaacctgctgagtcctaggcatcccttctatcctggcaaagtggcttcctt

SEQ ID NO: 106228 - DNA, 484 bp, Homo sapiens
  misc_feature (1)...(484): n = a,t,c or g
aggatanngnntttgaaacttgataacgtcgcaccggnccggaantaccgggccgagccacgcggccggcagaagatggaggacctggcccagtgactccggcagtatacggagtctcactttgatgcccaggctggagtgcagaggcctgatgtgagctgcctgcaacctccacctcccgagttgaagcaattctcttgcctcaacctccagagtagctgggattacaggagccagatctggaccccaagccaatcctggagctgcccctggcagagctggcccagcagcttcagaccgaagagctgagtctggagagcatcctctgtagctacttaaagcaggcactgaaggtgcaccaggaggtgaactgcctgatgattttcctgggggaatgtgaggaggaactgctcgcattaaagaagcttaagaagagtgagagaggccttctctatggggtccccatgagcctcaaggacacctn

SEQ ID NO: 106229 - DNA, 462 bp, Homo sapiens
  misc_feature (1)...(462): n = a,t,c or g
taccggnnnaaattccggtcaccccgcgtnnggaagggctcagctggggataccgcgagcacaacggtcctattcactggaaggaatttttccctattgctgatggngatcagcaatctccaattgagattaaaaccaaagaagtgaaatatgactcttccctccgaccacttagtatcaagtatgacccaagctcagctaaaatcatcagcaacagcggccattccttcaatgttgactttgatgacacagagaacaaatcagttctgcgtggtggtcctctcactggaagctacaggttacggcaggttcaccttcactgggggtccgctgatgaccacggctcccagcacatagtaaatggagtgagctatgctgcagagctccatgttgttcactggaattcagacaaataccccagctttgttgaggcagctcatgaaccagatggactggctggct

SEQ ID NO: 106230 - DNA, 414 bp, Homo sapiens
ctccgggcccgccgctcccgcaacacccatgtcgatcttcccggagctttactttaacgtggacaatggctacttggagggactggtgcgcggcctgaaagccggggtgctcatccaggccgactacctcaacctggagcagggcgagacgctagaggacttgaaactgcatctgcagagcactgattatggtaacttcctggccaacgaggcatcacctctgacggtgtcagtcatcgatgaccggctcaaggagaagatggcggtggagttccgccacatgaggaaccatgcctatcaaccactcgccagcttcctagacttcattacttacagttacatgatcgacaacgtgatactgctcatcacaggcacgctgcaccagcgctccatcgctgagctcgtgcccaagcg

SEQ ID NO: 106231 - DNA, 463 bp, Homo sapiens
  misc_feature (1)...(463): n = a,t,c or g
tgacnaccctntgtaggaactcccgggtcgagnnnnnngtgccccgggttattcctgggccggatcttcatcggcacaggggccactgagacgcttctgcctccctctttcttcctccgctctttctcttccctctcggttaggtagcctgggagcttgaaaggagaaagcacggggtcgccccaaaccccttctgcttctgcccatcacaagtgccactaccgccatgggcctcactatctcctccctcttctcccgactatttggcaagaagcagatgcgcattttgatggctggattggatgctgctggcaagacaaccattctgtataaactgaagttaggggagatagtcaccaccattcctaccattgtgtttaatgtggaaacagtagaatataacaacatttgtttcacagtatgggatgatggtgggcaagaaagaattaggcctctctggaac

SEQ ID NO: 106232 - DNA, 444 bp, Homo sapiens
  misc_feature (1)...(444): n = a,t,c or g
gacccacgcgtccgtggccaggctggtctcaaactcgtgacctcaggtgatctgcccgcctccgcctcccaaagtgctgggattataggcatgagccactgtgcctggcctccaaagacagtttaaagcctgaaagccaagctacaagtcctgggtaaatccacggactggattgagaacctctcttccagttcggcaaggtttcctctgattgatccccacccttcacctgttttacatgtatttactcttccctgattggttttttacactgtcatgcccacctttgagagacgcctttgttttagcctttttgttatatgcacaaaccaatcagcatacattccccattcctccccacactcatcgcccttaccacgctactcctacctatctccccttttatactaataatcttataaaagaaannnaaaaaaaaaaaaa

SEQ ID NO: 106233 - DNA, 454 bp, Homo sapiens
  misc_feature (1)...(454): n = a,t,c or g
gagcaagtgcatgagcgnatttgggnggaanncccggnggttattactattattattatttttggaagaaaaatctttgaaattctggggcaggttactgtgctcctagggggattcttcttttgcaagaggagctgaccagggcaagctactagagccatttctcggcaagtaaagagatttttccttccagaaggagaaggatttttctccctgctctgcagccaaatgaaagagattagtccctaaacctgtgaaatcgaccagagctgtgtgattaccagggcttgagagaggactcgaaaagaaaaggagaaataaatcaaacagcctgtcagttcctttggccacgtcagaagatgtcatctcaaactaagttcaagaaagacaaagagatcattgctgaatatgaagcccaaataaaagagatccgcacgcagctggtggagcagtt

SEQ ID NO: 106234 - DNA, 1607 bp, Homo sapiens
aatctttggactttgagccttggcagagttggactgctgcagaaaccaccacagtctggcatgaattaagtcccactgcagaggtgaactggagccaagatttcaatctccaaatgattactactgggggaaaaaggctctgggccatgctgacaatgaatatcagctgctttggtcatcaagaacaaggaaagtctgagaaagtgtcaccgccaagaagagataggagaattatttgtaacgtagtatcctggatgggatcctggaaagaaaaaggacaccagacagtgagatggggcttttttccagatcttcgcgccgagagccggggacggccaacctgccggcatgcgataaaggccggggaatgtctagctggggccgcgctgagccgagtgcggacccgctttgtgtgcgcgtttgtttgtctccgctgcggtccgaaccgctgccgcgacccccgaggaggcggggcctccgcgcgcccggctccgcctggttccgcaatccggggcgtgccctttctatccccgagagccggacgtggggtcccctgggccggagaagagcgcaaatccgatggttgcccacctgagcacctcgggggaatcatggagggtctctctaatggagctcaggctgtagaattaattagcgtttgggagtcgggcagagattggaacagtttggagggctcagaagaagacaggaagatgtgggaaagtttggaacttcctagagacttgttgaatggttttgaccaaaattctgctagtggtatggacaaagaagtgcaggccaaggtggtctcagatggagatgaggaacttgtcggaaactggagtgaaggatccttagggtgtcgcttcaccagccagaaacctctgtggcaagtgttgcctttgcccaagttttgctcaggcccactgggcttgttctgcccacttgacccagcaggctgtgcttggttttcactactggcccagatcccacggctgccaacggcaagccaggtgcagagcagcaaggggtgcatgagtgagcgagcgcggggtacagtgtgcacagccaggcatggtggctgtggcggggcaggcaggtccaggtgccagtatgggcgccggctccttgctgtggctggaacaggtgtaccacaagtggctcccactacaagcactgtggaacatggtggcacccagaaacttggagatgccggcaactgcagagccacaaagaggatgtcacagccctggcttggggagctcctaagtccaggctccctgaagggctgcagctcttctctcctctcttgtctcctcatcgtcacccacaacatggcgagcagcagggtgtatttgacacagtttgtgttacagcttgtttggtcctgccatttggcaggcagttcctcccgacaactgcagctctcagcagagaagagacccggagtgggtacctcctctctgcaggcaggtcattttgtcgagtgtgcagtcctcagtggagaggagacccaagtgggtagctcttacctgcaggcaggtcgtcctatcatctgccagagtctggctgagtttgcggtttttatgggcttcagaggggaggaa

SEQ ID NO: 106235 - DNA, 414 bp, Homo sapiens
tttcgtggaggaggaagaagaggaaaaaagagaaaaagatgaattatcacagaaaaaaaaattcttcgttgtctagactgggctttttttcccccctaaaaaatagcatattggagaattgggagaagtctctttggtttggaaaaaaaaaaggaatcttcagcctaaatcacttttttatccggactgggatattaaatataccacacatcccggagtttattggaccgcaaactgagggcgcaaaggtacgatgagctgccccattacggcggaatggacggagtaggggttcccgcttccatgtacggagaccctcacgcgccggggccgatccccccggttcaccacctgaaccacgggccgccgttccacgccaaacagaactacggcgcgcacgccccgcaccccaac

SEQ ID NO: 106236 - DNA, 419 bp, Homo sapiens
tttcgtgtgtgtgtgtgtgtgtgagtgtgtgtgtgtgtttgtgtgtgtgtgtgtgtgtgtgtgtgtgtgtgtgtgtgtgttttttttttttttcaggggggtgtggacacacaaaaaacctctgtcttacaggggcaaatattttaggggggtgtggacatacaaataacctctgtctgaggggggccaatattccacactcacaaaaaaaaaacagaggctcaatataaactattgtgcgcgcacacttttgttttttgttttaaagagagagagtttcgcgctctcttcccaggctagagggcaggcgcacttttttgtctcactgcagtttctgcctcgtgagaaaaagatattcccctctctcacccttgagagagggtgagagtgcgcgcgcccctcaccatgccttttttttt

SEQ ID NO: 106237 - DNA, 443 bp, Homo sapiens
tttcgtctctcctgggggccaaggttttggatgtcagaggagctcttccctggagttttctccctttgccccaaccctggagtcacttcccctggcctcctgggaagtcttttcttctctccagaggccatttaagtactcggctgtgcccggaagattctggcggtcccaccagtgagacagggtggtgactcctactctgctgggcacaggaatctcttgggactctgggggaaaacacagcttcctcccacaccgctgggctggaatgggagtctcctttgtttgcttgctggtttttttggggtttttgtttgtttgtttggttgtttgtttggtttgagccaaagtctggctctgtgctcacgctggagtgcagtagtgtgattacagctcactgcagccttgacctcccaggctcaagggatcctcctgcctcagcc

SEQ ID NO: 106238 - DNA, 392 bp, Homo sapiens
tttcgtggctcgttcacccgggacaagtccctcgtgggatcagcctggcccgctgagttctcctgcgtgcagggatcgcctcacgggagtctgagcagcaaggagcctgcccgggaggcggcggtgggagaggcccttgagggaggaggggctccttaccggtagagacgcggtttcacggtgttgcccaggctggtctcgaactcttcagctcaggcaatccgcccgccttggcctcccaaagtgctaggattacaggcgtgagccaccgtgcctggccatctgcttcttgatttgactggggagaacttcgggtgaaatgcatccctcctgtgactggattggagacacaagaacagaaacatcctgatctctgtactctactgtgcagg

SEQ ID NO: 106239 - DNA, 433 bp, Homo sapiens
  misc_feature (1)...(433): n = a,t,c or g
tttcgtgttgctttgtttcctgtggtcccagctatactgtgatggcttgacactgggaggcggaggttgcagtgagtcgagattgcacaactgcactccagcctggatgactgagtgagaccctgtctcaaaaaaaaaaaaaaaaagaggttttgtttcccccccaaaccttaccccaaaagtatttggggttcccatcccgggggaaaaatttcctcctcccgggttgggttcccatttataaaccaaaaggggggccttttaataaagaaaaaatcccccaattttggggccaccccgggagtaataacaccggggccccttttttttccccgcaaccattgtcgcccccccgcggttttatttttccaattttttttagcccccgctataagctcccaacacccgggcggggggggccgtttttattttn

SEQ ID NO: 106240 - DNA, 413 bp, Homo sapiens
aggaaacacagcaatagagatgaagtttcattatgttggccaggctggtcacaaaccagccagcctcagctgatctgccagcctcagccccccaaaatgctggaattacaggtccaggcactcccactcctcctgagagaaatctacagccacatccctgaacatcatcaactgttggaaagaataattccaagtattaatggggctcaccagagaagacagggcaaggtgagggggatctcctagcagaggaaacaacatgcgccaatcaagcaaagatatttttgtgcattcaaggaacacagagaggaaagacagtggcagatggagacgtataaagcagggatcctgttatgaaaagccctaaaaaatagggtatagagtttgcgccatatttcagaggtaataagaag

SEQ ID NO: 106241 - DNA, 383 bp, Homo sapiens
cgtgaacctgggagggggtggttgcagtgtgctgagatcgcgccactgcactccagcctgggcgacagagtgaggctctgtctcaaaaaaataaaataaaataaaataagactttgctgatatacttccaggaaagcagtttaaatggtctgtttcaagattaaatatgaaagcagattttaaaaataatgtataattataaattatatgttttatgctcagcatgtttttatgtgaaaagaatatcaaaatattcttcagttgtctttatggggttgtttagtattttgacttaaagtctaaagtttatgcgtttattgtacattctttttatgttgacttgtgaactttttctttctctttccctcagattttcatcaccg

SEQ ID NO: 106242 - DNA, 332 bp, Homo sapiens
gccgcccttcaagaaaataaagaggagaatcactgaacctggcacgtggaggttgcaatgagctgagatcgcgccactgcactccagcctgcgagacagagcgagactccatctcaaaaaaaaaaaaaaaaaaaaaaaagggaaaaaaagggggcccttgggaaggggggaggggaaaagggggaaacaaccccccaaagggaaaaggggccaaaataaaaaaaaacccccccccccaaaaacggggggggggcccccggggaaaaaaaaaagttttccccaaagggtccccgggagacgggggattcccaaaaacccccggagagggggga

SEQ ID NO: 106243 - DNA, 444 bp, Homo sapiens
gaccggcctgggtaacatggcaaacccccatctctacaaaaggtgcaagggttagcccggcgtggtgggaggatcccgtgagcccaggaggcggaggctgcagtgagctgaggtcgcgccgctgcacttcagcctggggggacacagtgagactgtgtctccaaaaaaaagtcattttctcattgacaccttccctggtcatcctgggaaacatcctgtttaacctgctcaccccctctatatttcttttctactttctcttagtttttcttcttagcattttaacattgtattaaaatattttaataaacttatttatctaatattttttattttattttatttttggtggagacagagtctccctctgtcgctcaggatggagtgcggtggtgcggtctcggctcgctggggcctccgcctcccgggttcgggcgattctct

SEQ ID NO: 106244 - DNA, 411 bp, Homo sapiens
ttggaatcagtagaaaaggaattttaaagatatttatggctattttaaattattaaagattcttactaagggtagatatgataaatgaagacagggaatttcaagagaaatacaactaatagaagaagaacaaaatggaacccctagaactgaaaattataataactgaaattatttgatgggattatcagtagattggacaacagtaaggagaatcaggaagcttaaagataggtcaatagagggccaggtacagtggctcacacctgtagtcccagcctactttgggaagcctaggcaaacgaatcatttgaggtcagaggtcagaaatttgagaccagccaggccaacatggtgaaaccccatctctactaaaaatacaaaaattagttgagtgtggtggtgcacacc

SEQ ID NO: 106245 - DNA, 419 bp, Homo sapiens
agaattgcttgaacccgggaggcggagattgtagtgagttgagatcgcacaactgcactccagcctgggcaacagagcgagactccaatccaaaaaaaaagaaaaaaatcccctaggacagggctgtggctgagaccctgagggctggaggcttggctggccttgcacagcaacgggtgcatgctggggtggggagaggcctggagaccctgtgactccactgggggccttgctgtgtgaccccctagtgagtccttgtgtctcttacccacgcatgcctgtcacatgcagacacccacacacacccactatctgccggacagagcagcccttcctctccgcagccaggaagctggacataggcacaagggctgacgcctggggccaggaatcctgcctgagcattaggagaaggtctg

SEQ ID NO: 106246 - DNA, 413 bp, Homo sapiens
aacctaggaggtggaggttgcagtgagctgagattgcaccattgcactccagcctgtgcaacaagagtgaaactccatttcaagaaaaaaaaaaaaaaaaaattttccccggtttgaatgtatcccgggggggggaaaaacacatccccatttttggcacctctaaaactaaaagttaaaataaaatttttttataaaaaaggacacttggtggccaactccttgttttaaaggaccaaaaacccggggtccctaaagggattttgcacccaaacaaagcccttgttttaaaatgggaaaacacattttccccttggaaaataaaaagggggcttctttccgggtggccccaagcttctttactcttttttgggggatttttttttttcttttttgggtttccccccaagggg

SEQ ID NO: 106247 - DNA, 448 bp, Homo sapiens
cttcggaccggctcggaattttcgggtcgagactccaaggggctcgcagcggcggagcccaccgccaactttggccttttgctggcctccatcgaggaccaaggcgcggggggaggcggctactgcggttcccgggaccaggtgcgccgctgccttcgagccaacctgcttgtgctgctgacagaggcggccggggtggccggtgtggcgctgggactgggggtgtcggaggccgggggtgcgctggcgttgggcccggagcgcttgagcgccttcttctttccgggcgagctgctgctgcgactgctgcggatgatcatcttgccgctggtggggtgcagcttgatcggcggcgccaacagcctggaccccggcgcgctcggccgcctgggcgcctgggcgctgctcttttttctgggcaccacgctgctggcgtcggcgctctgag

SEQ ID NO: 106248 - DNA, 410 bp, Homo sapiens
  misc_feature (1)...(410): n = a,t,c or g
cgaatctaccgcctccaggattgcattcgaggcctggcagccggagacacttccgaagggcttgaattactcgggcgccagccctgtcgtattaaacgcagtgcttccgctcaaaaaaaaaaaaaaaaaaaaaaaaaaaaaaaaaaaaaaaaaaaaaaaaaaaaaaaaaaaaaaaaaggggggggggtttttaaaaaaaaaaaaataaaaggggggggggggtaaggggtatttatttttttatggaaaaaaaaaaaaaaagaagacggcgggtggtttaacccaccgggtggaagaaaaaaccggcctgtaaaaaaaatgaatggggggaggcgnntnnnnttnngttcactaaaagaaacagaagctgttggaaatcaatatggatgggtgggaaggtattggcttgg

SEQ ID NO: 106249 - DNA, 432 bp, Homo sapiens
  misc_feature (1)...(432): n = a,t,c or g
gctcatgacctcaggtgatccgcccaccttggcctcccaaggtgctgagattacaggtgtgagccactgtacctggcctctgccatctttgaggccttacgtattcattcattcatgcattcattgtttgggacaatctgtaaacaatcatgttggacattctttccagcatgaaagttttcagagaagtggaaagaattgtgcagtgaatcatcctgagtatgcgccaccctgttctatgttaacattttgttacagttgttttatcatgtagtccagcccccatcaaatctatgtattcactgttccatcagtgagtagatagagctaatgaatggcagggttggcacctgaggcattntattttattatttttttttatttttagagacagggttgcactctgtcacccaggctgaagtacagtggcat

SEQ ID NO: 106250 - DNA, 458 bp, Homo sapiens
  misc_feature (1)...(458): n = a,t,c or g
cattgccccncccctcccctctgcccggccgcctcgtctgggatgtgaggagcgcctctgcccggccgccctgtctggaaagtgaggagcgcctctgcccggccgccctgtctgggaagtgaggagagcctctgcccggccgcccatcgtctgggaggtgaggagcccctctgcccagccgcccttcgtctgggaggtgaggaacgcctctgcccggctgcaccgtctgggaggtgaggagcacctctgcccggctgccccgtctgggaagtgaggagcgcctctgcctggccgccccgtctgggatgtgaggagcgcctctgcctggccgccccgtctgggatgtgaggagcgcctctgcctggccgccccgtctgggatgtgaggagcgcctctgcctggccgctgtgcaatcttccaagtgtgaagtgacagcctttctgcaggtgtacccaaca

SEQ ID NO: 106251 - DNA, 435 bp, Homo sapiens
ggaattcccaaggacccaaactggaaaccagatgctgtagtcaactgggggccctagggagctgcccaccatatgagactgagcttcccatccctacgagggaagaatgggcaccacatctgttaggcctcatgagctgttgggaggattaacttgctttttttttttttttgaaaagggattttcttttttcccccaagttggaaggcagggggggcaatttggtttaagggaacctttgccccccggggtaaaggaaatcccccgcctaacccctctggagaggggggcccaaaaaaaaaaaaaccggggccccaaattcccaggggacctcccttagggcctcccgtttaaaaagcgtgttggaaaatacattttgcccaggcccctggcccccccctataagggaaaaccgcggggggttaatttcctttt

SEQ ID NO: 106252 - DNA, 404 bp, Homo sapiens
cgtccgggcagattctctaacttcccttgggaagctttggtttaataaaggaaatagataaaggagtgatgataacacacggcagcagtggagtctgccagagcctagggcttgggaagggaggcttcatggaggtcatgcctggatgcttgaggctgatcgggtaaatgaagatggaacacgtagagggagcaggtaggtatgtctagaaaaacagtgaggacatttgggagggcaggaggctaaagtagtaaccaggagccaggttgcaaagggccttgtgtgcttacaaatttttactttatcctgggccgggcatggtggctcatgcctgtaatcccagcaatttgggaggctgggacaggtggatcacctgaggtcaggagttggagaccaacctgatg

SEQ ID NO: 106253 - DNA, 442 bp, Homo sapiens
  misc_feature (1)...(442): n = a,t,c or g
tccccgggtcgacccacccgtccgctggagggacctctcaaaccctgggcttttgttgaggcccatccgttttcctgccctgggcatctgtctctaaaagggaatggcgggtgggggccaaggggcactggaaagggaggccagtgcctaaagggaaaacagctgctgttttattaaaaaaaaaaaaaaaaaaaaaaaaaaaaaaaaaaaaaaaaaaaaaaaaaaaaaaaaaaaaaaaaggggggccccttaaaaaaaaaaaaaaaaaaaaacccgggggggggaaaaattatttttttttttgggggccaaaaaaaaaaaattgggggcggggtttaaaaaaacggggagaaaaaaaaaccgggggggccccaaaaaaaattccggggggaacaatnnnnntnttttntcttcctttaaactaaaattaattagtcttttt

SEQ ID NO: 106254 - DNA, 403 bp, Homo sapiens
  misc_feature (1)...(403): n = a,t,c or g
agcccccaccagaagcagatgcttgcgccatgcttcttgcacagcctgcaggactgtaagcacagacacctccagcttgcgaagggcagatccgaaaggccggagtgcgctgttggctgatatccagcaaggaactcgcctgcgcaaagtcacgcagatcaacgaccgcagtgccccgcagatcgagagttctaaaggaaccaacaaagaaggaggaggttctgcgaacacacgaggcgcgagcacacctcccaccctgggagatctgtttgctggaggctttcctgtattgcgaccagcaagccagcgggatgtagcaggtaaggaagaattcattctggctcccttgtggactgtatctccttaacttgtggaaccatctgggcaatccacacatgccagn

SEQ ID NO: 106255 - DNA, 398 bp, Homo sapiens
ggaggtaggtggtagtttgtgtttaatatttttagttgggtgatgaggaatagtgtaaggagtatgggggtaattatggtgggccatacggtagtatttagttggggagatattagggagtagaaggacctggagagaaaatgcctcatccaatgagagccagacttactcagttccagttaattgttatgtaagaatgagggcccagtgttatcagaactttcaatgttttgagagaatcctaaagttcagatttttatgtgaaatctattctagtgttaaaacatcagcaatttggccgggcgcagtggctcacgcctgtcatcccagcactttggaggcagaggcgggcggatcacgaggtcaggatattgagaccatcctggctaacagggcga

SEQ ID NO: 106256 - DNA, 446 bp, Homo sapiens
atcctcccatcagcctcccgagtagctaggattacaggcatgcaccaccatacctgtcttttttttttttttttttttgggcaccattaaaaaagggggtgctcacaggggggccgggggggctcaaatttcctccccaggggggccccccccccccccccccccaaggggggggaattatggggggggcccctgaccaacacctttttttttttatttcttttaaaaaaacatttttgaatgttgtaaaaaaacgggccttaaacggagcctggttttaccgcccaaaacttttttagggggggagtctccaaaacaagaaccaaaaaggggctctcaaaaaaggggggtggcccgggggttacaacacgggggtttacctttcttctgaaagaaaatttccaatcttttagccattccctggtaagtggtttattctgggcccc

SEQ ID NO: 106257 - DNA, 399 bp, Homo sapiens
aaaaatctcctattttgaaaggaagtaaacacagacaaaacttggctgtactgaattcttaaggcgaatttgtcctttgaaggttaaggtatgtgaaacagtacaatgtactgggccttgcatagttttactaaaaatgttgagcattttttcactctttttctcactcttggatgagacgatgagccagctgttattgtcattcccttgatcctcagggttaattctaatttggctgtccttcctgctttgcccacatttctcctcaggcgttgttgacaagttaagtttaggttaaatttccattaaaaaacagcgtaaaggacctgtgcagtggctcatgcctgtaatcccagcactttgggaggccaaggcagttggatcacctgaggtcaggag

SEQ ID NO: 106258 - DNA, 385 bp, Homo sapiens
aagatgcagaaccgaggtttcttcttcttaaccttcttggccttgttggggttaacttcgggggccgccaaaaaaaaaaataaggggaaaaaggccggcccgggaagcaagtcccctaattggccctgggggccctgcccccccagcagcaaggattgcgggggggttttccggaagggcacttggggggcccaaacccacggcatccggggcagggggccctgcaactggaaaaaggagtttgaagccaactgcaagtccaagtttaaaaactggggggcgggtgatgggggcccaggcaccaaagtccgccaaggcaccttgaaaaaggccccctccattgctaagggccaggaaaccatccgggtaaccaagccttgcaccc

SEQ ID NO: 106259 - DNA, 408 bp, Homo sapiens
ttttttactaaaatcaatacctttttttaaaagcacttctaattcccctttcggcaaaactggaaccacccatcgaggcctgttgatcatgtcatccaacttggccaagtcagtatggggaaaggcaggttcctcatcttcaagctgggggggggcatcaccttgaccttgctcatttgggggagttgccggggaattttcattggaaaaatcaggcgatgaagtctgattctgttggagggggggctgaaactgtccatcaggagcctggccctggttgtcattccctccgaccggaaagccacaagtcggggcttgcatactcgacacagggcaaatctttgcaattttgcctgcttatgtagttgccttgaaaaaaaaaattatagcccacttatagaaaatgag

SEQ ID NO: 106260 - DNA, 373 bp, Homo sapiens
ggctcggcgtggggagccagcagaccgggttcgggctctactcgtggggacctcaaagcctgcacatctaacatgaggagactggatctgaacactgtacaagtgaacggggaattatacgccgctcgaggactgtgcccaggagcagatgcggctcatagcccaggtgcacctgcttgagacccgggtcaaacagcaacaggtcaagatcaagcagcttttgcaggagaatgaagtccagttccttgataaaggagatgagaatactgtcgttgatcttggaagcaagaggcagtatgcagattgttcagagactttcaatgatgggtataagcttcgtggattttacaaaatcaaacctctcctaaacccg

SEQ ID NO: 106261 - DNA, 419 bp, Homo sapiens
aatacaggggggcatgacagtataataaaagttaatattttacttgaataagaacctctttccataaatatgtggaaagcataccttattttctttatatttactgagatctgctatgcagcattccttaaataatttatcatagtatttcttagcaagtctcttctccctagacccatgaaaatataaatattatacatttagaaactcaaccatggtttgctactttcaagtgatatcaaagaatacatactacataaatattaatgttttaagagaactattacttacatgtgcatggaatatctggatattaactattagaagtggttcactcagggagggaaattggagaactgacagtcacaaataagaaggagaatcactcttcactgtttaccctttggaatgtttggacg

SEQ ID NO: 106262 - DNA, 448 bp, Homo sapiens
  misc_feature (1)...(448): n = a,t,c or g
gcgacgcgaagcgccangaagttngatantntaaagagggcgcggagagggcgggggcggctgcacctgtttggagctttttattagaccgccgggactcggcccgcaccaggagcggaacaagtctgggatctgccgatatgggggatatgaagacccctgattttgatgacctccttgctgccttcgacatccctgacattgatgcgaatgaagccatccattctgggccagaagaaaatgatgtgcctggaggcccagggaagccacaaccatgtgtaggaagtgaatctgaacacacagcatcagcctctgctggggatggccctggagttccagcccacgcctctgaccatggcctgccaccgccagacatttctgtactcagtgtcattgtcaagaacactgggttgtcccgagcaggctggaggccctgggtggacgttcg

SEQ ID NO: 106263 - DNA, 414 bp, Homo sapiens
  misc_feature (1)...(414): n = a,t,c or g
nnggcnagccgnagtaaccangcgatgntaggttggatcctccagagcggccgcaattcatgctccagaatgctaacataatctgttataatagatagatgggtgggtagatagagggagagatagatagatagatagatagatagatagataggtggatagatagatagatgatagagactgctagatatagtatagaatattctatagtcctcatatgggctttgccacatgtttgtttgcttttttcaaaatatttaatggaagaataagaaatctcagttgatataaaaattctagtgagtcgtgacctatagatgcacaacaatggcatgcaaaacttttcatctaaaggtcatcaactgatgagtacatatgcaaagggtggcatatccatatataggaacactactc

SEQ ID NO: 106264 - DNA, 442 bp, Homo sapiens
  misc_feature (1)...(442): n = a,t,c or g
caagacgagccgnttgggttgaggcaccagagccgccgcaatacactgtgtgaccaaaataaatgagctaatttaccttctcaagcagttttaataaaagaacaaatgaaatgcaaagtaaatgaaattaaataaaacacagaaaatatattttaaaagcccaaagtttgttctgtaaaagatctggaaaattgaaatctcttactacgattaatcaagccacaagagagtacaaatagtgtcaagaatgagagatcacagatcttacagaaaataaacagaacggtatgaacaacaaatttgaaaatttagataaaattaatagtctgacagcctatttatttaaattatctatttatttagataaaattgatagtctgacagacagtggtggtgcatgcctatagttccagctacttgggaggctgaggcaggagaatcg

SEQ ID NO: 106265 - DNA, 814 bp, Homo sapiens
cggatattcccgggtcgacgatttcgtgtaaagctcccatcctgccctgaccctgccatgggcaccaggctcctcttctgggtggccttctgtctcctgggggcagatcacacaggagctggagtctcccagtcccccagtaacaaggtcacagagaagggaaaggatgtagagctcaggtgtgatccaatttcaggtcatactgccctttactggtaccgacagagcctggggcagggcctggagtttttaatttacttccaaggcaacagtgcaccagacaaatcagggctgcccagtgatcgcttctctgcagagaggactgggggatccgtctccactctgacgatccagcgcacacagcaggaggactcggccgtgtatctctgtgccagcagcttagccacagcatggcacagtcgcctccttcctgctcataaacctcatccttctctctccttgcagctcctagacacccttaacagaggcttctctttgcttctccctccccatgggaaacaagtagatttggacctcagcttgtcctttgggtagaaagagaccacagatttacccttaagacacagtaactgtaaatgtgggtggtggaagcaatcgtggcccaccgggctattggagtcctcagagccagctcattgctctaaggcaagcactgcgtgtcttagccttggccttcagggctgggacacacagtcttctttgggccctgggaggtggtgccaaattaaaaagttcgggcattgctgaggaccagggcttcccttaatgggtgggcatccgcagggccgaaccg

SEQ ID NO: 106266 - DNA, 362 bp, Homo sapiens
aatacaggttgctggtgaggaactgcgttcttttggaggaggagaggcgctctgcgttttagagtttccagtttttctgttctgttttttccccatctttgtggttttatctacttttggtctttgatgatggcgatgtacagatgggttttctgctatatgacctttctgcctgctatgcttttcttctatcacacgggccctttgctgacagtctgaagaccaaccctacctgtattatgcggctccgggcccctttggctcttattataaccagccgttcctctcttctcaccgaggggaaacaaaataggcgggggtttctgctccccctctgggccgcgccctctctcacaacgggc

SEQ ID NO: 106267 - DNA, 390 bp, Homo sapiens
aatacagtgtgccggtactcacctggccccacagaagttctccaatcccaatgaagagacaccacagccactgtgacaggctgatgcttgtacaactgaagggtttacccccaaattccacgatgaaaatctataacagagaaaggggcagcccaccatcaaggaaatgactaacaggcagctggccctccagccaaggcccccaaaaccacatcatcccactcctcaggatccttgggtacaagacccgatttgcttgcaggggaagggaaaagaaaaaatctctaaggggagacagaccaaaacagcctttaagaacactctgatggggagacagacataattactgggactatgattaacagaccatctgtaggagttaggggagcg

SEQ ID NO: 106268 - DNA, 391 bp, Homo sapiens
aatacactcttctttaatacttgcttttgtccaagatttcctctagggttttcctaatttgcaacaacttctaaaagaaatagttgtatttttctgtggcagaaaagatttcctaaccagcagaagactgtgtgtgtgtgtgtgtgtgtgcgcgcacgagtgtgtgtgtttatgagtatgcagagtgtatccatgagggtgtgtgccatttcatttattctcctaggaagaatatttactactcgctgtgaactagttttctgtgtggcttgcgcccccccagtgccttacgatgaataactcttctgctatacatcgctcctttgttactccctgatttttttcttgttgtttacgcttcctgcgcctggcgtttttcccgtcatgtgcg

SEQ ID NO: 106269 - DNA, 346 bp, Homo sapiens
aatacattggctggaactcacccacttcagctccatggtctctgcactcatgggcgggaacaggtgacagggcagatcagcgtcttcacccaccatggccaggatgggcccagagggtccaagcacagaaaactgagctgagtgaggcatgagcagctgaagcaaaaggaggcagacacgaaagttgagcagaaggaaggccaggaaacttgccattttcattcatgctgcatatcaggagatactggaaggtggggggcagacactatgacctggaagaagctatagaattcccaatggaaacctccacttccctagagctaactcaagtatggtgaccacgaaa

SEQ ID NO: 106270 - DNA, 397 bp, Homo sapiens
atacactggggctgtaaatagaaaatgaaaatgaaaacctctcatctcacagaacaaaattcattcagtgagtagctcacagactgggtttttttttttttttttttttttcggggaaaaaaaacccccctttgccccccggggggggggcaagggcccccccccgcccctacccccggggggggggaaccgggcccccccccggggggaaaaaaaggggaaagggaaacccccccctaaaaacccgggggccttccccccccaaaaagaaaaaaaaaccccggggggggggggggggaaaaaaaaaacccccgcgcctcccacaccaaaggaagtggaccaacccctcccgcgccgagaacagcgtgggcccgggcggctccccccgcgaggggcg

SEQ ID NO: 106271 - DNA, 514 bp, Homo sapiens
aatacatacccgcacctttggccgagtggggaatttaagctggaaagagaaagcagtgaggtcaaatatatcaggttgctttaagactggatagggtagaagattacatggtagcatacctagcctggggcttggcccactatggccagatctgcccactgcttgtttctagaataaattttattgacacacaactcatcttgtgtatgtattatcaatggctgctttttttttttttttttttgaaaaaaattttctttttgccccccgggtggaaaaacgggggaaggatttgggttcattgaagcttccccctccgggtttccggcatttttctggcttaaccctccaaggaagtgggaacaacggggccccccccccttccccagttatttttttggttttttttgaaaaaaggggtttccccctcgtaggccgggagggcctaatcctcccccctctgcaaccggccccattttgtatttcctttaggggcgcaatcaacgggccatcg

SEQ ID NO: 106272 - DNA, 475 bp, Homo sapiens
aatacagtgggcgaggcaagcataggatccactcttatccactgcgatgttggggataaagagcttttgtgtgtgttgctggagtattccactgacaaaccaggagtactgtgcaggtgggttagaggccatgtggcaggagaggttgagatttgcccctggatggtaataggagtctgggggggaaatggtgggaatgcccggtccatctggagtagcgagaataaagtcatacatgatatcatcaaagggaaggggaagctcctggtctgtggaatagccactgtgtccctgtgagccaattcacaaccttgaagttctaacgaaacccaatctgtccactgagtctgggtctgagatattcacctgtttcttccatcacaggctgttgaccctgagcctctcaggacaggaggagcctctcccctcctattcttggtgaaggctgggccttgccaccgtagcttgggaacag

SEQ ID NO: 106273 - DNA, 459 bp, Homo sapiens
aatacatgcctgggtatagctgacatcagtgggctgtccataggttccatagctttgttgcccatatgcctgctccaaaaaaaaacgaatgcaagaacttcatacgtgaacttttgtattttagcaataaaatggactaaattggagaacgaaaatcaaaaacattcctttctagaagattaaaaaaacaaaacaaaaacaacaaaacaagacaaataatcacagtatcatgaatgttatcccttatctggttcactcatattataggaaagttagctacggaaaaagctcattaggtaagtaggcaatgtcattcacagcttctcaaaagggggaaaaaaaagataatcaggcaaaacctcagttaactatacatgagattaacaagacactctcaagggaagagcaataagggcacaggtgtattaactgctagcacttagcggagcacaggtttag

SEQ ID NO: 106274 - DNA, 466 bp, Homo sapiens
aatacactgcctaattaatttcaaaatttcatattagagttttgacaatattttcaagaaaaatatatccataaacccaccttgtatattcttcttgtaacttggtggggtcacttacaaaaaatttgactctaaagttcaaactgtaaggagatcctctctttagctgcttccttattggtttgtttggatccagccacctctgaaaaataaataaataaaactgatttcttttttccttgaggaactactatattgattcttgcaaatctgttccatttggagattaatgctaaaagctgcatttcagaaaaggcccaggtaggaaaaaaaatcattgcattacagacaatatttttcatatcaaatgtaataaaattatgctagaaattagggaatgtgttaatattaagattttgatttgacttttccatcaaacagtacaatgtgcaacaatctctatttc

SEQ ID NO: 106275 - DNA, 473 bp, Homo sapiens
aatacatgctttcagatgtctagatagatctatattccctgtgaactgtcaggaaagggtcaactgtcagtgatctctccccttctcgcttttctccagagcaccctgcacagtgctccacactttgaagaaacccagcaatctttaaatttaccctcaaaggatttgtagccattttgtctgccaccacctctaaatccagcaggataatactcatttcaaggctgtccctaattaatttgtaattagaactaaagattaaatgaaggcctccaacataaaaaaatctgtgaagaccccaaaaatctcacctcaacatcactgtctttgaggggttgtgccaacatcttggcatgtgaggaccacaggtcagcatcccttggggccccggtgactgggatcgtcattggactgggtcaaactgcccgaacctgggggggcacgcccggatttccagttactccggggggtgg

SEQ ID NO: 106276 - DNA, 480 bp, Homo sapiens
  misc_feature (1)...(480): n = a,t,c or g
aatacattggcctggctggtctcaaactcctgacctcaagtgatctgcctgccttggcctcccaaagtgctgggattacaggcatgagccaccacatccggcctaaaaggcactnttttttttttttttttttttttttttttttttaacgccttcgccattttcaccgggggggaaaaaaaaaaaaaatttaaaaggagtattgttggtgggggttcacccttccccccagggtttttttggaaagggggggtaaaaaaaaaaatgttttttttttatgagtaaaaaacaaaaagcggggcgtttttttttaaatatatggggggggtggtctaagttaaaaataatcccacctccctctttattcatttacaaacacatgcttgcttttggtgaaaattccctggggacgagagacttatttttgtaataaatctcttccctcctctagcactatcgcctaaaagcttgtagtcctcc

SEQ ID NO: 106277 - DNA, 518 bp, Homo sapiens
aatacacttgccgactcctgtaggatcctccgataggtggtcctggcctcatccagctgtagttccacctggttgatctcctcgctggcctggttcaggtgctccaactcctcctgtattctaggatccagatcttcctcctctcttggggacaatttggcctcactgctgctgcttccacctcctccaggctcttctgcgactgggctcctagggacttcatcctctacaacttcaggccgcagctccccctgtggggtctcccgccctcctggaacctgtctgagctcagccatgctgacagggggagggcagacccctatgcacaagagaggactgacatgctttgaccagagccccagctttgagctttctgggctctaaaatggccagagacaaatttctcttctcaaaaaggaaaaaaagggggccccaggaaaaaccttccccttaggctaaagcgtgagaacccaggtcgggagctgttctttctatacctgtccacaaaacgcgtgccc

SEQ ID NO: 106278 - DNA, 488 bp, Homo sapiens
aatacaattgggtaattgtatttgttatctaatggtgcatgaccaattatcaacaaaacgtagtgggcttaaaacaacaaatatttgctgtctcagcttttgtgggtcaacattatgggagtggttgggctgggtggttctgactcctgaggttgaagagaatttgtcagccagggtggcagtcatctgaaggcccaagtgaggctggaggccctgctcctcaccatagggacccctccttgggcccacttgagcatccttcacatgacagccatgggacagagagagaacaagagggaagctgccagcagcagaattcaggttcttctcaaccacagccaggccataaagcaagagtccattattttattttttgagatggagtctggggtgtggcccaggctgcagtacagccggatgatctcagcttcatgcacactcttcctttcgggatccaacaattctcccgtctcagccccccggatagc

SEQ ID NO: 106279 - DNA, 512 bp, Homo sapiens
cggaccgaccaagcttgatactctaagcggccgcatacattcctcctttgcattctcagtggcctgtttgttgtggcgcatgatgcccaaggtggagaacacccaggtactggctgggggcactatatcggaatcagcatagctcacccactgcaccacctgggctgctgcctctggagtacttccccgcagcccctcattgctcacatagtaggcaatggcgatgctctcaaacacacagaatccatcatcaccctcaaatgctgggaccttgccggcaggaaatttgcggagaaattcaggggtgcggttggtttggccaaaatggaagtggggtggtgcggagagcacgcggacctgagccccgctgtactgagcagcgatgagagccttgaaggccctccagttttcaggatacgtgtacaggggcccagccgccatggtgattccgcaaagaaagggggtggcgttctcggcgctgccgcaaagtaagcccgcccggatagaaggag

SEQ ID NO: 106280 - DNA, 499 bp, Homo sapiens
actacagagggttgattttgactgtgtagacgaggtttcttacctgaactcgggtagttatagcttggtccttcacttggagggtcttcatcctctggaactcagtggaaaacttgccattgactttggaaaaaagagagagttctgtgttgatggagtaggaggtgctactctggtaatttgcccaggattccaggatttctgagttcatctccaagttgctttgtgtttggggaaagttgaagatatcactcgacgtggacctcgtgtccagcctctcgtgtgctacccgtagggactcagcttattctgttgcccttctatctcggaaattagcggtgacttgtccgaccccccccttgtctttcgtttccgtggcagcattcctctccggccggtcttagctttttcctcgagtcacgacgtacgctcattgaatgtcccagtcctgttcgtgtttttatctctatgcatgtgtgcgtgctgcctcctatctccc

SEQ ID NO: 106281 - DNA, 475 bp, Homo sapiens
aatacagtgtgtgtgtacatgtgcgtgtgcatgcctgtgtgtgtgcatgcatgtgtgtgtgcgcatgtgtgcacttgcacatgtgatatggagagtatctggcctcccagccaaacccctgtttggagacaggcacagcacccaccaccactgtttttgcttctgtctgcccaccacaggctcatcagcaaagcacaggtcccttgtggctgggccaacctatgtttgaagtccagaattctcagagtgacccatgtcttccaccccaaagaggattcctgggtcaggaggcttcccggaaatcctccaatcttttggctagcccctgcctcctgtaaatgcctcctgcagaaaaggaaggatgtacaaagaggtggggtgtgctgcccccatgggagctgctctggatggcatatgaaggaggaagccttttttttcaccattatccactgtcatgtgacgactgagtgctccg

SEQ ID NO: 106282 - DNA, 479 bp, Homo sapiens
aatacatgctctgttcaattttgagtacacaagaagctttttcaatttgcttaggagaaaaattcatctatttatttacttatttatttagagatggagtttcactcttgttgcccaggctggaatgcaatggcgtgatcctggctcactgcaacctccgcctgggtgacagagcaagactccatctctcaaaaaaacaaaaataaacaacaacaaaaatttgtgtctcatcaaaactagaatactagtggaacaattgggattaatctgcaagaaaatataacttatagaattggcatttatttaacaatagtttaatagtttaaatagaatttctcatcttataaatttatcatcttaagaggcagtgcttaaagcattacaaacttataatactcccaattaggggggttatgattataaattttccatttccatttttgtattcagggattattaaatttttaaaaaaggctatt

SEQ ID NO: 106283 - DNA, 396 bp, Homo sapiens
aatacagggtgtggtggggcacgtttgtattcccagctactcgagaggctggggcgggagaatcactcgaaccagggaggcggaggttgcagtgaactgggatcgtgccagcctgggcgacagagtgagaccctgtcttaaaaaaaaataaaaagaaaaaagctttatacattaacccccaccctccattccaatggtttcccttaaataaatgtgcggggcccattatttaagggaaaaaagatttaaacatttcccttttatcaccctatttctttttaaaagggggattaaatattttaaggggatggtataaatgtttctttcaagccactttttttatataagaaaatcgggtaggctgaaacctttttgttttgagaaaaaatatccagt

SEQ ID NO: 106284 - DNA, 406 bp, Homo sapiens
aatacaggctgggacacttctagttgcctgaagatatctttggcagctagagcatacaatcctgggttctcatgagttcctatcatggtgtaggtctttccagcacctgtctgtccataagcaaagcaagtggcattgcctccattgaaaatatgctgaataagtgggtgagtagtcttcatgtatacatcctgattggtgcacgcctcaccaaagacttcatcaaaataaaaaacatgctgcagaatatattgagtgaggtcaactgcttctttcttctcatgcacaagtagagtttctttgtcttctacagtaataatattaatttctccacgacgtacctccctcatgcccagggggcgttttcgaacacaaactctgaatttctccatctcacgcgcaggag

SEQ ID NO: 106285 - DNA, 632 bp, Homo sapiens
cgctccgtaatttccgggtcgacgatttcgtgcggaccagtgagggctgcccctcttttgaagcggtttttttctctttccgccagtggcctcccagctcacgcaggggcgggtcccggtagcgcgaggcggtgcagggcgggaaggggagtggtggcggcttcggcagtagggacagcaggagcagtggtgctgtcagcgcggccgtcggagacatgggagacccggggtcggaaataatagaatctgtccctccagctggccctgaggcatctgagtcaacaacggatgaaaatgaagacgacattcagtttgtcagtgaaggaccatcgagacctgttcttgaatacatcgatctggtctgtggtgatgatgaaaaccctagcgcctattatagtgatattctgtttcctaaaatgccaaaacgacagggtgattttttgcattttttaaatgtgaagaaggtgaaaacagacacagaaaataatgaagtgagcaaaaatcactgcagattgtctaaggcaaaggaaccacatttcgagtatattgaacaaccaatcattgaagaaaagccatcactttcatcaaagaaagaaatagataatcttggtgcttccgattgttgggattaa

SEQ ID NO: 106286 - DNA, 629 bp, Homo sapiens
tttcgtagttattggcaagttcccctgcagttgtttgggctgtccctgtggctggttctggggtgtgcggccagccatggagcgctctgggcccagcgaagtgacaggctcagacgcgtcgggaccggacccgcagcttgcggtcaccatgggcttcacggggttcggtaaaaaagctcgcacatttgacttggaagcaatgtttgaacaaactcgaaggacagctgtggaaagaagtcgcaaaacactggaagcaagagaaaaagaggaagaaatgaacagagagaaagaattaagaagacaaaatgaagatattgagccaacatcctcaagatcaaatgtggtcagagattgctccaaatcatcttccagggatacgagcagcagtgaaagtgaacagagttctgactcttctgatgatgagttaattggccctcctttaccccctaaaatgggtaggaaaaccagttaattttatggaggaagatatcctcggtcctttacctccacctcttaatgaagaagaagaagaagcagaggaagaagaagaggaagaggaggaagaggaaaatcctgttcacaagattcctgactcgcatgagataacgctgaagcatggcactaaaaca

SEQ ID NO: 106287 - DNA, 404 bp, Homo sapiens
  misc_feature (1)...(404): n = a,t,c or g
gtccagacgggcgggtgcacgtttctttttctgaccatttccctgtgagctcttttagatcagggctgccgtttgaaaagttttatcatcaccagacatgccataaggaatatctccaccgcctctaactgtccctaactcggtctctttcttataactaccattactcagtgttgagagattggtagaaatatacgcgtatacgttcattcaagacttattttcagccagtaatattccctactcctcttccgttttcagaatagagatggaccagccaaggacccattcaggacccacgacggccagcaatcctgcccccagctccaccaactcgtcatctgctcccagcgcgactaattcaaagcaggaaagatcctcttcgtcactgtccaaaccttcgn

SEQ ID NO: 106288 - DNA, 402 bp, Homo sapiens
aatacacgaggtggggttggatcataagagataacaggatgggacatacctgctgcaaggcacgaagcagggcaatacaccgggcattggagccactgaccaggccctgggagtactgcaggccgagtcgcaccatggctgggtggatcacagaggatgggatgctgatgggacggcggtgtcacatactttgaaagggagcttgagcatctactgcccacctgcccctgatgaaaaggaactcccttcaccagcagatttccccactcctctacagttctgccttgggttcatactttttcctacagagaccatctcagattactagaaactttcaatactgacttactaaaactcctcagactcaaaagttatgacgatttcataggatcctacctcata

SEQ ID NO: 106289 - DNA, 803 bp, Homo sapiens
cgcggccgcgtgaggacgaggctatttgaaaacacgctccgggagctagagcctgaggtcggcggcgcacgctgttgccccgtgggcttctgctccctcgcttgtcttctcgggcttctcgccccggccgcggccgggtcctcagtagtcgagaatgactaaaaaaagaaaacgccaacatgattttcaaaaagtaaaattgaaagttggtaaaaagaagcccaagttacaaaatgctactcctacaaactttaaaacaaagactatacatctgcctgagcaactcaaagaggatggaacacttccaacaaacaatagaaaacttaacataaaggatttgctgtcacagatgcatcactacaatgctggggttaaacaaagggctcttcttggacttaaagaccttttgtctcaatacccatttataattgatgcacaccttttaaacatattaagtgaagtgactgctgtgtttacagataaagatgctaatgtacgattagcagcagttcaacttcttcaattcctggcccccaaaatacgagctgaacaaatttctccattttttcctttggtaagtgcccatctctctagtgccatgactcacattactgaaggaattcaggaggactctttaaaagttttggacattctgctggaacagtacccagctctaattactggccgtagcagcatattgcttaagaattttgtagaacttatttctcatcagcagctgtccaaaggactggataaatagagacagatcccagtcctggatactttctgtaaatcctaatcgg

SEQ ID NO: 106290 - DNA, 197 bp, Homo sapiens
aatacatggagtatcacggttattctcacgaggatctctgtgcacaaataaagctcctccagctccattttgcatatctggcttatgcaaatgccttacatgtgttccccagtgggcggcgaggccagccgcccgggcccgaagcgccgcggataaaaacatggaggcccacactgttcaccttccccagcacgaaa

SEQ ID NO: 106291 - DNA, 451 bp, Homo sapiens
aatacatcgtctcgtgtggctctattgggagaggaggttctggaggctttgggattgtcccgctgggcacaggatgttctggaattctctcgagtggttctgttgggagaggaggctctgggatcgtcctgctggacacagggtgtcctggggttttcccgctggggagtacaagtaggaaaagaagtttgggggttgtcctgctgggtataaaaggttctggcgttatccttttttgtagcttcctgactgagtatatcaccctatggtccgtcatctgcttttctactcctcttccgaccctatcccttgaggacacgagcttgtctatcatccttatcactctctgtgaatccctctcttgtactaaaatctatatgcttgatcctgacccgagcagtgatcatcggccttcactcctctatctctctttccttatgtctgccgttct

SEQ ID NO: 106292 - DNA, 509 bp, Homo sapiens
  misc_feature (1)...(509): n = a,t,c or g
aatacaattcctctanattnttttcacagttttcaacttctttgcctttggtttgaatgtcctcccgtagctcagagtaatttgatcgtctgaagccttcttctctcagctcgtcaaagtcattctccatccagctttgttccgttgctggtgaggaactgcgttcctttggaggaggagaggcactctgctgtttagagtttccagtttttctgttctgttttttccccaactttgtggntttatctacttttggtctttgatgatggcgatgtacagatgggtttttggtgtggatgtcctttctcgctgatagcctgccttctaacagacaggacccttcaatgctggcctgttacactaccctgccctgcgaggggcaagtacgtccttgcctcgtaagcgtcaacccatgtccgccattccgtgcgaccctgtacataatttcccccttcattatgactttcccatccctagcgctactacgaagaactcttcccctacccccg

SEQ ID NO: 106293 - DNA, 380 bp, Homo sapiens
aatacatggctgtccttgtaataaaagaggcaatggccggagaggacgaaccagcggcgtttccagagacggagccccgagctgtcctgcttatgaagccagcctcggatgtgcacgggaaggttgggatccctcctgagcgcattgcctctcttcccaaaggcgtggatcttgtttactgcccgggtgggcttcttggggctcaggctgctgagcgaggagatggtggaggcgctgctggccaggctcaggctgctgcgaggtcggctcccctccatcaagggccagctctggggtcccagtgacgggggggcaagaggacggtgtgggtgctgcggcacctatgcagtctcccgcctcctttgtcttttaactgggag

SEQ ID NO: 106294 - DNA, 368 bp, Homo sapiens
cggacctggggattaatggttatagttttggcaggagcggcagaattctgcggagcctgcggtacggcggcggtggcgccgtatacagccgggacagtgttgtacagtgttttgggcatgcacgtgatactcacacagtggcttctgctcaccaacagatgatgacagatgcaccatcgaggctgatgggaaccatcctgtagaggtccatctgcgttcaaacccacacgatgccagagctatgactgggcctgcatgtgtggcgccgaggggagatcagccatggagcagccacaggaggaatcccctgaggtccgcgaagaggaggagattgaggagatggcccacgcagaaggaaccccatagct

SEQ ID NO: 106295 - DNA, 369 bp, Homo sapiens
attgtccggagttcggagagtttgcttgtccctttggctggagggcctctctgggctggggatcacctcaggcgctgttcttcattgagcgagcccttatggaccccgaggactaatggttaccgggagagatggctgtggagccgccggcggaccgccttcaagaaccactgaccttccgggatggggctgaggactttacccaggaggaatgggggcagctggaccctacccagaggatcctctaccgtgacgtgatgctggagacctttgatcacctgctctccataggtcctgagcttacgaagcctgaagacatctcccagctggagcaaggcaccgatctatgggtggctgagacactaacca

SEQ ID NO: 106296 - DNA, 596 bp, Homo sapiens
gcggccgccgtttcccggtcccgtccagacgctgtctggcgagatcggacggtgagcctaaggcggaacgcgtgaggcgcttttgagtctggggtccggggccgagagcaggcggaaagagaggggacccggcagaccccgagtggccgccgctgcggggcccaagtccttggctgctgagtggtgacagtagcccagcccgccggccagatatggtccagacctgtacatgaataactttggttagtcagagtgaaatattcaataatgagtggtgcagctttgggacttgagattgtttttgtcttttttctggcattatttctacttcatcgatatggagactttaagaaacagcatagacttgtgattattggaacactgcttgcttggtatctctgctttcttattgtcttcatactgcctctggatgttagtacgacaatatacaaccggtgcaagcatgctgctgcaaattcaagccctcctgagaatagcaacattacaggattgtacgcaactgctaaccctgttccaagccagcatccttgtttcaagccatggagttacattcctgatggaatcatgccaatttt

SEQ ID NO: 106297 - DNA, 420 bp, Homo sapiens
cacggcacgcgacttaagctaggatcctctacagcggacgcaatacactctggctatattcaaaacattttctttctcatcacttgaagccttcaagcctggtggtttctcagaagacactgtcctagatttttctccatccttgttttctctggctatacccaaaacagaatcttcctcgtcacttgtacccttcaaggttggtggtttctgagaagacactttcctagatatttctccatccttttttcctctggttatattcgaaaaagaatccttctcatcacttgtagccttcaaggctggttttttccgagaagacactctcctagttttttctccattcttttttcctctggctatattcaaaagagaatctttctcgtctcttgtagccttcaagcctggtggttggtcaaa

SEQ ID NO: 106298 - DNA, 430 bp, Homo sapiens
aatacagggtgccgcatgtgtgtagtcccagctacctgttaggctgaggtgggaggattgcttgagcctagaaggctgggccaagattgtgccactgcactccagcctgggtgacagtgagaccctgtctcaaaaaaagaatatattggatcaaagagtacacaggatgacaaatcagctgtaaggtttcctgtagcaattctaatgaaattgaagcaatattcaatgagccgtgagaataaaaacaaaatgtacaacagtaaagacgtatttgcaaggaggtaagagcaaacagcgctttctgacacggaacttggtattaggatagataatggaaaatctaaaggaatagggttaacatgacctgaagatgctgaagatgactgactttctccgatatcacatgtcagagctgagcctctgcctgtaa

SEQ ID NO: 106299 - DNA, 420 bp, Homo sapiens
  misc_feature (1)...(420): n = a,t,c or g
atacatgtgtggtggcacgtggctgtagtgctagctactcgggaggctgaggtgagaggatcacttaagcctggggattcaaagttgcagagagccatgatcatgacacggcactccagcctgggcaacagaatgagaccctgtctgtattaaaacaacaacaaatgattcttctttgtttcccacagtgaatctgcaagccaggtggctttaccttaaagacatatcctttatgggtgcccttttcattattgccaggaaaatctaagttatgggcatcttttgcttagattactgccaaagcctaaatggtcaccctgtatccacttgtgcccaactctagtccattcttcattcagcagttaattttcctaaaacatagatcgcaccagacacttgctcagaactcgtggattgctn

SEQ ID NO: 106300 - DNA, 400 bp, Homo sapiens
aatacaatggtaggtctatttttaggtctttgataaatctccaaactgctttccacagggactgaactaatttgcattcccaccaatagtgtataagtgaagaacctgctcttagacagccaacagtaaaatgatcaaattcaggaaaatttcagattggcagaatgctctctactagtgcatagtcctgattccatttttgccagttgtcatagtaatgcccttttaaagcattcgcctcttgactccaggttcacaggttgcatttagctgttatccctttggtgtcctttgagctggaagggttcctcagtttgtctctgttgcttatgacactgacatttctgaagagtacaggccaatgcttcttcaaaattagatcaatttatgcattgtaggc

SEQ ID NO: 106301 - DNA, 411 bp, Homo sapiens
tattgtctttctccgcggcgaaggtgaagagttgtcccagctcggcctgcgggggagccccgggagccgcacgtgtcctgggtcatgaaacttaatccacagcaagctcccttatatggtgattgtgttgttacagtgctgcttgctgaagaggacaaagctgaagatgatgtagtggtttacttggtatttttgggttccaccctccgtcactgtacaagtactcggaaggtcagttctgatacattggagaccattgctcctggtcatgattgttgtgaaacaatgaaggtgcagctctgtgctttcaaagagggccttcccgtgtttgacgtgactgaaaagtactttcttttgcccaggatgtatcgttattatcgatgcctttatacttatccatccgctgctgtg

SEQ ID NO: 106302 - DNA, 675 bp, Homo sapiens
gagatgcctgacgcatctgtctgaggagcggtcagtgacgcgatggagcgggcaagggatcgcttacacctgagacgaactacagaacagcacgtaccagaggtggaagtccaagtcaaacgcagaaggactgcctcactgagcaaccaagagtgtcagttgtacccgaggcgttctcagcagcagcaagtacctgtggtggatttccaggctgaactgaggcaggcattcttagctgagacaccaagaggtggttaaagccatattggagtagcgaggaatctgattccaagcaaaaaccaggctccatctactctttgaagcttctgcccagcttgcattgtttctaggagaacccgcgtcatacctttatctatagccttcccctaggtcttcagaagcatcaagttttaactgtggacattggatttggtggaacagcaatcatgactgttggcaagagtagcaagatgctgcagcacattgactatagaaagagatggatcctgcaagatggccgaatcttcattggcacctttaaggcttttgacaagcatatgaatttgatcctctgtgattgtgatgagttcagaaagatcaagccaaagaatgcgaagcaaccagagcgtgaagaaaagcgggttttgggtctggtgttgctgcgtggggagaact

SEQ ID NO: 106303 - DNA, 457 bp, Homo sapiens
accccggggggcaccatgccagaccacggccctctgcacagcagcaagcccaccacagcgtgtggaccgtgagacctgccaccgtgacttctccccaaaagggcctgagctgggcttaaccaggagggctggggagagctggatgcccttcaccctcgctgggcaagagcctcctcccaggcatgtcccagcctcagggctttgtctccagagggggcaggccctgggtgacacagcccctcagccccactgccctgtccccgaggctggccagcccttccttatctgcacagcctgaagccttgtgtggctgactcggccctgagcttgttctcaccaccaaaggaagagccaagcgcccccacctgctcacctctggcctgactgtcctcaccctggatcccttcccttattaaatccctccgtctgcaacccaggcagggaggtttcacccaca

SEQ ID NO: 106304 - DNA, 410 bp, Homo sapiens
aatacacctggtctcgaactcctgggctcaagcaatcctcccacctcagcctccgaaagcgctgggattacaggtgtgagccaccacacctggcactctgtttctgattccctatctttccgttgatcaaatagtgccttggccatcaagctgcctttcagtccacatgtacgtgtgaatacacacacctttgtaatagtctaactggcatcagcattatctctctacctctcttgttctttttaactgtttctcctacagaagcttggagagaaaagagggaagggggaggtaagggcaagaaggatgtgaaaggaatggagacatatgcttaaacaaaagtcaggagctgcaagcaactgctgcgctggaaggaagggggggcaggatgaattctgagacctgatcca

SEQ ID NO: 106305 - DNA, 405 bp, Homo sapiens
aatacatagatcacatagatagtatgttgtgagatctggtttgaccatgggttagattgattttgacacccatgcttagtctctccattgcatcatgcacaactgtgtttacaagaatgagctaattgggaagaaaaagaggccatccaccctcaccactgctattcaacatagtgctggaagttcttgccagtgaaataaggttaaaaaaaagagagagagaataaaaagcacactaataagaagggaaggaaaaaaatggtccatatttgccaatggcatagcagtctacacagaaaattccaaggaatctatagaaaaacaactggaactggctgggcacagtggctcacacctgtaatcccagcactttgggaggccgaggtgggcggaccacctgaggtg

SEQ ID NO: 106306 - DNA, 398 bp, Homo sapiens
  misc_feature (1)...(398): n = a,t,c or g
aatacatggcgtgaacccgggaggcggagcttgcagtgagccgagaccgcgccactgcactccagcctgggcgacagagcgagactccgtctcaaaaaaaaaaaaaaaaaatttttttttacaggaacctttatgggtaggggtttcctttgcctaactaaaaaaaaaaccccggtgatttttccttcaaaaggcccttttattttttcaaaaaggtttttttccggcggggggcaggggttaataccggaatcccccccttttgggggggccggggcggggggtccccctggggccaaattttggaaaccttccgggccacatgggggaacccccgtttttcttagaataccaaatattcaaatttcgcccgggcggggggggggggcccttttacn

SEQ ID NO: 106307 - DNA, 472 bp, Homo sapiens
agccccgcgatccttccgcgcctcgcgattcttccgtacctgctattcgactggtccgggacggggcgggccgacgctcactctctctggtataacttcaccatcattcatttgcccagacatgggcaacagtggtgtgaggtccagagccaggtggatcagaagaattttctctcctatgactgtggcagtgacaaggtcttatctatgggtcacctagaagagcagctgtatgccacagatgcctggggaaaacaactggaaatgctgagagaggtggggcagaggctcagactggaactggctgacactgagctggaggatttcacacccagtggacccctcacgctgcaggtcaggatgtcttgtgagtgtgaagccgatggatacatccgtggatcttggcagttcagcttcgatggacggaagttcctcctctttgactcaaacaacagaaagtggacagtggttc

SEQ ID NO: 106308 - DNA, 762 bp, Homo sapiens
aatacaggcctgggaaactgagggtggttctgggggaagggagccaggacccccattaagtggagttgtaggaggaactcgacagggagggcgggcagaggggggccctggggacacagtgtggaacatttgggggctcgctccctctccaggagaagagtgtgagcaggtggtctccatgctgcggtacagagttgccatagcaacagctttccgccggtggttgcacagcttggtcatgtcctcctctgatgctggccccaccccagccccacccggggtcaccggggccaaagggtcaaagttgaaaaccttggggacattaagtggacactccaaaccgcacttgcaggtcccatcgctgaggaggtagctccgggtttgctccaaggaagacagctctgtgccacttggactgatgtagagcacagcaccctctcgcacacagcgctgccagccgatggggacagatgtggccacagggcccccagctctgtctgctccactgctctcattgcccccattcattgtgtgtaatcagctcccgcgtgcctgaacatctctgcaaacattgtggggtccagtctaaagccggggccaccagcttagcccacaccgcggcccatggttcggccggccccgccctgcgcagtcgcggcccagagggtgagtgggagggggtgggaggagggtcggtggagcccgagcctccggtacggccccggccggtcctagcaggaagcgccgctgccgccgacgaaa

SEQ ID NO: 106309 - DNA, 367 bp, Homo sapiens
aatacaggtgtgacaggcgtctccacaatgggcttcccctttttcatagcagagttggtgaccttgatgaagtggccagtgaccatcatgtgggcagtgagctcctgcagggtgtcatgcgagctcccacactccatgcacttcaggatctgcgacttccgggcctcaaagtgccatgcatagctggccccattctggtggccgtaccgattatttggcgtgatgtaagggttggagttcttctgaagtgcatcgttggtgtctgagatggtggctttgggggttccacctgtggaatctggggagctggggagctccagctccagggaagctttcttccgagtggcagggatgattttggcggcga

SEQ ID NO: 106310 - DNA, 396 bp, Homo sapiens
gtacagggacgtggggatgctgtgaaagagatgctgactctagggcccgtaatgtggccaagagctggcggcgcttggagccctggaggagaacaggggatgacagtgggcctaaagagaatggatgatgcctggagaacaagaagggagagatgtggacctgattcagactggcagaagcatctgaattctttccagtcaagcctgccagaacccagaagaacttttatgtcaccaccccaacttctgggaagctggagagcagagaaaccacctatcccactttcttcaatgtgtaaatgagctaatggaggtttccccaaaggaaaatgcacaggccacaagcaacaagaccaaggccagagaccaggaattacaacccttcaccttgagctt

SEQ ID NO: 106311 - DNA, 508 bp, Homo sapiens
ttgacattactgtaattatttttgaagggagcagtatgcagaggggaacatgagagggcctgccccaggaaagaagacatctggtctgcaacagaaaaatgttgaagtgtaagaagctctttgttttgattgtgcatactatatgtgaagataatattttatgttcattgtgtgttagactgtgttgaagtggaaactttggaacattgttggaaccagtaagaatcccattcctcaggtatcaggtcgttaaagtagtttaaaataacgtattccttaattttcctcagcaggttccccctccctttaacttgtgtgtataaatatatgtgtgtgatgttttctcttacaaagatagtactagtggttataagttttgagataacttttggcaagccttttcaaacctaaaaagcaagtgctggcaagtgctaaaaatacatacgaattaacctccactttggtgaaactcatgggaagaatatgtgagaagttaaggtttcaaata

SEQ ID NO: 106312 - DNA, 395 bp, Homo sapiens
accacacggaaggaggcgaatgccggccggtcggcgaaagccgagccctgctgcaccatggcctggaggatggcgcgctcgccattcagcaccactatggggcagctgcccaggcggatctggaaaacgtcgccgtatcgccgtgccaggcgagcgaacgagaggcagcactgagaagtgaaggaatatttgggaggatcagaagcttggtcctgattttgccatcaacaggaacttgatgacttcaagggagtccccaaaccctgggtttctgtgttctcaactctaacatgaggggctagatgcatctgggttagttagtctccatgatgagttagctcgtctccatgatgctgcgaatttcaaatggtgaaaatcttctgaaaagccctgag

SEQ ID NO: 106313 - DNA, 728 bp, Homo sapiens
agttcctggagctgtgaggagattcgggccgtcaccctgcctcccctgcgtcccgcaccggcgcttctgtcctcgggcacccgggccctgggaccccctcgcgtccgcagcaggattgaaagaaggtggcaagaggaagaagcagaagcagagagaggagtcgaagaagaagaagtcgaccaaaggcaatcactagaccggacttgaggcacgcggtgcacccccagacgctggcgctccaccgtgctcggcatgcggtcgtgcacacgcgctaggtagcagcgtcggtcaggactgtctcgaggccacactcgctcggcaggattatgcgatcacggatcagtcagagcagggtcaggagacggggctgacggcacgggtggcggggacagacgtttgggacttggccgcgactctctgcttctctccagctctcaatctgctgcattttcctctagtgcttccggatcctcttcattcttttcggctactcaaccactccgcatgctgctggaatatttctggctttagaagtacaggagggcgcagatggctaactgagtaacattcatgaaatgaggctttctgtggcggcgtagtgtttggaattagaaggtaattcagtagagtgtaacttagagaatactgcaagtgacacattgaatcctgcccgtcagggcaccttttcctcagagcaatccggccacacgaatagaaggctgtcgtga

SEQ ID NO: 106314 - DNA, 449 bp, Homo sapiens
ggcatgagaagctgaagttgtttctaactagccaggaaggggagaagtagtattgcatatctctcagcatattaggaagaattggaagaaaaacagacccagagctctggattctatcttttgctccaaagtaatgataggaagctttattcatctaacaatggatgctgtgattttaaaaatttaaaactactcttcttgattaaataatgattatcacaaggtggaaggaatggaattacgaaatgatcgatggctacgttctgctactagtatatcttctctctccctcctcctctttccctttctgtactaaacctcactcctccttcttcttcttctgctccttcttgctccctactcttctccacctcttcttccctatctttctctcaatcttgttctttcacctctcctcttgacttctcttcctttcatcattcacgccg

SEQ ID NO: 106315 - DNA, 393 bp, Homo sapiens
gctatcaccatgagcttcaataccctgtatctttgaaaaaacgaattggtagtttaaaaaaatcttcctgcatagaaaactccaggcccagatggctttattgataaactctacatcacatttaggggagaactaactacatttccacacatacttttacactaatttactgagggggcagtacttttcaactcattctctaaggtcagcaagcattactctgacaccaaaacccaattatgacattatgagaaaagaaaactatagtccaatatcctcatacatatggaatcaatgttctttttttttggaacagatattccctctgtcattcaagctgaattgccccggcttgataatacctcactgaggccttggacttttggactcaag

SEQ ID NO: 106316 - DNA, 1245 bp, Homo sapiens
ttttttttttttctcaactctttttattaagttagaaaactgataaaagcaacacaacttttggggaaagcaccatggcacgtcctttgtgctatgtgataagtgtgctttatctcaatgaagcaaccccacgggtccaggcaccctccctgcagtccccgcggccaggctcctgagtgtgccagcagagccgtcccctgggaccacagccaagtgccttcgggcagctggcctgacacaggcggggtctgctgggtctacagggtccaaggagccccatgcagccagtgccccatggcgggcgtgtcagtgggcaaaccctgcccaaaggtcccacccccaagaggcctccaggacccgcaccaaggcatgggggacactcgtggctgcttaagtaactggtatgtgcacagccccctccgcggccctaatcttgagccagccaagcagtgttcacactgcaggtgcctgggaagccccaagtttggacaccctgcccagtccctgtcagggcaccaacacccctccctctcaaatggtggcttgggagtgagcgagaggcattaggatggtcactgacaggcgccaacctctccatagcccaggtgtcagggaggtgctggtgagggaccccagtgactcaggaggtgacagcaatgaacaaatgttcagcagttctctcggggccattcttatcttggagctcagggagcaaatgggggccaaaacgcaagaggatggtgagggtcccgtcactgtcctccacactgagatggatgcggccctggtgggatctgcaggggacaccctggggtccctttgctgtctccagctcacagctgctcctggtcttggagggcagcgtggtctcctggggagaagcccccagtgctgttggcaggtgtgtgccatgggggtcactgctgcctctcagggtgggctctgaggaggggaggggaggggtgacccccagggcactcggagccttgagtttgctgcaggcccagctccactgagtggccacgagcaactgtgtccccaccgggccacagcactgagcaaggccctgagtaggtgggctgggaccttacagctttgtggaaggggcccacaaaccttggaggtctgggtgtcctttgctaataaggcctcatggatgtcactgaggcccccctgcagtttctgcaccttaaaaaatctgtcttggtcacctttctggtctcaacccctgggaacctagtttcc

SEQ ID NO: 106317 - DNA, 1638 bp, Homo sapiens
  misc_feature (1)...(1638): n = a,t,c or g
tgcccagaagacaagagtgcgagctttctgttatgcccggacagggccaccagagggctccttggtctagcggtaacgccagcatctgggaagacacctgttgccaagcccaccgtggtctagctgtagcgttagtgtcaaggaaaaacacccgctacttagcagaccaggaaagggagtgtacagtgagatcaggatgagggtggtgaggtggtgatcagggggacccatgcttctgctcagggggttggcagaagccagcaaggcttggggtttccctgtttggagctctccaagttgagagtgcagaggagtgtgagatgcgtgtgaaaatgcaaacttggctctccctggctggaggctggcattgggtgagtctctggtaggaccaggccatgtatactttttaagcttttttattcttgaaaagttcaaagatatacaaagatagactatgcaggataatgagcccccacatactccgcatctcttgtctgtaattatcagctcgtggctacctctacctctcccctctacctcttgtctcatctctacctctccccctgacccctgcctctgggtcattttgcagcaaatcccaaatgcctatatcatttatcctaaatattccataaacattccactatgtagctctgaaagataaggacgcttacaacacaactgcaatatcttttttgtttgtttgtttgtttttgtaaaagacggggatttcggcccacgttgccccnaggctggtctcgaaactccctggagctcaaagcgattctccccgacctcagcctgcccaagtagctgggattaacaggcatgtgcccactgtgcccagcccaagtgcagtatcttatcacacctttaaaaattaataattccaatcatcctatagttgatcagtgttcaaatttccaattgcctcataaaaagatcatttcttaacattttgttttgttgcaattggttgctgtaagtcacctaaatatcttctcttttttatactttttattgtagtaaaataggtataacatacaatttgccattttaaccattttaagtgtttaactcagtggtgttaattacattcacaatgtgtagccctcccccctatttagttcaaaaatttcaagtctcccttattttcccttttttttttttttttttttttttttaattttagggactaggttttgccatgttgcccaggctggccttaaactcctggcctcaaggtgatccttctgtcccggcctcccgagcagctgggaccagaggcgtgcaccgtcacacccagcttcaagtctcttttaattattataaagttctggccatgcacagtggctcgcaactgtaatctcagcactttcggaagccaaggcggtcagatcacctgaggtcaggagttcgagaccagtctggccaacatggagaaactccgtctctactaaaaatacaagaattagctgggcatggtggcacacgcctttagtcccagctactcgggaggctgaggcaagagaattgcccgaaacccgggaggcagaagattgccagtgaaccaagagtcaagcccatttgcactgccagcctaggcaacacatgtgagactccgccccaaaaaaaaaa

SEQ ID NO: 106318 - DNA, 430 bp, Homo sapiens
ggactgtggagaggccatcagaccacagccagcctaaatggcaagtgagggaaatcctggtgggagctgatgagccgagtgcatgggagctgggaattatggacaagtgtcaggagcaagtgacttcctggctggctctgaaggatgaagagctttcaggcaaagtggcacgaagaggggcattttaggaagcccaagcatcatgtgccaggaaagggctagtctgggacttcggtggctctgggcagtgtgagatatcgggggtgggggccagtggtgatgggcatggccaatgtagatgcctctaaggggagccgcaagcacgcgggcctctgggcacagctatatgttctgaaaatgaacaccttcaatttgtttctcttggctttcaagaattcgggtcccaccttaaaggtcgccacttcgcgtg

SEQ ID NO: 106319 - DNA, 423 bp, Homo sapiens
  misc_feature (1)...(423): n = a,t,c or g
gaccttgggtggtggcactggagatgtttgcagcagcagtttttgaccccattttctgggtcaaacatcccaaggaaggagaggccttaaagtcaaaggagcatctcaggattgagagtcaaggaaaatttgatctttgttatgataatgttccctccaatctacagttctcaaactttctggtctcaaaccttcttaatgttgaaaattgtcttcatgggtatttccatcagtatttgttatattttaaaactgagaaaaatttaggccagggatggtggctcgcacctataatcccagcactttgggaggctgaggctggaggattgctgtagctcaggatcacagaggaggtgtgatggcacctctgcgcaagagaatgtggtcctgtctccaaaanaaaaaaaaaaaaaaggatctttg

SEQ ID NO: 106320 - DNA, 1025 bp, Homo sapiens
  misc_feature (1)...(1025): n = a,t,c or g
ggcacgagaagagggctgactagaggctgtgccatgccaggctggggtcagagagtttccctgtataaatagcaacctatgctaggggttgctagcaccagccatttcccctactcacacctgtgcagtgtgataaagatagtagaattagcctgcagttgtggtccaaccagataaaacttttaggcgggaagtcaagtgacaggcaaacttgtgtgtgtggnnnnnnnnnnnnaagggttaaatgtttttgatattttaaaaaagcatctaggctgcttgtggaagtcagaccaaaatagcaggaaggtattgcagcaagatggatttgggaaaggaccaatctcatttgaagcaccatcagacacctgaccctcatcaagaagagaaccattctccagaagtcattggaacctggagtttgagaaacagagaactacttagaaaaagaaaagctgaagtgcatgaaaaggaaacatcacaatggctatttggagaacagaaaaaacgcaagcagcagagaacaggaaaaggaaatcgaagaggcagaaagagacaacaaaacacagaattgaaggtggagcctcagccacagatagaaaaggaaatagtggagaaagcactggcacctatagagaaaaaaactgagccacctgggagcataaccaaagtatttccttcagtagcctccccgcaaaaagttgtgcctgaggaacacttttctgaaatatgtcaagaaagtaacatatatcaggagaatttttctgagtaccaagaaatagcagtacaaaaccattcttctgaaacatgccaacatgtgtctgaacctgaagacctctctcctaaaatgtaccaagaaatatctgtacttcaagacaattcttccaaaatatgccaagacatgaaggaacctgaagacaactctcctaacacatgccaagtaatatctgtaattcaagaccatcctttcaaaatgtaccaagatatggctaaacgagaagatctggctcctaaaatgtgccaag

SEQ ID NO: 106321 - DNA, 1508 bp, Homo sapiens
ttttttttttttatattaaggagagttttattggaaagataggcaggactctacaattttatatttttcccaagtgtataaaaaactctcagagtaaaagatttatgtctgttgtaccagcagacagattatttataaattgggaaagggaaagtttactttttgccaaactgaggcagagggggtggcacccttaatatcttggcctctctccaacttcttttcacaatccaccaggtaattgactccatcgatgactatctgaacaaagctcaccctctgatcgaccaattctatctatgttggaaatggtcgtacacatctgcgacccgcggcaatgtcccacaccaccttgtggccacgctttctgggagtcctaggtttttccaggatcttgagaaaagcggtggggtcttggctgaagctttggggatccctaacgtggacaccaagctcgtagtcctggttccaaggttcgaaggaccaggtcaaaatgtattcctagggcgctcatttccacatgaaactcccagcctcgttcttgggattaaccgttctacttcctttagttccacgacagaattcggctcaaaataactcgtttcatattggcctcctttttccattgagattaccctggtgtgaatcctcctcatttatccagatgagaaatggtcttatcataattatgccaggattcccctggcatcgtggccagtcacgggccatcccagcacatgttaataaaggggacactggcttatcaaaacagaaagtggtcatcgatgagccgctgctggtcctgctccgtcatctcggacatgcttgtatgtagcggccagccaaggtcccccttgaagccctccagggcagtgatggccacgttctctacctcccttcgctcggcccgggtgcaggctggaggcaagctcagcccacggatgctgcggccagtgcgcacccgagaagacagcacgtaatgctcgtcgaactgcccttggggtgatctttgatgcatccagatccgttgtgtgcttcaatcaaccctggggtcaatagccgttgtgtcttagtttgatgacggggtcaaaaaggtcagcaaacacctcataggactcctcgtcaccagccaccatgcccacagtctttatgaaggggtggccagggttgtccactccagtctggatgcactggtccagcgtgtagccgttgggtgtcaccttgttgcgaagcttggcataaatggcgggggtgaggcactcggccatgcagttgttgtgcttgcgcaggtctgggtagtctgcgcttggaggaaatagcctaggctgctcccggacctcggcacacactttctgccggttcagcaggtacccggtggtcaggacactggtgcccatggtagcaaacagcagagaagcattgcggccagttagcaacttagaaaagatactggccatccttcctcttggatgagtgtcgaccttgaagccggagcctcccacgtcctg

SEQ ID NO: 106322 - DNA, 505 bp, Homo sapiens
tttttttttgtgttcaaataaactttaattaccaaatcatttttgctaaacccagtccttctttcttccctaggggtatctagcttcatcaccatcatagaaggtagaaaaagatggaatcacagggtcaaagcacagcttctctacctaccctaccaaacagtacatattcacttaccccaccaggtttttctcaactccaaatactgctttaggttaagtgtattctgctgccaagggaagcataggtttgagtctaaacaggctctgaaacagattgtgcaaaacctcaggcctccttccttcctcgggaagttccaactgtggcagaaatgaagatggaacttctcaagaataaacagttttggccggggtgtggtggctcacgcctgtaatcccagcactttgggaggccaaggcgggtggatcacctgaggtcaggagttcgagaccagcctggccaatatggcaaaaccccatctctactaaaaatacaaaaaaaaaa

SEQ ID NO: 106323 - DNA, 2271 bp, Homo sapiens
gaaaaggggggtcccattataaaataatttttgtgaaaacggctctaggctactgtgtggataccggaccctaaagaatcaatagcagaggcagggagataattaggaaggtattgtaatagtccagggaagagatgatggtggctttaagaaaaatggtggtagtgttggaggtggtgagatggctggattcaagaggcatttggaaggtagagttgacaggatttgttgaagaactagataggagctggagagaaaaagagaaaacagggataagcatgctgggactaaatcatattttaggaacaaatgattacatataggaaatgtttgacatttaatttataaggcaagaattactcctgttcttttatgtagtagtataaaagaatcacagatatatttgttgattcagaaactgtgcatatcttaataaacaagagacagagctgcagaatacctggtttcatacaacttgtgcaactgatttctcaccagctggcagcaccaagagattatacggtgtctcactctgttgcccaggctggagtgcagtggccaatctcggctcactggaacctctacctcctgggttcaagcgattcttgtgcctcagctgacatgctttgaaaaatctttcctcatgtgatactcctccccagtactaagataccaattatagaaaatcaactggttaggattacattttgcatttgataaaataggaattgagatgaagaaaatagttcatacgtctctcctcagtatttccttcaattcttcactcttgtatataaatcaaaattataagtgacataattttagcaaaccaaaataaccagtaaaccaaagaataattttacttaaagtacagacaacctcctaacaaagagttgaccaagttaacacctgaaatttaaaaacctttcatcagactgctttcagcatatttaggatacatacatttcttcttttgaaatctctaccatgagagactaaacacagtacgatacttgcagagatttccattaacaacttcttttcaaatagtgacatttgcaatggaaacagctggtctctattctcatctctaacaacagaggtaggcaggcataaagggtaaagagagttgcctctcagtttgactctctagccagaaccctctgcagagaaggcacttagaagaagcaccccacgtggacatgctggccagagtcctgagtggaaacaagcctgtcagagaactgcagtctatgccagtaagtgaacgagagaagatataaccacacggacaccgtcttacatttattcacacagagggataagaatcagtacaaataataaacagtgctttaaatacaaataaatagctctggtttctaaaggaaacaactctatatataattctaagttttttctaagttcctattaaaaatagaagactattttgcactatgtaagttctagtccaccataatcctttgaagacttacggataaaatggtgaattctatactccaagaagtcaccagaaaaatgggagataatgctcctacctctctgaactatcccccaaataggaggagagttacttgcatcatagacagacacagctaatacatacagaaagtatttgatgtctagagatatttaaaaagattacccttgggaaaagtaaaaagaatttccttaaaccagttttatgaattctaaaacctccctctactgaagttttgattcaaatgtcttaaattcatttatactcatgggaagatgttaagttcctatattgaaagcttcctcttgctaacaacgatagtgataaacattctgtcatcaccaagaatggcacctggagtaacaaagtgatacatacctggtaaaggagcaaaggtgctgcccaattaaacagtatgtcaaacttggcatcaaaatgaccaaaatgtgctgaagaaacacatccctaaatctgttggttgacttatctttctctattgttatattcaggatgcttagagtgacaaacatatctagaggcaagtatgttctccaagtgaagaatcatttccaaggcatgcagtcctttaaaactacctaccacacagagtcattacagtcttggtgccacagtggcatctgttccattgactttctgtgcccactgcatgtcctctcctcgtcctgcacaagataatgcaaactcttccacttagaccgctacacaattattagaaaattgtatgtttgatagtgaccaatatagcaatgttt

SEQ ID NO: 106324 - DNA, 802 bp, Homo sapiens
ccggtgtccgagctgctgtacccctacgtggtgagtagatcgtgtccacagaaatcagcggaggcttccacagtccctggttggaatggaaccggcggtgaggatgagaggcgctgaagaccagaagacccagggcgtgaacggggcgtgtcatccctggagtttcagtagaatttcaggcctgtctgcttgagcagcagaggaggagtttctgtgtgcctgtgagagactgtgtgtgtgtgtgtgtgtgtgtgtgtgtgtgtgtgtgtgtgtgtgtgatgaatgaacagggttgtgtacgtgtgtgtgcgttagacaaatgaacagtgttgtgtacctgtgtgaattgtcactgtgactccaggctctaggctctgcagattcctcagccctatcgcctcacagacacttgggatgtgcagcaggtaaaagagagaagccagattcatggaggcgtgaaggatcccagcaagaaaacacagacttgatcttgagacgagatttttgaaattggttgcggcctcaaggcaggctctgagaagactcgataaagagttctcaggaataggcatccctcctggatatttcccccttggaagcgccgaggagccagctctatgtttgtaaccatagcatttctaaagctccagccccaggaacctgctgtgaattagagacagattccaccctagacatcagtgatcttggcctctcttgtattgggaaggtcaacactgttccagtttctctcctactcccatctggttgtgctcggtgaagtagtgctacccttctgttaaaa

SEQ ID NO: 106325 - DNA, 431 bp, Homo sapiens
aagtataattggattgtttgtaacacaaagggtaaatgcttgagggaatggataccccatttaccatgacgtaactattatgcattacatatctgtatcaagtatcttatgtaccccataaatatatgcacctatgtacccacaaaattttttttaaaaattggttttaccaaaaaaggttgaatatgcaagtttttataaaaatatttaccaatatttattaatttaataactatgaacattctttttttttttgaaacacactcttgctctgttggccaggctgaagtgcactgaagctaattgaaacctatgcctcctgggttcaagtgattctcctgcctcagccttccaagtatctgggattacaggctccccgtcgtcatcctggttaattttatgattttctagcataagacggcgcttcgcct

SEQ ID NO: 106326 - DNA, 439 bp, Homo sapiens
tagaggcatatagtgataggcgaggggaaacttaagggtcaacctggagcatccgtggcagctccatgcgtgaggctggtgccacacagtatcccggtgttggcattgtctccaggccttctctgttccgcacgcagttacaaaacaaaagaacagttgccagcagttgaaagaggatgtggatccaaaccaaatgggggacagatactccctctatggactagatactcatggaagaagtcaagttagaagagcaactgaaggaggttgtggaagaatataagcttgcattgtcagatactgagggcttgcagcagagcatccaaaaattggtggatgaggcaaatatgtgtagcattcaaggcttctgcatggactcgttagaggttgcagatgttctggagaacggcacacagtgtgtttcatagcagaaattcag

SEQ ID NO: 106327 - DNA, 446 bp, Homo sapiens
gaaagactgaagaactgtcacaaattggaagtatccacagagatctgaaaaccaaatgcagtgatcttagacaaagtctctagataatagtgttacaggaaaggggtacctgatccagaccccatgagagggttcttggatcttgtgcaagaaagaattcagggcgagtctgcagtgcaaagttaaagcaagtttattaacaaagtaaagtggtgaaagtacagctactacataaacagagtaggacatttccaaaaataggaggaacgcgtccaccctaggtatatactcgtatatatggggaggtgtgttctgctacaagggtttgtgttaaagggttaattgtcttaattactatattttgcaaaattgatattattatctttaaagcaaaattaggaatgacgtttgttctcagatatctagatttctgggcaactccaaaa

SEQ ID NO: 106328 - DNA, 2155 bp, Homo sapiens
aacaacacctaaacccaagagggcagctgttgcagcatccagttcatcttaagaatgtcaacgattagtcatgcaataaatgttctggttttaaaaaatacatatctggttttggtctcagcttcagaacattcacttataaagaaaccctgctgattaaatctctcttgggcttcctcccgaaatgagtttggatcataatacaagagaagcacagggcaaagacactgcataacctcaagaactaagaatggaaggactggccaggcctggtggtgcacacctgtaatcccagctactcaggaggctgaggcgagagaatcgcttgagcctggggggcagaggttgcagtgagctgagagaacggcgggcggcagagcgagactccatctcaaaaaaaaaaaaggataaaggaaggacttaagcaaaatcttccttgtaagtagaaggatgttttgacaagaaaagttgcaatggaaaaatggttctcatgtacacgagtatgtagaataagcatcgtgtgtggattggattcagatcaaaacattgcttttatgtttgggtctttatacggtgggagtataccctggtgccccaggatgaagacttgacctgacccatgtatttttagattactcacagataacaaaaagtattttcatcatgattagttgcgaaaacagttttatttcaataggtaaaacgtgcagtcctatgtaatcgtcagaaggtaatcttaattatagcttgggtgtgctttaaactgcaagctggcagtggagggcacgattcctctgatttcagctttctccttatacttttctggagctgtgagctgcaagttaactcagtgggattaaagtgtagactggaggtacaaaaggtgaggagtgaggagatagggtagttcttccttggctggctggcttcataatccctgggccccgcagataattaaatcgactttttctgtctcaggcatttgtatgacctctttggaggttccctgctgggtagttatccttgtatctgatggacccatctcaatttaaaatacttctgccagggttcgggaggtttcatggcttgttcatccccagcacttttggggaggcttcagaggtgccatttggctttgagccccaagaattttgagacccagcctggggcaacctgggtgaaacctctttcttccatttaaaaatacaaaaaatttaggccagggcatggtgggtatgtgcctgtagtcacaagctactcaaggagctgaggtggaaggattgcttgagcctgggaggtcaaggctgcagtgaaccttgattgtgccactgcacttccagcctgggatgacaaagaccctgtctcaagaaaagtctgtaattctttcctaacccttagtatccagcctcagtcctgaggttttctttacctctgggggctattttatgccggctctctcctgagtgtcacacatctggtcctcaggaaacattctcacatccctggcctgaaaaaaacaatttcagggagatcgcatggcagcagccctctctgggctccccagctaaatggttgtacgaaacacatttcaaagctctctgaagggcttccttgaagttcctttcactgggtttcaaagtagaaggtagtaactcctttgtccaagaaggctgaattgagcacttaacaattctccaaagaaatttcttcattggtctctatcctagaccccttctgtatccttgatatggctgaggattctaaaaaatgaccagtcttacatgggagggctgggatataaaaaataaaataataaataatgataaaaactgaaaactgaccacgttcttggatatgttttctttgggttgtgtgtgtgtgtgagacttttgatagttacccaaagtaggaaaaatcccattctaataaggttatatttatgtagctctgcaaataaacatctagcaaatgtaaaaagtattttctttgccttaaaaatgattaaaattatttgaactcctgaggagtgttatatgaataaaattagtaagttatttggaggaaagttattttttaaaaagacaactggtaaaacagtacaggagaaaggccagcttcctcaagtgaggacagttgtttagaattgactgaggag

SEQ ID NO: 106329 - DNA, 1950 bp, Homo sapiens
ggcacgaggcctcctgtagggctcctctgcagcctgccctgccttcccccggatgctgggccctgctgctctctcaggaccatccgatcaagctgcagctgccaccctcacctagaaacatgcctttgtgcccacctcaagatgggcagtgtccctgttctgaagtgcccagtggcagctccagtggtagaggaccaaggattgaggtttgggacctgaagctccagtgtgtgcctttggcctcttccctggacttgggtgaccagtctccgtcttcctcctgctagtgctccaccccccggacttggatgaccagtttcccaccttcctcctgctggtgctccatcccccaataccaggctgggccaccactctgaggagggtaggaggggcctccctggattgaaccgggacagaaacacggtgagggcccccaccacacctccctggttgaatcaggaatggagggagccaggcagggccctacctggggtcctgtgcccctcgttctggtctcctttgcaggcacgagataccagaaagagcatgcctttctgatagcctttggtgatgtcactgctgggaggtggctatcctgtggaccacctggcctccagacccacactcacagtctgtgaaaaactgaaaatcccctggtgggcactccctggagcccaagcagctcccctaggggactgaccggacctgacctcccctccctgtgtctgggtcttcaggttttagtttggtctttgttcatctgagttgtgctggggcaacgccaggaagtgccctgggtaacctctgctgtgcgctccttcccaggtggcgccatggattcctctgggggctggcgcatgcccaggaaagcctgggccacacgggacactctcttctttatcgaggacacttggaaaggtgactgatatgggtgcttggcttctctggtcccagcttgccctccggggagcaggggctctgtcttgtcccagatgagctgagagcccctgagaggagggctttcccagccctgggaccctccgaggtgggtgtgcgggtctcacaggtgcttcctgggacttcctgtggctgcacagggcttggctttgtcttcgttcccggtggaaaaccgtgggagaggaagcttgggcctctactccaagtatcagagcctgttcaccctcctccctttggtagcttgtgaatgtgccaggtgtttcgaggtaggcttgccttctggcagcatggactttgttaaaataataggcggaaagaagaggcctgggaagggcccccagtcttttggaatgtcctggtcacagggtcatgtcagctgccagttctcgtctcccgtcctggagttgctcggtcttgcggagctgcccgcctgcctgttctggcggctccagcgcaggctgtccctgctgctttgattccaggtgattttatttcttttatttttttattttttttgagacggagtcttgctctgttgcccaggcaggagtgcagtggcgcatctcggctcactgcaacctctgtctcaagcgattctcctgcctcagcctcctgagtagctgggattacaggtgcatgccaccaggccccgctgatttttgtatttttagtagagatagggtttcaccatgttggtcaggctggtcgtgaactcctgacctcatgatctgcccgcctcaacctcccaaagtgctgggattataggcgtgagccaccgcccccagctgattccaggcgaattcttctctgatgggcgggcgagggtgtgttcgtgtgatgggttggagtgtgtgtgtctgagtacacagatgatgtgttttcccttcagcttcttacgttttctgagcatccgttgtgccttaacattttctgcttgtcctttgggacaaagcagtattttactcattctttgaatgttctcattcttttgta

SEQ ID NO: 106330 - DNA, 2761 bp, Homo sapiens
ttggacacaaaatatgttatttattgtcaatttctgcaaagacacatttaagcaacaaaatatacatttgtcaaccttttagaatttgttttgtacattaacaaatacaatgtgctaccatagcaataaattaaatgtacattatttacattacataggcagttggggatctacgaatcacctcctcactaagaggaaagaaagcaaagtcgtcgtcacatggagcatcacttccaagccacagttcttaggttcgaccacacaggggaatctgcacattcacacgccagcagtccccgagctggagtgtccaaggggaaacacccaaaacaggagagagctgcacgcatgctaaggagcaggaagccgggggggggagggtagttcacacttccaagcagaaatgtcacaaaatcaaagacgatggcaattaaattccagtcttccagccaaatgtccccctccccagggctggtaaggcacaggacagagccgctgccccacagcctctcactcggcagggctctgctgcccttggccctagtggggcttgtcttcttcctcccaaaggggcacacggtccagctgaagggagggagacatgggattggggtgtacaaggggctggcggtaaaacagagtttggtaaaagaataccccagccagccccaccaggctgcaggatcaggcttggcaaactttactggcctccccttgcctcgatacagggtagctagaggctgggggaggagccgaggggtcctgagcatggctgactggcctggtccctgctggcctcctgtacccatgagatctactcgaacccccaactgcttaaaacagatctgtctctactgacttagaaaccaatgagaaaggtagtgtttgagttggcacctggcagggtcagggaggaaagcgaaacaggctcttgtcctgccttgtcacgggagcctgagtttctattaaccaccttcgtttaagaatcagggagaaatgaagagtttttctttgaccacttttcctcttaatttaggaaaagggaagctgagggtgggtgaacagcatctttttccctggcctctgcccccattacacagcccccatcaggagctgaagaaccgatcccactgaggaatagttcactgaatccctttccctcctcgttttcttggttcaagctgcatccaaagcccaagggtcctcactgaaaaatcctagagactatcccccctgatgaaaaagagcagaaactgcagcctcaccagcatccttgactgctcacctccatgccagtgccaaagcagcagctaactggcttccccaaaacccagggccccaggaaacgcagccacttattcaaccaaccatgtaggcgctgcagaggaagggaccctgggttgagggttctaatcccagctttgccaacagccagctgtgtgacctcaagcaagttattcccctcacctgggctaagatttctcatctggacgatgacatggttggatgagatgctaaaaagagccagcaggcttgtgttgaaatgatgctgacaaagctgaaccactgaatctttttcaagaaacgtcattttacatgactggcatagacagacactctcattaagaccttccatcgcgagcttttctgcacctgtttttaagcgtcaactgagctggaggcatatgggtgaccctacagtgcctgaaaagtagtttcttcagtgagtcaggcagttcccagagccagagatgtgtcccggaaaacatcccctcgtggagatcacagtggaaatgcctcaaacaccagcgtgggcaccatctagatgagcctagtcacgagggccaatgaggtttgggcaaatctttgagccccaagactgggcgcagcataaaaggaaagacattttagatcagagcagatgtagggacagcgtgggggaaacagccctccaggaacccgagctgcccgccccgtggtctaggggagggaggggaggctgggccatccttgttctcctcctccctctcagcactgcccgggtgggctggaagtgcacactctggaagccacaggatggagctcccagagatagtgaggcatgaccagagggaagaggcatttggggtcctgttcagatcattccaacagcaaaccgggcatggagaccccatctcaggtctgtgcttctctgggggccacccagccatcctgcccaccagctcagaggcagggacaaagccctcccaagaggcagcaggcagcaagggtcagccagcgcagtggggacaggcaggtatgggattcccaaatgggacagcatgctgacaacctggaaaccccaaaggaccccagatggcaatgtgacacggcccatccaccaagcacctgtaatgccggcttcccacagaggcaagccagatcctgcaactgttcttaaagaaatgcagtttgaccttgccagtgcctccagaagcccagccaacaaaacgcgtccagaacgtacgggcctctttccagccgtgggggctgctacggtgactcttcataaaagctaaacagatattttgttgaccttctaacaagaataaattttactagactagtactttagagaaagtactagcgaagggagagctcctctccagcttgcaaacaggactcaatcattcccacacacgtggcggggaagaaagatcacaatgttgcttgaatggcaaaagctatagggagaatttcacaatgtcagttaaaaaaaaaa

SEQ ID NO: 106331 - DNA, 2472 bp, Homo sapiens
ttttttttttttgccagagctaaacaatttaatataaaaaatgccattttttgtccatacagtatttataaaaaagtacatagtggttagttttgcaataatttctttttagccagatgtcatatcatcatataaatctatgaatataacaaatgacataagaacagtataaataagtttttgtagtatttacacttacacagaaactagcccaaatggtgtcctaagaaattgtttacagttaaagtgaaactactgattcaacatactgacactccaatgctttttaaagtttcgtattattttctatactagttttggctatgattttgccatagaattacttataaagtatgagccatttcacatcacaggtagggaggcctttaggtataataggacaaaaaaactagctcagaaaaggtccaaatcctcctaaatctagtttttcttaacatctggcttcttacttttgggaacaaggaaaacattgccatctcttgtttgctgcagggagtattcactaggagaataaggttttccatcttcatcacggtaagcatgctggaaaacttcggagatataaggtgctgagttgttttttcagtagggtgaaggcttttgtcattttctcctttttcttttgagcaatttctcctttttcatctttcaaatgatctaaatcttgctctagttctactatattttcccagttttcctttttcctgcaaattcctgaagcagcccacttttattccttaccccctccctacgtatatccccgaattaatgccaagttgagcttcattgaactgctctttggacatcatttcgttgaagtcaaccaacagggaggttaaatgatttttttctacagggaatggggatatgggagagcttttgccctaaagttcatctctttgtgagatgagccctccaagcgggcttgaatgtttgtccttttgtgaaatggggtttttccgatgacccaggacttaacaggcaaatcctttcctctggtgtgttcctcacattgggcatccatgcacgtgaagtgctctgccccctgagatggtgacaagggttgtacccatatccccagaagaactgtacatggtgttttaggacccattctgtttgacaccttccaggggcactatctagctcttccacttcagaatcactgaggccaagtagtgtgtctccatagctggaagattccactggagtgttctgggtgatgccacactggggactggtgtttagtgaaatgccggagtccaaaaccatgaaattcctgctgtgccttcagggtggttttggttgaaagctttgccaaagtgaatagatccagaaaacatccatgggccccatttagaagttccagagagtgaatggcttaaagtagcaggtgagggccatgcctgttgcctgatactgggctcagcctatgaaaaccagaataaaattccatcacccaaaatctgtgttgactgtggcattcttgaatttaatgagttcactgtcaactggttggggtcgttcttgtggagaggatgcttgctgaaggaatcctcaaaagcattaagaaaatgtgtgactacagttacctacttctttttccattgagggtatagatgagtgaaaaatgataattgtcaacttctgtcagtttggcttctggacttggaaccatggtagtctcaaccagcttgtcattgctcaatattaagacactgtaactcaggaatggataatagctcctcccaaacttgctcaatgtcctgttgcataccgtctaaatcaacaggggctacctgagcaacagaagtttcaggtgactgatgcctgattagttagcaatgaagactgggctctcgatgtgacccggggaataccagggaacaagtgactgaaacgtagccgaagaaacctcattgtcatctaccaaacgggaatgtctgcgccaaaagctgcatgcagtcatcaaagtacaaagcatctgatttgggaatgtgggcaacctgggagtagttggcagatccactggtttctgactggatgtgctgggctggctgaattgggagaaattcacctgtctcttcatctagttgtaactgagcgaaaaaggctttctcttgctccttttggagttgttcttgtctttccttttcaagttttttctgtttttccagctcatactctttccgtcgctgactgaagtcaaatacttctcgacttactccaagatctatatcttgcctccaaagtatgtcaatcaaatccatgtcctgctgggacgggagtcccggcggcggcagctccaagtccatcatgatgagctgtggaccgtgtgttggggctccccgacggcggccctgttccggctgccgaggcgcggcgcggacagggcggctctggtggcggcggcggcggtggcggctgcgtcggcggctcctccgggctccccgg

SEQ ID NO: 106332 - DNA, 910 bp, Homo sapiens
actgacgtcctcggaaccgccccggaattcgggtcgacccacgcgtccgcggacgcgtggggcacgctccccacgaggggctggttcctgaaaggatgtacagaggatccccaaccgcctgcgaaacccaagccgccgcgtaggagcgtgcgttcgggccctcttctcccacctgttcgactccccatccccaggatgtcaacctcagtccctcaaggccatacctggacccaacgggtgaagaaagacgatgaggaggaggacccgctggaccagctgatctcccgctctggctgtgctgcctcccactttgcagtgcaggagtgcatggcccagcaccaggactggcggcaatgccagccacaggtgcaggcgttcaaggattgcatgagtgaacagcaggcgaggcggcaagaggagctgcagaggaggcaagaacaagccggtgcccaccactgagaccccaaaccacctatccccagtagatggccctgccaagaccagcacccagcaagattatagaggaagaaatcctaaatgctggtgtgggaggtctaaaacatggggagagtttttggatctggagttgagagccatgggtttggacatgactggcacaaacagctgtcatatgttcatggtcagatgtcatacattctcagctgtcttgttccaccagtatttaccaggaaaacaaagaatgtgttaagggatgctcccccaccccacatcttaagtcagtgtgccaagtactgagatgattttagggacattttattttaaattaaatttacaatctaatggtaaattgattacctaattagtgcctttctctttcatcacttgttctggatgtttcaatcagtttagtggaaggaaaaataaatggggaaactttttattcaaaaaa

SEQ ID NO: 106333 - DNA, 1646 bp, Homo sapiens
ggacgcgtgggcggcctctagtgcactttcggctccttccccttcccgggcctttcagcttggtctttccgggcctcgcttcccccagcccctgcgcccggcccgaacgagaggttccggagccccggcgcgggcgggttctggggtgtagacgctgctggccagccctccccagccgaggttctcggcaccgccttgagagcttcagctgccccagggtgtgcagattagaatcccaagaaaatcaaatggcatccggggatttctgctcacctggagaagggatggaaatacttcaacaagtgtgcagcaaacaacttcctccttgtaacctgagtaaagaggacctgttacagaacccatacttcagcaagcttctcctgaatctctcacagcatgtggatgagagtggcttaagcctcaccctagcaaaggagcaggctcaggcatggaaggaagttcgactgcataagacaacatggttgaggtctgagattttacacagagtcattcaagagttgcttgtggactactatgtgaagatacaagacacaaatgtaacttctgaggacaaaaagtttcatgagacccttgaacagcggctgcttgtaactgaactgatgcggctcttaggtcctagccaggagagggagatacctccactgctggggctggagaaagcggaccttctggaactcatgccactctcagaggattttgtgtggatgagggctcggctacagcaagaagtagaggagcagctcaaaaagaaatgtttcactctgctctgctactatgatcccaattcagatgctgacagtgaaaccgtgaaggcagcaaaggtgtggaaactcgcagaggtcctggtgggtgagcagcagcagtgccaggatgccaagagccagcagaaggagcagatgttgctgctggagaagaagagtgctgcttactcccaggtgcttctccgctgcctcactttgctgcagaggcttcttcaagaacaccggctgaagactcaatccgagctagaccgcatcaatgcccagtacctggaagtcaagtgcggtgctatgatccttaagctgaggatggaggagctaaagattttgtccgacacttacactgttgagaaagtggaagttcatcgtctgattagggaccgtttggagggagccattcacctacaggagcaggacatggagaactcaagacaggtcctgaactcctatgaggtccttggggaggagtttgacaggctggtgaaagagtacaccgtactcaagcaggcaacagagaacaagcggtgggccctccaggagttcagcaaggtctaccgttgagctctggcagggccaggagacatggcttctgcatagctgctgcctcctaatcttcctgctagtgggaccaccttcacctggggctgccttcagtacaagggagtgtggaaatgcttacgcttgaaacactgcagtcatttaggcactctcctggtttctctttattttttatgactgggcctcttctggaaaatctagcaaggagatttatataatttttatgcatagctgtgtgtcagtgtcagccctgtattgtatttgattatctcctgaataaagttatgatattatatcttaaaaaaaaaa

SEQ ID NO: 106334 - DNA, 462 bp, Homo sapiens
gagaatatatgttagcagcctgaaacctaagattgcagtgattcttattgctgctcatttctgtttaaatctttgtttcctaatcagcaagtaacactctagaaattaacaataacatttatgaaactatttcaagtcctttctcttattggaaacagatttgaaccttttctagcttcatgcataggatggaacaaaatttagggggaaaaaagttaacagtgcaagccaaataactcagtcatatcagggtcattttgttttctttgctggtgctttgattcttcagactttagcaagaaagacctgtaagaatgttggttctacactttgggaggctgaggctggcggatcacctgaagttgggagttcgagaccagcctggccaatatggtgaaaccccatctctactaaaaatacctaaattatccggcatgaatgtgggcgccttagatccaaccc

SEQ ID NO: 106335 - DNA, 428 bp, Homo sapiens
cagggtcttgatgctcgagcaaattaggtgagaacagatctataggttagtaccctgaatgtcttaaatagcccgtggtcacaacagtgtgtattgatataatactagctttaacgaaactgtgctactcttaacgactcctattacaatagactgcctttatacgcgcaaggatgcgattgctcctgagtctgcatgtggagtgtgcccttgctcacttttaggagttggtgcttgaatacctaaagttgttatcagattggacctctcaaagaaacatgtcaccactgcctatggtggattcatgtgtgctaaatgtgttcttgacaggataaatcgtgcttttcttatcgatgagcactaaaatcgttcccaaagtgtagaaggcactttctcagagttcgaaagctttttgtgaacatgaaact

SEQ ID NO: 106336 - DNA, 638 bp, Homo sapiens
ccctgtggctctggagcctttgctgggtctgggcagtgtctcttcctctccagttcatccttgggtctcttcacccttgccaggggcaggcttcctggagagaggtcgacctcctgcatgaaggctctcaagaggccagttcaaagccaagctccgggtctgtgcctgtggggctgctcctcgatcaggagatggtcactcccctcctggtctgtatctgtgggattctcctccatcaggagatggtctctcccctcctggtctatacccgggggattcttctccatcaggagatggtcactccccatcctgggctatacccgtgggattctcctccattagatgggcactcccctcctgggctattcccgtggggctgctcctccatcatgaggaggtcactccccgtcctggtctatacccgcggggctgctcctccatcaggagatagtcactccccctcctggtctatacccgtgggatactcgctccatctggagataggcactcccctcctggtctatacccatgggatactcctccatctggagatgggcactcccctcctgcgctatacccatgggattctcctccatctggagatagtcactcccctcctggtctattcccgaggggtt

SEQ ID NO: 106337 - DNA, 375 bp, Homo sapiens
agacatggtcttgctctgtcacccaggctggagtgcaggctccatctaaaaaaaaacaaaagagagagagagaatgatgaatcttcatagatgatagatagatagagagagagagagagagagagagagacagatacaataaaaagaatagaagagaatcaatgaatttgaaggttctaaagaaaggtttacccaatctgtaaaacagagaaataaagactggaaaaaatcagaactttagatacctctgagactatttatctatccatatataggaattaaagtctgaggagaggacaggaaaggaggacagagagagaaagaatgagacactaagtcaatatgaagaaataatggccacaaactttccaaatt

SEQ ID NO: 106338 - DNA, 333 bp, Homo sapiens
attcttcatctgtggacatgtgaaactagaaaacaagttatctgctcccagtacaatggtgggcacagaatgacaatgaaagatattccagttcaaaaaatacgataatggctctccctctccctctccctgtctttccacggtctccctctgatgccgagcggaagctggactgtagtgccgccatctctgctcactgcaacctccctgcctgattctcctgcctcagcctgccgagtgcctgcgattgcaggtgcgcgccgccatgcctgactggttttcggatttttttggtggagacggcgttttgctgtgatggccgggctggtctcc

SEQ ID NO: 106339 - DNA, 333 bp, Homo sapiens
ccagtatgcacgtccacattttttttgttgttttttaagagacagggtcttgctctctgccacccatgctagagtacattggtgtgatcatggctcactgcagcttcaaacttctgggctcaaatgatcctcccgccttggcctcccaacgtgctgggattataggcatgagctaccacacccgaccccagatcaattttttaaactaaaacaagataataaatcatttatttagctaaaacaggttatcagttcttttattaagctcgttggaacacatggattttggggtaaaatatctcataagggtatgaattggtcttaatttcctgg

SEQ ID NO: 106340 - DNA, 379 bp, Homo sapiens
ccggccttaatcggctcctaatgcaagatgggggctgtcagatgatgacaccttcaagttacagaggtgttttggtttgtggtttgtgtgttttttcggagatgggggggatctcactgtgttggcaggctggggtgtaatggctgttcacaggcacagtcgtaccatgctgcagccctgaactcctgggctcaagggatcctcccgcctcagcctcctgagtagctgggaccacaggcgcatgcctggcagcaaattgcagaggtttttgatggactgcaagtcttagcttagagtccctgatctgggaggtcaggctgagtcataacttttcttaacagaacagccctgccccactcctgtgccccatgcttctttt

SEQ ID NO: 106341 - DNA, 1027 bp, Homo sapiens
  misc_feature (1)...(1027): n = a,t,c or g
ttttttttttttggatttgaattatctgactttatttagcatgcaatgcaattttattctggcaataaattaatatgtgcagttataaaaaatgttgggtactttttccaagaaaaatgtttctgaatgtgcacactagaatatatgcagaatcctttaaacagtcgacttcatattttaaacttgtaagtgtggtaacatcaagttttggaagaatggactttttctgtaattcatgatttagtttgagtttataaagggtttaaattgcaatttcaggttcctacaagctaccaaggcctgaaattaggaggaactgacagactgaggaaagggcaatcaccctgatcgaggtctccctaattgtacagctgaagaatccaatggccttgccaaagattacgaagctaaaaagagacatagcctggattacaagtcagtttttataggtgctccaggaatgtcttgagctaaataaggcacacgtatcacacagaactttagtcgtatctcagagtccagttttactctgctttctctttattttttaggcatgaggtcttgccctgtcacacaggctggaacgcagtggtgtgatcacagctcaccacagcctcaaactcctgggcccaagcaatttgctcaaggccccacaccttgctaattaaaagaagattttttagagacagggtctttctatgttgcccaggctagtcttgaactcctggcctcacatgatcctcctgccttagcttcctgagtagctgggattacaggcacgagccactgcgcctggctctggttttaccttctgcttaacacaggattcaatcttgatgtgttctcctacagttcacaaacttagtgactcaattgctttagaaacaaagcaataaatgatttgatttagaaataatttggtttagaaacaaaaccattcccattattgcagcattatcatcagtcgggantgntaatgctttttcctcgtccaagcgttggcgtgtaatggtcaacaattttcaat

SEQ ID NO: 106342 - DNA, 542 bp, Homo sapiens
ggcccgagtggttattaaacatctttttctggtcttcgtagagaggtttgggggtgagtgaaatgcctgtagatgtgagtgttggtctccatgtttatctgccacatttgtagaaaggtgtgtgtgtgtgcgtgtgtatgtgcatgcgtgtgtgtgtgcattcatacatccactcttacctcggcacccagaggatatgcatctactgttagctgtttggggtatttacttttcatctttttcatttagtcatttaagaatacttacaaatagtgcacagacactctctcattagatttaatgagtattgatttatttctctccactgaattagtgctgtaatgaattttttttaagccaggtatggtggctcatgcctgtagtcccagctactcggaggctgaggcgggaggattgcctgggcctgggagtcagaggctgcggtgagccaggagcaagcctgtgaatagccactgcagtgcagggggcaggtgtggaatagaccccatttcaattaaacaacaaaaaaataacaacagata

SEQ ID NO: 106343 - DNA, 374 bp, Homo sapiens
gttactgtaccttacctgtgacctttaggggtttcatgtagaaggtacaaggaataggaacttcagctactttcctcctgtaatcattccttgccagttattgcttgattgattaattgattggttgagacaggatcttgctgttgcccaggctggagggcagtggctattcgcaggggtaatcatggtgcactacagccttgaactcctgggctcaagtgattctcctgcctttgcctcccaagtagctgggacaacagggtgtgtgcaccttgctagttatttaatccattatataacccctagctcaggtggcattttttagtatgttccatcaataggtaatattcatgccatcatcagatccataattg

SEQ ID NO: 106344 - DNA, 351 bp, Homo sapiens
acaagtcaggccagctagctctgaagccagttagctgccccgactgagaaatgtgcagggatctcaatctttcatttcctttcaaaaaacagagactagccatatgctggtgaggaattattgttacggtttcggttttatttttattttaaaataatttgaaagctgaacatggtggcgcgtacctgtagtcccagccacttgagaggctgaggtggaaggcttgagcccaggagtttgagggtgatgtgcactatgattgatcctgtgaattagttgctgcactccagcctaggcaacatagtgagactgtctctaaaataaataaataaatagttctaaaaattttgt

SEQ ID NO: 106345 - DNA, 517 bp, Homo sapiens
cacccggcacatcttcattctttttatgtagtaaaaagtataaggccacacatggtttatttgaagtattttataatttaaaaaaatacagaagcaggaaaaccaattataagttcaagtgagggatgatggttgcttgaaccaaagggttgcatgtagtaagaaattgtgatttaagatatattttaaagttataagtagcaggatattctgatggagtttgactttggttttgggcccagggagtttcagatgcctttgagaaatgaatgaagtagagagaaaataaaagaaaaaccagccaggcacagtggctcacgcctgtaatcccagcgctttgggaggctaaggcaggcagatcacttgagaccagcttgggcaacatggcaaagccccatctctacaaaaaacacaaaaattagctgggcattgtggcgcacacctgtattcccatctagtcaggaagctgagatggaagaattaattgagcccacgagttcaaggctgcagtgagtcg

SEQ ID NO: 106346 - DNA, 549 bp, Homo sapiens
cgtgaaagttaacctacattcgaccttcaaaaacccacagacgcataaacagtgtgagataacacacagccctgagacgtccgctctgaagtgaggctggctgagaacctcagagagggaagtagctgcactgtttaaatagagccagcgcagcctcctcccaacagctgccttttgccatattattagagtaaatatgctcttggctccagaaacatgggaaaagggtgcaacgaaggggtcaaagtaataatacccaggagcaaagaagcagaggccgggaggagacagtgttcgaggaacacacttgcaaagcagatgctggtgtgtcttgctacacaattgtcagtagcctaagagtaatacacagacatttccatgacctaaaaacttaagagagtgaaatgcaacatagaaatcaactgatttgggccgggagcggcggctcacctgtgtaatcccagcactttggaaggctgaggcgagtggatcacctgaggccaggagttcgagaccagcctgggaaatataccaagaccccaaatctac

SEQ ID NO: 106347 - DNA, 615 bp, Homo sapiens
  misc_feature (1)...(615): n = a,t,c or g
cgattagtgatacaaattagtttaaaactccaacaaaatatagtcataatgatattcagagctcccccacctaacttttggtgttggttatgctgtctggaatataaggctaattgggatagggtgtaatgatatatcactttgcgtcacttactagttagaatattgtaatccttctctaggtggcccgtaatggttttgagtacagtgcttnnnnnnnnnnnnnnnnnnnngaaacatctgttcctaaaaatcatctagatttttaagagttcgagaaaggattggggcttgtcaaaaggaaatagggattggggtgcaagtggctcacaccctgttaaccccagcacttcggggaggctgaggtggggcagatcacttgagccccaggagttcaaaaccagccctgggcaacacagtaagaccctatcccctacaattaattagttaataagcccaggcgtggtgtcatgtgcctgtatgtaatcccagctactcagaaggctgaggtgggaggttcacttgagcctggatatttgaggctgcagtgagctatgatcactccattgcatttcagcctgctcagtagagtgagaccccgtctctttttattta

SEQ ID NO: 106348 - DNA, 397 bp, Homo sapiens
ggcacgagtgtgtgtgtatacataaataaaaataaatataactttacaaaggcaaagtatagaacaatggtaacataccatttcgaatgaaaatggtatacaaaagaatgcctttatcttttagtttctatatttagcagatatttattaagcatctactatagggaggtactagcccagacactgggaaagttgagtaaaacagtcatgtgtcctgctctcgaggaaactgtagctgttaatggattgcagattaagagcaagaaatgaggctaggcatggtgactcatgcctgtgatcccagcactttgggaggctgaggtgggtggatcgcttggggccgggagttcgggactagcctggccagcatggcgaagccctgtctctgctaaaaaag

SEQ ID NO: 106349 - DNA, 315 bp, Homo sapiens
atttactagcagtcacacaatacaaacggctgcctcgacttgcactttcagaagggcccatggcaatctgttggagaaacactaaatttatagactatatttctgtgtgtgtgtgtgtgtgtgtgtgtgtgtgtgagacatgtatatcatatgtctatatatattcagattttatatgtccttcaatcgagtgtgaatatttttcttttgcacatcgataggttaattcctagaaaagatagagctattttccttttgcaaatgacttcatatattatggtgtattttctttctggctttagatggtatagaaag

SEQ ID NO: 106350 - DNA, 496 bp, Homo sapiens
aaaggatgaagtactgatacatgctacaatatgaatggaccttgaaaacatcgttaagtgaaagaagccagtcacaaaagagaacatattttatgattccatttatatgagttgtccagaatgggcaaatatctagaagcagaaaggagattcatggttgccaagggttgtggggaatagagtttctgcttatgaacaagaagtttctggggtgatgaaagaattcaaaaatagaatgtagtgatggctgctctgggaactctggtaacatactaaaagccatggagctgtacacttcaaatggttgaataatacggtataagaattatatctcaataaagctggaagggtggaaaaggttataccatgctaccactcatgaaaagaaagttggagtggctgtattaatatcagagaaagtagatttcagagcaaaaaatattatcaggacaaagagggtcgtttcctattataaagaggacatataaccctaaat

SEQ ID NO: 106351 - DNA, 2391 bp, Homo sapiens
  misc_feature (1)...(2391): n = a,t,c or g
tttttttttttttagtcctaaagcagcatgttacttccctgctatttcattacctgcaaaagctaattattaataaacaacaaactgctccccttttattgtaatcacccaattacaatgtcaatgttggttgacatttattagatctggatttctcaaagtgtatttatctaggtcaagaaaaacgggcagaaggaaacttcacccaaattatgtagcagtgttaagcaaattcagtttttgagccaaaattaaatcatttgtgtcttcaaactttcccttggtaacttttcttatagcaatgcaattttgcattttgggccaaagagagctattttcttttggcagacaaaatcatgcttctgggagaaacattgacttagatctatggaatctgtttcctttttaatagagctctaacaaatagagcattatatatttattttatccaagttgatcctttcaaaaagactgatataatgaaaaatttgaaatttgctctgtagtacatttttatccaatatacataaatatgctcaatttaaagcaattttccaaaacaactggtttttggacaagattcaagaaaccccagaatgtcttacccaaaataatgataaactgacaattaaaaattaaacaatagtgcttaagtgtaattttgttttgttttgttttagagatgaagtcccactatgttgcccaggttggagtgcagtagctagtcacaaacacaattatggtgaaccacacagcctgggctcaagcaatcctcctgccttagcctcctgagtagctggaactaaaggcacgtgccaccacacctggctatgtttttaaaaaccacctttacactattgtacacttgtggacatttggaaacaaatatatgttgactctcatgagaaaagtacttggtgacacatgaaagaatgagtcaaggagtttacaaaaacacaaaaggcagggtgcagttattccaaaatgatagaaaacagcatcgtacctttgcttttgtttgaagagaaatgaaaatatttccactcaaaatagctaattactgttaaaatgtcaccaaattagtttaaaacattactcagaaaatcagttatttccaacagtaacaattttagttaccttttataagaacaatgttgtaactttcattttaagggtcttatatctcctcagcattattacaaaccaccttgttagatttcaaattaactaattctaactcaatccaaattaataactgctcacattcacaagcaaaaaatactattgcacattacactcacattttaggaatgtgtgcttccccccataccccaaaactgacaatgcagctatgaattacatcccattatctgaatttataacactcaaaagtgcttatgttcttccactgaacaagttcattaatatacctgtaatctcaaaatacttcatgaaccctgaagtgattctctatggaaggagcttcctttgtaaaatgaatttggctagtcacctgcataccaagatccccaagtatctgaacaaatttcttgtgctcctttccaatccaagatctcattggatcacgtacttggtaaggtgttacatgagtgtgaacgataattcctgtttgtgcaaattctttcaagacttctggataagtaacccaagtattgcttccctccctgttgaccaccatccagccaatacattgttcttatgcttttgataaaagcatctatgttcttgtctttcttggcttctttcaattcaaaaagcaactgattcaaaacaacacaacctttactgaatccaatcaaagtaaaagatgcgtcatttagtgatggtggataaaaactcatggcagactcatcagatttttcacaggtcctcactttttctccctggcaaccattcgtagtatgagaaggactggatctacagttagatgctatggagtccttattccaaacattcaaacttttctttgataaactattctgacttaaattaaaagcattaactaataacatataaaggtgcttaaaagctccaaagtcagtattgtgttctggggcaccaaacatgttacttttcacaaaattgtcatagcagctgaatttgtgcaaatgcattcgggaacattttatcacccaaatataactattggggaaccggtgggctaaaatggtagcaacattttctagactccagttttcccattgataattctcaggatgacgagtcataatttcatggtaattctgcacatccccagggaaatagaggacgtgatgaagggaaagcggctgcggctcctccttcgctgggtccccggggaggtcctgccgctccagtcgaatgccnccgcacangcntntagttcttcat

SEQ ID NO: 106352 - DNA, 442 bp, Homo sapiens
attgtgccactgcactccagcctgggtgacagagtgaaaccccatctcttaaagaagaaaaagacatgctcaacatcattagtcatcagggaaacccaaattaaaattacaagatacacctactcaaatggctaaagttaaaggaaaaataaggctggaaataataaatgctggcatggatatacagcaactggaactctcattgctgattgaaaagcaaacaaatgctttggaaaacattttgacaatttcatataaagttaaacatacactattaatataactctgaaattcaattcctaggtctttacccaagagataaaaacatagccaggtgtggtggcttacgcctatagtcccagcatgcctgggaggctgaggcaggcagatcacttgagctcaggatttcgagaccagcctgcgcaacatggtaaaaccctgg

SEQ ID NO: 106353 - DNA, 416 bp, Homo sapiens
  misc_feature (1)...(416): n = a,t,c or g
tttgtttcttatgcagaaccttttggtcatgtattgtgggaaagcttgggcaaatttggccagtgcaatttaattacaaactttaagttatctgcttttagtgtgcactgccactcattatcccttagagatggaaatgtgtaaaattaaaaaatacaggccaggcatggtggctcattcctgtaatcccagcactttggaaaaatcaagacagaaggatcacttgaggccaggagtttgaggctacagtgaaccttgattgcaccactgggctacagcctgcctgggtgatggagtgggaccctgtctttaaataaataaataaataaaattcaaaaaaataaaaaaatacaataaaaacctaatcatcttgatctccccaatctagaatatataaccatttttataatgttagn

SEQ ID NO: 106354 - DNA, 878 bp, Homo sapiens
  misc_feature (1)...(878): n = a,t,c or g
cggggatgcctatgatgtttcacatttaactataatggtggctgttgttttaaaagtttaatttaatgaaatagatgccctatgtcatgttaaggaattgtgctagttaaaaatcaggaataggtgttgaatattttcaaatgcctttcaaacatcctttgagatgatttttaaaaaatttttggtgtgagttttcacatactttatttccatgaaatgaagacatcattgattgtaaaacattattttgtataccacggagaaagaaaagtgctaattaatcattaagatgccaccaactggaagatatctcctgactttgagaagatgaaaaaatgtgcaactgaagatcaatgaaatctggtacatttcctaacatcaaaccaactttgcattcttaaggttttggtgcaccagtcttttcatacactagattatatttattgatattttatgtaggattcttgcctctatcttcacatgtgagattggtgctatctttgtgaagttttggtatcatggttaagcttgcatcatagaaagacttgggtaacttttaccttttctatgcttttcaatagtttctgtagcttaggaagtatcagtcccttgacaccttacatgaattcattgttataaccaggtcatagagtcatggagagaacgtttcagctaattcttgggcagctttcttagttctttacaatgttatcagtttattaatactttttacctcttgcatttattttggcgaattacagaggtttttgnnnnnnnnnnnnnngaaacggntgttttttttgtntcctttttgggggggttgggggttttttgggggttgtgtgtggtgggggttgttgggtgttgttttgtgttgg

SEQ ID NO: 106355 - DNA, 507 bp, Homo sapiens
gttcattttgtatagtatctcacaggtgttctctgaatttcttgaatctggttgtctacctctctaacaagataacaagattagggacactttttgaattattccttcaaatatgttttctgtgttgtatactttttctcctctctcaggaatgccaataatttataggtttggtcactttacataatcccatatttctcaaagattttgtttatttttcttaattctttttttaattttttgtcagacttggttattttgaaagactggtcttcaagctctgaggttttttcttctgcttggaacagtctattgataaaactttcaaatgtgttttgaaaatttcagttgagtttttggaattccagaagctctgattggatttcctaaggatgtgtatctcttacttcatttcctgaattggatttagggagtttctttgtgttggacttttcaacacactctagtgcctgtgttttaagggctgttgagcaagatggaagagtg

SEQ ID NO: 106356 - DNA, 340 bp, Homo sapiens
  misc_feature (1)...(340): n = a,t,c or g
tcccctacaaatatttaaatgaacatttcgtcaactaaggataaaacgatataatatacaccagaaagtagatttgacttttctttcgagtattttttgaagaacccaattatttgtttcggttttttggttttgttttcttttttgttttgagacagggtcttgctctatcactcaggttggagtacagtggtgccatctccgctcactgcaactacctccgcctcccaggttcaagggattctcctcctccaagctcccaaaacagaggttaaacagtcttgttctatttttagtttgagcttgcctaatcaatgaatttttttaataaaaaaatttn

SEQ ID NO: 106357 - DNA, 381 bp, Homo sapiens
tcgatgacacttgatgctagcatcattgacagtgctaaacctttgttgcatacctaaactcttactgaatctatactactaagtctgaatcataaccttctttctttcatatatttatagatgaaatatatatatatatatatatatatatatatatatatatacacacatacacacagataacactatatctatatagacacacagacacttaaaatatatatgtatatattataatcgtggcaaaatatgtcacacaaaaattaccatcttaaccatgtttaaacacacaggtcattggctatatatacatatatggtgatgtgcactcctcacctagatccatatgtggaactcttcattattcaaacaagaactccg

SEQ ID NO: 106358 - DNA, 1624 bp, Homo sapiens
  misc_feature (1)...(1624): n = a,t,c or g
ccaaaacaaacttacaagtggtcaatgttgtatccttttacatccaaaaggtgctagaaccagcaagattttatgtacaatcctgaaggaatagataannnnnnnnnnnnnnnnnnnnnnnnnnnnnnnnnnnnnnnnnnnnnnnnnnnnnnnnnnnnnnnnnnnnnnnnnnnnnnnnnnnnnnnnnnnnnnnnnnnnnnnnnnnnnnnnnnnnnnnnnnnnnnnnnnnnnnnnnnnnnnnnnnnnnnnnnnnnnnnnnnnnnnnnnnnnnnnnnnnnnnnnnnnnnnnnnnnnnnnnnnnnnnnnnnnnnnnnnnnnnnnnnnnnnnnnnnnnnnnnnnnnnnnnnnnnnnnnnnnnnnnnnnnnnnnnnnngtgataattcctatttcttaagaataaatgagattacagattgagctaggtgattactcaacacattttatgaaagagaataagcacaatatagaaatttcacaggggtagtgtattagtnnnnnnnnnnnnnnnnnnnnnnnnnnnnnnnnnnnnnnnnnnnnnnnnnnnnnnnnnnnnnnnnnnnnnnnnnnatgagnnnnnnnnnnnnnnnnnnnnnnnnnnnnnnnnnnnnnnnnnnnnnnnnnnnnnnnnnnnnnnnnnnnacattttaatctgaagactgggagtgcgggggttatatataaactcattcnnnnnnnnnnnnnnnnnnnnnnnnnnnnnnnnnnnnnnnnnnnnnnnnnnnnnnnnnnnnnnnnnnnnnnnnnnnnnnnnnnnnnnnnnnnnnnnnnnnnnnnnnnnnnnnnnnnnnnnnnnnnnnnatactaatatatgggatagaaacctaagaatagtatcattaaattgcatgatatattcatatttatcagttttaagaaaaggccaaactattttccaaagcggtgatactattttatatttccatcagcattgtaaagggccctcatttagccacatcttcatggacatattttatcactggtcatttttattatagttattctagtgtgtgttaagtggcttctcattgtggttttaatttgcatttcactaatgactaatgattctgataatcttttcatctgtttatgcccattcacatattttctttggtgaaatgtgtactcaaatcttttgcctgttatcttatttattaacaaattattaattataaattgataaattatagttgtcttatttattgggtacaaagtgatgttatgatttatgaattcaatgtggaataattagatcatggtaattcacacaccaatcacctaaaatcattatttttttgtcttgagaatggttgaaatgtattcttttggcaatttcaaaatgtataatacattttttactatattcaccatgctgtgcagtatatcttaaagaaaccttattctcctgtccagttgaggctttgtactgtttgaccatgatatccttatccctttaccatccccaggctctggtaaccactgttctactctctgcttatttgagtttgattgttttagattccacaaataagtgaaacatgtaatatttgcagcaacaaagatggaattggagaacattaggctaagtgaaataagcctgccacagaaa

SEQ ID NO: 106359 - DNA, 342 bp, Homo sapiens
  misc_feature (1)...(342): n = a,t,c or g
ttactgtctcagagaagccaccttgcctgctatagaagcctgagaccatagccacatagcagaaggcagagctgagaccctgagaaaaaaacaagcccaaataacgtatttgggccaggggtgatggctcacgcctgtaagcccagcactttggcaggctgcgatgggtggattgcttgaagccaggagtttgagaccaacctgagcaacacagggagaccctgtctctacgaaagataaaaaggcgacgcggacatgacgaggcctggtcacagaacgtgatttctgggccctgaggcagaaaacttcgccgtgatgtaaaatggacggacaggaatatcn

SEQ ID NO: 106360 - DNA, 521 bp, Homo sapiens
ttaagattgtaaaattttattactgggctgtttacatgatactttctttcttattaaatataacctgacaatctttattaaatgaaaatatttttgtatcatcaacaacaacaaaagaactaggatgaagaatttcccacattcttaatatttatagggtttctctccagtatacattctcatgtgtgctcaaaaggctgtgtgaaggctttcccaaatgtcttacatttatagactttcaccccactctgactcctttcatatattcacactctagaggacagttggaagattttcccacttttattttttcttgagacagtgtctcattctgtcgcacaggctggaatgcagtggcgtgatctcagctcactgcaacctctgtctccaggttcaagtgattctcctgccttagcctcctgagtagctgaaacaggagaatcgcttgaacccaggaggcggaggttgcagtgagccaagatcgcgctactgcactccagcctgggcaacagagcaagact

SEQ ID NO: 106361 - DNA, 412 bp, Homo sapiens
ggcacgaggatgagatatagctaaagagaaaattattgtggatgggaagatggggttgaagaaaatatgcagaatatagaatggagaaaaaagagatagcatatgagaggactattaagatatagaggataggccgggtgtggtggctcacagctgtaatcccagcactttgggaagctgaggtgggagaatccccatctgtctgggcaacatagtgagaccctgcctctagaaaaacaaactaacttagctgggcatggtggtgcatgcatgactgtagtcctagccattcaggaggctgaggtgagagggttgtctgagcctgggaggttaaggccacggtgagttatgatcacatcactacactccagcctgggttgtctcaaaaaaaaaaaaataaaaggtttttttg

SEQ ID NO: 106362 - DNA, 1056 bp, Homo sapiens
tttttttttctttttgagactgaatctcactctgttgcccaggctggaggcgtgatcttggctcactgcaacctccacttcccaggttgaagcaattctcctgcctcagcctcccgagtagctgagattacaggctcccgccaccaggcccggataatttttgtatttttagtagagatggggtttcaccatgttagccaggctggtcttgaactcctgacctcaagtgatctgcccaccttggcctcccgaagtgctgagattacaggcgtgacatcacacctggccaccattgatctttctgataaaggtactttttaaaaacttacattagcagagttctttgtgtagtttattaggcactttcatgtttatgatagcatttgatcacatgtaaacttggtaacattgacaaaatcactttcattttcttttacagatatggaaattgatctcagagaggctgagatctgctcagggtcagcaagctctcaaaactgttactagtactttttcttcaaaatatgtgtgtcgagcgtttttggctgagcctggatggattgccattttgtatgtgactttttgaagtctggacagcagaagaacgtgtttggtggttgcagtcagtaactttttctattcaactttatttctgaaattaaggcagcaagtactgctgactggtcttatcatttattctctgccaggccctctagctgtggaagtgacaagaaagccagagaattaaatctctctctctctctcttgtttttttttttttggaaagagggtctctggcacccaggctggagtgcagtagcatgatcacagctcactgcagctttggccttccaggctcaagcagtgctcccacctcagcctcctgagtagctgggactacaggagcataacaccacacctggctaactttttaactttttgtcaggctggtctcgaactcctgggctcaagcaatcttcccacctcaacttcccaaagtgctggaattgtaggtgtgaaccaccacacccggccaaatctttctcttaaaaagaa

SEQ ID NO: 106363 - DNA, 504 bp, Homo sapiens
attttgagtctccctccgtcacccaagctggtaagtaattctcgtgcttcaccctctggagtagctgggactacaggtgtgtgccacatggttggctaatttttgtatttgagacagggtttttgccatgttggccaggctggtctcgaactcctggcctcaagtcatcttgagtggatcacttgaggcatttgggagtgcctcagcctcccaaaacggtgggatcacaggcgcgagccactgtgcccggcctgcacatgtctttcttacatgtggactctccaggggatttatgctgttcaagaagcacctgaatcaaactgtgctttaaaaatatttttaaaacattccatgattcttcatagtacaaaaatgagaaatctcccctaaatctctaaagaattccctttttaaactttttgatttcctgaacttgtctgaaggacttaacacagttatatagagtgttctttgtgtaacagtatccatgactttcctcgtgcc

SEQ ID NO: 106364 - DNA, 404 bp, Homo sapiens
ggcacgagccaaagtccaaggttgggatctcattccaaagtccaaaaggaagggatcagcaaactgtggctggcccttggaccaaaactggctcaccacttgtttttgtttgtttgtttgttttttgtttttttgggagacagggtctggctctgtcacccacgctggagtgcagtggagcgatctccgctcactgcaacctcccgagtagctaggactacaggcatgtaccaccatgcccagctaattttttgtattttgtatggagatgggttttagaccagtgccccttttactacgctacaatgtgtaattagtgactgcctttgtatagatactgctatgcaatcttgacctatggctttaaggcctacacgggccgtgagcttgttaaaactaaaccc

SEQ ID NO: 106365 - DNA, 476 bp, Homo sapiens
ttcaagatccctcctcagtgcccatgtctcccccacctcagggtgctgtcaaccctcccttggtttccatgatcattgctgaactcagagctttcttctatccccagacccacatgggagtctcccagcacctctgactcagcttggccaatgcagaacttggcatctgaacccctgcctcttccctgaaccactcctcctcctgatttccctgctctctctgctcagaacactaccattcaccccatctcccagagacactctccctcctcctctttcaccttcatacaagcaggcccccgtcctatcagtacacccccctgtgatgcctctgaaatatgtaccctcctcccctctcctactgtcattcttatacctgtgatctctgcgtttctcttctacactgctgccagaggcctttttgccaaaagcactgctgattggcactcttttactttcctggttcccctttgact

SEQ ID NO: 106366 - DNA, 343 bp, Homo sapiens
ggcacgagcggagtttcaccatgttgcccaggctggtctcaaactggagtgcaaatgatactcccacctcagcctcccaaagtgctgagattataggcatgagccactatgcccagccaataactaattaactaatatttttagtatctgttggtgatatttacctgattcagatgagttcattcacggatgatcagtcgtaatttgacattacaggagtgtgttttcaggatattaagtggcataagtattatggactgtaagaatgggtagttaaactgcgttatagccgatatatgttattaacagtaacagtaaataatgtatttgccttatcttcatc

SEQ ID NO: 106367 - DNA, 479 bp, Homo sapiens
  misc_feature (1)...(479): n = a,t,c or g
gaccatatactacacaaagtacactacattcagagttccaaatttagggttacagctgttgactgctttcttttgtgtgtgtgtgtgtgtttccttaaatggctttaaaaatgccaaagattatggagggagtcacttaaaatacagtgtgtatataactggttttcttctccaattctcactaaaatttgattgctttctgtgtgtctgtgtatgtgtgtttccctaaatggcttaaaaaatgccaaagattatggagggagtcacttaaaatacagtgtttatatgacttgatttcttttctaattctcgttaaaattgaagtacttctgtgaccctattttaagaaaaagaataggccaggtgcgatggcttacacctgtaatcccagcactttgggaggctgaggagggcagattacttgagctcaggagtttgagaccagcctggccaaagtagtgaaaccctgtctctactan

SEQ ID NO: 106368 - DNA, 1274 bp, Homo sapiens
  misc_feature (1)...(1274): n = a,t,c or g
ggcacgagatctgcagtgggccagctagagatccaggagagctgatggtgtagttccagtctgaaggccagcttggataccctagaagagctgatgtttctgttccagttcagaggcaggaaaagactgaggtcttagttcaagcagtcaggcaggaggacttctcccttacnnnnnnnnnnnnnnnnnnnnnnnnnnnnnnnnnnnnnnnnnnnnnnnnnnnnnnnnnnnnnnnnnnnnnnnnnnnnnnnnnnnnnnnnnnnnnnnnnnnnnnnnnnnnnnnnnnnnnnnnnnnnnnnnnnnnnnnnnnnnnnnnnnnnnnnnnnnnnnnnnnnnnnnnnnnnnnnnnnnnnnnnnnnnnnnnnnnnatgaggaaaaacagaaatgatacatgtatacagagtgctcctcatcccaattaagtttcaccaagttaataatgtgtctctatgagaagtggttcaccatgttggtcaggctgttttcaaactcctgacctcaaggtgaccacccgcctcggcctcccaaggtgctgggattacaggtgtgagctagcactcccaagccgacaggtgcttcttaaatgttttctttgagcaggaattggtccaggaattggttctcaagttagaaggaaaatttgaggggaagaacttgttttttctccaatcagtctctgattaaatagttattaggaaaaactccttgcttatgtctttgtattgcacatttttatatatgtatatatgtggaaatagagatatttatatattcacagacaaacacgtgtatgcacatttcacaatggaggaagaagggatatggtgtgcactgaggtaaagtgagcagggatacagaagagagctggagcctcacagtctgattctctcattgtacataacctttagggtctttgtttccctgagttctctggtatggggcactgttggcttgggctggtaccctgttattctctgtgatgaagggattcactggaggtaaaaacgtaatcatttccaaaggttgagaataaatgactttgaggaaagggtgttcattatccgttgcttctatattataatcagttgaactacaatacggttatctattgattttttttaatttttctgacaaattattgacaccaaattgaataattcatgacctgcatgcttcagcttctttctccctggtttccaggtgctattccctcaagaaatgcaaattaaatatgtcggtcttaataaatcaggagggaagcatgcaaaaaaaaa

SEQ ID NO: 106369 - DNA, 513 bp, Homo sapiens
tggagactgacttaatcaccaacagccaaaggttttatcaatcatgcttgcataataaagcctccataaacaccctgaaaggggtttgcagagctttcagggttgctggacacaggagatgctgggagggtcgcatgttcaacagagggcatgggagctctgtgcccctccgaacttaacttgccctgggtatctttctttttttttgagacaggatcaggctcttttgtccaagctggagtgcagtggcacaatcccagcccaccgtaacccaagcctccccagtccccagctcaaggtatcctctcatctcagcttccccagcagttggaactctaggtgcacaacaccacaccagttattattattattttttaattttttatagagacaggttttcaccatgttgcccaggctggtctcaaactcctgagttcaagcgatcctcccaccctggcctcccaaagtgctgagattacaggcatgagccaccgcatccagcatgcacgtctc

SEQ ID NO: 106370 - DNA, 380 bp, Homo sapiens
  misc_feature (1)...(380): n = a,t,c or g
gcacatgtagcagaatctcccagctaagctctgcccagatctggtccaaatcatgagatagtaggcactcagtgaatatagggtggtttgttgtacatcaagagataactgagcccttggcatcattctagaaactacacactaatatacccctacactttaaatttttggatgagtgcctttcccacgccaaaggaggaattttttttttcttttcctgagacaaggcctcactctgttgcccaggctggagcccactggcgccatcatagctcactgcggccttgacctcctgggctcaaagtgatcctcccacctcagcctcctgagcagctgggaccacagccataatacctggctaatttttttatgaatttttn

SEQ ID NO: 106371 - DNA, 366 bp, Homo sapiens
ttttaatagacggaagtcttgctctgtcatgctagctgttttgcggtggtgcgatcatagctcactgcagcctcgaactcttgggcttggggcaatgctcctgtgtcagccaccagagtagctgagactacaggggtatgccaccatgcccagctggcatttgttaatcttcatttgaggactagatctaagcactgtggacactgaaaaacagttgggaaatcattctagctgtggaaatccaagcatatactgataatacctggttggggagagtacgataagtactagtatcataatattctgagctaagtgaatcttattcctagcatcgtatgcagctatgacctcgagttatattcaccg

SEQ ID NO: 106372 - DNA, 6881 bp, Homo sapiens
  misc_feature (1)...(6881): n = a,t,c or g
ggagtttaattgagcaatgaacaatgcacgaatcgggcagcccccaggatcacgggagattcaaagagactccagggatgatcgcttttcggccttttggctaagatcaagtgtgagactccagggatgactcgggtctagctgtggtcccctgcaaccaggtgcctccaaaatggggctggcgttgacaataaccatttcccagcttttagaaagaggtgacggagctctgttgtagtgtctgagccacaactcaagaaggtaatgagaataaggagcccaagatggccgaataggaacagctctngtcgctctggtctacagctccggtctacagctccccagcgtgagcgacgcaagaagacgggtgatttctgcatttccatctgaggtaccgggttcatctcacatagggagtgccagacagtgggcgcaggccagtcgtcgtcgcgcaccgtgcgcgagccgaagcagggcgaggcattgcctcactcgggaagcgcaaggggtcagggagttccctttcctagttaaagaaaggggtgacagacagcacctggaaaaatcgggaaaatcgggtcactcccaccccgaatattgcgcttttcagaccggcttaaaaaacgggcacacaacgagattattattcccgcacctggccttcggagggtcctacgccccacggaatcgccgcttgattgcttagcacagcagtcttgagattcaaacttgcaaggcggcaacgaggctgggggaggggtgcccgccattgcccaggcttgcttaggtaaacaaagcagccggggaagctcgaactgggtgcagcccaccacagctcaaggaggcctgcctgcctctgtaggctccacctctgggggcagggcacagacaaacaaaaagacagcagtaacctctgcagacttaaatgtccctgtctgacagctttgaaagagagcagtggttctcccagcacgcagctggagatctgagaacgggcagactgcctcctcaagtgggtccctgacccctgacccccgagcagcctaactgggaggcaccccccagcaggggcacactgacacctcacacggcagggtattccaacagacctgcagctgagggtcctgtctgttagaaggaaaactaacaaccagaaaggacatctacaccgaaaacctatctgtacatcaccatcatcaaagaccaaaagtagataaaaccacaaagatggggaaaaaacagaacagaaaaactggaaactctaaaacgcagagcgcctctcctcctccaaaggaacgcagttcctcaccagcaatggaacaaagctggatggagaatgattttgacgagctgagagaagaaggcttcagacgatcaaaattacttctgagcctacggggggacattcatacccaaagggcaacgatgttgaaaactttggaaaaaaattttagcaagaatgtataactaggattacccattaccagggaagtgcttaaaggagcttgatggagctgaaaaccaaggctctgagaactaggtgaagacatgcagaagcctcaggatgccgatgcgatcaactggaagatagggtatcagcaatggaagatgaaatgaatgaaatgaagccgagaaggaaagtttagagaaaaaaagaataaaaagaaatgagcaaagcctccaagaaatatgggactatgtgaaaagaccaaatctacgtctgattggtgtacctgaaagtgatggggagaatggaaccaagttggaaaacactctgcaggatattatccaggagaacttccgccaatcttagcaaggcaggccaaccgttcagattcaggaaataccagagaacgccacaaagatactccttgagaagagcaactccaagcacacctaattgtcagattcaccaaagttgaaatgaaggaaaaaaatgttaagtgcagccagagagaaaggttcgggtttacccacaaaggggaagcccttcagactaacaacagctgatctctcagcagaaactctacaagccagaagacagagtgggggccaatattcaacattcttaaagaaaagaatttttcaacccagaatttcatatccagcccaaactaagcttcataagcgaaggagaaataaaatactttatagacaagcaaatgctgagagattttatgaggcgccaggcctgcccttaaaagagctcctgaaggaagaagcactaaacatgggaaagggaacaaccagtaaccagccacttgcaaaattcatgcccaaattgtaaagaccattcgagactacggaagaaactggcatcaactaattgagccaaattaccagctaacattcttaattgacaggatccaaattcacacataacaatattaactttaaatattaaatggggctaaatgctcccatttaaagacacagactgggcaaattggataaagagtcaagacccatcagtgtgctgtattcaggaaacccatctcaccgtgcagagacacacataggctcaaaataaaaggatggaggaagatctacccaagcccaatgggaaaacaaaaaaaaaaggcaggggttgcaatccctagtctctgataaaacagactttaacccaacaaagatcaaaagagacaaagaaggccattacataatggtaaagggatcaattcaacaagaagagctaactatcctaaatatatatgcaccccaatacaggagcacccagattcataaagcaagtcctcagtgacctacaaagagacttagactcccacacattaataactgggagacctttaacaccccactgtcaacattagacagatcaacgagacagaaagtcaacaaggatacccaggaattgaactcagctctgcaccaagcggaccttaatagacatctacagaactctccacccccaaatcaacagaatatacattttttttcagcaccacaccacacctattcccaaaattggaccaccatagttggaagtaaagctctcctcagcaaatgtaaaagaacagaaattataaccaaactatctctcagacccacagtgccaatcaaactgaaactcaggattaagaacctcactcaaaaccactcaactaccatggaaactgaacaacctgctcctgaatgactacttgggtacataacgaaatgaaggcagaaataaagatgttctttgaaaccaatgagaaaaaaagacaccaacataccagaatttttgggacgcattcaaagcagtgtgtagagggaaatttataagccctaaatgcccacaagagaaagcaggaaaagatccaaaattgacactctaacatcacaattaaaaaaaactagagaagcaaagagcaaacaacattcaaaagctagcagaaggcaagaaataactaaaatcagagccagaactgaaggagatagagacacaaaaaaaaacccttcaacccttcaaaaaaaatcagtgaatccaggagctggttttttggaaaggatcaacaaaatttcaaagaccgctagccagactaataaagaagaaaagagagaagaatcaaatagacacaataaaaaatgataaaggggatatccaccaccgatctcacagaaatacaaactaccatcagggaatactacaaacacctctacgccaaataaacttgaaaatctagaaggaatggataaattcctcgacacgtatgtgtctctcccaagactaaaccaggaagaagttgaatctttgaatagaccaaataacagggatctgcaattgtggcaataatcaatagctttaccaaccaaaaagagtcccaggaccagatggattccacagccgaatttctaccagaggtacaaggaggagcttgtacccattccttctgaaactattccaattaatagaaaaagagggaatcctccctaactcattttatgaggccagcatcattctgataccaaagccaggcagagacacaatcaaaaaagagaattttagaccaatatccttgatgaacattgatgcaaaaatcctcaataaaatactggcaaaacgaatccagcagcacatcaaaaagcttatccaccatgatcaagtgggcttcatccctggggatgcaaggctggttcaatatacgcaaatcaataaatgtaatccagcatataaacagagccaaagacaaaaaccacatgattatctcaatagatgcagaaaagggctttgacaaaattcaacagcccttcatgctaaaaactatcaataaaataggtattgatgggacatatatttcaaaataataagaagagctatctatgacaaacccacagccaatatcatactgaatgggcaaaaactggaagcattccctttgaaaactggcacaaggacagggatgccctctctcacctcaccactcctattcaacatagtattctgccccatagtgttctgggccaggggcaatcaggcaggagaaggaaataaagggtattcaattaggaaaagaggaagtcaaattgtccctgtttgcagatgacatgattgttgatctagaaaaccccatcgtctcagcccaaaatctccttaagctgataagcaacttcagcaaagtctcaggatacaaaatcaatgcgcaaaaatcacaagcattcctatacaccaataacagacaaacagagaagccaaatcatgactgatgagtgaactcatgagtgaactcccattcacaattgcttcaaagagaataaaatacctaggaatccaacttacaagggacgtgaaggacctcttcaaggagaactacaaactactcactgatcaaggaaataaaagaggattacaaacaaatggaagaacattttcattccatgcttatgggtaggaagaatcagttatcatgaaaatggccatacttgcccaaggtaatttacagattcaatgccatccccatcaagctaccaatgactttcttcacagaattggaaaaaaactactttaaagttcatatggaaccaaaaaaggagcctgcattgccaagtcaatcctaagccaaaagaacagagctggaggcatcacgctatctgacttcaaactgtactacaaggctacagtaaccaaaacagcatggcactggtaccaaaacagcatggtactggtaccaaaacagagatatatagatcaatggaacagaacagagccctcagaaataattccgcatatctacactattctgatcctttggacaaacctttgcttgagaaaaacaagcaatggggaaaaggattccctaatttataaaatggctgctggggaaaactggctagcccatatgtaggaagctgaacctggcatcccttcccttaccccttatacaaaaatcaattcaagatggattaaaaaaaaagatttaaacgttagacctaaaaccataaaaaccctagaagaaaacctaggcattaccattcaggacataggcgtgggcaaggacttcatgtccaaaacaccaaaagccaatggcaacaaaagccaaaattgacaaatgggatctaattaaactcaagagcttctgcacatctgcacagcaaaagaaactaccatcagagtgaacaggcaacctacaaaatgggagaaaattttcgcaacctactcatctgacaaagggctaatatccagaatctacaatgaactcaaacaaatttacaagaaaaaaaaaaaaacaaccccatccaaaaagtggacgaaggcacatgaacagacacttctcaaaagaaggacatttatgcagcccaaaaaacacatgaaaaaaatgctcatccatcattggccatcagagaaatgcaaaatcaaaaccacaaatgagataccatctcacaccagttagaatggcaatcattaaaaaaatcaggaaacaacaggtgctggagaggatgtggagaaataggaacacttttacactgttggtgggactgtaaactagttcaaccattgtggaagtcattgtggcgattcctcagggatctagaactagaaataccagttgacccagtcatcccattactgggtatatacccagaggattatgaatcatgctgctataaagacacatgcacacgtatgtttattgcggcactattcacaatagcaaagacttggaaccaacccaaatgtccaacaatgatagactggattaagaaaatgtggcacatatacaccatggaatactatgcagccataaaaaatgatgagttcatgtcctttgtagggacatggatgaaattggaaaccatcattctcagtaaactatcgcaagaacaaaaaaccaaaccccgcatattctcactcataggtgggaattgaacaatgagatcacatggacacaggaagggggaacatcacactctggggactgttgtggggtggggggagggggggagggatagccactgggagatatacgtaatgctagatgacgagttagtgggtgcagcgcaccagcatggcacatgtatacatatgtaactaacctgcacaatgtgcacatgtaccctaaaacttaaagtataataaaaaaataaataaataaataaaaataaaaaaataaaaacacattataaagggggcaatccagatggccagtaaaccattgtaatagccagaaattggaaacatatattcattgacaacatttaagattataatatagtcatataatagtcctgatataacaatggaaataaattacagctacacacaacataatggataagtcttaaaaagccacatgtacagaatacataccatgtgattctacttctgtgaagtcaagaacagacaaaactgaaatactcatgtaaggatgcacactaaggta

SEQ ID NO: 106373 - DNA, 1540 bp, Homo sapiens
  misc_feature (1)...(1540): n = a,t,c or g
gcttgtgataacatttctacgtcgattcctcaggatttaactatatattcttgaaaacatctcaattttaaatgtttctttcaagatggtgaattaaacagagatagcccttcaacaggtggaactcagcatatgctgagtctgaaatggaaatgatgaagttagagaaccatacaacaatggtaatgatttcagaaacatggtgttgagcagaacaaagcagacacaaaagagtacctatggcatggcatgcatctgtatacgcgaaattccagaataagcaagctaacctatgataagaaagagactggctgggaagactgagagttcactttctggggtgacataatagtgtagatcttggctgggcatggtggttcacgcctgcaatcccaacgctttgggattacacgcatgagccactgtacctggccaaaatctcctaatgttttaagaaagtttacaaatttgtgttgaactgcattcaaaactgtcctgggccacatgcagcccgtcactcatgggtaagacaagctaagtataaagtaattatcttttcttttctttttgttttgagacaaagttttgctctgtcacccaggctagattgcagtggcatgatctcaactcactgcaacctccgcctcccgggttcaagcgattctcctgcctcagcctcccgggtggctgggattacaggcgcctgcacacacgctcggctaatttttgtatttttagtagaaacagggtttcaccatcttggccaggctggtctccaactcctgacctcaggcgatccgccgtcctcggcctcccaaagcgctgggattacaggcgtgaaccaccgtgcccagccaagatctacactattatggcaccccagaaagtgaactctcactcttcccagccagtctctttcttatcataggttagcttgcttattctggaatttcgcgtatacagatgcatgccatgccataggtactcttttgtgtctgctttattctgctcaacaccatgtttctgaaatcattaccattgttgtatggttctctaactccatcatttccatttcagactcagcatatgctgagttcaacctgttgaagggctatctctgtttaattcaccatcttgaaagaaacatttaaaattgagatgttttcaagaatatatagttaaatcctgaggaatcgatgtagaaatgttatcacaagctgtctgaacttactcaggggaagtcttcgtcttcactcacataagagtctaatggaattaatatcaacaatcttagagaaatcccacactattcatgccattttcatgatctccaccttggtaatnnnnnnnnnnnnnnnnnnnnnnnggaaaaaaagccccccttttccccccaggctaaannnnnnnnnnnaaaaccgggttacttgcaccccctgccgggggggaaaaggggacccttttgcccacccctcccactttttttgattttttgggggggcccccctggcggggtgattttttcgggggctggttaaaaagg

SEQ ID NO: 106374 - DNA, 340 bp, Homo sapiens
ccggagtaatccaggtcggtttctatctacttcaagggtatggcttctgcctaataaagaatgttcagctcaaaaaaaaaaaaaaaaaaaaaaaaaaaaaaaaaaaaaaaaaaaaaaacaaatataataaaaatatacaactaacatacgttaaaaaataaaaactaacatcctaataaacacgaacaaatctatttaacaaaaagacgagttattatcacacaacatacactgctagtctaattgatgtgatcttttctacataaattaatacataaagaatcattacacactaaaaaattacttaacatcagttcttcgataagaataattaaataca

SEQ ID NO: 106375 - DNA, 488 bp, Homo sapiens
  misc_feature (1)...(488): n = a,t,c or g
tgggaccntttttgacccttttgaccgcctcgaaanccccggtcgacccacgcgtccgctcctgcctcagcctgccgagtagctgggactacaggttctcaccaccacgcctggctaactttttgtattttgactagagacagggtttcaccacattgctcctgaccttgtgatccgcccgcgtcggcctcccaaagtactgggattacaggcatgagccaccgtgcccggccgaccttctttatgagaaagcatctgctttgtgaatgacagagctattggtgagctgtattgcttccttatgaagacagcattcttgtgtgtcatgttagtcaaaaaaatttcttaatgccaagagtgtatctttggctggcttccaaggccagccatttaaataaaaaaaaaagggtccaagcaaaattggatatttatattctttagcctaaaagggaactccttctcacattttcagtggtacccagtttttg

SEQ ID NO: 106376 - DNA, 405 bp, Homo sapiens
  misc_feature (1)...(405): n = a,t,c or g
cacacgcgtccgcatgctggtatcaatctcccgacctcaggtgatccgtccgcctgagcctataatagtgctgagattacaggcatgagcctcgatttttttttctctatactttttttgagatggattctcactctgttgcccgggctggagagcattggtgcgatctcggctcgctgtaaccttcgacttgtaggttcaagtgattcttctgcatcaacctccaggcacacgccaccatgcctggctaatttttggatttttgtagagacggggctttgcctgttgnnnnnnctnnanattnccattcttggggtatatgactgtcctnccttatccttctctgctctgtgctcctgctttagaaccaatgtttcttttatcatgatctttaaaattcttttt

SEQ ID NO: 106377 - DNA, 425 bp, Homo sapiens
agtgggtttatttgtaacagcccaaaacgtacattttccttcaggtttttgaatgaacatatattttcattcaaaaacctgaaggaaaatgtacgtagtgggtttatttgtaacagcccaaaactagaaatgacccaaatatccttcaacagaagaataattaaactctgtggtacctccacaccatggaatactactcagcaatcaaaatagaaaaactagggacacgtgcacagaatagattgattttgtattagcttcctattgcttctgtaatgaccacaaatacagtggcttaaaacagcacaaatttcttctctgacagttctggaggttgaaattataaaatcaacattttagctaggctaactcccttccagaggcttcagggaagaagctgtttccttcccccttttcagcttcta

SEQ ID NO: 106378 - DNA, 618 bp, Homo sapiens
tgagggagaagagagggagggggagagggctatttttaaaatttttttaaaattgctgaacaggggtacctctgggcagtgtgtcagaataccactttttaaatattttatgatttatttatttttctatttcttgaggttttaactgatgtgtatctgtatgtctatttgtgtatattttgtcatgatcatgtaacagagtctgaaaagtgtcgaagagacagttttcaggaacaacaagcaattattcctactttccaagttattttgatgccatggtggctcatacctataatctgagctacttgggaaggctgaggcaggagatcccccttgaacccaggagtttgagaccagcctgggcaacatagcaagactccatctctacaaaaaaagacaaaatttagctgagcgtggtggcgtgttcctgtagtcccagctacttggggaggctgaggtgagtgggatccccttgagcccagagaggtcaaggttgtgattgagctgttgatccacaccacttgcactttcagcatggggagacagagtgagaccctgtttcagaaaaaataaataaataaaaccaccagcaccacaaacaacaacaaaaaaaaaaaa

SEQ ID NO: 106379 - DNA, 396 bp, Homo sapiens
  misc_feature (1)...(396): n = a,t,c or g
agtctagccttttgtaaacttcatattgcacactaggactataagccattgctagctcattttgaattttaacgtgtaatttttgttttattttctttctgtggggaaacaatgcttgatccaccaatgctctttttaatgttttataactatgtatgtgtatatatataaatatcaaataatatgtatgcacatatgtgtgtgtatatatctatatgtatatacatatatagatatatagagatatatagagaggttttgagacaaaaaaaatacagaacgtgaaacccgagctgaacagcgtgtgctctgattacttgaatctggtctcctcggcacctggttattaagaactgaatatttttccacttgaatttagtgctattataaaattan

SEQ ID NO: 106380 - DNA, 735 bp, Homo sapiens
  misc_feature (1)...(735): n = a,t,c or g
tctgaagtgctgcagagctgtcatatctcactgcagcctggaactcctgggttcaagcaatcctcctgccttagcctcccagagtgcttgggattgcaggcatgtgccaccacaagcaactaattaaaaacctcttttttttttttttttttttaaaaaaacggggtttcgttttgtggcccaggcgggttttaaactccgggcctaaagggaccctcctttttgggcctttggggggcgggaataacccccaggaccggccctcacccggttttttttttaaaacccggacggggaatctcaggaattcaaaaggggggggggagaaattaataaatccttcttgattggacggggggatcttcccaggccggtgaannaaaaaaaaaggggggnnnnnnnannnnnnnannnnnaaannaaaaatttttaaaaaaaaaaaaantanaannnnntnnnnnnnngggggnnnaannnnnnggggggggggggggatttaaaatattccggggggggggccaattttgtgggggagaaagaaattattttttttttttttggggggggtaaaaaaaccggtgggggtgggggggaaaaacactttcttgggggggggcgagatgtcccccacccccacaaaaaagaaccgcggggggaaaaatatttttttgtgtggggggggggaaccccccctctctttgggggggagagaaatccttcttggcgaaaaaaaaa

SEQ ID NO: 106381 - DNA, 482 bp, Homo sapiens
  misc_feature (1)...(482): n = a,t,c or g
aatgataacgctganggccgctgattccgtcacaacgcctncgnccacgcgtncgcagtgaaagagtccatcttatcttaatatgtatgaaatttaaaaatagccatctttgtacttttttgcaagtttctctataagcttgaaatagtcatgtgatacttcgacaaacatcatatgccttgcagtttttctcggtcgtgttctcagggttgagtagtccccttagctacctaactttactttcaatacaaagcacaaaaaagaatatcttcaaataaaagtttgcctgcagaacctggcaaaatgacccattaggagagtttagatgttttaattttatgtgctcccagctactctggagtctgaggtgggaggatcacttgaggcagaggttgcagtaagctgagattacactactgcactccagcccatgtgacagaggaatgagagccagtctcaaaaaaaaaaacaaaaactcccat

SEQ ID NO: 106382 - DNA, 403 bp, Homo sapiens
atgaattgtccgttttgttttctttaaaataaataatctggccggccacagtggttcatgcctgtagttaacagctactcgggaggctgatgcagaaggactccttggggcccaagagttggagactgtagtgcacagtgatcacacctgtgaatagccactgtacttaagccgaggcaacatagcaagaccctgtctctacaaaaaattaaaaaattaggtgggtttggtgacatacacttacagtcctagctgctcaggaggctaaggtgggagtattactgtaacctcaaactccttgagcctaggagttcgaggttacagtgagctatgattgtgccactgcactccagcctgggtgataaagcaagaccagaccctgtttttttttttttataaaaag

SEQ ID NO: 106383 - DNA, 412 bp, Homo sapiens
gcgcggggattcacatgttggccaggattgtcttgatctcttgacctaatgatccacctgccttggccttccaaagggctgagattacaggcgtgagccactgcacccggccacaatgtaacagttttagaaaaagtttagagtggaaaaaaatgacctgtaagccctaaagctatatactttaacaagtatattttgaatgtatttcattcccgtctttttacatgtgaacatatttttatctgtttgtagctatagcatacatactactttggactacttattttattattcctgttatatcttaatttctctttgattcaggccttcatatttgtcttatttatttatgtattgagacaaagtcttgttctgttgcccaagctggagtgcggtgggatgatctctcctg

SEQ ID NO: 106384 - DNA, 495 bp, Homo sapiens
ctgccctttgaggcttgaaggcttgatataccacattaacgatgacaaccccaccaagagcatctctcgaggattctaattggtggccagtgtcgacgtctcaaactcctggcctcgtgtgatccacccgcctagacctcccaaaagtgctgggatttcaggcgtgaggcactgtgcccggccatcattttttttttcttttttttttttttaaattaagcaaaaaagttttaccataaaaaaggcccatgactttttttttaataattttaataaagttttaattttttggacaaaaagcctcattttgttgcccaggttaaagggcaggggcccaatttccattcattgaaactttatttttttgagttcaggggggggcccccccccccggttattttttttaatttttttaccgacggggtttccccatgtgggcccaccttggttttccaaagggctgggattacgggggggagccaccttgcccagcct

SEQ ID NO: 106385 - DNA, 1419 bp, Homo sapiens
ttttttttttttcagtggaaaataacttttattgagaccccaccaactgcaaaatctgttcctggcattaagctccttcttcctttgcaattcggtctttcttcagtggtcccatgaatgctttcttctcctccatggtctggaagcggccatggccaaacttggaggtggtgtcaatgaacttaaggtcaatcttctccagagcccgccgcttcgtctgcaccagcaaggacttgcggagggtgagcacccgcttcttggttcccaccacacagcctttcagcatgacaaagtcattggtcacttcaccatagtggacaaagccacccagagggttgatgctcttgtcagataggtcatagtcagtggaggcattgttcttgatcagcttgccgtccttgataaggtagccctggccaatcttataaatcttcttgttgatctcagtgcggtgaaatggtaagccttttctgccccagcgccgtgccacagagaagggctacacgagcagggatgcccatgcccccaatacagggccacctttgcgcaaggccctcgggtggggtctttgcgggggcagctttcttgggtgtgcccaacagactggttgaccccctttgtagccttttgcccttgggtcacccccgatgaagttcgatcattttattcctgcccaaaacacttgggttacaagtaccttgctgctcaaagcctctcgcggggcccaggtcagctttctcgggcacaggtgcccctcgttccacctgatctcccatcaggtgggccttcttctggcgcagaggaagcaggcgcatctgggtgtgggcaatgacacggatgacttggcagtacttcttcatgctgctgaagtccttctccagctgcttcttgccatcctcatcctgccatttcttgcagtacttggtaaaggccttcttcttagatttatgccaattcttatagaaacgcctcttgcattcatcactgatgtgctcagcaaagacagtcttgaaggtccggaggcctcgaggggtttccacgtagcccacaatgcccacaaccaccatgggtggtgtctctacaatggtcacagcctccaccacctccttcttgttcaccttggatcccggcctgtcgacttcccgcacgatgtgagtcatgccagccttgtatcccaggaaggctgtgaggtggaccaagaagcgggtgctcaccctccgcaagtccttgctggtgcagacgaagcggcgggctctggagaagattgaccttaagttcattgacaccacctccaagtttggccatggccgcttccagaccatggaggagaagaaagcattcatgggaccactgaagaaagaccgaattgcaaaggaagaaggagcttaatgccaggaacagattttgcagttggtgggg

SEQ ID NO: 106386 - DNA, 422 bp, Homo sapiens
ggcacgaggaccaaagggttaaagccaagggtttcttctttgtttgctttaccttaataagcagagtctttaatgctggctgtaagaacaagacaacaggattttcttttcttttctctctcttttttttttttttggggaaacggagtttggcccctttgcccaggggggagggcagggggccattttgggcccattgaaacctcctcctcgggggttaaggcagttttcctacctaaggctcccaagaagtggggactacgggggccccccatgacattttttgtttttttaacaaaaagggggaaaccccccgtctttacaaaaaaaacaaaaataaccggggggggggggccaccccgtaaatttaactggttcggaaggctgagcgaggaaactcccctgaccccaggggccaatgg

SEQ ID NO: 106387 - DNA, 444 bp, Homo sapiens
aacacaccggatatgttttgcatactttttaaccttcgttggcagcagggatagaatcacttttcttcgaaacctttatatacagcaaatagggtaatgacactgttctagatatgccacagggatatttgaatggtactctgggatactagtcctcattttgttgaggtttggtatctatgagcccatgaacctgaatataggagacccatatgattcacctcctagtagattatacaaaatgaggctctgggaaaggatggcaaaaagcttaatagaagtgtctttaaaaaatagtcatttttggctgggcatgttggcccatgcctgtaatcccagaactttgagaggcataggtgggaggattgcttgaacctgggggttttaagactagcttgggcaacatagcaagaccccatctttatttaaaaaaaatttaaaaaa

SEQ ID NO: 106388 - DNA, 441 bp, Homo sapiens
atttgatgtgtcttggtctcattttggtatcaaggtaatactgactggcttcatagaatacatttgtaagtattccctcctcctctgtttttttttttttttttggaaaggattggaaaagtatgggttttatttttttaaaggtggggaaaaatccagcagggagcccttcggttcccaggctttttttgggggaaaatttttggtaataaggccggggggaaaaggggtgggccaaactttcattggttattattaagaaaaaaaaaaaaaggggggggccttttaaaaaatccctgggggggcccaaatttaccggggggggggaaggaaaaacttctccccttatggggggcgaattaaaaccccccgggggatcttggggaagaaacccttctttgggggggggaaattatgggcacaacccccccccagatttag

SEQ ID NO: 106389 - DNA, 825 bp, Homo sapiens
  misc_feature (1)...(825): n = a,t,c or g
tggtggctctttccctgctgccaccaagtcatgcagagacggaggctcaggctcagttgcgttcaagattcggcttcacccgtaacccactgccatggccgaggaaggcattgctgctggaggggtaatggacattaatgctgctttacaagagctgttgaagacagccctcatccacgatggcctagcacatggaattcgcaaagctaccaaagccttagacaagcgccaagcccatctttgtgtgcttgcatccaacggtgatgagactgtgtatgtcaagttggtggaagccctttgtgctgagcaccaaatcaacctaattaaggttgatgacaaaagaaactgggggaatgggtaggtctctgtcaaattgacagagaggggaaaccccgtaaagtggttggttgcagttgtatagtagttaaggactatggcaaggagtctcaggccaagcatgtcatcagagagaacttctaatgcaagaaatgaagaaaatatctttggctcacnnnnnnnnnnnnnngggggggccgttttaaagaacccttgggggggccaaattttacccgggcttgcaaggtaatatttttttccttatggggggccgttttaaaacctacctgggaatttttggaaagaacctttttttttggggggggacatattggcccaacctccctccaaaaatttaaggctttagggaaaataaaaatttttaaggggtatagggggtaaaacaacctccatatcctggctgttggaaagttttgtttcctgggtttgatttataaaaattttttccccgggggcctgtgttttatt

SEQ ID NO: 106390 - DNA, 492 bp, Homo sapiens
  misc_feature (1)...(492): n = a,t,c or g
agagccggnnnccnnnnnccaggtgcctagctacntcggnannncngggnngatcangcgtncgggaatcataaaaagagtaattatagccttgcaccatggtggtacacaactgtggtcccagctacttgagaggctgaggcaggaggctcacttgaggctgtagtgtgctatgatcacacctgtgaatagccacagcagtctagcctgagcaacatatcaagaccccgtctcttaaaaaaaaaaaagaacaggaattatgattacatattttttaaatgaaagtaatatggcaaaaatttgaaaaattagagaaagggataaaaacctaggaaaagataaattaaaaaaaattgtaaaaaataggccaatttccatatagggatgggaaacagacctacacagcgagcagctgagtctcacccagccactaaacagctgacatttccagggctctttatcagccccaaattgatcatataaagctggtgt

SEQ ID NO: 106391 - DNA, 416 bp, Homo sapiens
tttttgtttgtttatgagacagggtgttactatgtttcccatgctggttttgaacttctaggctcaagcaatccttccaccgtggcctcccagagtgctgggattatgccactttgcccagccaaatttttaagttttaattactgaatgagtattactgatatacttgtgtttcaccattaggatttgagttcttgatatagttccaagcatcattttttatataacttacacagatgtctttccttatcagggggaaagagtggaactgaatgtttgagcctgttgtaacattattttaatataataagaaatttttagatttttttcataaaacgtacttattttaaatagttacaagggagcagagtttaaatcttgctatgtgagacttttgtcatgattcttcactagaa

SEQ ID NO: 106392 - DNA, 417 bp, Homo sapiens
cccacgcgtccgcccccttcctcctcccacttcacaccacatcattctgcagcctgcctgggtgctggggcccccagaactacaggaagtgcctagcagaaaaatagctcctacatctctccccagcaccatgccaataagcccctcaaaactgtcacctctcccccaccccctgccatagctgggcttgggggtctgcatctttaatcccagcattttgagaggccgaggcgggaggattgcttgagcccaggaggggcaatatagtgagatcccctctgtacaaaaaaatgtaaaaattagctgggcatggtgatgcatgcctgcaatcccagctactcgggaggccgaggcaggaggaccgcttgaacccaggaggtcaagattggaatgattgtgccacttgcactcagcctg

SEQ ID NO: 106393 - DNA, 435 bp, Homo sapiens
cggacgcgtgggcggacgcgtgggctggtcagagaacaaagtacgatagctgctaggtgagcagtatgacaaagcaccactagggacagttcagaaagaacagtcacctcttttgaaggatcagtggagactttgtaagaatttagtctgaccttgagtaggcaggagacacttggagttaggcattcattctaggtaaaggaaaatatgaaccttataacccatgtcttggctgggcgtagtggtgcatgcctgtagtcctggcttcttgggaggctgaggctgggggtatcacttgagcccaggagttctgaactatagtgcgctatgctgattgggtgtctgcactaagttaggcatcatgtgatgaactcccaggagctgggggccaaccaagtttcctaaggagaagtgaactggttcaggtcggaaact

SEQ ID NO: 106394 - DNA, 431 bp, Homo sapiens
  misc_feature (1)...(431): n = a,t,c or g
agtgttcacctcgcgtgatctgagatcgcccactgagtgcattcaccaccttttaaattttggtcactgtatgtatcagttctaaaatttccattttgttctctatattttaaatttcttgccttatattctattttcctgcaaatgtgtcagcatttgcttgtttgagctttttttttttcaagacagggtctcaactctgttacccaggctggagggcatgggtgccatctcaactatttgcaacctttgcctactggtgcaagcgattattgcccctcacttactcgggaggctgaagcaggagaatcgcttaaatccgggaggcaaaggttgctgtgagccaagatcgccccatttccaccctgggcaacaaaagggaaactccgtctcanaaaaaaaaaaacaaccggggttgttggtcccttttt

SEQ ID NO: 106395 - DNA, 412 bp, Homo sapiens
cccacgcgtccgaggacatcttatgaaaaacagggatatctgcttctaccacctgtattcagcattgtactagaggttcttgccagggcaattagtcaagaaactgaaataaaaagtgtccaaatgggaaaggaagaagtaaaactgtctttagtttgtgtgtgtgtatatttatgcatgagaaaatcctgtggaatccaccaaaacagtggacgccaacctttttgacaccagggactggtttcatgccatttttccacagactgtgggggaggtggggatggttttggggtgattcaagcacgttagatttatcgtgtactttatttttattattatcgtaatataataaaataattaacaactcaccatattgttgaatcactgggagccctgagcttgttttcctgca

SEQ ID NO: 106396 - DNA, 380 bp, Homo sapiens
  misc_feature (1)...(380): n = a,t,c or g
gccctaccttcatcaacatgtctcaggagaatggcatgaacctgggaggcggagcttgcagtgagccgagattgcgccactgcactgcagcccgggtgacaaagcgagactccgtctcanaaaaaaaaaaaaaaaaaaaaaagggggggggggtaccccataaaaccccccctttaaaaaaaaaacccccgggaaagggcccttcgggcattttggctttaaaatagggggggaaaccgggggttggaaaaaccccccctggaatttcccggggttgccttcttgggtttttagcctaaggtttatcccccgggaaaaaaaaaaacctcttaacgcccaaattttttttttttatttattcccctccctccctactttat

SEQ ID NO: 106397 - DNA, 417 bp, Homo sapiens
  misc_feature (1)...(417): n = a,t,c or g
ggcacgagggatcacttgagtctgggaagtagagattacagtgacacgatcacagctcactctaaccttcatctcccgggctctagcgatcttcccacctcagcctactacaggcacactccaccacacccagctaatttttgtatttttagtagacaggatttcgccatgttgcacagactggtctcaaactcctgggcttaagtgatccactcccctcggcctcccaaagagctgggagccactgcatcccgcctaagcatgagctgagcctaagcatgagccactgtacccagactaattttattactattttttctctaattttatttattttggcctacttctgaggatatttcctcagatctatttgcttactcttctggtgggtttaaaatttttctgaacccatttaan

SEQ ID NO: 106398 - DNA, 402 bp, Homo sapiens
ggcacgagaactatttggttgaaagccaaggcaaaattccttcactcctataaataaaatttacaaatccccaaccttgaaggtttatgactgtcaggactttaccagttttgtactaaaaacctatcctaagccaggcatggtggtgcgcacctttagtaccagctactcaagggctgaggcacgaggatcacttgaacccagggattctagacggtcgtgagctatgattaaacctgtgaatagccactgcactccatcctgggcactcccacgacccctgccccaacccctggaaagccattgttgattagaacatccattttgtataaattcttgtcatcattactttttattacagtattctaacagagtggtaaaggtgactagaaataggcacaa

SEQ ID NO: 106399 - DNA, 477 bp, Homo sapiens
tttggtaggcacgacggttgaggtgagcggagatctgacactgcactcctttctgttctacagtatgagaccggtctcaaaggggcaggggaaagcatagattggaaaggaagaaataaaacttttattatttccagacaacttgatggaatatacagtaaatttttaaatgtataaaccattagaattaataagttagtttagcaaggtcactgagtatcaggtgaacacagaaaaataaactgtatttatacctaacagctacaaatagaaaatgaaattgccaaaacaatataatttatgatagcatcaaaaagcatcaaatacttaaaaataagtctaacaaaatgtaactaaatggagggatatactatgtatatgcattggaagactcagtattataaaggtgttggttcttcccaaactgatgtgtgggggggaaaagatttttaacccaaatccaacagggttttgggg

SEQ ID NO: 106400 - DNA, 2059 bp, Homo sapiens
actatcgttcattgaagttgttgatacaaatgttgaacaggagaaaaaccagtagcttgccaacttggcacctcattctctagcttgacagtaatctcttatctagtagtttttagatatggttatttaatcaaatatcactagcttctaattttgttataattcattcatgtatacagacaatgaagaatcatctttcttcattcaacacatttattgggaaccaatcattgtccaaggcaatatgctaggcattgtgtaatagaaagcgattaagcttttacccctgtcctctttggcctgcaaagagcaggtaagattcatgcacagacaaatgtagtaccaggtaaatagtgaggccaaacacaagaggcaggtcaaagggctttggattcagaggatggagaagctctttctaggctggtgaaatatttgcagaatgagtaggctcataagtggaggtgaggtacaggctaagctgctgtaagaaagagtccaaaatgcaaaggatttaccacaatgcagttaatttttctcacaacggtcgaggtaggcaggtggtccaagtccagttaatcagccctcctcaacacaaggcttccccttgtaagctcaggatgaccgctccagttctcatcatctcccaggcagaaaaacgggagaaagagaactagacgtaccacccagtcattttaaggacatagccaggccaggtgcagtgacttcacatctgtaaatccaaggcactttggggaggttcgaggctgggagggatagcttgaagccaggagtttgagaccagcttggataagaaagcaagaccttgtctctacaaaaaatttaaaaattaaccatgtgtggtggtgtgcacctatagtcccagctactcaggaggctgaggtgggaggatcacttgagcacaggagttggaggatacagtgagccatgatcacaccacctcactccagcctgggcaacatagtgagaccccatctctttaaaaaacaaaacaaaaaaacatcaccaggaagttgcttacatgtcttctattcctataacatcggcctgagcttagtcacatggccacacccagcagaaagaactctaggaaatatggtcttatgctaggtaaccccaaacccagctaaaactgttgcttttgaagaagggtgaaacagacaatgtggaggagaattaccagtctgccacaaagagaaagaattctatgtgaggaaaacgctctagaagagggagctgattaattagttatatctcagccgagaggatgttatgagaaacacagatttgggtttaatagaaaaacttagaacccttcaagaaggaatgggcggacttgagagtgtcctccgcttctgaaaatgatcaagaaaaatggtaagaatgtacacctcaagggtggatggtaaaggtcagcctttaagcctcaatggcggtgtggttgtaggtggggtgggggtggaggccccgaagacaggcagactaccacagtagccccgatggaagcagtgagaatgaactggaaggagcggctgtgggagcgacaacgtgatgagaataaacccggcttggctctgccctgtgcacacacaggtgagctgtgtgctcccggatgtgtcagctggtatatgcgtctgtcagaaggcagctggggagcactgttagctcagagactaagaggcagacccaggaagcccttctttgcattggtcagggtttgctgcattttcccaagcccaggaaatggaacccagttcttcttctttctgtgtaaaataataagcatcacaataggctgtgctcatgagaacgcattttgtttccacagaaatgttttttctcactctgtcctgattttgatttctgttaaactcagtaaacacattaccaaattttaaaataaggtgacttgttttccccaactcacagttcaccaaaggtatttcatctgtttgttctgaaaactgcagctgctgtctagatttatgtgtgctctgacaagaaatgttttgtgtaacaataaaaatcatttcctttgatg

SEQ ID NO: 106401 - DNA, 425 bp, Homo sapiens
atcacttcagcctagaaattcgatactatcttggataatataacaaaatccattgaagaaggaagaaggaggaaggaggaagcaggaaagaggaaggaggaaggaagaaaaaggagaaggagatggagacagagatggagatgacaaagatgaagatgaagatgaagaaaagaagaaagatttcaaatcaataacctaggcttccatgttgagaaactagaaaaagaagagcaaattaaatcccaaaacaaatagaaagaagaaaataataaagactagagtgtaaataaatgaaatagagtataggaaaacaatagggaaaaatcaataagaacaaaagttggttcttttaaaagattaacaaaattgataaacctctagctatgcttgatagtggaaggagagactcaaattactaaaattag

SEQ ID NO: 106402 - DNA, 423 bp, Homo sapiens
cggacgcgtgggcttctatttcctttccacccactcttcacaggctattctactttaaaggaagcctttttattttgctgcacacaatctagcaggaatcttttttttttttttaaaaagcggggccaccctaaggaaggcaaaaaaggttggttttggtaaaaggctttttgggaatttattaaccataaaaaaaccggacctttttaaaggggccctattggaaaagtttccccccctgggggaaacctggcttcctccatttaaaagggggaccattcccttctcccctcaaggggccccaaggctcctccggaggacccccccccaaaaaacccccaacgggttttaatttggcatttgggggtttaaggggaagggaaacaaaaagggggcctttttttttggccgggctccttcccc

SEQ ID NO: 106403 - DNA, 2855 bp, Homo sapiens
  misc_feature (1)...(2855): n = a,t,c or g
tttttttttttttctttttacacagaatatatttaattccatcatataagctaggaacaatgttaaccaacagaaaatgtgatcccgagctacatacaatagatcaaatgaagcccacatccatgaaaaaatcatgccaattaaatatactctgcatttccattaatattagtatgctattctttgattttttttgctgataagcagtcaaaacatttaaactcaaaattgacaaatcaactagcttgctttttgtcatttggaagactaccattattcaaatttattatgtaatacactcatccagataatgaaacatctgcgaaaagaagtgtgggaatcacctcatctgtgcataaaatggctattatacatgaatgcagacgtttgaagttagaaaggaatataactcaaatagcaaaaggtcctaattacagagtttacaaataagcagttttattttcaaaagtacatagtaagtccagactgggctattgccaaagaactaatctttagtctacttcaacatgttacatggtattcctgactctacagactatcagcatctgtggaggttagctcctaaaggtcccaaagaacaggaaacatgcaggaataaaggactcctcatgaagagcaggtgggagcgagtgggcaggcctgtatcttctcagcaaagtaaggattgagtatagagagctgtttgtcttaactgggcttccctgaagaatctgagccaaactggaagaaaccagcctcatttccagtgttgagatgttagctgtacagtggctgtacaactgcagagtttatttatagaattagaaataattttttaaaattttaaaaggttttgtgtaatcattaaccagagatgatattcacaaattctggtaaaaatttgactctccaactatcaccatatcaacaggaaacagggccatgccaccagggaggactgtctcagctgccatttagggagttgacccctttgctctctcgagaccagttcctgaaaggagggcctgttttgtacagatgtggccatggagctcatggggcccttgtatcacttataaaaatacatatctttggcaggcgaaacgttcattctgatttcactaattttcatgtatccatttcaaaggcctataacatacatagtaatttagttttctaggtgcataatttgaatctagggtgcttacagctaggagacaagatgaatagagctaattgtcaggcactcctattttaacatggctatttttttctgttagttcacatattaccagcaattagtatattttttgaagcttttgtgaaactatgccctgtgatgctcttccaactcagggataacaatacatatggctgtgtctgagatatacatttttctgaaatgtcaaaggtctacttctcaacattctaatggattcacacattacttattattattactgattcttaacgaccttggtccttcctgcagcagtcttctaagtgactggtctgggagtcccagtttttatgttctccatttggagtttaccctgcccatgttctcactgaacctctggtaataacggcttttagaaatcttgactgaaaaacaaacagggccatggtgctttcaggtgttggaactctttgagcaccaggaactgtgctaagtgtcttacatgtgttctcattcagagatcagagtgaggtacgtactatcatcgccactttaagggatgaagacagaggcttaaagcagtgaagtcacacagccagggactggccaacaaagatctgaacccaggtagataggactccagaactacaatcacccttgaaagaattacaaagcccaactctccactgctctctacttgtaacacaagccataaatctcttaccctcaggggcctaaagccaacaaattaccacaaacttagtggctttaaactaagtttctgtaggtgagaagtgtggcatagcacagcaaatttatatgctcggggtctcaccaggctaaaatcaaggcatcaggtaaggccaagcttctcatctgtgcctcaaggtgctctcttccaagctcactggaaggattcacttccttctcttgatttccacatggcccctctatcttcaagtcagcaatagcaccttgggccttcctttgaatctgactcctgcatcctcttccatttttaagggttcatgtaattacactgggttcccccaggtaatccaggataatatctctattttagaaattttagttacatctgcaaagtcccttttaccacataatgtaaccacattccataggccataacactgggccagggaaggtgatggggaccaaaattctgcctatcaccccctcctgggaacctctcttgtaacatctacagcacccaaggcaaaatgctgtctcccttaggacacttttgcagtactctgtcctctgccaagtgtccaaggcagttattaggcagctgggactgggtctacactcaaaattatnaaattaacaccatgtattttccaccttaagaaatgctggttggctgggcctggtggttcctgccagtaatccccagcactttggaaggcttagacaggcggatcgcctgaggtcaggagtccgagaccagtctggccaacatggtgaaaccccacgtctactaaaaaatacaaaaattagctgggcatggtggcgtgcgcctgtaatcccagctacttgggaggctgaggcaggagaatcgctggaacccgggagggagggttgcagtgagccaagatcgtgccatcgcactccagtctgggtgacaagaatgagactctattaaggaaaaaaaaaa

SEQ ID NO: 106404 - DNA, 417 bp, Homo sapiens
acctgtgtcaggtaatgggactccctgccgagagcaacctaatgatgatattaattaagaccccctgtgtattaagcaaggtaagaaagggagcagaaatacagagcctgtttttggccagatgctcatgcctgtgatcccagcactttaggaggctgaggtgagagggtagcttgaccagcctgggcaacagagggagactctgtctctcctaaaaaaaaaacaaacaaacaaacaaacaaaaaaaaaaaacggttttaaaaaatttttgtagttggacacatgggttcacacctataaatcccacccccttgggaggccgagggggggggttcttttgaggccaggattttgaaaccaccctggcaaacatgggaaaacggggtttttactaaaaaaacaaaaattagctggggg

SEQ ID NO: 106405 - DNA, 389 bp, Homo sapiens
gtttgctgaaagtttgctgaattcacttattaactctagtagtgtgtgtatgtgagtgtgtgtgtgtgtgtgtgtgtgtgtgtgtgtgtctggcctctgtatgcatgtatgtgtgtttgcatctgtaggtattatttgggattttctatgtataggatcacaacatctgcaaattgagatcattttgttttctgttcaaaaatactttttctcatgtttatttttaaaagataatttggccaggtgtagaattgtaggtgacagtttttctttttttaagctctttattgcacacttcttgtgtgtatgagaaatcttatgccatccttatatttagcgctctgtagtgaacatgctctttccctttatattccttttaggatttcctt

SEQ ID NO: 106406 - DNA, 1616 bp, Homo sapiens
  misc_feature (1)...(1616): n = a,t,c or g
attcggcacaggtctgtctcaaaaaaaaaaaaaacaaaaacaaacaaacaaaaaaaacacctcaccatgagtgctacatgtgaatagatattaagtgccatatataattagttctcagaagaagggagaaatgatcataggactgggaattgttttgcaaacgttctaggagatgtgagagaaaatatgtaaccacatcttagtggcccaagaaaatacaggcctgaagggataagattgtgtctctatagagcttcaaagcatacaggtcaattaagaaagcccctctctctccagagccgtttccctagcttttggcacctggatgccacagtcctccattaggctgatgactccaaagatgtaactctagcctcttgcctgagcttcagactcgcgtcccactgcccacaggacacatccacctggatgtgactcacaggtacctccaacccatcatgtggagatactcatcctgttccccctagagctgctcttcctgctgcattctctctctcaattactgggaccaccaagctaggaacctgggagtcatccttgatactttctcttcctccttaatcctgtgtattcagcaagtaactaaaggttggtgttggccgggcatggtggctcacgcctgtaatcccagcactttgggaggccaaggcgggcggatcacctgaggtcaggagttcaagaccagcctggccaccatggtgaaaccccacctctactaaaaattacaaaaattagctgggcgtggtggtgcatgactgtaatctcagctacttgggaggctgaagcaggagaatcgcttgaacccgggaatcagaagctgcagtgagccgggatcacaccactgcactccagcctgggcgacagaatgagactctgtcttaaaaaaaaaaattggggctgataaatattgatgaattctgctctctgctctctatggttgtcaacactgcagagttgaggcctcatatctcacctgcactgctgcaacagcttactggtcccttgctcccagccttctcctcttcagtccatcgtccacacagcactggggaaggggagccacttgaaacaaaagtcaacaactggttgtagttcataaacacagagctgtttgtgtcccctgtatctggaatgccattatgacccactacattttttctttcctacccctcttaaaactcagttcaggtagcagcttccactaggaagccttggctgaccataatcccattcaattccatttcacctcttcgcaggcagtctggggttagggaccctttctctttgctccccaaaataaactggttatctctnnnnnnnnnnnnnnnnnnnnnnnnnnnnnnnnnnnnnnnnnnnnnnnnnnnncctnnnnnnnnnnncctgggggggccaaaaaaaaacgggggggggnnnnnnnnnntttttttctaaaagggggggnnnnnnnnnncacgggggggaattttggaaaaaaaaattattttgggggggggaaaaaatgggccaacccccccaaaaaaaataaacgccttaggggnnnnnnnnnnttttaaaggggaaaagggggaaaaaaaaccccaaaaactggggtgaaa

SEQ ID NO: 106407 - DNA, 2173 bp, Homo sapiens
gaattcccgctgtcgacccatgcgtccggcaaggtcaagtctggatgattactgtccttctgaccaagttgattctattcatgaaaaggtcctcaatatgctacgtgccctctatggaaatctagacctccaagtgtatgcagcagagtctcctccatcttgaaacaaacaaaacattaggctcctgttgtatcttggtttagtaacaggcccttaattaacttatttgtacatgagtcttccagagaacactgttttatattaactttcagttgaaatctttcagatattttgaatctctgaacaaccattgtcagttgtgaatgatggtaaattttttggcatcaagtctcataaccccaactgatagaactgttgcttatctgtcttccttaagtattttttagggttttgtttttttttttgttggtttgtttgtttgtcttcacttttcccccagggtctgttgagctgtatgagattcattcatacttcattaattcattcaactaatatttgttgaacacttacatgtaccagacattattaagtgctgggtatatggtaatgaacaaaatagacaaggcccctgcccttttaggggagacagatgaaaagtaaattccgggttatgagaaatgttttgaaggaaaggacaacaacagacatgtcttagtacttagggtatcatggctttataggaaagtaacattctctatcttttttttttttttaattttataaaaataaagatggggtctcaccatggttacccaggctggtctcaaactcctgggcacaagcaatccacctgccttcgccctcccgaagtgctgggattacagatgtaagtcactacccccagcccagaaactaacattctcaaaagctactaccaaaaaaaccccacaaatttgccaatccatgaaagtatcataggaagtctacctttccaaggaatttggcattgtggccctgctcttgccaaatgctctccagcattgttggtatcaaggtggtctggttgagtaaacttgaccaaacaaaaattaactgttttttgcttttctgtttttgttttgctgatcaaaaaagcccttcagggtcttttgtgcatccaggaggtcattgtagatatcaataatatagtgcctaagtgccactttattgccaagtctagattgatacttttttcagataaaccagctttttatgtaaagagtaagggaaaaagttaaatctttaattctgacctgccataaaataccccaaagatattaaactgtcttcccacccaccccccttcattaactaagacatccttcctggggtccacttctttaatcatgaaacttgattttctcaattggccagtcttctgatctttagtatctctttagttcagtaatttttacctacctacttgatttattttcctttaaaaggggaaatgacatttaaagaaaaacaaacacccatcattcctcagtcccaacacagcagttcttttcactcttgcttgtaactttcaggccttacccacatgtgttcctatagagttgcatgtagctaaaattatagtgtgctgcctaactttgtgctaataacgaaggacacacattatcattgcctcacagtggatggcacctgaccccatttttccaaggattctattttccagtgaatttttgtcaccgagttaatttcccaagtctgatagcatgaatgcttatttgtgctgtgaaaagcagagcagcctgagtcagctttccattttcataggataatatgtgccaaaaaaggtttattttcttggtaaaatcagaattgtagaattgtgctatttttaatttttaaaatttttggttagagcttatagacattacttttatgattattttgcgtgctaaataagttaaagggtatgttttgaactatagcactaattaatgtgtgtgatcctagtatgttgatagctttgattttgtgagtggtttactagtcatttattatgattcccatgaactctgatatgattcattgtggttttaactcaggttgaataaaagcatccatttcttttataggaaggtttgtttaattctcatgttctgtgatcatctctttgagaataaaattcagtccctaatagttgaaaagaaaaaaaaaaaaa

SEQ ID NO: 106408 - DNA, 390 bp, Homo sapiens
cgggagttctgggctttagtgcacaatgctaattgggtgtccacactaaatttggcatcaacatggtgacctcccaggagtgaggaatcaccagtttgcctaaggaggggtgaactggcccagatcagaaatgaagcacttccgtgctggtcagtaaagggatcatgcctgtgaacagccattgcactgcagcctgggcgacaagagggaagctccgtctaaagaaagaaaatggctgggcatgggcactgtaatgcatgcctgtggtcccagctgctcagggggcggaggtgggaggcttgcttgggcctggggggttatgcactccagcctgggtgacagagtgagactccgtctccaaaaaaaaaaaaaaaaaaaaaaaaagggggg

SEQ ID NO: 106409 - DNA, 1761 bp, Homo sapiens
gaaccacgcgtccggctccgctaggtaacttcgctttcccagtattggagaggttaccaccttggtggggcagggcccctgtgcccagggcacacctcattccgagttctatagcaatttgccaagaacaaagtctgcagttagagccaaagctggtggtggccagagggtgctgaagatacaggccagtggggatgggagccatgagccccgaatgtcttctgctctgatgctccccggactaagcctccctggcacactgggagtgaggggcagcctgagcaagtaggggaactcagaccacaggccagcagatttcccagcagtccatcactggccaccgtgtagccagattctgttccgtccacactggggtgaagagtacttggaatgtctgccatcctgtatgatcaccccaccccctgtccatccatcagtagataataagggttggttacaattcataagagaatagttaaaacacttctcctctcatgcctaccatggtgctgtatcaaggggatttgttcacatatgggctcagcaacgcacaagtgaggtcagccatggcactaggtcatttccattttagccaaggtgcctctataggggtcagacatcatgtgcccagacctaaggtcaggaatgtcatatttttctgttaaaatcattttatttctgtgtatcttacctttaaatcattgtggtttactctgagattctgtagtcctaatattgtatcattgtgctgtctgcaaaacaacttgaatctattttgtttgcatcttttgttacatgtaacgcagctgtactttatgttctttgcaactgtttccattatgagaacgctgtgctatttacaaggttacatttttcttggccaggcgaggtggtcatgccctgtaatccccagcactttgggaggccaaggtgggcggatcactttgaggtaaagagtttagaccagccctggctagcatggcgaaacccagtctctactaaaaatacaaaaaattagccgggtgaaattagccgggcgtcggtggtgtgtgcttgtagtcccagctactcgggaggctgaggcaggagaatcgcttgaatccgggaggcagaggtttccattgggccaagttccgggccactgccactcccagcctcggggtcaagagcgaaactctgtctcaaacagaaagaaagaaaggaaggaaggaaggagggaaggaaggaaggaaagagagaaagaaaagaaagaaagaaagaaagaaagaaagaaagaaagaaagaaagaaagaaagaaagaaagaaagaaagagaaagaaatatctttgctatttgtataaaaatggaaattttaacagcttagcctctagagagttactgaacgtggttaccttgggaatgtaaatagaactgcaaattaaaatgactggccacttcaactgggtaagggaaacagctgcaataaagcttcgtgaatatatatctccatcttgaaagttgtgttccacaaaggtttcgacctctttgtccaaaaatgcatattactcatttactcctttcataccttcattgtgaaattaaataacagactcacaagcacctggcactggtggcagacaaaaaggcctcaacattctgcagcaggccagaggaggaacgacgctgctacagtctttattagttccagtgctcaagcccaggtttctaaggtttgacaatattctgtaagttaaaatcatttccacacatacagagtagaat

SEQ ID NO: 106410 - DNA, 388 bp, Homo sapiens
atcctgcttctcttctgcaacatagaaattctacttgagtttctggctttcagacacaagactacaatttcaagttttacctgaatctccagcctgccagcttgccatacaggttttagactttccagttgccagaactcacaaattgcacaagccaattccttaaaatagatctatctatctatctacctacctatcatctatgtatccatctatctatccatccatccatctatccatatctctatctatccattaatccatcctattgggtttctttttctagagaactttgactaacataattgtagtatagaacttttcaaaatttaccataaaaaaaaacagtagttaaccagatcatagttagttataatcaagatacaag

SEQ ID NO: 106411 - DNA, 412 bp, Homo sapiens
  misc_feature (1)...(412): n = a,t,c or g
acaaaaattgctcaggagcatgctaagcctgaggccaagttgtttcttagtatgactttttaaaaaaacatctgctgagtagctacagggccaaagacttggagagcttgtttctgttgcatttgcatatcttctcaggaaattaaagtgtgtcatacatatgtgtgtgtgtgtgtgtgtgtgtgtgtatatgtgtgtgtgtatatatatgtatacttataaaatcttggtgttcttgatctttggtgtgttataagcaatttgtgctggagtgggctggtgctagcttataagcacatattattaaattttcaggaatggtgcactttagttattaactataggcattcttgaaattggctatggtgggagtatttatacccatgtanattggcaaacactacacattttn

SEQ ID NO: 106412 - DNA, 1182 bp, Homo sapiens
tgcagatgctgtacttcagcaataaccttgcctttgctaagaccccctccgagggcttcaggggggcctgccaagggggggccttgttcttgttcccaaactctgacttggaagaactcagcttgtggccgggctggtgagggtgtggggtgcgcccttcccttttgggctgagggagagggggccgggaggggttgtcaagcccacccgggaaactgagccctggagaggggaagcagccagcccaggatgcttcagggccctggcagcaaagaagctggggtggtgtggagggccctactccacaccctagagctgtgatgctgagcaaggtgcctgtggcggaaggaactgcccagtcctccctgggggcaggtagacctgtggggatggctcggtccaagcccaacactgcccgctccagagagcctcagccctgcctccctttccacagaggtggttttatgtggaacgaggtaccttgtctggggaagaagtggagctgggcaggcttgactgctcctggctgaccctgagctctcgcagttggagggaagcagacagacttgactttttgcaagtccgcgtgttgctggagggacacgtgtattggagcccagaagaggggctgtgtggcctgggaataccatgtggaaggttgggcttcaagttaacaggatcagacaccagtcaagcagcctcaggtcatcttgcgactccactgagcagcctttcctgttgtcacatgggttcagagcagctgagcagggaacacgtcctaggcaggtctgacgtgaaacctccccttaccctgaaccgtgtgactctgcaagcagacacctcgaggcaggtgttctaggcaaagggatgggcatgagcgaaggctccagggtccacagagcagggagtgtggagaaggtggaagagctgagctcagaggcagagaagctccttgcagggagcactgggagatggcctggcccgtcccaggctcctggaggccccacctgccgatcccaggcacttgaccttgttcctgtgggtgacagagatgagaaccagggaagctgtgatccactggccaggacaagtcaacatgggtgagggttgggcaaagggcccttccttcctccccaaccctgtggtctggggccatggcctcaggctttgtgtctatcacaa

SEQ ID NO: 106413 - DNA, 442 bp, Homo sapiens
  misc_feature (1)...(442): n = a,t,c or g
catgaggactgcnacntcganacncaagnnnnggacgaggaaagctactaaagaaaagccagaaacagcgtaagaatgccctactcaaatatgattcaaagacgagggtggggactttattccactggacttcagtcccagtgacaaggccactactattgtgaattaatatcaggctaattaaacttgatgttattaaatgttctatccataaaatttttcattcagaattcttgtttttcaaacaacattctggattattatttagctgtcaaagtagctgtgttcttagaaaatacatcagtcagggctgggtacagtggctcatgtctgtaatcctagtgctttgggaggccaagacaggaggatcacatgaggccaggagtttgagaccaactaagtcaacatggtaggaccctgtctctatccccctctacccccg

SEQ ID NO: 106414 - DNA, 1533 bp, Homo sapiens
  misc_feature (1)...(1533): n = a,t,c or g
ggcacgagacaatggaagctgccccgtccaggttcatgttcctcttatttctcctcacgtgtgagctggctgcagaagttgctgcagaagttgagaaatcctcagatggtcctggtgctgcccaggaacccacgtggctcacagatgtcccagctgccatggaattcattgctgccactgaggatttagaaataccagcagtgcccatactccatagcatggtgcaaaaattcccaggcgtgtcatttgggatcagcactgattctgaggttctgacacactacaacatcactgggaacaccatctgcctctttcgcctggtagacaatgaacaactggatttagaggacgaagacattgaaagcattgatgccaccaaattgagccgtttcattgagatcaacagcctccacatggtgacagagtacaaccctgtgactgtgattgggttattcaacagcgtaattcagattcatctcctcctgataaatgaacaaggcctccccagaagtatgaagagaacatgcacagataccagaaggcagccaagctcttccaggggaagattcctcntttattcctggtgggacaattggtatgaaaggaaaatggggaaggtgatatcatttttcaaactaaaggagtctcaactgccagctttggcaatttaccagactctaggatgacgagtgggatacactgcccacagcagaagtttccgtagagcatgtgcaaaacttttgtgatggattcctaagtggaaaattgttgaaagaaaatcgtgaatcagaaggaaagactccaaaggtggaactctgacttctccttggaactacatatggccaagtatctactttatgcaaagtaaaaaggcacaactcaaatctcagagacactaaacaacaggatcactaggcctgccaaccacacacacacgcacgtgcacacacgcacgcacgcgtgacacacacacgcgcacacacacacacacacacacagagcttcatttcctgtcttaaaatctcgttttctcttcttccttcttttaaatttcatatcctcactccctatccaatttccttcttatcgtgcattcatactctgtaagcccatctgtaacacaacctagatcaaggctttaagagactcactgtgatgcctctatgaaagagaggcattcctagagaaagattgttccaatttgtcatttaatatcaagtttgtatactgcacatgacttacacacaacatagttcctgctcttttaaggttacctaagggttgaaactctaccttctttcataagcacatgtccgtctctgactcaggatcaaaaaccaaaggatggttttaaacacctttgtgaaattgtctttttgccagaagttaaaggctgtctccaagtccctgaactcagcagaaatagaccatgtgaaaactccatgcttggttagcatctccaactccctatgtaaatcaacaacctgcataataaataaaaggcaatcatgttataggagaaaaaaaaaaaaa

SEQ ID NO: 106415 - DNA, 408 bp, Homo sapiens
ctggggttgtggctggggaaggacggggcacttgggggaatgcagtgggtacagggatgtcggaggatgctcagtggctgtgcaggggcctcaccagcgtcgtgggtgggggacgctgtctttcacggccccagggaggcctctcatgtctcagccttgaaccctaattgggggggctcccagtgtcagtgtggggaggctgagggcgctggtcagagccctcccatgaccatgggctccggctcataggtgtgtgtgtgttggggggtggtgtccggaggtggtgtggggcggacatggtctcccagacgggctccccggagctgagggcagggtgggccctgcgggccgtggctcccagtgtcatttccctgcggcagaacctcctgccctgcacctgtcctgttg

SEQ ID NO: 106416 - DNA, 487 bp, Homo sapiens
  misc_feature (1)...(487): n = a,t,c or g
nttagtagccccttggnngnntcgnnatagatgactattagtccagtgcggtggaattcattgatatagtattaatgcactgtgaatttatttatttattttgagatggaatcttgctctgtcgtgcagactggtgtgcagtggtgcgatctcagctcactgcaacctctgatatggtttagctgtgtccccacccaaatctcatcttgaattcctatgtgttgtgggagggacctggtggaaggtccatgaatgatgggggcaatcaattctttcctgtgctgttcttatgatagtaaataagtctcacaagatctgaccttttttttttttttttttttttttttttcccaaaaaaaatttttttttttccccccaggttgggggaaaggggggaattttgggttaattgaaccttttgcttccggggttaagggaattttcttgtttaaccctcccggtaagtgggaattgcacttccctcccc

SEQ ID NO: 106417 - DNA, 675 bp, Homo sapiens
  misc_feature (1)...(675): n = a,t,c or g
aaaaaattttaaaaagaaaagaaaaatagttttaggacccaaggctgaacaatgttttacagttcctaatgagataatactgctgcagggcttgccaaattgtataaaaagttaatccctttccaagtttttccttggctctgatttcatgagcagctgtaaatgtctttcttccaaagctctcttcacttcctgagtgtgttatctctttgacaaatttcagtgaactctttttcctgtctttacaattctagaaaaatgtgtagatgattaattaggaggtatctgtcagcacatccctctgaaaccattctgagcttcagctcaagcttcgtgttgcttgaaaaatgaaatgtacagctgatctgagtttgttagaaaaagatacataaattaaacttgaagaaaatagatgacaggaaagaataatgctaagagcagaagtcaatgaaatagaaaacaaaatagagaacattaataaaactggaagnnnnnnnnnngaaaaatattataaaattgataaccccctaacaagatcgataaggaggaaggtgaacataaattaccagtatcagaaatgaaaaagggagtgtcactacaaatcctactgaaatcaaaaggacagtaaaggaatacattatgaaaaactttatgccaataaatttaacaacttaa

SEQ ID NO: 106418 - DNA, 410 bp, Homo sapiens
tatatcagtagtttattcctttttattgcaatatattattccatcatatggatataccatagtttattcatcatttgatgaacatttaagttgtttctactttttggacattacgaataaagctgccatcaacattaatgtacatgggtctttatgtggacatatgttttcatttctcttaaatataggggtggaattgctgggtcatatggtaactatgtttaacattttgggaaagtgtccatggatcacttttataaaaataaaaaaagttataagaatgaaagcagaggcctcttggcctcactagactagttctcaagccttcttaagtctaatttgccaagcctaatttgccacttcacccgaaaaggatgtttaaagaggccactgatttaaaagctctgtgt

SEQ ID NO: 106419 - DNA, 842 bp, Homo sapiens
ggtagaggaggctttgaccgccgcggccccggtggctggtgggaaatggagttccaaatgagaaaatagaattccccacttctctttcccacaggtgccagggaaacggagtcatcgacccaagaaggtcgtgggagatgaggtcccagggtaaacagcgggtcccgccactatgtcaccctttcctgccgcctccccggatgaactgcatgcagggcggccggctccgtggcaggcagaggcaggaagaggcgcggagcccgctcgtggcgaagaggggagtgcggcgggaggggagggcagaggcaggcggccggtcgcgtggggcctgggccgccccaggagggcctctggctggattcttagcagatggaagccgtgcatttgcttgaggcaggggcctgacgtgtttggattgaggttgcaggaggggcccctggctgcttcagggagaataatttggaggcgagcggggaggtgagaggaagctgtgcggtgcaggatggcgtggctgtggaggtggagaacgttgggccacgctaggagtcttgaaagaggagccaaaaggacttgctgagagccgccgcagctggtgaatgacggtgccatgactgaggtggtcgaaagggagtatttaaggggaaatcaggcattccgttttgaccaaattaagctggagatgcctgtggaacattccagccaggctgcatcacgtcacactgaccttcagcattgcccacagtccatcttcccccaggacctgaggattttgcgtccggctccctcctcgcccaggacccccaagctcccagcacgcttctgatttttttttgtaggttttt

SEQ ID NO: 106420 - DNA, 1229 bp, Homo sapiens
  misc_feature (1)...(1229): n = a,t,c or g
ggccagtgctcattttctgcctatgttgtacatactttaaattgtgtaaattaaaagtcaaagcaaagagtctatttttaaagaaacttccaataatctaaacatatacttcttatgattatgaatcatcctgcaaagctgaatgaagaattttaccaaaaatacaatgaattaatcatatatttgagagtcacagagataggttcgactatattttgactgttgagtagaggcaccgtttaggtagtattgcttctgaacatggtgctttttatacttgaaatatatttttgctttattttttattgatataattatatttgcactaatggctttctgaagaaaatattatagatgacattttttgtatatatatttattaagcttgggaacctggtcgcccagtgttttctctggacaaatgtgaaactggataaagtatggataaagtcttgagttcctcagggtaactgtgttgatgtctcccgtcctcttcagtaaggcttgaatatgattttactcatcattgattctgcatagtgtacccagcaagacttagaaggacactgaacctgtcagagattttaagaggcacattttagtcactttgaatatggtagtggtgggcgcggtgactgaagcctgtaatctcagcacttcgggaggccaaggcaagcagatcacgagatcaggagtttgaggttacagtgagctgatcgcaccactgcactgcagcctggatgacagagtgagactttcttgggnnnnnnnnnnnntgacagtgaagcagacttttagaatccgagatgtcattgcaaaattattggtataaaattcagctgcaaagggaaaaaattgaaatggcccacacgttgatatcctggggcaggttatacccttcatgttagcaaaaacaaagccacgtcgctgtgttaaaagggacaggctgggccggctgcagctgtagtggaagtgagggacacagggaaggaatggggagcagcaatttggggacagtagactgggagtcactttctgacttcaaaaaaggtcaagtacttatttaaaaactatcttggtttttctgttccagacttaggcttcattttggatccatttttaaggtccccagtttgttccaaaattttccaagttgaattttgtcttcaggtttttcaggaaaccaaaattttacagggangggaagccaaaagccctgttcantagtt

SEQ ID NO: 106421 - DNA, 456 bp, Homo sapiens
taacttttggtagagacaaggtatcactatgttgcccaggctggtttaggactcctgagctcaagtgatccgcccgccactgcctcccaagtgctaggattacaggcgtgagccaccatgcccggcctgttcatgttttaataggtcagaaataaagtcatgaaaaggaatttctctgtgacagttcgcaaagaattctaccaatttaaaataaaataatctaggataaactctggccaattcaaagctaaaagaaaaaaacatttttacttaaagtttcttaaagcctctcaacggcacagggactagctgaaccagaaggtacttcattttctaatagataatgtacacgaagctcactcttggttcagttcatttggcgtggcttccacctgaacgcaagggcaggtcacgcccatgtaaaataagagtgtcgtacagacgccctcgccccac

SEQ ID NO: 106422 - DNA, 689 bp, Homo sapiens
  misc_feature (1)...(689): n = a,t,c or g
cgggtgagaactgctaagtgatgacaggtggagccccagcaggggccactctattgaatggcatggcccagaccctcggagggccaggcaacaggctagcaaggcccacagggagggagcagaatggagagggcatctcagatgcgcttaaggagcggcgggggcggggcatggggggtgtcacaactaatgtggccactgcttcattctctgggcaaaataatattaaatggattaaagaatctaaaaccagtgggaaaactgtctgatttctggatggcaaaggctttctaaactcaaaagtgataggacaagctacagaggaaaataagtacatagatttgatttctccaaaatacagaaatgctgctgggcacagtgatgtgcagttatagtcccagctacttgggaggccaaggcaggaggattacttgagcccaggagtttgaggctgcaatgaactatgatcacaccactgcactccagcctcggcgacagagcaagaccttgtttctcaaaaataaataaatagaaggaaataaatgtaaaaatgctgcaaattaaaaacctccaaagaaggggaaataattgccaacaaatgggggaatttgatgttgaaatattttacctttaaaaaccttattccaaccaatnaaggaggagttgcgnccccttccagccngccatgg

SEQ ID NO: 106423 - DNA, 1129 bp, Homo sapiens
  misc_feature (1)...(1129): n = a,t,c or g
gtcgacccacgcgtccgcccacgcgtccgaagaattgctggaggagggaagtgaggggcggctggcgggggactgctgggctggtgcagagggagtcaaggatccctaagagagaggcaggggtgttcagctctcccacctctgctggatgaacttgcagagcctccttggtgacccagccggtgcagagactctgctcaggacaacacccttgcctgggacccccacatctctggccccagcagcagcccttgggggggtccctttatcttcctccactcctacccaggcttcctcagcaggagatgaggcaggacatttccactccctttctggaaggttcagaaggttaatgagagctaagcacgtaagtccatttagggggatgaacttctgggaagagaggaacctgggtctgggctgacgtccaagggcgggctgggtgacggtccctctgatcacggagcctgtccacccactgcccagggccctgcctcgacccctctgaccagccactgagccccagagggatctccatgaatgtcagagacattgactggaggccttatctccagtgggagaccccttctcttcccactgtgggccggttccagcctgggctgtccaggaagtgacctctcagggcctgggaagggtgtggccagtggttcttggttgttctcaactcatctgccttgggtctaaggctggggtgaatggaagggcccacctggaccctggagggacaccaggctcatactaaaatcccaaaaagtgaaaagctttccccaggcccaagcagagaaactggaccttgaagctacatctctggacttagtcctcaaagtaggagacatttgcctctaagctgttctctcccaccccacctttctgtgagccgccggttccctgttgtccacatcaagctgtgtgctgggcactgggtgcaggaatagcttgaccacagtctctatcctgggggtaaaggggtgaccagcccacagagggatggactgcaaacagacagtcccaaagtgccatgagagaagctctcagggcctgggcgtgatggttcatgcctggaatcccagcaatttggnaggccgaggtgggtggttcatttgaggtc

SEQ ID NO: 106424 - DNA, 1883 bp, Homo sapiens
  misc_feature (1)...(1883): n = a,t,c or g
tttcgtgtagctgccgccggccttggccgcggccgggcgggcggatatgtggcttaaatggcgcaggcgtcggggcctagaggctgaagggctggtcgtcctaaaaactcgtggacgtcgcgcacggttacccggacgcaggcccgcccctctggggaaccgcgagctcctcgcagctgggtggggaccgtcctcgcagtggcggcctccaccctgccttctcgcttagccaaggcttctggaaggctcgcaaagtgtctgttgttggaagaagccgggccctgactggcgcgacggattctcccagccgctcagcagagcgtctaatatgctttttgtctaatgatgttagataaaaagcaaatttggagcagttttcttattcgagttcaaaatggttcataaagcagcgaagacaactcaaaacatcagtaacacatttggcccaggaactgctaacaaacatacagtgcagtggtggcttaagaagttttgcaaggaagagagccttgaagatgaggaacgtgatatgggccatgggaaagttgacaacgacccaatttgagagccatcattgaactacatgaaaaattacagaagaactcagcgttgactattctacggtcattagggtcgttcagcattcgaagcaaattggaaaggtgaaaaagcttgataagtgggtgcctcatgagctgagcggaaatcaaaactatcgttttgaagtgtagtcttcttttatgctacgcaacaacaacccatttctcaatcggattgtgacatgtaatgaaaagtgaattttatacaacaaccagctcagtggttgggaccaagagggcagctccaaagccagttcccaaagccaaacttggcacccaaaaaaaaaaggtccttggtccactggttcccgtgggtctgcttgcccccattctggatcccacttacagttttctgaatcctggggtgaaaccattacatctgagaagttatgctcaggcaaattgggtaagatgcacggaaagctgcaatacttgctgcctgcattggtcaacagaaaggggccaatttcttctccacgacaacaccctgactgcgtgttcgnacaaccagtgcttcaaaagttgaaggaattggggctacaaagttttgcctcatccaccatattcacctgacctttcgccaagtgactaccacttctgctagcatcttgacaactttttgcagggaaaacacttcagcatggtgcagaaaatgctttccaagagttcgtcaaatcctgaagcacggatttttatgctacaggaataaacaaacattttctcattggcaaaaatgtgttgattgtaatggttcctgttttgattaatagaatatgttttagcgtagttacaatgatttaaaattcgcagtctggaaatttaatttttgcatcaacctaatatttctatggtaaatccttgcaaacatggaaacaatgcatttggcccagtgctttgtggttgtgtactctttttctttgtttttttaatagatggcattggccgggcatggtggctcatgcctgtaatcccagcattttgggagggtgaggtggggtgggatcacctgagggtcaggagttcaagaccccagccctgacctaacatggtaaaacccccatctctactaaaaatacaaaaaaaattagctaggcggggtggcgggcatctaattccagctacttcatgaggctgcgacaggagaatcatttgaactcgggaggcagaggttgcagtgagccgagatcacaccattgcactccagcctgggcgacagagagagactgtctcaaaaaaaaaaaaagttggggtctcgctgtgttgaccaggctggtctcgaactcc

SEQ ID NO: 106425 - DNA, 328 bp, Homo sapiens
  misc_feature (1)...(328): n = a,t,c or g
ngcncgaggagagagagagagagagagagagagagagagagagagagagagagagagagagagagagagagagagagagagagagagagagagagagagagagagagagagagagagagagagagagagagagagagagagagcgtgcgcgtgtgtgagaaaaaagcacgcgctataaatctccccccccacggataccccctttgcgccggggcgggtgtagagaaaacacccccacgcacgcgcgctctctttttttttatataaaaagtgcactgggggtgagagagccccctctcccgtgtgtgtgggcggaaagtttacttgg

SEQ ID NO: 106426 - DNA, 363 bp, Homo sapiens
ggcacgagtatttaagtggctgagatgggaggattgtttgagccagggaggtcgaggctgcagtgaagcatgatcatatcactacactccagcctgggcaacagagcaagatcctgcctcaaataaataaatgagtaaataaatatcttgcgctctcataaaacatacttgtacattgctaataataatgctccatgtagcgtaagtatggttaaaaggttatataaacctatgcttcagtaattttgggtttctcatgaaagactatggctagagagtttttgttgtatatgtaggtttatgatgtagcaaagaatggagactcagatccagattacttagatgtgaatcctaactttgcca

SEQ ID NO: 106427 - DNA, 367 bp, Homo sapiens
ggcacgagctggagaactgttactcagtctgtgatctgcatttatagtgtagtttgggtagcaagaataatatgcatgaagcaattagccagttgttatggattgaatgtgtccccccagcaaattcccatgttgaagccttgactcccagtttgatagcatttgaagatggggcctttgggaggtaattagggctagatggggtcatgagggtgggcccttgtagggcattagggccctcgtaagaagagaaatcaagccgagtgcagtggctcacgcctgtaatcccagcactttggaggctgaggcgggcggatcacctgaggtcaggagtttgagaccagcctggccaacatggtgaaaccct

SEQ ID NO: 106428 - DNA, 371 bp, Homo sapiens
  misc_feature (1)...(371): n = a,t,c or g
ggcacgaggagaaatattaacaaccaaggaatcccatgacatcgttttttttttttttttccggaaaaaaagtttaattttgttccccaggcggaagggaaaggggggaacctgggttaatggaaacctccatttccggggtaaaagaaattttccggcctaaccctccggggaagggggaacaacccccgggggcggccaggccgggtaaattggaatatttcaagaaaaaagggggtttacccatataacccgggggggtctaaaaccccggatttatgaacccccccgcctaaccctccaaaagggggggaataaatggggggacccatgggcttggacccaaattttaaaaaattagggtttttttn

SEQ ID NO: 106429 - DNA, 363 bp, Homo sapiens
ggcacgagaaaatgaaaaacagatgttcactcaaaaacctgtacaaagctgttcacagcagcattattcctaatagttaaaaagtggaaacatcttaaaccaccatgagttgatgaataaacaaaatgtggtataaccatatagtggaatattatctggccataaaaagttgaagtactgacgcaggctagaaaggatgaaacttgagaacaatattctaagaagcagatagaaaataccacactttgttattccatatagaggaagtgcccagaacaagtacatcaatatatagagaaggtagattagtggttgtcagagagcgcaagaaggggggaattggagagtgtctgcccacaggtt

SEQ ID NO: 106430 - DNA, 858 bp, Homo sapiens
gcggtggacttcagatactcagtgaggtgttgcggtttgtttttttaatgatgaaaagttacacattttttggagagaaaagtcttagctgaaggtaaatcaagggaaggatgaaatttatttttaatattactactatatgaattatctttttttaaacttgtagataaaagtgttccagtaatcagaaaatcctcaagaaaattgacttcattatttggaaggaaaattagtattttttttaatattatatggaccatctgattatattttatttattcatctatttatggtatgtatgtataattctatattacactgtcaaatataaaatattgttatatgagtagaaatcacttaaattttttttgtgtttgtgaatttgaaacagtgtaagaaatcacttttaagaaaacatttttagaattcctttgttttttttttttttctttttgaaaacagggtcctcactcctgttgcccccaggctggagtggcactggcgtgatcctcggcctcactgcacccttcctgccctacccgagttcaagcgattccttgtgccttcagccctcctgagtagctgggactataggcctgtacccgtcatgccctggctaaatttttgtatttttgtagagacagggtttcacccatgttgcccagtctgttctcaaactcgtgagcttaaagctacttcgcccacctgggatgtcccaaagtgctaggattccatggggtgagtcatcatgcttgggccacatttttagtattctaataaacagttggtcatcagaactttaaaatggtagcctacagaaacatacaattttgaatttaacgagagtttcagtaaata

SEQ ID NO: 106431 - DNA, 378 bp, Homo sapiens
  misc_feature (1)...(378): n = a,t,c or g
ggcacgagcattcatggtcaaggtttgacggtgcagctgtccttaactttgaggcaaaaagctgcaactcctgttagaaacattgacacatctttgagaattctctaggacactcattcccttaatttcagcagagaaaaagctgcctccaccatatctaaaagtgttgactggctttgtgtgttgcaacagatattttcttttcaggttcatctcatggatgcaggtttttttagttgttattggtggtggtttacattttaaaaaaattgtgggctgggtgtggtggctcatgcgtgcaatcctagcactttgggaggccaaggcgggtggatcttgtgaggtcgggagttcgagaccagccaggtcaacatggcn

SEQ ID NO: 106432 - DNA, 481 bp, Homo sapiens
actgaagcaagattaattaaacatcttttttttttcttgagtcttactctgtagcccaggctggtgcagtggtgtgatcctggctcactgcagcctcaacctcctggccccaagcaatcctcccacctcaggatgagtagccgtcactacaggcagcaccaccatgcccgactaatttttgtatttttttgtagagatgggattttgctctattgcccaggtcggtcaaaaatcattttcagttcctgtatcagggaactttttaaaaaaattagtgattttttcctccttaccatgttaattttctgcaactcaaacaaaggctgaagtatccttttagattctactaagcttgcacatttgcccaaaaaaagtgtgggtggagctgtttatagtcattccaggttcctctccaggtttgctggtcatttgacaacctaagcaaccatgtttttactagttgtaggtgtgtagctgcagg

SEQ ID NO: 106433 - DNA, 368 bp, Homo sapiens
  misc_feature (1)...(368): n = a,t,c or g
gtgagccaagatcacaccactgcactctagcctgggcgacagtgagactccacctcanaaaaaaaaaaaaaaaaaaaaaaaggggggggggggcccttttttggggggggaaaacccgggtaaaaaaaaaaagggggcaaccaaatttgggcgggcaaggtttgggcctttcccggggttttttttttttgggaaaagggggaaaacccctttgaattttcttaaaaagaaaattttaaaaccccggcgtttttaaaactgccccccccaaaaaagggggggggaaatttttttttttccaaaaaaaaggcccataggggctttggttttttaaaaagggcaacataaattgaagggggctaattggc

SEQ ID NO: 106434 - DNA, 409 bp, Homo sapiens
tttgttcaacgattaaaggcctacgcgatctgatttaagaccggagtaatccaggtcgggttctatctacttaaaattcctccctgaacgaaaggacaagagaaataaggtctactttacaaagcgcctttccccgtaaatgatatcatctcaacttaatattatacccacacccacccaagaacagggtttgaaaaaaaaaaataatgaaatgctctgaaacctaagatacatttttttttttccggggggggcctgaaaggcattgtgtgggggaacacattattagacatcggactacacaaaactttttttttttggaggggacttttactatgccctatgaatatgagcggaaaatgccctttttgggggggggggtgactgtgccccccatctccaggtaaag

SEQ ID NO: 106435 - DNA, 474 bp, Homo sapiens
  misc_feature (1)...(474): n = a,t,c or g
gggcnnttctgaaacctcagtattcgctgcgaaacngcnnnggaattcccgggcggacgcgtgggcttgaacagatgtttcaccaaaaaagttgtacagaagtttaataagnnnnnnnnnnnnnnnnnnnnnnnnnnnnnnnnnnnnnnnnnnnnnnnnnnnnnnnnnnnnnnnnnnnnnnnnnnnnnnnnnnnnnnnncaaaagactaacaacaccaaatgctggcaaggatggggggcaacaggaactctcattcatttctagggggaattcacaagggtacaatcacattggaagatagtttggaaattcttataatactgaacatactctnnnnnnnnnnnnnnnnnnnnnnnnnnnnnnnnnnnnnnnnnnnnnngttaaaaacttatgtctacacaaagcttgcacatggatgtttatagcagctttactcctacttgccaaaacttggaagcaaccatgatgttctt

SEQ ID NO: 106436 - DNA, 416 bp, Homo sapiens
gcctctcaaagtgctgggattagtgagccgggtgggtgagccaccacaacccaacctaattttattgatatttttaaagaaacggctttggcttcaattttccttttttttttttttttttttaaggaaggggccacttttgtcccccaggggggggggcagggggggaatctaatttggttgaaacctcccctttcagggttaagcctccaacctaaccccccggagaagggggacctatgggccccccccccctgggccagttaatttttgtttttttggaaaaaaggaaaacttttgcccttgttccccaggggggtcccaaattccggggttaacccaatttgcttgtttaaccctctaaaagggcggggataaagggggggaccccccttgccgggccgggttggaatttt

SEQ ID NO: 106437 - DNA, 398 bp, Homo sapiens
  misc_feature (1)...(398): n = a,t,c or g
aaagagaaaatctcaagaaaaattttgaaaataagtatcaaaatttatagcattgaattttatattagaaaataaaaaggaattaaagtagaaatctaagctttggcattaagaaacaaacattaaaaataaacaaaacccaaataagcagaagtaatgaaataatatgagtatgaaacaataaaattcaatgcacacacacacacacaaaatcagaaaatcaataaaatgaaaacctagtttttggaaaatgtcaataaaaatgacaagcctttcagcagactgaccaagaaaataaagaaaatatgaatttttcaatactgggaacaacattaaagcttcataaacacccnnnnnnnnnnnnnnnnnnnnnnnnnnnnnnnnnnnnnnnnnncctt

SEQ ID NO: 106438 - DNA, 247 bp, Homo sapiens
ttttcatgcctattttattggaaaacccaacccatgatctgtagcccaggctggagggcaggggcatgatcatagcttactactgccttgaactcctgggctcaagcaatcctcccacctcagcctcccaaaatgttgggattacaggcatgagccaccatgcccaactgataattttgattgggagggggctactgccatttaactgggtcaagaccaaagacgctactaaatgtcgacgcggccg

SEQ ID NO: 106439 - DNA, 357 bp, Homo sapiens
  misc_feature (1)...(357): n = a,t,c or g
ctttgttgtccaggttggagtgcagtggctattcacaggtgagatcatagcacacttcagttgaactcctaggctcaagtgatcctcccacttcagcctctcaagtagttgagactataggcatgggctaccatatctgactagaagtagttttattttaaacccatcaagtcctgagtccttcatgttttctctaaattctacttaaaaattgaatatacttctttagttcatctctctcacattttctcaaaggcagatactgggccagatagcacttcctacattcttctcagaaatgttcttaggcagatccctgatatggngaaatatcctctcaattttccttgttagggg

SEQ ID NO: 106440 - DNA, 354 bp, Homo sapiens
aagatctcttatgcccatttacagttaatccctgttcccaactttagcctcaggcagcaactagtctacttactatctccatagtttgccatttttggacatttcttataaatggaatcatacaacatgtggtcttttgtgtctggcttcttttacttagcataatattcttgaggttcatccatgttgcagcatgtatcagtatttcattcctttttattgccaaatcatattccagtgtatagatgtaccacatttcgtctatatctgttcatcagctgatggacgtttgggttgtttctactttatggctattagaaataatgctcccataaaatatctgcatgcaagtct

SEQ ID NO: 106441 - DNA, 363 bp, Homo sapiens
atccttaactttttttgtaaagatgaagtctcaccatgttgcccaggctggtctcaaacttctgggctcaagcaatccttccacctcaccctcccaaagtgctgggattacaggcgcgtgccactgcacatggtctacgctttctgtaataagagacctccaaggaaatctggctgcaatgtttaaggttccatgagttcttttaagatgaggactgagactgctatagtggtctatgtcatactcccccatagtgctgggcatctaacaagctcaagtgaactgaactgaaacatttggaaactatagtctcagtgaatagatgcttggaaaaacaagatttatagtagattcaaagatgga

SEQ ID NO: 106442 - DNA, 453 bp, Homo sapiens
  misc_feature (1)...(453): n = a,t,c or g
cgccagcgcggtgggttttagttcagtagtgacatctctaaccacgantacgccaagcttggcacgaggagcacagtgaaagtccaaggcaatgacatctcccacaagcttcagatttccaaagtgaggaaaaaggatgaaggcttatatgagtgcagggtgactgatgccaactacggggagcttcaggaacacaaggcccaggcctatctgaaagtcaatgccaacagccatgcccgcagaatgcaggccttcgaagcctcgcccatgtggctgcaggatatgaagccccgcaagaacgtctccgcagccatccccagcagcatccatggctctgccaaccaacgaacgcactccacctccagccctcaagtggtagccaaaatccccaaacaaagtccacaatcagcaaagagcaaatcgcctgtaaaatctacggagcggacagcaaag

SEQ ID NO: 106443 - DNA, 367 bp, Homo sapiens
ggccatccccaaccttgctgagctttcatcagacctgccatgccttcacaacctcttaccttccccaacataagccaacaaccgaagccatgtcgcagaagatatatatgtaaatgtatgcacacatgtgtatgtgtgtgagtatatatgtacacacacatatgcatatactttatgtatatatttgctttggtatatatgctttaaatatatatatttatatatgcatatatacctgtagttctcaaaaatatcaccagtagcccaaatttgcctttatttcaggagtaattaagaagattgtaattcttaaagaagagctaccaaatttcactccctggcggcagtctcagggcgcactaaaggt

SEQ ID NO: 106444 - DNA, 493 bp, Homo sapiens
  misc_feature (1)...(493): n = a,t,c or g
ggtgctattgtgttagtcaaatagtcttgatctttattttttaaagtgcttaatattttattttccaagagagatatgttaaaatctaacactgtgatttttggggtcaattntccctttttttttttttttttttttgaaaccggttttcctttttgccctaagggggagggcaggggggcaaatttaacccaaatttttcggggccaagggaacccccccccccgcccccccggggggggggaaaaagggccccccccccccccccggggtttttgttttttttttggaaaaagggggttcccccattttgcccaggggggttttaaaccccggggctccaaaaggggtttatacccaaaggggggggattaaaagtgggaaccagggggccacacctctttctttttttttaaaggtttggttttaaattttggaaggggggttttacaaaaaacccgcccctagaattttttatttttctttgggaggg

SEQ ID NO: 106445 - DNA, 406 bp, Homo sapiens
gggtaaaactcattttctattttcatcatatgcttctcagattctcactagtttgatagcacacgcatatacatcttttactgaaataatactttctaacgtaatgagcacttacattaatagcctaagcaccacccaacacacatccattcctctcagaagctccccagtccctgagcctagaggctcggcctccctcagctccaagtaattcctcctcaaggcaccagtgtggagggcatcgcagacgcatccgccccaggactggagctcacactgcagccctccatggggagctccccctcagatctgacccttttctgattctctggcccatccgccccaggactggagctcacactgcagccctccgtggggagctccccctcagatctgacccttttct

SEQ ID NO: 106446 - DNA, 854 bp, Homo sapiens
gggggatgcggaagcgcaggggcaggtgcgccgccctcggcccgcgcaggcggtgggcccgtctggggcaaggcgcccggaagcgcctggttggttcagaaaatcggaccgcagcgggagggcgggcaccggcgcgtggtctcagtggccccaggcgaaccctgatgagcagcagccgcaagtggcttactaaaggagccactttctacgtttgtctggaatttacgtgaattaagctggcgggcgggcggccaggcctgtagtctcagcacttcgggaggctcagcacttcgggaggctgtggcgggcggatcacctgagcctgggagttggagaccagcctgcgcaacgtagcaagaccctatctctaaaacagattcattaatacttagccaggcgcggtggctgaggtcccagctactcggcaggcccaggctggcctgagccagaccgctctggactgttttaattttttcagccttaatacctgccagaattttttttttactatgtatctttgtccttacgtatataaattttatgtacaattgagattatcctgtatttgcttttcccccctcacttttatatggggacttttctcatgttaggctgaatactaacattttggaaactgtcggcctgaaaacgagcggagacacagtttctctaagtagagagtttatttgggccacacttgagcacaaattcaaggcgccctgaatgtgtactccgattagcagttaacagtggattttaaaggcaaaaaagggggccagggagtggactaataggaacttgtttgtgaggaattctcactggtttacagaaataacattgattagtgactgact

SEQ ID NO: 106447 - DNA, 442 bp, Homo sapiens
cttaaatgcgagctgtaagttacttccttccaaagagtaaagtacaaaatatgggggagagaagggtaactttacattagagaaagctgataagcacttcagccaggtgattgaggtcaacgtcaacagtcgtaagttatgttggcggtatgcacccttgatatgatgaaaatgacactttatttctgtagtcttcctccccaaaactcataacccatgtccaattataagaaaaacactagacaaatacccatggaggggcattctacaatatacctgaccaggattcctcaaaactgtcaaggccatcaaaaacaataaaagtctgagaaacagagccaacaggagtctaaaaagaaatgatgactaaatataatatgggatcccgggtaggatcctcagacggaagaagggcattaggcaaaaactcaagagatttgaa

SEQ ID NO: 106448 - DNA, 417 bp, Homo sapiens
cccacgcgtccgagaaagtatattaaaatttaataacatattatgacattaaataactgcttgtgagatgatatttggaattcttaacattttactttttttttttttttttttttttttaaaaggggggggggttttttttccccccggttgaaaaggctggggaaaaatttcttttttttggaccctcccccccccgggtaaagggatttttccccctccccctttaaagagggggggttttaaaaacccccccccccccgcttgttttttttttttttttttaaaaaaaaaagggtttccctttgggggcgggggggttttgaacctccggccctggggaaaccccccccctttattctccagaggtgtggtttttttatggggggacgcctggccccacaccttttttttttt

SEQ ID NO: 106449 - DNA, 360 bp, Homo sapiens
tctgcctcatcctccctagtagccgggtgtagtagtgcacacctgtaatcccagctactagggaggatgaggcagaagaattgcttgaacctgggaggtgcgaggcggaggaggagccgagatcgtgccactgtactccagcctaggtgagtgagactcgtctcaaaaacaaacaaaaagcagtgcatgttggctagtttgttaatcaatattagttagttattagctctgaatagatgccaggtaatatgctaggcactgatgacatactcatgacgcagagctggtcccaatgctagaatgatctttgttcctgagatccaggttgctgctgccactagagggcagccgaagctcatt

SEQ ID NO: 106450 - DNA, 373 bp, Homo sapiens
  misc_feature (1)...(373): n = a,t,c or g
gggacanaggcnnacctaaanaangaaggggccacggcnaaggaaagggcagacaagacaaaacagggaaacaagggaaacaaagaaagggaaacaagaaacgacaacacgaacggaagagaaggnatccgcagggcatccgctaaagaaagaccttttgtttaggcctagctctccaacatatattaaaaggagataagggccgggtgtggcagtgcacccttacaggcctagctactgagaaggctgagttgagagaatcactgaagcctgggagtttgaagctgcagtgagctatgagcatgccactgaactccagcctgggcaacagaacaagaccctggcttttaaaaaaagaaaaaaaaagaaagag

SEQ ID NO: 106451 - DNA, 1399 bp, Homo sapiens
ttttttttttttcaaggatcaacctgtttaattgttcatattttattcctgtatcagtagattaagaaagtaaaattttcccaagcactgatttatagatcatgtttataagcagcatacaaaaagttaagtttcataaacaataacattcagtgatctacttaaatccaattgtaatccttactttaaactaagggcaataataatttaatacatagagtaaatacacacaaaacctgtgtattcagaactacaaacatggtttccatagccacgtatggttttagtcaaggacacatttccacaatgaacaagtacttacaaatatgttaataaaacactaacccaaatgcttaccctgccatcagctttttaaacaatgccattcctgctactgaaagcatttatttttagaagcttgaatctgctctgggaaaacgggttctcctaaaacttaacaggatgttataaatccgaaaagattttaaatcaaaaagccttccaacacagcattattcatgtgaaacttgctttctatttatttttttgagacggagtctcgctctgtcgcccaggctggagtgcagtggtgccatcttggctcactgcaacctctgcctcccaggttcaagtgattctcctgcctcaacctctcgagtagccggtgtgcaccatcacagccacctgagtagctgggactacagttgtgcgccaccatgcctggctaatttttttgtatttttttaagtagagacggggtttcactatgttagccaggatggtctcgaacatcttgacctcaggtgatctgtccatctcggcctcccaaagtgctgggattacaggcgtgagccaccgcgcccagcccacacctggctaatttttgtatttttagtagaaacagggtttcatcatgttggccaggttggtctcaatcttttttttttgagacggagtctcgctctgtcgcccaggctggagtgcggtggcgccatctcggctcactgcaagctctcctcttgagtaaactcttaatggctacactattttcctggctaaaacactgcagctggaatcagaagtctgaaagttgaggcccagccctgccacttgtagctacttggcattggccaagcgaagccatgtctccaaggctgtatttcccccaaccttctttcaaatagtgacttccaggattgtgaaggccaaattaaatgtgaaaatataatgaagtaactctaaaattaatagttactagttatcaaagtagcatcctggcctccagcatggcttcccctgactttccccaccccttggaaccctgctgaattttttatttatttatttatcctgaggcaggagaattgcttgaaccccggaggcagaggttacagtgagc

SEQ ID NO: 106452 - DNA, 3130 bp, Homo sapiens
ttttttttttttaaagggtatgtgaacggaaacacatttattacaaaaaaaaaaaaaaccccaaaacgaaaaacaaattcacattgtattgagctacaatatggcagcagattaaaaaaaaatatttttacacagtttaaggtaactcctaacagaacatagccttgttgccacgagacaggacacaggattccaagtactcagtagcggcgagtgaagcgggcatcgctgggcctgctcccccggctctggcctccaaacccgccctgcatgccaccgtgtgggatggggtggccccgggaggccccgcctggggcaaagctgccgcgccctgacattcctcctcggttcatcatgtggccaggcccggagtgaccggacatgcttctctcgccacctttgccaccttcttgtgatcccctgtccatcattggcccccgttcggccgtgcccttgcccatgaccgggtcatcctcatcttcgagccatgtgtccccccagtcacgtcctgcccctggggggaaggagggcagcccccggccctccgctcaatcgtcattgtcagagctcatagccccacccaagctatcgcagggagtcctggcctgtgcggctctgggtcatctatggcgttctaggtaatgctgtccttctcgtataatcccatcattgaccttgaaccttctctcctgttccaccgagtggtcggggtagcggccgcggtccctgtggtcaaagtcgtggaagcgctcctggcggttaaagtcagaatggtagcgctcatccagggcggcccgctatggcttccggccaataggcatcatctcgccggtccaggtcgtagggccgccgcaccgcgggccgccgctcctgctcatagcgcagttcctgctggcgcctcagctcctcgcgcctcacggtgggatgcgctcctgctcgcgcctgcgctcgtgctccacgtgcatgcgttcgcgctccagccgttcccgctccatgcgcttcccgctcaagccgctggcgctgggaaggccagcctctctcgggcaatctccagccgctcacgctcctcgcgctcccactggcgcctgcatggcgttgttcgcgttcactgcgttcactcaccctgctatgggactcctgagtctcttgacttccgaggctccttgaccttatcaaaggacacgacggaccgcttctctctgctggctgatattgcgatccctggcttttggaaagctctctctttggacccggacgtttttacactaatcacaggcaccccttttggatttatccatttactacagtccgtttcggtcccctcgacttccttgactttgtggctcgagatcgctctgaggggccagcgcttctgatcattcttgtaccttactcttttctacactttcgtcgtcacacctcttagcatcatctgttctgtcacatttatcattccctcttaaggtttgtagatctgtcactgttgctcgacttctcctttttcccgtcactgcctctttttggcagaggttttctttaccacaggttcatttttggctttctccacggagatcatctttccgtggagctccgtcttgtgcaggtggttaatgcattttgtggcctcttctgctgtggacatcgtgacaaaaccgtaaacagcgaagctcccaggactccgggcatttgtccacaaccttggcgccccacccacccttccccatatttgcctgaaaagattccttcaaatctgtagctctggttgtagaagagagtcccactaaccccagaaatttcctacccacaactgctgcgacccttttcctctttggaaagcctttttgtatccgagtcatcttcgggagaactcattttctgaatcagcgccctcactggttgaggactctttaggagccggagggacttcattacaaagcgtcaaaatcaaacttcctcccgtcttctttgctatctctggcttctgggcttggggcttccgtgggtgcttctgcgagctcctcgctagaggcctccgcgagctcggaggccgcaacctactctgctcaactgccggctctagccctacaggctcacagtccgtcctctcgccatcgcctggctgctccgcgggctcccttttcactaccgctaacaggctgtctgccttgctcgactgagcgtgtgcttgttgactcgctggccaaatcttaaatcaccctcttcccggatgggcgctgtcaaataggtcctcttcctccgcaagctttctgtctggccccacgctacttgtgtcctgtgcaaatggctgctccagctcggaactttcttaatttactggctcagatcttcaagtttccctccaaaatgtcgagtattttctcattttctgggctccagggatggctcttcaatttcctgtaatatagtgaagtcagatgatgaagtatctaaattgtttatagtttctttgtcctctatagcatgttccctgaagctgctccggaagcttctttcatttccccctcggactagctctctactatccgacagggactcctggaggttatcagcatcaatcgtcttcgacacaatctgcaacgcttccatttatcaatctctgcttcatccaacacactgatatccatgatgtcgatgtcctgcaagttctccagactggtctcaacatcctcctgtccatccccagagttttcctccagcccgttatcttccacaccctcttcttctggtttgcgccctttgctagacctctttgatgttttcttgtttccctcggaggtaatttcaatttcgtcaggattaccaccttcatcttcaattgccttcttcagccgctccatcaaaacgctcttgttgccgctcgagtccacattccgtttcctcagctccgcccgcagatcgatcactcgcaggtcgctgaggcgccgcgtcccggtctctgacgaggcggagctcagagccgccgcgcccgccgctccagaatcacctaggcctgacagagtctccgccattccagggaccctggctccgccgcccactttccacagaaccgggccggttttatcaggctcctagcacaaaatggcgccgcctgcgagggaaccgcacgaaa

SEQ ID NO: 106453 - DNA, 457 bp, Homo sapiens
  misc_feature (1)...(457): n = a,t,c or g
aatacatttggggagcggctcggaaggggatgggtcatcggggggcttaggaagagggaattcaaatacgtcccgcttctcctcttcttcctgggcgcgaggggataacgtcccacgccctcctcctccagcggtctgcagttggatttccgaaggcgacgtgcagaaccccgggctaggagaggcgggagcagggtcctccacccctggggatggtggagaattgagatactgccgggtcttcttggtgcctgagggcgaggtatcggtggtgatgatgatgacctccgtacccttggccttgcaggcgtccagcagtgtggcaagggtctcgcggtccccgcggtccagggcgtggacaagagccgaggcgcccgcgtgatctcggactgaggggtccgcgccgtgngcaaggagcagcgaggccaccgcggcgcccccaccctcggcgcaagcg

SEQ ID NO: 106454 - DNA, 388 bp, Homo sapiens
atagatttgtttgcattttctgaaagtttatataaatggaatcccacagtatgtgccctctctctccttttctggtctggcttctttcactcagcaaagctacttcgagagtcattcaggctgttgtgtacatcaaagtttccttcttttttactgctgagtaagagtccatggatatatacaatttctttatccatttcccattagtggacatttgggttgcttccagtaggtatatgtttaattttttaagaagctgccaaactgtttgccaaagtggttgtatcattttacattcccagctgcagtgtatgaaagctccagttctcccccatcctcttcaacacttggtgatggcagtctttttcactttggtcattttaatgag

SEQ ID NO: 106455 - DNA, 404 bp, Homo sapiens
cccacgcgtccgcccacgcgtacgcactctgttgcacaggctggagtgcagaggcgtgatcatggcttactgcagccttgacctcctgggactcaggtgatccttccactttagccccccaagtagcagggactacaggcacgcaccacagtgcctagctgatttttggggggttttttgtttgcttttgttttttttattgctttttgtttttggtaaagatggagatcctccatgccatacaggatactttcactttaaacaaccacaatgatgcttcttcagtctctcaccaaagaatctatatgatgtatggggggggatatggccgcgcctgctatttttataaaattcattgtgtggaaaagaagcaaaacatgaattcggatctagatagcaagatg

SEQ ID NO: 106456 - DNA, 973 bp, Homo sapiens
ttttttttttttcagtaggagcaataggattttaataaacagaacccatcccaaagccatgactacgacagttgtacttgcaccaaaacagcatagaaaaccagagtgtggtgggaggacccgaagccggttgggggaggatgtgagtaggggcctggagggtgcagggtcattaatctgcggggagaacattgtgctttagcccagggaggggaggggtggggcaaatgcaccgaggtccccactttttcctgctgccctcggcaccctggggatgcaggcatctgggcacatctgccccttattgctgcccaccagcgttaaacgcccccgatcccaacactagcaccacaggtggttccggggcagggagaggcaggaatgggaaaattgcttagagaaagattccactagaatccagtgaattgtgctcagttctctttacttcctacaaccgagtacatgggtcacagggtggagggtgcaacaggacatggaacatgcccctccgtgccccccaacacacacctgcacacaggatggtggtgtctgcagcatcacaggtcatgcagggcatggggaaggggaggttcacacacacatagatgcccacagcgggtaccagacggagaacacccctgaatatacatagctgtacatggggaacccccaggtccccaccccaaccctctcccctgtcttgctgtcccccgcaggggaactatattgctttgagagagccaccccaggggctgcctctgccaggcaccctcccctcccacccacccccattttggcacatctgcaagacacacagcagcgagagtaggcaccctcccttcccaggcttctgtggcctggagctggagaagggggtaggagacttcatcatccatcctcccctaacccttcccaaacccctgccaaacccactcaagccagaacccacccccaccccccaaacacacataca

SEQ ID NO: 106457 - DNA, 1137 bp, Homo sapiens
ttttttttttttgagacagagtctcactgtgtcacccaggctggagtgcagtggcgtagtctcggctcactgcaagctccgcctcccgggttcacgccgttctcctgcctcagcctctctgagaagctgggactacaggcgcccgccaccacgcccggctaatttttttgtatttttagtagagacggggtttcactgtggtctcgatctcctgacctcgtgatccgcccgccttggcctcccaaagtgctgggattacaagcgtgagccaccgcacccggcctgaaaatattttctaaaaagataaaaaatatacataacgatgaaaaataatacaaatttaaaaaccaatacagtataacaactatttacatagtgcttacattgtattaggtgttattaagccaatcttaggagatgattttagcaagtatacagggaggatgtgcctaggttatatgcaaatactgtgccattttatatcaggaacttgagcatctgcagatattggtatcggagggcggtcctgggaaccaagcatccacggatactgaggggtgacatttcatgaagtgtagatcattgtattcagagattgtaaatgaaaaaaatatagaaactatttagttttggtagattttttttctgacaatgtgaccagactgaatttcctcataaagaaaaaatggcgtgccttgtgtctgtgtttctcttttctctgaaaggattaatagatctgaagctttgggccactcagagccttccttgatgctgccagagtcttcttatttagattttctgtcttaaaccattggaagcaaaaccgttttcccatgacattctggccttggacagattctgttgtcctcgacgcgtctctttataaagtggtaaaagcctgaaattcagggcagctctccatgaggtgctgaagggctcttttcataagaagctaaggcactgctgcctgccccaggtgtcccgctcctctcagagtcctccccctaccaggtagtgggtagctccatttcagaatgttaacctccagtgaagagctaatgactggttagaagattgacaaactaaccaaaattttacacacttccggttatgtgtgtgaaaggttataaaaaggaa

SEQ ID NO: 106458 - DNA, 893 bp, Homo sapiens
ctcctgctctcagccctgcccctgctgttggagtcccctctgcccccaggccctgagctttctggtgtctgcagcagtgccagcctgcctcctcctagctgtcctcaggaagcttcttccatgccaccaggccactttccatgtatccagccactgcacccagcaaatctgtacttattataaacaataacttcccgtttccttttgtcctgacacccaccattctactttctgtctctatgatcctgactaccctatctcatataagtggaatcattcagatatttgtccttttgtgactggcttattacactgagtataatgttctcacagttcatccatgttatagcatgtgacagaatttcttaaggctaatattccattgtatgcatgtgacacatttcgctttcagtagtcatttttaagctctataaaataaaatgaagaaaggacagttcacaatctagtaatagccattgcctacctgtttttcttggactcttgttggaaatggtaggatcatgatttcagtcctaacagagatgcttgtggagggacagcctgtccctttcttggggcagcctcagtggggagaccatagcactcctaatggagtcacagatagtattccaaaaggagtttggtcctggagttgagtagttacacgcagggagggacctcacaacagccagactgtttctcctgctcacttaaccctgtgttgccccacacagtattcgggaagagcgcttccgactgacgagcgagagcaccaaccagaaggtgctatggtggggcattgattagactggattctcatcctcactgggaactggcagaagcgtcacctcaagagcttttttttaggccaaaaacctggtggaatggccccc

SEQ ID NO: 106459 - DNA, 559 bp, Homo sapiens
  misc_feature (1)...(559): n = a,t,c or g
naatcgatcactgtccgaaggggctagattacatattgnttttctctggctaatttcatattttctctttagttgtggttttcattagtttgattatgatgtgtataggtgttgatttattcatatttttagagtggttgtctaaacttcttgagtcagtaaatttatttttttgtcaagtttgaggagttttctctcactatttctttaaatattatttttctgccttattctctaaactgttcttctaggactccagttgtctatatgtctgatgttctgaaattgtcccacatgtcccaaatactttgttcattttcttttggttttttttttttctaacctccaaatgggacgacttcatttcatctatccggaagttaattctttcctcagccatctccagttggttattaatcaaatcgtgggaatttttatcacagaaattttgattttccaggtataaaatttccatttttttggccttcctatttctctcttaaaaagcccctgttttttaaatcaaaatagaaataatttttcctcagagacatacttg

SEQ ID NO: 106460 - DNA, 477 bp, Homo sapiens
ccccccccccccccccgcttgacccccatcgcgatccatgtccatgtggtggaattcaagatatgaagaacgagaaagttttagctcagcaagaaatgtaacaatttaaagtttttattctgtcatgattctaaaagcctctagaattgtcatctgccttttcacctaattatacgcatatatacatactctttatatatatacactttgtatatattatgcatattatgtaaatatatacatatgtacacatatataatattcatataattatacacgtatacacatactatatagtatatgcgagtatatattatagcatgtattcagcatggtataatataaaggtctctaaagacaggcagacctatgaaaacatagctcttatcacctattactgagtgacctggggtactatgcttaacttctctaaaacttaaattatcatgtccagtccactggaaaataatagggcaa

SEQ ID NO: 106461 - DNA, 714 bp, Homo sapiens
atcgaccatagatgatcattagtccagtgcggtggaattcgtgaaccatgatagcaccactgcagtccagcctgggcgacagagtgagaccccatctcgaaaacaaaaatgtataattcagtggtttttagtctctttgcagatacatgcaaccatcaccacaatttgcacattttctaagcctcatatactgatgtgatattttggtgttttgtgactggcttcatttacttagcatattgttttcatgtttcattcatgtcgcatgtatgagtattcattcctttatttggctgaataatattccattatagtttgtgccacattttgtttatccattcatccattgatggacatgtggattgtttccaccttctggataatatgaactgatacagtttggatattttgtcccctccaaatctcatgaaataggatcaccagtgttggagaatggggcctgttaggaagtgtttggatcataggaacatctgtcataaatggcttggtgccatccttgtaatgagtgagttcttgctctatattagttcacttgaaagctggttgttgggaactcctgccctatctgttctgccctctctcgtcatgtgacatgcctgctccttgttcaccttctgtcatgagtaaaagcttcctaaggccttcccaggagccaagcagatgtcagtaccatgcttgtacagcctgcagaac

SEQ ID NO: 106462 - DNA, 465 bp, Homo sapiens
  misc_feature (1)...(465): n = a,t,c or g
ggcgcgccggnngntattgatagcctccctaggccgngncgnggaattcgccaaaaatttttttttgtagaaacaaggtcttgctatgttgcccaggatggtcttgaactcctggcctcaagtgatgctcccagcctttccataagtgttggaattataggcctgagccactttccctgacctaggattgctgctgtttaaatgcagaaaagtagaaaaggaccctttgaggagacagcatgagcaagacacatgaaagaagagagtacacaaaacttgccctaatacccatgaaagctcctataataggggagccctgagaatgggaatggctgtgtctttcaggtgtgccttaaaaaaaatttattgctaagggagatggagatgggaagtaatcagtgtttgtatcaaagggtggttagatttgtgttttagaaagttagaaagagaaaaaaatttttcttt

SEQ ID NO: 106463 - DNA, 412 bp, Homo sapiens
cagctactcagaaggctgaagcaggagaactgcttgaaccctggaggccaaggttgcagtgagccaagattgtgccattgaactcctgggtgacagaggtagactctgtctcgaaaaaaaaaaaaaaaaaaaaaaaaaaaaaaattttgggggaaaaaaaaaatccaaaaaccttttttttttaaaaagaaaaaaaatggggacttaaaattggaaaacgggtggggccttaaaaacttttttttttttttttaaaaaaaattcccaaaaattttttttttttcctaaaaattgaagggaaaagaattttttatttaaaaccattttttttatttccctttatttttttaaaaaaaaaaaaaggggggaaaagccttttaagtttaattaaaaaatttggccttaaaaagga

SEQ ID NO: 106464 - DNA, 473 bp, Homo sapiens
  misc_feature (1)...(473): n = a,t,c or g
agatgtcagcggcccnnnccctgagaaactgggatcntcggaagngcgnggaattcgagcctcgaacccgcgtccctgggggctgggccccaggcgcacggggctggaggcaggccttcgtgccttcgtgccttcgtgccttcccgcggtggccaggcctctgctgcagccgctggttgcaggcagagttttggggacctggcccttctcccactgggctcccccatcctgggccaaggccagaactttagtgctaggggaagatgaaatgtgcagttttgaaatgttgggtttccagagagagtcatgctggaggagaaggaagtaggccagaagtccagggctgcactgtggtgtgagggtggctttgtctaagatgcctgctcagcatgatcaccagagggtgtgggcaggtccctggagccgggggcgggggggggggggaaaaaaccggcccgttggcccttattggg

SEQ ID NO: 106465 - DNA, 507 bp, Homo sapiens
  misc_feature (1)...(507): n = a,t,c or g
ggggttnaggggcatcgaaccatagcagtaatgagaccttccgcagngtcgnggaacccgaaactatttggtgcacttcctcttattttagagctcccaaagtgtagctccagaatcgttaagggatatgctcagtgtcacagccagcctgtggatctcagtcccaacactcacccttgtgctactgagtcagctctaagaaaatctgccaaaagtaggccgagggctggttttttgttttgttttgtttgtttgatacagggtcttcactctgttgcccaggctggagtatatcatggctcactgcaaccttgacttgggctcaagcgatccgctcaagtagctggaactactctcaagtagctctcaagagcctctcgagtggctggaactacaggcgtgcaccaccacagctggttaatttttaaaattttttgtagagacggtggaggaggttctcactgtgactcagtgtgtgcccgacagcagagcccacaccactccagt

SEQ ID NO: 106466 - DNA, 1597 bp, Homo sapiens
ggagacaaggaaatcaagacccagcttgggggaaaagccacccctggagtcacctgtgtgttcagtggcacccccagcctgggtcccctcctcccaatagaggctgagccggagccagggcagtatgaggtggggctgccactgcccatacctcctcctcccttctttctttgaagcctaatggccccccaaaagatgggcaggacaagctgtagcccatctgagaggttgggaaactgaggcccaaaaacaggaagtgactcacacaagacccctcagcaagggtgcaaagggggaagaactaggggctccattgttcttcaggcgacaggagaccgttgctccagtgcatgtctgctgggacaaggattcctggcctcgaagccctgggctgcacagccctactgggctccacccctataaaccagtgacttctctgggcctgggtctgggggagagggttgccagggagactcagctctccttgggggctggcccagctgactgagggtacacaggattgggtctagaccttgatgcctgggtggagggcccttgtaaggggccatagcctcttcaggaccaactggagggagagttaggaaacaccagctcctgcctggggcagtgagggaatgggagcagctgtgggcgcctcatttcaggcaagtcctccccaaaccttcagatgcagtgagacctggccttcctgttgtgcttttcagactttgttttcagaatgcttttatctcgagtgtgcccttcggccctcacaagagcccctggggagtaggtggtggcctgtgccgtcatccccatttcaaagcagggagctgaggtcctgggaggggaaagtgcttgcctgaggtcccactgtgttagtgggtgggcaggactggaactcggttctccaacagcccagagctcactcttttacacccagaggtggagcaggtggcttagggggtggttatgtacttcacaagccaattcccttcagccaggagctcctgggtgcatttccgtgtcagaaacagtaccgagtcccaccccctctggaggcacagttgttgcgtcaggcaaggtcacctgcatttatttattgagcagcagtgctgtgtcaggcccagggaccgagcccctctccctgttcccctatggtgtctccgaggccctctgggagggccccacatttgggagcagcacctcagagtggacagaaagcattagcgtccacgagctcacccgacgccgagcctgtgaggtgggctgatggtgcccgtctaacccagcgcttcagggaggtcagaatggagccgaacccagggctgtgagcatcacctctggagccctttcactttatgactgcttcctggacgggtggtgggaaggcaggagcctgggtccttaggctgggggcctctctccatccacccacctttccctcattccctctcttggagcagcagccgcccaggcctttagggagggagggtttctggggcccttgggttggagtggggtcgcgttgcattgtgttcatgaccatgtagctcatgttgaaattaaagtttttggcttttctaaaaaaaaaaaa

SEQ ID NO: 106467 - DNA, 3113 bp, Homo sapiens
ttttttttttttagttagtcttctctaattttattacagggcatgttggggacaggggagggaagtgttagaggagtgacagggcagcccggggccctctcccaccctgagcctcgaggcctggtgggggacatgaactgcagaggcatcagataaggcctcagaaagcccaggccatcattttccatgggaccaggctggctcaatgtggaactggccctcccagagcagcaggagaagggctcgcatgggctgcccccgtcacctgtgcctgacaggatgggggggaggcagagagagagcatcagacgccctccctccccataaggggcatgggggatggggacacttcctcccaggacacagggagcctggctgagctggctggctcatgccccatctggtctggaggtcagaggggagtgagacactctggtttgaaaggccttcctttccactttcgggaaaacaggcagggagagaggtgagggtgccatgccaaaaaacacccccaaatccagatgcagactttggagccacatgtgggtttgaatctcaactctacctgagtgaccctgggcaagtcacttcacttccctgagactcaagtttcatcaagatgggaacaatgagcatctgcctcacaggcttgtcgtgaggattaagtgagaaggtgcgtgtaatattagcgatgactggatgatacaaaattaagaacaaggctgggcacgattgctcacgcctgtaatcccagcactttgggaggctgaggcaggtggatcacctgaggtcaggagttccagatcagcctgaccaatatggtgaaacccccatcttctacttaaaattccaaaaattagcccagcccatggtggcatgcacctgtaatccccagctactcgggaggctgaggcaagagaattgcttgaaccctgggaggtggaggttgcagtgagcccaagatcgagccatagcactccagccctgggtgacagagcaagactccgtctcaaaacaaaacaaaacaaaacaaaattgagaacaagactggctggggaaggctcagtggacacgcccaaggcaagtggggtaactcggcacataaaaggcccaggagtggctgcggagatgtctgccttccttcttcctctgccaggctgagtgagccccgggtggggtgagggggtggggagagaactgggggctggggagggggcagcctgacttcaagaccttaatgaaagagagtacaggcatgcctgtgggcctttgtggaggatgggacagtgctggggatcatggatcctctgaggactgtttttaaaaagctgaagaggagaaggaagagaggactacttcttcccataggtgcagctgcaaagacatcaagctggacccatcgaggatttcggattcagccatcatggggctgctgccggggaagccactgcccctcctttctcctcagcactggggttataaaaaaatacctacaaaccatgagaaagtttgtgtaaaaacacttttctgcacatataaaaagagagactggccgtggtcagtggctcaggacgtggaccaaagtcccaagagtggccaaggggagtccgtggtgccccagaggtagaagagctagcctggggcacccctggttgccgggacagtgccggctctggagaaggctgtggtgtttggctgggttgtgcttctgtggatgcaaggtctgaggggcaagaggggcggcaggagcgctggctcccgcagtcctgcagagaccctgtgctaaggtaggcggtgggagtgccttggccctgggcctcgggaacccccttagtgaaccccattgctaaaggcagaaaccccttcacagtaaacttcccccagatagctggtcagtggcgtggtcagggaagctgcagggggtcccgtctgatttccactctgatggagggttctgcccagaggctccagaagactggctcctgttgagactgaccccagctggggacatcaggcacaggagggcagtccggggtatggccaggaacgaaggctctagataaacaggggagccgccttggcagcctggcccctcctggctggggcttcttgatgtttcctgtgggaagggctgaaagcaaggagagggtggtggccccgtcttcctagcctgctcctccctccattcttcaccccacaagggcctagactgtgcggctggctaggaaaggtccagggagttcacccaggccctgatctgggggggccaagcagcttccagagccaaatgggtagggagagccgagtgacagtcagagctagaggttcctctgcccagtcagcccaggcatcccttgtctacccgccaccatggagccaaggctgtggtggccaccctcagtggatcttgtaccctccaaggcagcctaggagtggggtggggtgggtggcatctgcagtctgaaatgggctgaggaccactctggctctgaggcgtgggggcctgtgcatcagatcccgtccaggcactctagggctggaggaggggcaggccacgccggagtccctccttcaggaactgcatgtaggtggccgtggacgggtcttcaaaggtggatgagaagctgaagagattgctctcgatttcctcgggcttcacggaggtgatgtccaagaagtagttggcattgatgtgatggaccacggtgccattgggcaggcagatcatcatctccacggggaagctgtacttctccaggtgcaggccagccagcttctggtgggacgagttctcctgtttgttctgcagttcctccagctccttcaccagggaccaggtgctgatgaagctctcgttgagcagggtgaggatgggcgaactttccaggacagtctcccggagagtccgccctgaacctcagcaggactggtcatccagggccccccacagcaggattgagtgcaccagcttgttctcagccttggctcggtcgaaggcctcagtgaacggcaagtaggagcccttcttgaaggggtacatggccacctccaggcgccgggcagcctcctcccagctcagctcctgctgccacttgatctcctcaaacacgaaa

SEQ ID NO: 106468 - DNA, 961 bp, Homo sapiens
ttttttttttttggtattcagagacgttttattccttggtgagaaaagagatcacacgcttttgctttatcacagaaggaagggtcaagagaacgtctacccaaaggtaggcaggggaggtagcagagggcgtagggagctgctgcaggccaggctggatgaagatctggggggccgcttcacacagctgcccacatgccactatggagacttccagaaggacgggagcccgaccatgccttgtgcacccacagagccaggccccgagaaacaaggaccctgtgaggctatggctgagggcgggggccggttcctggggtctcccctccagaggggcgagagccacccctgctgggaggcctgggagaggcacaggctgtccagggcctctgacacgcggcccacctgtgcttctgggaaggccaccttaccccctctggctgaggagaaatcaaatacagttgagaacgttaatcctgagacgggaggaccctgcccgtgcaggcagctgctctccccagagtccgatacactcccctctccctgccaagattggggccaagatggcgtcccggcaggctggccggctgtgggttgaccagcagttcctgctgtcacacacgtcacagcccttcttccagcttctgattaagtctctgggacacacagccagcgtcagggtagagcttaggaggaaagggtcaagccctgcagccaccagtgctggcggcctccacaaggggcagcgctcaaacatgcaggacgcaggcgaggtccacggggtctcgaatgccacacggaagcaaggccgggagcccagcacgcacggagcaggctcgctagcagggagcccacgcatcaacccagggcctctcgcgtggctacgccagacgccggaaccacccaaacggcccctgcgttccccagcccaggccacgcaggagtccctcacgggagacgg

SEQ ID NO: 106469 - DNA, 462 bp, Homo sapiens
  misc_feature (1)...(462): n = a,t,c or g
cctggattgacgacccctagnccagngcggtggaattcggggtttcgccatgttggccaggctggtctcaaactcctgacctcaggtctgtgcccgcctcagcctcccaaagtgttaggattacaggtgtgagccaccgcacctggccacgccttctcttttgaccagtggttctggcctgtttcctccatgccatcaaaccgtgctaccacagggacccaaagagctggctatttgatgttaatcagggatcaaaatcgtcaatcagtgggaaggtgaaacctggagaagataacgtggtcaccatttgctcagttgcagtctgcaccataatccaacaggggcacaggctattctgcttaatgaaaacttctgatttgttacctttcagagtgtcatttattagagcacgtttgaaatcgtgggaaccaaattatgacatcaatttatgtaagccccttt

SEQ ID NO: 106470 - DNA, 422 bp, Homo sapiens
  misc_feature (1)...(422): n = a,t,c or g
cggacgcgtgggctagttctagatcgcgagctgccgcccttttttttttttttgaaaatgggcgggggggttttataaaaccggggggagctcttgctttcccggggggggcccccccatttccaaaatggtaaagggtttcccattttgcccccccaacccaaaatttccccctatttgaaagggaattttttgtttttttaaggggcccggggttaattaaaaaattggttccggccaggggaaataaggggttggatttgggggtaccccccatttggggggtggaaaaaattccggtgggtttttaaaaaaggggccattttttcaaaacccaccccttgcaaaacacgggggcccggggccctttccggttcccaggggggagaacttcccaagggggggcccttcttttgccttcn

SEQ ID NO: 106471 - DNA, 515 bp, Homo sapiens
  misc_feature (1)...(515): n = a,t,c or g
ggggngaaattgatcngccttagngaattcgccaggcctgcangaattcggcacgagatttcccttcttggtcttacgtctcagggtctaagagacaggtaaataaatcattaaaaaatgatgtatctgatagttcaggggccacagtaagataatttttcaggctgagcatggtggctcatgcctgtaatccagcattttggaaggccaagatgaggatcacttgaggccaggagtttgagaccagcctgggcaacatggcaagacccccatctctatgaaaaatagagataaaaagaagaaataaaaaagtgtgtccctttcccactgagcaaaagcatcctcctgaggaccccaggtgtgttttgagtgtcaattctggccgggtgctgtggtgtggccatgatcgacaacacagtccttgtccacaaggaagttaaaatcttaaggaaagcgagactgttgtggtccagctgaacatgcctgtgcattgagacctaaagctcatagagatg

SEQ ID NO: 106472 - DNA, 1629 bp, Homo sapiens
  misc_feature (1)...(1629): n = a,t,c or g
attcccgcgtcgacgatttcgttgaagacggaggcgggttctggacagacctaagctgtcggggagtgtttacttcgcctccacttctgttcctccccgccctggtgctgctccaggtcacatactcttcctgagccggcttcagcctctccgcgcagaagtctcccggagccatggcctagtattcttatgtgaagtctaccaagcttgtgctcaagggaaccgaggtgaagagctgggtcctgcagctccggcgggagcctcctcagttcttttcggacgcactccacccccgcgaatccggtggaagccgtgatgcggagagccggcttcgtggcctcccaggcttcgctctgaccctgtctgggctggatggaggccggaccgcccttcctggcgcctgtgcagagaggggcagcctcctgcgcggacgaccctggaaacaggatagacgggcgggtgacccgtgaccccgtacccacgagtttgggtcccttgaggcatctctccaggcctctgcctgatttgcctgaggttgactgtacatgcaaatattgagctttcctcctggcctccgtgataaacagaagttttgatattgttaggcgagatggaaagaaagtatcaaggagtgagctgaagccactgcccttgagaaccctctcgaggagtctggcctcatgaagatgccagaataaatggcagtaagaagaaaaagagcaaagataagaagagaaaaagagaagatgaagaaacccagcttgatatgttggaatctggtgaacagtaacaaactttggtgaaatttcaggaaccatagccattgaagtggatgagggaacctatatacatgcactcaacaatggtctttttaccctgggagctccacacaaagaagaatcgccctgaaacctggctatggaaaataccttagtataaattcagatgaacttgttgttggcgttcagatgcaattggaccaagagaacaatgggaaccagtctttcaaaatcaagaggtcagaaatggtgggccagctgagatgggagaagaaaagagaaatggcacaaagtggagagaagacaccgaccatacctcctttcctctctttcccagcacaggtggacagcccaaagcacactccaactggaggaaggtttgccattaaagataagggtgcctgtgcagcagtattcactgtgataggaagtgagaagcagtctgagtgttcattgctgagggaatcaagggcaaaatatcatggatgcactcatggacaaataagcagcagtttgaagcaacaccctagatggatgtacagccatcaagaggatcttaaagtgtggtctttagtggaaaaaaagcagaagcaatgtatgggagactgagtaattacatatgagctcacatcactatctcttccaccactggtcatccatcatgactgatctgggagatgaacagcacagatctaaaggaccgttggtaagnatccgagattcaccagagatcagtagataccttggcatacctttggganggatttaacactggtcctngggattcccaccgattcagcctggagttatggttccaggattaagcctataggtacatatttttagattg

SEQ ID NO: 106473 - DNA, 459 bp, Homo sapiens
  misc_feature (1)...(459): n = a,t,c or g
nattgtagattagtaggcccgtgcggnggaattcatctctatgaacagtcttgctggtctctgaaaaatctgtgctgtttggtgccaagtcacactatacacaagtatcagtcaggcagagcccacttatgtatagaccaagcaacagataaagtagagtgaccaatctggtttacctaggatggaggaaggggttggaggtgagcatcagggagtgctcatagattcaggactttcagttttgaaacagggagagtcctggacaaaccatcacaaactgatcatactaacagaaagcgtggtgggccaaacgtaaagtagagttttctaggttaggagcggnggctcatgcctgtaatcctaacactttgggaggccgaggcaggaggactgcttgagctcaggagttcaggaccagcctgggcaacacagtgagaccttgtctctactaaaaataga

SEQ ID NO: 106474 - DNA, 463 bp, Homo sapiens
  misc_feature (1)...(463): n = a,t,c or g
natcgagatcgtagtcagtgcggnggaattcggaccacttgaggccaggagttcaaggtgagcctgggcaacatagtgagaccctctctaaaagaaaataataaaaattaaaaatacaatataatacaatacaatattgtatttagttgtcatgatcctttagtctcctttaatcttttttttttttttttttttgggaaagggggtttccccctttcccccaggttgaaggcccgggggagggtttggggttatttaaacccccccctcccggggaaaagaaatttttgggccccccccccccaaggttttgaaattaaggggctgccccccccaattggggttattttggtttttttaaaaaaaaggggttttccccatgggggccggggggggctggaaccccggacctaaatttttggcctggcccacccccccaaaggggggggattaaggggggggg

SEQ ID NO: 106475 - DNA, 482 bp, Homo sapiens
  misc_feature (1)...(482): n = a,t,c or g
ggggnnaggaaagggggnaatcgagatcatagaccacgtggtggaattcgcccctctcttctcccactccccatcctcggcgtccacagatctgctttctgattggatggacattgcatataactgggttcatgtggcacgtggccttctgccactggcttcttttacttgcataatgttttccaggttcatctgcatgtgattgtggcacatgtcagtacgtccctccttttcatggctgcatattatcctacagttaggatggaccacattttatttacccatttatcagtccatggacatttaggttgttcgtaattttttggccattatgaagctttgttcattccaatagggtttctgcaatggccttccaaatccaccccttgccagggatcttgttcaggagggacaattggtgactttcacaaaaacctgttgtgggccctcaaggctggaaaccctcctccaaacaggtgcct

SEQ ID NO: 106476 - DNA, 450 bp, Homo sapiens
  misc_feature (1)...(450): n = a,t,c or g
catgacactgangccatcgcnccgngcggnggaattctacaggtaaattctttcatgaattctgtaagaaagaagaggcaaccacagtatgtatttatgtatgtactcacatgaataacacacacgtaaaggaatacaggaagaataaactggaaactaatggaggaggatgggagggaattagcatgggaatgaaatgtctccaaataggattttaaatatagttttgtgttttgaatcatttgtacataatttgtacatgatttacatgttcaaaaaattaaatcaaatttaaaaaataggaaaaagaaaccctccccaaattgtgcacgaagagaaacaaataaacctaattgtaaattagagagcttaaccacagagcaaaacaaacaaaaacaccaacacacacacacacacacacacacacacacacacgancaaaaacctatt

SEQ ID NO: 106477 - DNA, 506 bp, Homo sapiens
  misc_feature (1)...(506): n = a,t,c or g
ggggcgttncagcncgcgccnnnnttttgannncaatcgtagaccctagtcagtgtggtggaattccaagggggcagtcttgtaatgttttatttagttttttggcctcttttcattctcagtcccctatgcctattttaccagacaagaacactaactgtgtgttactgtattcagagtgaagatccagcaacatttagcatatttgggatgttatattaatcagacatgctctaggaaattttttaacctctatttcatgttatattgttaaaatctggctagatgctgtggctcacacctgtaatcccaacactctgggaggccaaggtggaggattacttgaagccaggagtttaagatcatcctgggcaacataggagaccctctctctacaaaaaaaaataaataaacaaacaaataaataaatgttaaaatttcaatatgcttttctagacgatcttaaaagctcctttntttctgttagacattatttttctctttat

SEQ ID NO: 106478 - DNA, 505 bp, Homo sapiens
  misc_feature (1)...(505): n = a,t,c or g
ggaggnnncggncgtgccccncaattgannnccataganancntacgcagnggcnggaattcgctcaagcgtcgtcactgaggacaagttaacgagagattcccgagtatgtctacagtcagccttgcgatatttgaagttgtacaatgaacccatcagagatgcaaagaaaagcacctccatggagatggagacaccgcagttgagcaccatcgactcacaagatgaatagaatggtgatgtcagaacagatgaagttgccatccaccaagaaggcagagccaccgacttgggcacaattaaagaagctgacagagttagctaaaaaaaaaaaagcctagagaacacaagggggacacaaacttcaaagaacatgctgtttgcagctttgatgattgtatcaacggggtgtgcaggtgtacctagcagctccaaagagacagcgaccatcgaggacaagccatgatgacaatggtggttttgtcaaaaagaaaagggggaaata

SEQ ID NO: 106479 - DNA, 370 bp, Homo sapiens
  misc_feature (1)...(370): n = a,t,c or g
ttgaaatcgagatagggttttgccgtgttgctcaagccggtgttgaactcctgagctcaagccatccactcgcctcagcctcccaaagtgccgggattacaggcatgagcaaccacacctcggcctcataaatgtaatttcatgattttctgtgagcatgaaatattttgtgatgtattgatagcaagaaaaccatattataaataaaccataagcaagagttaagatgataaaatcagtgaatctaaacaaagcttgtctttttcatttcaaaatgtgtttgggaatgaattgtaattatttggtcaacactgtctcatgagaatacttcaagtaattntatttattggaatgaataatggattaggtc

SEQ ID NO: 106480 - DNA, 485 bp, Homo sapiens
  misc_feature (1)...(485): n = a,t,c or g
aggagagagncccccaatgaganccatgagaggctggcggaannccctaaatccaatgacaagtgtcctaataagcaaggtaagaggaaaagacacagacccagaggagaaggtcacatgaagaggcagagattggagtgatgcagccataagccaagggacacttggagccaccggagcctggaagagggaagaagccttctccccttgaggcttttaggagagaacagctctgccaacaccttgacttcagacgtctggcatccaggactgtgagggaataaatatctgttgttgtgagcaaccaagtttgtgtaatttgtcacagtacctacaggaaatgaagacacccccgattgccttcccttttaagggattctttagtagtcaagatgaggcatggtaggctacccttactcatcataaaattcccctcatctaatgcctatgccaggagtcttttccagtccccctttgtactaggg

SEQ ID NO: 106481 - DNA, 470 bp, Homo sapiens
  misc_feature (1)...(470): n = a,t,c or g
tttggtttcgattaccagcttgacctgattacgcccagcttggtacgagggaacaactatgacccaaaaaatttgataacctttgagaacggatagacacatcaaacccaccaagactgagccacaaatacatacaacttctgaatggacctataactattagagattgaatcagtaactgtccaacaacgccagggcttcactgaaaactctaccaaacatttaaaaactaacaacccttctcaaactctttgaaaaaactagaggacagaacactttcaaaatcattttatgaggtaagcattacttagatatcnnnnnnnnnnnnnnnnnnnnnnnnnnngaatccctaataaatactgacgcaaaaaaaatcaacaaaataccaagaaacagaattcaacaatgcattaaaaagattatatttcataaattctcaactggaatttattcataaaatccaaggatgg

SEQ ID NO: 106482 - DNA, 460 bp, Homo sapiens
  misc_feature (1)...(460): n = a,t,c or g
nattganaactggatgacctgcattacgcccagcttggcacgaggctactttctgtctctatggatttgcacagtttagatgtttcatataagtggaatcatacaatatgtgctcttttgtgactgccttcttttactttaatattttcaagattcatccatgttgtagcatgtatcaaaactttatccctttttatagctgaataatattctattggattcatacaatatataagcgtttgtgtggacgtatgcattcagtttttttagatacatatctaggagtggaattgagtcatatggtacctcagtgtttaactttagaggaactgccaaatgattttccaaagtagctgcattattttacattgctaccagcagtgaatgagagtttgaatttctgtacatcttcacccaacacttgatattgtctggctttctagacaaattttgataaatc

SEQ ID NO: 106483 - DNA, 530 bp, Homo sapiens
  misc_feature (1)...(530): n = a,t,c or g
agagtgccnncatcgaacactattgagagncgcgtaattccagacggatatcacaagggaattatgctgtctctgacatcaagaagtcgccggatggtacccgagtcgtagggaaatgcggtggttactgtggaaaatgcactccatcctctggtactggcctggaggtgcgagttttatagctaaggtgctttgaagaggaagccattatggatggatgaaggatagtaatgcaatacctccaccttaatttgggtgcatgtgtatgtgtgtgtgtgtttgtgtgtgacttgtatgcttgtgtgtgtaaatgtgtgtacatatacatatatacatatctacacatacatatatacacatatatgtgtgtatgtagatatgtagactatcctaatgatgtaaagttaatatttatggttgaaattatttattgtgaagaatatttttggacgtaaaatgaatctattatgactggctttgcatgaagaatatgacaaagtgatccttcattatcaacggacactattggt

SEQ ID NO: 106484 - DNA, 461 bp, Homo sapiens
  misc_feature (1)...(461): n = a,t,c or g
agatgaggnnngnaaatgtagactacagtctatagacagngcggnggaattcgctactcagtaggctgaggtgggaggatcacttgcacctgggaggaggatgttgttttgagctgtgattgtgccactgcactctggcctgggtgacagagtgagaccccatctcaaaaaaaaaaaaaaatatttatttttgcaacccaaaaaaacttaaaaatggttaggttttttttaaggggccactctttcaggtgaccaatattgaacttttttaaaaacccctactttaaacatcaaaaagaaattttccccctcccctttaaatcccacctcatttttattttccaggctaattcataaaccccccattttttattttggggagctgcagtatttaaccagggggccctttttatattttggggccctttcccgcccttttagttcaaagaaaaaaaaatatt

SEQ ID NO: 106485 - DNA, 486 bp, Homo sapiens
  misc_feature (1)...(486): n = a,t,c or g
aggnaagtnnagcggntnnnnnnnaaactgaaaactgaggtacgctncgaggnaacctgctgggattgcagggatgagccaccgcgcccggccctggaatctgtatttttaacaagtttcctggaggacgaattcagcatagaaattgctgatctagttccacaccctacaccatgcagccaccctttacagcctccctagtaggtgattatctacttctgctcaaatacctctggtgacagggagctcatcccctcccaggaagccctttccttccttgcatgagcccaagtcagcctccttgtgaccaccttcttccaccattcagcctgtacgaagttccccaaagggatgaccatccccacccttagcctgagtccagttccccaaagggatgaccatccccactctctgcctgagtccagttctcccagttccttccaccattcctctcccaaatgtttcaaagccccttccatttcanag

SEQ ID NO: 106486 - DNA, 923 bp, Homo sapiens
tttttttttttttatgttttaaataaattttattgtctatattaaggtttacaacacaatgttaaatgaaacatatatatatatatagtaaaactatagtggaacaatgaacatacccatcatctcacatagttactgattattcccccattggcaagagcaggtataatctactcatttagcaaaaagtcctgaacacaatatacaatatgtattaactatagtcctcatgttgtacatttgatctttgatcttttcacttgttcatcctgcatatttactactttgcatcctttgacctacatctcatttcctccaccttatcctgaccttagtaattactgttttattctctatctctatatatttaaccttttttttcttgattccacatataagtgagatcacgcaatatttttctttctgtgtctggcttatttcatttagcataatgtcttctaggtctatccatgttttggcaaatgacaggactgccttctttttaaaggctaaataatattctaattatctatctattgatctctctatatcacagtttctttatccatttgcccattgatgaacacctaggttgtgtctgtatcttgactattgtgaattgtgctgcaataaacttgggagtgcagagataatctcattcccctttggggatatacccagaagagggattgctgggtcatatggtagttctatttttaatttacttaggaacctccatactgtcttccataatggctgcaccaatatataatacattcccactaacagtgtacaagtgctccctcttctccacaccctcaccaacacttgttagctcttgtctttttgataatagctatcctaacatgtatgaggtggcatctcaaagtaatttcgatttgcaccttcctgatgacgtcgac

SEQ ID NO: 106487 - DNA, 373 bp, Homo sapiens
tatgacccttctgacagagcggtggaattcggggctcctaccttcagcttgcactgtggaggccatggctgttcttggggacacgcccaggaatgatgcggggatgcctcagtacggggcagcggaaagcccccttaaactccagcagaagccaagcagtcaccggtgggccagcgaccgacatgaaggagggaccggacagatggccagggggaaggagccatcgggggcgttgggaggcccgggaggaactggacagagccaggtctcaccggggacagaatgcggcctcacaatcctgccccaccgccaagattctcaggttctgagcctggagtccgactgctagccagcgactcatggcgcccacagc

SEQ ID NO: 106488 - DNA, 452 bp, Homo sapiens
  misc_feature (1)...(452): n = a,t,c or g
catgagatgatagcatagcccgngcggtggaattcgtactgtcaacatacaaattacatacaaatttggagatttataatgaagaattttgccaatttagctaaaatctaaatcttagatttaactaaatcttttaaatctttgtgtttcattataaaacacaaaacatttataatgaagacacacttcatgtcatcattataaatctttggtgttatcctggctcctatataaagagcactggcaggctcaggccagaagtggagagggggcttggaccgacaactatgtgttgttaattttcttctattaaaaatattttttacttttagaaattgaaatcatatagaaaattatgctgggcacagtggctcacgcctataatcccagcactttgggaggctgaggcaggtggatcacttgaggtcaaaagttcaatcgagactagcctg

SEQ ID NO: 106489 - DNA, 471 bp, Homo sapiens
cgggaacaaaactcgagatcctataagtgcggtggaattccctaggttgcttccgtatccaatgcagaataatgctgcagtgaatggtagtgcagttatctcttcagcatgctgatttcaattcctttagctatacacccaccggtggggttgctggaacatatagtaattctatttttagtttctgatgaatctccatattattttccatcatggctgtattaatttacattgggaaatgtacgtacttttgatgttgttgtgaatggactggtttattcaataaattgtgttaggtacattgactaatagtgtgtagaagtaaagttatatttacttaattcttaaaggtatagtcaaaacagactgaataattaaatgtaaaaatgatctggagaaaaccttttttttttttttgaaaaggaaccttccttttttcccccggctggaagggcggggccccaatttctg

SEQ ID NO: 106490 - DNA, 404 bp, Homo sapiens
  misc_feature (1)...(404): n = a,t,c or g
atcgtgtgagcacaccatatttttacagtttgaatagacgtagacacacgagcagatttcacctccgctaccataatgcatcgctatccccaccggcgtcaaagtatttagctgactcgccacactccacggaagcaatatgaaatgatctgctgcagtgctctgagccctaggattcatctaataaaaaaaattaatataaaataaaaataaaaaaaaaataaaaattaataaataataaattatggggggggccccccggaaaaaaaaaaaaagggggggaaaaaaattccccttattttttataaaaaaataaaaaaatttctgtggccgaaaaaaaaaaaactttttgggggggccaaaaaccccattgtggggaaataaaaaaaaaaactctccccctn

SEQ ID NO: 106491 - DNA, 403 bp, Homo sapiens
gcatggaggcacgtgcttatattccttttactcacgaagctgaggtgggaggatcacttgagcccaggagtgcgaagctgcagcttgctatgatcatgccactgcagtccagcctgggtgacgaagtgacaccgtatctcacaaataaataaataaataaataaataaataaatagctattttttaccttcagatcaatggaaagccactggactgttctaagtatggggatcagattcatgtttatgtagaggatgaattggagggtaaaggtgatgggcagttggtatgggcagtcttgttgtattacaactgcaataacaaattaaattcaaaatctcagtgacttaacacagtaaagatttgtctctgtcacgcagagtccaaaagggttgggcagcct

SEQ ID NO: 106492 - DNA, 1119 bp, Homo sapiens
cgaattgttgttttttttcccccccccccttttttgttttttaaaatttattttccccccccccttttttttgtccaggtttttccttggcccctttaaatttaggataaaaggttttttttaaaaaaattgttcctttttttccttaattcccccaaaatttttttcccccttggaagtttttttttttccggtaaaacccttttaaaaaccgggttttaaaagttttttttcccttttcctttgggttttggggttaaaaccttttttttttttgggttttttttttttttcctttttggggagaacggggtctcgctatattgcccaggcaggtcttgaacgcctgggctcaagctatgctcctgcctcttgcctccctgagagctgggattacaggcatgagcccccgtgcctggccatgggttttgtgtttcatttaacgctttgaaagcccccttttttcaaagattatatgaaaagcttattccagtttttaaaatatttgatacaagggtaatgtactttggtataaggagtgaggtatagatccagctttatatttttctttttttttttgagacggagtcttgccttgtcacccaggctggagtgcagtggcgcgatctcggctcactgcaatctccgcctcccgggttcacgccattctcccgcctcagcctcctgagtagctgggactacaggcgcccgccaccatgcccagccaattttgcttttgtatttttagtagagatggggtttcaccgtgttaaccaggatggtctggatctcctgaccttgtgatccgcctgcctcggcctcccaaagtgctgggattacaggcgtgagccaccgcgcccggcccaaatttgttctttatttcaaagacaatggggagccattgggaggagtgctgcacagaagccacatagctgtccattggatgtagggacctggacgtcactggtgacccattgatcccctgccagaggagtagtgggggcaatgcctgggtgggtcatcctggatctgggccttcctgtctgaggtgtggatgcatcactttggcgcacgggagcctaccttctggtgctgtgcgtttgttggagtgagtcatca

SEQ ID NO: 106493 - DNA, 389 bp, Homo sapiens
cccacgcgtccggtttgatcctggctcaggatgaacgctagctacaggcttaacacatgcaagtcgaggggcatcaggaagaaagcttgctttctttgctggcgaccggcgcacgggtgagtaacacgtatccaacctgccctttactcggggatagcctttcgaaagaaagattaatacccgatagcataatgattccgcatggtttcattattaaaggattccggtaaaggatggggatgcgttccattaggttgttggtgaggtaacggctcaccaagccttcgatggataggggttctgagaggaaggtcccccacattggaactgagacacggtccaaactcctacgggaggcagcagtgaggaatattggtcaatgggcgttt

SEQ ID NO: 106494 - DNA, 396 bp, Homo sapiens
tttcgtgtgcagagacagtgatagatctggagagctgttgctgctggtccgtggtgactggggatggcatgtcaggtggagaaaaatttcctctgtgtgcgcatttagacagcttcagaagggaggaaaacacagaagacgagggctgaaagatggcattggacttggcacagggatggtcaggaggtcctgagtcactttgagaaggtaaatacctaggagtgggcttttctagatcacatgagacggggtctcaccacgttgcccaggctggagtgcagtggctactcataggcatgatcacagtgcaccacagcctcgaactcctgggctcagtccactctcctgcctcagcctcctgagcacctggaatgcaggcatgcaccactatgcctg

SEQ ID NO: 106495 - DNA, 646 bp, Homo sapiens
cggggaagaggaaggaggccgcggcttcgcgtcccgcctctcgcctggctggccgtggggggcctggacgcagtggcctcccgaatctcccaggaccctaatatcgcccgaggatgctgggaggaacgctgagccgacctctccgttaggctgaagattgcacaaaccatgctaatggccagcatggatggagggagcgtgtgagatgtgtggggcagcgtgctgcatctcagccaactccaggagccagttgatgtgatggactaccttaattgatttttgaatgttgagccagccttatgcatgtgggataaacccctgttgatcatggctggctggagtgcagtggtgcaatcatggctcactgcagcctcaaattcctgggctcaagggatcctcctgcctcagcctcccgggtggctgggactacaggtgtgtgccaccactcccagctgatttttttattttttgtggggacgagatctaactttgttgcccaggctggtattgagctcttgggttcaagtgatcctcctgcctcagtctcctaaagtgctagggttatagatgtgagccactgtacccagccaggttgtatattgaaataataatttcttaatatattgaattaaaatatatttaaggc

SEQ ID NO: 106496 - DNA, 419 bp, Homo sapiens
  misc_feature (1)...(419): n = a,t,c or g
tttcgtcagagagaactncctccttaatgaggtcatcggttttcacaattgaacctcatgcactgtccacagcatctcacctagctcctgtatctcctgatctgcttttaaaaatagttagttaggctgcctttttacaccaccttctctctctccccttgtggtaattttccagccttccccatagatataaaactagaacacctttatgatttggggtctatgtaatgactgaccgataagaacccaggcagatgctaacatacttaacagctcgcattaaaatactttaaatcaggcgtgatggctcattcctgtaatctcaagcactttgggaggccaaggcaggtggatcacctgaggtcaggagtttgagacgcctggccaacatggagaaaccttgtctctattaaaatacn

SEQ ID NO: 106497 - DNA, 444 bp, Homo sapiens
tttcgtaccgtggggagagggagagggagagggagagggagagcaattttttgttttttgtggagatgaggtcttactgtgttggccaggctggtctcgaactcctgggttcaagagatcttcccacctcggcctcccagagtgctgatattataggtgtgagccaccacacccagcccaggaaaagtttttgaccatttatatgaatattctatctaggaaatcgctgaaatggttcccacagatgtgcatatctcatcagggggtcgttcagtagttgcacatacctctgggtggccatggagaatgatggatttgtaacgctaaccagcaaacagtgccaaagccagcagctcatatgggtatttttgcctgtgagttgtggtttctgatatctctccaggatagacactcagttttgcctgggcatgatggtgcgtacct

SEQ ID NO: 106498 - DNA, 380 bp, Homo sapiens
ctggcttgtttcacttaacataatgccttcagggttcattcatgttgcagcgtgtatcaaaatttccttcttttttaagatcgaataatattgtatatacgtgccgcattttgtttatccattcttctgttaatggatattggggttgctttcatcttttaaaattttgttttttaatgcatgtacaatatttgtattttatttctattttgtttcctattattattttatagttttgctgacttagaacatatgtataattatttttattgcttttattaccactttctgatactaggtgttgctaagtaaaacattgattttgttacttcttgactgacttagtttttgcctttggtgttaataattagccaaagtta

SEQ ID NO: 106499 - DNA, 416 bp, Homo sapiens
tcgctggaaagaaataatgattatttcataatggaaaaaaagcaatgtcactgacactatgatcattcaacatttttttaaaataaattaattttttttagttttagggattaggcctcactctcttgcccaggctggagtgaagtggcgcagtggcacagtcatagctcactctaaccttgaactaactcctcaactcaactgatcctcctgcctcagcctcccaagcagctgggattatagacatgagccaccttgcccagctcagtatcatttttcacattcaagctaatgaaataattcaatagaattaaacaaatgcttttcaaaaatgaagctggaacaattagtcatccatagacacaaaacaaaataaaccagcagacaaacaaaacttcatattaagcctcatgcca

SEQ ID NO: 106500 - DNA, 411 bp, Homo sapiens
gcgaaacagcatattcctttgcttgccaggctggagtgcatcgtctattcacaaatacagtcacagctcactgtagcctcgaactcctggcctcaagccatcctcctgcctcagcatcttgagttgctaggatgacagagtgtgtacatcgtgcttggcttgaatggatcttttacctgtgtgtgattttgtaatatcatgcattggttatttggaagattataccattatgcatcagttatttgaagataattgttcattaagctatgtaaattttccaaatgttgatatattttattatatgggataaaaataatggtatttaatagctaatacccgaatgacctcataaggaaagtattttgggaagctctctgggtcatggcaatagataccagctcactgtgactt

SEQ ID NO: 106501 - DNA, 417 bp, Homo sapiens
tcctagctactcaggaggctgcagtgggagaatagcttaagtctgggaggttgaggctgcagtgagctgtgattgtgcactgcactccagcctgggtgacagagcaagaccctgtctcaaaaaaaaaaaaaaaaggaaaatagggaggggtaatccttacataccatttataatataccgggccctgttttgaaagttctatttataaatatattagctcacctattttttgcaactttaaaaaaaaaggctgttttaatcaaaccttaacgggggggaaacctaaagctcagggaaattatatacttaccgggggccacatagctcacggggacgaacccgggatttacctcgggggctttgacactacagggctgggttaacctaccatgctacaaggctgcccatgaatatggg

SEQ ID NO: 106502 - DNA, 426 bp, Homo sapiens
ctgggcgacagagcaagactctgtgtcaaaaaaaccccaaaaacaaaaaacatgcaaataaagtaaaaagtgataggtgggacggccacctgtcagctgttgagctctactgtgggagaaggtctggggaaggattgggaggggtgtacgccatgaagggtgaggctgggagtgttacacgtgttatgcacagtagcaggtattggttagaatgagataagctgctgtaacaaatagacccccctgctgcccagccaacaatggcttaaaaaagagagtttatggctgggcagggtggttcatgcctgtaatcccagcactttgaaaggctgaggtgggagggatagcatgaggccagtaatttgaaaccagcctaggcaacatagcaagaccctgtctcataagagaaaaatttttaaaaattag

SEQ ID NO: 106503 - DNA, 1437 bp, Homo sapiens
tttttgttttttttttttcccctcaaatgttttatttttgaaaatatcagagtacagaagagttgaaagtatggcacattgaatacccgtattttccatgtggactcaacaatgaacattttgctatgtttgcctgatctctcaatacatatttaaaatcatttttttgaaagttgtaaacatcagaacacttcattccaaatacttcaacatgcatcccttaagattaagaatattcttcaaactaccaccaccgtcacaggtaagaaaatcaacaaaaattccctaataccatctaataaccagtcatattcaaatttcccaactgtcctaaaacatgtattttataactttttttcaaatcagtttcacacactttagttggttacagctctttagttttgggttttcgttgccattgttggtttttactttttattttgaaatgatagaatcacaggaagttgcaaagatagcacccttcacccactttcccctcatggttacatcttacataaaatgaaaaaggaaatcaacattggtacagtatgtgtgtataggtatagcacctatagatttgtgtaaccaccactgcaatcaagatacacaagtgttccatcaccacaaagacctttctggtgctaccttttaatagttccatccaaccctctccccatttttcctcccaccatccctaacctttggcaaccattaatccatttttcatctctatagttttatcattttgagaatgttatatgaatattttcatacagaatatggccttttgtgattattttcactcagcattaattcccttgaaatttatttgagttgttatggatatcaataagtcaattttattgcagagtaacaagtattccatggtaatacataaaccacaatttgttttaaccacctaaggaaggatatatgggttgcctacaggtttcgaccattacaaataaagctgctatgaacattcgtatacaggtttttgtgtgaacgcaagttttcatttctctgggataaatgctcagaagtgcaattcctgaagcatgacatatacatgtgtggttttacaagaaactgccaaattatattccagagtggctgtaccattttacattcccagcaatgtatgagatcctgttttttttcatccttgccagcagttaccaccattaaaaaaaaaaagttaagctattctgataggtgatatctcacgattttactctgcatttccctcatgcctaatgatgttgaacatcttttcatttgcttatttgctatctatacttcagtgaaatgtctgtcttttgcttattttctaattgtatttacttattactgttaaatttggaaagttctttatgtagtttacatacaaatcccttgttggatatgatttgcaaatattttttcccaacctgtaat

SEQ ID NO: 106504 - DNA, 407 bp, Homo sapiens
tttttagtagagacgttatagtttcactatggtggccaggctggtatcaaactcctggcctcaagtgatcagctcgcctcagcttcccaaattgctgggattccaggcgtgagccactgtgtccagccttgtctgaaatttcattaccaagtcggtattagaaaatattttgaactaataaattaaaatgaaagcacaacatcttcattacctctttttttttttttggaaaaagtttcttttttgtcccccaggttgaagggcaggggggaaatttaatttaattgaacctggcccctccggggtaaaagaaattctccgccttggcccccctaaaaaccggaaataacgggcgccccccgggggggggggggtggaaaacatcctctgcctatgggggcaccgcc

SEQ ID NO: 106505 - DNA, 387 bp, Homo sapiens
cagctttcttcctaatacttgaaaggtccacctcacatgttaaaggtttcattcctgcctactgaccccacctccagagtcaagcagttatataattgggtacctcattcaaccgttctcattgcattgttccccaccaagaatccaggatgagaaagcttttgctgcttttccatcatgtgttgctagtgtgttttttcagttctctgtggtatgttatttgctggttattatgagtttccttgatctttgaacactgcctgggaggtccagtgatttcagccttccagaggtgatttaaaaaaaaataatcacggctgggtgtggtggctcattcctgtaatcccagcactttgggaggcaaaggtgggtggatcacttgaggcg

SEQ ID NO: 106506 - DNA, 451 bp, Homo sapiens
attgaaaacttcgtagaccactagtcagtgcggtggaattcgttggccaggctggtctcaaactcctgacctcaggtgatccacctgcctgggcctcccaaagtgctgagattgcaggcgtgagccaccatgcccagcagagatttcctttcgacacaggaattccatcacaccactgtgcctatcaaaaggtgctcacttttgtgcaaaaaaagcttctgcctcttttttttttacaatccattcgcaaaaccgcacaccagccaaactgttctctgtggtctaccaggccccactggctctggacccatctgaccttatcgccctcctctctctctctcctcccgcactctggggagccacactggcctcttccctttcccaagcacaccctacccggggcctttgcctctgtctggggcacccttccctcacatcgtcagcctttttg

SEQ ID NO: 106507 - DNA, 415 bp, Homo sapiens
ttcaagtccaaaggcaggaaaagaccaatgttctagctcaagcagtcagggaggaggagcttctggttacttagctttttattctattcacatcttgagttgattgaatgagacccacccacattaaggagaataatctgccttgctcagtctacaaaccccaatgttcatctcatccagaacaccctcatagacactcccagaatagggtttggccaaatgtctgggcaccccatggcccagtcaagttgccacataaaaatgaccatcatggccaggcccagtggctcacagctgtaattccagcagtttgggaggccaaagtggaaggatcggatcgcttgagcccaggagttcgagaccagcctgggaaacatagggaacctcatctgtacaaaataaaaaataataaccc

SEQ ID NO: 106508 - DNA, 544 bp, Homo sapiens
  misc_feature (1)...(544): n = a,t,c or g
tcggctcactgcaacctctgcctcccgggttcagtagattctcctggcctcagcctcccgagtagctgggactacaggtgtgcaccaccacacccggcaaaagtttgtactttttggtagatactggctttcactgtgttggccaggctggttttgaactcctggcctcaagtgatctgcccgccttggcctcccagagagctgggattacaggcgtgaaccaccacacctggccagaaacatgaatttttaacaagcatcatagtgaattcttctgtcattggttctatgttttgaataactgctagagaacggccagctgaggtcctagtaagtgagaacaaatcagtcaaccaaccaatcagcaccacccccagcacccccatctgttaataaatatctcaactccnnnnnnnnnnnnnnnnnnnnnnnnnnnnnnnnnnnnnnnnnnnnnnnnnnnnnnnnnnnnnnnngggaaaaaaagggggagaaaanagggaaggaagcggggggagcagccccagccctccatgtgtgtgttttt

SEQ ID NO: 106509 - DNA, 432 bp, Homo sapiens
  misc_feature (1)...(432): n = a,t,c or g
nactggatgacattacaccatgcggnggaattcgttgcctggagagaaggaagtccccaggctgccagcgacctgctgctccttcccaagcccaggatttcccaaagcagcttttcccttccagacgctggggtgcagggcccaagacttcccaaaacagcttttcccatccagaggctggggtgtagggcccatgacggttctgctttagtgtcggggatgaaagagagggaaaaagggctgggagagaaacagagaaacagaaagaaagaaacagacagaagacacagagacacagagagaggaaagagacagagacagaaagagagcagagagagacagacacagagagagagaggcccagggaagagagacacacagagagagaaaagaaataaaaagcaggggtgtggagtggggcgcttatcgaca

SEQ ID NO: 106510 - DNA, 451 bp, Homo sapiens
  misc_feature (1)...(451): n = a,t,c or g
agccgggnnnnnannnttagagtagcttacatcgagcggnggaattcccaagactgaaacaaacaacaaatagatgaaaccaatatttcctgcccccaggatgctgggaggttaaacaactcctttattgtgcagagggcacgggccctgcgagagcaaaacgatgccaggggggatggcacgctctgaggctctggactggcctttccctccaccctggggcctacttctcccagcacctatctctctctctctctctctctctctctctctccctctctctcaggtctttccttataccgtgggtcctccttctcccagcaataaagaaataggtcattcaaagcatctcctctccctaagagtgtggatctcacccaccacatgctgtccttgatgtggggcctgacaaagattctctccatgaccacacgttaggctcttgtgagat

SEQ ID NO: 106511 - DNA, 460 bp, Homo sapiens
  misc_feature (1)...(460): n = a,t,c or g
gggggcannnnnaattgagacatagaaacgcgnggaanncnaaaacttggcctgcctaaaagcctactgagacctcctaactggtctaatccgtttagaaaataattaggcggccgtttgtgcgcacaggatttttcttggagctgtagcagtctaggaagccagggtggaacttttgctaagctcccgttgtaagcccagagctgtaataactgctgagacacaaccagcagtatacaggctccagttggaaatcgagaactttccagggctgtcacccaggctggagtgcagtggtgccatcacagctcactgcagcctcgacctcctaggctaaagtgatcctcccaactcagcctcccgtagctgggactacaggaatgtgccacgcccagatagtaaactcctgcaaagcagattggttggttcttctttcttcacggggcctgacccatcgttn

SEQ ID NO: 106512 - DNA, 484 bp, Homo sapiens
  misc_feature (1)...(484): n = a,t,c or g
gggcccccaatcgagtcctatagccgtgcggnggaattcaggctgcctgcattcctgggctgaggctctcccctcccgccgacgctcactgccaccgtcacattccttctccgcctccctcttccacggcccctcgtgatgatgtcgggcccatgcagataaccccagataatttcccacctcaggatcctccacttaaccccaccctcccagtcccttttgccacatagggccccatagccacagggttcgagtgtggacctccctgggctgttattcaaactgccacagatgccacaaacaccaggcccagaggaggtggacacgtgtgtgcaaatccacaaaaccagcaaagcacgtgaagacgtgcagatgaggaagaccccaatggcacgggagggcagacacagagccgcccacagatggattggagctctggggaaggcaccgcaaagccagcgccgtctgaggcacacggtggggg

SEQ ID NO: 106513 - DNA, 391 bp, Homo sapiens
aataaaataaaataaaaactttattaattaataactatagcaaactggcagatcacaaaatagaaatactcagttttgcaaagactataaggatctaagtacaaggatcttcttggaggacttataacagcaaaaaaaattaaattaaaataaacttaaatgttcacattaaagaatgattaaggccaggtccatggctcacacctgtaattgccacactttgggaggtcaaggcatgaggatcactcaagcccaggagtttgagaccagtctgggtgacatagggagaccccatctctacaagaaaaaaaaaaaaaagggggggccgttttaaagaatcaaagtttacgtacgcgggcatgcaaaggaatagtttttttatagggccacc

SEQ ID NO: 106514 - DNA, 408 bp, Homo sapiens
acttttttatatgtttactttttgttgaattttttaatgttaaaaaatttaatttttaagttatattttgatttttgttgttttttaaccatatgtttactttttattgaatttattaatattgcaaagttcttgcactgccaaaccatgcctaagaattcaaagaaagaaatggtacagtagacggcctcattcacccatcatacagtatcttaaaacttgattcatgtacattttgatattttcatagtcttttaagaagttataacgagttggaatttaaatctgctgcaggggctgagcacagtggctcatggctataatcccagcaccttgggaggctgaggctggaggattgcttgagcccaggagttgagacctgggtgacatggtgagaccctatctttc

SEQ ID NO: 106515 - DNA, 766 bp, Homo sapiens
  misc_feature (1)...(766): n = a,t,c or g
ccacctgcttggttagcaggtaggttctcctctctgtattctacatctgaggcttctcttaatatatgcttaatgctgccaaagaggtgagctcacctgagcagcctaagctctgctgttgccactgcccctgcctagggagagtagttctctggatgaactcaattccaggagcaggttacaggaagctccatttggggcttggatgccatgctatggttgctaattcaccttgtctgcattaaagtagattaattcccaaaaaaaaaaaaaaaaaaaaaaaaaaaaaaggggggggcccttttaaaaaaacaaatttttacgcccgggggggggaaaaaattttttttttttttgggcccccaaaatttatttccgggggggggtttttaaaaggggggggggggaaaaaccggggggtcccccaatttattggggtgggggggggnnnnnnnnnnnnnnnnngnnnnnngnnggngngnggggggggggggggngngtggggnggngnnnngnggggaaaatgaggggggggggaggtaaaatgtgtggggccctttgagaaaaaaannngtgatgtagtggagagaggggacagagagtgagaggagggaaagcgggggggagcgatgaggtgagaaagtgtcgagggaggggacacggggggaggagatgagcggagttgaaacgaatgagaacgagccagacgaagtcctgaaggcgagaactctaattaaagggcagggggcggtagacgagggacacg

SEQ ID NO: 106516 - DNA, 723 bp, Homo sapiens
cccacgcgtccgcttcctcttgtggaaattcccattctttagcccagattctcagcctgcttgcctctgcttcgcactggctccatacacatcttgctgccccacacccgcaaataaatagtgtagtggtgtgggcttttggagagtacagagttacagcttcagagtttaccgggcttatatgtaagtgttatttttgggaaaatattttatatcagtggtttgggaatttgctgcaccaaaatatttcccagtgcccttccctcagcacagcccgctgcttctcttcccctgccagctaggtctgctttaggcattgttttcttccttcatttttgttagattgaatgaactataagaaattaccaatatttcatcatatttgacttataaaaacattttcatatggtttaacataattgttcttttttttttttaaaacaaaaagtttaattttttcacccaggttgaattgcaggggcccatttttggttaactgaaacctttgcctccggggttaagggaattctcctgcctaaccctttgggggggctggaattgaaggggcaccccacaaggccgggttaatttttggggggggggggggggcctttttgaaaaaaacgggggttacaccatgtggcgccaggcggggcctcaaactccgggactggaaatatatcccacccccccttaaaccctcccaagggggcgggggaataa

SEQ ID NO: 106517 - DNA, 382 bp, Homo sapiens
tgtcatcctaatttttgttcctctgtttataaaatctttttgtttttcatctggctgttgtcaagattttctctttgttactggtcttaagaaatttgattatgatgtatcttggtttatctttgtgtttcttctgcttggggtgtgttgagtttcttgtgtctttggttttatagtttgtatcaaatttgggaaatttggggttattatttctttaaacactctctctgttcctttctttctctctccttatgggcctccagttacacatatattaaaatgtcccacagctcaccagtgttcttttcattaaaaaaaaatatattcattccttctggggcagggcatggtggctcatgcctgtggtcccagcactttggga

SEQ ID NO: 106518 - DNA, 506 bp, Homo sapiens
  misc_feature (1)...(506): n = a,t,c or g
atctttcaggaaatgttagtttttttcctacaaatctcacacatttttttcttgggtttattctcagatactttatagtttttgttgccatgataaaggggatttgttttcagcagttgattgttgctggtgtatggaaactatttgatttttttaaaaaattgatcatatatgtggccaccttgtaaaaccttttattagttttactagtttgtcagttgatttttttgttttttgtcttacgcaaaatcaaatcgtaaaagttgtgtcagcctgttcaatcgtttagttttcttctctttatttttttttgggctagtacattggctagcacttctaatatgttgattgtttttagtgatagcatacatccttatttgtacatattttttacatattttaattagcctaatattcatttcactactattaacaatannnnnnnnnnnnnnnnnnnnnnnnnnnnnnnnnnnnnnnnnnnnnnncgtatgattgagacggagtct

SEQ ID NO: 106519 - DNA, 396 bp, Homo sapiens
aatgattgagagtgaaaatggtgattttacagcatagacacctggtagagcccttctttgcccactgactagcagtgggacttgtgggccacacgtgcatcctgatgtgacttgctgaggggaactcagtgccactctgggcctcttctgtcaaagacacatggcctgaatctcctttttcagacagtgaagtcagtgtaaagctcagaaaatttttctggtaagacagtgaatctttgctgtcttggcagattacatagaatgatttcttggctgcacacagtggctcacgcctgtaatcccataacttgggtggatcacctgaggtcaggagtttgagaccagcctggcggacatggtgaaaccgtgtctctactaaaaagaaaaaaaattggc

SEQ ID NO: 106520 - DNA, 376 bp, Homo sapiens
taattggtcagtcttttagtgaaaccccagagcaacaaagacaattcctcaccccacacccttccccaggcatcccgcaccacagtgattgtttaagcacagggccacaggccaacttgttgcatttgaattccactataaccagcattgtatctgtattctaaaaagtgtcaagtctctacattacaatcaaagcatcaatctctaaacagtgggggagaaaatgtacctcaaggttaagagaatctaggctgggagtggtggctcacgcctctaatcccaacactttgggaggccaaggcgggtggatcacttgacctcaggagtttgagaccagcctgggaaacatggcaaaaccccatctctacaaaaaata

SEQ ID NO: 106521 - DNA, 399 bp, Homo sapiens
  misc_feature (1)...(399): n = a,t,c or g
accatgccccactaattttttgtatttttagtagagacggggtttcgctatgttcgccgggctggttttgagctcccgacctcaagtgatccaccggccttagtgctgggattacaggcatgagccactgcgcccggccccgtaattacatttgaagttacttcacatgcagcatcctctgtagttccaacaattgatactctctcataaatataaaatttgttccatatgtatttcaattcaaagagggtaactttcttagtaactttgcaggaaattcactgagcattttgagagctagagaagccatttccttatagctgtgaagtagaactaaatactgagtttctgataggattctctgcccccttcttccagctgcagaattgtgaacttgan

SEQ ID NO: 106522 - DNA, 389 bp, Homo sapiens
  misc_feature (1)...(389): n = a,t,c or g
caaatgtacactgagagtgaaccctaatgtaaactgtggactttgggtgactataatgtgtagatgtagtttatcagttgaaacaatgtaccactcaggccgggaatgtgaatattagggaaagctatgcatgtgttcgggtggggagtatatgagaaatctctgtgctttcctctcaattttgctgtaaacctaaaactgctttaaaaaaaactacaaaaaaaagaaaanngtggggccctggcaaaaaaaaccctcccatttatgggttccgggggggggccaactttaaaacaaaaaaccccttttggggggaaattggcaaaaattttccggccttaatgttaaaatgggcctaaggcaaaaaattttttgataatgaagtgggg

SEQ ID NO: 106523 - DNA, 459 bp, Homo sapiens
  misc_feature (1)...(459): n = a,t,c or g
ccccatcgcagtcgtcnncngnttgtaagccgttcacttgccgtaccgacccagcacttcccggttcaacaccacgcgttcgctttttcttttgataagtggattaacaccattcacatttgttgaaattaccaaatgtttggtttagtttctgtcattttattgttactgtgtttctttctctataaagagttttctttgttttctattaaatttttctttcttcatctcattttttgttctctttctgcttttgtccgataatgtttatcatgtttccattcaaatttattctttcttgtaatatagtcttcatttagaatataatttttttcttgtttgccatgtctgaggttagtcaactcttgtctcattatttgtattttttttttttttgcttcagttctaacctaaggtttggaattccaatcaaaaaggttttttatttttcccagagag

SEQ ID NO: 106524 - DNA, 433 bp, Homo sapiens
ttggtttcaccaggtacagtagcttgagcctgtattaccagctactcacgaggctgaggtgggaggattgcttgagtgcaggagctgagactgcagtgcactttgatcatacctgagaatagccacagcacttcaacctgggcaatatagtgagaccctgtctttacaaaacaaataaaaccaaaccaaaacaaaaaacttggttccatgcacaaaagtatttaaaatgtataaaactaccttcaggctatgtgtataagggatatatgaaacataaaaggctcatatttaaacctgggtctgatccccaagatgtatcattatgtatatacaaatattccaaacttcaaaaaaatccaaaacacttcttgtggtaccaggtatttcagataagcgatacctgacctgtatgcaaatacaattgtagtggtag

SEQ ID NO: 106525 - DNA, 498 bp, Homo sapiens
  misc_feature (1)...(498): n = a,t,c or g
cgtacaaatgggggncccggagncncggnancctagnngnccttagntgngcagtgcaagaaccnnaannnccggaacgacccacgcgtccgcaggtgttattaatattttggtatttatcctttcagtcttttttctaacacattcactatgtatccatatatctaaatacatgtttgtttatatttgtgtctgtatatgtacacgtacagacttttatacagaatttaagtcattctgtacattctgtttttttggttcttcttttttttttttggaaaaaaaatttccccttgtggccgggcttgaagaacagggaaaggatttgggttaattgaaacctccgcctccaaggttaaaaaaattttcttgtttaaccctcccaggaggtgggaataacgggctggttttacccctccaaaaaaataataataataataatttggaattttaaggggagacggggtttaacaatgcggggagggcgggtttaaaatg

SEQ ID NO: 106526 - DNA, 471 bp, Homo sapiens
  misc_feature (1)...(471): n = a,t,c or g
ccagtgacccctggggnngccaggttgngaccgnaggcngctangnncgggaaganccgggcccaccgcacgcgatctgaatttgcctattctggacatatcatctaaatgcagtcataaaatacgtggctttttgtgcctggcgtctttcactttatagtgtgaccacattcatccatgttgtagcatgtatcagtatttcattttgttttatagccaaaggatagtctgttgtatgtatatactacattttatttatccattcattagctcatagatttttgtggtgattgcactttttggctactatcaataatgctataatgaagagttgtgtacagctttttctgtggacatatggagtggaagggctgcatcttaatggcaaccctctgataaactttntgaggaactgccagttttctaaagcaggcgcccgcaccatttgacattcccatcagctgtgtgagg

SEQ ID NO: 106527 - DNA, 415 bp, Homo sapiens
cctaacgatacatttctcagaattgatccctattgttaagcgatgcgtgactgtgcatgtatacattacatacactgtatatgcacacatgcatatatgcatatatatgttacacatgtaaatatatacatagatatcacatacttaaattcctgaagatgccaattccgttaaacataaatatacacacactcatatatatgtgcacacactcgtatatccacacacaacatatttaatgtgctcatatatatattcctgggtgtgtgtgtgtgtgtgtgtgtatatatatacatagaaaatacattagttttctttatctgtgcaatcacattctgcaagttcaggtactggggacaactgtggtgtaaaaatatgtgaggacagtcaatgagatattttgaaagaggcccca

SEQ ID NO: 106528 - DNA, 425 bp, Homo sapiens
cccacgcgtccgcccacgcgtacgctctacctccatccaagtagctgtgaaagacatgtctcaccctggtaatccagaatgtggtgaaaccccatctaccataaaaaaaaaaaaaataatttagacgggggggggcttaaccccagttacttgtaaatctgaggggggaggatcgtttgacctcggaaggcaaaggttgcagtgagctgtaattatgccattgcattccaccctgggggacaaaacaagaccctgtttttaaaaaaaaaaaaaaaaggggggccctttttaaagaatcaaattttacgcccccggccttgaaaaaaaaaattttttttatagggccacaaaaataaaataccggggcgggggtttaaaaccggggggaggggaaaacccttgggttaaccaaattaaatcccttg

SEQ ID NO: 106529 - DNA, 373 bp, Homo sapiens
  misc_feature (1)...(373): n = a,t,c or g
acaggcatgagccactgcacctggactcttttctttttttgaaacaggtttttgctctgttgaccaggctggagtgcaatgacatgatcatggctcactgcagccttgacctcccaggctcaagcgatcctccagccttggcctcccaaagtgccaggattacaggtgtgagccactgcaaagggcccgaacacacttctttactcacataagttatctttcccaactcccttagttgccatccagctattttagcagccttaaatggagggagatggaaaccagataatcatgtgggtaaattgctcacagctgcagcagctgaccctggcctaccaggctaccgctgctgtgtctgcgtggataatttccn

SEQ ID NO: 106530 - DNA, 416 bp, Homo sapiens
ctcccaacttcttatttatgtcttactaaggcatctaaagcgcttggtactttctgctcatcagatccaacagcatagtgtcatcactgtagtggactagtgtgatattttgtggattgtcaagatgatcaagatctctgtgaactgtattatgctagagagcagaactgacatagtcctgaggtaacactgtgaaggtatactgttggccctgccaggtaaaagcaaactacttctggtgatccttataaattggtatggagaaataccaatttgattctaacttggtagctccataccaagtgccaagagctgttgtgtatgagtaaagatgctacatctggccccaggcgtggtagcttacagatgtaatcccagcagtttgggaagccaaggcgggaatgattgttgagcca

SEQ ID NO: 106531 - DNA, 384 bp, Homo sapiens
tgtctttaacatggcagattacacctttcctttgcaggtgaacacctgggagtgttaacggaccccaacacttacccaaaggtagccattgggtcaggtttctgcactatagtcccttctgtgggtgccagaaatacgttacaggaaaagggtcccgatccagaccccaagagggggttcttggatctagcgcaagaaagaattagggcaagtccacagtgcaaagtgaaagcaagtttattaataaagtagtggaataaaagaatggctactccatagacagagtaacccccgagggctgctgggtaagcatttttatgaatatttcttgatgacacgctaaacgaggggtggattattcatgcctcccccttttaaaacatt

SEQ ID NO: 106532 - DNA, 401 bp, Homo sapiens
ttctcaatttgatacctatgatttctagtaaattgtttgtgaaccctgtgagttctgctttaatcctctgacccctctgttcattcaaaaatggccagttaacagaaaacacctaataaaataatcttcatttgagccccggggaataccactgaacccagaagtggccatgcagaaggagtcagttaacatactttgttctccacgttctcaagaattcctggagagcaggataaagattaaggttctaacagatctgactcaagatgaattgtgaggccaagctcagtagctgacacctataattcccagcactttgggaggccaaggcaggaggattccttgagcctaggagtttgaggctaagatcatgccactgtactccagcctgggtgacagag

SEQ ID NO: 106533 - DNA, 387 bp, Homo sapiens
ctgcaacgtcgggaagctaccctatatggtctaaaaaggggaggcatgaataattacccccgcttagcatataatcaagaaataaccctaaaaaaggacaaccaacagcccttgggggtgctctgcctatgagtagccattcttttattcctttaaattcttaattacttgctttcactttactccatggactcccctcaaattctttcttgcgcaaaatccaagaaccctctcttggggtctggatcgggacccattttcggtaataaacttgtagcatttggcggtttaatgattgtggtttcttgacttgatacctcatttagcctcaacttgataaagatggtctttatggccattttattcagctttaattggtctaagggg

SEQ ID NO: 106534 - DNA, 409 bp, Homo sapiens
tacagattctttatcaggtattattttgcaagtatttttttcaccatgttggccaggctggtcccgaactcctgacctcaggtgatccacccacctcggcctcccaaagtgctgggattataggtgcgagccactgcgcccagcctcagttattttatttaacagtgtaagtacttagaaagtaagaaaattgctgatttagtttttttttttttttttttaaaggttcccccacctttttgaaggttaggccaaacccccctttcaaaaaaaggaaataacctcttaagaaggggtttaagtttatgttttttttaaaattttataaaggggggttggaaggttttgacttttaaaaagccaccccttaaattaaatttagcggggagtttaatttggggtttaaaaa

SEQ ID NO: 106535 - DNA, 481 bp, Homo sapiens
cggtggggccccaatgaagcgtcatggaagcctggaccggaactaccgggtcgacaccacgcgtccgtctcaattatttttatttcagttatatcacaactatttgaaatttgcttatgaagctaccaaagagtacatgcacagaaaggaaaccttatgcttgccctgccctgccatccagttttccttccctaaaagcaacctctgttacagaggttatctgtgcatgcgcacatgtgcacacacacaaatgtgaatgtacagatacatatatacatatgtatatatgcatatttacatatgcatgtaagagcaatatgtacatattacacatttgaataaaaatacatcttacaaaaatgtatactgttgtgcatatttctcttttttttacaatatctcaaatatgtttcatatctaaacagacatcactttttaatagctgcatagcatcttgtttatttataactaatacataata

SEQ ID NO: 106536 - DNA, 415 bp, Homo sapiens
cgacccacgcgtccggttcgattctggctcaggaagaacgctggcggcgtgcttaacacatgcaagtcgaacgggatcccaggagcttgctcctgggtgagagtggcgaacgggtgagtaatgcgtgaccgacctgccccatacaccggaatagctcctggaaacgggtggtaatgccggatgctccagttggatgcatgtccttctgggaaagattcatcggtatgggatggggtcgcgtcctatcagcttgatggcggggtaacggcccaccatggcttcgacgggtagccggcctgagagggcgaccggccacattgggactgagatacggcccagactcctacgggaggcagcagtggggaatattgcacaatgggcgcaagcctgatgcagcgacgccgcgtgcgggatg

SEQ ID NO: 106537 - DNA, 430 bp, Homo sapiens
attttagcattaggaaatttcctagtttcttttaaaatgaattttttgtaagctgaattctattttacatgcacaactttagtttgttatttctttccttgacaagcatttattgaatgttgttatatgactaaaactgtaagatgataatgtcttaatattttcacatttctttcatagcttccaaagtgtatatatatactcacatacttcatatatatgaatctacttatatactgtatataaaaatatgtatataaatatatacacattgtatataaatgtgtatatatatttacacatgtatatggatatacatatttatacacagatgtatataaatatacatatttatacacagatgtatataaatataccaatataaatatatacatttatatatacatatacatatttatacacagatgtg

SEQ ID NO: 106538 - DNA, 407 bp, Homo sapiens
tgcttataaaatgcctggacataggaagctctaagtttgctgctactactggtattatggggactattattaggcattgcaaggaaaatgtatcaacagatgaatttggttcaatactgccttctagttttgtgaccttagaatttataggaacaaaaaagatttgaaagggaggttgggctggatcatagagagccttgattccatgttttaggatgtatacacagtgagaagtccttcaggttttggtcttggtaagagttgtgaatcagaaagttaactcttgtagccaggcggagtggctcatacctataatccaaacactttgggacatcgaggcaggaggatcacttgaggccaggagtttgagaccagcctgggcaatgtagtgagacccctgtttctgc

SEQ ID NO: 106539 - DNA, 482 bp, Homo sapiens
  misc_feature (1)...(482): n = a,t,c or g
cgcgccantttgattggtacgtcggtcagcaccggccaccaattcccaattccacgcccgacccacgcgtccgagttatatgagccttaagcaagttgttatcttgttgctggtatagagccttgccttgatggtgatggctgctgacttacaggttggggtgactgtggtaatttctgagaaaaaggcaacaatgaagattgccacatcaattgactcttcttcttattaaagaattgggtctgtacaagtgatgctgtttggcagcattttacccacagtagagcttttttcaaaatgggagtcaactgccgaaaagctccttatactgataaatgacttcagtaaagtttcaagatacaaaatctatgtataaaaatcagtagcatttctatacaccaataatcaagctgagagccaaatcaagaatggagtgcctttctctctatccacaaaaagaataaaatacttatgaatacggg

SEQ ID NO: 106540 - DNA, 327 bp, Homo sapiens
cagcatgccttctgggtttactgaagcattatgccagagcacattcttccttggaagttacagtttgttctgggggaggttttaggtgcttaactttgagacttgggttgtgagggatgggggatggagggaaggcagtggaagacagggagcgcctgacagctcagttttgagtgagccattaaaaaaaaaaaaaaggctggatgcaggggtttatgcttataatcctcgctttttgggaggccgaggtgggtggatcacctgaggtcagggatttgagaccagcctggccaacatgggaaaaccttgtttttattaaaaaaaaaa

SEQ ID NO: 106541 - DNA, 511 bp, Homo sapiens
  misc_feature (1)...(511): n = a,t,c or g
agggcgtccagcggcgngcccgaaccctaaggngcctaaagntgctngcagnnnncccgnnnnnnnnnncngggnngacccangcnnncgnnnccgcgcgggtgcatgntgtagcttgcataagtacttccttccttttgagaccaagtaagattccatatggatacactgcattttatttatccattcatctatttggagatatttgggttgtttctaccttttggctaccatgagtaataccgataggaacatttgggtacaggtatctgatggagcatgtaactgtattcaagtctctggggcatatacctaacaacgatattgctagctgtatnagaattctatgtttttactttttttttttttttttaacacaaagcttcattttgtcgttcaggtggcggggagcggaaatcacgtttttgccctccatccggagccacaaaagcaaaattctgtctaaaaaaaaaaaaaaaaaaggggggtcccccacccggcccaaaaaaat

SEQ ID NO: 106542 - DNA, 419 bp, Homo sapiens
aaaaataagatccaactgtatgctgcctacaggacactcacttcacctataaggacacaaataaactgaaagtaatgggatggacaaaatattccatgcaaatggaaaccaaaagagagcaggtgtagttatacagattgagtatccctaatccaaaagtctgaaatctgaaatagtccaaaattaataaaattttaagtgctgacatgatgttcaaaggaattgctcactggagcactttggattttggtctttagggatgctaaaacagtaaatatataatgtgtagtagtccattctcacactactataaagaatgctacctgagactgggtaactatgaggaggtttaattgactcagttccacaagcttaacaggaagcatggctaggaggcctcaggaaatgtacaatattgg

SEQ ID NO: 106543 - DNA, 421 bp, Homo sapiens
cggacgcgtgggccgaggtatttaactagagatacctaggaatgaaatgaaaacacatattcgtacaaaaaaaatacacaaatgtttatagcagctttatttgtagtaaccccaaactggaaacaacctacatgtccatcatgggtgaatggataaacaaactgttgtagccatttaatggtatactattcagcagtaaaaacaaactattggtatatgtagcaacatcagtgaatctgagaataattatactgggtaagcagccagacaaaaaaagagttctaactgtatgattccatttatatagaaaatacaaactaatctctagcgacagaaagcagattcatggtcgtctggaggtggagaataagggtaagtgaggatgggccaggaggcatggactccacagaggcatgggaaa

SEQ ID NO: 106544 - DNA, 408 bp, Homo sapiens
cggacgcgtgggttttgatgttcagacatggttttaaaagcctgcattaaaaaactaatgtcctacagcaaaatggggcatatacaggcaatggactattatacagccttaaaaaggaattacgatgtatgctacaatataggcaaaccttgaagacattatgctaagtaaaataagacagacacaaaaagacaactgtcttatggttgattgcatttatataaggtatgcagaacagtcaagtttgtagagatagaaggtagaatagtagttaccagaggccaggggagaggagaatagggagctgttgtttgatgggcatagtttcaatttggggtgatgaaaaagctctagagatggatggcaatgatgtgcaaatacttaatgccactgaattgtacacttaaa

SEQ ID NO: 106545 - DNA, 424 bp, Homo sapiens
tttagtaaagacgagtttcaccatattggtcaggctggtctcaaactctgaccttgagagccacccacctcagcctcccaaagtgctgggattacaggcatgagccaccgcacctggccttgtgaagtcttttctaatccaccctgtcccactggcagaatgtttcgccccttagccagtgatatgcctttacaagagcatatgttgcactagatgtttactcggctgctttccacaggccctttcaaaggccatagattagacccacctttcctgtagccctggccaattagatcacagagacctatgtagatatggtaggaaaaatgatccagaatgtagctgtgacctggaggatgcctgcatgttccttcaatatcatactaaggctttgtctgtcatgaagattattaattctctagag

SEQ ID NO: 106546 - DNA, 474 bp, Homo sapiens
  misc_feature (1)...(474): n = a,t,c or g
cgggganattgaatcgtacgcttgacgcacgcgggtaccgatccggaatttgcgcatcgacccacgcgatggcttttagtagagacaaggtttcacctttttggccaggctgatctcaaactcctgacctcaagcgatcccccgcttctgcctcccaaagtgctgggattacaggtgtgagccactgcgtccggcctcaaagttacttttaattccgtgattctgtgattctcactttcctttatagcatgtaacacattgcaattccttggtgtcaatagcggttggttatctttttcttaaaaccattcgagaatttttatgaatcttgtttgaagatgcaaacttttaaggaaaatgttccttttgttttttccttctagtgagataatttattaggggaatatcagaaaaaagattttatgtaaactctttgtccgcaaggttattttcattttgctgaataggatgatg

SEQ ID NO: 106547 - DNA, 410 bp, Homo sapiens
aaataaatgacacctcacttatgtgccaaagctcatgcagttttctcagaaggaaagactttaaattcttatttcaaagcacattaattcttaacctagataaaatcctaacacatttgattatatgattttcaaatacgtggcagattaaaaacagcaaagtagaaaggagcagcagacacattaacaacaaataatggtcactgagaaaatgacaaagagaagagatagaaatgtttataacacacacacacacacacacacacacacacacacaaaaccctgaaattatgttttttaaagtggtgatgtttttaataataacagagtttaagtaaattatagctcatctattcaaagattattaagaagtccttatattatttgtacaagaacttttagtgtcacaa

SEQ ID NO: 106548 - DNA, 1960 bp, Homo sapiens
aacaaaaaaaaggaccaaaaattgataacgacaatttgtaatggtcagtcctatcccaccagtctaaatgaaagtttaaaaattttcatatactgtacagaagtagatggagtcttaatgctaggtaagggtaaacaagctgaaatagcagtcagtgacttcagagaccatgaaaccaaagttaatcttctaagtccttttaattgttcttataaactagcataagatataaacttaagtagtacacatgagttttataatttactaatctctgacagatagctaagcatagcacatcagagcgtaacacagtgtgagggaaataaagtgtacaatgacatcttctattctggacctaataattcaatagagaaagaactacttgtagtcactgtggttacagaaggtttcatggacagcgaacataaagctctactagctaacaaataggtcttaatgataaaaacgtgggccttcagagaactaaaggtaccaatgtgtggcagtccaaaattacgaggaaaatgagttcccttcatgggtcacatcagcaatttttttttttccccctttttgagacagaagtacttggctctgctgcccaggttgggagtgcagtggcaatgatccagggctcactgcaacctccgcttcccggggttcaagcaattctcatgcctcagcctcccgagtagctgggattacaggtgcctgtcatcacggctggctactttttgtatttttagtagagacatggtttcaccatgttggcccaggctggtctcaaaactccttgacctcaagtgatctgcttgcttcagcctcccgaagtgctgtgatcgtaggtgtgagccactgtgcccagctacctcatcaattcttaatctataaaccatggataggcttcgggagaacccaagaaccaatgaaatctgttggtaagttttatgtgtgcggttttctacagagagggtcaacagcatgtatattttcaaagaagtctgtggtgcaaaagagagtttattgttagaagtccttgggcaatcaacttggaaaagggtggattgagaatgggggctgtctagatcaggataatgttgaatttgaccctcacttgaggcttttgtacagaggatgagaagacggtaaattcaagggttaatcagaaattaacaccaacatgacttggtgatgagtgagatgtgaaacgtgagaaaaacatcaatgatgaaatcaagcttctgacttgcaacagtgagtataccaagagctacaggcttggaagatgaataaagttgggagcattctgttttttcatgagtgcccatgggacagacagggagaaatggacagttgaaagtacaagtctagacaggcacagtggctcatgtctgtaaccctagcactttgggaggctgagataggagaattactagggttcaggagtttgagacgaacctgggtgaccatagtgagagctcatctctacaaaaaataaaattagctcggcatggtgctgcaagattatagtccctcagcctctgagtaagctgggattacagatgctcaccaccatggcctaggtaatttttgtatttttaagtagagatggggtttcaccatattggcccaaggcaggtcttgaactcctgacctccagagatctgcccacttcagcctccccaaagtgctgggatgacaggcatgagccactgcacccagccttatccccaatatttaagaataaaattgtattctctctacagaagtaacatgatcacatttactttaaaaaaaaaaatcaataccatgaattcttgggaaaaaaatatctaaacttgattttattacagatctcaccatcagtttatagaaaatatagggaatggaagagcatgtttaccaccacctagaaatgtaagaagccaaatccaaaatatagaaaattctattgaaaaaa

SEQ ID NO: 106549 - DNA, 395 bp, Homo sapiens
ggcacgagggaatttagaatcctgtcagagaaatttaagaaagagattgactttttttttttttttaaaaaacaaagttcccctccacccgggccaaaaaagcaaactttgtttaaaaacaaacaacccccaccaaaccccaaaaaacaaatttggggcctaaaaaattcggtggccaacctaaaaaacccttcaaaatctctcacccccaaattggaccacccaaaaaaaaaaattataacccttagggccaaccggtttggaatccccccggggaaaaaaaagagggacccacccctccaaaatttaaagaccccggggcaaatttgaaagttatgggccttaaagggggggtaaaaagaaagagagggggaaaaaccttccctcaaagagcc

SEQ ID NO: 106550 - DNA, 494 bp, Homo sapiens
  misc_feature (1)...(494): n = a,t,c or g
ngatgtgcctggagcatgatgatcttgcaaccncgcgacnngaatataggtatatgaagaaatttatattaaggaatcggttcacatgattatggaggctgacaagtccaaaatctgcagggtgggctggcaacctggagacccaggaagagtcaatgttgcagttcaagtctgaaggccataggctgcagaatcccctcttgcttaatcttctgttttattcagtctttcaactgattggatgaggcccatcctcattatgagggtgatctgctttactcaaagcccatccatttcaatgtaaaaatctcatccaaaaacacctacagaaacatctggaataatgtttggccacatgtctagacactgtagcccagccaaagtgacgcttaaaatgaaccatcacaccaattgtgctattgacctgtacccactgaggtgagacatgatcagagactgggcaattttcacagtttggacacagctatgagcan

SEQ ID NO: 106551 - DNA, 480 bp, Homo sapiens
gcgcggacgagatcatatccagtgtggtggaattccactgggtttcaccatgtttcccaggctggtcttgaactcctgacctcaggtgatccacccaccttggccttccaaagtactgggattataagcgtgagccactgcgcccggcctttttttttttttttaatctgggcacaaaaaaaaaggagggtttaacaatcggggcctttttaaattggagaaaaaggggtaaattcacatacgggaacaaggaaactatgctagggcatggtataggctaaacctaagggggaaagaaaaacctcagggaaggaaagggggggtaaaaggaatatttccgggggggaaagtttttttttaaataaccagccaccccagaaaaacacccacctagggggaggctagaacaactgattgagggctaaggaccaggttttgcccaaaatcctggtttgtgaaatggaaatgggggaaagttgg

SEQ ID NO: 106552 - DNA, 861 bp, Homo sapiens
  misc_feature (1)...(861): n = a,t,c or g
gttgttcagtggagaaaatattttattttgctttcatttttaattttaaattaagtaaaatttgaaagttcttttgcactagcccacctatcaagtagtcagcagccacgtgactggtaccttctacattgcaccacacagttctagaatttcatataaatgaaatcatttactatatactctttttggcatctttcattcagcataattgttctaagattcatgcatgttatgtgtatcaatagttcattcctttttattgccaaagtattaccccattgattgggtaatacccccaattttttaatccgttcatcttgttgatggacatttaggttgttttttagcgtttagcttttaccaataaagatgctataggcatccagataatagtgtttgtatggacacatgctttcatttttcttcagtaaataacccagcagtggaatgctgtcatctggtaggtgtatatttaatcttttaagaaactgctaaactgttttccaaagtggttgtaccattttgcgctccctctagcattgtatgagagttccagtcattttatatctttgtcagcacttatatgatcagcccttttaattttagccattctaaggaggtgtttagtgggtatcctcttatggttttaagtagcattcactaatgaccaatgatataaagcatttgttcatataccatacctgttttgtcttctttggagaaatgtctgtttaattttcctcctattttgcctgagcaagttggggaaatagacnnnnnnnnnnnnnnnnnnnnnnnnnnnnnagatacaagtcttttgttgggtatatgttctttaaagattttctttcttggggctga

SEQ ID NO: 106553 - DNA, 578 bp, Homo sapiens
  misc_feature (1)...(578): n = a,t,c or g
gacccctttatttgcacgtcaggggagccggctccccccttgaatgtattttaccctggtgtgggggtcactgggccctaaatttttggggggtcaccagccactccaggggcagggaccatttcttcattttctgaaagcactttaatgattccccttcccccaaactccagggaatggaggggggaccccgccagccaaaacattccccccattcccgacccccctctcctcttctagcccatgcccttccccggcggagggagggagcagggagccctcactctccacgccccttgcttgcatctgtatatagggggagcagcaagtaacccttctcctccctcccccctcccccctcctcaatgtagtggccttggatatcctgtttgttaataaagacaattcaaccagctcccnnnnnnnnnnnnnnngggcccccccttgaggggaaaaaagttttactcccccggcctcccaacgaaaaaacttttttatgggggcaccaaaaaacacaatccggtgggcgggggttaaaaaagggggggcgggggaaaaaccggggcggccccaaaaat

SEQ ID NO: 106554 - DNA, 475 bp, Homo sapiens
  misc_feature (1)...(475): n = a,t,c or g
cgagagcnnattgaaaccactgagnatggcaggcacgacgcaccggnccggaattgccgggtcgaggggaggcatgagaagggcagatcacgaggtttggagatctttaccatcctggctaacacggngagggcccgtttgtactaaaaatgcggagaaattagccaaatgccgngatgggcacctgtaggctgaggcaggagaatggcgtgaacccgggaggcagagcttgcagtgagctgagatagcgtcactgcactccagcccgggcgaaagagtgagactccgcctcaaaaaaaaaaatcatgatatgcctccactttaatggctcattggggggttcctcattattaatctctctacagcattttttgttgttgttgttaatggcatcaggggcacaagacagaaaaggaaatgccattcatgatacttatatctttcttatcccccacattggggatatcaccatacg

SEQ ID NO: 106555 - DNA, 470 bp, Homo sapiens
  misc_feature (1)...(470): n = a,t,c or g
gagcgccttttgaagctttgatatgtcttaccggnccggaanncccgggtcgaggggaggcaggaggatcaggcagggaggttgcagtgagcctttattgcggttgtacagtccagcctcggcaacagagggagaccgtggaaagcgggagacggagacgagggaggggggagaccgtggaaagcgggagacggagacgacggagagggagaagggagagggtaattccctaattctttactctgttatctccactctattctcaatctcatccagtgagggtttatttctgttattgtatttctcagttttataatttatgtttgtttcaagataatatttgattgcggaagcatttttatgtctgctgctttaaaatgcttgtcatataattaatgccagtatctgagttagctcagtgtcggggtcatgtgattgccttttctaattcagattgcgaatgttctggg

SEQ ID NO: 106556 - DNA, 406 bp, Homo sapiens
gcgccggggcatgccaccacacctagctaatttttatatttttggtagagatgcggattccccaggctggtctcgaactcctgggctcaagtgatccactgccttggcctcccaaagtgctgggattacaggcatgggccaccatgcccagccaagcacccacacccggccccctcttgattcttgaaagactggctccttcctgtcattgagttcagattaaaccttccctcctgagaacagcctttctgaccacagtcacacttaatctaatcatcctactgctttctgcattgccctcctgcttgttctttattgtttatttccttcgactagaatgtaaagtccaagacttgatctgggtagttacagaagcaacatttatgtcaaaattcaccaagctata

SEQ ID NO: 106557 - DNA, 465 bp, Homo sapiens
tagatacccgtgcggaatccgccgcgcgcagatggcaggcaggaggagacaggaaagagcagcagacctgactgctgctgcgcaaccgagacgcagactgggcgacccagtgagaccctgtgtcaaacccggaaacgactaagccagagcctcccaaaaaaacaactgaaagttaacctggcctaaatctctcctgtggctcccttcacacttaaaactcatcttaatgcgcaaaccgtgaacaacagcccccgtctccccagcctcatttaccacaccccttacccacttcactccaagtacacagactgccttgatgatctctgcctcccccgaacctcttcactcccctttatgacacccagaaccctccctgcttcctgtcattcagttccctgcttaaacatcgcctccttgaccccctgtctacagcagccccccgtctccaacctgccctctccatcc

SEQ ID NO: 106558 - DNA, 2235 bp, Homo sapiens
tttaatcaaacatgactaattttaatgtaattactaaagaaagatataccattttattatgacactctagccatacattttcaaaatatgcttattaaacagtaaatgtaagataatgattcaattagttacatttttagaagtcattaggattgatattcctctgccataagtgaattgaataataatttcaaatacaatcagaattaatttaataaaaaatatgcttttcaactaagacagatgtaacgaatggccagtcattattttctggtttcaaagtagcaggggaaattaattcagtgtctgtaagtttatttatcacacttggcctataagtgtgataaaaatacatgaggcaaaatacatgatgtaatcccaattctcatagttcattaactcttttaccaaaaagatctgacatggtatttggggcctttatgtaaactgaatataagctgcgtgatatttgaaaggttttgatattttgaatagacattttcatgatacacagacacagataaaagatgtaagtagacagcttgaggtttcagagtccctcctgcagtgtgtttagcagcgggtacaagataaatatccaaacaaaatcagattaagggattaacagaagtgactttgctatgagttggtgagtggggtcaatgggtggcttgaaagggattttagagctctgtttttatttttcctactttacatcagtgcattttgggcaaaataaaatgagtaatgtttacttttaggcctcagtaatataaaaaaaggcagattctaaggattgtggaaggtcatgtttttgaaagtgaaaggtaattcagctccggttattaggagaaactctgtctccatcttaactcatatttcagttgagcagtaacatttggttttgtgtcctctctttttttttttttactttaaaaaagcttgggatttttttcccccttgaaagacccccatcaaacgatagttgaaggaatgagggagagaaggatccatgtttaagatccatggtaaatcatacattaagagggaacacatggggcagggtgtggtggctcatgcgtgtaatcccagcaatttgggaggctgaggcgggcaaatcacaaggtcaggagtttgagaccaacctggccaacatggtaaaaccccgtctctattaaaaatccaaaaaattagccgggcatagtggtgggtgcctgtaatcccagctactcaggaggctgaggcaggagaatcgcttaaacccaggaggtggaggttgcagtgagccgagatcatgccactgcactccagcctgggggacagtgcgagaccccatctcacaaaaaggaaaaaaaaaaagagggaacacgtgaaatatatgttttcagtgaggttcctttaattctagagtttcagcttggtcagccctctataaaattctgaggcagatactaaaataataagggctgggttgggatgggggcagaataaagacagcttcaaaaatcccctgggcctctgtcttatctgtgagaggtttctttaaaaaacaaaagcattgttccagataggaattggttatttaaattgatatctttatcctgtaccatatgcacttaaagcttctgacagtcttctctcttttttaaatagaaattacacaaaaaagatatctatgtatcactttctaatacctaacaggaaggtcttataaaatattaaaatagcaataagcaaatatgtactacaggattaaacactagcattgaaaacaaaacaaaatccaaaaccaagaatcaacaacattttccttttgttgttgcccccctaccagatctggactttatggtctttgcaagggaggggcataaactttcacaattcttctgttttaaaataaatgatgccattgcataaatcagatttatcttttgaaaatattggtggaaagccatgtgatttgaatggaaagattctttcttctgaggagagccaaacaggttctgctctaataaattagcacaatcttttaagattaaaaatagcaaaacattttaaatagtctgattatagcttcaacaagtcaaacatacatttctatctagcctatagttttaaagagtctatgtgggtttaacttattattcctcattctgatataaaaaaaagaagaaaagaaccaagtcattttgaacattaagaaattcataaagactgtataaagtaaaaaaaaaa

SEQ ID NO: 106559 - DNA, 424 bp, Homo sapiens
  misc_feature (1)...(424): n = a,t,c or g
ccgttgtaccgggccggnnttcacgctcgacccacgcgtccgcccacgcgttcggggaggcggaggttgtcgtgagcttagatcgcgccattgtactctagcctgggtgacagagcgagacttcatctcccgcaaaaaaaggtggtgacttgatttcacagagaactccagctgcctgagccaccctgcaggataggagcaggctctgaggtccacagtttgctactgtctcaacccactgcccccagctcctctgagacccaggcaggactgcaggcccatgtaggttcagatggatgcctggaggccggacacggtggcttgcgcctgtcatcccaacactttgagaggctgaggctcaagtatggcttgaggccaggagtttgagacaagcctgggcaacatggtaagaccctatctctac

SEQ ID NO: 106560 - DNA, 777 bp, Homo sapiens
ttttttttttttacttttgctttatcttcaatgaacttatttccaaatgccccaaatctggcaataagttattatttttaagagaagggatctcactaaggtggccaggctggtctggaactcttgggctcaagtcgtcctgctgctgagcctcctgagtagctgggactaccaggcatgggccattccacccagctaaccgattaatatttttactgttcctttttaaagctagctccatagctggaatattgcctgtgttggatcctatttgctggattcatgtcattctctggtttgtgtactccttcattttgctggagtattttctccaacagcttccctaaaaagggcacatggaggtaacccctgagtctttgcttgtctaaaaatgtattattttaccttcacccttgattatttgggtgaatatagatttatcagttgaaaataactttctagaattatgaaggcatggttccattgttttcagattccttttcgagacaaggtctcttctgtcaccccagctggagtgcagtggcacaatcacgactcactgcagccttgaactcgtgggctcaattaattcttccatctcagcttcctgactagatgggaatacacggtgtgcgccacaatgcccagctaaattttgtgttttttgtagaagatggtggtgaatggcagctcacctgtaccggtgctggggactcaagttgggtccttggagaaccacttaggtattacaaggaaaggcttattaaatggtatctg

SEQ ID NO: 106561 - DNA, 406 bp, Homo sapiens
  misc_feature (1)...(406): n = a,t,c or g
ggaagtaaaacattgaagccatgcgtgtagacaattattttaagagttgtgtcttgttttaggagggtggaaataagttcagtttgaggcaggttgaatctgagatacctataagacgtccagacagagtgtccagttaggcagatagatatacagccctgaagcacaggagaaaaatagggcctttgtagatacagattggcaagtcagtcattcaataggtaatcactgaagctctgggatctgatgagttggaaggaagacagttatggtggtgaataaagatacacagccaagtgcagtggctcattcctgtaatcccagcacttttgaggccaaggctggaggactgcttgaggcaaagacttccagacccgcctgggaaacatanggaaactccactttn

SEQ ID NO: 106562 - DNA, 423 bp, Homo sapiens
tttcgtgttctttgttgttgtactgtcaagttttgaggatatgtggtttccaaatgttttctccccatctgtagcatgtcttcatccacttagtggttgttttacagacagaggtttttaattttggtgaagttcaattggtcagcctttagtggattgtgcttttagtgtcaagtttaatatctctttgcctagcccttgatcctgcagattttttcctatgttaattttttcctgtaagttgtattgtttaatgtgttacatttaagtctgtgatccattttgagtttttttttttaaaaactgagatttgggctgagtttttttgtctggatgtcatttgctccagcgtcattttcttgaagaagctggctttgttgaattggtttttgattttttggaataaaaaaaaaataatctggc

SEQ ID NO: 106563 - DNA, 414 bp, Homo sapiens
tttaaaattttttgtacagacgggagtcttcctgtgttgcccaggcttgtctcaaactcgtgggctcaagcgatccttccgcctcagcctcccagagtgctaggattataggtgtgagccactgtgcccagcctctcctacatttttatttttcttcaatctgtgggaatgaagtaaacttggttactttcctaatttcttaggtttataggaagagaaatgggaaaatacagataatacagtatcataagtaatttattaaaataatggattctaaaactcttacacttaaaatagtctcaaagattagttgaactataaaacaataaaaaaatttttatgagtacctctgcacgtgagaatcagtgacatactaaaaggtatttgtaatattagtgctaggtagcacatttt

SEQ ID NO: 106564 - DNA, 427 bp, Homo sapiens
gacccacgcgtccgcggacgcgtgggcggagggaagatgtctgtttagaccggatattggcgctgcctccccgaatcccggacctgcgctgaggaggcggttcatctgtggccagcggtgcttctggacccgcgctgggggaaccctggcgacggggcctggccctgctatatgcgggggcctcggctggagtgagcggcgtggacgcctcttttctccggctctttccttgttgctgcgagagcgagagggccgcgggcggcggaagcagcggggccgggatggaggacgttaactctaacgtgaacgcggaccaggaggctggagtgcaatggcgcgatcttggctcactgcaccttttgctcccaggtcaaggaaatggcttggaaagaagctgagcctaaactggctggatgactttctagaa

SEQ ID NO: 106565 - DNA, 401 bp, Homo sapiens
tgattcagaatcatttttaaaatgttcacaaataattctgaagtgtatccccagtatagaaccactgcactgaaacagttctctttcagtaactaacgtgtgtgtgtgtgtgtgtgtgtgtgtgtgtgtgtgtttgtgttacagagagaattttttttttaaatttttaattgggaagggcacttatggatgtatatatttatggccaaaaacttttattcttatttttatttatatattatacagcccccggggaagaagcatcttaaaaaaaaaattcttttttctaacctaaccttaaaaaatgttaaaaaacattgggcacttgttataaaacatgaagcttataggctgggtcaatgtacagtacctcccccaatctgtcttttctctttgtgagg

SEQ ID NO: 106566 - DNA, 1198 bp, Homo sapiens
  misc_feature (1)...(1198): n = a,t,c or g
tttgagacagtctcactctgttgcccgggctggagtgcagtggcgcgatctcagctcactgcagcctctgcctctcaggctcaagcaattctcctgcttcagcctcccaagtagctggggatttacaggcgcccaccacgaatgccccagctaatttttccgtatttttcagtaaagacagggtttcacccatgttggctaggctggtctcaaactcctgatcccacccgcctcggcctccccaaagtgctgggattacaggcgtgaaccaccgcgcccgggtgacctttggaacttctgaccgactggcttcaagttgaggttcccacaattccctctgtaggttcaatttgctgggagtggctcacaaaactaaggggaaatacatttactggtttattataaagggatattataaaagatacagataaagagatgcatagggtgaggtatgaaggaagggcatggagcttcctgtgccctccctgggcgcaccacccttctagaacctctgtatgttcagttatctggaagctctctgaatccagtccccttggtttttatggaagcttcatgacagcagcattccttctagcaggatatggggtgggaccgtctctggaatgagttttatgaccccccctcagaaaggtagggaagattagagtcctgtcttgggcaggtaaaagaaagggcaggaggttagagtgattgtctcctgaggcctgacacacccaatgttgtaacaaaagagtgtaacaagggctgtgggagttatgagccaggaactgtggacgaaaataaatgcgtgtgtttgtatatatgtgtgtctgtgtatttatatatatatgtgtgtatatacaaatacacacacacacacgccaccacaaagccaaaaaagaagaagtgatcatttttctaagtgctacgatggatgccctgggagagcgagccagagggggcatgtttatgggctgagctgcacccccccacccccaatttatgtgttgaacccctaatccccggtagctcgcaatggcccgtatgtgaatggatatggagataagnnnnnnnnnnnnnnnnnnnnnnnnnnnnnnnnnnnnnnnnnnnnnnnnnnnnnnnnnnnnnnnnnnnnngaaaatctggacacacaaagagacaccagggacacctgcactcagaagaccaaccagggcca

SEQ ID NO: 106567 - DNA, 472 bp, Homo sapiens
cataactttataagacagacaccattgctatgcgtattttattttaccaaatagtgaggtttcactatattgcccaggctagtcttaaactcctgagctcaagagattctcccacctctgcctcccaaagtgctgggattaatagggcatgaagatgcccgcccttggccattattcctgttttatatagatgatgaaactgaaatcccagagagtgagagtaattttgcccaaaggacacacagctaaaagtggcagatctacggatttgaaccccaggctggccggctggctctactcattacactcactgcgttgcctcctgaagcgtgtgtcacgaccccactgttaaccacgaccttgatattccatctctccaaaaaacagttagacgtgcctctttgtggatcttgacctttagttacatttcttttcccagcatcttcaaagtctcatctgccttcctcatctc

SEQ ID NO: 106568 - DNA, 373 bp, Homo sapiens
gacttttgggtgtttgtgaaaactatatggaggaatatggggtttttttttttttaggagggggctaaattcggccacccaggccgaaatgcaggggcacaatttgggttaattgaaatctccacctccggggttaaagaaattttcctgcctcggcctccggagaaccgggaataacaggttcccaccacaaggctgggatagttttttatattaaaaaaaaaccgggtttaaaaacctttactttgggaaaacccacccccccccccagtttcaggcactggcaccagcctgccccaatgggagtctactctgaaatactgggggaaaaaagcctaaccaatgggtgggacccccaaactaaaaaaggccc

SEQ ID NO: 106569 - DNA, 379 bp, Homo sapiens
tcatttcactacatctctctccctctctacctgggggcctggaataacttttaaacattcatctttgtgtttttctttagtgtttgaattatttatttttctttttttttttttttggaagggggttttttttcacccccccgggtggaaggccaggggggaaattcggtttatgggggggttccccccccgggattatgccatttttttggctaaaccttctggaaaagggggactgggggggcccccccccccccccgggtaattttttttttttttttaagggggcccgggttttccttggttaccccgggggggcctaatttcccgacctatagaaccccccttttgggccctccacggggggggaaaaacaggc

SEQ ID NO: 106570 - DNA, 391 bp, Homo sapiens
acttttaaaattagagttttaaatgatacaaaaagtattggagatcagcattaatatcattctatactaacaagaatgaaactgttccaataagtagctaaaagacaaacttccttctgtccatggacataaattagcaagttttttttttgtaggggggggggggcagggtctcactctgtcccccaggctggagtgcaggggcacaatctttgctcactgtagcctcagcctcctggacttaagttatcctcccaactaactccctcccctaccaagtagctgggactacaggtgtgcaccaccacacccagctataaattagcaattcttatattcctaactagttacttgtaaaaatgaatagggtggatttgttttcattccccag

SEQ ID NO: 106571 - DNA, 382 bp, Homo sapiens
cagtatgtttattatggaaaagtttgaaaatatagaaaagagggaagaaacaaaaataattcataatcttagcttgccagcagcactgttaacctttcaatatattggttcagcgtcttagtctatatgcatagtttggagttcatattgtcagtgcctagcccccttttttaggaggcggggtctcactctgtcacccaggctggagtgcagaggctcaatcatagctcacagcagccttggactcctgagctcaagggatcctcctgcctcagcctctcaaagtgttgggattacaggcgtgagccactgcgcctggctgagggctgcattcttaggccctgcaggggtggaatgggcacagctcttgagagctctgcgg

SEQ ID NO: 106572 - DNA, 381 bp, Homo sapiens
attatttgtagagacagggtctccttgtgttgcccaggctggtcttgaattcctgggctccagtgatcctcccatcttggcctcccaaagggattacaaggtgtgagccactacactcagccaagttttttattgagctaatatttatctcattgcaatgactcttattcctggatctgccctctgatgctaaatatagtaataatatgatagtatacatattcattggttttttagatcacttttttttactactttaaaaatgattttttaaaaattacagttctcttcctgtaggtctaacctacatccaaattaaaacagaaaagaaacaagaagaggtcacattgctggctgacccaccagactctaatgtagtgg

SEQ ID NO: 106573 - DNA, 737 bp, Homo sapiens
gttagattggggtggggggatgggtaaaggagaaaggagttagagatatctgactggaagactgatttgaagtgattgtggaaattaatggaaaaggctttgatttgtggaagaggattacggtctagatttagacatattgacatcctcacatgaaaatgggaaacaaggatttgaaatcttgggactagagttatagagatttattaatgtagtgtagcatgtttgggaaaaaaatggagttggaggtcagaggtctgtttgcattgaatcctggcttaactaaaaatacattaggtgtgtccagtttacaaaatagcttagaaatgagatcttttaagaaactctatacaccatggaataatatacagccatagaaaagaatgagatcatgtcctttgcagggacatggctggagctggaggcccgttatccttaagcaacctagtgtaggagcagaaaaccaaaatgctgccctgttctccccttatggggtgggagctgaaatgatgagaaccccattggacacctagaaggggaaccagccacacactgcccgcttgtggaagggtggaggatgggaagagggagaagatcaggaagaataatggatacttattcttcctgaatcacccagggtgatgaaataatatatacaacaaacccgcatgacaccatgtttacctatgtaataaacctgcactaccctgctagttgtactcctgaacttacaagtt

SEQ ID NO: 106574 - DNA, 434 bp, Homo sapiens
  misc_feature (1)...(434): n = a,t,c or g
agcaaagcaaacgtcctgaggtcggaggaattctgggggaggccgtggaggctctcacaggagcagggcctgcccatccatcttctccccagacctgcccctgtggcctcacactttgtcctcatacctcccaagccacctttgtgtgcctccctggagggtttatccccagtatgtgctcagatgtctgcacaaaatatacttaaaatggaaacatttctcaagcatggtggcgcgtgcctgtagtcccagctattcaggaggcctaagcgggaggatcgcctgggcccgggaggttgaggctgcagtgagctaaacaccacacttcaacctgggcaacagagcaagtccttggctctagttttgggggagtgggggggagatcttagggctgagcttctctaaggcangacctggcccctgtggggtggcct

SEQ ID NO: 106575 - DNA, 379 bp, Homo sapiens
taggagttagctagcaccatgagcttcaataccctggggtcgggggcggaggcggaggttgcagcgggccgagatcacgccattttctgggcgagagagcgagactccgtctcaaaaaaaaaaaaaaaccccgggaaaaaaaaagcctaggggagggggggcttttggcggggtaaacccaggccgctcttggccgggcgggaaaatttacggaaggggctaaaaaacctccttaagggaggaaaaaaaaccggcaggggggttttggttaaaagggaaaaccttttggggccccaggttttgggaaaaatttggggccccaggctttggaaaaaatggggcctttaattataaaccaacccccggtgaaatttgaaag

SEQ ID NO: 106576 - DNA, 394 bp, Homo sapiens
  misc_feature (1)...(394): n = a,t,c or g
cggcacgagattttttgtgagtgtattttttgtagagacaggggttcgtcatgttgcccaggctagtctcgaactcctgagctgaagcaatcctcctgccttggcctcccaaagtgctgggattataggcatgagccaccatgctgattcctatcataattttgatgacttcagtagccacatagatgacccttccaataccctggcctctcaattatttgatctcctcttttccagaaggctcatcctctaccataacttagccattcaacctcaaaatcataccctaaaccttgacattaccaaaaactacaccctcttcataatctcaatttcatgcatcaccagntaccaccatcaatcttgctagcttcttttctttaggatgccagct

SEQ ID NO: 106577 - DNA, 433 bp, Homo sapiens
tgagattgtgccactgcactccagcctgggcaacaaaggcgaaactccatttcaaaaaaaaaaaaaaaaaggggaaaaaaagggggggccttttaaggggggcccgggggtttaaaccttaaccccaaactttttggcaaattgggggggaaaaaatttttaaccccaaaattttaaaacccccctaacccaatttgggaaccccctttttttccaaaaatttccaaaaaatttttaacggggggggggggcccttcccgggaaaaccccttcccccggggggggggggggggaaaaatctttgaccccccaaggggttcaggcttcaagaaccttaaattggcccctttccctgcccaaccggggggaaaaaaggaaaccctttttaaaaaaaaaaaaaaaaacaaaaaaaaaggccttccctttttgtggg

SEQ ID NO: 106578 - DNA, 391 bp, Homo sapiens
caaaagaaaaccttatatccattaagcagtgactcccaattacccctctcccctagcagacaccaatctgccctttttttctatgaatttgcctattctggacattttatgtaaatggaattatatgtgactttttctttgtggcttgtttccctcaggataagggatatgagagtcatttatggggcagcatgtaacaatacttcattcttttttatggctgagataatattccattgattggagagaagagtttttgcgcacccattcgtctgttaatgagccttaacgatgtgcccaccttttggctattgagaatatcgctgctgtgagtatatgagtaccgtattcttacaaacacctattttcagactttttggatacacctcgg

SEQ ID NO: 106579 - DNA, 377 bp, Homo sapiens
tgcactcaagcctgggcaacagagccagactccatctcaaaaaaaaaaaaaaaaaaaaaccccaaattgggggtgggggggtggaaaaaacccaggctttaaaaccaattttttgggggggggggggggggggattatttgaacctaaaaattaaaggttacgggggcccaaaaaacccccctttgctttgacccttaaaaaaaaaaggaaaattctttttaaaaaaagaaaaaaaaaaaaaaaaaaaaaaaggtttttttttttttggggcccgggggggtgttttttggggggggtttttttttggggggggggggccggggtatttaccccgctggagagaaaaacgggggaaatttattaaaattatggatag

SEQ ID NO: 106580 - DNA, 298 bp, Homo sapiens
cggcacgaggtggatatgtatttcaagtcaaccaaatttggaaaatgttaaaatttattaaacctcaccatggaatacacgtatatttactttctcttctttgaaatattttataataaaaaatctactctgacctcctaactcatactgtgatggcagcatcaccctaataccaaagtcagacaaaaacattacaagaaaggaaaaatacttacgaatatctcatgaccatagatgcaaaagttttcaataaagtgttaccaaatagaatccagcaataaataaaaagaattatatt

SEQ ID NO: 106581 - DNA, 1163 bp, Homo sapiens
aaaaacagacatagtctcactgttgtccagattggagtacagtgacacaatcatagctcactgcagcctcaaactaatgggatcaagtgatcctcctgcctcagcctcccaagtagctaagcctactgggcattgcactactatgccccagcctcacacagaaggtttctgagtaatctgttgctctttttccctacaatttgtcttccatataactcaaactgacaaggctatggcttacataaagaaatatattataaatcaacaacactcatgataagtttacataagacatgagaatacacctgaatcaccaaccgggaaaaatgattgaagagcttgaaattaagcctaagtgtaagtctctgttaagcttacaacattacaatagttaaatcgaaggttagaaagaaaatggtagacattgctccttttcctgtacttaccaccattacttaaagaaagttctgaataacaacaactttgagcctttttcattgttgtattcatggatgacaccaacacatactacttctgcttaaaaatcaaactcattcatcttgacttgttcccagaaacatgacacagaagatcattttttgaaaaagtatttttgtaattaccatctgcatacacctgagagactgtttctaacatgttttggtcatttttaatcattctatctgcctttctttgttataaggatctatttttaattttattcactcctaacatagaggggaagtgcataccttcaatgacgcaaagtaactagttaatgttgtttcagaataatatgcaaaagggaagggaggaaacagcacaaagtatatcatatttttacacatcagacaccttcaggaagaaaggacatttctcatcttagtgtgacagactctggccaatatcccctttgaacatctgctttcgctggttggtaaaaaagtgtcattttaaatttagtgttactccttcaggctattccctctctcttcttacttgcagggccaaagcaacgtctctttccaccttggtcaccttccaacaacgatttcttcggacgcctttgttaatcattcccctaaaacctctgcccggctccgcggaatcgtcccagtactcctaacatggcggccgagtcccctttgctccttcctcgtgcc

SEQ ID NO: 106582 - DNA, 393 bp, Homo sapiens
tgtgtttctccatgttggccatggtgaaactttgaaggccaatggtgaaacatgaggccaaactcctggcctcaagtggtccacccacctctgcctcccaaagtgctgggattacaagtgtgagccaccgtgcctggcccaataacaattttttaaaaaacaaaattgaaattggtattttactgatacctaggggaaactgaggcactgcaaaatgaggacatgtctcagtcagcttgagctgcttaacaaaacaccacagacctcaacagagatttatgtctcacagttctgggggctgggaagtccaaggtcagggtgccagctgattcggttcttggtgagtgctctcttcctggcttgcaaacggccgccttctcgctgtgtcttcag

SEQ ID NO: 106583 - DNA, 323 bp, Homo sapiens
tcttaatagagatggggttttgtcatgttgctcaggctggtcttgaaaccctgggctcgagtgatctcgccttggcatcccaaagtgtcagccactgtgctcggccatatatattaaagttattctgaaatatttattttaaaacaattttgctagtttacttagagcatcccaattcctttaatgttattttaacatgtatttgcacaagactatctaaaggaaccaccactgaaaaaaagtatatgcaagattccattgagcttctatgaatagttactaaaaagtatatttctgcctggaacaagagggggtacagactg

SEQ ID NO: 106584 - DNA, 531 bp, Homo sapiens
gaattaacaggaccatcctttctggagctgctcaagatcggctgaaggaagcaaagctacatttcttggcgttgatgggtgaatgtgaaaattgtacatctctgatggctgctaaatctctttgcctttctaaatgacaagggttttctggttcctatgaacagaagcagaattttttcacaacagaaagtgaagcaacgaagttttgagggttgctcctcatttaatgatgtgggatcttgttatgttacccaggctggagagcagtggctattcacaggtgtgatcggcacactatgacctggaactcctggcctcaagtgaccctcctgcctcagcctctcaagcagctgggactacaggctcctgacaccatatccagctgaacctgattttatattccagtggctgacaaactatttaactcctctgaactacagattctacccacctaatttttgccagtttgtatgcaaaagaacaacttatcactttttattttcaagccacttccctccagccatgtacatt

SEQ ID NO: 106585 - DNA, 401 bp, Homo sapiens
aatacagagcccttcttgaacattttttttaaagacaaggtctcattagtattgcccaggccggagggcagtggcgattatattcacgctgtagcctcaaactcctgggctcaagcaattctcccacctcagcctccctagtagctgggagtaaaggcaggcatcactacacaagactctgattattcttttatgttagtaggcctcaagactatttgccttggtccccagttttttttttttctttctttctttccttttttttttggaaagggagtttttttttgcccccaagctggaaggcaagggccccaatttgggttaatggaagcctccccccccgggttaaacccatttttctggcttaaccctccaaaggggtgggaataacaaaggggacc

SEQ ID NO: 106586 - DNA, 415 bp, Homo sapiens
aatacaggccgtcaccgtcagaaaccaaagctgtactggttttcttttctttcttttcttttttttttttgggaacccctgggggaaagggaccccctaagggggccccaaacccaactttaacttggaggggaaaggaaaacttttttatttaaaaaaaaaaaaaacccaattaatttaaaaaaagggcccccccccaaaaatgggctttaaacgggaaaggttttgggttttaaaacccaaagggccccaatttgggaaaggggaaaagggcccccaaactacccccacccaaggggtgacccaaaagccccatccctctggaaaaagccccaatttcccggggggggaggggggggggccccaaaaaaggcctcttaaggttaaaattttaacccaaaaataaatccccccc

SEQ ID NO: 106587 - DNA, 409 bp, Homo sapiens
aatacatgaggggtgtgcagagggaaaagtgttcactgctgagctgacaggcgggcccaggcagggcttcagaggactcagagcaggaccaccactgaggcagcctcactaaacggctctccatccagcgcaaactatgctgggcaacaagcaagtggccaaggtgctttctgctggctgtactttctggatcagatctagaagacataatagactgctcaagaaatgaagctgtaggccaaaaaaacttcttgcttttttaaaaagtagcacagagatcagccaaaggtggaaacaacccatatatattcatcgacagatgagtagataaacaaaatgtggcatatccataccatggaatattattcagccttaaaaaggaccaaagttctaatacatgctacaacat

SEQ ID NO: 106588 - DNA, 383 bp, Homo sapiens
tagaacttgatgtttcttatctttcccttttgaaacttaagcatttagatctgtgatatcattaatctgtgaattgaatgttcaaaagtttggtaatctctgaagttttataaaattctgattttgtttaatgtctgtgtttggcctagtgttggtaactgtcataagtggttgtgtgattgtgtggtttagaagcagtggtatggcctggcatggtagctcacacctgtaatcctagcactgtgagaggtggaggcgggaggatcgtttgaggtcaggagttcgagactagcctgggcaacatagtgagacccagtctgtacaataataaatcatgtatataaaaaaaaaaaaaaaaaaaaaaaaaaaaaagcaaataaaat

SEQ ID NO: 106589 - DNA, 388 bp, Homo sapiens
cgtgttgcttcttccccccattaaatttcatcctttatagctgttttggctatcactgattttcatgtgttcaaattcatatgtttgcatagtaaaatgaaaatgttccataaaaggattactttattcttaattgattgtttccattttagtcagagatgagtgaagaggcaatgcccactaaactttctctgctactgaagaagacaactaggctgaggtggcaggattgttgggtccagaagtttgaggctgcagtgagccagattacaccactgcactccagcctaggagacaaagcaagaccttgtctcaaaaaaaaaaaaaaaagggggcgcccttttaaaagaatccaattttactccccggggctggcagagttttattt

SEQ ID NO: 106590 - DNA, 411 bp, Homo sapiens
ggtattcttcggcagatttctgtaaattacctccctgttggccgctctcttgcccaggctggagtgcagaggtgtgatctaggctcactgtaacctctgcctcccaaggtcaagcaattctcctgtgtagctgggactacaagggggtgccaccatgcctggctaatttttatttttagtagagaaggggtgtcaccctgtgaaaggggcctcaagtgattcgcccacctttggcttttcaaaagctgggattacacggttgagcccacgtgccctggcctgcacttaaagattttgtggaggggggagtaacacacggagttttcctcccgctgttaacctggcgcccccccccccagtgagttattggggggcggcattttattctctgcgctgctataaacacaaatt

SEQ ID NO: 106591 - DNA, 413 bp, Homo sapiens
tgcagattaatttctgggttctttattctgttccattagcccatgtgtcttttttttttttttttttttttaaaggcccccccccccccttttggggttttaaacgttggggggtttttttaaaggcggggggggggaaaaaaaaccctttggttttttccccttttttaggggggggttgggcttttagggatttttggccttttaataaaaattaaaaaattttttttttaattttgggaaaaaagggctttggttttttggggggaaatcccttgaatttggaaatggcttgggggcccaggttttccttggccccccccccccccagggggaggggaggggttttttttttgtttttaaaaaaacccctctttcccaccccaaaaaaaaaaaaaatcctcggttgtggg

SEQ ID NO: 106592 - DNA, 398 bp, Homo sapiens
  misc_feature (1)...(398): n = a,t,c or g
actttctttttattggcaaaaaaattccattgtattgatatgccacaatttgtccatctaacagttgaaggacatttatctccacttttttgctattatatataatgctgatgtgaacatttgtgtacaagttttacatggacatgctttttatttttctgttgaatacgtgcctaggagtgaaattactgaaccatatggtgactctattgcttaaccttttgaggaactgactattcatttattttggatatatagnttctaagttctgaaaaatgaatggtttttgtaacctactgtgtagaagacacagaaaacttccatttaccctgttatattccttcaatgatgtccctttgtggataaactctgcccccaacctctaggcccttgcaagc

SEQ ID NO: 106593 - DNA, 1315 bp, Homo sapiens
ttttttattttttcccaaacaggtctttttatttaacataaggccaaagaagctatcaggcgttgctgaatactgtccactaactgtacaaaatattgactgcatgcctcgcaaacaccaaaatatccgctggaatgccatagaaataaataacttctgctataaacacatgaaaacatatcaaactgttatctctttaaacatattgtaaataaaaaaattaccagtacttctacacaataaatattaagaaaccattgacatagttgaaatgcactcatataaattaacaactttaattacattagccaaacagacattggttaaagaactgcatgtagtatgcaaaacaaaacaaaacaaaacaaaaaacaaagtaaaaaaccaacaaaatagaaacaaacaaacaaacaacatcaaccacagaacataaaaagttttaaaataaaacaggcttcagattatcttggctttcataattatatttttcttttaaagaaaaatatcaacccattgtcaatgcactgtttttcaaagcatttaaatagagggtaaaaccctttggaaattaatacagaagaaatgattcactttatgcataaaaaataaataataatatagctgagacatgtggtttgcctcctgctcttgaagatgtgaacagcttctaagcattcattttctctgacccatacaacagcttctcagtgatacagggtttaaatttaaaacacatacaatgtcccaccccccaaaccctctgccccaacaccctacaagttttatttattttgtgggttttccagggtgacctaagtttttcccctacattgaaaagagaagttgccaaaaggtgcacaggaaatcatttttttaagtgaatatgataatatgggtccgtgcttaatacaactgagacatatttgttctctgtttttttagagtcacctcttaaagtccaatcccacaatggtgaaaaaaaaatagaaagtatttgttctacctttaaggagactgcagggattctccttgaaaacggagtatggaatcaatcttaaataaatatgaaattggttggtcttctgggataagaaattcccaactcagtgtgctgaaattcacctgacttttttggaaaaaatagtcgaaaatgtcaatttggtccataaaatacatgttactattaaaagatatttaaagacaaattcttttcagagcttctaagattggtgtgggcagatttttaagagcctagagtttagtcttagagaaagagtgaggagatagtaaggttagatagagccactgagtttca

SEQ ID NO: 106594 - DNA, 383 bp, Homo sapiens
cggacgcgtgggatagtgtgacctcatttttacaaaaaatataaaaattagctaggcatgatggcacacacctgtagtcccagctactctggaggctgaggcaggaggatcatttgagcccagggttcaaggtggcagtgagccattattacacctgtgaatagccactgcactccagcttgggcaacatagtgagactcccatctcaaaaaaaaaaaaaaaacgacccggggcctaatttttgggattacccgggcccttggggaaaaaaaaaaaaaattttttcattttttccagggaaaaggggccaaaattttaaaaaaacccataccggggggcgaaaccctcggtggtttaaaaggggagaaaaaaatttttccttt

SEQ ID NO: 106595 - DNA, 419 bp, Homo sapiens
cgatcttgctctgttgttcaggctgtagtgcaatggcatgattacagctcactgtaacctcaaactcctgggtagctcctgggttcaagggatcctcctaccatggtttcctaaagcactgggattacaggcatgagccacgaggcccacaggcccagtccttcatgtgacttttgaaggaggcatctgtggtcttcaaacaccaagaatctctcctttatagacactcataaagcacggaagaggaggataagaaatggccaagtctcttggtgtttgctcttgctggaaagaaaaagggggaaattggatttctctgggattctctgttcaaatggcaaaggaggaaaaaatcccagagagtctgctaaggaaggaagtataagctacgtcatctctataaacagcagagaggacat

SEQ ID NO: 106596 - DNA, 401 bp, Homo sapiens
aatagagccgctgttcactattgaaatagtaaaggccaaataagcttgtgatcaaatcttttttttttttttaaaaaaaaggtggtcctttgagggtttttggggggttttttttaaaaaaaggggttgtaacctttggttttttaaaggcccccaaaaaaaagggcggtgtggaccccctttgagggggggggggaacccttttggttaaccctctttttttaccccaaaaccgggcccttccttgtgaaaaaaacaacaataataaaatggggttgcccgccctggggggggggtgggttttttttaaaaaaaccaaaggcctggggatttttttgttataaaccaaaggtttgcttaggaagaacaaaaaatgtcttttgagaaggctggcaccaaat

SEQ ID NO: 106597 - DNA, 396 bp, Homo sapiens
ccccgggttcctattccaactttgcctgttctatcttcattcaatcattccttccagcctcaaccttctcatgggaaggacgcaaccacccaccacaaaactcactgtgagagtcttgtgatagtatagtatgttcatagcctagcgcctgggagagtgctcaagaatgggtagctgtgagcctggcaggtagtgcacacctgtagtcccagctactcaggaggctgaggcaggaggctcccttgagctaaggagttcaaagctgcagtgagctatgatcgtgccattgcactccagcgtgagcaacggggtgagacactgtctcaaaaaaaaaaaaaaaaggggggggcctttaaaaagaacaaattttaattccccgggcttgggaagatattt

SEQ ID NO: 106598 - DNA, 413 bp, Homo sapiens
cccacgcgtgcggaatgtttaacccatggatttttatggaggactgtacttgacaactcttgaccttatagagcttgcaacctattatgaaaagatagtcgggatcaaagaaattcaatcaagtgttgtaggtgctattatacaagattgacaaaagcagaatgcgcacacaaaggagaatgtgggctcgagtcacaaaaggattctggagtcggcagtcagataaggatggtcagagctcacatgatgaactaggcacagtggctcacgcctgtaatcctagcactttgagaggccgaggcaggaggatcgtctgagcccaggagtttaagatcagcctgggcaacatggtgagacctcccatctctattaaaattattttaaaaaataaatttttaaaaagccattaaagg

SEQ ID NO: 106599 - DNA, 396 bp, Homo sapiens
aggagacagaggccgtttaggcacgggctttattgtgaagggtcttgtgggctggggaagagagtttcaatcgttgggggcttttttagagacaggggttcttgtgccacccaggctggagtgcagaggcacgatcatggctcaccgcagcctcaaactcctggactcaagcgatcctcccaccctggccttctgagtacctgggactacagatgcacaccaccatgcccagctgtgagagtctggattttaatctaagtaccgtggaaaccattggagtgactttaagcagaagggtagaatgatccagcttaagttttacgacacttattttggctgctgggtgggaaaagggctgaatgacaacacagtgaacgttcagttatagtccctggg

SEQ ID NO: 106600 - DNA, 406 bp, Homo sapiens
  misc_feature (1)...(406): n = a,t,c or g
tctgggattgccaggtatttggtaagaggaaataagcagaaccctggttaatacactattccctccttcccccaaaccctcactctttttttttttggaaagggagttccccggtggtgccagggaccgaaaaccggccattggccccatggcccccaacccggggaaaaaaagggggcccccgcctaaaaaaaaaaaaaaaaaaaaaaaannngggggggggccccctaaaaaaaaaaaaaataaacccccggggggggggggaaatatttttttttttgggggccccaaaaaaaaaaccgggggggggggtttaaaaacggggggggggggaaaacccgggggccccccaaaaaaaaggggggggggcaaaannnnnnnnnnnnnttnnttntttttaanntng

SEQ ID NO: 106601 - DNA, 386 bp, Homo sapiens
cccacgcgttcgcccacgttttcggggttttactatttgcccaggctggagtgcagaggctattcacaagtgtgatcatagcctcgaactcctgggtttaagcggtcttccggccttggcctcctaagtagctgggaccaccggtgcccagcaagaagagctctcttagaacaccttactttcttctccccacccagttctatagaccagggaggctcaaactttttggtttcctctatactcttaaaaggcattaggttaggcacagtggctcacacctgaaatcccagcactttgggaggccaaggcaggcggatcacctcaagtcaggagtccgagaccagcctggccaacatggtgaaaccccatctcttactagaaatacc

SEQ ID NO: 106602 - DNA, 381 bp, Homo sapiens
gtttcaacatgttgcccaggcttttctttaactcctgacctcaggtggtcctaccacctcagcctcccaaagtgctagcattacagacaggatccactgctcccggcctgtcttgtattttgacagtttgattataatgtgccttggtgtggatgtttgcgagtttattctacttggagtttgttgaacttcctggaagtatatattcatattcttcatcagatttaggaaatttttggtcattatgtcttcaaatattcttccaacttctttctctttctctcctttccttttggaactactggtatatattgtatgttatatatgtattatgtcccagatattcatcttgtattaacttttataaatacatcaccccat

SEQ ID NO: 106603 - DNA, 441 bp, Homo sapiens
gaggaaacaagttttggcaaggccagatgcctgcctggatacccaggtttccaccctaggcggctgcgctccaggtctccactgctgagctgaatgccgctttcccacccacaggggccgagccaacccccagctgggagcatgtcctcttcaccgcctgccacaaccagcacctgcagctgcagcccccccgccgcaggctgcactcgtgggcggacgactggaaggccattctggacagcaagcggccctgctgagctggactgtgcttcgggctcctctgtggggctctgacctcagggctcccagctcggggcctgtggggccagtatgctggtctgggagtccctcctagactcctgggccccatgacctcctgctgcatgtcccttcccttccccagccctgccaggccttaacctgatcacggggcagggctgg

SEQ ID NO: 106604 - DNA, 471 bp, Homo sapiens
  misc_feature (1)...(471): n = a,t,c or g
acatccttannnnatgtggaggaattccttggcacagtggctcatgcctgtaatcccagcactttgggaggctaaggtgggaggatgtccccagcccaagagttctagaccagcctgggcaacatagcaagaccccatctcaaaaaaaaaatttaattggccaggcagaggtgggaggatcacttgaacccaaagggtggaggctgcagtgagccgtgatggcaccactgcactccagccagggcaacagagggagaccctgtctctaaaacaaacaaacaaacaaacaaacaaaagagttaacattggccagattaggattcaccagatagtgttaatattagtttgatttgagactttaatcagaaagcacatgtgtggtgggggtgggtgtaacctaagtcaggtagaatctttccaacttggggggggcacactcctgattgtagccatatgagtctgtcagtgtgg

SEQ ID NO: 106605 - DNA, 434 bp, Homo sapiens
  misc_feature (1)...(434): n = a,t,c or g
ttcgttanggtcccnnnngnnnnnnngnnngnnnnncgagcgccttctttcgaaacattcaagntttttttaaaaatgttattatacttgcattatactgnacactgatgagggaaggataagatgtgcagctgttttgttgctgcncctaaaacggatttttttcttaaaagttgtatttacccatgacacagccccaggagatcctgacaacatgtgtccctatagctgtttttaaaaccaaattatcaaatcaggtctttttttttttaaaaaaccacatttaggctgggggagggggcttacccttgtaatcccacccttttgggaggccagggggggaggatcacttgattccaggaatttgaaaccaccccggccaacatggcaaaacccttgctttacaaaaaatacaaaaattagcaggggggggg

SEQ ID NO: 106606 - DNA, 407 bp, Homo sapiens
aaaagacctagtgtgccaaaaatgaatgtcaaggtgggcaggtggagtcaggtagtttttaggccatttatttgtaaacagttattttatctatgcgtctatctgtctgtctgtctgtctatctatctatctgtctatctatctatctatctatctatctatctatctatctatctatctatctatccctccatccatccatccattcaactggcatctatttaatctatttttctttggggttaaattatgaaagagcacggagagaatagatttattaactataaagacagggaataattgataacataacatccctgagaaaattgaagaggatgatatacaaaaacaaaatcatttatttttggatggagggtataggtagaggggtctgtcattgtattggg

SEQ ID NO: 106607 - DNA, 455 bp, Homo sapiens
  misc_feature (1)...(455): n = a,t,c or g
gacatcgctccggtcggaatccggcccgtttgtctcttttttaaaaccaccgaaataantataactttattttcatgcacggaaggtttaacgagcgccggatttctttttccggtttggttgttgtttaaagcccnnnaaccatccttggctggggctgacaatctccaggatacccagagagggtaagcaaattacccaccatcacacagagagggatgtggatgcaccaacccagttttgtctgcacctctctttaaaacgtatgaacaggctgggcacagtggctcacacctgtaatccctgcattttgagaggattgccttggcaggaggattgcttgaggtcaagaatttaagaccagcctggtcaacataaggagacactctctctatcaaaaataaaaataaaaataaattagctgggcatggtggcacattctgtagtcccaactg

SEQ ID NO: 106608 - DNA, 427 bp, Homo sapiens
tttcgtgcaaattagtatttttaagtcaccttttaatttataggcacatcccatcttaagaagaagaggaaagaaaaaaaacccccctggctaaggccttcccttttggggttgaaggggaaaaaaagggccggggccaaaaaaaattttgcctggcccgttgcccaaccggccgggttccgggggggccccaactggttttgaatccaaacgggggggcccccagcccggcccttcctttggccttgggcccccgggaaaaaagaccccggcccttttcttgggggtttttttttttttttttttggaaaaagagagccctctctttccccccccgggtggggagggggggtctttttttttttttttgggggtcccccctctgggggaaccctctattttttgccttgacctcccagaaaacgcg

SEQ ID NO: 106609 - DNA, 398 bp, Homo sapiens
caaaaaaataataataaaataaaaattttaaaaaagatccataggaaagtatagatcttggaaaagagaaagagctataagatctgtagaaagggcagagtacctcaggaaagggtggctgtcacattgagattcaggtcaggggttggggcgtggctggtttcaaaggtgacagaggcttcaggcttcaaggatttggggctctatcctgcaagcaacagtgagccaaggaaggggattatactaatcaagatgtgggggcgaggcacagtggctcttgcctgtaatcagcattttgagaggctgaggcaggaggatcatttgagcccaagagtttgagaccagcctgggcaacatagcgagacctcagatgatccatcttccttggcctcccaagg

SEQ ID NO: 106610 - DNA, 435 bp, Homo sapiens
aatcactgaagctggatcagacacacaggaaattcatcatactctttacacacatttgtgtgtatattggagattctttactaagaaagcacaagttaaaaagaaagtgtggtggcacatgtagccccagctactcgggagacttgagatgggaggatcgcttgagcccaggagtttgaggctgcagggagccatgaccctgcctgtgactagcactacactaagcctgggcgacacgcgaagaaaccaccgttttaaaaaacgaagaggaagaaaagaacttgtggaagtccagttatctataatgcttgcagctcctcagcctattaactctcgccaaaccctcagcctttgcttttcaaaatactgcatttgctatctactgtctcacagaaacgcagaccttttgcctgaatttcacacttgctgttctct

SEQ ID NO: 106611 - DNA, 410 bp, Homo sapiens
cgaggggcgcggtgtcaaaagccacatgacagacctcctcttcttgatcaaccccatcttctcccaattatggcagatatacaagattaaaaaatatctattctggggtggagccaagatggccaaataggaacagctccagtctacagctcacagcgtgattgacgcaaaagacagcagcaagccagatcattctaagcttctcctccacatctcttgaaaagattcccatctcatcagaatctggagggggtgggtctgtctctgtcacccaggctgcagagcagtggcgctatcatagcttactgcagccttgaactcctggggacaaacgatcctcccaccttggcatcccacatcctgagtagctgggactacaggatctcaaaggattgggtgatgcccgtttt

SEQ ID NO: 106612 - DNA, 420 bp, Homo sapiens
cggacgcgtgggtaaaattaagaactctttatcagattatactacaaagagaatgaaagagcaagtcacagaggatgataagatatttgtaatacatttctgaaaaaaggatttgtatccagaatatagtaagaactataaaaatcaatttaaaaaaaagaaaaatgggcaaaatacttgaacaaggatgtcatacaagaagatgtccagatggccaatgaacatgaaaagatatttaactttattagttatctgggaaatgcgaatcaaaagcacaagatgccaccatatgtcaccaaaatgactaaaattaaaaagacaatgtcaaatgtttgcaaacatcatctgaaactctcatatactgcttctgggttttttaattggtcacatcactttggaaatctatctagtggtatctag

SEQ ID NO: 106613 - DNA, 1371 bp, Homo sapiens
ttttttttttttctgggagaacaatggctttattcagatgttggtgcctctgcccctctggtgcccccgatccccacaaggggccgcgaggcgggcaggtcacagcaggttgaagtcccctttgtgctgttccagccactggtccagcgtcagggccttggggttgagtctcagggtcagctcgatgtcacggtcgggtctcagggcatagaaacggaacatgttggccaggtcccgggcaccgggaaagccaagcttttcgtagtcctcaggagtcatcttggcatcgtgcacgaccttgcgggtgtgcttggtgagcagggcagcgtactcctcggccgtgtgcctgcaagtgctcagcccgatgttctggccgacgtatttttctggcatcttcaaaaggctgagcaccacaggacccaggtcagacacggacatgccatccatgggaacgtcacctgtgggcaagctcagcaagtagctctttccgtctggggctttctggggcaagaagtgggagaggaggttctcaaaatagcagggcagccgcacactggtcatgggaacgccaatgtcccggaaatattcctccacctcccctttgccgtcaaagtgcgcggcggccaatctccctgccgtcagcttcttgatgttctccaggccgctgtagaccacatagtggaggcccaggcgcctggccagatcagcgagcagcttcccctgcttgacctcctgctcctggctgcagctctcccagtaattggtcacgatgaaggtggcgtaagccccattcagggccagctccatgatgacctggtcatcttggtctccctgcactacttctgcaccttgcagcctcagctcctttgctgccttcttcctagggtttcgggtcaccactcgaaccttgaatgtcccatcttccaggagtgtgcgggccacggagccaccctgggcacctgtgcctccgaaaaccaccaccagtttcttgtccaccatgaggacgagaatgggacgaatccggtccagagatctggcagagcgccgctcacggaagcccagcgtcggaggacccctggctgcagccgccaatcccgacgtgtcggccgaaacccctcctccggcgcagttggctcctcctggatcccgcgggactcggcgtcgtttccgggtttgcccgccccaggcacgtgcacagtgagtttgtgtaaatccagttagaccaaaatgagcgaggtggagagcctcttaaccggatgctacgggtgatgacccgctgagcagagcctgagcctgcaacctccagagatctggggaaagccacatactccgcttcccgcccccctcgtgccaagcagggcgtaagcaggt

SEQ ID NO: 106614 - DNA, 419 bp, Homo sapiens
  misc_feature (1)...(419): n = a,t,c or g
ctccgtagcgtgaccctcagagcggccgcaatacaggtcaggctggtctcaaactcttgttctcagatgatccacctgcattggcctcccaaagtgctgggattacaggcataagccactgcgcccggcctcacagtttcttttcttaagaatgtttgacatgatattcaaagtaagattcaaaaaccttttcctcctaatggtgtataaaacactaatattctggttccaaccttaactttccatgttttgtggaggatacctaagctctgctctgagatacacaaatgccatcttaccacttcagatcctccattaaggctgtacaattcttcagaaactttactttcaatgtgtgtaaaccacttactcacctggcttatctactagatttaaaacagcttggaggtcanagcatt

SEQ ID NO: 106615 - DNA, 764 bp, Homo sapiens
  misc_feature (1)...(764): n = a,t,c or g
ggctgctttaatggtttcaggcagtatggctcactgagccagtgtttgccataaatgggtgctttgcccaggaagatggctgaagtgatgttaagtggctcacagatgatgcattgactcgtcttcctggacacagactgatagatgtaaagaggatagactgtgtcctgggacgacggggacatgtgccccaggacttttgtttctttcagctcccccactggggcctttctaaccttctcaggcccatccatccttccatgtctccctctcggggccctcccctggcctcagaccccagcttgatattccccttcatccctcaacctctatcgctcctcgcccactccctggtccagcttctccttcccaggctggagccccatccttccctgcctagtcccacaggggcctgcccattcttgcctccctgccttggcgagcagaggcactggcccctacccacttctctgctttggcttggccttgacggccattgccttgcaactcccagtgtgagttannnnnnnnnnggattagccnnnnnnnnnnnnnnnnnnnnnnnnnnnnnnnnnnnnnnnnnnnnnnnnnnnnnnnnnnnnnnnnnnnnnnnnncaccttggggctccaggcgatcttcctgccccatctactcgggaggcttgagcaccaaaaccactttatcccaggaggcggaaattgctttgaactcaaatcaacgtcagggcactaagacctggatgaaaaagctacactttgtttcg

SEQ ID NO: 106616 - DNA, 366 bp, Homo sapiens
aataacagtgggtgcagccgacagagggtgagctgaagcagggtggggcatcaccttacccaggaagcgcaagcggtcaggggatttccctttcctagccaagggaagccatgacagactatacaaggagaatcgggacactgccacccaaataccgcacttttctaatggtcttagcaaacggcacaccaggagattatatcccttgactggctcagcaagtcccacaaccacggagccttgctcaccactagtacagcaggccaagattgaactgggaggcagcggcctggctcaaggaggggcgtccaccattgccgaggcttgaggaggaaacaaagcggcccggaagttgggcttgccacg

SEQ ID NO: 106617 - DNA, 382 bp, Homo sapiens
aatacactgccagcaattcaaatgtactatttaatgaagaagaaaaaagacaagaaatctccctttccatcattgctcctcattcctaagaaagttatggcatatggaacaggcttgtagtcagccctaggtttaaatcccagttctgccggttgtgtgaccttagcaaattatatatactttctgattctcagtttctttatctgtaataaatacctacctcaaggggcccagcacagtggctcacacctataatcctagcacttcgggaggttgaggcaagtggatcgcttgagcccaggagttcgagacagcctgtgcaacaaggtgaaaccctgtctctattctaaaaaaaaataaaaataaaaaacaggctgggcag

SEQ ID NO: 106618 - DNA, 2575 bp, Homo sapiens
ttttttttttgttttttgttcctattgttaccctctttattccaaaacaattacacatttcaacttttcaaaagcaacatctgggtaagttaggaatattcacagcttcttacacagtgtcagagaaagagactatctgagctcaccaggtatctgctgtgtgttggggaaactgaaaaacaagcaaaagtataactacaatctggacttttttcttttttaaataaagttttttttttccatttttcttctcatactgtgaattgttcttgactccttttcttgacattcagttttcagaatttccatctttcttctggaactaatgtgctgttctcttgactgcctgctgggccagcatccgattgccagccagaaacgtcacactgcccaagatggccaggtacttcaaggtctggaacatgttgagctgagtccagtagacatacatgagtcccagcatagcagcatgtcccaggtgaaatataatcgtgctaggagcaaaagtgaagttggagacattggcaccaatccggatccacagagcgaagagcagaagcaacggcgagaggatcagggcagtgaatgtattggacaccacggtggggggcctcttctcaggctcgcggaacaggtgctgaatttcctgttttggagtgaaaaggttctgggacaagacagtcgagggagcttcttcctcagggaacttgatgaccacatcagccacattccagaggattgggttcttcaaagtggcatctccaatgattaaagtagaaagtgtaggtgccagagcgggaagtcaaattcaatcctttcctttcagaggtatccagttcaaacttgtacacgttcttgttgtctggctcggcaacaaacaccacttccctggccagtcttctggttatggagtcggacaaatgtctggtgaggagtgagttcagcaccagtgttcacacctacccagctggaagaacaaggcgaagttctggtggctgtctgcgatgaatgtgcccttggctttggcctgggtatgtcacccgggtagtttgggggtgcaatgctctgatccttatcccacggtggaaagatcaacatttgtgatgccaacttcagtgggaggatcttggactctgagctctacggtatttggaaatataccggttgtcacctttcaactttcgaccaaggaagtcattaataaccacttggaaaatttgacggttcatgaaatttagttcaaaaacaatccctacaaggggtgaaggatgtcttctggaggacagtggctcttggaagcaacagatttagcatgttctagtttaacagtggcctgagtcagaggctgagacagaacattggtgacttgcaaccgcaagatagcctgttcatgagtgtcggaagcagagccctcaggcacaaccacaactggcacgtggtagcgattatgcgagagcacagcagctgcagaggcccacgctgaaggcttcggagagggacttcaaagttcttcttgctgaaagatcgcggttcatcagctggatgacctgatccttccttaatggatggcttcagtccccacaatgatccattgagctttgtaggtggcagccacaaactaacgctgttgtttccagtccttcttcaaacttggagatacacgcccccgagttcatccaggcgagcaacaaggtcctcaatctcctccacgatgctcctcaggtcagcctgctgggacaggtgggatgctgtctgcagagcctggactgttgccagcacagtctcctccttgctgagacgagcagtaagggcactgagtgcttcttgggatgccaagggaaggcccaaagcccactttagagctgccaacttgcatggtaagatctggggtaaacagatgaagtccctcaactgaacagctgcccaaaagccagatctttggtcctcatttgaaaatagagatcttcacattcctgagagggccttggctggccctgggccagccgtagaagagggaatcccacattgcctgggatcaaggttagatcttgatgtaggtacatgctttctttgcactctggcacctgagcacccaaggctgctgagtcccacgattggagtagaaggcagattccaaatttgtgaaagggcgatccagcgaggcttttagtctctccacgtcatgcttggtgaggtagtgagtgggcgtcagagcccaaggtgctggctatgattgtcatgggccaacatggaagacacgtgcttgaaacccggcggcgccattcctccgatgcacggtcccgccggagtccgagccgcgggctgacttccgctcgggaaagtggctccaagagcccgccacaggggacgccagggactcgcggcaggctctgcgggccaggatgagttctaagcacaggtcagtgtccgcggccccgctgagcttcgacgcttccagcagccgcggccgggatcccagtcctcccgctcacagggccttgcagttcccgaggacagacccgcctctcccccgcgcccaggcccacttggaaccgaccgtctcgcaacgctggaa

SEQ ID NO: 106619 - DNA, 938 bp, Homo sapiens
  misc_feature (1)...(938): n = a,t,c or g
tttcgtcccattcaggctggaagagctccctgggcacttaccctgccttgcatggggttcacagagggaagccctgctctcctttcccacagctcaagatgtgatatccaaatggggtgtaacacgcatgctgtagacgatagcacaggggaaggccccttccacaagggcagaatgagggaatcttgctggctaaggacacctcgatgtgggctttacacaaaaggggttggggggccaggaatggaaggccgggagaggcgttcgaggagccgccgccagcacatgccagggcgcgggcattctaccatggccagctggagcctcaggcagtgcatgcggcttaaacttcagtgggcatccgatctcctaagtcagttagaaatgcagattcccagtctccccccaggagagtctggttccttagggctgacaggacccaggagcctgcatttgaacaaaccattggcctaagccccacaccgggggagtcctggagtgaggaattgggttggcgggatagtgggaggtggacgagggacagtggcaggaagaggaggccacagagaggcaggaaataagccctcagggacctgggggaggcagtgctgtgcttcaggtgacaaagctatgtccatttgactaacatcactatatgactcgaaggggcgagcctgggcctgggagacccgtcaggaagtggttgagggaaagcagccagaacaggataggtgggggagaggggcgttgggagtgaggacaaagacgtagcagggagggtcgtgaatgtccagttggatggggtgggaggaagaagccactgcgatgggggctgatgtggagcanggggcaggtctggctgagtctgaagcacctatggaacaagccagcggagctgtcgggggagccagaaagaactgagttgcatcagctctgag

SEQ ID NO: 106620 - DNA, 1052 bp, Homo sapiens
  misc_feature (1)...(1052): n = a,t,c or g
ggttctaggggagaacctgcttccttgccttttccagccccaggggtcactggcattcattggcccggactccttcccccaaccccaaagccagcagcaccacatctctctgacccttcatccgttgtcccctctccccccaagccccatgggacagggtctccactcctgagactcatgggattagactaggcctacctggatgatctgggatcctctcccatgtccaggtctctatccctaaccacatcagcaaagtctcttttgccatggaaggtatttgcaggctctgactttgtgtgtattagggcaggacatttttggcggggcagtggtgggggcagggaattattctgcctaccatgccttatacaaaaataaataaatcacaggcttatacctgaaagaattcctgcaaataataaaagaattagagcagctcagttaaataaaaaaaggtatgannnnnnnnnnnnnnnnnnnnnnnnnnnnnnnngcaggggagcaaggtatttatcaaaaagtgctccacttttcacttaccagagaaatgcaaatcagcacccaaaggagtcactgcggcaccctcatctgagcctcagaagttagaaagatggatagcaccagtgtcaaaggtgactgtgggagggagatttgcatacactgctagtaacaatgcgaattgatggaaccaacctggaaaatggcttggcatcaactgttggagaagaagacacacagtcctctaacctgccagtcccacatcagggcctggatatggccgtcatgtgtaccagggagcatggccaggaatctttacagccaaatactcaccatagcaccaaactggaatcagccgacatacccatcaggaagagaatggatgttaaaaaatgcaaggatagccattgggtagaacgccatacagccatgacaattacacagtgacacctacacacaaggagcatgagtctcacaaacatggcagcaaaaggagcctgttcaagagggtatgtgctatggattccattgtagataaagtttttcaaaag

SEQ ID NO: 106621 - DNA, 453 bp, Homo sapiens
aatacagtgccttagcaaagctttgtttaattttttaaaaaaattgcttaaggactccaccttgcaagttaaagaacagataaagcaaacataaatcacaggtgatagaagacatagtactgggccaggaacaaagtgaggtacaagtcacccttcacattagagacagctgtgactgccttgatctcttaaaacacacacacacacacacacacacacacacacacaaaacacaggtatgatctagagactgagcatctgaaagagccaaaataatccaacaccagaaatcatgataatgctttcatggtatttggtttgtccacttaggggtgacgtgacgctgctgttgccttcaggtgaaaagaaaattgctttgtgtttacctcatttccacagcagaaacccaggtgcatgttagagaactttaaagtagtcaaaattagaactctg

SEQ ID NO: 106622 - DNA, 761 bp, Homo sapiens
tttttttttttatttttaatattttaattataattttatgttcaggggtacatgttcaggtttgttatgtaggaacacttgtgacttgggggtttggtgtacagattatttcatcatgtgtgtactaagcatagtacctgatattttttttttccctgaacctctccctccttccactgtcctccctcaagtaggccccagtgtctgttgttcctctccttctctccatgtgttcttattatttagctcccacttttaagtgagaatatgtggtatttgattttctgttcccatgttagttttgttctttttttacggctgcataatattctatggtgtatgtgtaccacattttctttatccagtctacagttgatcaacatttagtttgattccttgtctttgctgttgaaaaattacagtgaatatttatcatccaataacaaaagtcaatattttgaaaagctaatatgaatctggaagaatgtatatatcttcatcttgaggaacttcagaaggacgaggcttctggaagttataatagtcagaagatgtctcatttccatagatatgctcctcgaaattagactgccctgtgttttcatatagttccttatcggtttttcctttagctttgggaggacctgcttccacattttcatagttgtcgtgtgtgttatttcccctgacagcagatttgtggtcttgggtttcaactgagatttcatgccttaagccaatgatgcgggggcccaagaatg

SEQ ID NO: 106623 - DNA, 514 bp, Homo sapiens
actcgtaccaagcttgatcctctagagcggacgcatacattctctgttttctaggctatggttttttaaaaaatgtgtttccaaatttattacatttgcaagatttttgtccaatataaattatctgattttgaacaaagtttgagcaactgcttcagggttttcctctagtataaaatgtgtacaatatgatttgtgatacaagtaaaggtactacaccatccttatatttgtaatatttgtcttcagcataaacatgctttttactttaaagggttatagtttctgaaagatcttttgacagtaattgcatttataatgctcctaattaagtaaaaattctgatgttgagtaagatgtgagcagacatcaatgacatttttatattctttatatttgtataatccttcataagcataaatgttttcttgtacaaaaaacgcccgaatactctggtccacaggtttctacgcgttaattaactcatagggagcacacccctaaaaaaatatgg

SEQ ID NO: 106624 - DNA, 472 bp, Homo sapiens
aatacagtgtggagatgaggtcttgctgtgttgtccaggccggtctcgagctcctggcctcaagtgatcctcccgccttagcctcccaaagtgctggtattccaggcatgagctactgtgcccagcctaaatataacttttaaaaataaaaatgaggaagaaaggtcgttatacataccttatgattatatataaaacgtcaatgcttcatatctggattaaaaaagaaaaacgaagacagactgaagagaaacatatggctaaggcctggctgagttagaaaggactaaaataggttacttatatttttctatttcagctaccaaaagacttcttgtaccatagaccaagacttgccagcagcacttaactggtaggttactaaatgatttgtatccaaggcttggaataaaaacactgtcctacacaacctggtctgagaaaatattgtaagaaaaacagtttggtcaag

SEQ ID NO: 106625 - DNA, 481 bp, Homo sapiens
aatacatgtggtcacaggtgctggagagctctggtctgccactcccgctcatgactcaatgctgttcactctcactgaggaacaggtcagtaaggaagctgtgccacatccatggcctttaaagataccagaaaaacagctgtggagccaggggtggtggttcatggaattagaataaaacccctggagaaggtgtgtgctgacttgatcacaggcaaaaagtttaaaaatctcaagtaaaaggaccagtctgtatgcctaccaagactctgaaaatcactacaagaaaaactccttgtggtgaaagttctaaggcactgggatggtttccagatgagaatccagaagtgactcactaacttgcacagtccttccaagattgtcaagcagattatttccatcagtggtgcgccaggaatcgattctgaagtcaccaatgcagatggttaagtcaactattttaataaaataatatggccgg

SEQ ID NO: 106626 - DNA, 1460 bp, Homo sapiens
  misc_feature (1)...(1460): n = a,t,c or g
cggtccggatatcccgactcgaccatttcgtgggcgttcgatccctagagggaggagcctgtccaaacggacgctaacggcctacctccccctcaggtgctcttacagcctgttccaagtgtggcttaatccgtctccaccaccagatctttctccgtggattcctctgctaagaccgctgccatgccagtgacggtaacccgcaccaccatcacaaccaccacgacgtcatcttcgggcctggggtcccccatgatcgtggggtcccctcgggccctgacacagcccctgggtctccttcgcctgctgcagctggtgtctacctgcgtggccttctcgctggtggctagcgtgggcgcctggacggggtccatgggcaactggtccatgttcacctggtgcttctgcttctccgtgaccctgatcatcctcatcgtggagctgtgcggggctccaggcccgcttccccctgtcttggcgcaacttccccatcaccttcgcctgctatgcggccctcttctgcctctcggcctccatcatctaccccaccacctatgtccagttcctgtcccacggccgttcgcgggaccacgccatcgccgccaccttcttctcctgcatcgcgtgtgtggcttacgccaccgaagtggcctggacccgggcccggcccggcgagatcactggctatatggccaccgtacccgggctgctgaaggtgctggagaccttcgttgcctgcatcatcttcgcgttcatcagcgaccccaacctgtaccagcaccagccggccctggagtggtgcgtggcggtgtacgccatctgcttcatcctagcggccatcgccatcctgctgaacctgggggagtgcaccaacgtgctacccatccccttccccagcttcctgtcggggctggccttgctgtctgtcctcctctatgccaccgcccttgttctctggcccctctaccagttcgatgagaagtatggcggccagcctcggcgctcgagagatgtaagctgcagccgcagccatgcctactacgtgtgtgcctgggaccgccgactggctgtggccatcctgacggccatcaacctactggcgtatgtggctgacctggtgcactctgcccacctggtttttgtcaaggtctaagactctcccaagaggctcccgttccctctccaacctctttgttcttcttgcccgagttttctttatggagtacttctttcctccgcctttcctctgttttcctcttcctgtctcccctccctcccacctttttctttccttcccaattccttgcactctaaccagttcttggatgcatcttcttccttccctttcctcttgctgtttccttcctgtgttgttttgttgcccacatcctgttttcacccctgagctggnnctctttttcttttcnnnnnnnnnnnnnnnnaaaaacggatcccacctg

SEQ ID NO: 106627 - DNA, 1718 bp, Homo sapiens
  misc_feature (1)...(1718): n = a,t,c or g
ttttttttttttgagcagaaggcttatcaaaagacatttaatacaattagttttcaacaaccccttggtggtgcccagcatctacaaagatatccagcccaacccaaccccccttccaaatcccacccccacagaaaagcacatacttaccagaatttttagcaagtatggtttgggaatttttgtggtttttgttttttaaaaaaaggcccccagggcaagttatttacagtttaattgccactgtcaactgatctcggaactttggatcggggaccngggacctctgggcggatccacaggatgctgggaggacttaggatcttactttggagggaaccacggtttctggggctctttctcagggcacgggggaggaccctacttaacaggaacggggacttggctccgggctccgggctccctgctcctggcttcttggaccggctgttaaggtttgcgaactacgggggacggggatcggctacggggacctagaggggacttttgggtcccgggatccgaggacctgcttcttgacctactgggccgttttgctgcccttaattaagtttatatttttgccatttatttccttttccagaaagtttttcaatagcattctttaagtcaccataagaggcaaactcaaccaccccttcatttaaatttaggtcggtgtgcattccgcaaacgttactttccccagcttgtctcatgaaatctttgagatccttaacacaagataatttgtgttaagcaaagaagaggaaatggggacacacaaacaatcacatgatataaaaaaaaccaggactactgaaagagaagatgttagataaagtacaaacatggccatttaccaccacttgtattctatcagaattcaaaaattatctatgtcagggcacggaataagcaaatagcatattgcttttaagcaaaatgctaaaagaaattcagattttaacattaaggtagtattagtctatgctgagctcagtacaaaagaaaaaaaaacaaacaaaaaaacaacaaaaaaggaaacagtacatatttttaaagtaaagactaaagtagagaagttttatttaaaaaaacagaacatttacaagacaccagttattttgtgccccatatgtcattaaaaaagtttactttacctttattattatttccctaggctagtcaaaccagcaaaccattaatcgggtcggagaaaccttcatgacatatgcccgactggctcttcgccacccacttgaaggacactacccaatcgatggaagcctttaatcgcacagccctccctattagcggacttattgggcggttgcagtacatgttctactcgagcagttaccaaggaccactattactgcgatcaggattccaacgaccacctaatttcgtatctttcaactcttttcgaccggacctcttattcggaagcgttacaggaagacaggtctcaacttagggatcagatcacgttatcaacgctctgggatcgctgcaacctggcacttcaaggaagtgcaccgataacgtctagaccggcaaacacagatctagaggtggccaactgatcactgtaggagctgactggcaaagtcaaccaggcccaaccaagagtgaccaagacaacgattaggataacccacaggcactcctcgtcataaggccaacgacacagacaggctggcaaataaagggtt

SEQ ID NO: 106628 - DNA, 1348 bp, Homo sapiens
ctctttactcttttcccctgtattaccactcttcttgtttctacctttagcctatattcttcagaacttaaaacctcttcaattctcacctgacctaaaatctaagcatcttattttcttctgcaatgctgcttgaccccaatataaactcgacaggagttccaaatagccagaaaatggcactctgaatttttccatcctacaagatctaaataattcttgtcgtaaaataggcaaatggtctgaggtgcctgaagtccaggcattcttttacacatcagtcccttcctagtctctgtgcccagtgcaactcgtcccaaatcttccttctttccctcccgcctgtcccctcagtcccaaccccaagcgtcactgagtctttctaatcttccttttctacagacccatctgacctctcccttcctccccaggcgctgctccttgccaggccgagctaggtcccaattcttcctcagcctccgctcctccaccctataatccttttatcacctcccctcctcacaccccgtccggcttacagtttcattccgtgactagccctccccctcctgcccagcaatttactcttaaaaaggtggctggagctaaaggcatagtcaaggttaatgctcctttttctttatcccaaatcagatagcatttaggctctttttcatcaaatataaaaatccagcccagttcatggctcgtttggcagcaaccctgagacactttacagccctagaccctaaaaggtcaaaaggccgtcttattctcaatatacattttattacccaatctgctcccgacattaaataaaactccaaaaattaaattccggccctcaaaccccacaacaggatttaattaacctcaccttcaaggtgtacaataatagagtagaggcagccaagtagcaacatatttctgagttgcaattccttgcctccactgtgagacaaaccccagccacatctccagcacacaagaacttcaaaacacctgaatcgcagcggccaggtgttcctccaggaccgcctcccccaggatctttcttcaagtgctggaaatctggtcactgggccaaggaatgcctgcagcctgggattcctcctgagccatgtcccatctgtgccagaccctactggaaatcagactgtccaacttacccaggagccactcccagagctgctggaactctggcccaagactctctgactgactccttcccagatgttctcggcttagcggctgaaaactgatgctgcccgatccgccttcggaagtccccggagaccatcacggacgccgagctgccagtaactctcacagtggaagctatctggtc

SEQ ID NO: 106629 - DNA, 1135 bp, Homo sapiens
gcggatcacaaggtcaggagattgagaccatcctggctaacacggtgaaaccccgtctccactaaaaatacaaaaaattagccgggcctggtggcgggtgctgtacaggaggctgaggcaggagaatggcgtgaacccgcgagcgagcttgcagtaagctgagatcgcgccactgcctccagcctggcaacagagcaagactccatctcaaaaataaatagataaaataaaacccatggaaatggtttaagaaaatggttctgggtacaccagaaatttgtttgcctgaagctaaagtgtgtctacaatggtacagctcttccagggacatgggaagtttatcgtgggagatatccagaacctgttttacactgggctcctactgtgtttggtgatcagaaactatagaggggtccaacccaggatttcatgtttgtatcttcataaggccatgctcctgacaggtctaggcaacctgggggatgaattaggttagtgtgctaggattgacacacctcatccagccttcttactttgtggatgggaacacttaaggaatagagagattaaatcttacacttaccccacagctggttactgacaacacaagctctagaattcatgtttgtttgtttgttttatttcaccaggctgcatgagactgaccttccggcattcttactaatagtctttctattatactattggatctttattcatccacctatacaagtaggaaataaggatgaatattcatttagaagaattaatattcatattaacacattgctctcagattattgggaattaacatcttgtaaaaactgggagcaggccaggtacggtggctaacgcctgtaatcctgacactttgggagtctgaggcgggtggttcatctgaggtcagtcgggagttcaagaccagactggccaacatggtgaaaccccgtctctactaaaaaaaaaaaatagacaaaaattagcgggggggtggtggcagggcctgtaattccagctactcaggaggctgaagcaggagaatcgtttaaacacaggaggtggaggttgcagtgagccgagattgtgccactgcactccaacctgggtgacaagagcgagactccgtctcaaaaaa

SEQ ID NO: 106630 - DNA, 627 bp, Homo sapiens
  misc_feature (1)...(627): n = a,t,c or g
tctaaatttagttttcagtaattacagctttacctaaagaattccatttctggcaaaattgtattaaatttgtttttgcattgtgagaggttctaaatatgttttacacaagtaaaagtcctaaatgagagccaggtgcagtggtgtatgcctgtggtcccagctacttgggaggctggggcaggaggagtgcttgagcccgggagttgagagctgtagtgcctgtgaatagccactgccctccagcctgggcaacatagcaagaccttgtctcttttacaaaaaaaagttccaaaacaacatgaggagggtgcaaacaatcagctgttgcaggtagaatttttttacataccatctctgtttctctgctctgtatcgtatcacatcactattgaagctagtagtaaaatgtaataaatagacccagtgcggtgtaattttatattaatcattgtcccgtatgtaatcttcatcaattagattttaaagtattatactacattctgatgccaggcaaacaaagaggcgtattaggcttttaacatctattacatctatgtctatcatcttcttgtttcagatgcaatgtatgcgnccattcccagaagcnngttcagaaggtaacgg

SEQ ID NO: 106631 - DNA, 432 bp, Homo sapiens
aatacaccacatgtaagtagactcatgcagtccaaacccctgttgttcaagggccgactaaagtggaagcaggagtcagccccagggggtctggctccagaggcccacctctgtcccctccagcacgtctttgactgcagaaaccgtggctatctggtagtggcttctgagacatcacacagggcagaggtgagggcttctctctggaaagggcactcttgagggagctctccatttgcagaccaagccagtagtgtcggagtttcgccctgttggccaggctggtctcgaactcctgacctcaggtgatccgccacctctgcctcccaaagtgccgggattacaggcgtgagtcaccaagcccagccccagcaaaattctgattgcatcagcttgataacttttatctggctgtgggtgtctggatcatgg

SEQ ID NO: 106632 - DNA, 2060 bp, Homo sapiens
  misc_feature (1)...(2060): n = a,t,c or g
tttcgtcttcgctgtcgcgatttcgtgtcgggcggaagtcgggaggttgggtggtctgtaaacgctggcttgtgacaaggagggggaggaggaaggccttcgtaaaggttgcatctccgtcccttcgctcccggggacccgcgggnnnnnnnnnnntccaacacccaggccccggggctagccccttcccacaggctctctccgctcgattttgtcaccgttatgtgggaagcgaatccagagatgtttcacaaagcagaagaattattttctaaaacaacaaacaatgaagtggatgacatggacacgtcagatacccagtggggctggttttacttggcagaatgtgggaagtggcacatgtttcagccggataccaacagtcagtgttcagttagcagtgaagatatcgaaaaaagcttcaaaacaaacccttgtggctccatttcttttactacttccaaattcagctacaagatagactttgcagaaatgaagcaaatgaatctcaccactggaaagcagcgcttaataaaaagagcccccttttctatcagtgctttcagttacatctgtgaaaacgaggccatccctatgccaccacactgggagaatgtgaatactcaagtaccatatcagcttattcctctgcacaatcaaacacatgaatataatgaagttgctaatctctttgggaagacgatggatcgcaaccgaattaaaagaattcagagaattcaaaacctagatttgtgggagttcttttgcaggaaaaaggctcagctcaagaaaaaaagaggtgtgcctcagattaatgaacaaatgctgtttcatggtaccagcagtgaatttgtggaagcaatctgcattcataactttgattggagaataaatggtatacatggtgctgtctttggaaaaggaacctattttgctagagatgctgcttattccagtcgtttctgcaaagatgacataaagcatgggaacacattccaaattcatggtgtcagcttgcaacagcggcatctgtttagaacatataaatctatgtttcttgctcgagtgctaattggagattacataaacggagactccaaatacatgcgacctccttccaaagacgggagctatgtgaatttatatgacagctgtgtggatgatacctggaacccaaagatctttgtggtttttgatgccaaccaaatctatcctgagtacttgatagactttcattgatttcacttccaaatctcggtggtcaaggaagctttattcttttttgcaggaaggtttgctcttcagtcatctagccactaaatgttaattatctgatacttttgaaacagatatgaaaaaaagtggcctccatataaaaagacatactgacttcaaggttggtttttgttgttttgtttttgcctgtttcttgtagtcttgtttgttaaaagttgatatcattgatgttttaacacataggggtgaaagataccattcaaaatggaatcagctgagtctcaactaatgtggtcattgagatctttaaagtttacgtgtgtgttatcaggataaatgattttagtttaaatagacttattcgtataaatgttgaaaaaaaatacagacataaatgtgtccctttagaggaattgatcctttgtaaattgaattcaggtagtagtatcatccaccaatccatctgttgctttgttggtcttctgaaggggggatttaaaactctgaaacagtctgagcaccttgagagaaatcagaaacaagacaattatttgcagtgctgtcaaacaagccagaaggagaaaatcaaggtagaatgccccactttccagttgccttaggatagcaggctgcagcctcagacttgatcctgtcattctcctctgtntcccacatctgaattgataattgctgcaaaatgtcattagcctacaatttcatccatcagggctcttnggattcttacaccacggcttgctgtgcaaggtgtttattgcatcttcaaagtgaaactttaaattattattcaaaacatttattttccc

SEQ ID NO: 106633 - DNA, 450 bp, Homo sapiens
  misc_feature (1)...(450): n = a,t,c or g
cgtcagctgtacgtagcnnnnccgctctagagcggccgcaatacaactggggcagaggctgaggttacctgggccagattccccaagactgacaggcaggcagcttgagccaggcacaggaagaggctccagggcgaagcgggggccctgctccatcttcaggttcaggcgggagactcccccacagagggagggaggggaggcactcggggccacatccaggcaagcaccacccccctgccctccacggcagccttgggagttggacgcgtcggccaaggctgctgctgttgctcctccaaagaaggttggcttcaaggccgtgtccagggacccacgagcagaggcactggggggcaagggatctccaagggggcaagggatccctaaagggggtagctcacaggtgagggggtttaggccccctctagggagcgcctgaggccatac

SEQ ID NO: 106634 - DNA, 894 bp, Homo sapiens
aattttgtatttttagtagagatggggtttctccatgttggtcaggttggtctcaaactcctgactttgtgatctgcccgcctcggcctcccaaagtgctggaattacagatgtgagccactgggcccagcccagaacttggttttatccacctctggtgaaacatgagctcacttggtgctctctggcctctttattcccatctccttaggctgaccctgacaagtgccagggccaggcttggaccaagcagtcaactgagtcagcctgccctgggaaccaggcaggggagggagcttacggacgggctaggctcaggagagtaagagagagcagatgaagggcagaagtccgtggccgcagaggcagctgagcatgagggatggagcgtgctgctgtcctgcaggtgccgttagccctgttttgcactggtggattgatctgctcaggcgcacagggagatggcacagcaggacccgccgcccagcctcgctgagggcatgctcccgcctcacctccagaggctgttgggcggaagccgagagctgcagcagttggggccagcgtgggactggaggcccaggtgaatcttgtggggcaggggacggagctgaggctgtccggcccgggccctccccacccaaaggccctagaaccctagccttcaatccctggggtttgcttctcccctgagtcctggctttcctgacctgccgtccgttagggacaggtggaggggccaagtcttgccatcagaggccagtgtggtggtgccagagctacggggtattccaggacccctgacctaggcacggggcaggagggcccagagccacctggccacttgtcaggaggcttaggattgggaggaaagagggagccccgcgtgccgaa

SEQ ID NO: 106635 - DNA, 423 bp, Homo sapiens
tggttcaaaccatcccgcctcgggctcccaagtggcatgtgcctgtggtcccagctacttgggaggctgaggagggaggatcacttgagcccgggaggtcaagcctgcagtgagccatgtttgagcctatgaatagccctgcacttcagcctgggtaacatagccggaccccatttgtattagtccgttctcatactgctatgaagaaacacctgaaactgggtaatttatgaagaaaagaggtttaattgacttacagttctgcatggttggaaaggcttcaggaaatttacaattatggggaaaggggaaacaaacacgtccttctttacgggccaacaccggggagaatttttgaccacgctggaaaaccttcttaaactattataacatatgatagcacttactactagaacagcatgg

SEQ ID NO: 106636 - DNA, 417 bp, Homo sapiens
atcttgagaggacgtgaccctgaattatccggctgtgcttgacatccaatgactggtgatgttgtaagagaaagacggagggagatgtaagatatgagagaaggccacgccgagactggagtgatgtggccgtgagccgaggaatgcctggagccaccagaagctggcaaaggcagaaggagcctcctctggaccctgtggtgggtacgcagcctggcagatatattcattttggacttctggcctccagggctgtgagagaatacatttctgcagttttaagccacgcaatctgtgtccctgggaagcccaaatagggcgagaccttttgccaagtggtctccaagtgtcacgtcatcgaatccttctcccgggcttgtgccatagtctttccactttagagaggaggaaacggag

SEQ ID NO: 106637 - DNA, 5400 bp, Homo sapiens
gtacgtgcgcgtctccctgccgccgccgccgcccgccgcgggccgccccggggccgccgtcgccgacgacgcgcgggaggaggaggaggaggccgccccgccgccgccgccgccgccgccgccccggctcgccgccgcccgcccgccgggctcgcagccccggcccccggccgcaggcgaggcccaggccgcggccgacatgaaccaccagcagcagcagcagcagcagaaagcgggcgagcagcagttgagcgagcccgaggacatggagatggaagcgggagatacagatgacccaccaagaattactcagaaccctgtgatcaatgggaatgtggccctgagtgatggacacaacaccgcggaggaggacatggaggatgacaccagttggcgctccgaggcaacctttcagttcactgtggagcgcttcagcagactgagtgagtcggtccttagccctccgtgttttgtgcgaaatctgccatggaagattatggtgatgccacgcttttatccagacagaccacaccaaaaaaagcgtaggattctttctccaagtgcaatgctgaatctgattccacgtcatggtcttgccatgcacaagcagtgctgaagataataaattacagagatgatgaaaagtcgttcagtcgtcgtattagtcatttgttcttccataaagaaaatgattggggattttccaattttatggcctggagtgaagtgaccgatcctgagaaaggatttatagatgatgacaaagttacctttgaagtctttgtacaggcggatgctccccatggagttgcgtgggattcaaagaagcacacaggctacgtcggcttaaagaatcagggagcgacttgttacatgaacagcctgctacagacgttatttttcacgaatcagctacgaaaggctgtgtacatgatgccaaccgagggggatgattcgtctaaaagcgtccctttagcattacaaagagtgttctatgaattacagcatagtgataaacctgtaggaacaaaaaagttaacaaagtcatttgggtgggaaactttagatagcttcatgcaacatgatgttcaggagctttgtcgagtgttgctcgataatgtggaaaataagatgaaaggcacctgtgtagagggcaccatacccaaattattccgcggcaaaatggtgtcctatatccagtgtaaagaagtagactatcggtctgatagaagagaagattattatgatatccagctaagtatcaaaggaaagaaaaatatatttgaatcatttgtggattatgtggcagtagaacagctcgatggggacaataaatacgacgctggggaacatggcttacaggaagcagagaaaggtgtgaaattcctaacattgccaccagtgttacatctacaactgatgagatttatgtatgaccctcagacggaccaaaatatcaagatcaatgataggtttgaattcccagagcagttaccacttgatgaatttttgcaaaaaacagatcctaaggaccctgcaaattatattcttcatgcagtcctggttcatagtggagataatcatggtggacattatgtggtttatctaaaccccaaaggggatggcaaatggtgtaaatttgatgacgacgtggtgtcaaggtgtactaaagaggaagcaattgagcacaattatgggggtcacgatgacgacctgtctgttcgacactgcactaatgcttacatgttagtctacatcagggaatcaaaactgagtgaagttttacaggcggtcaccgaccatgatattcctcagcagttggtggagcgattacaagaagagaaaaggatcgaggctcagaagcggaaggagcggcaggaagcccatctctatatgcaagtgcagatagtcgcagaggaccagttttgtggccaccaagggaatgacatgtacgatgaagaaaaagtgaaatacactgtgttcaaagtattgaagaactcctcgcttgctgagtttgttcagagcctctctcagaccatgggatttccacaagatcaaattcgattgtggcccatgcaagcaaggagtaatggaacaaaacgaccagcaatgttagataatgaagccgacggcaataaaacaatgattgagctcagtgataatgaaaacccttggacaatattcctggaaacagttgatcccgagctggctgctagtggagcgaccttacccaagtttgataaagatcatgatgtaatgttatttttgaagatgtatgatcccaaaacgcggagcttgaattactgtgggcatatctacacaccaatatcctgtaaaatacgtgacttgctcccagttatgtgtgacagagcaggatttattcaagatactagccttatcctctatgaggaagttaaaccgaatttaacagagagaattcaggactatgacgtgtctcttgataaagcccttgatgaactaatggatggtgacatcatagtatttcagaaggatgaccctgaaaatgataacagtgaattacccaccgcaaaggagtatttccgagatctctaccaccgcgttgatgtcattttctgtgataaaacaatccctaatgatcctggatttgtggttacgttatcaaatagaatgaattattttcaggttgcaaagacagttgcacagaggctcaacacagatccaatgttgctgcagtttttcaagtctcaaggttatagggatggcccaggtaatcctcttagacataattatgaaggtactttaagagatcttctacagttcttcaagcctagacaacctaagaaactttactatcagcagcttaagatgaaaatcacagactttgagaacaggcgaagttttaaatgtatatggttaaacagccaatttagggaagaggaaataacactatatccagacaagcatgggtgtgtccgggacctgttagaagaatgtaaaaaggccgtggagcttggggagaaagcatcagggaaacttaggctgctagaaattgtaagctacaaaatcattggtgttcatcaagaagatgaactattagaatgtttatctcctgcaacgagccggacgtttcgaatagaggaaatccctttggaccaggtggacatagacaaagagaatgagatgcttgtcacagtggcgcatttccacaaagaggtcttcggaacgttcggaatcccgtttttgctgaggatacaccagggcgagcattttcgagaagtgatgaagcgaatccagagcctgctggacatccaggagaaggagtttgagaagtttaaatttgcaattgtaatgatgggccgacaccagtacataaatgaagacgagtatgaagtaaatttgaaagactttgagccacagcccggtaatatgtctcatcctcggccttggctagggctcgaccacttcaacaaagccccaaagaggagtcgctacacttaccttgaaaaggccattaaaatccataactgatttccaagctggtgtgttcaaggcgaggacggtgtgtgggtggccccttaacagcctagaactttggtgcacgtgccctctagccgaagtcttcagcaagaggattcgctgctggtgttaattttattttattgaggctgttcagtttggcttctctgtatctattgactgccctttttgagcaaaatgaagatgtttttataaagcttggatgccaatgagagttattttatggtaaccacagtgcaaggcaactgtcagcgcaatgggggagaagaggttagtggatcgggggtccctggctcaaggtctctgggctgtccctagtgggcacgagtggctcggctgccttcctggggtcccgtgcaccagccctgcagctagcaagtcttgtgtttaggctcgtctgacctatttccttcagttatactttcaatgaccttttgtgcatctgttaaggcaaaacagagaaactcacaacctaataaatagcgctcttcccttcattgtgtgcattgtcggcccttcctcgggttctcctcctccagctgcctgggggctttttaataaacttgtctcacctcgtcagccactactgtctgcagcccctttgcaaagtggatgcactgaatacagtccggacagacattgtgggggtctttttattaaatcaagaacattgttaaattcaattaaggtttactctgctgccttggcagacttacgatctcaacagttcatacgagcaggtgaaaggattataaatagaatttcgttaaagtggaacagacgacaagaaagccttttagcaagagggcatgctcactagtggttagtaagctgtcgactttgtaaaaaagttaaaaatgaaaaaaaaaggaaaaatgaattgtatatttaatgaatgaacatgtacaatttgccactgggaggaggttcctttttgttgggtgagtctgcaagtgaatttcactgatgttgatattcattgtgtgtagttttatttcggtcccagccccgtttccttttattttggagctaatgccagctgcgtgtctagttttgagtgcagtaaaatagaatcagcaaatcactcttatttttcatccttttccggtattttttgggttggttctgtgggagcagtgtacaccaactcttcctgtatattgcctttttgctggaaaatgttgtatgatgaataaaattttctataaaaattataattcagtgagttacgtggaagtggaggaagatttctactctccctggaaacaggcctgggaaaccttggcatttgtaacaaggtttcactgagatgtacttttccttctaattccgttttgcgggggcagggtctcttggttcttttttttttttagcctctaactagtcacatttactcttaagaaatgaaaggttttccaggagagaactgtgtacaaataaggtgactggagatgtgacctgatgtgtcacgaggcccttcggggcggcaggcgctatcgtgggcgtggtccttgcaccgtcccatcggccttgccttccagctccgtggcacggtttcctggtctttgggccagtgtgtaccttggagcgacttcctttctcaacttccactgcagtgtgtgtgccttctgctctgagagctgccttgtgacccgtgtgatagaaagcagggagtgagggtccccgcggacctggcccttccctccttcctcccccagaaagaggagttagagcaggggtgcgagagccgttcgctgtgggtttgtctttgaacaaacattaaggctgctctcgtctttgttctgggctgggggctggctgtagtcttaggtacctgaaagttcctactctccctcaaggtcttaactgactcttttctcc

SEQ ID NO: 106638 - DNA, 528 bp, Homo sapiens
cagatcccgaagcagcgctgggagcgtaagtgcgggcagagcactgcgccgtttgggaacgcaactttgaggagacagtgcggtggacttcagtgaagttccttatgacttcccctgaaattgcttccttatcatgggggcaaatgaaagtaaaaggctctaatacaacctataaggactgcaaagtatggccagggggtagtcggacttgggattggagagaaacaggaactgagcattctcctggtgtgcagcctgcagcctgcagatgtgaaggaagttgttgagaagggtgtacagactcttgtgattggccgagggatgagtgaggccttgaaggtgccttcatcaactgtggagtacctcaagaaacatggcattgatatgcgggtcctccagacagagcaggcagtgaaggagtataatgccttggttgcccaaggggtcagggtgggaggtgtcttccattccacctgctgatggtagccttaagaggagaataaatcactaagtgcctataaaaaaaaa

SEQ ID NO: 106639 - DNA, 389 bp, Homo sapiens
ctgggcagaaaaagaagaaaatagaagacttaaacaacactataaaaccatatcacctaaacatacatagaaaatccacccaacaaccacagtatacatattattctcaagtgtacatggagccttcttcaacacagaccatatgctaagtcataaaacaagtctcaattaattttaaaacattgaaaccatacaaagtatgttccccataacaatgaaatgaaattagaaatcaatttaaaaaaagcaatttggggaattcacaaatatgcaagtcaggtgctgtggttcatgccaatattcccaacactttgggaggccaaagtaggagaattcctggagcccaggagttcaagatcagtgtgggaaacatggcgagaccccatctc

SEQ ID NO: 106640 - DNA, 2442 bp, Homo sapiens
ggctgccagcgtttcatgatcaacatgggagactcccacgtggacaccagctccaccgtgtccgaggcggtggccgaagaagtatctcttttcagcatgacggacatgattctgttttcgctcatcgtgggtctcctaacctactggttcctcttcagaaagaaaaaagaagaagtccccgagttcaccaaaattcagacattgacctcctctgtcagagagagcagctttgtggaaaagatgaagaaaacggggaggaacatcatcgtgttctacggctcccagacggggactgcagaggagtttgccaaccgcctgtccaaggacgcccaccgctacgggatgcgaggcatgtcagcggaccctgaggagtatgacctggccgacctgagcagcctgccggagatcgacaacgccctggtggttttctgcatggccacctacggtgagggagaccccaccgacaatgcccaggacttctacgactggctgcaggagacagacgtggatctctctggggtcaagttcgcggtgtttggtcttgggaacaagacctacgagcacttcaatgccatgggcaagtacgtggacaagcggctggagcagctcggcgcccagcgcatctttgagctggggttgggcgacgacgatgggaacttggaggaggacttcatcacctggcgagagcagttctggccggccgtgtgtgaacactttggggtggaagccactggcgaggagtccagcattcgccagtacgagcttgtggtccacaccgacatagatgcggccaaggtgtacatgggggagatgggccggctgaagagctacgagaaccagaagcccccctttgatgccaagaatccgttcctggctgcagtcaccaccaaccggaagctgaaccagggaaccgagcgccacctcatgcacctggaattggacatctcggactccaaaatcaggtatgaatctggggaccacgttggctgtgtacccagccaacgactctgctctcgtcaaccagctgggcaaaatcctgggtgccgacctggacgtcgtcatgtccctgaacaacctggatgaggagtccaacaagaagcacccattcccgtgccctacgtcctaccgcacggccctcacctactacctggacatcaccaacccgccgcgtaccaacgtgctgtacgagctggcgcagtacgcctcggagccctcggagcaggagctgctgcgcaagatggcctcctcctccggcgagggcaaggagctgtacctgagctgggtggtggaggcccggaggcacatcctggccatcctgcaggactgcccgtccctgcggccccccatcgaccacctgtgtgagctgctgccgcgcctgcaggcccgctactactccatcgcctcatcctccaaggtccaccccaactctgtgcacatctgtgcggtggttgtggagtacgagaccaaggccggccgcatcaacaagggcgtggccaccaactggctgcgggccaaggagcctgtcggggagaacggcggccgtgcgctggtgcccatgttcgtgcgcaagtcccagttccgcctgcccttcaaggccaccacgcctgtcatcatggtgggccccggcaccggggtggcacccttcataggcttcatccaggagcgggcctggctgcgacagcagggcaaggaggtgggggagacgctgctgtactacggctgccgccgctcggatgaggactacctgtaccgggaggagctggcgcagttccacagggacggtgcgctcacccagctcaacgtggccttctcccgggagcagtcccacaaggtctacgtccagcacctgctaaagcaagaccgagagcacctgtggaagttgatcgaaggcggtgcccacatctacgtctgtggggatgcacggaacatggccagggatgtgcagaacaccttctacgacatcgtggctgagctcggggccatggagcacgcgcaggcggtggactacatcaagaaactgatgaccaagggccgctactccctggacgtgtggagctaggggcctgcctgccccacccaccccacagactccggcctgtaatcagctctcctggctccctcccgtagtctcctgggtgtgtttggcttggccttggcatgggcgcaggcccagtgacaaagactcctctgggcctggggtgcatcctcctcagcccccaggccaggtgaggtccaccggcccctggcagcacagcccagggcctgcatgggggcaccgggctccatgcctctggaggcctctggccctcggtggctgcacagaagggctctttctctctgctgagctgggcccagcccctccacgtgatttccagtgagtgtaaataattttaaataacctctggcccttggaataaagttctgttttctgcaaaaaaaaaa

SEQ ID NO: 106641 - DNA, 2148 bp, Homo sapiens
  misc_feature (1)...(2148): n = a,t,c or g
ttttttttttttacatttttagtctttattttttaggtaaattccattgaatcaaatataacaaaattacagtttttgtttgtaatgatctttgttcaccaccacacaatcatagtagaatcaaaagtaatatgagaacataaaatgatcaaggacatcaatgtttagtataatttcttaataaaggtaaatatccccatatttagaaaaaattgcattgctagttgcaaatcttaaacacctcagtgctgaaggatcctgtatttccccccaaagatccagcagcacggaggctttcagaacacaaactcaaaaatatagtattttcggggcagcattttaagtttcagaaaacccaaacaaaacaaaacaaaatcagaatcaggaatgtgaaagtgatggtgctctaaaaatcaatctggaagcagatctgccaacataagaatgtggttgaacagagtctaaccaggaaaaggagagatgcgaactcgctccccctcccctctcgccatcgtcccccgcccccagcgagcaagccgccccctgctctgcgctgtctctccaatggcgtctgcctccggggccacggcgaagcacgagcagatcctggtcctcgacccgcccatagacctcaaattcaaaggccccttcacagatgtagtcactacaaatcttaaattgcgaaatccatcggatagaaaagtgtgtttcaaagtgaagactaccgtgcctcaccggtactgtgtgaggcccaacagtggaattattgacccagggtcaactgtgactgtttcagtaatgctacagccctttgactatgatccgaatgaaaagagtaaacacaagtttatggtacaatttttgctccactaaacacttcagatatggaagctgtgtggaatgaggcaaaacctcatgaattaatggattccaaatggagatccccaatgaaaatgataaattgaatgacatggaacccagcaaagctgtcccactgaatgcatctaagcaagacgggcccacgccacaaccacacagtgcttcacttcatgatactgaaacaaggaaactaacagaagagtgtaaaagacttcagggagaaatgatgaagctatcagaagaaaatcaacacctgagagatgaaggtttaaggctcagaaaggtagcatattcggataaacctggatcaacctcaactgcatccttcagagatgtcaccagtcttcttccttcacttcttgttgtaattgcagccattttcactggattccttttctttttttggagacggagtctcactcttgttgcccaggctggagtgcagaggcgtgatctcggctcactgcaacctccgtctcctgggttcaagcaattctcccacctcagcctcccgagtagctgggattacaggcgcccgccaccacacccagctaatttttgcatttttagtagagaaggggtttcaccatgttggccaggctggtcttgaactcctaacctcaggtgatctacccgcctcggcctccaaagtgctgggattacaggagtgagccactatgcccggccttcattggattctttctagggaaattcatcttgtagagcaaagcatgcagagtgctatttcttttttttttctcttgaccagaagatttgtttacctaccatttcattggtagtatggcctgcggtgaccatttttttgtgtgtgtacagcgtcatacaggctttgcctttaatgatctcttatggttagaaaacacaataaaaacaaactggctactggacaaattgtatattaccagatcatcactagcagctttcagttgcacttcagtcctttatcaaattcataaagaattgttctgggaagtgaggagcacctctgcctggccaccctgtctgggaagtgaggagccccgcttcccgcgagccgccccatctgggggaagtgagggagcgcttgcctggggncgcccaactggtctggggaagtgaggtgtgcctgtgcctgggctgccgcactgtctaggaagtgaggtgcgtctctgctgcccgccgccccatctgggaagtgaggagcgcctctgcccggctgctgtgcaatcctgcaagtatgaagtgacagccttgtgtgtgatctttctg

SEQ ID NO: 106642 - DNA, 1241 bp, Homo sapiens
ttttttttttttaaaaagaaaaaagtgtttattataggcaacaacaccaatgggaactggtatttgtctacaccaagggagtgcaatttttcatcttccaatggcggcctcaaccttgaggcgaatccactggcgaaagatgcctttctaggaagcagagctccctgactgggctaagatagttcagattgatcttaggtcaatggtaagacctatgtagttcatgaagtcttggcttttcggcgctgggtcgcccaaagcagaatggagacggatagagtggtggctcccagaatcccgaagaacataagcagtgagaacgagccctggcgcatacacttgtatccatggaaaccatcagcacaaacacactgcaaaagacctggaccatcaggtacacaagatccattctcaggacacatttctgggtccccagtgttattgcaaaggttcttttgcccttgacagatttggttgtctatataagaggtgatagtattccaggcattaattcctccaggacagttgacatgttgtggcagtatcagagtctggagctgagtaaagccacggaaggtgttggccaagtcacctttgagggggtttgcttgcaggtctatgatgacagtggtatgtgcctgatgaaagtttggaccagggtcctccagagaacagttctggagatccagccccaagatggtgcccttctgattcaggcagcaacgggcatgcagcattagctctcgtgtcgttttacaataaaaggccacttttgacaaattttgcacgctccctggacattgggtgcatatctcgggtagcgccagagccctttccacgcccagagcgaggagcagggcggcagcccagggcaccagggtcgtaagactacccgggccgtgaggcgccattttccgttcccttggtgctccgctgctcgcgcgacccggccccgcggccccgccccgcagcgcgtcaggccctcttccccgggcgtggcctaagcggcccggtccagtcgccctggggctgcttgggggcttttcctgctcgtggagctctgcgctggtcttcatgcgccctagccctctttcggggatactggccgaccccctcttccttttcccctttagtgaaggcctcccccgtcgccgcgcggcttcccggagccgactgcagactccctcagcccggtgttccccgcgtccggacgccgaggtcgcggcttcgcagaaactcgg

SEQ ID NO: 106643 - DNA, 433 bp, Homo sapiens
agaagcttctagctctggggtctggctaccgctaggaggctgagcaagccaggaggggaaggagtctgtgtggtgtgtatgtgcatgcagcctacacccacacgtgtgtaccgggggtgaatgtgtgtgagcatgtgtgtgtgcatgtaccggggaatgaaggtgaacatacacctctgtgtgtgcactgcagacacgccccagtgtgtccacatgtgtgtgcatgagtccatgtgtgcgcgtgggggggctctaactgcactttcggcccttttgctctgggggtcccacaaggcccagggcagtgcctgctcccagaatctggtgctctgaccaggccaggtggcgaggctttggctggctgggcgtgtaggacggagagagcacttctgtcttaaagggtttttctgattgaagctttaattggaacgta

SEQ ID NO: 106644 - DNA, 536 bp, Homo sapiens
gtgggagcagtgtgaaggagaagcggcaagaacgacccctggaccgaccaaagcccgcgcgctgctgcgtcccacacccggtgcccacatcccgccgtcgccgccgccgccatgcccaagagaaagactgaaggggatgctaaaggagataaagccaaggtgaaggatgaatcacagaaaacatctgtaggatgtcctctaaatctgctgcttcaaaggcttatgccaagcctataaaggcccctgctatgaacggagagaatgtacccaacggtatccagagaaaacttgaagccttctacgatctgcaagcgtgtagacatctcaccagactcattgactttgcttgagttggtactatcgggaaagccacattcccatatactgctttacaaggatgacattatggctattgctaattattcctataccctgatcctacaagtcctggatcttccacattggtttttctatatgtgtcttctggtaatgcttcttagctgataatacagggtacttgaccttgagaggttcct

SEQ ID NO: 106645 - DNA, 748 bp, Homo sapiens
tttatttttttttttttaaagaggccaaacaatacatttattattttcatttaagttgcttatcagggcaaccttccccatctgggaacaatctagcagtcatgtaagaagcacatgcccccacaattagtttgaactccatcctggaattgcagctggttgtgattctaaggtacaggcatgccaggagcctggatttgaatagtcagtgggattttgtcacttaggggaatggataataagccaaccaatggtcatcagtctcacacataaggagtgcaggctcgtagggtatacacagtactttctcaaaagcattgcaaatgactgatttctctatgttgaaatttgaaaacccaacatctatctctctaacaccaaaggattgagccttccttgcctggctggtgagtaagagtgagcctctataccaaggatgtaccctttggctgtgtgaggttttcagaagtatcagaagctgtatacatttcctgtggttgctgtaacaagtgactaccaatttgttggagccttaaaacaagaaagatttattctctctccgttctggggaccagaagtctaaagtcaagacgtcagaggggccaagattgctctgaggggtataagggagaatccttcctgcctgtcccagctcctggtggctccaggcattgcctggcctgcggtggcatcactccagtctctgtctgcatcatcacatgaatatcttgtcctctgtactcaaatc

SEQ ID NO: 106646 - DNA, 353 bp, Homo sapiens
caaaactctgtctcaaaaaacaagcaaacaaaaaacacaggtagcaagagaaatgagaacagcacggaatactccaagtagagggaatagtatactcaggagtttggaaagtgagacagaacacagtatattttaagatttcagactgggtgtggtggctcacacctgtaatcccagcactttgattggctgaggcagaaggatcacttgaagccaggagtttggagaccagcctgggccacataacaagacctcgtctttaccaaaaaaaaaagaaacatgaaaaattttgaaaaaataaatttttttgggggggggggtttattaaaagttgttttcccggggttacctat

SEQ ID NO: 106647 - DNA, 901 bp, Homo sapiens
gtcgacgcttctgcctcaaagtgctaggattacaggcatgagccactgcgtgcagctgatactatctcttaataacagacttttgacagaatggtttcctatttgtgcttttgtttttactcagaagtcagacttctgctggccatttttatggagggccattgttgatttcttgagtttcttttttcttttaagtaaactttatattgaaatatgacctatgttcagagaagtgtacgagccataaatgttcgtcttgaatttctgcaaaatcaaaacacccatataacaccttcccagatcaagaattagaaacttcccttgggttccccactctctaaaagaaggagcccaccattttggttaggcatcaatagcttattcagagtagaaaacccggtattttgtaggaatggcctgtacgatattggtaaaatgcaacacattgcagggaaatatttgaaaatctggcccgtggcagtataactgagaatgtaaattagtggctgaaagtgtaacttagcagtcaagatttcaggccatgccgggcgtggtggtgcatgccggtaatctttgctactggggaggctgaggcgggagaatcacttgaacctgggaggtggaggtttcagtgacctgagatcgcaccactgcactccatcctgggcaacagagcaagattccgtcttaaaaaacaccaccaccaccacaaaagagatttcaggccagtcagcatgtagaagagctgagcaggttctcagtaaagcccttgtgaagagcccctgaggaaagataatgcagagcattgatatgactagtgcacatcccctgcaaccagctgtcttgcttgttgaaacttcctactgctgctttatcctcctgtctttcctttaaaaaaaaa

SEQ ID NO: 106648 - DNA, 2712 bp, Homo sapiens
ttttttttttttctggttttcctttttatttaatcaaagactggtgaataaacataaatacagcacaattacttcagatcattcttcatattgtatacacacaaacccatgaacataatctgaaagaaacctgtagacagcaatgaaatgcatacagctttttcttccctcgctcaaaaaaaagtttaaacacacaaacttacaatctcatcagcacacactctcttgtgacaaatgattcagacataaatagtgggtgcaaagaaactatatgctaacatatgaataacctttgttaatgaaaaaacagaagcagccataatgattaagatacattcagttactgataactagttgtgccctaaagggcattatcaaaagagaaatcgtgctgcagagaaaagcgatatatacatacacaatgagaaaataaactgcaagattaatgcatgcatgtttaatactggaaaaatcacagccctccaaaatttctgcacgtttgttataaaagccctctgcactcaactaaaattaaaatgatcttaaaaggataatacttgtaaagtttaagtctcctcagccacagaaattgcaatggaaataaatgttcagagtcattttcaaaacaaaaccaaaacaaaaatctattcttccgatgacatgcaagatacactgctctacattcccaatgactaggaaaaaaaaaacctcaagtcaatttttagtttgcagatgctcaagaattttgtattccagcaggagttcaaatcttttggatcttttcaccaacaactactggattttcttttctgattttctcagcagcatcggctttgtaattgtaagagcaattgtgtacatctgagtaacggtgtacaccacagtaaacatttccacaccggcattcaaacccagtaagtcccactttcttcctgcacatgaaacagcgattctttttttgtttcggtttttcaagagacttgctttgctcttcagatggctgctgtgctgtgtctgatactgaagcctgcacatcttctgtttcaggtactgctttgtccacagatgtactgtccaattgagaagatgctacagattctgataaaagtgactgatttgatacagggctgggctgcatagatgaagatgtagagtctaatgctgactgggcttctggcacactgccatctgtgcattgaactggtaaagattcagacagactactgacagaggttgcaggtgggcttattctaccattactactattctgtctttgaagatgttctttatagcatactgaacacatgccatttgtacgagggtttccataaaatccacagccagtggaacaaagcataggcacttggctgtgattagtttcttgagccatgttcctcagttgcacacctggcggcgggtctctccgcctgacacgctgcgcgccgccgccggtagccgccggtgaatgggtacaggtaatgccgccgaacccctgcttgctccggctccgccaccgccggcccctccgtccgctgtttattaaacttttctgtttggttgttcggccagacactggtcacacggcaagaaagtaatgcaggctctttagagaaccagccatctttctcggtcaggctgacagaccagatttctttgccatcatccgcattcagcgcttttactaaaccagcgcggtccgctgcatagacaacgttgtccgccagtgccggatgaagattggaatagaagttgccaatgccgctaccatcggaagtgctccacgccgtggtcggcgtaaactggttttcaacggttggcaatggggacatctttaccacatcttcttcgctgttaaacagcgaacagccgcttaaaagggtaacggaaagcagtccttgcttatcacctttgctcagcaatgcttcaccacgcaggtcggcaacaatggcagcccacccttcacctttgatgggttatcaagggttttcagcgcggcatcagcctgcttgagctgtacctgaacgcgagcaagacgcagatttatcacggctttgagattttcatcgctcgtgtctgccagcccctgttgtaactgggcggcagctttctctagttcatttttgtcaacaaattgctgcgcaagttccaaagaagccagcgcaccataagtatttttattttcagcagcaaatttttccgccgccgggatgctatccggtttgccttcgctcactgcggtaaccgcattttgataggcaagagaagcggagcgtgcagaatcaacctgatggctgttccagtagcgccagccaatcagtgcgccaacgcccaaaatcaccccaacagccagtgcagagcgcaaatccttcactactgctgtgccgttagccacttcagactcacccagcaccacagcaacgcgggcaccccatttatcagcacgggcaaactgtttcttaaagttgccgccgccgtggttggtcatcaatttcacgcccggtaattcatcacgcagacgctcagctaatgccatagccgcagattgtgtatcagcacctgaagccaccaggtatatatcgacaacaggatcggctttaaattccggattaacggcctgtactaacaatacaagacgttcgaggcccatagcaaaaccgacagccggtgttgcacgaccgcccagttgttccacaagaccgtcataacgaccgc

SEQ ID NO: 106649 - DNA, 421 bp, Homo sapiens
  misc_feature (1)...(421): n = a,t,c or g
ggagagataagtttgattcttatttcccacagtttagtgaggaatgagtggaacaaactatggaaggttttagttagggaagtaacacagttctgtagagaaatcaccacctagttgcatttaaggagctgtcagccttgaaagttaaaagagtggactgggcgccgtggctcatgcctgtaatcccagcatttcggaggccaaagtgggaagatcgcttgagcccaggagttcaagaccagcctgggcaacatagcaataccctatcataaaaaaaaaaataggttaaaatagtgagggaatttcaagggcttttccggcaggtgaggtttccgctgtttatccttacacagaaatgttctctaccctccttttcattgactatgagagctacctggccaaatgaattgcccttatgctn

SEQ ID NO: 106650 - DNA, 2114 bp, Homo sapiens
atgtcgcggaggctgctgccccgggcggagaagcggcgtcggcggctggagcagaggcagcagccggacgagcagcggaggcggtcgggagcgatggtgaagatggcggcggcgggcggcggaggcggcggtggccgctactacggcggcggcagtgagggcggccgggcccctaagcggctcaagactgacaacgccggcgaccagcacggaggcggcggcggtggcggtggaggagccggggcggcgggcggcggcggcggtggggagaactacgatgacccgcacaaaacccctgcctccccagttgtccacatcaggggcctgattgacggtgtggtggaagcagaccttgtggaggccttgcaggagtttggacccatcagctatgtggtggtaatgcctaaaaagagacaagcactggtggagtttgaagatgtgttgggggcttgcaacgcagtgaactacgcagccgacaaccaaatatacattgctggtcacccagcttttgtcaactactctaccagccagaagatctcccgccctggggactcggatgactcccggagcgtgaacagtgtgcttctctttaccatcctgaaccccatttattcgatcaccacggatgttctttacactatctgtaatccttgtggccctgtccagagaattgtcattttcaggaagaatggagttcaggcgatggtggaatttgactcagttcaaagtgcccagcgggccaaggcctctctcaatggggctgatatctattctggctgttgcactctgaagatcgaatacgcaaagcctacacgcttgaatgtgttcaagaatgatcaggatacttgggactacacaaaccccaatctcagtggacaaggtgaccctggcagcaaccccaacaaacgccagaggcagccccctctcctgggagatcaccccgcagaatatggagggccccacggtgggtaccacagccattaccatgatgagggctacgggccccccccacctcactacgaagggagaaggatgggtccaccagtggggggtcaccgtcggggcccaagtcgctacggcccccagtatgggcaccccccacccccttcccccaccacccgagtatggccctcacgccgacagccctgtgctcatggtctatggcttggatcaatctaagatgaactgtgaccgagtcttcaatgtcttctgcttatatggcaatgtggagaaggtgaaattcatgaaaagcaagccgggggccgccatggtggagatggctgatggctacgctgtagaccgggccattacccacctcaacaacaacttcatgtttgggcagaagctgaatgtctgtgtctccaagcagccagccatcatgcctggtcagtcatacgggttggaagacgggtcttgcagttacaaagacttcagtgaatcccggaacaatcggttctccaccccagagcaggcagccaagaaccgcatccagcaccccagcaacgtgctgcacttcttcaacgccccgctggaggtgaccgaggagaacttctttgagatctgcgatgagctgggagtgaagcggccatcttctgtgaaagtattctcaggcaaaagtgagcgcagctcctctggactgctggagtgggaatccaagagcgatgccctggagactctgggcttcctgaaccattaccagatgaaaaacccaaatggtccatacccttacactctgaagttgtgtttctccactgctcagcacgcctcctaattaggtgcctaggaagagtcccatctgagcaggaagacatttctctttcctttatgccattttttgtttttgttatttgcaaaagatcttggattcccttttttttttttttttttttttttaaatgctaggtttgtagaggcttacttaaccttaatggaaacgctggaaatctgcagggggagggagaggggaactgttatctcccaagattaaccttcacttttaaaaaattattgtacatgtgattttttttttttcctgttcatacatttgggctgcccatgtactcttggcacatttcaataaaattgtttggaaaataaacccagcaaaaaaaaaa

SEQ ID NO: 106651 - DNA, 440 bp, Homo sapiens
cctgtttaaaaaaaaaattatgatggctgagtctgtgtcaaagaaaattaacttattttttggggttaactaaattatctttaggtaattacattttatataaattgggatgatatatggcagtagttttcctattactactacttttttttcttgtttttcctttgtgtttttgtaataccaggggagccttttcttaaaatgaaactaggcaaacctaagacaattatgcttaaggaaaaaaaagggggggaatcttactcagaactgttttttgaaacggatcaaatggaatggctcagagcaggtgtgatggctcctcctgtaatcccaacactttgggaggctgaggtaggaggatcgtttgagcacaggagttcaagatgaagcctgagcaacatagtgagaccctgtctctatgaaaaaagttaaaaaaaaaa

SEQ ID NO: 106652 - DNA, 300 bp, Homo sapiens
ggaaaatacattttgcttcttaaagttttttgttgttttttgagacaaggtctctgtcacctggctcactgcagcctccgtctgccaggttcaagcgattctcgtgcttcagcctcccaagtagctgggactccattacgggtgtgcaccaccatgcccggctaaattttgttttttgttttttttttcttgtttgtttttgtttttgaaacggagtctggctctgtcgctgaggctggttgcagtgagctgagatcgggctactgcactccactctgggcaacagagtgagactctgtc

SEQ ID NO: 106653 - DNA, 347 bp, Homo sapiens
ggtaaggctgatcttgaactcctgacctcaggtgatctgccagcctcagcctcccaaagtgctggattacaggcatgagccaccgtgcccagccaaaacgttttaaataattgcagcacatagcatgagattatgcacagtaataatatatgagacacttgacaagaaataaattaccttacaatttactatttagaatttctgggtaatgatgtattggtgaaacttttggttaaaaacttaacaaaagataatattcaaatataatcctttcttactctgaaaattgaaactcttgttatacctgaggatcacatctatcaacagcagttctcattggataggct

SEQ ID NO: 106654 - DNA, 375 bp, Homo sapiens
tgttaagagacgttatgcccatttctctggaaatctcaatggagacaagtaaggcaaggcatacaatacattcctgtcccactgcaaccttccacagctagcctctgcactgctgggtatcagggaaagactcaagagaggaccttttgcttgcaaatcctcaaactcctgacctcgggagatccgcctgccttggcctcccaaggagctaggattacaggcgtgagccaccacgcccggagcttgcaaataccgaccacagagtttaaccttcatgggctccttctaggaagcaggcagacacttgccacagactttgcagattgttcttatatattgttactgatcatatgaccaacatatgtaatgtaaccg

SEQ ID NO: 106655 - DNA, 1184 bp, Homo sapiens
gctttcaaatacggtgcctttttatttaaaacagtgtaaacataacaactcaacaccaccaataattggaaaaagactggatatgtgaacactaatttcctcatatgtcccatgaaagtgagggtaaataaacagacaaatcttcaggagaggtttcagttcaccttagcagtggtaaaaatattgctttattccaaatgaacatacaacacaatttactgttcttttgggggggcttcttgtgaactgaatagtctgggtatttttatttcaacaatttattcttcccatactaaccacagaagccgaagccctggtccacacatagcagacttgctataaaataaatggtaatgagaatgatgagaaagcaaatggtaactgtcaatttgttaattgtcttgtattaataatttaagtaggcatgattcaaaataaacacacatccttgatgaactcaccttatgatactgatatcattaatgagccaatagttgatcctctcaaaagtattcacatcagaaaatggtctagacagtgtcaagagttttatacgaccccaccatgcaagtgaccttgatttaagaactaactgaactttatacttaatggaaaaatttaaagtgaaaagatctaagagggaaataatttttctgaatagtagattccctgatgtttcagaacaaattttagcaagcgtaatacgcgcacacatgcacacacatacgcacaatgaacacatgtgcttacagcatatgtgcccgcgtgagcaagtccacacacacacacgctcggcacacacatgtgcacacaggcacacaaaaactgagaaacgctcctccagagcctctaaacaatctcaaggaaaaacatttctattagcatgattttagtgacacgatataaggatttttttgtctctttttctgtaataatttcatacctccagctgagatctgtgcattcaaatctcagaggaaggtggcacacaagagtagttaagattgcccccggtttctccttctatctcctgtcctccttcccattgcagagtcttttgtggcattctccaaaaatcaaatagaaaacactacatgtgtcgacatgacataacctgtgatgaggctattgggtgaatagaaatttagggcttgggactggcaagccaaatggcaagagccacc

SEQ ID NO: 106656 - DNA, 2564 bp, Homo sapiens
ccagcgtgctgaagccggagcgagctagccgcccggagccgcgccgacccagctgagcccagcccacgggacgccagacctcgaccgtcgctcctaccccggccaccgctcggagccgaggcggacgcgtcccgatcttcccctgtccccaccctgccccgaccctcctctccacctctcgcgtcgtgacaccagcgtctccggcagcctccatgaaagccctcagattgtcggcttccgccctcttctgccttctgctgatcaacgggttaggggcagcaccccctggtcgccctgaggcgcagcctcctcctctcagctctgagcataaagagccggtagccggggacgcagtgcccgggccaaaggatggcagcgccccagaggtccgaggcgctcggaattccgagccgcaggacgagggagagcttttccagggcgtggatccccgggcgctggccgcggtgctgctgcaggcactcgaccgtcccgcctcacccccggcaccaagcggctcccagcaggggccggaggaagaagcagctgaagctctgctgaccgagaccgtgcgcagccagacccacagcctcccggcggccggagagcccggagcccgcggctccgcctcgccctcagactccggagaatgggcccgaggcgagcgatccctccgaggagctcgaggcgctagcgtccctgctccaggaactgcgagatttcagtccaagtagcgccaagcgccagcaggagacggcggcagcagagacggaaacccgcacgcacacgctgacccgagtgaatctggagagcccggggccagagcgcgtatggcgcgcttcctggggagagttccaggcgcgtgtcccggagcgcgcgcccctgccgcccccggccccctctcaattccaggcgcgtatgcccgacagcgggccccttcccgaaacccacaagttcggggaaggagtgtcctcccccaaaacacacctaggcgaggcattggcacccctgtccaaggcgtaccaaggcgtggccgccccgttccccaaggcgcgccggccggagagcgcactcctgggcggctccgaggcgggcgagcgccttctccagcaagggctggcgcaggtggaggccgggcggcggcaggcggaggccacgcggcaggccgcggcgcaggaagagcggctggccgacctcgcctcggacctgctgctccagtatttgctgcagggcggggcccggcagcgcggcctcgggggtcgggggctgcaggaggcggcggaggagcgagagagtgcaagggaggaggaggaggcggagcaggagagacgcggcggggaggagagggtgggggaagaggatgaggaggcggccgaggcggcggaggcagaggcggacgaggcggagagggcgcggcagaacgcgctcctgttcgcggaggaggaggacggggaagccggcgccgaggacaagcgctcccaggaggagacgccgggccaccggcggaaggaggccgaggggacagaggagggcggggaggaggaggacgacgaggagatggatccgcagacgatcgacagcctcattgagctgtccaccaaactccacctgccagcggacgacgtggtcagcatcatcgaggaggtggaggagaagcggaaccgaaagaagaaagcccctcccgagcccgtgccgcccccccgtgccgcccccgcccccacccacgtccgctccccgcagcccccgccccccgcccccgctcccgcacgagacgagctgccggactggaacgaggtgctcccgccctgggatcgggaggaggacgaggtgtacccgccagggccgtaccaccctttccccaactacatccggccgcggacactgcagccgccctcggccttgcgccgccgccactaccaccacgccttgccgccttcgcgccactatcccggccgggaggcccaggcccggcacgcgcagcaggaggaggcggaggcggaggagcgccggctgcaggagcaggaggagctggagaattacatcgagcacgtgctgctccggcgcccgtgactgcccttcccggtcccgcccccgcgcgcccccgccgcgcggcgcgcgccggcgcccccctccgtgttgcccgctccccctcggtgtttgcatgcgccccggccctgccccttggccctgcccctgtccccgggatgcgtcgggacctgccagacccccctcccgggtcctgagcccgaactcccagagctcacccgcgggtgaccgggggccagcccaggagggcgggtggtttgtgcgagttcccttgccacgcggggccccggccccatcaagtccctctggggacgtccccgtcggaaaccggaaaaagcagttccagttaattgtgtgaagtgtgtctgtctccagcccttcgggcctcccacgagcccctccagcctctccaagtcgctgtgaattgaccccttctttcctttctctgttgtaaatacccctcacggaggaaatagttttgctaagaaataaaagtgactattttattaggaaaaaaaaaa

SEQ ID NO: 106657 - DNA, 429 bp, Homo sapiens
ggcacgagtaattttatacagaagcataaattttctttttatctttttttttaacttttttttgtgtttggaattggcaaaaagggggttcccccttttgccccaggcgggcctggacctccggacctaaggggaccccccttttttaccctccaaaggggcggggataccgggggggaccccttgccccgggcgggctttagaatttggggccccctgaaaggggtaatcttgggggagaattttttttttaaagcggaacttaccctggggaaaacctggttaaaggagtagggggttaaaaattccattaaaaccaagggggcccaaattttaaaccggcctcttgggggttcaacctttacggtgttggcccttagggccccctaaaagggggggtttttttaaaacccttcggaaaaaaaagct

SEQ ID NO: 106658 - DNA, 352 bp, Homo sapiens
ggcacgagaaagaactttgaagagagagttcaagagggcgtggtggcgagcacctgtaatcccagctactcgtgaagccaaggcagagaattacttgaacccgggaggcggaggttacagtgagctgagatcacgccactgcactccatccagcctgggcgacagagcgagactcaaaagtatgattctggctgtagagttttctttttttctctgtctcaaaaaaaaaaagtgtcagctttgtcttgtcaagaggtgaaggaacttgtttaattctttaattttttttttgaaataaaaacgggggtcttactatgttgcccaggctggcctcaaattcctggtctaaggg

SEQ ID NO: 106659 - DNA, 854 bp, Homo sapiens
  misc_feature (1)...(854): n = a,t,c or g
tgaaataataaaatgaataatgaattgccaggtgaaatgaaatgaaatgatgaaatgaataatgaaatgccgggnnnnnnnnnnnnnnnnnnnnnnnnnnnnnnnnnnnnnnnnnnnnnnnnnnnnnnntgagatgacatgagatgaaatgggatgaaatgaaataatgaacaatgaaatgccgggtgaaatgaaatgaaatgaaatgaagaaataaatgaaatattgaaatgaataataaaattctgggtgcggtgatgcactccagcttgggtgatagagtgagactccatgttggtcaggctgatctcgaactcccgacctcaggttgcagtgagcagagatcgcgccactgaattccagcctgggcgatagagcgagtctgtctcagaatgaaatgacgtgacatgacatgacatgatgaaatgaataatgaaatgccgggtgtggtggcacactccagcctgggcaatagagcaagtctctgtctcgaaatgaaatggaatgaaatgaagagaataaatgaaataaatgaaatgaaataataaaatgaataatgaattgccaggtgaaatgaaatgaaatgatgaaatgaataatgaaatgccgggnnnnnnnnnnnnnnnnnnnnnnnnnnnnnnnnnnnnnnnnnnnnnnnnnnnnnnntgagatgacatgagatgaaatgggatgaaatgaaataatgaacaatgaaatgccgggtgaaatgaaatgaaatgaagaaataaatgaaatattgaaatgaataataaaattctgggtgcggtgnnnnnnnnnnnnnnnnnnnnnnnnnnnnnnnnnnnnnnnnnnatgaaatgatgaaataatgaaac

SEQ ID NO: 106660 - DNA, 361 bp, Homo sapiens
  misc_feature (1)...(361): n = a,t,c or g
ggcacgagttgaacacctaggctcaagtgattctctcacttccacctcccaacgtgctgggattacaggtgtgcaccaccacacccagctgactttttattttttgtggagatggggtctccctgtgttgaccaggctggtcttgaactcctgggctcaagtcaacctgggagtgggattttaaatagggtggctagaggaggtctcacagagaaggtgtcctttgaggaaagacaaagacgttggcaaggaactttcttctggatatcagggtgtatttgtttgcgtgggtgccacaacaaagtaccacgagcttggaggcttaaacagcagaaatttatcttctcacaataaatgtctn

SEQ ID NO: 106661 - DNA, 1723 bp, Homo sapiens
gggggagaattgcttgaacccggcaggcagagattgcagtgagccgagatcgcgccactgcactccagcctgggtgacaaggcaagactccgtctcaaaaaaaaaaaagtctgagagtagctaagaatttatgtaaaagcaatcagagtttttaatttatgggaaccaaataaaactataacctcatagtgtttataagaactcagaaataatatttatttaactttattatgaggccacacatattttcctgtgtttctatatatagtttggaaaactatccttaatagtctgttttatatgccttatatttaaaagtttgttttagttattttgaaagactattgctgctgcaaatagttgtgtgctttacattctaagcttcagtacatttatttaagagcatcataatctgacctgagcatccacttggagagtgttttttttgtgtgtggtctggggtgacaaaagaccacaaaaatgtgtggtctggattttttcaactatgtcattaactttatgatccaagaccagttataggatgaatctgtatgtaaaaatagagtcttatttatggaaggaattattctaagggaaaaatccagggtcaagctgtatcttttatgtcctttatattgcatgtctatttctgttacacaatttgttatttcttcaaatttcctatggtagcatgataaatcatcaaagaacctgtttgggatataaaactctgatagaaaatatttaatgagtatcttgattataacctagaatatgtatacgttagtaaaataaccagatatactacagaactctctattggctcaaacaggttgacctcaatccaagtttactcttgatatcactctgttggctgaaggaggtaactcaaacctcagggtttgtttttcccgggacagatagtagtgatagtgcattatatttgaataagaaaaacaaaccagtataccttgagaaattttaaaaagcatagttgaggcatattttttcataattatatacttatctgtttattgcccatggaaaatatatgtgtagaagtatttcttctgttatttgttactatcttcttaatttgttccaaagaaaatgctgccatactggcattccctctgggaagggaaacaaaacaaaacaaaactcacttcaaaaccagcagtgctgctatcagataagtagatgtcaatgtatacttacaaggaaaaactaaaaaatgtaatgtgttaattcagcctttttctatgtaatatttccaagtcagactttcttacattcctggaatttactttgatataccaagaataataatgataaaatgtttgctttgattactgtggggggaaagatgaaatgttcaattgtattaaaacaaacaagcttttcagagatactggtttcctgcccttgaagggtataaagaatttagatcatgcctgtaatcccagtactttgggaggccgaggcaggtggatcacctgagatcaggagttcgagaccagcctggccaacatggcaaaaccctgtctctactaaaaatacaataattagccaggcatggtggcgggcacctgtcatcccagctacttgggaggctgaggcaggagaatcgcttgaacccaggaggcagtgattgcagtgagctgagatagcaccactgcatgcaagcctgggcaatagagcgagctccgtctcaaaaaaaaaa

SEQ ID NO: 106662 - DNA, 348 bp, Homo sapiens
ggcacgagggattaaaaataaccacggggcattgctcgagtgatactgcctttatataagagacaacattgtggaaactttaaaattatagagcagaagaatatgcattagcctggaaatgaaattaaaataatgtaagaattttaaagaaaaggctatacagctgcagtagcttgatgctgtctttgtaatgataattctgtattgctgtgtatgtattatttactagtgtgtatgcatgcatgcatgcatgcattgtatattaagacttggaagatcagctgggtgccgtgtctcatgcctgtaatcccagtactttgggaggccaaggtgagtggattacttgag

SEQ ID NO: 106663 - DNA, 328 bp, Homo sapiens
ggcacgaggtgacacacacctatcagttacttcagggggccgatgtgggagaatcgcttgatcttgggaggtcgaggctgcagtgagctatgatcatgccactgtactccagcctgggcaacaaagtaagacactgtctcaaaaggaaaagacaaaataaactatgataaaggttatgatccaatgttaaatgcatccagtagaatgtaaaatgatacctagtgtttaatctcaatcatgtaaagaaaagaaggaaaaatgatcaggagaaagtatggcagtggccgacgtagtaaccgctgttgtttaattgagcccatcccttcct

SEQ ID NO: 106664 - DNA, 325 bp, Homo sapiens
ctttgtccatttatttttaactgtggagcttctggggtcatgatcccataaggaaaacataaacgagactaaatatttttatttttagacacgagatctcactatgttgcccagactggtcttgaattcctaggctcaagtaatcctcccgccttagcctcccaaatactgggattatagacatgaaccactgcacccagcctcctcacacttggtattttaaaagagaggatctaatacaaggaaattgataaatattagagaattgacaaagcaaagatgggacactgactttaggaaacagctactctccctggggttatgg

SEQ ID NO: 106665 - DNA, 357 bp, Homo sapiens
ggcacgagagagaatacacacaggctgagaagaggaaattcattgcttttttcttctttaagatggggtcttgctctgtcatccaggctagagtgcagcgacatgatctcagctcactgcagcctcccaagtagctgggactacaggcacgcactaccacacctggctaatctttgtgttttctcgcacagactcccgcttacctagttccccacgctcccctctaacgtccgtcatcagtctgatcatcccactcagccttattcctacgacatatcttaccactccatctcgcccatcctctacctccccaccttcgcatccttcattccgcgcacccctaacatccgacccacg

SEQ ID NO: 106666 - DNA, 893 bp, Homo sapiens
  misc_feature (1)...(893): n = a,t,c or g
ggtcgactccggctctcactgctaggggcttaagcggagggagtcgagccagcgtcgccgcgatggtgttgttggagagcgagcagttcctgacggagctgaccagacttttccagaagtgccggacgtcgggcagcgtctatatcaccttgaagaagtatgacggtcgaaccaaacccattccaaagaaaggtactgtggagggctttgagcccgcagacaacaagtgtctgttaagagctaccgatgggaagaagaagatcagcactgtggtgagctccaaggaagtgaataagtttcagatggcttattcaaacctccttagagctaacatggatgggttgaagaagagagacaaaaagaacaaaactaagaagaccaaagcaggcagcaacagcagtcaacaacagcagcacctgccgcagcagcaacagcagcaacaacagcagcaacaacagcagcaacagcagcacagtaaagggcatacatttcctgctttcaccaattaaccactgaattgctattttttccttttggccagatagctaggtttctggttcccccacagtaggtgttttcacataagattagggtccttttggaaagaatagttgcagtgtttataggatagttgtggtaagaatctagtttattttgcatttggctaattggtctgtgctgcatggttatatactcctggattatagattaaaagtctctgtagacatctctgtgaagagcaagctatcattaaacatgtctgtttatcaaaaaaaagaaaaaaaacttnnnnnnnnnncccggcccccaattccccttaaaggggggggaataacaatccccggcccgcggttaaacaccgcggggcggggggagaaaaaatcancacatcg

SEQ ID NO: 106667 - DNA, 2265 bp, Homo sapiens
gggggcagcaggaagagctttgtgtacattcccagtctccagtgtggaccaagggaagccattacctattctgactcatatgggaccttgcagaagtctggcaactgactcaggcggtggtcttacgttggaagaagctcccaactgaactttgtgatacaaccttgagtagggaagaactcctttagccagaactggggggtaagtgggaagtgtgctgcaatcatgagcataggagctgggcacccctgtcgtgcaggtgcgcttttcatgcatggcttgaaagctgtggttgttatccctgcagagaaggtatatggcctgggggagttttgagttctgtgctcagatggcctggaacttagggtcgttgctgctagtagaaagctgtgggtgtgagatctgccttgccaagtgtgtgggagctgggtgggacttaccactgcctgctactccacatttcctgcagtacttttctgttcaacagaggcagctatgctcctctttggaacattaccccagggtccagagaactgtctcctgactcccacaggggctgctgcttgctctgcacatggagagtcagaccaaagacctgcctaactcagcccccacctggctttgcccctctacctgcctggtatcttaacacaaaggacagaaacttttgggagctttatgcccaccacctgagaaaccggagtacctctcttgggtaacataaagcaagcacaaatcccactgctactaccatagctggtgctcttttgcaagtgccacattttggctggaggccagctgacgcagtccattacagcatctccaagttgaataataccacacccaggaaggagaaaacttgtgtgtgacctcagctatcaccattgcctacacaaccctggctaaccaggaggtcctaagtctgtacatgtgaccagttcattactactataaccagcatttgagaaagccaacacactaaggctatctataaccaaggaatttcacaggatctacatcactcccttgccacccccatcagagctggtgctagtacacactcctgggaaacttaaagacaggtcacatctctggatcccttgaagacattccccagaaccagcctggagtttaccagccccactgggcaacttgactcaggggcaacagccttcacagtagtctggccctcaggggctcctactcccaggggaagggagagtgcagctcatcaaggaaacaccctgtaggacaaaggagcctggatggcaggcttgagtcccagatctttctgctggtgggaagtttctttcagcagatgcacagttgcaatgctgggttcaactgggaaagtctgcagttttgccccaacaatcaagaggccctggtgcccatgaaggatctcggagaagggggggttcttctcctccttgtccaccactgcagacacagctggtgttctccccacaggagcttagcatgagtgcacctatacacaggctttctgtaacacttcagggtgactgcatctccacaggaggagcaccttccaggtgcaggcttgcatgagaagtagggtcacatttcctctctacttggtacatcagcatttctgccgatgaaaaagaggcacttgtctgatctgaacagctggaacacttggtcaggagtgtgtctgggaggtggatagctttcctgttggcctggcaggggagctgagatggttatggccattccctctgataagacctcagtgtgtttcactgagggtgcccccagccacttctgtcaaggctgggacttctgcccaccattgagtgttgcatttacccacctgctttagctacagctggttttaatctgtggacacctttcctattggccccaatcctgaagcattcaatccagtaaataaaatactggggaataaataaagaagtacacaccaagggggaatcaaatacacttcaagatacctctgtcattccaaccctataggagacagtgaacttgctcactcaccgagcacgttggtactgcaaccagcatctgaggaagccatcatacaaagactctctataaccaaggaactcatacacagtcttcagccctgaaagcaccaagagccaaattaagctataaactataaacattaaaagtcacatccttaaagggggaaaataaatttaacaaaatacaaataaaaaataagttcaagaataatcaggagaaactgtctacccaaactaaacccaaagctagcag

SEQ ID NO: 106668 - DNA, 446 bp, Homo sapiens
ggcacgagcgcggacggaagatggtttccgtcactccgtctcatccagcggctgcggaactgggcgtccgggcatgacctgcaggggaagctgcagctacgctaccaggagatctccaagcgaactcagcctactaccaagctccctgagggtcctagccacaagctcttcaacaattactatatgcactcgcgatggccgtcgggaatctgtgccccctttcatcatcatgtcgtcgcataaggcgctggtgtcacgcatgccagcatacagctttgctgaagctgccactgataagaaggcggtgactccagctccttccatatataggggggagcagtcctcggaccatccttacctgcgacactgcacccttactgtcactcgactactttgactacttggatttcctcctaggagaatgtgacctaatttatgacaaaact

SEQ ID NO: 106669 - DNA, 468 bp, Homo sapiens
ttgtcccaaagggtcgcttaaggaatctgccccacagcttcccccatagaaggatttcatgagcagatcaggacacttagcagatgtaaaaataaaatctaactctcatttgacaagcagagaaagaaaagttaaataccagataagcttttgatttttgtattgcttgcatccccttgccctcaataaataaagtgcttttttagttccaaaaaaaagaagcaaaaaaaaaaaaaaaaaaacaaaaaaaaaaaaaaaagaaacaaacacacctgaacaaaaagaaaaaggaagaagaaaatacaatggagggggtccaacaataaaagggcacggggggactgaaaagggaacctgcttctttactccagaactcttgttctttggggaccaacattacattctcaattagatatctgcaagaaggctcctttagatggggactaactaccgggactaaactctaat

SEQ ID NO: 106670 - DNA, 463 bp, Homo sapiens
  misc_feature (1)...(463): n = a,t,c or g
cggacgcgtggcttgaacctagtaggcagaggttgcagtgagccgatancacgccattgcattctagcctgggcaacgagagcgaaactctgtctcaaaaaaaaaaaaaaaaaaaaaaaaaaaaaaaaaaaaaaggaacacgcagtaaaaaaacccaccccggggagaacagaagaccacaaagaggaataggaaaactgcaccaaaagcaggggagaaaaaaaaaagggctacacatacaaaaaaaaaaaaaaaaattttgggggggggtaatatcaaaaaaaaaaacagaaaaaaaaaaacacccaagggaaaaaaaagaacagaatataaaaacagtgttaaaaacacgcctgaaacatctcgcatgggagctttaacttctaaaagtgaacaggaaaaaaatataccttccggcagcagcaacaaaggggcaacagtacagaacaatgaaactcaagca

SEQ ID NO: 106671 - DNA, 477 bp, Homo sapiens
  misc_feature (1)...(477): n = a,t,c or g
ggaganntttgaccctttgtagcggtccgattccgaaggagggaggcgggggcacaaatatatttttatccccatatatacacacacacacacatatatatttatatatacacaaatatatatttgtctccatatatacgcatgtttatctccatatgtacacatatatttatctccatatatatacacacatacatatatatctctatatatgcacatatatatttatatatacacacacatatatatctccatatatatacacacacatacatatatatttatctccatatccatatttattcaagttgggtttgtaaaggtagttgatttctccatgaaaatagctgcatgttcaaatagctatctttgtgaatttttatatccatatttatgtatatggagatatatatgtatgtgtggtatatatatatggatacatgtatatatacacatatatatggatccatatacata

SEQ ID NO: 106672 - DNA, 430 bp, Homo sapiens
  misc_feature (1)...(430): n = a,t,c or g
ttacatgttataaaattgactctttttatgagtatcagatgcttttaatacacagaggtgtgcaaccgtcatcactaattgcagaacattgtcatctcccggaagaagaagccctgtcctgaaccagacactccgcatttcccccatccttagtcctcagaatccactaatctactcctgtatttatggacttgcctgttttggacatttcgtacagacggaattatataatataggtgcctttgagactgagtttttaaacttagtgtaatgtttttaaggcgcatccatgttgaacatgtatcaatactgaattcttttttatggcagaataatattccactaatttttttcatccattaatatgttggcagatattcgggttatttccatcttttggccactatgactaatatggctatgaaccttn

SEQ ID NO: 106673 - DNA, 425 bp, Homo sapiens
tattgtaagtagtcatggatatatagcggtaacagtagctgacattttggggcacatgccacatgccagacactattttaagcaccttacatttaattttctatcattctattttcataggattatgattattattgttattattaccccaagatatatcttactaaactgttatatttttatgctaggaaattatatatatacacatatatatgtgagacatgtatatatatgtgagacatatatgccagtatatacacacatacatacatacatatgcatatatatatatatatggaaagagactacatggttattcagctgtggaattagcaaaacatacaggacccatgacctagcctatacttatctagtcttctgcctcactcacgtcacatttcatgtttcatctacctaataagcat

SEQ ID NO: 106674 - DNA, 430 bp, Homo sapiens
tgggggtctcaccatgttgtccaggctggtctcctactcctgggcttcagtaatcctgaaggcctcccaaagctgtggaattacagttgtgagccactgtgcccagcctatttctaatttgacttacccaagtaattttaaaagatttaaagcaccatccataaggtatagttttctgctaggtaggatttttgatgttatctcctttgtttccagcaacattggtaacctagaactgagtcaatgatgagcattgactacactatgaagcctctctgtttaagatacaggagaaacttagctcctttaaaaaaaaaaaaaaaaaaaaaagggggggggggttattcccggtatacccacccttttggaggggggggttgaatttggaaaaataaaggggccggggtttaaaaacaccctggtatatatt

SEQ ID NO: 106675 - DNA, 433 bp, Homo sapiens
tattttaaagcaaagccaattttaactttggaaataaaagacctatttagagaactacaaaatgtggtagaaagttttaacaacagactagaccaggtagaaaaaaataatttcagaggtcgaagacaaggctttcaggttaacctcttgcgatgaaaaaaaaaaaaaaaaaaaaaaataaaaaaaaaaaaaaaaggggggggggctttttaaaaaatctttgggggggcccaattttaccgggggtgggaaaataattttttttttttttaggggggggaaaaaaaaacccctgggggatttttggagaaaaaatctttttttgggggggggatttttgggcccccccctctcccgaaatttttggtcttggggggaaaaaaaaattttttaggggaaggggggaaaacaccccgttttgttgtgggggggg

SEQ ID NO: 106676 - DNA, 443 bp, Homo sapiens
  misc_feature (1)...(443): n = a,t,c or g
catttactgcccatatatctctctttgtttttatagcccctctctgccctatgagtaatacttaaaaaaagagaagtcagtgtagacagtgcatcaggcttggaggacacaaaatgaagggaaggttgggggaggtaggtggttaaagaagaaaattatccaagaaatttaagagacctcttttgttgttggtacttggaagattaaaaaaacactatggatgatttgttgttctagtaaccacctccttccaagatacatataggtaactttagaaaaatgagtgatgtcaagaatgcaacaggctgggcgtggtggctaacacctgtaattccggcacgttgggaggctgaggcaggaggtatcacttaggcccaggaattcgagaccagcctgggcagcatagcangacccccatctctacaaaaaagttttaaaaagta

SEQ ID NO: 106677 - DNA, 536 bp, Homo sapiens
tcaaaaaaaaaaaaaattgttctatgccttctggcctccatggttttttctcagaaatccagaggcattctaactattgtttcccaacaggtaatgctttatttttccccagctgctttttaagattttctccttgtctttggttctcatcagtttaattatgatgtatatggacatggatttctttcggttatccttatcagagttcacagagccacttgattgtgtttcagatatctgggaagttctcagctatgatttcttcaagtattgttttctgtaccatactgtcctgtacttctgtgtcattgataacatgaatgttagagcttttgacattgtccgtgaattcctgagactattcattttttaaaaaattttctctaggtgggtgtggtggcatgcacctgtagtcccagctatttgttggggctgaagtgagagatcacttgagcccaggagggaggtcaaggctgcagtgagccaagatcgtgcctctgcactccagcctgagtgacaaagtgagactgtgtttc

SEQ ID NO: 106678 - DNA, 451 bp, Homo sapiens
  misc_feature (1)...(451): n = a,t,c or g
aaatagtgaaaaacaaaacaatccaaatgcacagcaattggaaaacagacaaataaattgtggtatatttatacaggggaatactatgcaacaacaaaaaaggatgaagcataatactacacacagcgtgagtgagtctcacagacacagtgttaacagagagaatccagacacaaaagagcctatctatgcatgattccatttatatgaagttcaaagacatgcagagctaatctatggtgatagagataagaatggtggttacactgaaatgggaggatcgctcaaacccaggaggcggaggctgcagtgaaccatgatggagctgcactccagctttggagacagagcgagaccctgtctctaaaaaaaaaaaaaaaaaaaaaaatgattgttccattttgggggggcaagggggggcttgactggaagggaacacaagggcacctgn

SEQ ID NO: 106679 - DNA, 504 bp, Homo sapiens
  misc_feature (1)...(504): n = a,t,c or g
atgcggccnncccccatagagtacaatagnatggacggancncttgnggaacacgcccccgcccgtcctgagcgggcccgatgtggtttcgggagctcgggatccggtggaaggcctggagcttcagcggaagggaggctgcctggagagcccaaagcctgttctggcccagcccaagcaccctccacctacccaggcctgctcaaaggggccctatctaccagagcagagcgctccctctccaaagctctattgctctcgctctctaggtctctcaccctctctttctcttcttcccctccacctcgcgctttttttgacgccttttctctctctctctctctttctctctctcctggccctacccactctttgctacaataaatgctgaatgagtcccccnaaaaaaaaaaaattaagaaaattattataaaaaaaattaaaaaaaaaaaaaannnnntnnggggaggggtcctaattaaaaaaccctcccggccccccccc

SEQ ID NO: 106680 - DNA, 830 bp, Homo sapiens
ttgaaacatgatgaaagagccacagagttggcagaactgtttgaaaatgctgtgaagcggtcttctctgtcttctttatggcccagtaaaattctcccagaagagatttatggcagcctcactcccagtagtttctgcatttagtgagataagatggaatcttgctctcttgctcagactggagtgcagtggcatgacccttggctcacctgcaaccgtcacctctcgggttcaagcgattctgcctcagcctctcgagtagctgggactacaggtgggagacctccacagaacccttccagcaagctgtcttctaaagcaaacaagaaaaggaaagtctgagcagttttgattagatttcccagaagtcaaagcaaggaaaaatgaaaaagcttcatttctcacgttcttaaaagagagcacagatgttgcatcatctggttagataccctgagaataaaatctggatccagtgagaggaaagattctgggtgctcatgagaaaagaaacaaaacaaaacttgggagcctcttgagagtgtacagcatcagcccttgccaactcttgtttatatgcatttaactttcagttaaccatgggaataattcatgaaaatccaatctacaaacaaaggccatcctaacgttcatgttattcttttccctaagaatctttcacaagagctataatcaagtagaattatgctttgatttgaattctaattcaattgaaaataaaaaatgagagccaccgcgcccggcttcctctggtaatcttacacctttacagaattaatctaaactggtggctcataaatgacattaaaaac

SEQ ID NO: 106681 - DNA, 711 bp, Homo sapiens
ttttttttttttgatgccgaagtgaaacacgcagctttattaagacaggggcggtagaagaaggtctccatgctgaacagattacattatggagcccgggagcctgggaaggatggggcaggagagtgaagggggctttgaggagaggtcctgccaggaacatctgtccctgttaggggtgaagggtaagggggccagggcctcagaagcggccatgcccagtgatcaggggaacacccgatggttcctctctcggggatggtggccagtatggaacctcgggggtgacctgcgcctgggtccccgcccatagagctgcctctggaggttctgggaaatgggccgcagatgcatgaagttgcagaagccacctcgggtacattcccgtgcacagcctgcccgttgaaccagcggttactgagttcagccacggcccgctctccatcctcctccctccggaacttgacatagacgttgcccacgaggtggtccccaaggttgtcgcacacattcatctcttcaatctccccatacttctcctgcagttctgtgaacacctcctggctgaatgtcggcttgttgtgaagccgggagcaccggtccccgtgccggcagaccccgatcttaaagtaaaaagagcagttaaccttgtccttctcagtcccgaatatcgaagctaaatattcagccatttttacccaagccacgaaa

SEQ ID NO: 106682 - DNA, 2281 bp, Homo sapiens
  misc_feature (1)...(2281): n = a,t,c or g
gtttttgttatacaaaaatctattttatgtgaaaatttgggagtcatacatatgcaaatatgtaattatataataacaatatgcttccatagggacatcatatcttaacaattaaagcaaatctttgcactgattcttgcaaggacttatacaatacccccatgaggtagagaagggaggagcatcccacagtttttacagcactgagatgacatatacatccaaggctttatgttcaaaacccaccaaaatccatggaagattaaattaaaatattaataacttttaaaatctactaagaaaaaccatgattcacattattacataaagctcatattccttagaattagattaaaataatctcagaaccactncttgagaaaggaccagggtatacaaaattaatttggtttcctcaaagtcatggcttggttttccaagttccagtcatgaatgttcaaaagctttggagttttgggttttcttgtccaggtgcttcataaagtcctggacccacttctgtgtggggtcagcacagatctcctttgtccagtttggtcttgaagattacagcttcccggggacagtggctactggtggtccttctgtagctctccagcctctgcttagggattttcttattgataaatctgtagcagcaggtagttgaagtattaatcccaactggctgagcaagcccctgggggctgaaagcagctgctgtgagcagcagacacagaagtgctgcagaggctttcatgttggagggtgagggcatgggcttccacatgagaattggaggtttctggtttggtcctagcctttctattagctcttagtaagattacacatgcaagcatccccgttccagtgagttcaccctctaaatcaccacgatcaaaagggacaagcatcaagcacgcagcaatgcagctcaaaacgcttagcctagccacacccccacgggaaacagcagtgattaacctttagcaataaacgaaagtttaactaagctatactaaccccagggttggtcaatttcgtgccagccaccgcggtcacacgattaacccaagtcaatagaagccggcgtaaagagtgttttagatcaccccctccccaataaagctaaaactcacctgagttgtaaaaaactccagttgacacaaaatagactacgaaagtggctttaacatatctgaacacacaatagctaagacccaaactgggattagataccccactatgcttagccctaaacctcaacagttaaatcaacaaaactgctcgccagaacactacgagccacagcttaaaactcaaaggacctggcggtgcttcatatccctctagaggagcctgttctgtaatcgataaaccccgatcaacctcaccacctcttgctcagcctatataccgccatcttcagcaaaccctgatgaaggctacaaagtaagcgcaagtacccacgtaaagacgttaggtcaaggtgtagcccatgaggtggcaagaaatgggctacattttctaccccagaaaactacgatagcccttatgaaacttaagggtcgaaggtggatttagcagtaaactgagagtagagtgcttagttgaacagggccctgaagcgcgtacacaccgcccgtcaccctcctcaagtatacttcaaaggacatttaactaaaacccctacgcatttatatagaggagacaagtcgtaacatggtaagtgtactggaaagtgcacttggacgaaccagagtgtagcttaacacaaagcaacccaacttacacttaggagatttcaacttaacttgaccgctctgagctaaacctagccccaaacccactncaccttactaccaggnaaaccttagccaaaccatttnccccaataaaagtataggcggnaggaattggaacctgggcgcaataggatatagttccgcnagggggaaggtggnaaatttttaccccaagcctaatnttngcaaggggttaaccccctntacccttctgggataatgggtttcccttgggaattacttttcccaagggggggcccaaaggttaagnncccccgggaaccnaggcnggggttcccttangggccagctntaaaaggnggnancccgggtttttggtngggaaaaatngngggggaggtttttaaggggnaagggggggaaacctttccnggccctggggnancctggggttccccaagggnnggcctttnggcnanctttaaaatttnncccnaaggncccccnaaaccccc

SEQ ID NO: 106683 - DNA, 1455 bp, Homo sapiens
tttaactccccctcttcttaagagaattttaatgaagctgagataagaggcatatttacttgcagtttgccccattgttaccctggattcctccgagcgcacaagcttaccgcaaggctgactgtggatgtacttgggaatctctcgtcggctgtcctcaatgctcacgttcttagcataccttcaccctagagaaaggcccccacatcgggcgccagatgaaggggtggtctgcccctccacacctgtgggtatttctagtcaggtgggatgagagacggagaaaagaaataagacacagagacaaagtatagagaaacaacagtgggcccaggggaccggcacacagcacaccaaggacctgcactggcaccggcctctgagttccctcagtttttattgattattattttcattatttcagcaaaaaggaatgtagcaggagagcagggtgataataaggagaaggtcagcaaaaaacatgtgagcaaaagaatctatgtcataattaagttcaagggaaagtactatgactggatgtgcacgtaagccagatttatgtttctctccacccaaacatctcagtggagtaaagaataacaaagcagcattgctgcaaacatgtctcgcctccccaccataggggcggttttacccccatctcagaattgaacaaatgtaacaatcggggttttatacccgaggccattcagttccccagggggccaggccagggagaccagtggcccttccctctatctcaactgcaagaggctttcctcttttactaatccacctcagcacagaccctttatgggtgtcgggctggggcacagtcaggtctttctcatcccacgaggccatatttcagactatcacatggggaaaaaccttggacaatacccggctttccaggacagaggtccctgcggctttccacagtgcattgttcccctggtttattgagactagagaatggcgatgacttttaccaagtatactacttgtaaacattttgttaacaaggcacgtcctgcacagccctaggtcccttttaaaccttgattttatacaacacatgtttttgtgagctccaggttgggtcaaagtggttggggcaaagtggctggggcaaagctacaaattaacaacatctcagcaaagcaattgtttaaagtacaggtctttttcaaaatggagtctcttatgtcttccctttctacgtagacacagtgacagtctgatctctcttttcttcccctacaggcagagtgtgagtcacattccaaattcaaggacactgcctgccatctcttgaccacaggctcatccaggctccaagacctttatgtacctttattcccaaagcctcctggtcaacacaggcactgggaataagttatcaaacaaaaacacaccttagtgaagcagtccaataagctcagtctcgccagg

SEQ ID NO: 106684 - DNA, 324 bp, Homo sapiens
gcacgaggagagagagagagagagagagagagagagagagagagagagagagagagagagagagagagagagagagagagagagagagagagagagagagagagagagagagagagagacccccccccgtgtgcttttttttgtgcgggggagagagggttcccacccagaaaagtgtgagaacaaaaaagagcgcgctcctttttcgcgtgcgctgagaaaaatctctatagagacacgggggggggtgtctataacaacagaggcgtgtgtgtttgtaataggggcacaccgcgtgtgccgctctgtctatatatatatacg

SEQ ID NO: 106685 - DNA, 2025 bp, Homo sapiens
  misc_feature (1)...(2025): n = a,t,c or g
agcctgggcttcctgctgagacgggacccccccctctcttcttgatctcactcccaggaaagacactgaaggagcagaggtgtggacgccacatactggacggggtttcaccatctgctgggacgggacaccctctcttcttgatctcactcccagaaaagacactgaaggagcagaggtgtggacgcctcatactgctagagacggggtttcgccgtgttggccaggcctggtctcaatctcctgaagtcgtgatccacccgccttggcctcccaaagtgctgggattacaggcgtgaggcacctgtgtctggccaaattcattttttaagagatggggtcttactatgttgcccaggctggaaagcagtggcataatcatagctcacgacagcctcaaatgcctgagctcaaaccatcctcccacctcagcctcgccatgcctggccagaggccatgggctgctgatgcaccatgcatggtttttttttgtttttttttttttgagacggagtctcgctctgtcgcccaggccggactgcggactgcagtggcgcaatctcggctcactgcaagctccgcttcccgggttcacgccagtctcctggcctcagcctcccgagtagctgggactacaggcgcctgaaaccaatgcgcccggctaatttttttttttgtattttttttagtaaaaacggggtttcaccttgttagccagggatgggtctcgatctcctgaactcatgatcccaccccgcctcggccttccaaagtgctggggattacaggcgtgaggccactgcgcccggccaagagctccttcttaaccgcacaggcatgtgaggcccagaagactggctctgccaccagaaggaaggattgtttccttcaaccaaccttttggttgctaccatttcttgtccttgagaaaggtgctcctagtgcttgtagagggaaacgctacgtccgtgcagtatggctctccctttccacaggagcgatcctccagccctaccccaaactgcaggtttccaattggttatgatgtgccagagaccaggaaatgccagagggatgtttgtaacaaagctgccaaactctaagccttcttgttctaccccctaaggagaaaaaagatgtgtaagaaattagcccatggaccccagctccacctgaacatcaatataccgtgaggacattccagagtcgcaaaaggtctcgtgagctgcagttcattgagtggctttaggtcacacggagaaaggagggttccagttccctctgagaggtgagggattgtggttacaggttgtaacagctgtcacaggagggtaaaaagtctccagcatcttgctgaggatgcccagtaggcagcagctgagtgaggatggatggaatgcagggcaggaggggagcccaagtgcagaggctggggctcagacagccaaagggccccacacacagggcctcgtctcagagtcctccaggctgctggatgacaagcgccggcgctgggcattccgactgacggcattgtcatcagcctgccaggcaccaggtaagcagacctcagagcacagcttattgtccagtgctttcacgcttgcgatgtcaaagtcattgttattgtcacactccatacctagaaatgcgcacgtcctctggccttcctgcgtgggtgatccatcctcttcctctataacatcatttccctctgcatcctgctctccagctgggaggccagcaaagttgctgtctggagactccgctggcagcccctctccttcttctgagggggccctgctggcaggctggggggaagagagagcctctccctcctcttcagtgccaggggcgatgtaggagccagacatggaggagacggtgtcagtgctgatctgggaggatgccatggacatgacagactgggccaagctgctgctggcagggccttctgcgtcgtgccaagggtgatcagttgatggttcaacagtcatcataaccnnnnntcanccgggcaattct

SEQ ID NO: 106686 - DNA, 411 bp, Homo sapiens
gaaatatcaaggaccaaaagtatgctgctacaatgatttgttcaacatttagtggccccagacggcatcttgcttggttgcccaggctggagtgcagtggagtgatcatagctcactgcagcgtcaaactcctggactcaagccatcctcctgcctcagcctcccaagtagctcggattacaggcatgcatcactgtgcctggcttcatttgatcattttattaagagcacatggcagctcaccattgtgttaaggcagaaaaaaagcctagtacattttcttctaggagcaaactaaacaaatgtgatattaaaaatacatacttcaccttaaaaaaaaaaaaaaaaaaggccggcctttctaaaggatcccttgaggggccaaagttaacccgtgcttgcaaatttatt

SEQ ID NO: 106687 - DNA, 411 bp, Homo sapiens
attccagtgagccgagattgcgccacttcactccagtttgggcaaaatgagcaaaactccatctcaaaaaaaaaaaaatgaggaaaataaaagaggggggtttggaaaagttttggcccccccattaatgtgtgggggggggggggaattctttttttttccaaaaaaactggggggaaaaacaaaaaaaagggccccccttttttaaaaaacaataccccggggggggcccccaagcaaaaaaagccgaaacaattggggaaatccggggggggggttctttggggagaagtttttccccttttaaaaggggggccccggggcctcaaaggtttaaaaaaccgacaaaaaatttttgttggggggggggtgggcctcaacccaagcctttttgggttcaagacccccggt

SEQ ID NO: 106688 - DNA, 575 bp, Homo sapiens
  misc_feature (1)...(575): n = a,t,c or g
tcctacttccctgtactctgccatttctctacatctctacatctacgagatatcgacgcgacnnnnnnnnnangtttgaaaaccctcncgnannncccnnnntttganacccttccgaaccgcccccggaatcccgggncgacccacgcgnccgccttctttaagcataaccattttcaaaagaatatatgataaatttatagtatctttgatttgggggtggatgaaaatcaaggacagtgcattggataggaaggagccttttctctgggtacattttattttattttttttcttgttttaagcaatacatttttattatctataaaaaatcaacaaatttggaataaaaagactgtttggcacctccccattcctccccacactcatcgcccttaccacgctactcctacctatctccccttttatactaataatcttataagaaaaaaaacaacaaagaactgaacaacaaaaataaaaatatattaagggggggcgctccttaaaaaattcccttggggggcccaatttaccgctgcgggggaaagaaattctttttccccaaaggggcg

SEQ ID NO: 106689 - DNA, 591 bp, Homo sapiens
gagtatgaacgaacccgtccttcagtaaatgagcatagtccccaataggtagtttcaaccccttgcccccgttcctccttccccagtcttgtattccccagtgtctgttgttcccagacattgatctttttcctctatgttgctaagctggtagaaaggctggagttgctggcaaccatctttgcaaccatgcagggagaactactttggaaatgaagcaagataaagaagaaaacagataaaaggagacaaatgtttgactttgtacagctggaaaccagcaatgctggaaatgagcactgaaggcagtttaatgggtttgtcacttgtaaccaagtgacccatggcaagctcacagatttgtattggcagaattcctccttttctttatttaaaatggtacttttggccaggcaaggtggttcacacctgtaatccaaagactttgggaggccgaggcgcactgatcacccaaggtcagaagttcgagaacagcctggccaacattggcgaaaccccatctctactaaaaatacaaaccattagctggctgcggtggcctttctaccagctttttgtctcaaaaaaaaa

SEQ ID NO: 106690 - DNA, 386 bp, Homo sapiens
taccccctctagagcccactgtaaagctaacttagcattaaccttttaagttaaagattaagagaaccaacacctctttacagtgaaatgccccaactaaatactaccgtatggcccaccataattacccccattctcctcctatccctcaaccccgacatcattaccgggttttcctcttataaaaaaaaaaaaaaaaaaaaaaaaaaaaaaaaaaaaaaaaaaaaaaaaaaaaagggggggggccttttaaaaaatccctgggggggcccaattttacgggggggggaaaaaaaattttttttttttttaagggggggcaaaaaaaacccctggggggatttttgaaaaaaaccctttttttgggggggaaaaaaaaaaaaaaa

SEQ ID NO: 106691 - DNA, 762 bp, Homo sapiens
aataaactgaaaataaccctgacttccatcaagaatgaaatggatatttggtatgtttgtagcagtggagtgccacacagcagtaaaaatgaatgattattaatacatacagcagtatctatggatctcaaaaacagggaaagaggccaaacaatgaagtatgtgccatacaatttcatttatttgcaattctagaagctaaactaatccatagggacagaaggcatgcctgtggttgcctggggttgggtgtggagggaaagactccctaccagtgggtacaagggaactttctgggcatgatgagaatattctgtatcttcattgtggcttgatgttatgtttgtcaaaggtcattgaactctacacttcagaggggggcattttaccatatatgtcatctctcaataaactgaattttttaaaaattaaaggaatttacttaattgcaaaagaggactggaaaggaaaggctgccgagcatcttggcctgctgtacccctcttccttcaaaggagggtgtggccacgtccgacagcagagttgaatgaagcctgcatgcttgcacaacatcagaactgtcagaatgtcaagatggaatactttcaattgagttttacaaaaagacaagaaatttgctgggtgtggtggcgcatgcctgtaatcctagcactttgggagggccaaggtgggggaattgcttgtagtcaggagtttaagaccatcccgagcagcaaagtgagaccctgtttttacttaaaa

SEQ ID NO: 106692 - DNA, 419 bp, Homo sapiens
caggaattgggtgtttccttacccctaggtgggtaggctctggtaaaatagttttccttgaggaaagccctttgttaaggataacagaatgctctggtcatgcctttttctttctttctttctttttttttttttttttgggaaaaaacccttggccccttttttttttgggggggaaactgggggggcggggccccctttttaattatttgagccctaaccttcgggggtaaaaagaaccccccattttaaccctcttggaaagggggcccaaaaggcccttggcgggcccaaattttttggtggggggggggggggggggggttttgtggaaaaaaaaaggtcttaccttttttcccagggtgggttaaaaattctgggctaaagcaaacctggccccttgtgcattcaaagaccgg

SEQ ID NO: 106693 - DNA, 367 bp, Homo sapiens
tttaccctcagcattacccctcttgcccaactttccagtatactttgaagaccaaaaaccacaactttttaattttttttgaggtaggatcttgctctgttgtccaggctcgagtgcagtggtgccatcatggctcactgcagcctcccattcaagcgatcctccggcctcagccttccaggtagctgggactccaggtgtgagccatcgtgccccgcccaaaaaccaaaacttttgagatcccaatgaagagaggtgatgggttctcaaaagggaggaaggaaacttccatttcttatgttcctgtgtgccaagctttgtactgagcatgggaatataagaaagactggttctcttctaaaactgt

SEQ ID NO: 106694 - DNA, 2248 bp, Homo sapiens
ctatccaaagagaacattaagagtaagacccagagccttgacagatgcttcagctctaaaccagaaccaggaaccacatccatcaactgtccagttcatcttccttttcctttctgcaatctgctcctctgattccatttctacttcattactaataggagttttttcttctatatcatcaataaaatctggttcctgattatttgatactgatagtctcagtggagaaagctttctttgtttagtttctgggctcttcattttgttggtcgttccttcacaatccaaagtaatattctgattttgtgtatctttttcttttgaaatatctttgtctttttttccttttttccgtctggtctcataaccactattgatattttccatggattcagaactacgttttagaacagggcactctgggttttctttgaggcatgcacagtccaccttgtacttacaatttccatagtcaaaatcaaaggcaatagtaatttcagttccctttggaatactgtgtatagaataaatataaagatgtatggttccatcttgaatttcatgcctcacctctgcattgggtgtacaagaccgcctgatgaatcgagcctcattcccaaaagtccttgcatcaacacacatttctagcccatggaaatttagagtaggaataacacaaaagggtatgggtcttttaaaagaaatacccatttgcttcaaactgttcttctcaggcataaacttccctctgtattcaatgataagtgcatcagggaggccaatcttttggcagatttaagaattttctttattcttttgtatatggctctctacaggaggtttgaagagcaaattgttggtattcaaatcggatttattcatctcttttttgtcatttccattgcctaatctcagagctattctttgtgcctccctctgaacaccctcactgtactggttgttatttgcttcttcatatcgatccatccatgctttgatctttgtctcccatccaaaatttgaaccatcagatgaaggatcaatctctggagctgaaccctttttacattttgaaatgtgttgttctttctccccgctttttttccttcttttatcattaactttggaaactcttgaagcagttaaagtaattgatgttggagtatgctgaaatgcagtatataattccacaggaacctcatcaccactctcagttgcactggtatcaccatctgacatattttcccttttccggcgttgtagtagcactgccctctctttatccaaattcctaggctgacaacgttcacatagatatgtatcaggaatatgctgcctatcaatccccatgcagtcaatatgttgccaaacgctgcatttgtcacaacagatcatgtatccatcatcatgtgtaaaaccacatatgcacctgggttacatcagtaccataacttccatcctcaggatgtgctgattgtaggtaggcactgggaagtttcatcaaaattagggagtgggtaaatatggcctacttcatttttgctaataaggactgatgggaggagggggagccggggtgttcggaggagggacgagcaccctattatgggtccgcataggggcaaacccattgtaactgtgtgaatgatgtgagctgctggtatataactggtggggataactgttggatttctcaactaccacagggctagcttctacggattctggttctgaacctgcagccatttccaagtatgacgtctctgctgtatcaacccccaatgggatcactatgctcatgacgttcgcctctggtaaattcgattactatggagtcctatgcattggtatccaaaacactggggcatgccagccacagtgctcattgcaaacatctaagtgcatccacaaaccctgtgatgttcacacacgagacacccgaaccccgttatgtgctcgacccccaaggagtctctccgcacctccgcgaacaggcgaccccccgacagcagccactgcggacacaggacccggctccacacaccccctccccaaacagcagcgcgcagcctcttcaccaggaaccgaggagtaggggagggggcagccaggcagtcaacaggaacgcagagacgacggcgaggctgctcggagtgtctatgcccactctgttgccgctcccgaactccggcacggtctccgactcggccccctgcgcccgctcagtgtcactgcctctcgcacgaaa

SEQ ID NO: 106695 - DNA, 336 bp, Homo sapiens
tcaagtgatccgcccacttcggcctcccagggtgctgggattacaggtgtgagccaccccgcccagcctaatatttcttttaagaatgtggattggttttgtgattttaaaaagtattttccattatagtgaacggtattcttgacctttttttaaatattgcaggaagctgaattaatgatcattttaaatggctatgaatagtccaagtgcatgtactagaacctaaccattccccaacctttccatacttgactcctttcgttgttttgctgtttcaaatactgtatggtacctcattacaagtaaattcaccaattcaaaatctagtggttg

SEQ ID NO: 106696 - DNA, 390 bp, Homo sapiens
gggacaggtaatgcgtttcatctaatgtaattactgaaaggtagggtttatacttgtcgattttgtatttgctttctgcgtcttctgtcttttttgttactttctgcctcagttagtttttgttcttcatggagatggagtttcactatgttgcccaggctggagcgcagtgagtattcataggcatgatcatagtgcaccgtggccttgaactcccgggctcacaggatcctcccacctcagcctcctgagtagctgggactgcaggcgtaccacaacgcctgactcattgctttcttcttttgtgttagatattttctagtgtataccattttaattcccttgctggttatttgactgtattttttatttggtttcttaggtggcctg

SEQ ID NO: 106697 - DNA, 354 bp, Homo sapiens
tgagaactaaaatgggaaagaattttgcaacatggaggttattagcattcagagagcagtggaaatagaacaggttaaagagtgaatgaaaagtgggagatggaggaagatgcttggttttttgtttttattttaaaagacagggtttcactgttgcccaggctggagtgcagtggcgcaaccatagctcactgcagcctcaaactcctgggctcaagtgatcctcagaattacgaggacagctggggaacataagaaaaccccaaccctcataaaaattaaaaataaaatagcacccatgtactcttttctctatattgccttattaaaataagaatctgggccgagcacggg

SEQ ID NO: 106698 - DNA, 415 bp, Homo sapiens
atctgtagtcccagctactctggggatcctgaggcatgagaatcggttgggcctgggaggtagaggttgcagtgagtcaaggtcatgccattgcactcgagcccaggcaacagtgtgaaactccatctctaaagaaaaaaatctttggttgctgcagccgtatctgcctaaggggcaccccaagcccagtaacactgtgatttttatgaactcatagagttactgccttcatggtcttgggaatgattcagtagaattctctgcattaccaggtatacactcttgttctcttcccttacttttcttcaaacaaatggaggcagagactttcaccattttaactctagactttcaccatgctgagatcctggagctgagggacaggtgacacaagcacccttgtggccatcaccac

SEQ ID NO: 106699 - DNA, 421 bp, Homo sapiens
  misc_feature (1)...(421): n = a,t,c or g
cggacgcgtgggggcaaacgtccacaaaggtcacaggcagcgtacatacggttctgttataccccatatattaccccttcatgtcctaaagaagacattttctcttagagattttcattttagtgtatctttaaaaaaaaaatcttgtgttaacttgcctccatctttttcttgggtgaggacacccaggaatgacccttttgtgtctatgatgttgctgttcacagcttttcttgataggcctagtacaatcttgggaacagggttactgtatactgaaggtctgacagtagctcttagactcgcctatcttaggtagtcatgctgtgcattttttttttcattggngcactgggtttgatttgtctcatatatttggagtttttctgaaaaatggagcagtaatgcagcatcaacctat

SEQ ID NO: 106700 - DNA, 412 bp, Homo sapiens
ccaagaattcggcacgagtcggcggggcagaggcgctccccacatctcatacgatgggcggccgggcagagacgctcctcacttcctaaatgggatggcggctgggaagaggcgctcctcacttcctagatgggatggcggccgggcagaggcgctcctcactttccagacggggtggcggccgggcagaggctgcaatctcggtactttgggaggccaaggcaggtggctgggaggtggaggttgtagtgagccgagatcacgccactgcactccagcctgggcaccattgagcactgagtgaacgagactccgtctgcaatcccggcacctcgggaggccgaggcagtcaagcgtggcggcgctcgcctgcaattgcaggcactcggcaggctgaggcaggagaatcagg

SEQ ID NO: 106701 - DNA, 405 bp, Homo sapiens
  misc_feature (1)...(405): n = a,t,c or g
aattaccacgcctgaccagaaaaagctcttttactataggagagcaggctgagtgctctctatatataccatatatgtgtctgtgtgtataatagagagcaccttttatatggtatacatatgtgatacatacatatacacacacacacacacacacacatatatatatacatatgagagcattcgctcttgaggacaagttcatatgtagtcttctctgctcaagacaagataatgctttcatattagttagtgttaagctccaaaggaagaattatttcttaactagaaggtagaatatatttttgtaacttgttaagactgtatattgattcaggacaggcgctgtggcttatgcctgtaatcccaacactttgggaggcagagatgggaggattgcttgan

SEQ ID NO: 106702 - DNA, 477 bp, Homo sapiens
  misc_feature (1)...(477): n = a,t,c or g
ntttgaaccgcgctgcaagaattctgcacgaggcaaggtgcccaggggcttctctcctaatttgcctcacgtaacagttgagaccccagagggcagcaaaactgggttcgaattggagagccgtccaggcacagacaaattcattcatctgcccagtgcccgctaactgcggttccaggcgccggcgacgcaattccagaggatgcttctggctggcacacctggcttcccctccatgctcagaactgcttcctactctacatccaggctcctgagcagcccccagcttaagcttcagcagctccagggtaaatccatctccgcccagagctgactccggatctgccccagtgacaataacaagataaatgccttccattctcttcgtacttacaggatgtaatccacatatttacacagtgtttcatttgcggtaaaaaaaaaaaaaaaaaaaaaaaaacctggggggggggccgg

SEQ ID NO: 106703 - DNA, 684 bp, Homo sapiens
ttttttacattccacatttttaagtttattgtatatttattgtaaatgtgttgcatattgtattagtctgcccaggactgccataacaaaatacttcagattgggtggtttaacacaacaggaaacttgccttttcacagttctggtttctggaagtcccacatcaaggtgctggtcccgtgtgaatttcctgggaagggctctcccttggcttgccgatggcctccttcctctggtgcaggcacggaggggaagagcaggcgagccccttgcgtctcttctcagaaagacgaatcctgttggatgagggccccaccctcaggaccggatgtaaccttaatgacttctgtaagaggccccatctccaaatacagacatgtttgcagttacggtcttcagcatttgttctttaatagaattttcaatgccagcttgcaccacttaagtcattgacattccttctgtaagtcctcaatgcgatttcccatttcttccattctgaggtttaatgttgccgtcagagcttgaaaatgttcctgaagttcctgaaatagattttctgccgcgtcccgcagcgcgcgccgccggggcttcagggccccgcacgtccatgtggaccgctggccgggggcgtcagtggggggtcccgtgggccgcgcggacccggcgcgaggtggcgacagc

SEQ ID NO: 106704 - DNA, 3021 bp, Homo sapiens
gatacttctggcgagcgcggttgctgtttcttctcaggctcagggaccggccgcggccccgtagggtgttttaactcaaatgggtgatgaaaaggactcttggaaagtgaaaactttagatgaaattcttcaggaaaagaaacgaaggaaggaacaagaggagaaagcagagataaaacgcttaaaaaattctgatgaccgggattccaagcgggattcccttgaggagggggagctgagagatcactgcatggagatcacaataaggaactccccgtatagaagagaagactcaatggaagacagaggagaagaagatgattctttggccatcaaaccaccccagcaaatgtcttggaaagaaaaagttcatcacagaaaagatgaaaagaggaaagaaaaatgtaggcatcatagccattcagcagaaggggggaagcatgctagagtgaaagaaagagagcacgaacgtcggaaacgacatcgagaagaacaggataaagctcgccgggaatgggaaagacagaagagaagggaaatggcaagggagcattccaggagagaaagggaccgcttggagcagttagaaaggaagcgggagcgggagcgcaagatgcgggagcagcagaaggagcagcgggagcagaaggagcgcgagcggcgggcggaggagcggcgcaaggagcgggaggcccgcagggaagtgtctgcacatcaccgaacgatgagagaggactacagcgacaaagtgaaagccagccactggagtcgcagcccgcctcggccgccgcgggagcggttcgagttgggagacggccggaagccagtaaaagaagagaaaatggaagaaagggacctgctgtccgacttacaggacatcagcgacagcgagaggaagaccagctcggccgagtcctcgtcagcagaatcaggctcaggttctgaggaagaagaggaggaggaggaagaggaggaggaggaagggagcaccagtgaagaatcagaggaggaggaggaggaagaggaagaggaggaggaggagaccggcagcaactctgaggaggcatcagagcagtctgccgaagaagtaagtgaggaagaaatgagtgaagatgaagaacgagaaaatgaaaaccacctcttggttggtaagaacctccctggagacagagttccagttccagagtcacgtttcgaccgagattccggggagagtgaggaggcagaggaagaagtgggtgagggaacgccgcaagagcagcgccctgacagagggcgactatgtgcccgactccctgcccttgtcgcccatcgagctcaagcaggagctacccaagtacctgccggccctgcagggctgccggagcgtcgatgagttccagtgcctgaacaggatcgaggagggcacctatggagtggtctacagagcaaaagacaagaaaacagatgaaattgtggctctaaagcggctgaagatggagaaggagaaggagggcttcccgatcacgtccctgagggagatcaacaccatcctcaaggcccagcatcccaacattgtcaccgttagagagattgtggtgggcagcaacatggacaagatctacatcgtgatgaactacgtggagcacgacctcaagagcctgatggagaccatgaaacagcccttcctgccaggggaggtgaagaccctgatgatccagctgctgcggggggtgaaacacctgcacgacaactggatcctgcaccgtgacctcaagacgtccaacctgctgctgagccacgccggcatcctcaaggtgggtgattttgggctggcgcgggagtacggatcccctctgaaggcctacaccccggtcgtggtgacccagtggtaccgcgccccagagctgctgcttggtgccaaggaatactccacggccgtggacatgtggtcagtgggctgcatcttcggggagctgctgactcagaagcctctgttccccgggaattcggaaatcgatcagatcaacaaagtgttcaaggagctggggacccccagtgagaaaatctggcccggctacagtgagctcccagtagtcaaaaagatgaccttcagcgagcacccctacaacaacctccgcaagcgcttcggggctctgctctcagaccagggcttcgacctcatgaacaagttcctgacctacttccccgggaggaggatcagcgctgaggacggcctcaagcatgagtatttccgcgagacccccctccccatcgacccctccatgttccccacgtggcccgccaagagcgagcagcagcgtgttgaagcggggcaccagcccgaggccccctcgagggaggcctgggttacagccagctgggtgacgacgacctgaaggagacgggcgttccaccttaccaccacgaacccagggggccttctgccgcggggcccgggcttcagcctcagagttgctgaagtgtcagagctggaccccgtcatagggaggaactcagccggagaccacaggcgtggctatctgccggcttggaactgcgatgggactcggaactcctcgtcttactttgtgctcccatgttttgtttttgtatttttggtttgtaaattaagtagaattaaatcattttccttgttgtggaggaaagagctgtgttttctccgtgacttgcccagggcggagagggtgggcatctttcggggtgcccacgtggggcagcacaaacctcaccaccaccctctcccactctcgacacgcacggggcttggctgggccgtgatttggaaaggaactggtgggagccgggtggattgtttaatcttcggagctggagacctgtttctgtgttgggatgagcgatgccctcttgccccaacccactcgtccagaccagccctgtccacgaccagcccccggcccccaaccacccagccccagctgttgccagcaggactcgaacaggttttttattacaaggttgttggagttttaaaatgtattaaaatattcttcgaggaaa

SEQ ID NO: 106705 - DNA, 488 bp, Homo sapiens
  misc_feature (1)...(488): n = a,t,c or g
taataggacccttggaannnccctatagtagatcttggaaagngcggcggaattaccaagaaaaagtttatacgatctatcaagtcacacgttttgaactctttactcacccaatattcacctcccagcccccaccatgggttgtacatgctgaacacagaaatgtgtttaagagaggtttagacacgatggatgatggattaaaaacaggatgtgcttgaacccggaaggcggaggttgcagtgagccaagatcacgccactgcactccagcctgggcgacagggcaagattccatctcatacaaacaaacaaacaaacaaaaaacaggatgtactactattttgatgtctacaacatctaggaccgccaaaaaaaaaacacctggagctggagggagggggtcactgtgctgaacgagtacagcacttttggtgtattcacacagtcccacgattattatcatctatgtgggaaaacgagaggggg

SEQ ID NO: 106706 - DNA, 463 bp, Homo sapiens
  misc_feature (1)...(463): n = a,t,c or g
atcgacccctctnnatcgagaccatctagaccgngcggtggaattcgtcccaaaaaaaacaaacccgaaaaactttttattagtagatcttcaagtatacttatatataaaatataggcatttgtgactataagcttttggaagtattctttattgattaagaaggtttccattcctgggtggcatgtataggccgctagaatggcttctacattttttgttttttggttttggttttctacatttatgtctttactccatttgtgtgtgtgtgtgtgtgtgtgtgtgtgtgtgtgtgtgtagaatgcacacagtccaactatatttcttccaagtggggtgccagtgtagctctctattaaacccccttttcccaatgaattgacacacccgcattgncatatattaaatatatatatttagtgaggtttatttctcaatatgccatgctgttacacttact

SEQ ID NO: 106707 - DNA, 474 bp, Homo sapiens
  misc_feature (1)...(474): n = a,t,c or g
ctcgaccccccntngnttttgtagtccctagtcagtgtggtggaattccctgcatgtgcacatccagacggctggttcctaccttaactgatgatattccaccacaaaagaagtgaaaatggctggtccctgccttaactgatgacattaccttgtgaaattccttctcctggctcatcctggctcaaaagctcccccactgaacaccttgcaacccccacccctggccaccagagaacaaccccctttgactgtaattttccattacccacccacatcttataaaatggccccatccctatctcccttcgctgactcttttcggactcagcccgcctgcacccaggtgaaataaacagccttgttgctcaaaaaaaaaaaaaaaaaagggaggttttttaaaaaatccccacccccagaaaaaaaaaaaaaccccccaaaaggaatttatataaaaaaaaaattttcagggca

SEQ ID NO: 106708 - DNA, 463 bp, Homo sapiens
  misc_feature (1)...(463): n = a,t,c or g
nttgatnccattggnannaactaaannttgaggaccttagtacagngcggnggaattcctgtcacctgcctggcccctgtaagcttttctgctgtgcttttggaaatctttcaaccacaatagcatgctttgttgcaaactcttagggacctaagccaggcatggtggcatgcacttgtaatcccagctacttggggaggctgaggcgggaggatcacttgagcccaggagttcaagaccagcctgggcaacatagcgagaacatgtctcaaaaaggaaaaaaatgggggaaaaaaccctcccagggacagatatccacagccagtcttgataagctccatcattttaaagtgcaaggcggtgcctcccatgtggatgattatttaatcctcttgtactttgttagtcctttgggaaatgcccatcttataaattaatagaattctagaatctaattaaaatg

SEQ ID NO: 106709 - DNA, 470 bp, Homo sapiens
  misc_feature (1)...(470): n = a,t,c or g
aggcgcgggnnttttncatagaattgcctacntangncgnggaattccgccaactacttgagaggctgaggctggagaatcacttgaacccaggaggtggaggtcagtgagccaagactgtgaaactgcactctagcctgggcagagactagagactctagcctggacagaatgagactgtctcaaaaacaaacaaacaaaaaaattctgtgtatgactatgatcccttaacttgatttcatgacccacgaatggatctcaacctacaactggaaaaacccactactctggaggagctgattccgtactctgctggatcttcaattcctgaccgctggaaattggctgcaattttcctggtgagttcctccctccatgctctcctcactaatacaccctacaccagacctccagtcctaaaagccaccacctgcttcacgtcaccacacctgtgccaatcagatttcctc

SEQ ID NO: 106710 - DNA, 446 bp, Homo sapiens
  misc_feature (1)...(446): n = a,t,c or g
nttcgagttccactacccatgtggtggaattccaaactcccaacctcaggtgatgtgcccacctcggcctcccggggtgctgggattacagatgtgagccaccacacccggcctacttttaacatttttgtatcaatttatgtttcctgtaatacataaatattttcacctaatgaatttgtctttcaacagaatttaatccatttagttatacatgccatattaaagccttaatttacattatttacattattgcttctatattatttaatattaaggtgtcattaatttttttttttaagatctgaatctgcttcacaattgcatggaattgaatacctttaaagatttccagctgggcacagtggctcacgcctgtgtaatgccagcagtttgggaggctgaggcgggtggatcacttgaggtcaggagttcaggaccagcct

SEQ ID NO: 106711 - DNA, 477 bp, Homo sapiens
  misc_feature (1)...(477): n = a,t,c or g
ntttgatagacgtccatacgacagngccgnggaantcggtgaaaccccatctcttccaaaaaataaaaaaactagacggacacagtgactcacgtcggtagtcccagctactcgggaggcggaggttgcagtgaacccagatcgcaccactgcactccatcctgggcggtgagattctgtcaaaaaaaaaaaaaaaaggtcccaaaggaaaaacaaaaaccttaaatggcccagtttttttaacaaacccacccggggcccttttttattatataacaaaccagactttttaaaaacccaggggaaaaggggaccttcaaaacccacaaaattttttcattttttgaaaggcaacccctaccaatataccggcggcccagccttcaaaaaagtttaaaaccccatattttttgcttaaaaggggccaaccttctccctaattccccaaaaaagcaaagaaaggtatatatgtgtgtt

SEQ ID NO: 106712 - DNA, 634 bp, Homo sapiens
atcgacatcgacagcggtggaattcggacaagaggggaggagagagacacagatcacccatgggtcagcagtgtagagaggacccaggacttcacagccttgtgtggggaagggaaggaggaagaaatgtgggtaagcctcaggccaagctgctgcactgtgaggccacttggactcacacccacagcctgggctcattcctggctggtggccggtatgaggtctcaccctagttccactcctcgtgggggctggcaaaggcacaatcctcggcctgtttgagggtaacccagccacagcaccccaagccagtgcctgctccctccctcccctaggagtgctggggaatccgaggtaaggtcccttgtcctttgtcgtgtgagtgagattctgggctgtgagaggcgcagagtcgcctcatgggcttacctttgagatagaggcctgaggggacagccgggccttaggcagtgtcagaggtgaggcagtggtggtagaccggggaaactcctgtcttcaggactggcattgagctgagcagcagaggtgggggcctttctccagggcttttccctaaccccaaattctcaccccagcagcttcttcctgtgccctgggaaaggggatgtggtct

SEQ ID NO: 106713 - DNA, 513 bp, Homo sapiens
  misc_feature (1)...(513): n = a,t,c or g
agggtnnnnnnnaaggggtgtccccnngnagggccgcccnaattgaagacccctagtttagagnggctgtaatncagctgggattataggcctgaatcaccgtattggtcgaatgtttgacttttaaagagttcacgtgggattaatgcttggctaatgtgacccagctgactttatcaaggtataaaaattgcaaatcactgtatactatatgtgatatgataactttgtcatgtataaatgtttactacataatgtttttaagtaaatgagagaaatgggcctgttattctagtgctttggaagactgaggcaggaggatcacttgaggccaggagtttgaggctgcagtgagctattatcatgccactgcactccagcctgggcgacagattgagaccctgtcacacacaaaaaagagaaatgatctcatcttgaataaaagtcatctttagttgaaaaatatgtcaaaaaaaggataaaatgtgagcccactaaaaatttattcattag

SEQ ID NO: 106714 - DNA, 487 bp, Homo sapiens
  misc_feature (1)...(487): n = a,t,c or g
ggcggtnnnnnnnattgagaccatttccatgtccctctcactcctgactggcagtgactctaaaaaatgccccacccgtggggaggccttggaaagtagaagtggagatgcagtcactgatctcgggagaagctgaaaacacagtcatcagccctaggagaggggttttctgcacttccttggccatcgctggcctctggggtgtttcaagtttttctggaaaacaggatcattctgtggagtgagtctcaggaccttgacatgggaggaacaaaacttttcttgcttttttggtgcaccctgggctgaaataagaaaaccactaggggtgagtcttcaaagcaaagacaacccagggtctcacatcacccaggctggggtacagtggcaccatcagggttcactgcggcctcagcctccctgggctcgggtgatcctcctgcctcggcctcctgagtctctgggaccgcagatgcaccgccacgcc

SEQ ID NO: 106715 - DNA, 462 bp, Homo sapiens
  misc_feature (1)...(462): n = a,t,c or g
tgcgcctgnnnnntttttgactagagtaccntaggccangncgnggaattccgggcttcaccaggaaaactcgtcagcatagccagaaggacacaaaagctctactcatttccagtgaaatgaggaagcccacttcagctgctgccgtccccgctggcagctctcaccagggactgttcagaggcaccgatggggtcttgctctgttgcccaggatggagtgcagtggcgcgatctcggctcgctccaacgtctgcctcccgggttcgagccattctcctgcctcagtcccaccccagctccctgtccctagtggctgggactacagacgtacgccgtttcattctgaaatgtgtctcccggtctcggaggtggggcctgctgggaggtgatcggatcatggcggcagatcccttatgaatggtttagcactatccccttggtgatgagtgacttctcactc

SEQ ID NO: 106716 - DNA, 587 bp, Homo sapiens
  misc_feature (1)...(587): n = a,t,c or g
caggggtgcagctccagcagcaatggcagtgacggcgttggcggcgcggacgtggcttggcgtgtggggcgtgaggaccatgcaagcccgaggcttcggctcggatcagtccgagaatgtcgaccggggcgcgggctccatccgggaagccggtggggccttcggaaagagagagcaggctgaagaggaacgatatttccgagcacagagtagagaacaactggcagctttgaaaaaaacaccatgatgaagaaatcgttcatcataagaaggagattgagcgtctgcagaaagaaattgagcgccataagcagaagatcaaaatgctaaaaccatgatggataagtgcacaccgtgtgccataaaatggcacatgtcattggccaacttctgtggaaaacttggttctggttaactctaaatattggctgtgtgctattaccggatattantaaatggccttcatgggaaaaaaagannaaaaaaaatttttaattaacgggcccgagctttaatcctttttgagggggttatttacttgtgacatggcccgcgtttttaaaccggaatttagtaggggaaaaccc

SEQ ID NO: 106717 - DNA, 1122 bp, Homo sapiens
  misc_feature (1)...(1122): n = a,t,c or g
atggggttttgccatgttggccaggctggtcttgaactcctgacctcaagtgatctgtccgcctcagcctcccaaagtactgagattacaggcatgagccaccgtgcccagcccatcttcatcttctttacttgaacttaattctttttcatgcatcttcccttctttcctcttttctcctccacccaaatgtcttaactgttaacattcccaggtgtttggtcctgggcctctggaggttgtgaaggagcactgctcagtcctcccttcaagaaagcagcttcaaggagttcaattacaaaagctcctggcattggggacctgccgccatgttcctgcccagggcatgctggtcctggctgtcaccaagcacagtggaggtcaagggctaggccatttctgcccgacacaggcctcctctaatgagcagtctgaggccaggcacaggaggctgaggcaggagaatcgcttgaacccaggaggtggacgttgcagtgagccgagatcgagccactgcactccagcctgggtgacagaataagacttcgtctcaaaaaaataaaaaataaaaaaatactgagcagtctgcttgggcgcttccatcagcctggccatgacatctttggagctgtcctgccctcttttgccccggtgttccttggcccacctgtcagacctacatcataggctcttcctgtcttctgtttcctctcccctttctctaacataggtgtttctcctgagaaagaaaaaaaccacctgtccctgacattcagaagctgacaacactgttcggtcatgccattctcctgttggacataaacagtctctgaatgccaaccccaaagttgctctcaggccatgataaaataaaccacttaataattttgtctaagcacgtacaaagaaaattcaaggtcagtttaccactcacaaaataccaaacatccttctgctggttaaaacgagtgacagctgccgnnnnnnnnnnnnnnnnnnnnnnnnnnnnnnnnnnnnnnnnnnnnnnnnnnnnnnnnnnnnnnnnnnnnnnnnnnnnnnnnnnnntatatgtgcgcgcgtatatatatatatgcaaatatacctttactcatactctagccg

SEQ ID NO: 106718 - DNA, 767 bp, Homo sapiens
ttgtctatatttctatctttaacagcacttcagtcctgccttaagttatagttatgtatagatacccattatactttaaatttttcagcagaaattatgcttttatcttctctgcagtgttatatgttggtgtgcaaaaatgttaaatttatttttcctaagtaccccatctgcttttcaactctgtcctctgcctgaaaagcctccctccagcccctacttccctcccatcttagttcacaaagtcaggttgatttgcccccagctgtcaaagcagactacctgtttccacatgtaactggttatgttctgtaaagttacaaaaatagaaaggttgaatctgtggcggccgggtacggtggctcacgtcctgtggtcgcagcactttgggaggccaaggtgggcagttcacgtggggtggggagttcgagacccagcctgacccaacatggagaaaccccgtctctactggaaatacagaaatattagccaggcgtggtggtgcatgcctgtggtcccggctactagggaggctgaggcgagagaatcgcttgagcctggggggcagaggttgcagtgagctgagagaacggcgggcggcagagcgagactccatctcaaaaaaaaaaaaggataaaggaaggacttaagcaaaatcttccttgtaagtagaaggatgttttgacaagaaaagttgcaatggaaaaatggttctcatgtacacgagtatgtagaataagcatcgtgtgtggattggattcagatca

SEQ ID NO: 106719 - DNA, 438 bp, Homo sapiens
  misc_feature (1)...(438): n = a,t,c or g
nttcgagttcactagcccagngcggnggaattcagcttccagaggaaggagtaggcagcagtctttgctgttctgtagcctctgcttgtgatactcaggcaaatagggtctggtgttgccctccagcatactgcagcagaactgcagaagagattcctggctgttgaaagaaaaactaaccaacagaaaacaatttcaacatcaacaaaaaggaccccccacacacacacagaaaccccatccaaaggtcatcagcctcaaagataaaaggtagataaatccatgaagatgaggaaaaaccggcccaaaaatgctgaaaattccaaaaacaagaaagcctcatctcctccaaatgattgcaactcatctccagcaagggtgcaaactggacagagaatgagtttgacaaattgacagaagtaggcttcagaaagtggg

SEQ ID NO: 106720 - DNA, 2343 bp, Homo sapiens
  misc_feature (1)...(2343): n = a,t,c or g
ttttttttttttcaaattttcagtagttttattgaaaaatgcctcttttgtttcagaaataaataatataaggcagtgaaattcacaatctgcagttaaaatataaaagcagcaattctatgttcatagtcttgcaaatgttttccaactacttttgataactaagaaatattatattctgaaaaaagttcatactaaatatacaacacaaacatgcaattccctctctgcagaataatctgcaatttggtataaatgttagtgtgtctaaaacaaggaggtttaaggcaatatggaactgtatcccgttgatgcactaacttcatctacatggcttaaggtttgtggttgttaaagagatgtatacgagcattctatgccccggcgtataacagagatagaagaggaagataagtaattgcaatggagttgacgtttccctcctttttggttttaggaggggaattatttgaatcgtggtgtaattgaattgaaaataagtatagcaaaagataaactgcccgctcgaaatacacagcagctctgggttccaggacttaactgcttaacctaagagtttcactgaggctgcccgctgtgctaactaaaggcacacggcatgttctctctttgcagcttttgttaacaaagtattttgcaagcatttcaagggcaaaggcaaaaatgtctacagactgcgtgcttggagctaggcttcctgcagaaacaaggttctctacaatcagaaagggtactcctggatgagcaacgctggaagaaacacctcagaaaagacgtacactgctctatctgacctgtaaatgagaatttcaacacctcccccaagcctcgcggcgcggcgcgtgatctctggttcactgcccgggtccgtggggcagggcgcggccgccagcgccggtggggctcaggaggctcctctgcaggctcgtctgcgccgtagtcctcgtattccgctgtccgctcgggctccaccggcacgatgaagggctcgcgctcaggcaggtaggccccgccctcgggcacgtaaggctctgtccgattcaacattacaattatggcatgatttggaaggcacacacacacacacacacacagcaaaaggtaaatcatcccccgcggtgatggcactccagtcttaatttcataactataaatagataagttacaatgtcccaattatttccagataatttggtgataatcaaataatgaaatggccctttcttaaaaaaaaaccttcaaaaatccagcagtaaacacaatcattgcacaaatacttgggaagggtcagagactgggccaaagaactgtaaacgcagtaactaagtaggattttcgcaaatccccaagtaactgtttatgccttcaaactcctcaattcaaagaacaacttggaaagatgaggaggtgaggggaagtttcattggctcctagaaactgaactcggggggtgaaaagcaactatcaccaggtaatatacagtacatgacatcttctgtggctgtacctcacacaaactgagttacagctggtgggtgaggaacaccagtgactacagcaaaacaggaagaaaaggtgattttaaactttggtttgaaaattgcagttacaaaacccaaatgagaggacacggacaaaaaagtaacaaaaagacagatgccctgaatcagacacatcgctaacaagcaagagatgaggagattccatttggtgttattccggcatagagcaagcggcaggctttgatgcagaagcttattgtagaattgttaagtgattttagtcgacaggatcacatacaaatcatttacaagccacaattagtttattatttacataagacatttctctttaaccaggttaattgtttttcttaaaatggcatagactcctctggttagtagttttattatgcacctctttcaaaactgaggctcctcatggctgtgtgttggaacttttttaaaataatgtttttctacattattactgaaatgcatcaggattataaactgacaccactgcttttgtctcattcaagttagtaaaaagagtctccaccctcctttgtgatgtcgacccggttcgttaaccattatctgtggtgagatttccatacagactcatttcctaataagcacgtgcgcaaacatcttagaaacaggattttcatgtattcaaactgtaagcagcactggcgacttagaaaatgtgttagccggaacctggatagctttgcccgttgtatgggatgctggcacactgagaagaatcacagtatccaggaggacctgggggtcctcgnatacctgagctcgtgcc

SEQ ID NO: 106721 - DNA, 2439 bp, Homo sapiens
  misc_feature (1)...(2439): n = a,t,c or g
ttttttttttttaaacaacttagataatttatttagaaagtagaaaataaaaagtatgattctaacatctatttagaatatgaacaaaattagaaatggttaaactacagaaaaaaaggcagagaaactgaagttggcttaatggttatccaatacaaacaagcaaaacccaagttaccttcatgcaaataagcattaaggaaaagaatacgggaatgtttacagaatgcgccatggcaaacatttttcaaatttacataagatactgtacataaatgaaaaaataaattaggtaatttacaagaaatgttttacagattacaataggctataacttagtttattatgaataaaatttatggcacatcatacatttttacatcacagattcagtgttaaaagaattcagacatgataaagcttagacttgacaagaatgatgtaatagaatgaggcaactgaaactgaaatggcatgtgtaagtaaaattaatccccaaattaaaggattccttagattgggacataataacatcttctgagtacactttggtcaataactggtcattaagataaacgccattcaattttagttaaaaaatcagttttttgctgtagtttaaataaaaagtaaaagcacacagtgtataaaaaataataaaaaccatcttaatattgcttacatcctaatactattagttatattcggggcaagcagactaggatattggtgttacttctataaagttaccttctgtttctaaatgctgtaaactaaactaaaacaggttacccagaaaaaagtggcaaattccaaaatggcttaatacctgtgacaactattgactgagccaggtacaacatcgatgaaattcagacatacaatgtaaagttgaaataatcccaaattattttacattatttatgtatactttacaaataacacaaatatggaaatgttttcttggaaagctgttggaactgtaagcactgcaacgtatgaaagaaacatatttagcaataaaaaatttaataatatcctacaactgaattagttgcatatttataccattcaaaatcttgattttaacctcattcactcctttgaaaaatacattcctcttttgttcttttaaatgcaaaattagtggcagttgcagcaaaaacgccgaaattctataagaaaaaaactgatttaccccaaacatatcattcagcacaaactgcggtacctgaaatcccagtatcagctcatagtacattcattcgttcattcattcattcattcatttttgagacagagtcttactctgttgcccaggctggaatacagtggcatgatctgccctctgcctcccggttccaagtgattctcctgacctcggtctcccgagtagctgggactataggtgtgtgccaacaagcctggctattttttgtaatttttagtagagacatggttcgttcccacatctatccccactcacaatgatcagaaataagaaacagctttttaaaaagggccactaaaaaatcccaaatatatgtaacacaaacagtccgacttaacaatggtttgacttatggtttttcaactttataatggggcaaaagcaatacacattcagttaaaaactgtacttcaaattttgtactctgatattatcctgggataacgatatgtggtacaatactcttatttgagatattaaacacttcattataaaataggttttgtattagatgattttgcccagctaaaggccaacgttaagtgttcagaacacatttaagataggctaggctaagctgggatgttcagtaggttaggcgtattaaatgtattttcaacttacggtattttcaatttacaatgggtctactggaacataaccctattgtaagtcaaggaacatctgtattctaacatttatgaataattttttgtacaatgaaaaagtcataatgcccatataattctgaagttaacacagtaaaaattccagataacctttacagatttaaaagtacaaacattttaatatacatataaaacctttcatattactttaaggtatatctacctggccattacaggcaatcacatattaagagagaataccattctactggtttggtgagaatccaatacctagtacctatcaaatatataccaataaaaattatgtaataacttaaaattatataagcactaaatattaactccaaaacatgacaccaaatacctgaaaaaaaatttactttagttatctcaaacaccgccatgaatgaagcaattttctcaggaccctgaaaactgactcattaaacatcataacaaaccaactccctccggccgcgtgggtcgncccgggnnttccgggcggtntcagaaagacgctcagggaggggctcaaaggccgggcgggggggacaatct

SEQ ID NO: 106722 - DNA, 498 bp, Homo sapiens
gatttgggctgatggtagaaatttggaatttagcaatatgtagatcataatcgtgaagctttgtgaatgacaagtcacataggaatgtatagattgaaagactgattggaagatagctgaggacccaggactgaaccttgaagaaagccagcactttaaggatgttttcaaagtataactacctgaggtcagctgggcatggtgatgcccatatgtagtctcagctgtttgggaggctgaggcaggtggatcaagggctgaagtgagctaggatcaagccactgcattccaacctgggtgacacagtactgaaccttgaagaaagccagcactttaaggatgttttcaaagtataactacctgaggtcagctggcatggtgatgcccatatgtagtctcagctgtttgggaggctgaggcaggtggatcaagggctgcagtgagctaggatcaagccactgcattccaacctgggtgacacagtactgggcctttaaa

SEQ ID NO: 106723 - DNA, 374 bp, Homo sapiens
  misc_feature (1)...(374): n = a,t,c or g
acctaattgaggttaaggctgataagagatggctgatatttctgttactgcctaggtaataccaacataggataacagcacaacattggtttacagctcagtcaggctttcatataacatgatttctgaagactttctgaaatgagaaggtaacatttcaaactctgaatatgaaatgaaacttttaaaaatcacatagttcaagtctgcatataatgtaaccacactgaaattacatatgtgaacaagaaaaagcacaggccaggcacggtggctcatgcttgtataatcccagcactttgggaggccaaggagggctcatcactcaagctcaggagttcgacaccagcctgggcaatatgactctgtctccn

SEQ ID NO: 106724 - DNA, 507 bp, Homo sapiens
  misc_feature (1)...(507): n = a,t,c or g
cgcggcnnnnnaattgaaagcatcgaaganccttactacgccaagcttggcacgaggctcacaaggtgataggggagcacagagggggaaggtgccacatactttaaacaaccggctctcatgagagcttactcactgtggggaggacagcaccaagccacaagggatccccatgacccaacacctccccccaggccccacctccaacactggggatcacagttcaacgggagatttgggtatgacaaacatctaacctgtgtcccctggcttccctcctctggtgcccagtgccccacacccctcacctgtgccctccctgcagatatccggagtcacctgggcagcctgcggcccaacactgcggtgctcctcgtcagccccagcctaaccctcgggcctgctcttcccgggggctgtttagatgcccgcccgcttgccaccatgcaccctcttgccttctgtgtgtgtgcccacctcttccacaatgctgcagagtccaaggga

SEQ ID NO: 106725 - DNA, 480 bp, Homo sapiens
  misc_feature (1)...(480): n = a,t,c or g
agtccgcaagcgggtnnnnnnncctgataacctgagacgtgcgaggaacncgnnngncagngactcggattaagtctaaatgcctagtatcatggtttatgggactttataatttggcttctgcctacttgagtagccttcttttcccactcaccctcaattctgttttttgttttgttttttgtttgtttttgagacagagtttctattgttgcccaggctgaagtgcaatggtgcgatctcggctcaccagatcaaggttcaagcgcttctcctccctcggcctcctcccttcccctatctatttggntaaaaaaaaaaaaaaagttcaacttcaatttaagtcctaggccctgacaaagagaccctggataaaagtcatccccacccatctgttttctttagttttaattaaatcggcccaggcttttctatcaagatcattcctttcctgcagggacggaagagttttcaaatcct

SEQ ID NO: 106726 - DNA, 488 bp, Homo sapiens
  misc_feature (1)...(488): n = a,t,c or g
ggannnnnggggngagcggggnnnnnnnnnatcctgagattcgctantccgtgcggnggaattcggcgctctctggagcgagactctagagaaggaatttcaaatcttgcttaaaacacgtgactgagaatgtaaagccagcattaaggtgtgtctctaatcaaagggcctgctttttcttcctctatccagccattgtctagggaagagagatttttgataaacctagaatgatactctggatcttgctttgtaactagcagagaaaagacctctaaggctgaaacgcaccctaaggtggttcagcagtttactatatctgggaaattgtccaggtgctgtggctcatgcctgtaatcccaacactgggaggcctatgcaggaggattgtttgagcccaggagttcgagaccagcctagtcaacgtgctaaggaccccctccccaaacctgtctctacaaaaaattaaaaattaaccaggtgtggtg

SEQ ID NO: 106727 - DNA, 996 bp, Homo sapiens
  misc_feature (1)...(996): n = a,t,c or g
caacaaagaaggaggagaaggaggaagaaggagaagaaaagaaaaaaaaaagtcgtcaaaggatattaattgtcgatagataacagataatgccaaaaaatatagaagcaattcttaaaacacagtgttggaactggtccacagctctgatttttaatgagctcccatttctgaggccaatataaacttcattctatgctgcccatctctgacaggtgggcattaactaccagccccccacggtggtccctgtgggagacctggccaaagtgcagcgggcggtgtgcatgctgagcaacaccacggccatcacggaggcctggggcctgcctggggccataagttcggccaagtgcgccttagtgcactgggtacgtgggggagggcatggcagtgggggaattctccgaggcccgcgaggatctggcagctctggaggattatgaaacatgtgggccatggaatcccgtggaaactgaggctgaaagaaggcgnaaacaatagtgaggggagggtgcggcaaggccaaccatccctctgtattccccaccataacgctaggagagctaattacctattaaaatttccgtattgcaaattagccgggccgtggtggcgggcgccttgtagtcccccagcctactgtggagggtgaaggccagccgaatggcgtgaacccgggaggcggagtttacagtgagccgagatcgcgccactgcactcccagccctgggcgacagagcgagactccggtctcaggaaaataataataaaataaaaaataaaatttctgtattgcgatactgtctttctcctgtgttgtactttgagagattcctcctccagataaccctccctgaagtccacctccccagtacgagagtgagtgcgggctctggtttttgtcgggttctttcgtgcaagcgtcccaggccccgttttatttcttccgtcagaggtcattccgaggcgagctgccgcccctgcggctttcga

SEQ ID NO: 106728 - DNA, 932 bp, Homo sapiens
  misc_feature (1)...(932): n = a,t,c or g
accacacccagcctcttgtttatttagatctgctattgactctttttttgttcaaatttaacctcggttttttccggmtcctttctcatcctgcctttcagggagcccttgcccacttcttgggtctccagtcactcctagccctcatctccttagcatgtaacactttttcccattctcatctgtgtgaccttccgkgcaacactgctgtactgttttttttgtctgttttgttttgtttttgagacagggtcttgcctctgttgcccaggctggagtgcagtagtgcaatcctaggtcactgcccaccccagcctcccaagtaactgggactacagggacacaccatcacacccagctaatttttttgttgtactgttggctgtgccctcctcccttggcctctgaggcctctgctgagagccccccacttctaccaagggggtttctttgcttttcctcaaccacctcttccataacagctattccagcaaccaccagggactatgtggatgtctcacgctcagggtcttagagactttcaaatgccacaagtgcagagtcaaactttttttcttctcccacctataaaccttttttttctcttgtgtttcccttctgggataatagtgtccacctgatcacccagatcagccaagccagaaacttattttgttcctctctgactctctctcttactccatcctttcttttcctttttaaaaaacaaaacannnnnnnnnnnnnnnnnnnnnnnnnnnnnnnnnnnnnnnnnnnnnnnnnnnnnnnnnnnnnnnnnnnnnnnnnnnnnnnnnnnnnnnnnnnnnnnnnnnnnnnnnnnnnnnnnnnnnnnnnnnnnnnnnnnnnnnnnnnnnnnnnnnctccatcctttctaagctgccaccaggcacatcagttctgtctcttgcatt

SEQ ID NO: 106729 - DNA, 407 bp, Homo sapiens
tcacttgaatggcccttctttttttctttctctgagacaggatctcactccttcactcaggctatagtgcagtggtgcaaccacagctcactattctcccacctcagcctcccagatagctgggaccacaggtgtacacaatcatgcccagctagatttgtgttttgttttgcttttatgtcgccccagctgagtaattcttgttaattatgcaaagacaagacaaataggaaccagaaccttccaaactgggtgtgtgtgtggaggcaggggagggtgctttgtcactttgggataaatactccctgtctaggacatctctgaaccctggcaggacggaagagactgattggcatatgtaccctaggggctctctctgtggtgatcaaccaaactccactactttg

SEQ ID NO: 106730 - DNA, 1238 bp, Homo sapiens
gcatctccagggagctggggattagtgccaggcagccctgccagccatgcctacatccccatgggcacagaacaagccaaagccttcgttgtatgttgacgatgcacttttatgaatgtagtttctatcgctgtttttagccttttcacatcatgtaatgtgaggccttgtacttgttaatttatatctcagatcatatttgatggtttttatatatatcaattctagactgttacaggtgacggacgcctcaagagagagaagagaaaatgaaagcagctggttttgcagaagtgtgtgtcgcatgcgccagttgggcctggaccctcctgtgtccatccctgttcccccaggggctctatcagcccctgtaccccacactgccctctgaagacaacacaggctcctgcttccacctcggcccttgcccagggtggggcctggccctcatcttgaccaaagctgctgtgtggcagctcggcctctctacgaccccatcttggtggctgcacactcttcctggcccgcacccccatccccagtccctgttccccaagaggatacagagcacggtgctggctgactcaactgtgcgtcccaggttcagggtcttacagagctccaccccctggggtcttacctcactgggaatgtgttttgaaaatgaatttgaagacaagccaacaaaccctgcactccaaaaaagcaaaacagaccctaatttttttgtgccaaaaactgtggacatgctggctcagcatcctcaggaccaagttgttgcttaatttattgttttttaataactaatccagataaaaagttgtggggcttcagggtgacctgggcccaaaggttctgaagggcagttcctggcagccccaggcttgctgtgggaaggggccgtgccgtcactttctcatcattccatggggtgtgtctgcctgggccaactctgcatggagaggccagggctggggacagtccgcactctgccaccctcctgccccttccacccaccccagctctatgtctgtgtctgaattgtggatcgtgcagccatggttattgtggaactgtggaacctgcagccatagttatttgactatatcttgaccgagggcttgcagtgcaaagccaggccagtgttgcgcattacttacaataaaagggatcatttatatcagaggggtcctgtggcagtgctttcagttgtggggggtggaggtaggtttttgctt

SEQ ID NO: 106731 - DNA, 381 bp, Homo sapiens
  misc_feature (1)...(381): n = a,t,c or g
aggtacccttatggaaatagtctttgttattatttgggtcagttgactttttttgttgtaagcaacagaaactaacttaaatgaaaaagagatttcctttcaagccgtataggagtagcttacagaatcaaaggcattgctgaatgaccaagaggaacaggaaccgggaaggtgacagaaaacttagaaacaaaagttctttaaccaactctctaggattctgcctccttgtgattagctttaaataccttttgttggctgggcgtggtggctcatgcctgtaatcccagcactttgggaggccaaggagagtgggtcactcgaggtcaggagccaggccaacatggcgaaaacctgtctctactaaaaatacaaaaattn

SEQ ID NO: 106732 - DNA, 403 bp, Homo sapiens
tttcgtggaaagtgagaggtgacagtgtgctagcagccctcgcttgctctgggcacctcaggccacagcatccattctggccacgcttgaggagcccttcagcccgccactgcaccgtgggagcccctctctgggctggccgaggcaggagccatctccccctgcttgcagggaggtgtggagggagaggtgcgagtgagaaccgaggctgcacgcggccaggacgagttccgggtgggcgcaggctcaataggccccgcgcttggagcagctggccagcgccgccggccccaggcagtgagaggcctagtgccatcaactgcccaagggctgaggagtgtgggcgcagggtgtgggactggcaggcagctctgcctgcggccccagcgtgggtcccagtagg

SEQ ID NO: 106733 - DNA, 597 bp, Homo sapiens
  misc_feature (1)...(597): n = a,t,c or g
tgtcttcgtaaaantttggaccgccgnnnnnntntnnnantnnnnnnncnnnnnnntnnnnnnnnnnnnnnnnnnnnnnntnnantnnnnnnnnnnnnnnnnnnnnnnnnnnnnngacgtatctgtacgaacgagccaccggnnccggaatcccggggcgacgatttcgtggggagcactcaggctcattcgctgcatgttttatgagtcgagaggggctttgagcagcagggggtgggatcagagctgacttgccaggatcacactcccagtcatgtggagagtggattggagggtgggggcacaagggggcctgcctgagaccatggtagtggcacaggaggcccgcaggggtgtgtgggtgagggacgtaaggggaagagacaccccccggcgtgttttgtgggtagagccgtgaggacctgctgatggatggatgtggggtctgagaggggtccagggaggactcccacattcctctgaggcatcgggaggatggagcaagtgtctctggagttgcagaggacacccgaggagccagttctggaaggaatgccctcagtctgagatgcccattagtctaatggggacaatggc

SEQ ID NO: 106734 - DNA, 429 bp, Homo sapiens
taaaaaagaaaaatagaagtgaaatcgattctaataatattttagatgtattggcttaaataaaatgtattattaaaatcaatacatctaaaatattattagcattttagcattaaccaatgttaaaattattgataagatattttacattttgtttctcatgctgactctggaatccagtgtctcccctaccctatattaaatgtggctgcattcgagccagccgcatttcaaatgctccataactccctggggcttgcggctactctgtttcccagaacaacacttggcctttatgcagacattaaaatacagcatgaggctgcgcacagtggctcacacctgtaatccagcactttgggaggccaaggcaggagaatcacttttgttcaggagtttgaggccagcctgggcaatatagacagacct

SEQ ID NO: 106735 - DNA, 399 bp, Homo sapiens
tgattgaattgttgcaatctcatgataaaactttaacagataagaagttgcttcttctggatgagcaaagaaaatggtttcttgagatggaatctactcctggtgaagatgtgaacaatgttgaactgacaacaaaggatttagaatatcatatcaacttagatgataatagcaggatttgagaggattgactccaattttgaaagagtttctgctgtaggtaaatgctatcaaacagcattgcctgctacagagaaatctttcatgaaaggagtgtcaaagtagcaaacttcactgttgccatattaccacagccacacaagctgtcagtaaccattaacctgatcattcagcagccatcaacattgaggcaagaccttctattagcaaaaagatgat

SEQ ID NO: 106736 - DNA, 417 bp, Homo sapiens
  misc_feature (1)...(417): n = a,t,c or g
gtggctgggacaacaggcgcacaccatcactgttggctatttattactattattaggattattatttgtagagaaagggtcccactgttccccaagctggtcttggaactccggggttcaagcgattctcccttctcgacctcccaaagtgcttgggattaccggcgtgagccacagcgccccacctcccttcactattttgttcagctgaaacacaatttacatagagtaaaacgcagagatcttcggaatactactcgttgagtgtgtgtgtgtgtgtgtgtgtgcgtgtatgtatatatatatatatattttttttttttgaaacagagtttctctcttgccccccaggctggagtgcagaggtgcgatctaagctcactgcggcttccgcctccccggatcaagcgattctcn

SEQ ID NO: 106737 - DNA, 401 bp, Homo sapiens
ataaacatctttctgatcttcaaattttgagacttggattgtcatctaagacacgaaaaacaagatattcccattttgctcaggggaggtcaatcttttttctattaagaccttcagtggattggataaagcctgcctgcatggacggcaatctgcttttctcaaagtttactaatttaaatgttaatatcatctaaaaagcaccctcacagaaatgtccagaataatgtctggccaaatgtctgggcaccatggcccaaagaagttgacacataaaattaaccattaaagaactatttttattttaactgtgtgccattaaactggttatgttaattaaaagaaactctgttatagaaattaggcctagggtttcttctttgacagcatagtgtttggcc

SEQ ID NO: 106738 - DNA, 406 bp, Homo sapiens
cccacgcgtccgaataaaacagcataaaatgcaaacactgtataactgtacaaaaatgttttctttatatccttattttataagcttttttctgtttttaaagttttttatttttcatttatttttgactttttgaacttttttggtaaaaacgaagactcaaatgcacacattagcctagacctgcagaggatcaggctcatcaagacatcagtaggcatgggatcacatcaagttagaaagcttctacacagccaaggaaacaacaaaatgaagagacaacccacagaatgggagaagatatttgcaaactacccatctgatgagggattagtaactagaatgtataaggagctcaaacaactctataggaaaaaaatctagtaatttgattaaaaaatgggcg

SEQ ID NO: 106739 - DNA, 391 bp, Homo sapiens
ttattataacacctcccatttatattacaatttattagtttcaaagacagtgagccagggcagatgattgcaggtgtggtgtttttggcaccacatatttacaaaagtgatggctccacaaaaagcacagctcgctctttctctctttctctttctctctgtctctctctctctttctctttttctctgagggagtcttgctctgtcgcccaggctgcaacctccgcctcctgggttcaagcagttctctgcctcaactacttgggaggctgaggcaggagaatggcttgaacccgggaggcggaggttgtggtgagctaagattgcaccactgtactccatcctgcatctcaaaaaaaaacaaaaacataaacaaaaacaaaaagcaaaa

SEQ ID NO: 106740 - DNA, 403 bp, Homo sapiens
tcgaatgaactaacataacaccgcatgcttctgtactgatgaatatagaacatttttgacagacttaaggaaggcccacatgaaggaacaaatatatcacgttcatggattagaaggcacacatggttaaaatgtcagttgtctgcatattgatttaggtaatccctgtcaaaattcctatatatatataaaatatatgtatatgtgtatatgtatgtacataagtatagatgagtgtatatgtatgtatattgtaaatataagtttatatatatacatatatagttataaattgataagttggttctgaaatttatataaacacataaaaacctagaataaccaaatcattgtgataagaaacacatttagagaaggcagactttaacactagagtaatacc

SEQ ID NO: 106741 - DNA, 432 bp, Homo sapiens
  misc_feature (1)...(432): n = a,t,c or g
nnacgttctaaaaaatcattgttttagggactgcccaactttctgcctggtggtggccctggcccttgatgacccagtcttagatggtcaggcattttcgtctgctttaaaacaaagttgtttttttttttttctccgtggcaaaaaccaggagggttatccttgaaaaaaaaaaacctttgcccgattctttaattgcccgggatttgcccccccagaggaaaatctgtggggcccaaacagggccacttttttcagggctttgggacgtgaagggccaaaggcccctaagggaaccctgaaaaaccccccctcccttgggccggggggaccaccccccccctcccgccggggaggccctggccttaaggtgaatggcggcttttctcctccaaaaaaagttcaatagaaccttcttttttttttggggaa

SEQ ID NO: 106742 - DNA, 390 bp, Homo sapiens
tgcagttggttaattcattgaacagattagtaaagtcagaagtctttttcataacatacggtcacaattcctttcttttaattaaagacaaaaggtttatgggttttggtttgtttgttttagatatggggttttgctatgtcacccttgctggagggcggtggctgttcacaggcgtgggtcatagagcactgcagcctggaactcctgggttcaagctctcctcctgcctcagcctcctgagcagcttggactaaaggtgtgcaccaccgcacctggctgagaggcttctgtttttcatgttccctttatcaaaacaaaatcacgcctaaacatactctctgtgtgaaatcttgattttagttcaacctaagaaatataataaatata

SEQ ID NO: 106743 - DNA, 402 bp, Homo sapiens
cccacgcgtccgatttttagtagagatggggttttgccaggctgccaaggctggtcttgaactcctggccttgagtgatccacctgccttccagagtgctggattacaggcatgggccaccgcacccagccaactaattacacatttatttaattacagttggataagtgctttaaaaaggtggctagaataccttgacatagatcgagggcagttaacagagtctgggaaagttgagtttgagctgaactttggaagaacgaacaggaatttaataggccaagagggatggggtggatgggatgaggaaaagcgagcggtgcattccaactagagagaacagcatgtggaaagccaaatggcaggaggagcacaggccagtttgaggcagtgcgaggaggc

SEQ ID NO: 106744 - DNA, 427 bp, Homo sapiens
  misc_feature (1)...(427): n = a,t,c or g
atgagctaaaaataaaaaatttaaaaatcccttaaaaactcataaggttttaaaaaagtttacaaatttgttttgggcctcattcaaacctggcctgggctggggattggacaagcctggcttactgggtcctcaaattcctgggctcaagcgatcctcctgtttaaccctcctcctgagtagctgcaattacaggggcatgtcaccatgcctggctaattttgattttaatttaattaattaaaaaatttaataacctaaatgaaacatctaaaaccacagcttttggaaaaaccacttggtcttgacgggcttgtacctttttttgaacttgaccctggcctgtcagaaaccttgcatttaaaagcagcctctttgaaaacatccttgttgatgagagttttttccaaggggatatccacggacn

SEQ ID NO: 106745 - DNA, 464 bp, Homo sapiens
  misc_feature (1)...(464): n = a,t,c or g
cgccgccccaactgaaatcataggcatgcacgnaccgcnccggaattcccgggacttcaaattggagggtatcgcggcctcacaggagagcctgggtttaactttgtcattatatgttcttcctttatgatgaaatgtgcctaagccattcttagcaaaagcagggatgattgctggatgtgtgtgtgtgtgtgcatgcatgcgtgtgtgtgtgtgtgtgtgtgtgtgcgcacgcgctctgtttgtgtggcccaaaggcaatatttatgattatgggatagacaggcgctcgctctctatattatattttaaaaaaactgtttttctttgaaattcctgagatagtggtgtgtgtgctttatatctgaccctcttcggagaggtgctttttttttttttcccccgagggagtttttaaaagagaaaacccctaatagagaaagaaagccctcgggggctacaat

SEQ ID NO: 106746 - DNA, 431 bp, Homo sapiens
acacaggacatttatattttagcaaaatattttctgtggcctttcccactcattctgttaccggaaaggggtcccgatccagaccccaagagagggttcttggatctcgcacaaggaagaattcatggcagggctgtaaagtgaaagcacgtttattaagaaagtgaaagaataaaagaatggctactccatggctctagacagagcatccccgagggctgctgattgcccatttttatcggtatttcttgattatatgctaaacaaggggaggattattcaggcctcccctttatagaccatatagggtaacttctgacgctgccgcggcatttgtaaacttatggcacacgtatgagtgtagcagtgtggactcccagaggacactctcctagtcctctcggttatggtgaggtgtggccattttattg

SEQ ID NO: 106747 - DNA, 399 bp, Homo sapiens
  misc_feature (1)...(399): n = a,t,c or g
ttttttgagacggaatctctgtctgttgcccaggctggtctcaaactcctgaactcaagtgatctgcccgcttcagcccccaagtgctgggattacaggtgtgagccactgcatctgaccggaaaggatgtatttttgctcaattagcaacacttctgggtctttaatgtcttttctatggctatttgatattcactttatagagaattaatgcctgtattgttggacatttaagttgtttccaagttttcaccattataactgtatttgggtgtatatattatattcttgccaggctgtaagctttactagcagagaggaaattttaaagctttaaaagaacgctgagctagatctagcttctggctctgtgtgtttattgaccagnggtgtgccttg

SEQ ID NO: 106748 - DNA, 471 bp, Homo sapiens
  misc_feature (1)...(471): n = a,t,c or g
gggcngtcttaagctagcgtcgacgaccggncggaataacgggtcgacccacgcgtccgggagtctcgctctgtcgcccaggctggaatgcagtggcgggatctcggctcactgcaagctccgccttccgggttcacgccattctcctgcctcagcctcccaagtagccttattcttaaatagaaaataaccatggttcacctgtgagttttactcnnctctcggggganccttgttttacgtgtgagtcgagttctattctctggtgccccgagggaccttactctcttaaagacaattccccccaggccctctgcgggagtaatatacccttattacgggaagcacacctccaatacttcctttcccagtcgccacgcttagcctgtccgccgctctttgtcttcggcccgctgtgctcccgagttgattcgtgatgccacaccgtgcgtagatcccttctgttcgtcc

SEQ ID NO: 106749 - DNA, 605 bp, Homo sapiens
  misc_feature (1)...(605): n = a,t,c or g
cccaccatggtgctgtctcctgccgacaagaccaacgtcaaggccgctggggtaaggtcggcgcgcacgctggcgagtatggtgcggaggccctggagaggatgttcctgtccttccccaccaccaagacctacttcccgcacttcgacctgagccacggcgtcagctcctacctctgaccccagcttctctctgattcccacaggccccatgcatcctccctgcctcactcccctcagcccctgccgaccttagcttatctgggagagaaacaaggcctggtgcctgtgaggaagagaggtcacccctaccctccctccccgcttgcctgcctcaccctcaataaataaattaattgttgtcatggnnnnnnnnnnnnnnnnnnnnnnnnnnnnnnnnnnnnnnnnngggggggggcccttttaaagaaaaaattttttccccccnnnnnnnnnnaaaannnnnnnnnnnnnngggggccccaaaaaaaaatccggggggcgggttttaaaaccnnnnnnnnnnnaaaacccggggggccccccaattttatgggtgggggaaaccccccctttttcccggggggggnnnnnnnnnnnnngccg

SEQ ID NO: 106750 - DNA, 477 bp, Homo sapiens
  misc_feature (1)...(477): n = a,t,c or g
ggtggctcctgactgcgtgcgttgacgaccggncggnnncccgggtcgacccacgcgtccggttttgccatgttgcccagcctggtctcgaactcctgacctcgggtgatccgcccgccttggcttcccaagatactgggattacaggcataggccactgcacccagcctctttttctttttacagtattttaaatactgggtattgagaatccagattgtaacagctggaaaggctggggttcttaaggtggtagagaaaataaattttagaaaaccaaaacaccaagagaaaaaccaaaggtcccaggaaagttaaaaggaagtacctgaaccaagcttgtccaagccatggcctgcatgcatcccaagatggctttgcatgcagcccaacacaaatctgtaaactttcttaaaatgttggaagattttttttgcattttttttttaaagctcatcagctgtcattagtggtagc

SEQ ID NO: 106751 - DNA, 390 bp, Homo sapiens
tgttaatttaacctcgagacttccctgattatccgcataatctgtcctcaaatcccctcgttgtcactgcattttgatgacacgggggacttggaaagcacctattttgtgggggatggggaagcccacagaaaagccccctgatgggggaaggagcaaccgccaccccgcccatgtgagaaaagagcccagcagccaaatgccggtgcaagtatttacttaaccttcctgagaacgcaaaggtaaccggagtgtgcgtgcgtgtgtgtgtgtgtgtgtgtgtgtgtgtgtgtgtcaaagagagagagagagagagagagacaccccccgtttaaataacccttttttggagatccaagacctcttccaaaactaaaaatatacgctgtg

SEQ ID NO: 106752 - DNA, 394 bp, Homo sapiens
atgagttaatgggtgcagcacacaaacatggcacatgtctacatatgttacaaacctgcaagttgtgcacatgtaccctagaacttaaagtataattaaaataaaaaattttagctgggcatggtgttgagttcctgtagtcccagctacttggggctgaggtggtaggatggcttgagcccaggaggccgcagtgagctgttattccacctctgcacttcagccagggtgacagaaccagaccttgttacaaaaatattttttaagtaaaagttattttttaaaaagtaattcagcctggcaacatggcgaaaccgcatctctacaaaaaaaaaacagaaaaatttgctgggcgtcgtggtaagcgcctgtaatctcagttactcaagaaggg

SEQ ID NO: 106753 - DNA, 470 bp, Homo sapiens
  misc_feature (1)...(470): n = a,t,c or g
cggcgttccgnnnnnnnnaacagtagctaccgagctaccgcaannncnaannnnggncgagcacgcgttcggagtccctgggtcccttcgtccactccttaccgtgtttaaactgtagtaatttcccagcactgctatagcaaatagccatgaacttggtgacttaaaacaacaaagattgttgcttttgttatcagaaaggggtcccgataaagatcccaaaggagggttcttggaaattgcagaagaaagaatcagagcgagtccgtaaagtcaaagcaagtttattagaggagcgaagaaacaaacgaatggctactccataggcagagcagccctgagggctgctgagtggctacttttatggttatttcttgattatatgctaaacaaggggtgaattatgagttttttgggaaagggttggggacttcctcaggaggtgaggttcctccctcacctttatatca

SEQ ID NO: 106754 - DNA, 411 bp, Homo sapiens
atggtagaagccttgagtgtatgggttctaagatttggcaaacctgtaagcatgaacttgcccagtaaccttcagtttcccttttctttcccccaaatcacaatatagtcatccacatgggacttttaaaaattaattcaatttttggagagggtcttgctctgtcatctaggatggagtgtagtgtcaccatcacagttcactgcggccttgacctactgggctcaggcggtcctcccagcgcagcctcccggtggctgtgactgcaggcacatgtcaccactcctggctgatgtttttaagttttgtgtagaaggtgtgtctttggctggtcttgaactcttgggatcaagcgatccttcttgcttggtctcccggggtgctgggattacagatgtgagccatcgtgcc

SEQ ID NO: 106755 - DNA, 427 bp, Homo sapiens
  misc_feature (1)...(427): n = a,t,c or g
cccacgcgtncggatcttggctcactgcaacctctgcctcccgcgttcaagggattctccctgcctcagcctcatgagtggctgggattacaggtgtgagccaccacgcccagcctgttgtttttttgttttgagaaacagcctgggcagccgagtgagaccctgtctctgaaaaaataaaacaacaacaacaaaacaaaaaacaaaaaaacctatcttgaaccattcccctctcacgacaaggtcttaatgggggcagataatatgacagagagacattcagagcaggcagaggtgtcatcgatttgattcacgagtctgaaatcttgtttttaatgtttaagcattactctttgacaattgagagaaaacaatccccctgggaggaggaaagtggccaaaagaaaatggaacagctgagaaagaa

SEQ ID NO: 106756 - DNA, 378 bp, Homo sapiens
caggtgtgagccactgcaccaggcctaatctgctagtttttaagttctttgtagggtcttggctgttatgtccagactggtctcaaattcctggcctcaagggatcttcctgcctcggcctccaaagtgctgggagtataggtgtgagccatggtgcccagccacattttttagtttttattttatttttcttcaatttgctgcagttaggctttcctcccaacaccactccaagacatttcattgtcaagattagcagtgattttgttgctaaattcagtggtccattcttttactagaggtcttttacttgacctctgttagtgacttgcttatcactttgtcctgttagtgactcttgacagttgatttcttcct

SEQ ID NO: 106757 - DNA, 341 bp, Homo sapiens
gggggccacaccgtgtcccagggagcccagcctattcccgttggctggctgggcccctctcagctgctgggccccacctccccactgcacccaggggacaactccacctggactgatgggcacaggaggcaccaatagcgattattgggggcaatgcgaggtctcctcctatgcccttcctacccctgagtgggacaagaagggccttgagtgcccaggagtgccccacgttctgagaaggggccggccggagggaggggacccggcagggagatttcggttttgaggtttctaaatacattaaagttatttcttaagaaaaaaaaaaaaaaaaaaggggg

SEQ ID NO: 106758 - DNA, 406 bp, Homo sapiens
aatgaagtttcccataatgtattataagaacatacactcttccttaattgagggcagactatgttgtttaattgtgtggtgcaacgggttgggagtttggggacagtgaacagaatgggagattgagaaagggaaagaaaagtgacaatgtacaaaatgaattcctctgaaaattgcaaggaactggaaaaaaaaagcaatattgagtaccatatcaatatgtagtgaaaagcttgagggcttttgaacagagagatgtgggtttgatcttttgtcacttggccaggtgcagtggctaacgtctgtaattccagcacttgaaaggctgaggcaggtgaattgcttgagtccaggagttggagaccagcctgggcaacatggcaaaacctcatttctttaaaaaaaa

SEQ ID NO: 106759 - DNA, 478 bp, Homo sapiens
  misc_feature (1)...(478): n = a,t,c or g
cgctgcctttgatatcgtangcagtgncgnggaactcgttgcagggagccgagatggcggcagcacagtccagccttttttcggcatcagagggataccgtggagagagagggagagggagagggagagggagaccggggagagggcatcagagggagaccgtggagggagagggagaccggggagagggagagggagaaaagtattactcttaaggatttgtgtatggagaagggtattgaggttgtggaatagaggtaggattggtgttggaggaagggttacttaccttatggaatcggaaatttgagacaggtttctgagtgaaaataggtaaatgtggtattgtaatataataagaaatacatatttggtctctgttcctggttcctggcacacagctcttaaaacccttggactgaccaaagtactgtaataaatgtctttttgtatgctaatgagatgactggtggctggg

SEQ ID NO: 106760 - DNA, 483 bp, Homo sapiens
  misc_feature (1)...(483): n = a,t,c or g
cgcgcgcatcgagttcctagcnatngncgnggaantcggctgagatgggaggatcacttgaggccaggagcttgagaccagcctggataacatagtgagatgagggcatctctactacttagggcacactggcatgctcctgtagtcccagatactgtggaagctgaagtgggaggatcacttgagcctgaggctgcactgagctgtgatagcaccactgcactccagcctgggcaacagagtgaggccctctctcaaaaagtaaataaaaaataaataattgcgcttacatatttatcttaccaatgaagattgagttcagctgcctgtaacagaacaccaaaaattgcaatggcttgagcaaagttaagtcatttctcttttatatagaagaatacagaggtagtcatccaggacagatagagttgtggtcatctatttcttgcaccttgctaacatttgtcttccaacctgaggatcatt

SEQ ID NO: 106761 - DNA, 476 bp, Homo sapiens
  misc_feature (1)...(476): n = a,t,c or g
agcttgatacgattaccgaactgtcgaangaccanngnnnnggaattnccggggcgacgcacgcgttcgngactcattaaattatgataatcatatctaccaaatgcccctcatttacataaatatgggactagcggttaccatctcacttctaggagatactagtatatcgctcacacctcatatcctccctactatgcctagaaggaataatactatcgctgttcattatagctactctcataaccctcaacacccactccctcttatccaatattgtgcctattgccatactagtctttgccgcctgcgaagcagcagtgggctgggaagagtgcggctttcggtccaggccaacggctttgatcctggaagggccgcttcgcagttgtcagccacgcacatgtgtgcggaggccggcgtgcaccaggcgcgggccggcctttgtgggaaaaaataggcactccattggcggg

SEQ ID NO: 106762 - DNA, 468 bp, Homo sapiens
  misc_feature (1)...(468): n = a,t,c or g
ccgcgccatgaggcatgatgacnatctagtcagngcggtggaattccaggcttttagttaactcaagaaaaaacagccaggttaaaataactgcaacgtgtgtgtgtgtgtgtgtgtgtgtgtgtgtgtgtgtgtgtgtatacatatatgtatatacgtatagtgtatatatgtatatatacgtataagtatatatgtatatatacgtataagtatatatgtatatgtgtatatatacatgtatatatgtatatgtgcgtatatgtgtatatatgtatatgtatgtgtgtatacatatgtattgatagtaagggcagataactctctcaacactctgtgtgagggaggggttttatcacccattttataggggaaactgacgcacggagccaggtaaaagtccagggatctttgagtccccacccccgggaaataaggggggagaaatggagctggagttccactgtg

SEQ ID NO: 106763 - DNA, 1058 bp, Homo sapiens
gatcaggggacctcccttgggagatcaatcccctgtcctcctgctctttgctccgtgagaaagatccatctacgacctctggtcctcagaccaaccagcccaaggaacatctcaccaattttaaatcgggtatacatccagatggcctgaagtaactgaagaatcacaaaagaagtgagaatggcctgttcctgccttaactgatgacactgccttgtgaaattccttctggctcaaaatctcccccattgagcaccttatgacccccacccctgccagccagagaacaaaccccctttgactgtaattttcctttaccaacccaaatcctataaaatggccccacccctatctcccttcactgactctcttttcggactcagcccacctgcacccaggtgaaataaacagccatgttgctcacacaaagcctgtttggtggtctcttcacacagatgtgcatgaaattgcatgaaatttggtgccgtgactcggatcgggggacctcccttgggagatcaatcccctgtcctcctgctctttgctccgtgagaaagatccacctacgacctcaggtcctcagactgaccagcccaagaaacatctcaccaatttcaaatccggtaagcggcctctttttactctcttctccaacctccctcactatccctcaacctctttctcctttcaatcttggcgccacacttcaatctctcccttctcttaatttcaattcctttcattttctggtagagacaaaggagacatgttttatccgtggacccaaaactccggcgccagtcacggactgggaaggcagcctttccttggtgtttaatcattgcagggacacctctctgattattcagccaggcttcagaggtgtcagaccacgcagggacgcctgacttggtccttcacccttagtggcaagtcccgcttttctgggggaaggggcaataacccatcaaccccttatccttctgccttagcagcgagttccgcttttttgggatagggacaggtgccccctctcatctttgcgctccggcgctcgc

SEQ ID NO: 106764 - DNA, 415 bp, Homo sapiens
agaaagaaatactctgacttgtaaagggctagggagaaggcaatgccaaatattgaggcagagaggaacaagataaagaacatggtgggggtggaaggtgaggtaataaacagggcaggagaattaattccttcgggttattttgatttgccataagatgtatgggtgtgtgtgtgtgtgtatgttgcatgtatatgtaatggtatgtgtatatatatgtgtgtatgtgtgaaatcatggaaattaaaacctgagttaaaatgtttatgtataagtgatgaggttggatgggttctcacccagtgggcaggaagagaagagaattgaggaaggatccctggaatgaccagtaagtattagttgagcagaaaaaattagaagactgagagagcactcacagagggaagggagaaat

SEQ ID NO: 106765 - DNA, 398 bp, Homo sapiens
  misc_feature (1)...(398): n = a,t,c or g
tttcgtattttcaactaagtacactggtatcttacattttgcaagtaaattttttataaccaaaaaatataaaatggttaccctagttgttttcaaaagatagggtccctctctaatctgtgtgaatttgtaaattaacagcaacagtgaaaagatggggtcccactatgttgcccaggatggagtggagtgcagggactattcacaggtcatggaatagcacactgcaacctcaaactcctaggttcaagcaatttttctgcttcaatttcccaaggagctgggactacaggcatcgttgcaaatggctagctctcaatttcaatatcccaactgaggatacagacttgtcacttgtggcaccaacaattactatttttgtctcaattctagtaagn

SEQ ID NO: 106766 - DNA, 1159 bp, Homo sapiens
cccgtggagcccaccccgggcggttaacctcgggtctcagtcccgggctgtgaccctccccgaggccccgcccccacggcgaaggcccggggcagttaacccttctcttgctgcggcagagtccgcacccgggcaggcccatctcagaattaacgctttgatggcatcaccgcgtcgggaatccctggggatggtgttctccaccgtcaagacctttgagccgcctgagcgactaactcctgcgcccctgaggggacattttattcagaaattaaatcattcagagttccagcactgtcgggggtcatcgggctctgtccaccgccataggcctagcattgtcaccaacggagccatagagggacctcggcccaagctggggcctcttcattgtcgaagaaggcctcttgccagaccaggatctgtgggcgcggccaggctggaggactagggcggtggcagtggccaggtgagtccacatggcttggggtgggccctcaattgctccctcctctctttcgctaccccctgggctggagggaggcagggcacccagccggaatggcatgatcctgaagcccaacttccacaaggactggcagtggtgtggccatgtggctcagccagcccatggggaggaccctgcagaagcaaggtggccagcaaaagcaggctgcatggcccactgatatgggcccatccacccatagtaaggtgccccatgctgaggcatcactaccaaagcacaagctggcaggggcctcagcttggaggagtttaagggtggctggcatttacaagaaggtggcccagaccattggcatctcttgaggatgcaaggaggaggaaccagtccaccccaggccctgcaggccaaggttcagaggctgaaaggaggaccgctcctcacttatcctcttccccaggaaagcccttggcccccaagaagggagacagttctgctgaagaactcgaactggatactcagctgacaggaccagaaatgcccatcggcaatgtctacaaggagaaagccagagtcatcgctgactaggaggaaaacttccaggccttgttagtctctgtatggcccatgcaaatgcccagctcttcggcatataggcacaaagagccaaggaagctgtagaagaggacgctt

SEQ ID NO: 106767 - DNA, 686 bp, Homo sapiens
  misc_feature (1)...(686): n = a,t,c or g
aaaaaacccccaagtgtattataaggcaataaattcctatacgaagcaaactaaaatgcagcaatattaaggtataaaaacaaagaggaataattccattgaaccttgattctggaaactttgatccacccagcagtcatgatgttagactcattgaaaagaatgtatttctaatgcatgatgcgatcggtctatagatgtgtcatggaaacttggttgcaacttcaagacaaaataaaaagtaaacatttacatgaaaaatggtggatatggaaggtggagaagagaggagataacagctttatctttcaaaatagagaattgagagatggtaccaaaagctgatgaagtnnnnnnnnnnnnnnnnnnnnggacccttaatataaacctttaatttacaaatttaaccccaaaaaaaacaattttattgatccaaatgtcaaacactggaaatgtccaaaattttgaaagaaaaggggggtataattgacctaaaccctaaattttgtttgggcacaggggttaaaaataacccggccttggaaaaatgcacctgtattcccagttatttggaaggttaaggcgaaagaatcttttgaccttgaaaggcgaaatttgcagtgacccaaaatggccttactgccttccaccctggaaaacaaaaaaaaaccttgtttaaaaaaaat

SEQ ID NO: 106768 - DNA, 474 bp, Homo sapiens
  misc_feature (1)...(474): n = a,t,c or g
aagtgaggaaactaaggaagagagtagggtggatagataaaggcacagacctcgctcagttactggccaggaagcccagaacctaatggtaccctcattattcagaaactagccatgaagccactgtccccctagagctactcaagacaggacctaagtgaggttgaatgctgctttttctaatcatttaggggatatatactttctttctttctttctttctttttttgagacagagtctcactctgtcacccagggctggagtgcagtggtgcaatctctgccttccgggttcaagtgattctcctgcttcagcctcccgagtacctggggaccacaggtacattgccaccatggttcagctaattttttgtattttttagtaggagacagggtttttggctatgttgggcccagantggtgttcgaantcctggacctcaggggatcccaccccgnctcagccttnccaaa

SEQ ID NO: 106769 - DNA, 377 bp, Homo sapiens
  misc_feature (1)...(377): n = a,t,c or g
ttcagggtttcactatgttggccaggctggtctcaaactcctgaccttgtgatctgcctgccccagcctcccaaatgctgggattacagatgtgagccactacgcccagccgcatttttaatagttttatagccagctgtagctatttcttttctgaagtcttcccaagagtttaggcaaataagaatcaatgtcttctgaataataaccatctgtacaacacatacagaatttgaatgtctttattgacaagctgtgtactacattaaatgaggaaaagtctaatatcactcttttataatttatttttcacatgatgacaaacattaatgagtgtgaaactgtanatactgctagccaaggttttgaacagaaga

SEQ ID NO: 106770 - DNA, 399 bp, Homo sapiens
aatacatttgtgggaaagacttttaagattttttacttacctggtttcaaatagcgctttttttttttttttttttgggagaaaattccccccctgaaggtgggttttcccaaggggaattttttgggtttaaaaaaaaagggggaaaaaatttacaacttgggggcccaaaaaaaaaaagccagttttggggggatttttggcttttaataaggggttatttttgggggggttggggctaattttgggggggggggggggggaaactttagggggtgggggcccccaaaccccttttaagaaaaaaaacctcctttttttggtcccaaaaaaaattttttttttctttttttacccccaggggggtttttttaggaagttttgggttttttggaaggc

SEQ ID NO: 106771 - DNA, 425 bp, Homo sapiens
aatacattttggttgttttgtttttttgttttttgagacagagttttgctcttgtcacccaggctgcagggctggagtgcagtggcgtgatcatagctcacaactcactgttgcctccacctcttgggttcaagtgatcctcctacctcagcctcccaaagtgctgagattacaggtatgagccaccatgcctgtccaatttttaaaaaacactcctaagagaatccccacaatgagagaccaaccagggcaaggtcacccaagagtcccagagagaatccaggttttccgaccaccaacccagccgcctgtccagtacatgatgatgctactgcagctggagagaaaggaggaggaaggaaggaggagaccctcagcttcaggtcactttccctattacctggctgccattcagggtctctagt

SEQ ID NO: 106772 - DNA, 423 bp, Homo sapiens
aatacagtgggggttggaggaggaatgaataggagaagcatgggatttttagggcagtgaaaatactctgtatgatactacaacggtggacatatgccacacatttgtccagacccacaggctatacagcaccaagagtgaaccctaaactatggactttgggtgataatgatgtgtcaatgtaggttcattgattgtaacaaatacggcacttgggtgggggttgttgataaggagaagctctgcatgcatggggcagggagatatgggaaatctctgtacattcctttcaattttgctatgaattaaaaactgctataagaatataaagtcttcaaaaatctccaggccctattatggtaagataaatagtcataaaaatggttaagatggcaaattttatgctacatatattttgatacc

SEQ ID NO: 106773 - DNA, 368 bp, Homo sapiens
  misc_feature (1)...(368): n = a,t,c or g
catttttccccttattgaaagaaaaaaaaccccatcaaacaaaaatgccctgcaagaatggacaaatgggcattctcagatgaaggaaaactaagagaatttgtcgctaacaaacgctctcttaagagtggctaaccaggccgggtggtggctcatgccggtaatcccagcactttgggaggccgaggagggaggattgctggagcccaggagttcaagaccagcctgggcgatgtagcaagaccccatctctactattaagaaaaaagaaaattagctgggactacaggcgcccgccaccgtacctggctaattttttgtattttcagtagagacgtggtttcaccatgtaggccaagatggtctcn

SEQ ID NO: 106774 - DNA, 418 bp, Homo sapiens
  misc_feature (1)...(418): n = a,t,c or g
attatcgggtcgacccccncnttcgcaattagtgtattaaaataacgtattttctatctctgctaatttttccaaatgttggtaatgtttctatgtatcccaaataatatatcatttagtcttatgtttctcagtatgaattacctgttgctgtgtgtgtatatacacacacatacatacatacgtgtatgtgtgtgtatatatatacacacatacatacatacgtgtgtgtgtgtatatatacacacacatacatacatacatatatacatacatgtatttatatacatatacatatatacattcatgcacacgtacatatatccctatgtatgtatggtactgttgcaattaacactgtaataaatgcgtttgcgctcaaatatattcacctttttctttttttttaaaaatattc

SEQ ID NO: 106775 - DNA, 1611 bp, Homo sapiens
atagataccgtatgatttgattaacctcagcttggcacgaggcctcgtgccacgctccgctgatgcctgtctgcagaatccgcaccaaccagcaccatgcccatgactctggggtactgggacatccgtgggctggcccacgccatccgcttgctcctggaatacacagactcaagctatgtggaaaagaagtacacgctgggggacgctcctgactatgacagaagccagtggctgaatgaaaaattcaagctgggcctggactttcccaatctgccctacttgattgatggggctcacaagatcacccagagcaatgccatcctgcgctacattgcccgcaagcacaacctgtgtggggagacagaagaggagaagattcgtgtggacattttggagaaccaggttatggataaccacatggagctggtcagactgtgctatgacccagattttgagaaactgaagccaaaatacttggaggaactccctgaaaagctaaaagctcttacttcaggagttttctgggggaaagcggccatggttttgcagggagacaagatcacctttgtggatttccttgcctatgatgtccttgacatgaagcgtatatttgagcccaagtgcttggacgccttcctaaacttgaaggacttcatctcccgctttgagggtttgaagaagatctctgcctacatgaagtccagccaattcctccgaggtcttttgtttggaaagtcagctacatggaacagcaaatagggcccagtgatgccagaagatgggagggaggagccaaccttgctgcctgcgaccctggaggacagcctgactccctggacctgccttcttcctttttccttctttctactctcttctcttccccaaggcctcattggcttcctttcttctaacatcatccctccccgcatcgaggctctttaaagcttcagctccccactgtcctccatcaaagtccccctcctaacgtcttcctttccctgcactaacgccaacctgactgcttttcctgtcagtgcttttctcttctttgagaagccagactgatctctgagctccctagcactgtcctcaaagaccatctgtatgccctgctccctttgctgggtccctaccccagctccgtgtgatgcccagtaaagcctgaaccatgcctgccatgtcttgtcttattccctgaggctcccttgaactcaggactgtcctcgaattgtgggtggttttttgtcttctgttgtccacagccagagcttagtggatgggtgtgtgtgtgtgtgtgttgggggtggtgatcaggcaggttcataaatttccttggtcatttctgccctctagccacatccctctgttcctcactgtggggattactacagaaaggtgctctgtgccaagttcctcactcattcgcgctcctgtaggccgtctagaactggcatggttcaaagaggggctaggctgatggggaagggggctgagcagctcccaggcagactgccttctttcaccctgtcctgatagacttccctgatctagatatccttcgtcatgacacttctcaataaaacgtatcccaccgtattgtaaaaaaaa

SEQ ID NO: 106776 - DNA, 426 bp, Homo sapiens
cggacgcgtgggcggacgcgtgggttttgtgagggcttaactttttttttttttttttgagtcagggccctgctgggtcactcaggctggagggcgcaggggaatgatcatggctcactgcagcctggatttcctgggctaaagggatccccctgccttaccctccggagaagctggaactacaggccaggtatgtgccgccacacccagctagttttcgccttttttttttttcccagggaaaaaaaatttttgttgggtgccccaaccgggtttaaaactcggggcctaagggggccctcccgctttggtttccaaaagggtgggaataagggccaggaacccccaccccgggcaaaagggttaatttttttagaacccgaaagaggccaagccttttttggggttttttttggcccaacccaa

SEQ ID NO: 106777 - DNA, 398 bp, Homo sapiens
gaattgggtagattagtgaaatcctttattcctgctgatttttttttctttttaagacgaggtcttgctcttttattcaggctggagtgcagtggtgtgagcacagctcactgcagcctcaaactcctgggctcaagtgctgctcctgcctcagcctcctgcaaagctggaactacagaggcagcactcaagctctgattctcactgttgcccagcgtcagttgtttagcagacatgatttagattgctacaacccgtttttgtggtgtgtttaatggaagtacaagattaaaactggcaagctgactgcatgttacatttccaaagcttataaatggtttgaatccagaatgtctgtggccctttccaagaatatttggtttctctaaaaagcaaca

SEQ ID NO: 106778 - DNA, 433 bp, Homo sapiens
cggacgcgtggggaacaaacattcaacttttcttatcacctcaaacttggagaaagagagttaatttgggcaaatctacaagttctgtttttgtttctatattgccattgttgattaatactcactgtacttgtagttgagacaaataggtgatattgaattttacactctattttctttttcactaaaacattggcatcttagtgatacagaaatttaaggtatacaattgcagggagccgaaggcctgtgggatgtgaccaactcaccattctgctggaggctatatgatcaaaaaacagtttatcatgaatgcaggatgtgggcaaactcacactgccctgccaccaaaaggtttgctgagggacatcactccccggtgttgggctccttgaagttacctactgagataatcaccgcctattgttaaagg

SEQ ID NO: 106779 - DNA, 1552 bp, Homo sapiens
tcccgggtcgacgatttcgtccaggaggcggggcgcctgtgggagccgtggagggcactttcccagtccccgaggcggatccggtgttgcatccttggagagagctgagagctggagtacagaacctgctaaggccatcaaacctattgatcggaagtcagtccatcagatttgctctgggcaggtggtactgagtctaagcactgcggtgaagaagatagtagaaaacagtctggatgctggtgccactaatattgatctaaagcttaaggactatggaatggatctcattgaagtttcaggcaatggatgtggggtagaagaagaaaactttaaaggcttaatctctttcagctctgaaacatcacacatctaagattcaagagtttgccgacctaactcgggttgaaacttttggctttcggggggaagctctgagctcactttgtgcactgagtgatgtcaccatttctacctgccacgtatcggcgaaggttgggactcgactggtgtttgatcacgatgggaaaatcatccagaaaaccccctacccccaccccagagggaccacagtcagcgtgaagcagttattttctacgctacctgtgcgccataaggaatttcaaaggaatattaagaagaaacgtgcctgcttccccttcgccttctgccgtgattgtcagttccttgagggctccccagccatgcttcctgtacagccctgcaaaactgactcctagaagtaccccaccccacccctgctccttggaggacaacgtgatcactgtattcagctctgtcaagaatggtccaggttcttctagatgatctgcacaaatggttcctctcctccttcctgatgtctgccattagcattggaataaagttcctgctgaaaatccacatctcccctgggtccggtgttctggaagtgagagagacaatgtcacacttcaaggaggcagctctctagacaggaaggttattcacgtcccatgtcaagtctagctagagttcagagcaattgagaagtgcaattttatctcctgcctttcattctataccctgcttctgaaccatcgtgttcaactgtgaaactcacactttggtgaccctgactccaaaacttaatacacccaaggtcagccccagtgatctgcttcatagccaggactttgggtgggtcttcccagggagtagggcaccctcagagaatgtggctttggacttcatcacagctggggccttttgtgtcacttcagatctaaacttgtaaccgtgctagatctgtttctaacgtgacaacatcacgaaccacgagtccagaagcctaatccataatcctccctcctcatgacaaagtctcatgctctgtgctcaacatggttagctgcacaagatgtaaaccaaagcttcactgaaccctcgacccagatcggtaactcaagtgcatcaatcataatgaacctccccgaactcagtatttatgattatttttgaggcagggtctcaatctgtcggccgggctgggagtgcagtggcaggatcaggg

SEQ ID NO: 106780 - DNA, 915 bp, Homo sapiens
attgagaccccctgagacctggacggccttcccgggacgacccacgcgtccgcccacgcgcccggaaacgagctggcggagaggagcagaaggcaggaggggaaatctggcacaacggctgggagaggaaacttgatgcttctgggccaccatttgccagggcctcgctcgagccggcgcctcggttcctgcccagctggatttggggggcagcattgcctggcgcagggagatcaaatgagactgcaaagaagcataaaatgaatagacaatccaaccaaccaaagaccgggggcagcagcaggccagcaagacggcatcttctccttcccagcctagaagccctgtgaaatcgaggatcttccccctaaaacacatacacacaagatatgtgcaatcaagctgccaccgcttggtaaaaagctcatggtgcctaaccaaaaaggatcaggaacagatccttgaatcagctgtcacttctatagaatgggatttttttttccttcctccttaacctgcgctggaaattgccgttggctttatacatctctatagagagaggctaaagagtcttgcgtgagaaagaagcaatttacaatgcaaatagaggcctgtgaagggacggatgctgctgctcactcgtaacagcttgctgcaccttaatagctggttttattttctgatattaatagatgaattgttggctaacgctgccggagattacttgctgaaaggaaaaagaaaagttcggaataaactctgaaggcaacagatctcgtttggatgttttagccgcgcacacacacaaacagaacccaggtcatatttacataaaaggaggaatcttaagcgcggcaagtatcctggacgaccactcttcggtactgccagaaagacgaaatcgtcgacacggga

SEQ ID NO: 106781 - DNA, 393 bp, Homo sapiens
ggttatttatttattattattttttgagacagagtcttgctgtgtcgcccaggctagagatggggtttctccttgttggccaggttggtttcagacccctggcctcaagtgatctgcccgcttcggctcccaaagtgctgggattacaagtgtgagccaccgcacccggccagatgtgaggggttttaaaaaatgtgtttacagctagaaatgtcccacttggcactgcttttgctacatcacataggttttggtattttgtacttctgttttcatttgtctctaagggatttttcattttctttttctttctttttttttttttttttttaggaaaaggattttttttttttttcccccggggggggggggggggccaaatttaggtttacc

SEQ ID NO: 106782 - DNA, 1848 bp, Homo sapiens
ttttttttttttattgcaaaactgaggtttaaaggacaaatacattatccatttaaaaacagatatctaagacaaaataactcaaacattctgaggtcagatacttgcttatgcacactgacatccacaactgctaccggtgcggaagcaacgccagggactggttctgtatagtcacagccgagcttgaacacctttagctcccgacacctggatgtgtttctagagaatgacaggctgagactgtagtttggtttaactactggctttgttgcaataatcctcgaataccacacagtggcagcttttggcatcataaaaatgggacataactgaagggaaggcttcacacatcacaaagaccgggttggttaatgactaaatctcactacatgaatacgcaatcttaaattactgtgcttatcagccatttctcgcattcatgtgtaggaaaaaccatggagacgtgtccctggagggcaggttgtaaactgcaacagttactaggaagtcagtcctttacatgctcgtaacatgggcgagctcttgagatgggatctgggtggcaggagaggttgcttttcagaggaaagctgcctgggacccagcatggtggagcagctttgaagctgagtcccctctgggtgcatactgggttccaggggatgatccttggcttgagggcaggctgcttgatggaaggggacgctccacaataagaaagaacaaaggctttggtttgtcctcatcctccagtctgtcccacacacctgccatctctgggttttggtggccccagtgagtggctgtggaaaaggaggagggccaggtgggtgctggcagctgtcctgcaccactgctggggtcgggtggagttgctggtggagttctgtgatagcagaattggcatctcctttctgcggaagcaccagtctgcacagaaagcataggatgtattgtattaatgggctagagacaaagtcgtcccagagcccctccagggccaggcaggtttataaggtagtggtaggaaaaagcttggtggctgaggcagtggccagttttgagaccagctgaccccccatgaagaaaaactcagcagtccttggttattcagtgtttttgatgaggcagctagctggagcgctggaccatgcagaatttgttgcaagaacttcagacagacgtggaaaaactagagatggggccctgctggcctgcacagaagggacaacgaccaccatttggggtccttttagcatggtgggctgccctggccgaggtggccaagatggcacctgtttcctgcctcagaagaaaaggcactgacgcactgaccctttgaggttgtgtggggtgtggtcagtgccctcctgcctgagggtcaagtgtgttttcaagtcaacttcagcagacctcatttaaccattttttgttcccttaaaaaaaaagacccaaaaaaccaaatcccaataaatatgttatttttctccatcacaatattgcttagaaaaataagagccggcaagcagcaattgtcctggaggcccagagtgtctcctggtgagaggcagagggtagagcatggcatgggatgggcagctgtctgttgtgccgtcggtctgtaggacacaggggcgttaggatttcacagtgacacgatgcttgaagaacagagaggtccaagagtccaagaatgagatcaaaataaatcaggagactgctcccgctggcctaactggacaccaaaagctccacttgggatgcagtgaggtgggcggagaaagctctgggaggagctcggctttcaggtgggcagggagccagcggcacagttggtggcgggag

SEQ ID NO: 106783 - DNA, 545 bp, Homo sapiens
cgcctctggcttaggtactccagcctcacctggtctccagatggacctcaactgctcctgcgacactgataaaggatgccgggtttcggggccttgggatctccattttcatgccagaggatagaatgtccctgcggcaggagctgggtcctgcacttatgccagcttctgcaaatgcaaagagtacaaatgcacctcttgcaagaagagtgagtgtggggccttccctgggaatcagggtgctgggcagagtcagaggagggaaccgagagctcagcaggcaggagcaggacagtgacaagcttcccacatcccctttctggtaagtgattctggatcacagctggaaaaacacaagatagttgattcccaactttcattcttaaaatggggaaactgagggcatgtgcgtgcaccaacctgccaagcacagacctgacacttcaggactttcctcacttaagtgtacgggtttggggaactggctttcctttgtccctgtagccccagtcactgcctctccagtcttctgtcatctcccaggg

SEQ ID NO: 106784 - DNA, 668 bp, Homo sapiens
gccaagcagagagggcaagagaatgacaagcatggtcctggggggccgtggacgcatggtcaccgcgggagcagtggcggaggtggctgtgagttggaccctggcagggagcaagacccagaggctggtggaggaaacaggaccagcgagcagcctcctggtatctgctgttaatcctcatgactgctctcaaacctctcaactctactgaagacacagacacagtcatgcccacagctccacagagagttcctacctaaacacccgtgcaaccagcacgtgatgaagacacagatatcaccaagaacggtttgatgcctcctacagaagtgtccattgcatggggggggttcctgagctgaacagcaaggttgtttgccatcttcatctccctaggcaagactgccctggaagagcgagtgatgtggatggagacagggaatactgaggtctgctgacgtcagtcgatggcggccatatggatggacggcgggcatgtggacggacggtcagacatgtggacggacgggcgggcgtgtggacgggcgggcgggcgtgtggacgggcaggcgggcgtgtggatggacggcgggaagtgggatggatggttttgggtggttgacacccaatactgcgtgcaaaaggcttgatgtaggtttcccggggtc

SEQ ID NO: 106785 - DNA, 439 bp, Homo sapiens
  misc_feature (1)...(439): n = a,t,c or g
gcagacagccgnttnnggtaagnnacnagcccccgcaatacattgtggggtgaattctttgccaaagttatgtttatcacgcagaccagcacgttgcccaagagcgtgaagttctcaggatccacgtgcagcttggcgcagtgcagctcactcactgtggcaaaggtgggcttgaggggggcgcaagtgagccaggccatcactaaaggcaccgagcactttcttgccatgagccttcaccttagggttgcccataacagcatcaggagtggacagatccccaaaggactcaaagaacctctgcgtccaagggtagaccaccagcagcctgcccaaggcctcacacgaaatcgtcgacgatttcgtaaaaatcacataattacatatcaattgatttagaaaaagcaaatgacaaaattcaatactcgtgaatgataan

SEQ ID NO: 106786 - DNA, 506 bp, Homo sapiens
ggcttgatcctctagagcggccgcatacagtgggtcagaggagaatgcaggcctgaagcccgtcctggccccgaagttctgcccgcccatgctcaggtcactgccttctcccaggactctgggaccatggaaaagccccatgtctccgagctgcccggcactctcaaggacatggcttcaggaaagggaggaaggaagggtgtgggctctgggctgcggggtggacaaagaaccccgtgccaacctggagggcaggggcaggagaggaccaggagtgacgtctccgccccctgtgcccagcgttcagaacccacccctctcctcaacgcagacacggtgggtcccaagccacacgccccgttttatttaccccccccccaaagcacatggaggggccgaacgcaccaattttaggggaccagagaattaccgctccgccccccgagatattataccggccgccaagggccgcaacatgcgacgcgctgcgccgcggataggccccg

SEQ ID NO: 106787 - DNA, 465 bp, Homo sapiens
aatacactttgtggcctctgtaacatctagtaaggaattctcccatattctccctgcgttctgagagcgccgaactctaaacgagtgaggaaatgtgggtgcactaccccgcggcacctctcaaggcaactaggaaatgcgggtgcactaccccgcgggcacctctcaatgaaacgaggaaatgcgggtgcactaccccgcggcacctctcaaggcaactaggaaatgcgggtgcactaccccgcgggcacctcaatgaaacgaggaaatgcgggtgcactaccccgcgggcacctctcaatgcaacgaggaaatgtgggtgctctaccccgcggcacctctcaaggcaactaggaaatgcgggtgcactaccccgcgggcaccctctcaaggaaactaggaaatgcgggggggctacccccgcggacgctttttatgaaactaagaaaatagggggcggccttt

SEQ ID NO: 106788 - DNA, 2620 bp, Homo sapiens
ggcacgaggcgcagctggacccagcagccgctgtctccagtgccgcagcagcaggtagtgctcatagctctctttgtccagtgcttcggccttggtcccagcgccttcccacggagcagcactcttcaccctgcacagccttgttagcccaacagcatggtggtggaacaccccgagttcctcaaggcagggaaggagcctggcctgcagatctggcgtgtggagaagttcgatctggtgcccgtgcccaccaacctttatggagacttcttcacgggcgacgcctacgtcatcctgaagacagtgcagctgaggaacggaaatctgcagtatgacctccactactggctgggcaatgagtgcagccaggatgagagcggggcggccgccatctttaccgtgcagctggatgactacctgaacggccgggccgtgcagcaccgtgaggtccagggcttcgagtcggccaccttcctaggctacttcaagtctggcctgaagtacaagaaaggaggtgtggcatcaggattcaagcacgtggtacccaacgaggtggtggtgcagagactcttccaggtcaaagggcggcgtgtggtccgtgccaccgaggtacctgtgtcctgggagagcttcaacaatggcgactgcttcatcctggacctgggcaacaacatccaccagtggtgtggttccaacagcaatcggtatgaaagactgaaggccacacaggtgtccaagggcatccgggacaacgagcggagtggccgggcccgagtgcacgtgtctgaggagggcactgagcccgaggcgatgctccaggtgctgggccccaagccggctctgcctgcaggtaccgaggacaccgccaaggaggatgcggccaaccgcaagctggccaagctctacaaggtctccaatggtgcagggaccatgtccgtctccctcgtggctgatgagaaccccttcgcccagggggccctgaagtcagaggactgcttcatcctggaccacggcaaagatgggaaaatctttgtctggaaaggcaagcaggcaaacacggaggagaggaaggctgccctcaaaacagcctctgacttcatcaccaagatggactaccccaagcagactcaggtctcggtccttcctgagggcggtgagaccccactgttcaagcagttcttcaagaactggcgggacccagaccagacagatggcctgggcttgtcctacctttccagccatatcgccaacgtggagcgggtgcccttcgacgccgccaccctgcacacctccactgccatggccgcccagcacggcatggatgacgatggcacaggccagaaacagatctggagaatcgaaggttccaacaaggtgcccgtggaccctgccacatatggacagttctatggaggcgacagctacatcattctgtacaactaccgccatggtggccgccaggggcagataatctataactggcagggtgcccagtctacccaggatgaggtcgctgcatctgccatcctgactgctcagctggatgaggagctgggaggtacccctgtccagagccgtgtggtccaaggcaaggagcccgcccacctcatgagcctgtttggtgggaagcccatgatcatctacaagggcggcacctcccgcgagggcgggcagacagcccctgccagcacccgcctcttccaggtccgcgccaacagcgctggagccacccgggctgttgaggtattgcctaaggctggtgcactgaactccaacgatgcctttgttctgaaaaccccctcagccgcctacctgtgggtgggtacaggagccagcgaggcagagaagacgggggcccaggagctgctcagggtgctgcgggcccaacctgtgcaggtggcagaaggcagcgagccagatggcttctgggaggccctgggcgggaaggctgcctaccgcacatccccacggctgaaggacaagaagatggatgcccatcctcctcgcctctttgcctgctccaacaagattggacgttttgtgatcgaagaggttcctggtgagctcatgcaggaagacctggcaacggatgacgtcatgcttctggacacctgggaccaggtctttgtctgggttggaaaggattctcaagaagaagaaaagacagaagccttgacttctgctaagcggtacatcgagacggacccagccaatcgggatcggcggacgcccatcaccgtggtgaagcaaggctttgagcctccctcctttgtgggctggttccttggctgggatgatgattacctggtctgtgggaccccttggaacagggcccatggctggagctgggctgccttaggaggggcagggcccccccatgtccccggtcaagggccttttggaactgtccttccctcaaagaggccttagagcgagcagagcagctttgctatgagtgtgtgtgtgtgtgtgtgtgtgttgtttcttttttttttttttttacagtatccaaaaatagccctgcaaaaattcagagtccttgcaaaattgtctaaaatgtcagtgtttgggaaattaaatccaataaaaacattttgaagtgtgtactctaaaaaaaaaa

SEQ ID NO: 106789 - DNA, 1171 bp, Homo sapiens
cggacaagagcggaggcctgggtgagcgcggcccgcgacggcacgggctaggacagacggacgcagacggcccgacgacctgggcgttcgggcggaggggcgctggggcctgactcgcggaaggggaaactgaagcagaaagaggttacttaatgggctcaaggtcacctacctgacctaccagcagctcaatggccttcccaaagaagaaacttcagggtcttgtggctgcaaccatcacgccaatgactgagaatggagaaatcaacttttcagtaattggtcagtatgtggattatcttgtgaaagaacagggagtgaagaacatttttgtgaatggcacaacaggagaaggcctgtccctgagcgtctcagagcgtcgccaggttgcagaggagtgggtgacaaaagggaaggacaagctggatcaggtgataattcacgtaggagcactgagcttgaaggagtcacaggaactggcccaacatgcagcagaaataggagctgatggcatcgctgtcattgcaccgttcttcctcaagccatggaccaaagatatcctgattaatttcctaaaggaagtggctgctgccgcccctgccctgccattttattactatcacattcctgccttgacaggggtaaagattcgtgctgaggagttgttggatgggattctggataagatccccaccttccaagggctgaaattcagtgatacagatctcttagacttcgggcaatgtgttgatcagaatcgccagcaacagtttgctttcctttttggggtggatgagcaactgttgagtgctctggtgatgggagcaactggagcagtgggcagtacctataactacctgggaaaaaagacaaaccagattgttggaggcttttgaacaaaaggacttctctttagccctgaactatcagttttgtatccagagatttatcaactttgttgtcaaactaggttttggagtgtcacagaccaaagccatcatgactctggtctctggggattccaatgggcccaccccggcttccacttgcagaaagcctccaggggagtttacttgatagtggctggaagcttaaactgaaggagcctggggttttccttttctttttcactggattttaaaagggtgggaaacttgggaaggtgggtagg

SEQ ID NO: 106790 - DNA, 464 bp, Homo sapiens
aaacacgggaggccgagataggtaaattgcttgagtccaggagttcaagaccagcctggggaatgttgcaaaaccctgcctctacaaaaaaaaaaaaaaaaaatccccacttggggggggggtccccccacctcctaaaaaaacctgggtgggggggaccctttcgccccaaaaaatccggcccgcagggccccttattttcccccctcccctcccgcgaggccaacaaggggaacccttgtccccaataaaaggagggggggggggggggagttccctatccccctccaccccccccttgcctcacaggaagagcgctcccccctcacccatttctgcgaagtcctctccttccccccctccttgccagtatgtctatcatccccccttgttgcccctcttttttttcttgcacgcccttcgccgagcgactgcccctctcttcctcttccttgtgcgggccc

SEQ ID NO: 106791 - DNA, 1152 bp, Homo sapiens
  misc_feature (1)...(1152): n = a,t,c or g
tttcataatttccccccagggtcgtactcgtacaaaaagacgaaaggccttctttatggtaaagtgtcgctcaagaaatcggtcttttcccaaacgaaaaataaaactttcatttgccaagggagcaccattttcagctcctgccctgtactgagctctccaaagactgggcaggcaaagttccctcctggccccttttgaagttggaaagtgctcgccctgaaggacagcatcagagccaaggtgaggtcctgctcaaaggtgggcagggggctgcgctgactcctttcggccccttgccagcgatgggccggcctcgctcctcccagatgggtgaggccatcgcaagagcagatcttgctttggggttctggaaaaaggccagcggacttggcaattgatgccacaggacaacctactccccggaagttccctggtgatctttggataaagggattggccttcccgggccccagggtcatcttcttccctcatcaataatcaaggctgcggccaatcacatcccacaccttcagctgctcatcctccattctgaagaaggcgccgcccgcagcattagcaccgacatttgcccaggtctccgctggtgccggtcagagtcctgggggcccccatggagatgctccatcagggttaaagtgattcccacagctgttgcagttgtttgtaaggtccccgtactgatggacgtggagtccatgcagcccaggctccaggcccgncaatagttccctcgatgaggcagcgctcaggggtcagctgtaggaagcgcaccaccccctgcacggtgccaaggccccccccagggatggccactggctgccccccagattctgaaaactggccggttgcccatgcccttgagtaccggctgccgccccgtgccttcccaggagagcctgcacctcctggctgggtagagtggtgtgtaccaagaccatctggtcctccaagtgcacctccacatcctggacacctgccaccccttgcagggatttgcgcaccgcgtccacacagctctgacaggtcatctgcaccgcgaactccaacgtgcagagggtcccctggttccccgaatccgaagccattctggacccagtcaccaccccgagacgcagaactcctccggcg

SEQ ID NO: 106792 - DNA, 475 bp, Homo sapiens
aatacatgcttgtctatcagtcattctttcaagcaaaaaaagagtaatatgaataagtggctaatttggcacacaagccattgcataagtgtttttcctcaagacaatcatcagtcttcattttgcagcaaactttatgcatatattccatttcatcacacagattaaaaagcatgtgtttaagaactgagatttaataaagatttaataaagctaataataatttttgctgcttcattaaggacactcaagtgaaactagcatttttttttaactgtgagtagatggcagtaaaaaatacaatgagatgcctgtgatcccagcactctgggaggccaaggcaggtggactgctttgagccgaggaagtcaagaacagcctgggcaacacgggaagacagcgtctctacaaaaaattagctgggcacatggtagtgtgcatctgcagcccagctacttgggaggctgaagcagat

SEQ ID NO: 106793 - DNA, 1554 bp, Homo sapiens
attcggattctccccagacgccgaggatgcgggtcatggcgccccgaaccctcatcctgctgctctcgggagccctggccctgaccgagacctgggcctgctcccactccatgaggtatttctacaccgccgtgtcccggcccggccgcggagagccccgcttcatcgcagtgggctacgtggacgacacgcagttcgtgcggttcgacagcgacgccgcgagtccaagaggggagccgcgggcgccgctgggtggagcaggaggggccggagtattgggaccgggagacacagaagtacaagcgccaggcacagactgaccgagtgagcctgcggaacctgcgcggctactacaaccagagcgaggccgggtctcacaccctccagtggatgtatggctgcgacctggggcccgacgggcgcctcctccgcgggtatgaccagtccgcctacgacggcaaggattacatcgccctgaacgagcacctgcgctcctgcaccgccgccgacacggcggctcagatcacccagcgcaagtgggaggcggcccgtgcggcggagcagtggagagcctacctggagggcacgtgcgtggagtggctccgcagatacctggagaacgggaaggagacgctgcagcgcgcggaacacccaaagacacacgtgacccaccatcccgtctctgaccatgaggccaccctgaggtgctgggccctgggcttctaccctgcggagatcacactgacctggcagcgggatggcgaggaccaaactcaggacaccgagcttgtggagaccaggccagcaggagatggaaccttccagaagtgggcagctgtggtggtgccttctggagaagagcagagatacacgtgccatgtgcagcacgaggggctgccagagcccctcaccctgagatgggagccatcttcccagcccaccatccccatcgtgggcatcgttgctggcctggctgtcctggctgtcctagctgtcctaggagctgtgatggctgttgtgatgtgtaggaggaagagctcaggtggaaaaggagggagctgctctcaggctgcgtccagcaacagtgcccagggctctgatgagtctctcatcgcttgtaaagcctgagacagctgcctgtgtgggactgagatgcaggatttcttcacacctctcctttgtgacttcaagagcctctggcatctctttctgcaaaggcatctgaatgtgtctgcgttcctgttagcataatgtgaggaggtggagagacagcccacccccgtgtccaccgtgacccctgtccccacactgacctgtgttccctccccgatcatctttcctgttccagagaagtgggctggatgtctccatctctgtctcaactttacgtgtactgagctgcaacttcttacttccctactgaaaataagaatctgaatataaatttgttttctcaaatatttgctatgagaggttgatggattaattaaataagtcaattcctggaagttgagagagcaaataaagacctgagaaccttccagaaaaaaaaaa

SEQ ID NO: 106794 - DNA, 452 bp, Homo sapiens
gtcgccctactttagctcgtatactctagagcggccgcaatacagtggtggcaatggtgtgcctggaagagttgtacatgaaagcatatggtactggtggtagctgagttggttacagttgttagtggtgctggtgttgatggtggtgctggtagaatcgatgggtgccatattggggttgacagagttggctgctggtgggattggagagtttggtggtggtggtattggcagttggccagcgctgatgttggcggtcactggagtcattggggttatggatggagctgacgctagcgggctttgttgctgaggaccttgttaaggctggctggtaggagcgtattggtggtggtgtcatgatggacaggcttgcgctgcccatgtggcactggagcataacgcgaggatgtccttactgtggggtcacacctggatcttgtggtgctgat

SEQ ID NO: 106795 - DNA, 1337 bp, Homo sapiens
cggctaatttttatatttttataaaaggttttttacctgaagcaggagaaaggagacacaggataatcactgcttttcaactaaaatggttttattgagatgttttggttggaggagatactttttctggcaacatttctgactcaaggtccctctgggccccagctcttcccatgagacagtcacaacactgtttaatcagctctgcagaggccagccctggagcagaggaggattcagggccatggaggggacctactctgccctgttctggtcactacttctctagactctcatgcactattgtctgtagcaagtgacatttccactggaagcacataaagatggcgacagcctcatttcttcctgagtgaactgaagcccaaagaaaggggaggtcccaccaaaggggaagagagccagggccccacccaacaaggatgctgaaataaactacatgtaatgctttctaggagacaacacagaaatctctactctgaaatccagaatgttaaatatggctccccctctataagttaactgtacaagcttatcaatcatttaaaaccccagcaaccaacaatagcaattaggaatccaaattcatagcacaaaagaacacagataccagtgttggacagtggttttgttatggggactgggtgacagcttatcctaaatcctgcgcatccgtccataccaggagccgggttacccttggtaccaggtgcctgccccacaaagcctgggtcgggagagggcttggtgacgggcctgcagctcccgtgagtaactgtcttttcccaggctgtgcacgcatggccaggtggtcctcagggtggctggttctccttccaggagcaaccatggcaggggcttaaaagttgagtagctctgggaaatggtccttggaaggcagcgatgggtccatgagcacagtggtccctctttgccttggctcctttcttcttggtctgccctaggcttctgtggctgccacctccccattcacgtaatccggttccccgtcctcctcgtctgggcttcccaccgggccaggggatgcttctctctggagttgccccatgaccttcctggactcgcgccactgatggatggatgctgagttctgataatcctcagattcctcatcttcttccggggaggcagagggacagagaccagaagtggggccagtcttcagggccagtgacaggctgaggtcccctctgcagaggccacctatgccctcctgctgggcacctgtctctgtggttttctgcttgcaaatgagcacattctcgtaggaattggcatcatcatctgtgctccctctc

SEQ ID NO: 106796 - DNA, 402 bp, Homo sapiens
gtttaccatgacaagtctcaccctcaccccaaccctgactgactccctctttctataaataatgacttttagtgtcttgtcatcccagtgtttattttactaatttatttatttatttaatttttgagatggagtctccctatgctgcccaggctggtctggaacccctggcctcaagtaatcctcccacttcagcctcttgaggtgctgggactacaggtgcacactaccacacccagcctcttcccaatgtttctttatcaaatacaagcaaatgtaaatatatattcttatttctccgttttcttatgcaaagttatcccatgtacaccactgtgcaccttgcttttttcaccatttggtaatttttttaaacaaaggcttaacaatcctggtaatgga

SEQ ID NO: 106797 - DNA, 381 bp, Homo sapiens
cacggtttgggcagccgagttccactctcacctttcagtccaaatgaggaaaacagaaccatttgaagtgtctatggtgtcggctattgtttctgctgtcggcggtgatttcgcgtaatgtttacattctcacatgactttctctctctctctctcagtgtgtgtgtgtgtgtgtgtgtgtgtgtgtgtgtgtgtgtgtgtgtgtggctattcttgagaattatcctcgatagcctctggagaacgaagaatggctcggcgtagatttgagagccttgcgctcctgagctcactcatgagcctcgcatatgcatcttccctagagagtgagacacgcatcgtagaaacggttatacctatgctaaataccttttttacaat

SEQ ID NO: 106798 - DNA, 483 bp, Homo sapiens
tgtgtgtgtgtgtgtgtgtgtgtgtgtgtgtgtgtgtgtgtgtagagatgaggtttcactatgtttcccaggctggtctcgaactcctaagctcaagcgatccacccatctcggcctcccaaagtgctgggattataggcataagtcactgcacctggccatggcatgattcttttatctctcctggggctgaactccctacatttgcttacacctggcctggaagacccaagatccccctcacaatactacttctatacccagggccaggtgatgtgttggtttagttcaggactgagctttattatgcatctcccagcaggcaacctggggcttctgatactgcccgggagagctgggggaatggagctgttcctgacttcctacacaaggagtggctaatcttctgtcctttttctaaccaaagccatctctggaccaccaagagcaagtgggcagaggtccctcatcctggcaggagag

SEQ ID NO: 106799 - DNA, 733 bp, Homo sapiens
gcctggagtcaacatggggagaggcttggagatgctgtgaagcaaagacactgggaacagctgcagacattttcccagaccaggaaggacatggatgaagctggaagccatcaccctcagcaaactaacacaggaacagaaaaccaaacaccacatgttctcagtcgtaagagggagttgaacaatgagagcaaacacatggatacatggaggggaacaacacacacaccagggcctctcagggggacagggggtaggagaccatcaggacaaacacgtggatacatggaggggaacaacacacaccaggacctctcagggggacagggggtaggacaccatcaggacaaacacgtggatacatggaggggaacaacacacaccagggcctctcagggggacaggggagcacctaggggaaagggcggctgtgggcacagcttcagcagacttaaagcatctttgaaaagcctgatggctctgaagagagcagcagatctcccagcacagtattcgagctctgataagggacagactgccttctcaagtgggcccctgacctccgtgtatcctgaccaggagacacctcccagtaggggccaaaagacacttcatacaggagagctctgtttggcatctggcaggtgctcagtaaggccactgcagccagtgggacgaagcttccacaggaaggaacaggcagcaatctttgctgctctgcagcctctgacag

SEQ ID NO: 106800 - DNA, 429 bp, Homo sapiens
gtaaaaggcttctgccataaagcattaaccccacctctgtgaagaaggatagttaggatggggtttagaatgcatttacttatgggtcgtggttttccttccaatctggctaacatcagcttaagcttccttaagtaatttcttggtcttcctaactggagctagaagtttgagataaacatgatgaactgttctattctaaaaaaaattagggaacaatgcatattactagaactagtttattttattaagaaataaattgcagccaggcacagtggcttgtggctgtaatcccagcactttgggaagccaaggtaagtggattgcttgagctcaagggttcgagaccagcctggacaacatggtgaaaccctgtttctaccttccccaactcaaaaaaaaaaaaaaaataaaaaacttgggggtggg

SEQ ID NO: 106801 - DNA, 1835 bp, Homo sapiens
aacaaacaaaaaaccactgttctggagttaggattttaaagcatctgtttccaacccgggcttgctctcagagtttattccttgaggacaatttctaagcaaggatatcactgttgttttgaccttcagtcccatttataagggtccaaattcctttgagaaaagttccagaaatcctcctccctccctacccaatctatgatcctatgtccttgtgatgcccgtttccacacagctgaagaactacggaaggaaaatgtagtaaactagaagaaaaagacaaatgccttcctgttcccacttctctaaaaccccatagctaggaacagaaaaaaaggaaaagacttgaaatgttctagagatataacaaaaactttttttttttttaaagaggatccacctggttcatgaaccctccctcactgctctctgcacatcacgggcacacagcacctgcagggaggctgtggggaaggtgtggagcaggtgcaacaggcagctactctcctgggggccacacggcggagagaggattcgatgcagcatgacgatcccttcctcccaggcatgacctcttctcagaacacgggaactgacaacactgcgagtggcaactcagcaggtgggcagagaagcagaaaggggccctcagcaccactaggccagctctcagaatcagaagagcagcctccagggagggagcagggctacagggacagcctacgggcagtggagcttctggtttggcacatgggaaaggctggggcgcatgcgctgaaacatgacaccatcagggaagccagaaaggacaacatggacaaggccatcgatctgaacccccagccaaaatgggtgctctcggcttgctcaaaaagtgctgccagcagcgataggttggcaaattaaaagcaaacaaatagaggtcacggccacacaaaggcagtaactgcactcacaaggtggctcagcccaaagaggtctgaatctgaatatgccgcactgtccctgccccgggggagaaggggaaggctgggccctgggaactagagatgatggcattcctttcattccttcctgaggcgggcctggagggctgtgccctggtgactcctgtctcctaaaggagggcagggccggctgaaggatccaggcattgatgtctagttctgaggacacccaggacccgcaactacaagggccatctaaaacgtggcctggaggggatgggggcaggcgggcacaaaacttctgctcagctcactccagctccccacgtgctcatctgttccccagatctggggctgcctagtgagccgttaaacgcctgggttccgcccagggctgccttccaccgggacgccgggcctgctgtggctggaccctgccgctgtggtggtcttctcaccaaggagcctggtctggctgcctggaataacctgcaggtcggtgttctcaggggactgtggcaggttctgggctcgggtagccaggagtgcattgaggtactgcagtcgcgtaaccttgatgagctgcagatcagagagcgccctcacggtgtagtcgggacaatacgcagatgaatgcgtgccgtcacctgggtcgggctgcaggtcatggcggatgggctggagcgaggacaccggggactggtgaaccgaggatggcacagttagggccgacactccatagtacgtgaaggccccattctcaaacttcagaccctctttcccgatctccacttcaaccctgccctgcaggatgagaatgaagtaatccaccggctggctgcgctggtacaggtagtggtgtgtggccagccggttgctcctcgtgcc

SEQ ID NO: 106802 - DNA, 2015 bp, Homo sapiens
cggacgcgtgggtctagatcgcgagcggccgctaaagtcatgagggcaaggctccggttcctgccctcacagggtcccagaagcaagggcagtgaggacctggcccacgtccctggcacgggctgtctgattctccttcgctgtggcgggaagatggccggatttgaagaggcagaagaggcctggaccttggcgcacacagacccaggaacagatgagcagggatgtctgcatccacacctggccgtgcacctactacctggagcccaagaggcgatgggttactggacagctgtccttaacatcgctgtcgctcaggttcatgactgacagcactggagagattctggtcagcttccccctctccagcatagttgagatcaagaaggaggcttcacattttatcttcagctccatcaccatcctggagaagggccatgccaagcactggttcagctccctgcggccaagtcgaaatgtggtcttcagcatcatcgagcatttctggagggagctgctgctgtctcagcctggagccgtggcagacgcatctgtcccaaggacccggggcgaggagctgacgggactcatggctggatcccagaaacgcctggaggacacggcgagggtcctgcaccaccagggccagcagctggacagcgtcatgagaggcctggacaagatggagtcagacctggaggtggcggacagattgctgacagaactggaatctcctgcttggtggccctttagctccaagctttggaagacaccaccggaaacaaagcccagggaagatgtctccatgaccagttgtgaaccctttgggaaagaagggatactgataaaaattcctgctgttatttcccacagaacagagtctcacgttaaaccagggaggctcaccgtccttgtgtctgggttggaaatacatgactccagttctttgctcatgcacaggtttgaaagagaagacgtggacgacatcaaggtccactcaccttacgaaattagcatccgccagcggtttattggaaagccagacatggcctatcgtttgatatctgccaagatgccagaggttatccccattttagaagtgcagttcagcaagaagatggagctgttagaagatgcattggtgctcagaagcgcaagaacctcttcccccgcagagaagagctgctcagtctggcatgcagcatctgggctgatgggccgtaccctgcaccgtgagccacccgcaggagaccaggagggcacagcactgcacctgcagacaagcctgccagccctttctgaggcagatacccaggaactaacccagatcctgaggaggatgaaggggctggccctggaggccgagagtgagctggagagacaagacgaagccctggatggcgttgcagcagctgtggacagggcaaccttgaccatcgacaagcacaacaggcggatgaagaggctgacctaggggcagaacgtccctgcattcctgtctcaccctgcacatcccgctgagatggagggctgggcggcagtgccagggctgcagaggcctgtggccctccggagtggtcttcctctggatggggctgctactgtggggctgcttctgcaccaggggcctccccaggtgtgcaccatgcctgcctcccacttggctgtccctgctgctgggcaggacccggccacatgttctgcggatgctgcagaagtgtggaccatggcgggaccccaaggacacttggcacaggcctggaagaggccgccctcgtcttgtctcggctccctttcatggacagactggccttcttagctgtactataaatttgtgagtgaagttagagcccagctcacttagccagctcactttgagggcatcctataaacacccaactgttcttttatcgtctcgggttttaagccaaaaagtgaaattaagcatgactggaatcttttcaaacaaaaatatttgatttcttgcttttaagggccccggttttccattccaa

SEQ ID NO: 106803 - DNA, 450 bp, Homo sapiens
gctaaacaaggggctagggactgaaataccaagggaacaagacatatttctgccctcaaagagcccgggacctactgggggaagcagatccaggagtagatactgaggaccctgaaagaacagggtgcttgaggctgtggaaccatagacaaaggacacctgacccagggggatgtccgggaaggcctcctggaggaggtgactcctgagctcagtctagaaagaggggagagtggcaggaagggatcccaggcagaagaggcagcttaagtcataaaaagggtgtgtgcactggcagggcctgcccgggaactgtgggcatgtgcagaatggggtaaaacaagcgtgggaaggtcaacagggtctcgcagtccatggcaaaggagccatggcaggatttcgagcacaatcagacctgctggtgatggacccacctatatgggcggcgtt

SEQ ID NO: 106804 - DNA, 472 bp, Homo sapiens
ctggtggaattcctggggcagacccagagacaaaccctagcagcttacttagctctcatgaactaagggctgtcccttagttctcccaaagtaacccacaatgcaaccctgatgggctgcatcttccaaaattgaaaggcctttgtctatcattccatgaaacaaaaaaagattatcttactttttaacatggcttaaccttaatacccactggatttcggagaacagtggccactgcatggttctcatgcttacagtacgatcctgtagctagatttgttttgtaagaaggaagaagaatgagatgaaataccctatgtataatgttttatgttgctttggaaaagtacaacaatgtagaaaaaggtaaaatcatgataaagtaagaaattaaaaactgtttggactgatttacaagaaaaagatgatgctatgaatggtcagttaaaggaacctatgactcacccccctc

SEQ ID NO: 106805 - DNA, 1051 bp, Homo sapiens
ttggtagacacggggtcttgctttgttgcccaggctagtcttgaattcttgggctcaagtgatccttctgcctcggcctcccaaagtgctggaattataggcagcccatacactctttattaaatagagtcttctgtcaataaatagaaagaagactgatcaccctcattctgccgctgtacatgagccttagtttccccatgagtagggagtttggaagtagattctcttaattaaaactgcctctctttgcagatgtcattttaaatgctatcttaatctaaccttatcatctgagctgctaaatctttcaccccaaaaagttaccacatccatctacaatccattttgcagtggctcttccagctccttcccaaccatttccccagtaaatagactcaaatggttggggtgaaactcactgtaaacgaacatggggtatatctgtgacggaacttctgaaagccatttgtctaaataattctgtctttatacacacatggcacagggtgcatggcacagagagggacaggggaacgggggagggctgtcatggctatgatccaggctgaacaggaaatctataagatgagaaggtgagaaaactgtcaggaaatccacatttccagaaagccgggcactaatgatgctgccattcgacttttgtaacagctcctcgatttacgaagtgttttctccatgggagacctggtaataaaacagttggctgatcgctaatgtgtcaggacttgcccacccagcccagcagcagccttctccagccaggaaatggttttccccacccctgcaacgctggacctgggctcctgctgccgacctgctgctctggcagatctgctgggagactcgctaagaaggagccctaaggagctaccacgtggctcaccccccagaagtccccagagctccggcacacatggctaaccagagtagcaccgccaaaacacacagccagcgcggcctccaattcttcacacgtctccagataaagcccaaagaaaaaaggaaaccagatcaaaagggtatcaga

SEQ ID NO: 106806 - DNA, 338 bp, Homo sapiens
ccttgaaggatgctgtgatagtaaatggatttatacatggaacgtgcttgaaataatgcctgacagtttgtaaagacaaggtctcactctgttacccaggctggagtccggtggtataatcatacctcactgcagcctcaaactcctggtctaaagcgatcctcccacctcagcctcctgaatagctagaactacagaaagtgctcccggtgcctgtggtccatagagtggagtgagtctctaagcaaatctggagggactctgggagctgaagattcagaatatctccacttattcttgccatagcctttgctgctcacctgttgggtgccatgatg

SEQ ID NO: 106807 - DNA, 436 bp, Homo sapiens
cggcacgagaaaatacagcaggacttagagacatggcccagccctcttcgggatcacgtggatgtccctagggagattttggactactctgcaaaagtgctggagtggtacccagagggctgcagtaggcagaggtctgtgtcttacaaactttaaagtccataaaatcatttgaggactattgagtctgcacttcagagatgctgtgcatcagggattagataggctgtgtcatttttccccaagtgggtggattgggtggagcttatgacccaggacccactttggtgattaaaagtaaaacagggtagggggcacctggatttgaaccagggacctcttgatctctagtcaaattctctacccctgagccatacacccagtcataggaggacagtgtaattaacaccatttttctgtgtcgacacaccaagaa

SEQ ID NO: 106808 - DNA, 394 bp, Homo sapiens
ctagccaaatgctgtatcttgcgtaagagtttatgctgggccatgtaacccttaagtagcgctgctgaagatgatctcttttagggaaaatgggtaagtctgggatttagggtgggagctaggggaatgggggaataacacccaaagtatgtactggtttataacctttcagtacagtagattaatatttggttctatcttttttattttattttttatttatttttctatctagagtatcattgcctatcttttttattttagaaatatgactgggcatagtggcttacacctgtaatcccagtactttgggaagtcaaggtgggagaattgcttgagcccaggagttcgacaccagcttgggcaacatagtaagacccccatctctaattaa

SEQ ID NO: 106809 - DNA, 449 bp, Homo sapiens
ggaaatagggttgagtgtgatgggacatgggatgaagagatgggctggagaggaaaattgagagctggaaagataagctagtctcttgaaaggtcttacaaggcatgattttatcctgggggcactgaagaaccactgcatggtttgaagtagggtatgacgtgatcagatttgtgtattcagaatatccagtaatagtacatttgttccctagaacctaggcacaagtcttggaattggcctcagagcatccatgtataataggtgctgcccacttacagcctcagggagacagcataacacaggctgcctaaaaaacgaaagacctgggtgtggtggatcatgtctataatcccagcacttttggaggctaaggtgggaggatcacttgaggccagaagttcgagacaagcctggacaacagagcaagatcctgtctctacaaatag

SEQ ID NO: 106810 - DNA, 448 bp, Homo sapiens
ccctgaggccgctgaggtcgttcgtgtctgttgaacggctgtgggcgtcttgctgccttggaagtgagcttgtagtggacaaaacaaagaggaaaaaaagaagagaactgtctgaggaacataaacaagaaattaaagatgcttttgaactatttgatacagacaaagatgaagtaatagattatcatgaattaaaggtggcaatgatagccttggggtttgatgtaaaaaaagctgatgtactgaatattcttaaagattatgacagataagtcataggaaaaatctcctttggacattctattgaaatcgttacagatttccaattgtaaagataacgcggtctctaactaaatgcgtctatgcttttaatcatctctatcgttcgatgtaacttattattcgtatataatctttattatcatctatcgttgtcttactgatctcg

SEQ ID NO: 106811 - DNA, 877 bp, Homo sapiens
gtcgatatgcactcgcgcggaagtcccgagttgacccacgcgtccacccacgcgtcaggaaagatggcggctccctgggcgtccctgcgcctggtcgcccccatgtggaatgggcgtatcaggggcatccatcgcctgggtgcggcagtggccccagagggcaatcagaagaagaaaaggacaatactccagttcctgaccaactatttctacgatgtggaggctctgagggattacttgctccaaagggagatgtacaaggtgcatgagaaaaatcgatcttacacctggctggagaagcaacatggtccatacggcgcaggtgcctttttcatcctgaagcagggaggcgcagtcaagtttcgagacaaggagtggatcaggccagataagtatggccatttctctcaggagttctggaatttctgtgaagtgcctgtcgaagctgtggatgccggtgactgtgacatcaactacgagggcctggataacctcctccgcctgaaggagctccagtccttgtcgctgcagcgctgctgccacgtggacgactggtgtctcagccgcctctacccactggccgacttcgttgcaggagcttttcgctgggccggttgcccccgcattttccgaacgggggctaagcatggcttccaccacctccagtgagacctcagctcaggctgggccacatgcccaggcacctctcccacctaacccagatgcaggagaggaagtggggaggggcaatgttaggcagttctcatatccccctgcatccatcacaaacctagagtatttatggtagatgagcagtcacagtgagtctctggaagaattaaatgactcctggttttcttcctttttgttttagtca

SEQ ID NO: 106812 - DNA, 1783 bp, Homo sapiens
ttttataatggcctcggggttactggaaacactgtaaaatgccacctactttttcttttcacagctgacacttctcccaactaacagaaactggcaaacattgtagaggaagtgtccactgagtgaatgagtatataatttatgaaaacagaaaagtgctttggaaaaaaaaaaaaaagacaacaggagtacatacagtgaaccaaaaagagtgtaccaggaggagcagaccctgaacagttagaactatggaaaatcgctatgcttttgtgttgtcacaggagttaaaataggaataccctgcatacaataaatatttattggataaataactaagcctgatacccttttcaatgcgttatacagactctatcatcacaccactaatctaagttctcagaagttaaacattacaagacttcagaacaacataggcgtctttggctccatttaacagaagaaggaccatagtgatcatttaatctctatgagtctgtcttatcttctggaaaaggggcctaacaccatttccttttgcaaaaaggtagctgccttgcttccagttctaccatcctctagcaacccatctttctcttatttgatgtctctgatcagctcctcttccagcacaaactggagaaaggggatcctttctgttttcttggaggcttctgaactcaattacaggtctgcattaaaaatgtatggagaaagctggtgatcagtttgtacatatggacaagttcaaggcagtatggtcctactttctgggaaaggccctggatttcccattttgctcctgattggaaaaacccttagtccccagcagtgtttagaatgaactggagaaggcagatgggtaccagattcaggaagaggtactgatagaccaagaccagttctttctgttttaaagatgtgttatctcagatctcctccaatgctccctttggaaaattcacagaagatttagggctccccacagaaacagcagcttggcctgggcttggtcttctgactaactggagctgaatacaaaaagtctgatgggttgactgagtcggtgactgccaatttggagcctgaagcccccaaagtcttctctagacttgatgatgaagcaccagttacagttctcccagctcgccttccattgcccgcaccatgacatacagctcggccagacccaccacagaggcgacgatcaatgcagctagcacccgcgaggccatttctgtgaagatatattggcttccaaggtaagtgcagacgaaggcagcaatcaccgtgacaatgaaattgaagatggtgatgaccagagccttcaatgatctcacttgctttcccaggtcgctgagagtcccaccatgtcttgtatcctgacaagtgacgttgcgggtgatccgtttatattcctcattggccagctgtatcttaatcttctccagccgggcaactagttctgggttccgtggaggcttcacaacctctgggagatagatttcactgccttctaggagctcatggaggtatagtttggaatccctttctctcagatgctggtgcagatcccggatgagacggaaagaaaccaagcgttgggggccactggagctatcaccgcccttgtgcttcttccccagcgcggcctcaagctcggcccgcagctttcggggtagccgctctggctccagctccccgccggggcccaaagcacgcaccaatcgctcgcccgcaagcaaagaggacgccatatctagccggctctccggtcaggacgaaa

SEQ ID NO: 106813 - DNA, 1533 bp, Homo sapiens
ttttttttttttttcatccaaatcaaggctgtatttatcgtcactgattgacatgggaacagaatatttaaaacaaacagggtccaccgtggaaatgtggctgaaacacagaactgagcaaagcaagtggctcgacggctgaccccgaaggctgggaatcccggcagggacacagcccagacatcggggaacacaaaaggccgcaaggggggcagggcatgggggggctcatgtgggtgagggcaaaacccaaactgagaggaggccaggccaagggcctgggaggcgacgaccacaccgaggtgacgctgatgcctcaggcggaagaaaacacacagcagtgattttgtgtgtgtgtgtgtgtgtgtgtgtgtgtgtgtgtgtaaaatcagcctttagactcttgcacttctatacctccaccggatctggtcctaacagattccaagaacactgcaccatccacacaaacgtccacagcatcgcccttgcggctggagccggccagtcctgaagcccacaggagccgcccaggagtgctgttctgctggcccaggggctctgctggggggacccaacccctccacggacccaggggctgggaggtcgctggcggaaccttcctcccccaaccagcagagccgccgggaagcgcttgcatagttgaaggaaagttgctgccattaaacttctgataatgtttacagccagcagcgcctgggtttttgtgaccatgttagacaaacaaccagaggggtttctggaaacggtttttataaagtctatctagattaagaatttagtaacgtcatatatttatatcaacagactatttacacgtttcgtttgcttttaaaaaaacaaaccaaaaaagaaattacacttctgcataataaggcaaaaaaacaaagttttgtacattattattttaatataatctgtaacttcggttccaagtaccaagggggggccagggctggcctgagtgggggcctcacagtgcgctggacaaagtgaccggtttttctccataaataagacaaagaaaccctggggatctggagaaggatctgaggccattaaactgcaaatcccaaccgaaaacgaagaagcaaaagtttcttttttggttcttttaaacgtctaaagagcataaaattaagaaaaatacaaatccattacaaacacttctcatctgtggggggaaaaggtacaaacgcgatttttttttcccaacagccgaatcccaaactcggaaaacaaaagatcaccctcagaaaagccgacacccaagtccccgcctccgcaggctgcgggtggagaggcggcgccgccccaggatcggcgggagctgtgcttgagttctaggaactgatggagagacggacagcggtgcgctccgctcggagaggcgtctgcggccccggggctaccgcgcctccacctccgggggatttcgggacggggagtagtcgcgcgcctcgcccggcccgaggccccccagcggagtagtccggctccgaattccaccgc

SEQ ID NO: 106814 - DNA, 424 bp, Homo sapiens
ctgacaggccttcctcctctcaaacctggcagatgggggcctctctggaagagggaggggccctgtcactgtccagagtctctttttacacttcacctccttctgcagtcagactgaaatataaaaaaggtggtggtggtggtgaaggggctggtggagatgtaggaaccgatctgctatttttaatttcctgtgaggatagagacttgcagttagactcaaagaagtactgtactttcccaggttgactaagaaatgccagtggtggaggtgggtgtttgggaaaggcagggccctgaaatggcctgtccctagggctctccaagcactagccttcccagcttcccggcgccccccctatctcttcctgtctaacttggggaaggggcctgggctgtgaggacagggcccccacaggggatgg

SEQ ID NO: 106815 - DNA, 584 bp, Homo sapiens
  misc_feature (1)...(584): n = a,t,c or g
attagatataatatataatagtatatatcaataatactatattgcccaggctggtctcgaactccttagctcatgtgatcctcctgccttggcttcccaaagtgctaggattacaggtgtgagccactgcgcccggcctgttggagttctttacatttattttataatcaatgctgttttattaaatgcggattttattttggattacaggatgtataatgccatatttttcttagatcatagggcctttcacatttgtaatttggccttgtatgagttaccctgcaatccctttgttttccccataacccttccaaaggaaggccgcaatagaaacacaaagagaaacaaaataattagaatattttttaacttctacagttcaaggttttggcataagtctggtttataagcacatttgcctagccctttccttcccaccaaggtggaacgtcttcctctagacangaggcagagggctcctcagagtcagaatctggtgtgggctctcacgtgctgatgcttgatccacgtgaggagggatgaatgcagttgacacccaaatagtgatggtgactgtcgcn

SEQ ID NO: 106816 - DNA, 631 bp, Homo sapiens
ggcacaaattcaaaggaagatttgccttacctaggctgatcaaacagctgtgttgtgggctcccagatgatctctcccacctcctctaccacacaggagaatataaatagcactcagtttacctgtggctagccacaagcagaagtctggtcacatgactgggcaagctgggagtaaccatcaagtagacatgaacactcagagggcaggtttgctctctcgctacagctcactaggttggactctgtcaggaccctctgctcctaaccctgactgattcattttgctctgtgctatggggaggaagccatctggcatttcataagaatctttatgtcgttcatatagacttagtcatgtatttctctaggatttccttctactttactctttctgctgcaatctgcctctccctatatctcggcagtcatatcttgtctccatttctttaactattttattgtgcatatacaactttatacctctgtctcattacaacattgttctttcttatacctaaggtatagcttttaaccgcgtgtcttttttatacggccctccatgttgccgtatggcatctatcttatacttacctaccgctaccagtggcaccgtgtcagttactgcgacc

SEQ ID NO: 106817 - DNA, 425 bp, Homo sapiens
gagagataataccttcagcccagaaatgctggcttctagtagtaaacataaaccacatgaagccaagccacatgttcctgcctgtgtctgcccctgcaccacccaataacacatgactgactgttaattacatgtttgaaatgctacatgcctatggcatcctatgtcgccatatgcaccaacttattgatgctgattgagcccaggactacttcgatgggttcttgctataacacctatagttcttatgatattgatctcatcctataaccatgtctccatatcctatggtggtacctttcgatctaacttttttcttgatcagatcatactgacatttctcatttacgagctgcatatcgtataaacttctaaaaggacaatgatgagtatattgagatacttttggttatctgtctatcttc

SEQ ID NO: 106818 - DNA, 428 bp, Homo sapiens
ggtacactggtacctacacgctgtcactcaggcagagggtgaagacacactttcgtggacaagagcacacaggcgaatacattcacacaggtgcgcgcgcacacacacacacacacacacacacacacatgtagtcacaggctagaccgggccacggagcagaggctggattgcccctcagcccgaagttctccacctggccttggcatggagtagggttgtgcgctgaggtctctcccaaggctgtgtgctgggagtcactcttgagcctagctggagggttgcaggagctctagggtgttggatgggggatcccaagatccacagaggtcctggcagagctgggggccatggggtgcaagggagagagggcggattggctgatctagaatggtgaggcaaagggtatgtgtggctgtggcttgggg

SEQ ID NO: 106819 - DNA, 996 bp, Homo sapiens
ctggaggaaagcgagccctcagctcagcccaggatccccagaatgcccttaggcccccagcgcgcggccgcaagacccgccacgacccgctggccaaatccaagatcgagcgagtgaacatgccgcccgcggtggaccctgcggagttcttcgtgctgatggagcgttaccagcactaccgccagaccgtgcgcgccctcaggatggagttcgtgtccgaggtgcagaggaaggtgcacgaggcccgagccggggttctggcggagcgcaaggccctgaaggacgccgccgagcaccgcgagctgatggcctggaaccaggcggagaaccggcggctgcacgagctgcggatagcgaggctgcggcaggaggagcgggagcaggagcagcggcaggcgttggagcaggcccgcaaggccgaagaggtgcaggcctgggcgcagcgcaaggagcgggaagtgctgcagctgcaggaagaggtgaaaaacttcatcacccgagagaacctggaggcacgggtggaagcagcattggactcccggaagaactacaactgggccatcaccagagaggggctggtggtcaggccacaacgcagggactcctaggggcccagtaaggacagtgcccgccagggaccatgtatgtatcatggcggaagagttggccctgacctggaataaagcagttggtgttgcttatgaggaaggttcagccttatccagcacagccttcacgttttgccctctgctgtcaccacttggtcagaaacttccaaacgcagtgccctgttctgccggtgtgtacagcctcagcgcaccaggagaccctagagtggtttccatctcacagagaatcagacagggccacagccccctcaggcagccaggtcatctgagtatcattaagagtagtgatgggaagattacagtctgagggccaaacgtgcctgcttcctgtttttgtaaataaagttttgttggaacacaaaaaaaa

SEQ ID NO: 106820 - DNA, 356 bp, Homo sapiens
catgatgccttcatatcgtcaactactgactctactatcagaatctaacgctattctcctgtctagggctaccaagtagccaggactgtaggcccgtgccatcatacctggccaattaaaaaaattttttttagagctggggctcttgccatgttgcacgggctactcaaactcctggcttcaggcaaccctactgcctcggccttccataacattgggattacaggtactagccaccatgcctggcctttcagaccatcttaaatctttctggagcatatgattacaagggtggctaaccatttattgcaataactggtactatacttttggcattagtttaataacagctctca

SEQ ID NO: 106821 - DNA, 1488 bp, Homo sapiens
cggacgcgtgggctgaggcccagggaggaagagcgatctgtggagatatttctagaacccctgcaagctgagccccagtgaaggagagaaggtccagtaggagcttgctaagctcaaaatcgaagaaaggttcagcaagactgtcagggtgacctcaaagcaatggcagccatcagaggagccccattgctattaggaggctcctattgccctccccttcagcctctgactttcacctgtgctacccaattctggttccttcactcccattcaaaaatggaccccagaaaagccttattttgtggagtacctagttcccttttgggtttgtctcttgactgctacgggcattgccccagggcaaccatgacagtgaagatgactggccaagcttgtggactggccagcaagcttgggctgcctgagacgctttgaaatggctgccttctgagttggtcttgagggtgaagactgaccacccttctcacctgcacagtcacagtccctctcctgctggcctgactgcagctgtcctcccagctggccacctgaccagagaccaggagagaggccacagcctccagaccctccagagtcccacggagcggaggaagaaggcttaccagagagaccctctgatgcatgagccaggccccagcccttctccctgcatccaggtgtgtttccaccgcaaaatgcctccacacaatgagcgactttggccctgcgtgggtcagcatgtggtctgaggtaaccctcaaatgcctccaccacacatctgtccacctgcacgggttcaaggtgagcacttgcccccttctctcctccagaccagtcgcctgaaattctgagcaacattccttcaagactatcatgtaacccttggtgatgctgagtccagacaggaaatgcagacttgggacccacctgtatcagcagaaagaggccttgtgccccgtttgtccgagtcccagaacggagcaaatgagaaaaccggcgagctgtcccccgaggagctgtagggagattggtttttagtataaattacaataaaattttgtgtatgtgtaacagctgtgttcaaaatcccacagtgtaaagctgtgatatggtttggatgtttgtccccctcccaaatcttcatgttgaaaatgtggatcccccagcattgggaggtggggcctgaatgggaggtgattgggtgatggggggaagttgccctcatgaatgacttggtgccctcctggaagtgatgagtgagttctcgctgagctcactcaagatgtggttgtttaaaagagtgtggcacgtccctcccccaactctccctctcactcccgctctcaccatgtgacacacctgctcccccttcgccttccaccatgattggaagcttcctgaagcccttaccagaagcagatgccagccccacacttcctgtaccacctgcagaaccataaaccaaaataaagctcttttctttatcaa

SEQ ID NO: 106822 - DNA, 788 bp, Homo sapiens
tcatgcctgtcatcccagcactttgtgaggccgattctcctctatccaggagacgggtttcaccattttgccaggtttgtctcaaactcctcggcttaactgatccgcttgctttggccttccaaagtgctgggattacaggagtgagccaccacacgtagccagtcctggcattttgtagaaggatggccaacgcagcctgttgacccttcctggccatcacatgaaaatcagcgactcttccttcttacaaaactcggagcttctcaggataacttggtgaaacgtcccccgctgtgaacctcagtgagcccacctgtaatatacaggtgagggagaagaccagaaaagctcagtcagagtgacactgacccctgaaatgatgggcacaatggagtgtgtggcttttcctgtaggacagggaggtacttagttgtagtttgaactttaaaggattccagtcctccgaaaaacaggattagactcaaatcaccttgaaccttatcatctcacggctttgacccacctacatggctccgtgtcccctgcaggcctcgccccggagctctacaatcctgtgtgcagttgtctccgcagctctctgctgggacatcaaacaggcatctccaccttcatgtgtcctataagtgacttcctaaacccccaaacacattcccttacagtcctacacatctcagatgagggcgacagtgtacttctgggtgcttagctgaggttgacacccatgtattttaaatatggaaaataaattacattatttgtaaaaa

SEQ ID NO: 106823 - DNA, 824 bp, Homo sapiens
acagatattcagaaaggtttggttgccctgtgcctcagtaaataaggaaaatgctttcttagaaggctgctccagtaactgcatattccttgccatcctctacagaaatcaccatctgctctcctaagttcttctggaaagagcaccgtaaccatgtcatcctaacagcaatgccatgaagaaagggaggcagctccctccacgtcctggctccagtgcccactcccgtgccccctccatggcccacgcagcctggccacctgggtgacatctggtccctgtgtcactttctgcaagacaaggaccagcctcaaagaggagagcatggtgtcctgaaggagatggcggccaccatcacctgtcctgtggctttcctctgactgcccaggtgggggcccagaggcggcgcctctcagtccagctttgagtggagttacataatttccaggcttccctgcagttctcgcctccccatccctgaactgtttacacagtagctctcacccacaaagagtccgcatgatggcttttcctctgtttgggaagatgtggatggctgtgtcccaagtttttcctacctaagatccttttcaagtaggggatggatttggtctatctgatgatcaagagttcagggtggcctttgtgatagtgttacaccccctcccaggtccaataaacagttttttgacaaataatggcccttccttttccttccccccctgtcccccccctggtaatgtgatgtaagggtggcaaaatccccccccccccttccaaaaatcccaggacttgtgtgggaaatactgtcataattaaagcct

SEQ ID NO: 106824 - DNA, 872 bp, Homo sapiens
agcgggttcctctgttgtcaagctctttggaggtgcctggctgctactactgtcccagagaggtgatgatgaatgatgggtgtgtccagtggcagtttgccccactgaggcaggggcttccactaggccctgacagagcccttccagcaggcagaaatccctgtgctaggcaagattcaaactccgtagcatgtctcctgctcccatctcttaggaatggagtccttcaggccttgagtcccacattttccatgatgctccattaagcagctgatagcacccccacctccagggaaagtgagttcagagtccttggtctaatgcatctgtgttgaaattgaggccttcccctgtgttcacctttctgctctttttcttttagcccaaggctatgaaggcctcattcggtgctgggcatggtcactcctagcattcctcactctgttgctaacagcaacagcaataataataagggttacaacttactccataccttactgtctgccaggcattaagctaagtgctttacatatattaagtcatttaatcctcataatgaccctatgaaagagataccatctcaacccaattgacagctggtttgcaagattaggagggatgaaggacccaggggacaatgcgagggaaaactctgaccccggggccccaggctggatgttctttatgcctgtgaaccacagcttatcacatgtctggagttagggaccccacttaaagtgagattttggctggaggtggtggatcatacctataatcccagcactttgggagaccaaggcggaaggactgcttgaggccaggagttcaaaaccagtgtaggtaacagcaagaccctatctctaaaaaaaaaa

SEQ ID NO: 106825 - DNA, 366 bp, Homo sapiens
gaagaattctttctgttaaaaataagtccaggcacaaagaggggaacgacactggggcctccttgagggcagagtttgggaggagggagaagatcagaaaaagtaactattgagtactaggcttagcacctgggttacaaaataatctgtacaacaagaccctgtgacaggagagtttatgtatattacaaacctgcacatgtgcccaccaaaacctaaaataaaagtttgggggaaaaagtcggctgggtgcagtggctcatgcctgtaatcccagcactttgggaggccaaggtgggcggatcatttgaggtcaggagtttgagactagcatggtcaacatggtgaaaccctatctctactaaa

SEQ ID NO: 106826 - DNA, 380 bp, Homo sapiens
ggccagagatgagtaattttgttactgtgatggtatattgtatatatatgtgtatgtgtgtgcgtgtgtatatatatatatgagatatatatgatatatatatgatatatatgatatatatatataaaacatacagttcagtagcattaacatctagcattcagtacatttacattgttgtgcaattgtcaccactgtccatctctagaactttttcattatcccacactgacataccacacccattaaataataactcctcattgctcctcctgttagtaccaaccattgttctactttcatctctatgtatttgactattctaggtacctcgtataagcggaatcacgtgatatctttttgtaactggcttatttcac

SEQ ID NO: 106827 - DNA, 1014 bp, Homo sapiens
gaaaaagaaaagcctctacatctctaattctagctgttccgtttggaggtagctttgacatttagaaacatcttcttaggttcaaccccaatttgtattactgtgacctcaaccaattagtcatagttgcagtttagtgttctttaaatacggtatatatgaaataaaatttttttaaataacaaaaaaaaataaagaacaaacaagaaaatgttatataccctacttgtggcattacgctcttgcagtaaatgttaatgaacatgataaatatgttctagatgtatactacgttgatttgaatttttactgattggtaaataaaatgagaagaatggggaatatttatgtaaatttcttgctgaattgtgtgttcacatgtgtttggactcaggcttaattttaagtcttatgaggtaaaattatcaaggtagctggttatattctcattactactgtgcagctaaaatttgagaaaagatgaaaaattcacatttgtcttaccatggtcacagaatgttttgtgtttattattatgcaataaattattgaccggaagagtaggcttacttctaaaacagagaaaatatatctttgaatcaggtgataatagtgtagaaggaatttgattaaatgcatacaaccaatatgatttctagcattaaattgcaatgtatattgtgttagtgaaaaaatcattagtaaaaatatagtccagtggtgtatcctgcttgaatagagcaggctggattacaggcgtgaaccaccacatccactcccttgttttattaaagcgagaaaaatagactcaaaacataataactgaagtatgtctgatgtttttgctactacctcatcttgctattgaagccactgttacctggccaggcatggtggctcacgcctgtaatcccagcactttgggaagtcaaggcaggagaagcgtttgagctcgggagtttgagttcagcctggacaacatagcaaggccctgtctctagtcccaaaaaaaaa

SEQ ID NO: 106828 - DNA, 409 bp, Homo sapiens
  misc_feature (1)...(409): n = a,t,c or g
atttattactatgcatatacaaatctgtaacaaataaaacgtttccatgtggtagattgtcttttttacaactttattgaggtaaattttacttaaaaatttcacatggtaggttttggaaaaaaaaatactttttaaaaacaaaagattaactcttctgtgtggtacatgaaaaactaactaaaaccaaaaacaaaaggcagcctgggcgacatggtgagaccccaactctacaaaaaattcttttaaaacttagcctagcatggtggcgtgcatatgtggtcctcagcctcccaagtagctgggattacaggcacgcgttgccatgcccagctaatttttatatttttggtaaagatggggtttcaccatgttggccaggatggtctcaatctcctgactttgtgan

SEQ ID NO: 106829 - DNA, 352 bp, Homo sapiens
atgagcttcaatacctgaacactaagcctgtgtgtgtgtgcgtgtgtgtatgtatgtgtgtgtgtttgcttgcgcccatgcgtgcatatcgtgggggggaacctgaaaagatatatagtatttgcgagaagtgtaacactgggctgcaaattcacacatttgcacatttctcttattattaacaatgatacttagacctttgatttactaatggatgagaattgttggaacaaagacttggtgctgatttcctgatggattaactttatcagtctgcctctctcaagcctcacatctatattactcaggaaccctcatgtacagatacacccctcctggtccctgagttatt

SEQ ID NO: 106830 - DNA, 356 bp, Homo sapiens
ggcatggatctttggcagatgtgccatagtctctcccttcctttaatttttttttttttttttttttcggaaaaaaccaggtctaattttgttccccaggcaggtttccaactccgggccttaagggaccctccggcctaagcctcccgagaagctggaataacaggcttgacccaccacgtccggccagggcaaatttttaaaaagatagggactttaaaaccaacaattttactaccattattaccccggaaataataccaggaaccctttaatatcatcaaaaattcagcccctgtaaaaagggcaaactgtggcccgggccccttaggaggctgaggcagggggatcctttg

SEQ ID NO: 106831 - DNA, 406 bp, Homo sapiens
gaaaaaatattgtgatgttcctcaaatggtgattttcctatttctgtcattttgtttatgtttattctacttgaagaagaatctttctcttctcccccaaagtgctgggatttcaggcgcgagctaccgcacccagccatgattttttggtttttaaaagaaagctgctaactttgattagtttgctaactctaagagctttccttgtttttaactttgtgtactctccttaaaaatagatatatccataaacacatatactcactcatatttgtaattcatcaactgtctactaggtttcaagccttatgaatctagaagcgaggttggacttgatggctcatgcctgtaatcccaacactttgggaggctgaggcaggcggatcacctgacgtcaggagtttgg

SEQ ID NO: 106832 - DNA, 401 bp, Homo sapiens
ccaagattgcaccattgcactccagcctgggcgacaagagcgaaactccgtctcaaaaaaaaaaaaaaaaaaaaaaaaaaaaagtggggaaagggtttccccccccagggcaagggttttaaaacaagggggggttttccccaaccttggaacccgggggtttaaaaggggttgggttttttgcggcctttgggtaacccggttttaaaacagggggggcccctttttaaaagcggaaaagaaaagcccccttgaggggaaattgaaaaatgggggaaaaaccaaaaaacccggccctttggaaaaaaattttcccccaaaaattacccttggtttcgggggtccaaaaaaagagaccccctttttggggggtttttttttggggggcggggtaaatttag

SEQ ID NO: 106833 - DNA, 1841 bp, Homo sapiens
acccttttcttaatggtgaaatccaaatttacaaccctaggcaaatggagtaaggaatatcttttaaaaattaaatctccaattatttaaccaaaaagtctaatgttctcttgtttatttactactcctcattacaaggtttttactgactaaagatgatgacatacctaatgtgactgtttgcattgatgactccttaaatagtgtaacatcaaccctcagaataaaatgtcaacacaaaaatccaagtgagtgatccagctcattgaactcacaggtaaactgagtttttctcaaatcaataaggagctttttattgagaacaacttcattaagacatttgcagggcaaatatgccatcataaattttattctgaattacaataaagtgctgaatgataattacctgaatcttttttagtacttttcacttatcttaagttaaaagagccctttctgtggcattagcaaatctgtgagtgagtgagtgagagagagagagagagagaaagagaaagagaaagaaagagtgagagaaagaaaggaagaaagagaaaagaaaaagctaacttccagtaagggaacaggaagcactgcaacctttcatgtttaactggggtgacaaataattgagaccaaagtaatcaaagtaattcatgcaagttatctttaaaggtatacataagcttgaagaaagaaagaacactgttactgacctttgatattatggcagtaaattgcatactaaaataccttaattatcctagatgcctagatctggcttggcaagcatcatgccactgacatgctttagctctttttgtaactaaaagtgatttgcagttcaattactgagtatttcaatgtgactcattaagctgtgtgatgaactttgaagttaaatttaagcaaattctttacacctaatcacaccatcagcacaagcaggacaatgctggagcagcatgaaaggtgggtcactttaaaaagattcttccttttactgcatgatatattaagatgacagacctaaatttcaactgggttaatgagttagaatagatctgtttcccaaatttagcacacaataatttcagtggattagagaaagaaacctcagatgtgaagaaagtgaagaaaaaaacaaacaaaaaagcttgagctataatagctaacctgcagctctaaaaattgtcatgctacagagtactttcaaaaaattaagtttgtaacaaacataagaaaacagtgttttgagttgaagttgaccaactgctgcatagaaaatatgctaacatacaacagtcaagtttaagcctgtgcatagagaagataaagcacttatggtaactgcaaatggtaacgagtccttaaggtttgtacaacctagtatgggtccataaggaaaaaactgtagtagaaatggttaggacaaacaataaagtagaaacaggggggaaacttgagaagagaagaaagaagcaagaaaaaaagactttcaattgtataaaattcacaaaccagtaaagtataaagacaccatggagaaatggttaactttgccccaaacacccaacagcaaacaaaaccagaatgaataagcctttggcagacaattttagaaatttgaatgttacatttctcaataattcacaaacaatatattatatggtatatttatattaaatattgggaaaccaatgttgtaaatttgatgcttataatgctttagccaatgagagcacaatgatatcaatcaagctaaatgaatgctggtgttatcacaacagtgctcatttatgaaacaactgttaccaattcgtgctttaacagtgctaaaa

SEQ ID NO: 106834 - DNA, 373 bp, Homo sapiens
taaagatggggtttctccatgttgcccaagctggtcttgaactcctgggctgaagggatcctcctgcctcagcctcctaaagtgctgggattacaggcagaagccactgcatccagccaacatactttttaataaagagaaatattaagaaaataaattgagacttaaatgaaagcaaaggatttggctgggggggcatggtagaagatggatcttttgtttaatagtgtcagagccaaatagcaggaaataacagtatcctaaattttaggggaaattagatgctgttttatgttggttatctttctgctaaacattacttgtgccagttaactcttttgtttcatagttctgcttagaaccacttgtaagt

SEQ ID NO: 106835 - DNA, 375 bp, Homo sapiens
gttgccttgtgggaatttagatccaggggtgctagatcttttgatttttttcaagggaagctataaagctaaatccttatggaatctactgatttttaaatattacaagttgtacaggatatatgtaattttggggagcatgagaagtgggaagaggtaccctgtacaggccaaactgcaggctaaagaaaccacatctgtgagcctcgtggcctccaggcctccagtatgaacttagaataattaaatgtctgcttcattgttggactagagcaatgattttcagagagagagagaggagagagagagagagagagagagagagagagagagagagagagagagagtgagtacacttgaaacgcaaaggggcgg

SEQ ID NO: 106836 - DNA, 358 bp, Homo sapiens
tctgtaccccaggctggggtgcagagtgagtgagactctgtctcaaaaaaaaaaaaaaaaaaaaaaaaaaaaaaaaaaaaaaccattaaaattattttcttttccaaaaaaaaaaaaaaaattttgaaaaaaaaaagtttctttaaaaacccaaatttatggggaaaacataggggggaaaaattaaaaaaacggaaaactttttgtttgccaaaaaaaaattaaaaaaaaaaagggggcccccctttttgtggagaaccggtaatacaaagaccccaatttttttttttcttttcccaaaaaaggccatggggtgataaaccccccccaaaacagtttttcccggaaaaaaaaccct

SEQ ID NO: 106837 - DNA, 411 bp, Homo sapiens
gctcattttgcaacctctgcctcccaggttcgagtgattctcctggctcagcctcccaagcacctgggacaacaggtgtgcgccaccacgcccagctaattttttaaattttttaatttttttagatggagtttcactccagcctgggtgacagcgcaagactccatctcaaaaaaaaaaaaaaaatttttaaaagggggaatccttgacttgggttttaccaaaaatttttgaaatagggtcccaaacccccgggcaccaaaggaaaaattagataagggggacattcaaattttaaaattttggggctttaaaagatccattcaggagagggaaaggacacccttaaaatagggggaattaatattcaaaatatttaaggaacttttacggtttacccgccaaaaaaaa

SEQ ID NO: 106838 - DNA, 360 bp, Homo sapiens
cccacgcgtccggctcttgatgcctcacctgcatcatcagtttaccgggaaaggtatcaataactccctcagggttctgaggggagttaaatgacactatacatgtaaaatacttaggatagtacattaaggttctctagagaaacagaacaaacagggtgtgtgtgtgtgtgtgtgtctgtgtctgtgtctgtgtgtatgcatgcacacagaaagatttattttaaggaactggctcatgcaattgtggagccttggtacgtccaaaatctgcaaggcaggccagcaggctgaagacccagaaaacagttgtgattcgaagtctaaaggcagtctgctaacacaatttccctcttgcta

SEQ ID NO: 106839 - DNA, 344 bp, Homo sapiens
aaggctctgctgcctgcagggcagagaggagagggaggaggccagcgagagggagcctctgtcggggcgtgggaggaaagcaagataacgcaggcgacccgagaaggacggtgaatctgactggccagactgggaatcttgtctgtcaccgaggctggagtgcagcgtggcaggatcatagcttactccatccttgaactcctgggatcaaggaatcctctagcctcagcttcctgagtaggtgggactacagatgcataccaccatgccccgtgaaggaaacggagtctcgctgttgcctaggctggagtgcagtagcgagatctcggctcactgcaggctcc

SEQ ID NO: 106840 - DNA, 333 bp, Homo sapiens
gtctcgttctgtcacgcagactgtagtgcagtggcatgatctcggctcactgcaacctctgcctcccaggttaaagcaattctcctgcctcagcctcccgagtagctgtgtgttttaaagcaagtcaagcaagctacctggactaaatattcttcttcacaaatttttgcaattttagattgtatgaccactctaagttctcatccagctctaaaatactgtaattatgttctaatatcaaatcaaagtccaaatcatttaaggctatggtccaaggtttaaaacaaagtaatttttgaaaactctttctataagcttaatatggattaaact

SEQ ID NO: 106841 - DNA, 334 bp, Homo sapiens
gcaatcttgatcaaaatccccataaactttttttgggggaaggagggggtaattgacaagttgattcttatttcatatggaaatgcacagggattcaaggttgcagtgacccctgtttgcaccactgcactccagcctgggagacagagtgagaccttgtctcaaaaaagaaattaaaaaaaaaaaaaaaaaagggaatgcaaaaaatctcaaatagctaatattttcccagggaaaaacaaatttggaaaacttagtagtacttgattttgaaacttagttgaaatctaaagtaccctaaaaacaatggtattgtcaaagtattaggaagtaa

SEQ ID NO: 106842 - DNA, 236 bp, Homo sapiens
gtcgacgcgggggttaataggcttaggcaggagaatggcatgagcttcgaggcggagattgtattgagcccagatcgcaccactgcactccatcctgggctacagattgagactctgtctcatataataataataatattaatattgtctacaattagttttcatcaactccttcattaatgtaaccatcaaaattgtatgaggaaaagtgttttatcatttgtcgacacggccgt

SEQ ID NO: 106843 - DNA, 400 bp, Homo sapiens
ggcacgagtgcccacatgggccaatcacctaccaccaggtcctactctcaacgggtggggattatgggcattacaattccagatgaggtttggtcaaggacacagccaagccatatcagaagtggaccctcaaaagtatatccttaattgatcctccaataagcatggactaaccttgtctgaagatgactacttatgattttaaaagtgctcttgaaattgcatttttttgctttacagctatattgaggtataagttacttataaaagttacccattttaagtggctgcgtgtggcggcccacgactgtaatcccaacactttgggaagcggaggcggtcggatcacctggggtcatgagttcaagaccagcctggccaacatggcataaccccatct

SEQ ID NO: 106844 - DNA, 374 bp, Homo sapiens
  misc_feature (1)...(374): n = a,t,c or g
ggcacgagctgggcagaattttccaaactttgatactagtaacaattaacagcaacccttatggttgccaatataaaatcgagcaataaatcaatcaaatgcttgactcaatcaacttcttgttctttctgtaccataatatagtctagactagctttaatactgctttgagggctgagggcagtggcttacgcctgtaatctcagcactttaggaggttgaagtgggaggattgcttgagaccaggagtttgaaacaagcctgggcaacatagtgagaccttatctctacaaatttttttttctaattagctgggtatggtggtgcacaccagttcttaagaggccgaggaggctgggcacagtggctcacgn

SEQ ID NO: 106845 - DNA, 398 bp, Homo sapiens
ggcacgagataagagttaattgccaatggaaaaaaggttgcttgcacttagctagaatttttttaagactttgttagcagattcctccaaaggtatcaaagaattgtcatgtttccagttattaaaattctactctcactttcaaaattccgataggaccattaaaactgatttgaagagcatctgctaatccattttcacctataccgatccttctgaggaactcctctgtattggtctggataaagagcaaatatcagtaaggattaaaaattggcaaaggttgttcatggtggtttacgcctgtgatcccaacactttgagaggtcaaggccagaggattgcttgagcccaggagtttgaaatcagcttgggcaaaatagtgagaccctgtctac

SEQ ID NO: 106846 - DNA, 1640 bp, Homo sapiens
atcaagaggaaactagaagaggttcaacagctgcgtcgtgacattgaggacttaaggaccaccatgtcagacagatatgcccaggacatgggagaaaactgtgtcacacagtgaggaattctgggggattcccccagggaggagctgggctgctgagagcctagtccagcaggtttctgccctgacattctcttgtctgctattcccagagaggtctcaaaggggaggggagagcctgcatctgggggccaagggctgattagggaactgtgtcctacccacactggcatgttggattacgtttgtcctgttaattcactctcgacggtgagttactaattaacttttggcaggtacaacagataagtcctcacaaactgttcccagccctaggctgacatgagagacgaacaggctgtccacctttcttctccatccaatgggatggatccatgttcattcccacttcacaccttggtcctgctgattagagagctcatcagaggggcctggaaaggctgagcaagtaccagtgacaatggccatttaagaattctcaggccccatgtgccagccttcttgggaactgagctggctttctgggttttctcatgcctggtcttactgcttcttcctcagggctcttgttctcccagaagcctcagggtaatgtgttggttagcacgtaactactaggattggggccctagggattatagccaggactctaatctgcctaccatgccatttaacaagagatcccactctccagctgccttgtgtccctagggtcctggccatgtgtttagtgtgctaaactttctcctttgttctcaggccttccaggtagtccccttcctggacttaagagtgcaaactcttctctgtggttctagccttgggcagaattatatcccagagaccacagagcaactgtcaagctgcttaccccctcacccagggctacagcctgtgcccagccctctaatttgtgcctctcttgtgttgggggtggtgggggttattcctttccctttcctgctctggcctccttgaaagttcagagtacccagtacaagtcagctttaaagtacagcttttagtgtttcctgggttgtttctctggggctttagtgagggacctttgccctctggtttttcttgcctcctggtttagggagcatctcacacttgttagtatctggttgttgggccagccgtgcctcctctagatctggagccaggccaggcaggggccacgtgtgggccagtcagccactacaagatttttgctaagctttgggctgttggcagcatcttggacctcatgcctgggcctgaatgaggctctttcttaagtgtttttacaagtttgtgttttatttatggagtgacttatcccttccattcagagcagccccacccagccagcccttcagcctctgggctcctgctgcttaaaggcagagccgcctggttggtctccaccctgtgcattgggagcccagcccccatgctgacgggtatttttcctcataaagtttataaccagttatttatatgaatctttgttatgtccaatttgtttgtattgcgtattttgattataaaataaagtatcttaccagccaaaaaaaaaa

SEQ ID NO: 106847 - DNA, 401 bp, Homo sapiens
ggcacgagctagaatgctgatgagttcatttatgttggagtcagttggcaagatgagtgtataaagagcatgaaacaggtagctcatgcctcaattccagcaatttcagaggtcgaggcaggaggattgcctgagcccaggagttcgagaccagcctgagcaacatagtgagaccctgtctctacatataagatttagaaatttgctggatgtggcttatggcccgtgttcgtattgaccgcttggagcctctgctgctacgtggtctgtctgttagtatacgttggctctcccaccccgattcgtaagtggatccctcactcagtgtcctgtcgaggtcccctgacatctagccgtctgcccgcttactgtgccgagacgagcgcttggtatgatccgct

SEQ ID NO: 106848 - DNA, 335 bp, Homo sapiens
ggcacgagaaattgtgtccccttggaccagttccttaatttcatgagcctcttgttttctctttgagaaaattttatttattttttttttttttttggaaaagatggggcctcactatgtggcccaagcgggtctaaaactccggggttaaagaaatctgcctgcctttgcctcccaaagcgtggggattacgggcttgggccattgggtcccaccttgttttctaattggaaaggcagggataataccatcggcttgttggcctgaggtgaagcttaggcaaagcttttgaaaggcatccaacactggggtggggccttacacagtacctgttg

SEQ ID NO: 106849 - DNA, 339 bp, Homo sapiens
ggcacgagaataagttattcttgaatgagtacagagtttcagggttttttgtttttgtttttttttttttttctttaaacaaagcctggctttgccccccaggctgaagtccagggccggaacctgggtccactgcacccttggtttcccaggttcaaagggtcttttggcctaaccctcccaagtacctggaataccttgcttcccccaccaccctaagctaatttttttggaagtttaagaaaaaagggggttcccctggaacccccatcgggccaggcggttcaattaattaattcttcatttttttgcacctgaagtcttcccatcccccagggg

SEQ ID NO: 106850 - DNA, 324 bp, Homo sapiens
ggcacgagtttttttttaccctgaaacagggtctcctgttgcccaggctagagtgcagtgggcattcacaggtgtgatgatggttcacattagccttgaactcctgagcacaagcaactctccttcctcagcctcccaagtagctgggactacagaggtataaccagggaattgttccagaggttcccttggatattcctacaactgataacagctgtcatttcttcagaatctactgtactcaagaacctggagctagctgctgtgagaggatcacatgtccgtgtgataatgatggcggtccctatcaatccattttgacat

SEQ ID NO: 106851 - DNA, 358 bp, Homo sapiens
ggcacgagggcaatgaacaaaaaagtgcccagtattttctttttgtttttgggtttttttttttttgggaaacaaaaattccctgatgttccccaggttgaagtgcaagggggcaaccttgcacaaccttggtttggggcacaaccttggctaagggcacaacctgggctaattgcaccttttgcctccaaggctccagcaattctccggcctaacctggagaacctggaataacgggcgtccaccaccacaccgggctattttttttttttttttaaaaaggaactttgcttttttccccagctgagaacccggggccaaattttaatttatgggaaccccccacctcgggggaaag

SEQ ID NO: 106852 - DNA, 877 bp, Homo sapiens
gtttttaactcctgaaatcgaactacgtttaagtttgtatgtttattacctgtttgagcacttaggtgcaattgtgggagcggggatgtcaagttcatttatgtgactctttggctcaacttacataatctttgttttgatatcacagttgtctaattattttactttgtagcttaaggcaggctgaattgttgataaaatggaaaaagtagtatattgttatataagcttctgaggtgtgttttgttgtataagccctggaggttaaaaagtcatcccttatgtatagtagttaaaggcataaaactgtgacttttagatattccacagaaccagacttatttgatgtggataataaccaatgatttagcattttgtttgcttttggttttattttatcccgggttcattttttactcttcccatgtacatgaaacaggtggtggcgtgtagagatcagctgatccttgttttatggttaattgaactactttgtatccagggtttctgcaaatccaaaagtgatttttcatctaggatctattcctaacagtctactccaatcccactttagttttccacaattttaaatcttaatagtgagaattcaaatgaaagtcatttcatttgactattctgatgacatgattgtggcagaataaattgggtcttaaaatgccctagaaaatggtaaatgataaaaaataatattttaaaattcaaccaaagaaatggcccattggccaggtgtggtggctcacacctgtaatcccagcacttttggaggctgaggcgggtggatcacctgagctcacgagtttgagaccagcctacccaacatggtaaaaccccatctctacaaaaaatacaaaaaaaa

SEQ ID NO: 106853 - DNA, 377 bp, Homo sapiens
ggcacgagaagatattttgcaggacagaaagaccatattcacataacttttattacagtatattatcataatcattctagtttatttacctttttcaaatttttatatattttttacacacaacatctcactttgttgcccaggctggtctctacctccttggctcaagtgatcctcctgcctcaacctcccaagtagatgaaactacaggcaggcaccaccacaccccactaattttattattagttattgttattaatctcttactgtgccaaatgtataaactttaccatagctatgtatgtatgggaaaaagcacaggctgtgtaggattgggtactatcctcagtttcaggcatccactgggggtcatggaa

SEQ ID NO: 106854 - DNA, 388 bp, Homo sapiens
  misc_feature (1)...(388): n = a,t,c or g
ggcacgaggtggaatgaagtaagtgtgcagtaagtgttaactacaaatattattatctgggacatacagaggtccatgattcatgaatggtgaagcatcttagaagacatccattctaagccaggcatggtggtgtgcacctatagtaccagntgctcagtagaatgaggcaggagaattgcttgagcctaggagtgagtggcttgtatgggcaacacgcgcactccgtatctcaagcagagggcttcgctttcgtttccgcttacggagattcacgagtacgcgctagaccccggtcgtctaagctcgcctcaacgctcacgaatccgtgtcgcgtctctgagcgtcggacggtcccttcctcccgtggtccacacacctttcgacc

SEQ ID NO: 106855 - DNA, 1265 bp, Homo sapiens
gcgtcggactttttttgtttttttttgagacggaatcatgctctgtcacccaggctggagtgcaatggtgcggtctcagctgactgtaacctccgcctcctgggattcgagattctcctgcctcagcctcccaagtagctgggactacaggcacccaccaccacacctggctaatttttttgtatttttagtaaagctcggggtttcactatgttggcctaggccggtcttcgaactcctgacctcgtgatccaacccaccttggcctcccaatcttaattgccttacaaagtcctgcttcagggttaccttccctgaccactgctgcctccctcccagcatttgcccgggactgtcattgcctttagttatttttttctgttttgttttttttttgtcgtttttgtgttttttttgagacagcgtcttagtctgctcgccaaggctggagtgcagtggcgcaatcaaagcttgctgcagccttgaactcctgggctcaagcaatcctcttacctcagcaactaggactacaggcacatgccaccacgcttggccttctaatttatttctgtgtcaacaaaataaaactcaggcctaggaatagcttggttcagaaatcacagagggacttagtattccattaatacaaatggaaacattaagttcatcctcagatgataaaaggaaaaaaaaaaaaacctgatactcatctcaaaagacgcagaaaagacatttgcataaatccagtacctattattatttcaaatttaaaaacttccttcttttttaagagatagggtatcactatgttgcccaggctgatcttgaactcttggcctcagatgatcctcctgcctcagcctcccacagtgctgggactacaggcatgagccaccacacccatcataaattaaaacttctgaacaatctagtaacaaatggaaatgctttcccatgatccagcacatctagcagggggtgtctgctgacattctacacaaagagacacactggagttgtgcttctcatcatttcacattaagaacccaactgcacctttttctgtgcctctaaacacctgtagtctgataggggacaccccccccaagaccttaatcattcacattaacaccttgagactttttgccatatctgactgaatatagccagtcattttttcccttaaatcaagtcacttttttttttttttaaacaaagtctcattctgttgccctggcatgatctcagctcactgcaacctcctc

SEQ ID NO: 106856 - DNA, 385 bp, Homo sapiens
cccacgcgtccgaaaacttgtttcatatgtatatatgtatacacatatatgaatatgtatgtatatatacatatatgagaacatgtgtgtacacatatatgaatatgtgtatatgtgtatgtatgtatatatgtatatgaaatgagagccacatctaaagatttcttaaatcaagtttggttcagcttccttagaactgtggctgtactttttgaggagtacctcatagtactatatttttaatgcatgcaaatcataatagctccaaatgaaccacagttttttcccaatggaggatttttttttaattcttgtactaaaaaaaaaaaatccataccaaatatttttacaaattaagattgatgtaggttttaaaaaaggcatt

SEQ ID NO: 106857 - DNA, 317 bp, Homo sapiens
tttttttcataagattattagtataaagggggagataggtaggagtagcgtggtaagggcgatgagtgtggggaggaatggggtgggttatgactgctaccactgcggcttgacctggccggaagttacagatttttgaatctgtattgcttggcttgaccgagcagatcatttggcactggcatattgcacacatatgagattctttcattcatacatagatttgcctggtccaaggtatttgtactgctctaatataagttatgtgcactttcccattgatgattgcatgatgctattgactggctttttggtgg

SEQ ID NO: 106858 - DNA, 203 bp, Homo sapiens
gagaattgaaaacatacgttcatacaaaaacttagcagcattatttatgacagcaaaaaaaatgggaacaatccaaatgccccacaattttgaatggataaacaaaatgtggtatatccatacattggaacattaatcagacaaaaaaaaaaaaaaaaaaaaggtcaaccgggccgaaattccaaaattaataattcaaaaat

SEQ ID NO: 106859 - DNA, 367 bp, Homo sapiens
  misc_feature (1)...(367): n = a,t,c or g
ctttgatttccttaataacccatttctgttaacctcttattaagaaagaaaaaaagaaagaaagaaatgaacggaagaaagaaaatggagggaaggaagatagaaaagaaaaaaggaagaaagcagcaatgaaaacaaacaaagacattcttcccacttcttggatttttaaaccacaatctgaagcaatagctactatagaaaggaaacagactttgtatgaactctaagttgaaaaatatataggcagggcgcagtggcgcacacctgtaatcccaacactttgggaggccaagacgggtggatcacctgaggtcagaagttcgagaccaggctggccaacatggtgaaaccccatctctactan

SEQ ID NO: 106860 - DNA, 564 bp, Homo sapiens
ttttttttttttattcggctcagtctaatcctttttgtagtcactcataggccagacttagggctaggatgatgattaataagagggatgacataactattagtggcaggttagttgtttgtagggctcatggtaggggtaaaaggagggcaatttctagatcaaataataagaaggtaatagctactaagaagaattttatggagaaagggacgcgggcgggggatatagggtcgaagccgcactcgtaaggggtggatttttctatgtagccgttgagttgtggtagtcaaaatgtaataattattagtagtaaggctaggagggtgttgattattaaaattaaggcgaagtttatttggttttgtcaaagttttacgaaaatatatgatatatatttatactaaaactatataatccttagatttaggaaagcaatcagttaatgtctttagcacactaaagcagtattaaacacaggtacaagttggaaattgtagaaaactgaaagaaaacaagacaaaatgtctatggtagggaataaaagagtttaagatattatgt

SEQ ID NO: 106861 - DNA, 388 bp, Homo sapiens
cccacgcgtccggactagttctagatcgcgagcggccttggaactgattttttttttttttttgggtccacccaatttaccagtgtataatgggcccctgggtagaaccaaacctgggactggggaacttgatactgggggcagcccaatcctgtgtgtgggccaggggaggcatccttactggaaaggcggggccaagcctttggccccttttggaaagggggggggcccatgaggcacccggcccttggcagggccaattgtcccaccgaaggcagggctccagtcggaaatgcccggtatggcccccttttgtggaagttttgggtaacctttaacgtttttttttccacccagggcactggtgataaattaggttcttgggggg

SEQ ID NO: 106862 - DNA, 360 bp, Homo sapiens
tcatgtaccccctgcttgctcaatcgatcacaaccctctcacatggaccccgttagagttgtgagcccttagaagggacaggaattgcttattcagggagctcggttgttggagacatgagtcttgccgaagctcctggccaaataaagcccttccttctttaactcagtgtctgaggggttttgtctgtagcttgtcctgctacacctgtaatcccagctactcgggaggctgaggtgggagaattgcttgaacccatgaggcacaggttacagtgagccgagaatatgcccttgcactccagtctgggaacaagagcactacttcatctcgatcaataaaccttccgaagggggagcg

SEQ ID NO: 106863 - DNA, 463 bp, Homo sapiens
atagactacattatcgttgttctatttcacctgggtgcaggtgggctgagtccgaaaagagagtcagcaaagggagataggggtggggccgttttataggatttgggaaggtaatggaaaattacagtcaaagggggttgttctctggtgggcaggggcggtggtcacaaggtgctcagcggaggagcttctgaaccaggaaaaggaaattcacagggttaatcactcagttaaggtggggcaagaacaaatcacaatggtggaatgtcatcctataatagcggggcagggacttttcacttattttgtgattgttacgttacttccggccatctgatcttgtatatgcaagttacagtcgatgctatgtctagcttggctctctctgatctgtcttgcattacatctcataaagtatctagcattgtcctaccgtccgttcattatctccattcttacatat

SEQ ID NO: 106864 - DNA, 861 bp, Homo sapiens
ttttttttttttccttttaatacctgaatgttctgcgaaaactgaaattgttacaggccaccctgccgcggccagggcgagacaggctgggcccacccagaggtagagagtagttttatgttttttaaaaatttttttaagttttttttttttttcctcctattacctgagtttcaggcgtggttcccacgccgtctgacaaactccagagaaactgaaatttcacacgtcatgaatgaaaggctgagtttacatttgccaaggaaaaaaatgcaaaagcacaattggggaaaaaagggacaaggtgggtaaaacatgataagagaaaggaaattcaactgtacagatgcgtgacccttaacaacgaccccagctgccccccgtgccccgtgcccaccctcccgcctttctggacagccacttacgggtcccacggaaggttccagaagccgcctttctcccaacatctcagagcagggggagcccccgttggccttgactgtggggcacccactcagtacgcagccaggccccacggtcccaagtgaactagaacccatccagggtcctcgtggctgaggggactgcccgaccccctcccagtctgcataagggggggtgctgagctgcaccccagaaagccacaccgaatttaaacccccaccgacaggcggtggcaggagatgggcacggctggggttgaacggggccacctgaggcagggaggagcctctgcagacacggcttcctgccgagtatccaggaccgggccccatagaccccctgcaaccgcctcccatttccacggccagcatggccactgccttcagcgacttccttctcctgggccgggacccagcc

SEQ ID NO: 106865 - DNA, 1675 bp, Homo sapiens
ggcacgagcaaagctaagtgaagtgacccctcttcttgcctctgtaacaccgccatgcacatttcatacagcccttgctgaaacttcatctagttctctgttagacttaacattccctaagggcaggtttggaaccttactcatctttatatggcgtctaaaatagtgcttgctttatgataggtgctcagtaaaggttgtcttgaattgagcagatcctctagggacaggagttggatggagagcagactgtaaagcctcatgagggcaggggccctgcctcttcctgagctcaggatacccagagcctagctcagtgcctgccatgaaattgttcactccatcaagccttgttaaatgagttcggggcggggggagcatgatggttttctctctctcagaaagaaagcgctgtatcaaagccctagcaccctctctacacccaccttcagtatttcatattagatgcggcccaagtgatactttctttaccgtcccgtgaagacagcatattggcagccctgcaaaaacaaaacaaaacaaaacaaaaccctcagttcatggcatacttgctataaatcagctatgtgtattgtcaaattgtagaactgaaagtatattctgattcggtgtgtgtataaggaaatatacaccagtatatgcattaaaacgtcaagaagagctgggcacagtggcacatgcctgtaaacccagctattcaggaggctgaggtgggaggatcggttgaggccaggagtttgaggctgcagtgagctatgattgcacagctgcactccagcctgtgctgagacctcatctcttaaaaaataaaaaataaaaagtctaagaggatacacagaaatttttaagtggttacctccacggaatgggattaggggatcagaggtgagggaactcatggtttggctatttctcgttctttctgcactgtttcaaatttttacaagtgtatgttattgtacttttaaaaagattagcttggcaacaagtctagcctgaaatgggtgctattttgactagtctgagtgaaaagtgaggatttaaatgaagtaacccctaaactcagccagtcccatgtttttttaacacttggaatatctaattccatttacactgcattcttcaaatgtaattttcaaagatgccttttgcctcatcccttgcttttaagtattattatagacttttggagactcacgaaacaagcaatccctaaattctcgcccaggaaagtatcttggattaaatggtttttgagaaccttgagagtgtatattctatgaaatggaagaaacaagaactagacagagtcacaaatgctgttgatcacagacaatctctgccatccataaggtaaatgtaatacatctggcgacctgctgagtgtgaacttgcagcaggtgaggaaggaactctgaactctcacaatcttgtttcttcatttcccagagagaaactcggcaaagagaaaaaggacatttccctccaggttatctgaaagaatttcaatgcttacctttaatcatgtgacattgtttatcttggattaaaagaaaagaaaatgtatttattttgtgcatattttcaataaaatatataaaatcgagttggtatatagtgccaaataccattaattaaaaatattttaacctga

SEQ ID NO: 106866 - DNA, 378 bp, Homo sapiens
  misc_feature (1)...(378): n = a,t,c or g
cacaatctgagaggacaggggagaacactctagctgtgcaccgagaacaatccaaataccatgaatttgtacagaggtgggacctcattgaagacactgtaatggtctaggaggctaccgtggcgacgaggactaggatatatagaactgttccaaggccttgagatcaggcaccactttttatttggacctcattatttaaggagaacacagtgccagggaccagtaataccctcagaacttgatggccaggggtgggactacatgagtccaggagtttgagaccagcctgggcaacatgacgaaaccccatctctacaaaaaatctaaaaaactagctcagcatggtggcatgcacctgtagtcccagctactcan

SEQ ID NO: 106867 - DNA, 403 bp, Homo sapiens
cccacgcgtccgtagagacacggtttcaccatgttgaccaggctggtcttgaacttctgacttcagatgtttcacccacctcggccacccaaagtgttgggattagaggcatgaaccaccgctcctggccgcctgtgtgaatttgaatgagctcttgatccctcagtttgctgttaggtaaaatgtggataatgatacttaccccaagaggcattaaaagaattagctattggttacaaaaggctcgcagccttcaaatgacaggtatgatatagagtaattaccattattctgtatagtcgttattttaacacctgtcttcttttacaaatgtaaaaaatatatataaacttataccctaagtagctgcattgtggaaattttttaaatgtctaggatgttg

SEQ ID NO: 106868 - DNA, 422 bp, Homo sapiens
cacttggatatgaagaccaattcttcatatcagctggatacgtccaattagttttggataaaaatatatgtgtgtgtgtgtatatatatatatatatttgtgtttcctaaacagagacagggtctcaccatattacgcaggctggtctcaaactcctgggctcaagtgatcctcccgccttggcctcccaaaatactaggatcacaggcatgagccaccatgcatacccatcatctaccccataactatataccccatctttgtacccacaaactttaaaatacaaattttaaaaaattcttatgcttttcacatcagcattcctccttactcatttcgccttgcacaaattgcctactatctgtatcactgatctaatcccgccaactactgccccactttacagctatgtcctgggcacc

SEQ ID NO: 106869 - DNA, 1567 bp, Homo sapiens
  misc_feature (1)...(1567): n = a,t,c or g
caactttcgacttctgaaaagaaggctacgggagagtctccagtgaggggtctccctgggcctcatggtctgtctcctctagcctcctgctcatgctgcacgggcctcccctccaagctacacttggctgtgctatgaagtgaaaataaagaggggccgctcaaatctcctttgggacacaggggtctttcgaggcccggtactacccaaacgtcagtcgaatcacaggcaggaggtaagcagctgggaatgcagaaaacacataagtaaaatgtctggcggcgggctctcaactgtgtattttttccacaggcgcttccagatcacctggtttgtatcatggaacccctgcctgccctgtgtggtgaaggtgaccaaattcttggctgagcaccccaatgtcaccctgaccatctctgccgcccgcctctactactaccgggatagagattggcggtgggtgctcctcaggctgcataaggcaggggcccgtgtgaagatcatggactatgaaggtgagaggtgcaggggtcaggggagcatgacggggaggaacagcctcagagatggatggatctgcaatgccatcaattatgcatccctgcaccgcacgctaaaggagattctcaggtgagggtctccctctggcctcatcgtctctctcctctcgcctcctgctcatcctcctgaggactcccctggcaacgaaagctggctgtgcttcaccatggaagttacaaagcaccactcagctgtcttccggaagaggggcgtcttccgaaaccaggtagcaccaaagtcctatttacaccctaaataggagctaagcagctgggaacgcagaaaacacaatacgtgacacacaaactacgaggtcacctggtacacatcttggagcccttgcccagagtgtgcaggggaggtggccgagttcctggccaggcacagcaacgtgaatctcaccatcttcaccgcccgcctctgctacttctgggatacagattaccaggaggggctctgcagcctgagtcaggaaggggcctccgtgaagatcatgggctacaaagattttgtatcttgttggaaaaactttgtgtacagtgatgatgagccattcaagccttggaagggactacaaaccaactttcgacttctgaaaagaaggctacgggagattctccagtgaggggtctccctgggcctcatggtctgtctcttctagcctcctgctcatgctgcacgggcctcccctccatcctgcaccagctgtgcttttgcctggtcatcctgagcccctcctggcctcagggccattccatagtgcccccctgcctcaccacctcctccccgctctcccaggctcttcttgtagaggctctccatccacctccccagtcctgttcccccagcctgggtgcccctaacttgactcttcccatctccccagcataaccaaatcnnnnnnnnnnnnnnnnnnngaaaaggggtttaattttgcccccctttttaaaggcaaagggcgggtttttattcaatatgaaaacttgtttaagggggcaagggtacc

SEQ ID NO: 106870 - DNA, 423 bp, Homo sapiens
gtgtccctctgggaaaaagcttccagaggaaggagcaggcagtaatttttgctgttctgcagcctccgctggtgatatcgaggcaaacagggtctgcagtggacctccagcaaacaccagcaggcctgcagaagaggggcctgactattataaggaaaactaacaaatagaaagcagtagcctcaacgtcaacaaaaaggacaaccacacaaaaaccccatctgaaggtcaccagcatcaaagaccaaaggtagataaatccctgaagatgaggaaaaagcagcgcaaaaaggctgaaaattccaaaaaccagaatgcctcttctcctccaaaggagcacaactcctcgccagcaaaggaacaaaactgaacagagaatgagtttgatgaattgacagaagtaggcttcagaatgtaggtaat

SEQ ID NO: 106871 - DNA, 2847 bp, Homo sapiens
  misc_feature (1)...(2847): n = a,t,c or g
ctttgccagccaacagatccctgccaggttttggaaatacttctattacctcgctgctacttttctgcagggataaaacttttgaggtggccagacccagaacatccaaggattcctgttacagtgctacagtatacactgctcatttatcctattctcatgtgctttcttctttagtaagattattttaagaaaataagtgatatttaaagtccaaagaggaatgatcacagttgtataaggggtgttttcccacttgaactctgatgtcagtcgactgtgggtcagagctacaaccatctgtttggtttgatgttttggtggtttacttacggagtggggatagtgtgagacctaattccctgtgcaaatgtctcttattccagaaatgtgcattttgtcatctataagcaagaaatatgggcatagcagctcttggtttaaagtttgccataacctgttcatgtttgttttaagctcaggtaaagataacctccccctttctatgactccagtttccattcaggttatagtattattcaatagttgattttctttttaagctggggcaataaattgatgtttccagatggtaacatgggaagagggcatataggataaagatggagcaaattctaccctaaaaatggttctagtagttcacaggaagaagatgaggtttaataactttcaaggtaattctagattgacattttgaggggaaaatgggctcttgttctagttgaagtgagcagagaaggctataaattaatatgtaacttacagcattccagaggttaaaaataactgatgcagatgtacttcttcagtgtgattcttcagatcaaacttttacttttggcatagttaatttcagaaaaatgtgctgtatgtgtgtgtgtatgagggttggtcttgctgatccttcagttagctctaaattctggcaactccttgtaattccaatgtatttgatacatgaacaatcatgttgaatgcatttgtgatctgggagacttcctcgtcttccagggaaggaaggatgtgcagcccctgaaggcatgaaactcccagtgtgtacggagccagtggaatatgggatacccataccttaccaggcgctggttccttctgctcacaataacatctgcccaaagagggagtgggaagaacgcttagctctttcactagtatggatttgagttcatggtcactatttttacccacctgcctttgttaaaaatcactttgagtagaatagcactggaggaacatatttagcacctaatattaatatttagtagtccattgataaatttgccagcatatgttctagcctctggggggaaaccaggaccacttttgtctgtggcttaaacagttcagttgctatatctgttgggtatgccgggggtggatgagtgtggcattccgtgaagaggaaggtggtaagtaaggtttcccttctactgccttcttaagttgcaggagggagcttttctcctcccctctggttgggagcactgaggacagtgaggagggcttttaccttgttaatcctttccttatttagctagctttcctttttgtctagggcttcctcttgagaccctcttccatccattgggcctttgaaaggactaatcagacacacacacacacacacacacacacacacacacacactcgcatactcatgcacattttccttcatttccagatcctttatttcagagcagcccattttcctctggattcattgatgaatacaagtacccacacctttggccagtaatgtcagttacctgctgcaggttctgtgtatgaggccttcatgaacggttaccttctccatacactagggaagcatttgtcagactctgcagactgggttctagagaggcagagtctttaagagtattcatttcttctggaaggtggagctttacccaaagtggaagttagccttgctcaaagatgtgttttgtggtaggtggtaaaaataaataaataaataaataataaaaaaagaaacatgtattggaggtaatttgacactgctgctggcagtagttctctattcaccattttaaagcccattcaggttctctcttcctgaaaagaactgattgctgtgtttacatgaaatgacattggagtcagatggtctgttttaaagatttccatgacagcctcttttcctgagttggagagattggaggtggtctatccgtacgatgtggaatcaaacggtgggtttcttagtagctaaagaagccatgtacttctagtgtgtttctcagaatatcaactcatgttcttcagatgcttttctttttttaatggtgagggaaaaggtataatttgggattccacagtgccttgcatatagtagggcgccccagtaaatacttgttgaaggcaaacccaagtttcccccaagtccctcatccccttatagtgaccaaggacatctttcctccccctgaaggggcttgggcagttgtgggcctaaaaaataaggcagtattcattattttgcttggaaatcatattattacagttttgtatggaatttccagtanggtttgcccaggacatgattttttcttattgtattttcctgtaaaatatttctggcactgaactgtgaaagtaaagggccaagtgttaatatgaaggcgtgcccgtgccccttgcctcctgtgtttcatcttcgtcggttagggaagaaggtccagaggtttgtttgtatttatgccgatcctttgtccagaagaagcccatggaatattgaatgtaatacatttagtcaattaaattttaaggagattcttatctaataaa

SEQ ID NO: 106872 - DNA, 520 bp, Homo sapiens
  misc_feature (1)...(520): n = a,t,c or g
cacaattagaaataagcccccagagtgtccatattgaaacagtcagtgtgctgccatctctcagtcagttggccttgtccacttgccaatggaacttcctctaaaaatttcccaaattgaaaagagcagatcatgctatctgggcctacaaaggaaatttcacctgtcccaatgcagatatcaaatttaaagattgttcnnnnnnnnnnnnnnnnnnnnnnnnnnnnnnnnnnnnnnnnnnnnnnnnnnnnnnnnnnnnnnnnnnnnnngggggggggccctttaaaaaaaacccttgggggggccaaatttaaccgggggggggaaaaaaaaatttttttcctttaggggggggaaaaaaaaccccccggggaattttggaaaaaaaccttttttttgggggggggaaaaatggggaaaacccccccaaaaaaattaaagcctttagggnnnnnnnnnntttttaaaggggaaaaggggaaaaaaaaccccaaaatccttggggtaaaaaaaaatgggg

SEQ ID NO: 106873 - DNA, 416 bp, Homo sapiens
ctcaggctcccaaagcatagatattacaggtatgagccactgtgcctggctcacactgttactctttttattaatctagtgctgcgttctatctttagcgtccaggaagcttacccccaacttttgtgcttaaatgctgtcatttccctttgcctatgtttttgataaaaatattctacatggctgggcatggcggcttgtgccttgaatgccagcaatttgtgaggctgaggcgggaggattgcttgaagccactaggacgagaccagcctatgcaacatagcatgaccctgtttcttaaaaaaaaaaacaaaaagggtaattttttttaggttccaagggacattactttttcaacccctgcaaggcgcgggggctcattcctctgctcgcgggagttggacatgccaggggtg

SEQ ID NO: 106874 - DNA, 869 bp, Homo sapiens
tccgggtcgacccacgcgtccgaccgtaaatgaactggtacttggaatccggacatctgaaacttgaattgacttgccgacatcagtctccagagcgaatccaaggagtggacccaagacatttgtgttctgtgatgtgggggcatgttacctgtcatctccgatgcataactcctaaagtgcgtctggggcagttgtacagattgcagaggataatactcaagatgttctccaaggccaactagtcatcagtttattcatgtttctgggattggattcatgaactcatcctttgaactatttcaacaagcttcttcatgtaactaatctgcggaaggtagaaaggggaaaactgttgggtgctaaaatgacaactggttcaaggtacaatggcgaatatttttatttctgcaacttttcttagaggttggaaactggactgggcaggaagattcctttttgtaagattagtctccagttttcatcaagcagtttagtggggtattttaggcccagttccctctccacagtccccaaaggtcttctgttaactttaaatccgcaaagagagagatctctgccaagcagcaactgcaagagcatgtgggtcaatgttaccagcagacactcaaagcccattccctttacttcaacaccgctttataaattatcttagagacgttgtcaggttggtattagaggtgagtggtcacgacttcacgatttctcatctttctgaatgcatagtggctgggagtggtggctcatgcctgtaatcccagcagtttgggaggccgaggtgggcagattgtttgaccacaggagttcgagaccagccggggtaacatggcaagaccccaatctctacc

SEQ ID NO: 106875 - DNA, 420 bp, Homo sapiens
cccacgcgtccgtaaacagacaactattagttttatcttatatacttgtaaattaaaaaataatgatgaattattttatatttttctataagtcattaggagcttatgttgatttgtttgctttgacccttcaaagacatctgtgcatattcactctcttaacactgggtattttataatttattataagtgtttttaccccaagatggaatatgctagattatataaatccttacttgtaccacacacacacaaaaagacaaaaattctgttagagccaaagaattgccttaaaagataagcttcagggctgagtgcagtggttcacacctgtaaactcagcactttgggagtccgaagcaggaggattgcttgagatcaggagttgaagaacaacctgggcaacatagggagatgctg

SEQ ID NO: 106876 - DNA, 512 bp, Homo sapiens
cggacgcgtgggcggacgcgtgggcaagaaatgccttctgtctcagggaagcccttaccagaacctctaggtagagttagaggctaactccacggcaccctagagtccatagcatgttgttatcatgtgtgtatcgttgcatgtaaaaatattcctatttgttacggtttgcttgtatgtgtttgtcattaatctattaattcattcagtgaagagatgccaacttgtatactagcctgggaaacctctgtgtcctcagtgcctaatttaatactcctttttctatctagtagtaaaatgaatatgaatgtacatgtctgaggtctctataaattaaaaggtaaaaagtcttaagccaggtgtggtggcatgcacctgtattcgcagatatttgggaggttgaggtgggagcattgcttgaggccagaagtttgaggctgtagtgtgcaatgctcttacctgtgaatagccatggccctccaacatgggcaatgcagtgagaccctgtcttt

SEQ ID NO: 106877 - DNA, 1341 bp, Homo sapiens
  misc_feature (1)...(1341): n = a,t,c or g
gggaagaggcagataggaaatgcctcaaacttcttctcactttgatgtttacttcctcactagaagccaaaggtaaaggtgtccatcttcagaaataatgcctgtaataatctttttagagagtccaactatttatatcctctctatagtaagcatttgaatatcccagaacctcctttccgaggatcctctgttaaagttgcccagatgaattgaaaaattgaacttgcctttttttgtttaacacagtgttccctataacaagcctgtgactaattttcacttaagtgattgaacccaaatttatctaataacatttcaggtgaaaattatattgcaccaaaactttgacacaatatgcaaaaatagtatgaaactaccctttgttaatttattcttaaatcaaaatactaacttttaaaaaacatcagaatcatcagcattgttcatcagtagtaaaatgagcttctcagtcaaggtcataccaagtcagtgaaaagtgtgactgcaaaaaggaacaaaaaaagtgaaagcagaaagtagaaatgggtgatttagcatgtaaaaccgattgccagttgcttgatgatgaaatcaacatagtgaatactgtgtctgctccctctgccaaagcttctaggtcaaatggaccccgttccacacctggaaccgctgtacaaaaagaagaatgagactctttaaaaattatgcacatacacatgcacacatatatgtgtgcgtgtgtatatatatatatatgtgtgtgtgtgtgtgtagttcatcagccagctacacatgaggaccaaaatgcttcagtctaaaatggaagatacacatttttttccttcaaaatgcaagtgagaactgaagtagcttttttatggagttaaatgtaatctttctgtgtaccagtctttgttgtattttatatttcttaggacacagatttctagttgaccacttaacatttgtaactgatgatgtgctgaccnnnnnnnnnnnnnnggccaaataaaaaaaagggcccaaaatttttgggggaaagggggtaaatattttttgaaaaggaaccaagggggggggaaacaccaaaaatggggcctaaattaaaagggctggggatttaattgaaaaaaccaaaaaaagggggaaaaaaaaacctttggccctggggtatccaaaagcccagggggcaaaccaaggaattcccctggtaggggttcaaaaagacccctcgggtttttcggggtggggaaaagggggtcacccatttttaattggtaacccccagggggagcccgcttaaaaataaaaaaaaatttgcgtgttggggtgctttcg

SEQ ID NO: 106878 - DNA, 438 bp, Homo sapiens
cccacgcgtccgcccacgcgtccgctagtctagatcgcgagcggccgcccttttttttttttttttttttttttttttttttttttttttttttttttttttttgggaaaaaaaaaaaaaaaggggttttggggggcccctaaaaaaacccccctttttttttttacccccccccctttttaaatcccccgggggaagatggccccccccacccccaggggtttttttttttttttttttccgggttattgggtttaaacggggggggcccttgggggggaaaatttttttttttttaaaaaaaaaaaaatttgggggggggccccctttttttgggggggggggccaaaaaaaaaagggggtttttaataaaactaaaaaagggggccacccccccctaaaaaaagggggtgttttttctcagaaaaatttttttgt

SEQ ID NO: 106879 - DNA, 415 bp, Homo sapiens
atgttcttcaagctggactttatgccacaaggggagtgtattctaaaggggaagaaaaggattgtggtttaaaagaacaattgtaatatttccttcattctgaggcaggagaatcatttgaacccgaaggtggaggttgcagtgagccgagattgggccactgcactccagcttcagtgatggagttagaaaaaaaaaaaaaaaggttttttacataaaaaattttaattttttgtaaattataaaatagcccttaataggggtttggtatcccgggatttttgaatatccaaaattaaaaaaaaggggagcagttttatgaaacttttcaaagcttaaaaaagggaaactacttaaaattccattatatgttttttatgggaacattaaatgaagtaggtcttaaaaccatgct

SEQ ID NO: 106880 - DNA, 745 bp, Homo sapiens
atctacaggcatggatttgtaattctcggccgcgtccacattattaattttttttatagattagggacttcaactgggtgggcttggtatctgatttgtctggggggagaaccgttaaggtgctcttttaaaatgtatttggaaacaccatagttaggggaaatacaatggcacaattcactcttgcatattatttgcttagcccaatttatgaattctaagttaggccaaattgaaggttttggagttttacattgtgggtgagtctaaattcatgcgtttggcaagcacaaggacatgggaaaagaatctggtattttgaggcaggcttgagtttataatgaaagcaaactcagttcctcttcatgtcctatgtatttaagagaggacagttttccctcagtttttttccccttccttacccctacccccatcaaatacagcccaaccaaataactgtgttcttaatttaaaggaaaatggcagacttgatacctgctgaatatttcgtgtagacagagtatgacaatgaatgagatccccagtcattgcccttgtaagcctgggaacccagtttagtgggagagactaatgtaaacagctttaatcaaaagtatatcaattggccgggtgctgtggctcacacctataatgccggcactttgggaggccaaggtgggtggatcacttgaggtcaggagtttgagaccaccctggccaacatggtgaaaccctctccctattt

SEQ ID NO: 106881 - DNA, 408 bp, Homo sapiens
cggacgcgtgggcgacccactcgtccggcagggtcttgctgtgttgcccaggctagagagcagtggctattcagaggtgtgattatagtgcacaatggccttgaactcctggctgcaagcgatccctccacctcagccacccaactaggtgggaccacaggagtatactgctgtgcccagctttgaaatacgtttcctatgaagtcagtattttacagatttatctgaagcttttgtttaatagaaccaaagacaaatttattaaagtcttcaccctgtggtagtgtttaatcagcctttggtgatggagattaaaactttttaatgtaaggagtatataagaagtatgagaaaatcgggttccttatctaggactgatggttactctcagaaattttactcagagtc

SEQ ID NO: 106882 - DNA, 388 bp, Homo sapiens
ggcacgagctaaaattaatgagagaacttgaattaccaggtattgaaacactgtaaagccacaatcatgtaaacagtatgttataaccatgggaatagaggtctgtgatacagcagaaaaaagtgaaaaaaagaataactgtattcataaaaatttaaatgtggagtcactgggggaaaggattaaatattcgataatgtagaaacaactcaactatttggagaaatgtaaatttagagccttatctcatgccatataccaaaatactatttagatttgattaaaaaataaaaatgtaaataaagaaaagttaaggcaaggcgtggtagctcatgcctgtaatcccagcattttgggaggccgaggtgggtggatcacctgaggtgag

SEQ ID NO: 106883 - DNA, 441 bp, Homo sapiens
  misc_feature (1)...(441): n = a,t,c or g
ccgttgccatgacaataacaggatgtagaaagacccatgaagaaagaaagaagaaagctatggttccgaaagcaggtaaccacagattttgaaaggaggcagagatggtgattaaactgtagtccttgttttttaaaatgttctttcatgttaggcaccaccacatagttaataactaccaacttctaaagagaagatccccttgatttatttatatcatgaaaatactaaaaatcaattctcaagtctaattaactattacattatcttgctagggccttttccctaaatttttaattcagaaaattaaccagaattggccagatgcagtggttcacgcctataatcccagcactttgggagtccaaggcagatggatcacttgaggtcagtagttcaagaccagcctggccaacagaggaagaaagagtgaaaacaaan

SEQ ID NO: 106884 - DNA, 435 bp, Homo sapiens
gataattgtaggttggttcgttggtttgttttaaggaatatttttatttttcaaagcactataaaacaaattttcttagaaggtctggaatatgaaaatcatagccatgaacatttgtatgcttacaaagctgccaaatgatgcatggctagtgagtctcaaagtatttcactgatgctcaaatgctgcttgtccatttatttgccttctgtatgcattaggaaacagataagctataagtagtaccagcattttaaaatatggtagaaaagaggctgggccaggctcatgcctataatctcagcactttgcggggccaaggcgaaaggatcacttgagcctgggagttcgagaccagcctgggcaacgtggtgagaccctgtatttaaaaaaaaaaaaatttttttttaataacccaggcatagggtggcggcg

SEQ ID NO: 106885 - DNA, 523 bp, Homo sapiens
  misc_feature (1)...(523): n = a,t,c or g
ttagtcaccttgcgaacctaagagaagctccggatacagccacgcgttcgcccacgcgtccggccacacccccacgggaaacagcagtgattaacctttagcattaaacgaaagtttaactaatctatactaaccccagggttggtcaatttcgggccagccaccgcggtcacacgattaacccaagtcaatagaagccggcgtaaagagtgttttaaatcaccccctctaccccctctagagaaaaaaaaaaaaaaaaaaaaaaaaaaaaaaaaaaaaaaaaaaaaaaaaaaaaaaaaaaaaggaaatgtttaaaagaaatattgggggggaggaaagaggggggggggggctnggagttttttggctttttttaatggggcttttttacctctgcggggctttttttggaaaacctttttttttgggggggtgtgttggcggcggcctcccctctgtataaaagaggtagattttggtgggaaaaaaagaaaatgttgggggcgggggggggggccgcgcg

SEQ ID NO: 106886 - DNA, 397 bp, Homo sapiens
ggcacgagcagggttttgctatgttggccaggctggtctcaaactcctgacctcaggtgatccacctgcctctgcctcccaaagtgctgagattacaggtgtaagccactgcgcctggcccccctttttttttctttaaaaaaaaaaaaaaagctggggggataaaaccccctaaaaaaggggcctttcccatcagttaaaaaaggctgaacaaaaccttgggataaaaaagctgttttttaccccataatggggaggagggattggactcctaaaaaccatttttcccttttttgccctttccaaaaaaaaaaggcttttgcctccatgagttttacctaaaagggattggagttggcactggcctaaaattccaatcccttttaatataagaacc

SEQ ID NO: 106887 - DNA, 489 bp, Homo sapiens
ggcacgagtaaaaggttggatatacagcagtgagcaaaataggcaaaaatccctgccttcaggagggttacattctaggaaagagaaaacaatgcatagatacataacgaagacataggggcatgttcaaagctgatcaaagtgtgatggagaaaagtaaagcagaatggggtgagggtgaggtgttacaattttaaatgtcaggcacagacacagaaaaaaggtaacattgtacagagatttgaagaaggtgaggaagtgccccaaactgcatggaaatcttaggaaagttttccaggcagagggaatagctagttcaaagacactgaaaggccatgtatggtggctcatgcctgtaatcccagcactttgagaggccaagatggaaggactgcttgaggctaggagtttaagatcagcctgggcaacacagtgagagcacatctctacaattttttttttttttaattagccaggcatggtagtacc

SEQ ID NO: 106888 - DNA, 442 bp, Homo sapiens
  misc_feature (1)...(442): n = a,t,c or g
aaacttctgagccttttaccactccagcctagcccctgccccccaaggaggagggcactggcccccaccaggcattacgccgctaaactccctacacgtccccctcctaaacacatccgcctgactcgcatcaggagtataactcacctgagctcaccatagactggtaccaaacaaccgagccctaataattcaggccctgcgcattacaagaatactggggctttattctaccctcctacctgcctaaaagaacttcgaggctcctttcaccatttccgacggcgtctacggctcagcattcttttgagccacaggctgccacggacttaacgtcattattggctcaactttcctcactatctgcttcatccgccaactaatatttcactgtacatccaaacaataactttggcttgaaccccccgcctgggactggctn

SEQ ID NO: 106889 - DNA, 465 bp, Homo sapiens
aaagggcttcagtgggaacctctgagagcattttcctgttccccctatcaaccgcccccagtgataacatctgtgaagccagccattactcaataaactgcaaacttgtctaaaaaaaaaaaaaaaaaaaaaaaaaaaaaaaaaaaaaaaaaaaaagggggaaaaaaaaaaagggtgttttgaaaaaaaaaaaaaaagggggggggcccacaaaaaaaaatttctcaaaaagaagctttttttaaaaaagggggggaaggtatattttttaaaaatgggagattaaaaaaaaacagcgcggggggaaattttaaaaaaaaactttttttgggggaacatatatttggggagaaaataaaaaaaaaaaaaaatttgtggggggaaaaaaaaccctccaaacaaaaaaaaggttaaaccccggggggagaaaactcctttgaaaggtgtgttgaagaaaaaataaat

SEQ ID NO: 106890 - DNA, 431 bp, Homo sapiens
cggacgcgtgggttttatttatttatttattttgtagagacggggtctcactttgttgcacaggctggtcttgagctcctgggctcaggtgatcctcccgcctctgcctcccaacgtactgggtttatgggcgtgggccactgcgcccagcaaatattttaaaaattagactcaggaggttcaaatctttcataggtgtttagtctatcatgtcatttcaatttttttctaagtgacagtagaaggaatggaagaagtcctggctgggagttcagagggcatgggctccaggcccacttctctccatgtgtgaaactgagttatataaactctgagtaactgtcttcactggcctcagcttcctccctagaaagttattgtcagctgggcgcggtgcctgatgcctgtggtcccagcactttgggaggctg

SEQ ID NO: 106891 - DNA, 429 bp, Homo sapiens
  misc_feature (1)...(429): n = a,t,c or g
caaagatgagtctgtgctcctaatactatgctgtgctgccttttcaggactttgcagcctaatttttttgttattcaggaaagcaagataaggtagccatttcaattcagagttaattgaaatgaagttctatattattaaaagaaatatatttataattttaaattgcttttatttaataaaacatcaacacttccattatacaaagtttctattagtatctgtaattaataaattttgactggccacagtggctcacgcctataatctcaacactttgggaggccagggtgggaggtctgcttgaacccacgagttcaagaccagcctgggcaacacagtgagatcttgtctctataaaaatttaaaaatgagctgggtgtggtggtgcacagccatttgggaggctgaagtaagaggattgcctgn

SEQ ID NO: 106892 - DNA, 397 bp, Homo sapiens
tttatttgtccaggtctttttgaatgcctataatatagatatcctgaaactcgcttctttaacaagggtatattggggatactatcatgggtatattgatactggtgtatttttttacttatagatggaggcttgctatgttgcccacgctggagtgcagtggctattcacatgcacaatcatagggcattacagactcaaactcctgggcttaagcaatcctgtctcagcctcccaaggaactgggactacaggcatatgccaccatgcctggctttgtacagaatttacagctccacctcattcttttcaattaacacacacggtgctataactacttgcatactgacatacatttagatgcttcagatattcactagtagaaccctccaatgaa

SEQ ID NO: 106893 - DNA, 384 bp, Homo sapiens
acttgaacctgggaggtgaaattgcagtgagccaagattgcgccactacaccccagcctggatgacagaacgagtgtctgtctcaaaaaaaaaaaaattattattaataattaattaaggagtcccagttttgttttgtctccaaggctgaagtgcgggggcacaatcatggttcactgcagctttgacctcttgggctgaagaaatcctcctgccttaccttccaaagttgttgaaactataggcttgcaccaccatgccctgttaagacttttaattttttttttttgaaaatgggttgtcctttttttttgaagctatttttaacttctcctcttaggggaagtttcacctcttgttttttgttaattggaattacaattt

SEQ ID NO: 106894 - DNA, 403 bp, Homo sapiens
tggtctacgaactcttgacctcaggtgatccgcccgcctcggcctcccaaagtgctgggattacaggcatgagccaccacacctggtcaggacttcccttttcaatgagtttagcgagagtccctgaggagctgagctgcctgggagagtggcagcttagtggtctcatggtggacttccagccctggagcacagagcttccctcactccttaaactccagctcactagccaggcctggctttcagcccctttctttctttttccctccctccttccttccttcctttctttcgggggggggcgctattttgcacaggctggacttgaactcctggcctcgatggatcttcccaccttggcctggggagggaggggaatttgattggagagggtccaagaggg

SEQ ID NO: 106895 - DNA, 457 bp, Homo sapiens
  misc_feature (1)...(457): n = a,t,c or g
taatttctgctcccctgagattcgtccttcagccccatcatgtgctttgggatgagtgtaaataaaacggggctgtggcttgggaaaaaaaaaaaaaaaaaaaaaaaaaaaaaaggggggccccccttaaaaaaaacccctggggggcccaaatttacccggggggggaaaaaaaaaattttttccttaaaggggggccaaaaaaaacccccccggggatttttggaaaaaaaccctttttttggggggggaaaaattgggcccaccccccccccaaaaataaaaccctttggggaaaaaaaaaaattttaaggggtaaagggggaaaaaaacccccaattttttggttgttaaaaatttttcttcccgggttttttttttaaaaattattttccccgggcctcggggttnnnncnnnncccccccccccccccnatannnncaaaccttccatgtt

SEQ ID NO: 106896 - DNA, 463 bp, Homo sapiens
  misc_feature (1)...(463): n = a,t,c or g
atcggcacatgattttttattttttctagagaaggggttttgctatgtttcctaagccagtctcaaactcgtggacacaagtgatcctcctgcctcagcctcccaaagagctgagattacagacatgacccactgggctcagcctaaaatagattgttttttatatactaaaacccatcaggattggtaggtattgctagatgcttcaggttgtgactaaggagtgacatcatattctgatatgttttttctccttaacattttcctatattatatctcaaaagaccaaaaacaaacaaaaacttgtaattaactagtagataaaataggggtagaagttgtggtgagaacatgtcacttcctatttccagtaagacccaagtaagatagtaaaaagaaagcagagctgaggaacttggtctgttgggggtgaaggtagctggntgtaggtgtgcaaagcaag

SEQ ID NO: 106897 - DNA, 431 bp, Homo sapiens
  misc_feature (1)...(431): n = a,t,c or g
ctcctctttcttctttttctttatatcctttttcttcccctcctgctcttttctctcttctttaaattttttgggagaagagtacttaacataagatctatcctcttagcaaattttaagcatgtagtaccatattggtagctatagccactatcctgtacagtagatctccagaacttatttatctgacataactgaaaccgtgtgcacttttaccatcaccttcccatcttcccctcccctcggcccctcataacccctataccttctgcatattgaataanaaaaaaaaaaaaaaaaaacaaaaaaaaaaaaaaaaagagaaaaaaaaaaaaaatgaccacatttgggggggggggggggcttaaaaaaaacctttgggggggccaaaaataaccggggggggccaaataaatattttttttttatgg

SEQ ID NO: 106898 - DNA, 406 bp, Homo sapiens
agagagttggagaggagaataataacactgtgctcagtagaagcagatgactttacttcagtcatggtttatttcattttgtcatcataggaatttctctaatattgttaccatggttcttaatcatcaatgcttgttataataaccgggattgaatgcaccttcttcagttacagggatttggatttagggagttggaggtggggcccgtgaatctacttttaacaagtaccccaggtgattctgatgaaggtggatcagccaggcatggtggctcatgcctgtaatcccaaaactttgggaggctgaggcaggaggatagcttgagcccatgagtctacctgggcaatataatgagacctcgcctctatgaaaaaaataaaaaaattagctgggcacaatggtg

SEQ ID NO: 106899 - DNA, 1352 bp, Homo sapiens
  misc_feature (1)...(1352): n = a,t,c or g
gcgggggcactctgcatcacaagctcagttccatggactgcagaactccagctgcatggaaagggccagctgcagactttgagccagaaatgcaaacgggaggcctctgggactcagtcagagcgctttggctgaatgaggggtggaaccgagggaagaaggtagagagctgtgagccccagccccacctgactccagcacacctggcgagtagtagctgtcaataaatctatggtaaacagacaagaggaggtggaaggccatacagaatggagccgtgagtatggccagcctccagctctcagccaggaggtccccaaccccaaggaaggaagaaactggaaattaggaactgcttcctcatttaacaaggtgcttcttttcatgtgatgaggccctgtgaagaagggacaggatatacagacgggggcatgctggagacagttatgatgagtgccaggctttgtgtctgagcattctgctcccatggacatccccaacaacagcagggaccaacctatgtcactgtcaaagggcagctgagaagggcctgagccccagggacccctcacctgatgggaatgagagtgtggggagcttgcttcttggctgaatggtctgctggggtctggcatagaaagcagatggcttaattcggtctggttcctttggagagggctgggttacctgggccctgtggccttgggcctagagaagggacactgggcttggaccctgattgctggccattcttacctttcctactccccagttcaggcttcagagagcccctgacgcctgcaggaacatggcagaggagacaccgtctgtcttcacaaagtacgtcctccctccttgctgcctcttcccaccagcctgacttatccagggacagagcagtagatgcctggcactcctcgatgcccagtgaaaccagactgtgcttccccacccccaccaccatgccccatgctcactggctcatttcttgggagggcttagagctggataatataagttcccttggaccctgctgtgccaaatataccaattctctctcccagcgtcnnnnnnnnnnnnnnnggggggccctttttaaaagaacccttggggggcccaaatttaacgggggatggaaaggtaaaatttttttccttatggggggccatttaaaaaccctccttgggatttttggaaaagaaccttttttttggggggggaaaatattggcccaacccccccccaaaatttaaagcctttagggaaaataaaaatttttaaggggtaaagggggaaaaccaacctcaattccctggctgttaaaaatttttctttccggagtagaattaaga

SEQ ID NO: 106900 - DNA, 477 bp, Homo sapiens
  misc_feature (1)...(477): n = a,t,c or g
nttttgacnccccgaggtaccggtccgtttgatcgcgtcgacccacgcgtccggtgacaccatgccagctaatgttttaattactttactttctatagggatagggtctatgttgcccaggccggtcttgaactcctcgcctgaggtgatcctcgcgccttggcctcccaaagtgttgagattgcaggaatgagccattgtgcctagacctaaattagctaacttaatattggaaaattggagccttcagataagagatttgttaggggttcagtccttcctcacaaatatgcatttgggatgaaattaaaatggaagaggcctggttcctaccgctaagcattatgttaacatcccctccccaggaaggcattccttctacaaaaaacatatttactgggtgctgaactaaaaagtatagtgctaaacactttactttttagctcagagtctattcaattctattagagcaggata

SEQ ID NO: 106901 - DNA, 416 bp, Homo sapiens
catgttgttctctgcacttgcctgctctgtggtggggataagtttggttagggtggcgttggccagagttctttgttgtaaaggtaatcttttcccgtttaattgactgaagtagtctctggagtgatactctgaaactgtatatatctgttgcctcaatacacaagtacacgtgtgcatgcatacatacatacatacatacatacacacacacacacaagcggcctgagttccacctctgtgggttcaaccaaccacaaatcaaagatatttgggggaaaaaagggataggtgcatcagtactgaacatgtacagactttttctcatgtcattattcctgaaacaatatattataaccactgtttgcatagcatttacttgtattggtattgaagtaatctagagatgattgaag

SEQ ID NO: 106902 - DNA, 382 bp, Homo sapiens
gcaggcgcctgtaatcccagctacttgggaggctgagacaggagaatcgcttgaacttgggaggcagtggttacagtgagccgagttcgcaccattgccctccagcctgggtgacaagagaggacgacgtgttagatcactttcaaatccacaccaagtggagactctgctggatgggcggagcgcaggctggctccaggccttcctgttcctggctccgccaccaccgggcacgctcaatttcttcccctcacattcacccagaatgggtctatgtccagcctggtggggaccctgcctgggctgggggcttgtctccccaccaaagaggagatatagcaggtacaggcaccagcacatggcggggctcagaatatccccg

SEQ ID NO: 106903 - DNA, 348 bp, Homo sapiens
  misc_feature (1)...(348): n = a,t,c or g
tatcctgtacatgcattaaggctggtgactgctaaagtctcttgggaatctacaaataggaaatcacacgcagattactgggtctgaagagtgtctacattgttaaaaaaatcttgcttttttttttttttttttttttttttttttttttttttttttttttttttttttttttttttttttnnnnnnnaaaaaaaaaaaaatttaaaaaataaaaaaagggaataaaaaaaggggggggttgtattaaaaattttttttatttgccccgaattcccgggtttaaaaacggggaaaattaaaaacccccccatttttttttcttttgtgtaggggcgggttctaaaa

SEQ ID NO: 106904 - DNA, 581 bp, Homo sapiens
  misc_feature (1)...(581): n = a,t,c or g
taagctaatttcttttggcactctgtagcctcccacattcagttcctcacatttattttacctataatttcttctaccaattctcctgtattttctccttttcttttgctttcctgttctctgtggtgtcttcctttgtctctctttgcctcctcttgcctcccctatctttttttcttttaggttgggtttcctttttttccctttaggttttcccttaggtcttcatgggcgttgctttgcctcactaacagttaacataaagacgtatttctgtttcttgtacccatgtgctaaaggtacaactgttaggataccacttcatttcagttagatctagtttaggcatacaattgtaatccaagaagactgatctcttctagtgattcagattggctttatctttgatttttagatttcatctgcatttcttgattaattactcattttggtttagttgacagttgagcnnnnnnnnnnttactttctccggagaaaaccatcggttttatttatgctttctatgtggntctatgttgaagtgcaagagcacattaggaggtatttttgcggagcgaaaa

SEQ ID NO: 106905 - DNA, 359 bp, Homo sapiens
  misc_feature (1)...(359): n = a,t,c or g
aaatgctgacatgattttgataaatatggtgttatagttctgttttgtatatatgtgtttttaactgtgtcaagattttagttactttatgttacctaactccaagaatgcaaaataatacagcatcattttctaattacaagaagtgataaaacttcatgcaattatgtggggttttggggggttttttgtttgtttttctgttttggggggttgggggaatggagacttgttcatgttgtccaggctggagtgcataggtgtcatctcggctaccagcaacctctgacttccaggttcaagngaggcatgcacctctatctcccgagaacctgggattacacgtacccatcaccacg

SEQ ID NO: 106906 - DNA, 355 bp, Homo sapiens
  misc_feature (1)...(355): n = a,t,c or g
cccggctcgagctcttgatctcaagggatctccatatatggagtcttgctctgatgcccaggctggagtgcaagactccatatatggggatcacttgtgattaagagcacccgccgtttaatagggtcaaacggtttttgtggcttcgccctccaaagtaggtggaattacaggcgcttcccaccacccggggttattttttttattttaaaaaaaaaaaaggttttcccttttggcccgggggggcctaaaattcttgccctttggtgacccacctctttggccctccaaaagggcgggaattatgggggaaacctcccacccccgccctggggacggggttttttatctaatn

SEQ ID NO: 106907 - DNA, 350 bp, Homo sapiens
ctagcttctgcttcagtgtcctgagagagattattgggcagtctttaataatgaaaactttaccttgaattacacacacacacacacacacacacacacacactcacacacacacacaaagagagatagagagagagagagacagagagagaggagagagtcaagttctagggtgttaagtccaacattatcagctggggcttgggaaccttcaaggttttatgaaagaagaggtctatttgctttcaatactacaagggggaggaatctggatatatatccatgttttacctcttacctgtttgtgttatacctctttttttctctttcccccctatgaaaggtatcat

SEQ ID NO: 106908 - DNA, 382 bp, Homo sapiens
  misc_feature (1)...(382): n = a,t,c or g
ccgccttggcctcccaaagtgctaagattacaggcgtgagactctgtgcccagcctattattaaaattgcttatggagacagggcctcaccatgtggtccaggctagcaccactacgcccagctaatttttcatactggagggatttcaccatgttgcccacgctggtctcaaactcccgagctcaagcagaccaccccacttggcctcccaaagtgctggtatatacgggtgtgagccactgcgctcagcccggttgatcatcaattatataggtagcagattatggggcctaagaaatatctgtctatctcaagaccatgaggagtgtctcctctgtttcattctacaagctatatcgatgtatcgtttttgtttgggtn

SEQ ID NO: 106909 - DNA, 386 bp, Homo sapiens
  misc_feature (1)...(386): n = a,t,c or g
cttgaactcctgacttcagatcatccgcctgctttggcctcccaaagtgttgggactacaggcgtgagccactgcgcccagccactgttagccattattaaaggaggttatgttttaatactgattttgcatctaaaacttttgatcaggctgggtattaaaatttggtcttttgtgtgtttggaaaatatatcaatgcagttttcatcttatttttcatagcctatatgacntttttttttttttttttttttttttccccccccccaagggtttgaaaattgggcccaaattttttggaaaggggggcaaaggggaaaaaaaggggggagaacccaaacattttcctgaaaaaaataggggggggggccatattcctttattta

SEQ ID NO: 106910 - DNA, 386 bp, Homo sapiens
  misc_feature (1)...(386): n = a,t,c or g
aatttgttagcttgtaagtaggataaaatctcagaccctttacagttcctgacagtgttcagctaagaatcggggtttctgcaggagtagttactagaaatctaccataggcttcttcccagctacttgagttggccatacaggtgtttccaggtatctggatccctcccacaaccaaacagaagggagtgccttcaggtaaaactctagtcacttccaaaattatagcaggtctcaaaatgcctaaagacagtaggagtcggccacgcacagtggctcacacctataattccagcactttgagaggccaagataggaggatcacttgagcccaggagttcaagactagcctgggcaaaatagggagaccctgtctcttccanacn

SEQ ID NO: 106911 - DNA, 333 bp, Homo sapiens
tgtaattctagtgacagggaatgcaatgactagatcattgagaactagtgtggactttatcaggaaggcattgggagggccacttaaaattaataatgtagctgggtatgatggcacatgcctgtggtcccggctactgaggaggctgaagcaggaaaactgcttaagcccaggaattcaagtccagcctgagcaacatgccaagaccttgtcgcttagaaaaaaaattaataatgtaataagatctgtgttctgaagaccacacttatacaacgcagaaaaaggcttataaggaaataaaacacaaggccagggatcatgctattgcgagaa

SEQ ID NO: 106912 - DNA, 313 bp, Homo sapiens
gcacgaggagagagagagagagagagagagagagagagagagagagagagagagagagagagagagagagagagagagagagagagagagagagagagagagagagagagagagagcgcgcgagagagagtgagagtgtgtgtgagagggggagacagtgtcagatagagagagagactttgagcgcgcccccccgcgtgtgttgggggctgtggctatatatatagaggtggtgtgtcttgcctctctgatacagtgactgtctctctctcccggggggggcgcgctatatatatctctccctctcgcactg

SEQ ID NO: 106913 - DNA, 335 bp, Homo sapiens
  misc_feature (1)...(335): n = a,t,c or g
gagttccagtacattctttgttctgccctcatcttcggcagatcaaaaatattaaaataagctacaaaggaagtgaagaaatcaaaacatatcccgagaataagctgtcaagacacgagaaagtataactggagtgccaaggctaaaagacgaaataccaccggaactggtcgaatgaggcacctaaaaattgtataccgcagattcaggcatggactccatgaagaaaacctctttttaaaacatgnatgnnnnnnnnnnnnnnnnnnnnnnnnngnnnnttntnnnttttctgttnnnccttttntttntttttaattttgttttttttttnt

SEQ ID NO: 106914 - DNA, 623 bp, Homo sapiens
  misc_feature (1)...(623): n = a,t,c or g
aacacgcatcatgggtccctgatctatgaaatgaacacaacctctctgaggctggatgatctggaggaagggggcatggagcaaatttgaggctctgattgctgagccagcctcctcccaggcggtttccccaggactctcgtaggaaataaatagccctttcaagattcctcagctgcctcaccccctgcacatgtgcctggggtgtggcctagaagggagtgatgttcttactctggtggtctgtgcttctgaacacaggctacatgcacacactgacaactaccaataaacagacaggggaaggtctttcatctcagccattttctcttccccccgcccccccttagatggagtcttgctctgtcacccaggttggagtgcagtggcacaatcagctcactgcaacccctcctcctaggttcaagcgattgagtagctgagattacagggcatgcattcantatgccggggttttttgttattttttagtaggagatgggggttttaccatgttgggccagggttagttttcaaantcctggacctaggtgatggcacccacnttgggccttcccaaagtgtttnggggnttacagggcntgaggccaccagggncagcc

SEQ ID NO: 106915 - DNA, 375 bp, Homo sapiens
  misc_feature (1)...(375): n = a,t,c or g
cggacgcgtgggtgggaagggaacacattgcccccacctgcgtgtgctgcctgtggtgtgcatgccctgggaagggaacacagcccctgagggccgggagcttgctaggtgcccctcagcgtctgtgtctctaaattgccagtactgtccttgcaaaaaaaaaaaaaaaaaaaaaaaaaaaaaaaaaaaaaaaaaaaattgaaaaaaaaaaaaaaannttnggggggcctatattattaagggaagagagaaaaaaaccccccccctttaaaggtaacaaattataagttggggggggggggtggtttaattattttggggggggggaaaaacctttgggggggagcagtgggttttaccccttctttttggggg

SEQ ID NO: 106916 - DNA, 395 bp, Homo sapiens
  misc_feature (1)...(395): n = a,t,c or g
cccacgcgtncggctagttcctagatcgcgagcggccgcccttttttttttttttaacggcccaggggggcagggaatttggaaaaaatccccctttccccaaaggggaaacctttctttcccccttataaaaagggggggggcttttttaaaagggcaatattgggggcccccgggaccccaaccaaaaaaaaaggggggggggggttttttttaatttaaaacggggggccaaggtttttccaaaaaaggttttttagggggataaaaaactttttttggaaaaaaaaaaaaaaaattttttaaacagaaaaaaatttggggggttttccttaaaaaccaattttggaaatggaggggacagttttttggccagttttaaaaaaaaaatcatn

SEQ ID NO: 106917 - DNA, 387 bp, Homo sapiens
  misc_feature (1)...(387): n = a,t,c or g
cggacgcgtgggtagttctagagcgcgagcggtcgcccttttttttttttttttcttttttttttgttttttttttttcttttttcaaaacccccccctaaaaaggggggaaaaaaaaaaaaatactccccccctcaaaaaaaagcgccctctgagggggggcttcaaaaaacaaaaggagtgttaggaaaaaaaaaaaaaattatccgggcccaaataaacaattgggggaaaaatttcccccttatgtgcagtgacccccggcactctggggaaaaaaaaaatattggcccccatcccccccccctgtagggggagggggggaaaccattcctttgtgtttggggggggggaaaaaaaacccccccccatttattgcccctcccn

SEQ ID NO: 106918 - DNA, 449 bp, Homo sapiens
  misc_feature (1)...(449): n = a,t,c or g
agcgttcgnnnnggggnnntttgaaaacatctatgatagaganacatgccagcttggcacgaggagtacctttatgatttcatttccttctttatccatctggtattcattttgacaaatggtgtgagctgggaaataacgtgtattatttatttatttatttcccggatgggtactcaattctttcatcactgttaaaaagcacgtatttgtgtgtgtgtgtgtgtgtgtgtgtgtgtgtgtgtgtaactatttctaaagagaacatcttgaacagctggacactgaaggtcacgcagctctagactttgggtcatcattagaaacaccagcttaacaggcagaaatatcatcttaacaggcagatgtggctctttctaacagatgtgagcttttgaatcacacggattgacatttgacattcanatccagctttggagctcactgct

SEQ ID NO: 106919 - DNA, 432 bp, Homo sapiens
gggcagtgagccgagattgtgccactgcactccagcctgggcaacagagcgagactccgtctcaggaaaaaaaaaaaaaggaaaaaaccttttaaggtttgggcccctggggggggttccaaggttcaaaacccggggctgagggaaactggggtttttggttaaaaccacccggttcccttggggggccaaaatttatttaaagcccttttttcaaaaagaagaaaatgggggctaaaaaaaaaaacttttttggcccaaagcggaagttaaaaaaaagaaaccggaaaaaggggggcgcacccccggggttgcctcccattaaagccatttttggaaactttttaatggggaactttggggctttttttttccccctggccttgggccaaaaccttttagggaacgggggttaacacaagttcccatcct

SEQ ID NO: 106920 - DNA, 418 bp, Homo sapiens
  misc_feature (1)...(418): n = a,t,c or g
actgtagtcacttttaacacagaggtgtaagtatttgtatatttaaacttagaagtattgtgaatttaaacatagaagaggtgtggcaaacatatgatataaaagataaaacatgatacacctgtatagggcacttaatatggatggagcttgaaggactgaaagttgccctgagggagtcagtgactgggtggggagtgaatgtgaaggcctaggatgttcctgtacactactgtagactttataaaccctgtacacttaggttacactcgatttataaaaaacaaatacttttatggccgggtgcagtggctcacgcttgtaatcccancactttgggaggccgaggcttgtggatcacttgaggtcaggagtttgaggccagcctggccaacgtggtaaaaccccatctatactt

SEQ ID NO: 106921 - DNA, 463 bp, Homo sapiens
  misc_feature (1)...(463): n = a,t,c or g
gtgggcaccccnntttcgtagatccctagtcagtgtggtggaattcacaaaacaacagatggtctttccaaatgatctgtttgtgattctgtgccaggagctgagagacttaaaaagacagccagatctagtccttaattttaaagggtttgcaattagtgggagaggcagctgttcaaaatagctcaaagtggcctggcgcggtggctcacacctgtaatcccagcactgtgggaggctgaggagggaggattgtttgagtacacgagtttgagatgactgtgggcaacacagcaagaccccatctctactaaaatgtttaaataaataaatattattaggttgttgccaaagtaatcgtggtgtttgccattattttgacaaaaacggctattatctttgctcggactcgttagtattcatgaatgatttttatggctttatactttcattttccttatag

SEQ ID NO: 106922 - DNA, 401 bp, Homo sapiens
aaaaaaataactgaactcctcacacccagttggaccaaactatcaccctataaaaaaactaggggcagtgtaggaaacaagaaaacattctcctccgcataagcctgcgtcagattaaaaaaaaaaaaaaaaaaaaaaaaaaaaaaaaaaaaaaaaaacaaaaaaaaaaaaaaaaaaaagcagggggggggggtgtaataaaaacaatgggggggagaacaataccaagggaggaaaaaaacctctgtttttttaaaggggggctattataaacaccatagcaaggataagggggagaacctcttttttggggggggacaaaaagagggagcatcccctataaaaggtatgtttgttcatggataaaaaaacttattgataggcgttggagcgcaaccacg

SEQ ID NO: 106923 - DNA, 430 bp, Homo sapiens
  misc_feature (1)...(430): n = a,t,c or g
ctttgtaaaacctggaaangtganttccntcgaaaaaccgggnggacccaagcgtccgaatcaacaccctcctagcgttactattaataaggattacattttgactaccacaactgaacggctacatagaaaaatccaccccttacgagtgcggcttcgaccctatatcccccgcccgcgtccctttctccataaaattcttcttaggagctattaccttcttattatttgatctagaaattgccctccttttacccctaccatgagccctacaaacaactaacctgccactaataggtatggcatccctcttattaatcatcatcctagccctaagtctggcctatgagtgactacaaaaaggattacactgagccgaataaaaaaaaaaaaaagggggggccgttttaaaggatccctagagggcccg

SEQ ID NO: 106924 - DNA, 1039 bp, Homo sapiens
  misc_feature (1)...(1039): n = a,t,c or g
ttttttttttttaaaataactgctttaatgagacataattgggtaattcccataccatacaattcatccatttaaagtgtgcaattctgtgggtcttagcatattcagaggtatgcaaacatcaccaacggccaatatcaaaacacttcctcaccccagaaagaaaccccaaaccagcaaccgtcgctcccaacccccgtcccgggccccggtaagaggccatttcccttcttccctctggacgtgcccattcgggacacatcacgtgagcaggatcacgccgtccgctccgtgtgcctggcttttcacttagcatgatgtctccaagtctgtgtcgcccggtctgtgtcgcccagtgcatcagggtctcattccttttgaccgtgggcgccgttctacggcctggattccagtgcctggactggccatgtttagtctatgcacgcctcagtggatggacagggtttccaccttgccgctatggcaaaggatgctgccgctatgacgaaggatgctgccgctttggcgaaggatgctgccgctgtgacgacagatgctgccgctgtggcgaaggatgctgccgctgtgacgacggatgctgccgctatgatgaaggatgatgccgctgtgacgacggatgctgccactatggcgaaggnnnnnnnnnnnnnnnnnnnnnnnnnnnnnnnnnnnnnnnnnnnnnnnnnnnnnnnnnnnnnnnnnnnnnnnnnnnnnnnnnnnnnnnnnnnnnnnnnnnnnntggaggagctgccaggcttattccagagggccgcacggnnnnnnnnnnnnnnnnnnnnnnnnnnnnnnnnnnnnnnnnnnnnngtgccccccgcgctggttattcacctttagtaatacgaccatctttgtcagtgtgcagnnnnnnnnnnnnnnnnnnnnnnnnnnnnnnnnnnnnnnnnnnnnnnnnnnnnnnnnnnnnnnnnnnnnnagaacaatttctacattttgtacatctttggaagatctgcccagacccttcggcacaggcccaaagttg

SEQ ID NO: 106925 - DNA, 349 bp, Homo sapiens
  misc_feature (1)...(349): n = a,t,c or g
gcatgagtgactatttgcaagagttggtggaaggatattactaatttttgctaataacttttagtaaaaccctggtcattttggaaaaacatacttttttaacaaacactttttttttgaggtggggtctctgatgcagcggtgtgatcatagctcactgaagcctcaaactcctgggctcaagtgatcctctgtccttagtcgcccaagcagctaggactacaggtgcatgccaccatgaccagctgacaaacgctttttttttttttcctttggaaagggtgccgacccccttaaaaaacaacccctttttatgggttaagggggtcaaaaattgggaccttgattn

SEQ ID NO: 106926 - DNA, 1390 bp, Homo sapiens
cattgcattcatccgcctgcacgaattcggcacgagctggccggacctttgtttcttatctacatattggaagatttggtcctgatgtcctttgaggcttctttagctctagttctctgacacttcagcctatatcacagctaacttcctcagtctcatctattccttatgctccagcccctggcaatttgcctcaagatgggggtttgaaaataactttacctgactcaaggagtgtctggagcacctcctagtctaagtctgcaagctccagttcttgcctaaaaccatgccagtggccacccttgggctcagacagctctgggccttttgaccacaagccagcccctcgccctctctgtggcatagtcttctctgccccaggactgcagggcggcttcctccaaggcttccaaggctcaaaagaaatttggctccatccaagaaggctccagctcccctactggcccctggctcaggcccacacccctggccaggcccagagagtgtgtctcaggagaattcaatggctctagagagacacacagaaagtttggcatttggaaatttcaaggatgtatgtatgctcacgtatggagcaggttgtcctggtccctgggtgcagggaagtgggctgcagggaagtggattggaggggagcttgaggaatataaggagcgggggtggagactcaggctatggacaaggacagccccaaggttgggaagacctggccttagtcgtcctcagcctaggggcagggcagtgaagaaagctctccccgctcctgctgtaatgacccagagtagcctccccaggccggcatcttatgtgtgtcttccaccatcctcatggtggcacttttctaggcctgtctcccagcattgtgcaaggctcggaagagaaccaggaagtgaaactgggtgaaaacagaaagctcaatggatgggctaggttcccagatcattagggcagagtttgcacgtcctctggtcactggaatccacccagcccacgaatcatctccctcttgaaggattttatttctactgggttttggaacaaactcctgctgagaccccacagccagaaactgaaagcagcagctccccaaagcctggaaaatccctaagagaaggcctggggcaggaagtggagtgacaggggacaggtagagagaagggggcccaatggcccagggagtgaaggaggtggcgttgctgagagcagtctgcacatgcttctgtctgagtgcaggaaggtgttccaggggtcgaaattacacttcttcgtacctgggagacgctgttttttggggagcactttggcttcatgcctgggcacacaattaggtctttccaattaaaaccatggtttaaatccttgaaaa

SEQ ID NO: 106927 - DNA, 358 bp, Homo sapiens
gctggagctgtgtctcctgctgggattccggactgagagtgacagcaggtagtgaaacctcaagcaatttaaaacatggtattgttcctggaagactggttatgttggctagggtcagcaagagagggcatcaaggctgtagtctagcagtgatttaatctgcaagtcaaaccagacgggtattttgtattattcatatgtcacatcctaccaacagacagtaagtcaggcaaggctcctggtgctccttgtcactcacgtaattttcacatcaggaaaactctgggctgggtgcagtggctcacacctgtaatcctagcactttgggaaaccaaggtgggtggattgcctagctcag

SEQ ID NO: 106928 - DNA, 1140 bp, Homo sapiens
ttttttttttagtagagacggggttttgccatgttggccaggctggtcttgaatgcctgacctcgagtgatttgcccaccttggcctcccaaaatgttgggattacaggcatgagcctctgtgcccagtcagaatgctgttttagaattcagccctggtttgtgtgcctttggaaatgctacataagcttcatgagtgttactactatgggcagatagtcacatttttcagggtgtaagtttccttgaaaaatgaaactgttaccctttacacaacaggcagctcagcccatatctgcttttctgggtctaggtgatacaggactactacggcatttcatggaagtgttgtgtgtgtgtagttttttcgagtgtgcaggagcatatgggaatttcaagctaggatggaatgacttctgggcataagaatgtgggcagctctggcttctcatgccttcttacttttccactagggttttttcccagggaaccaatctgtccttttgaagaaaagacaaagataggaacgatggtagaggaccaccggtcaaattcttaccaggtaaacagaaaatgtaccgttgtacaaaatgacatacttacatccaataggtagacacatttccttctagacagactcatctccagagttttcttagagcaaatgaagccttactcaaggactgaatccccaggtgaatttccccagggaatgaagtctcctatacataaagtgttaacttgaagatcattccagtagctcggtaattactacttaagcttgaccttcatggtgccaactgcatctttcttacattgctgggtgcggtgccagatgataaagcagatgaaagtgtccttttatcaaataattaattcactcatcagcatttatcaggtatctgcagtgtgctgaggagtgtgctgcccagagaccaatgggacaggaagagctcctagcctgtttgtgctgagataatgtaagcagtgtgcagtggcttcatgcctgtaattccagctactcaggaggctggggtgggaggagcacttcagcccaggagattgaagctgcagtaagcagcgattgtgcctgggtggcacagtgggaccctgtctttatatataaataaataaaaagatt

SEQ ID NO: 106929 - DNA, 357 bp, Homo sapiens
ggcacgagataaaataaaaataaaatgttggcttctaactaaaacaggcagatatgtagcagtgttctccactggaactttctgtgatgtttggttcatgttctaggtctgtactgtccagtacagtagccagtggccacataaacctttgttttttttttttaaaacggattttctttttttttgcccaggttgaagggcaagggcccaacttcggttaaccaaatcttcggcctcccggtttaaacaaaggctcccccttcaccctcccagggacctgaaataacgggcgcccaccaccacccccggctaattttggaattttttaagaaaaaacggggtttaccctttttggtg

SEQ ID NO: 106930 - DNA, 383 bp, Homo sapiens
ggcacgagctgggctttaccatgttggccatgcttgcctagaactcttgaccttagatgatatgcccaccttgggctcctaaaatggtgggattacacgcgtgagccaacacacccaccctgactgaaaccttttgaggcctgaatcaacttactcatttttttgtgaatgggacccccacatgatggggcatcctaacttaccatcaaattaaactactgggtgatcaggcacagccacaccattccaccaaatattgccagagacagccatcgtacacagactttttctttcaaactctgactattgaattcatactcgtgacggataatttaatgggaagggcactactttaacgaaatgtagtgtttagattcaacttc

SEQ ID NO: 106931 - DNA, 366 bp, Homo sapiens
ggcacgaggggatttcaccatgttggccaagctggccttgaaggcctgacttcaaataatgagcctgtctcagattaccaaagtgctgggaatacaggcatgagccaatgcgcccagctaaaatctgatggtgttaaagagaggagctcccctgactgagatctgactttttgcctgctaccatttatggaagatgtgacttgctccttcttgccttccatcatgagtgtgaagcttgcccaggcatatggaattgttagatcaattaaacttcttttctttgtaaatgacccaatctcgcgtatgtctttatcggccgtgggaaaacggactaatacatgaaataggttccaggagcgggatgtt

SEQ ID NO: 106932 - DNA, 492 bp, Homo sapiens
aataaaaaatggttagaaaagaaatgatgaggaaatagaaagaggtggaccagaatccaagatatatttaggagctggaactgaccaagtgactaattgcatgggagaacgaggaataaagagacatcatattctggctgcgtgggcagtggcgctattcactgagaaggaacacaagagaccctgtgtggatgtataatatgtttggtgagaggtgatgccttaaacctcttccatttgaagtgttcctgggtagggtggagaggtgcaatttgctgtatggagttaagagagacagctaaacagaagttatcagtttggaagttgtatccatttgaaattgtgtttagcttttctaacaataacccaaggccaggtgcagtggctcacatctgtaatcccaacactttgggaggctgaggcgggaggatcgctcgagcccaggagtttgagactaatctgtgcaacatagtaagaccccatctctttagg

SEQ ID NO: 106933 - DNA, 1176 bp, Homo sapiens
  misc_feature (1)...(1176): n = a,t,c or g
ttttttttctctttttttttaaaaaaaaaagagtttattagcttttaatataaacatgagaaataaaaaccacataaattggagcattcttttcaaaataaaactgcaatcaatactttgaatctcccaaactctgaaatcccataaacaaatatttgtttttttgagggtggtagaattgtaatatttgtatacccattattttatcatttatgtctctgtcctttaaaaatgatgggaaactgcagcacaatatgatgtgaagcattgctataatagagggaagtactccttgtcccagaaatgctttggcttctaagcaagattcctagggattagatttgagaaagtaggagaaaccggatttcacatagttgagaacactaacactcttcttagtatttcaaatttaggtgacattatcggtctcctaaaattatttgctccttgccttttaaagcctgaagagttcctaagggttatgtaagtatttcttaaatagcaggacttaatgggacacctacagcttggtagcatgtaggatgataaaacagctgttcatatcaccttctataattagggtccaattccttttattacatgttaattaacactgctcttcaaaatcttcctttaaagaaactgcggtaatcaaagcatatagagcacagctctgcgggtaactacttttaaaaagagggcattttatggagatacaaggtattccaaaagttcagtgtaattttaagctttgatacttgtagaaatataaatgctacaaaccttcacaaaaccttgtctgaacatttttcttctgcttttttctttgagacagggtctgggatgtcgccccaggttgggagagcagtgacatgatcatgggcccactgcaggccttgacctcctggggctctactgatcctcccaccttaggcctccagagtgggctgggggacttacaggacacatggccaccatatccaactagtttttattatttttttttacagggcaggggtctcactatgttgcctagactggtcttgaactcctgcactcaagcaatccttccacctcagcctggacaacgcagtaagacccccatctctttaaaaacaaacanaacaaaacaaaaaactttcaaatcatgttttttaaaggtttatagcatttata

SEQ ID NO: 106934 - DNA, 463 bp, Homo sapiens
  misc_feature (1)...(463): n = a,t,c or g
atgtttttctgatcccttcgtcatagctacctaagaacaggcncgacccacgcgtgcggtggtcccgggagattttggatggaaaagtcaggagttattgacaacagttttgcctaattacatagagaaattaggaacccccaaatttcatgtcaattgatctattccccctctttgtttcttggggcatttttccttttttttttttttgggttttttttaccccccccttaatttttccccccaaaaaaacaaataaaaccccccccccctttttaaggggggggggggaaaaaaaaaaaaacccccaaacccccccttgaaaaaaacaatttttccccccccccttttaagccccggaaggggattttttttttatttccccctctttcttgggttaaaaaaaagggggacccccctggggggacccggccactagcccccctttaaaaaaaaaaaaggg

SEQ ID NO: 106935 - DNA, 406 bp, Homo sapiens
  misc_feature (1)...(406): n = a,t,c or g
cggacgcgtgggggtgacttctgacagacgggccgttgtggttgaactgatcataatagctgcatacccttgttgagccccgactctgcaccaatccttggtctaatcccaaacatgtattcactcatttcatgcccccaacatgagacacacaagaacatgggtgaagaaagagccatgaactcgggcttcatgtcccgctgttgacaatttcttttgtgtcatgggtaagcagaacttttaagatactgttcatgtggccactttctttagagcatggccagatataaaacaaagccgggggtgcggtggctcacacctgtaatcccagtgttttgggaagcagaggcaagatgattgcatgagcccaggagttcgagaccagcctcggcaacacagtgagatn

SEQ ID NO: 106936 - DNA, 403 bp, Homo sapiens
atctctttttaaagggtttacacacacacacacacacacacacacacacacaaacacacacacgattattaaaaagtgtgtgctctttaaaaaaaaaagtaaaatatctcaaaggacggtttcaccaccgccctttattgaatcaatttttctacatttcagagcaagtgtagattctgagggactcctatttgccaaaaagacaaatctagcaaaaaaaaaaaaaccaaaaaaccaaaaaaaaccccttttaaggggtcccaaaaaaaaagggttttttgggggggggcccacccagggtctgaaactcgggggaagggaaaaaaaaaggcccggctcaacccaaagttaactttgggaggccccaccacccaaaaaaaattttttaataacccgggggggg

SEQ ID NO: 106937 - DNA, 397 bp, Homo sapiens
  misc_feature (1)...(397): n = a,t,c or g
cacagatcccagggagattggatttcttcggactgggatgtcgggggaagccagccacctgccttgggctgtctcagaacccagcctgcatccctttctccttcctttccctttcctccccagctcggcccctctgaagggaggcagcaggcccaaggccttctgcaagggtttctgttcactgcaggcacggctgatctctggaaaaactgagtgctctatagagtatccctgctagtgattgactcatactgaggggttaggatataatggtttgctctttctgagggatttgtctttttaaagtgaatagtggctgggcatcgtggctcatgcctataatcccagcactttgggaacttgaggcgggtggatcacttgagggccagaagttgan

SEQ ID NO: 106938 - DNA, 476 bp, Homo sapiens
  misc_feature (1)...(476): n = a,t,c or g
aaatgaaagcctcggaaccgcccggaattccgggcacccccatgatggcatgaaaggaacggaagaaaagagagagagagaatggaaggaaggaaggaaagagaaagaaagaaagggaaaggaaaggaaagaaaaagaaagaaagaggcctgtatatataaagttaagatagagatttccaacaaccttgcaaatcttattataaatgtagaaaggtaagatcgcagaaggccagatattttgagttgggtaagtttaagttcaagggtatcaagtgtgttcatagctctggtcacatgtttgacatctccacaattcttcctctctttacatctcaatcaaattttgttcccattgggaaaaaacctctgaatgcatttatactaaattatgaatggctggcaagacaaagaattagtctccagagttatacaaacagggattaaaaagtgttcagactccagtctcaactcaan

SEQ ID NO: 106939 - DNA, 463 bp, Homo sapiens
  misc_feature (1)...(463): n = a,t,c or g
nattgatcgcactgcggaccgcnccatagatacctgtncgacccacgcgtccggaggtgcagatgtttcttcaatatactgatttcctttcctttggataagtttccaatagtgagatggctggatcatatgggagtcccatttgtagtttttttagggaccttcatattggtcttcataggggctgtactagtttgcattcccgccaacagtggataagagatccctcttctttgcatccttgccaaagtttgcaattatttttggtctttttgataaagagaaggtcgaaagtgtacataatatccccaaatgctacaacttacatttggctcatagatttagtcaacagatgagaaaaacatccaaataactccctagaaaataagcacatccagaatctgaaaacaagttatccctgcttatgtcaggattgacttatacttaaccttctttttgattg

SEQ ID NO: 106940 - DNA, 396 bp, Homo sapiens
  misc_feature (1)...(396): n = a,t,c or g
aaaaaagaacgcttccaggcacggcagtgtgtgtgcacctgttgtccgagttactcaggaagctgatgcaggaggatcacttgagtccagaagttctgagctgtagcaccctatgcctactggatgtccacactaagtttagcatcaatatggcaactcctgggagtaggggaccaccaggtttcctaaggaagtatgaactggctggcccaggtcagaaatggagcaggtcaaaactcctgtgctgatcagcagtggcactgtgcctgagattagccacttcacgccaggctaggcaacacggcaggaccctgttgcaaaaaaaaaaaaaaaaaaaaaaaaaaaaaaaaaaaaaaaaaaaaaaaaaaaaaaanannnnnnnagaaagggggggct

SEQ ID NO: 106941 - DNA, 412 bp, Homo sapiens
cagagtgagacccagcctcaaaaaataaaccaaaaagggaccaaacccccccccgaaaaaggaaaaaaaaaaggggggaaaaaaaaaaccgggcggggaaaaaaaaaccccaaaaccttcccttggggtccttttttttttttttttcaaattttttaaaaaaagacccacggcctttttttttttaaaaaaaaaaatttttttttaaaaaaaaaaaaaaaaaaattttttttcttttcatggaaaaaaccccggaaacgggggcccctttggggggcccccccccccccctttttgaaccttttttaaaaaagggggggggcttccaaaagggccccccccaaagggttttttttggaacccccctcaaaatggggggggggggccctaaccggggggggaaataaatttc

SEQ ID NO: 106942 - DNA, 380 bp, Homo sapiens
  misc_feature (1)...(380): n = a,t,c or g
cccacgcgtncggctagttctagatcgcgagcgccttccnccaaaaaaaaaaaaaaaaaaaaaaaaaaaaaaaaaaaaaaaaaaaaaaaaaaaagggggggggggccttttataaaaatttctgggggggcccaatttttccggggggagaaaaaatttttttttttttttttaggggggggaaaaaaaaccccccgggggttttttgaaaaaaaaccttttttttggggggggaatttttggcccccccccccccaaaaaaatttcccctttggggaaaaaaaaaaatttttaggggggggggggggaaaaaaccgggtttttttttggggggaaaaaattttttccctcgggttttttttaaaaaaatttttcccccc

SEQ ID NO: 106943 - DNA, 497 bp, Homo sapiens
  misc_feature (1)...(497): n = a,t,c or g
agaagggccccctatgacccgtggtagaggccgtaagacccggcncgacccacgcgtccgcccacgcgtccggaacaattcacagaacacaaaagtgttgggctaagaaataaaggaagaggggagagataggaaggcataacaagaattctaagatgaggaaaagtacagcatcatgtctctaaacttgctaacattcagacctggaaaggaaacaccgtggattcacttaatacctttgtaatattaaatatactagttaaaaaccaactattttgagggtaactcattttttagaaggatgtgaaaaatatgaatttttgttgcctgtagcattttctaattttagtgaacctcttaagagatactattattggctgggcgcagaggctcatgtctgtaatcccagcactttggaaggcagaggcgggcagatcacttgaggtcaggagttcgagaccagcctggtcaacatggtaaaaacctgtctttactaa

SEQ ID NO: 106944 - DNA, 361 bp, Homo sapiens
gggacctacctgtactttcaggtacttgggacgctgaggctggataatggctgaaacctagcacgcggaggatgcatttagctgagattgccccattgcactccaacctgggcaacaagagcataactccatctggaaaaaaagaaaactctaatttctggaatctttggggatcttattcacatggtaacatcaaggattgaaccctttagcccagggtattcacttgtaagcccacttataagcattatttgcaaggagtttacctaactgtgttaggaatgaaagttaagaatttaagattgaatcactgattaaacttgtagcatcaggtacgttaaagtgtgtcttctaatagttg

SEQ ID NO: 106945 - DNA, 405 bp, Homo sapiens
tggatcttacgccctcggtctcccaaactgctgggattacaggtgggagccactgcgctggactaatttttttgaagaaggacaaatatacttaatccggcccttcattaaaaaaatgaaaaactcttttatggacacgtgggctaaactattcttctgagagactattgaatttgggaagaaaagtagtcatgacgaaccgtttaggaaatatgtttggaattcaaaattatcgacgaaatggataaatgtggcaaactttggctgggcacaggggctcacacttagaatccaatcactttgggaggccaaggtgggcagaccacctgaggtcgggcgttcgagaccagcctagacatcatggagaaacgctatctctaagagaattgtttatgaaaattatac

SEQ ID NO: 106946 - DNA, 341 bp, Homo sapiens
agtatggctaaattttctcaaaggtagagtggataaatatggtatattcatacaatggaatactatataataatgaaaaataacaaattatacccagaggtatcaacatggataaatcacacaatgttgggtagaagaaataaggtagagaacaatatatccagaatgttccacataatacaaagttcaaaataggtaaaaccttaaattatttgggattgcatatatgtgtaataaaactatgaataaaagtaaaaaggccagacacagtggctcacacctgtaatcccaacactttgggaggcctaggcaggaggattgcttgagtccaggagttcaag

SEQ ID NO: 106947 - DNA, 344 bp, Homo sapiens
taataatactcccttaatatcataaaagattcggttactgattgaagttccaaatttctcatactttatttttttaaatagttggtttgtttgaatcagaatccaaaaaaggccaacacattgtatctggttggatatatctaaggctcttaatctataggttcctcttccctcttttttcctgcctctgcaaatttttttttttttttttttcccctgaaacggagttttgttttgtcccccaggctggagtacagtaacacaatttgggttaattgaaacctccgcctccccagttaaagcaattctcctgcctaaccctcccaagtagctggaattacagg

SEQ ID NO: 106948 - DNA, 398 bp, Homo sapiens
  misc_feature (1)...(398): n = a,t,c or g
cacaagcgtgtgcaagagacagagagagaggggaaagatacacgttatgacccaggaggaaatagcttatacactaaaataattcactttgctgatataaactagcagaaacctgggggatagatgcaagagtagattctaaggatagcataccaaagtggacagaatataaaaagagatgagattagaccgggtgcagtagctcatgcctgtagtcccagcactttatgaggcagaggctggaggatcatcacttgagcccaggagtttgttatcagtttgggcaacatagttgaaacataaaatacaacaaaatagcggngnttgttnantcttattcctgcatgtgaggactcattaatgtcctatacagctgctatctctgggatgagaaacgt

SEQ ID NO: 106949 - DNA, 448 bp, Homo sapiens
  misc_feature (1)...(448): n = a,t,c or g
ggtcgtcaaaacntttgaaaaccttggaagnacactcgaagaccacgantacgcgcagcttggcacgaggcgaagatcttggagaaggaaaaaaccgaatttgttaatttttctgtatttaatggcctgaactgagagttgagatggccaaagggagacaggccttttaaaatatatatatatatacacatatatatgcttatatacacatatatgtatgtatacacatatacacatgtgtatatacatgtgtgtatgtatacatgtatatacatatatacatacacatatatgtttacatatatacacatatatgtatacatatatacacatatatgtatacatatatatatattctacagtaaaactgtagactgtcctcgtacttggcattttcactgttctgtacaaagctgcttgtttttttattgcctaagtcaaataaacg

SEQ ID NO: 106950 - DNA, 420 bp, Homo sapiens
ggggaagaaccacgtgattcaacctcttttgtttgcgctctaggaaattaaggctcataaagtgacataaggagtattccctttttttgtatcctctggaagaattttaataagattggagtgattttcctttcaagcatcagtagaattcaccagtaaaactgtctggagctgggtgcagtggcttacacctataatctcaactacttgagaggctcaagcaggaggatcacttgaggcaaggaattcaagaccagactgagcaacaagactccatctccaaaaaacaaaaaccaaacaaaacagaacagaacagcacagcaaaaccatctcggctgggtattttccttgtgtgaagtttgtaaaatacgactttggtttatttaatagttatgaaactgttcaattattttctttctt

SEQ ID NO: 106951 - DNA, 365 bp, Homo sapiens
  misc_feature (1)...(365): n = a,t,c or g
cggccgtttttattttttgtttttaaaaaagggaacccttttttttaagggcgagggtttttaaaaaaaaaaagggggggaaagggggttttaaacctttttagtttttggggggggggtttttcccgaaaaggggaaggggttttttaccttcgggcccccccccccctttttttttttggaaaaccaaagggccaaaacccccaaggggggttttttattttggttttccccaaaaaaaaaaaaaggaacttgggggggggggtgatttaaatttttttccccattttcggggggggggccccttaggggggccccattttacccgaaaacccgatttttttgggacctttggcccttgcccn

SEQ ID NO: 106952 - DNA, 376 bp, Homo sapiens
ctcattgcaagctccacctcccgggttcacaccattctcctgcctcagcctcccaagtggctgggattgcaggcgcccgccaccacacccggcaaattttttttgtatttttttagtagagatggtgaaatcttgtttctacaaaaaataaaaataaaaatcagctgggtgtggtggtgggtgcctgtggtccaggctacttgggaggctgcggcaggagaatcacttgaacctggagggtggaggttgagatcacactactgcactccagcctgggtgacagagtgagactgtctccagaaaaaatcccaaaacaaacaaacaaaacccctgaatttccttgtggacaccttttctctggcagcctttttgaatg

SEQ ID NO: 106953 - DNA, 409 bp, Homo sapiens
tcacagttggcagcaacgtctccttttgggtgtggatttatttgttccccaatgcaactgtgagcaccatgagtgcaggaaagtgcctgtttctgatcatggtatttcctgggtgtgacttcatgtacagtcaagaggagaaactctgagtgggagcactagggaatagttgaagcttaatcttcattttggagaagagggagtgttattatccacgttcattattcacagtagcaaatttcacagtagcaaaaaggtgacagacactcaattgtccatcgacagataaatggataaacaaaatgtgccatatccatacagtagaatattactcagacataaaaaggaatgaaattccgatgcgtgctacatgtagacaaaccctgaaggcatgatgctatgtgaaatt

SEQ ID NO: 106954 - DNA, 433 bp, Homo sapiens
atcaaaaacgtccccaaacaccataagaccatcacagagttgctgccctaaaatgtataattagtgaaaaattgacctctgcttccatttaaagcatggcagtgggttgggtgtcattatgtagtataaaaactggactagataaactgctattttagagcattattagcattctctgaatatatgtatatatacatatatatacgcacacacacacacacataaatatatatatatatatatatatataaactcacatactcccacttaaaagtcgggtgaaagctacacaggattacagaagcatctattatatcactcttgctctttgactaaacctatgctggttttggtatagaaaagtacaaggacatggatgaagtgttttttttttaaaaaaaagacatatttgcactacacatacattttggtt

SEQ ID NO: 106955 - DNA, 415 bp, Homo sapiens
cacttctatgaatactagtatattgctcacacctcatattctccctactatgcctagaaggaataatactatgggtgttcattatagccactctcataaccctcaacacccactccctcttaatcaacatagtacctattgccatactagacttagccgccggccaagcagcggtgggcctagccctactagtctcaaaaaaaaaaaaaaaagggcccccccttaaaaagccccctttgggggcccaaatttccccggccaaccaaagaaaaaagtttccccctaaaagaaagccaattaaaactcggcggggaactttttgaaagaaacctttccttggggggggggaataatgggaaaacccccccccaaaattaaaacttccttgggaaaattaaaacttttaacgggggag

SEQ ID NO: 106956 - DNA, 488 bp, Homo sapiens
  misc_feature (1)...(488): n = a,t,c or g
cgataaacgccaggggcggggcggttttataccgaaatcctcggccctgcgangnacnnnngggnnanccacgcgtgcgctcttttcggactcagcccgcctgcacccaggtgatataaacagccttgttgctcacacaaagcctgttggggggtctcttcacacggtcacatgagacaaacatcaggtcaaatcataaaacagaaaaagagcagcatcaaactaaaatgaaaaatgatcaagcttgaaaatgaataaattgagcactccattcaagaaactggatgcattaacatcaatagaaacaatgaaaataaattcataagaagaaaccattgcaaaaggaaacagaacacccaacaggaatgacaaagaatgaaaactgagttttcaaaaaatatgatgagaagtaaaaagccatcggcatgaagataaatgaaagtacaaacaaaaacacattgaggtaagaaacaagcagcatagctaaa

SEQ ID NO: 106957 - DNA, 375 bp, Homo sapiens
  misc_feature (1)...(375): n = a,t,c or g
ggcaaagtggaaactgaatttctgtattaatggcacaatgtttgtgaaaaatggttgtagacacattactaataatatcattatttactttttaaatgtggtatagtgatggagagacataaccgtgaccatagaaacagcagtaagtgttgaaaatgaaggcatgccagtgcaaaacgaggaaaagaatagaactgcttttcacaaagacttttttatactttttaatattatgctacaaaagatttttctagacccagagcagtggctcacacctgtaatcccagcactttgggaggccgaggcaggcagatcacttgaggtcggcagttcgagaccagcctggctaatgtggtgaaaccccaactctactan

SEQ ID NO: 106958 - DNA, 373 bp, Homo sapiens
  misc_feature (1)...(373): n = a,t,c or g
cttttttgtccaagctggtcttaaactcctgggctcaagcgatcctctcccctcagcctctcaaagtgctgggattacaggcatgacccaccacgtcccactgcccacacattcttccttttactaagatcaactaagattgagttatgttatgtttttctctcttcaagaaagtaaaaacagaaagcaatcaggaaagcatatggtggagtgataagtggggaacaaagttcattctacaaaatgggctttatgatttcagtcacctttaaggagtagcagaattcaaatactaaaaaatgcaatgtagcaagcatcagctagaactaaattcacaatgttgtcactaagaattcagagtaggacgatatan

SEQ ID NO: 106959 - DNA, 472 bp, Homo sapiens
  misc_feature (1)...(472): n = a,t,c or g
cacggtcccctaggtccagtanganggtcntggnaancgcgncgacccacgcgtccgaaaaggcaaaactatggagacagtgaaaatatcagtggttgtcaggggttagggaagaaggggatgaatgggaagagcacagaggattttgagggtagtgaaactactctgtatgatgccataacagtaggtacatgtcataataaatttatccgaagtcatatagtgtacaataccaagagtggaccctaacataaactatggacttggggtggccatgatgtgtcagtgtaggttcctcaattgcgaaaaacgtaccaccctggtgaaagatgtttataataggggaggttatccatgtataggggcagggagtacataggaaatctctgtatcttctgttcattattgctgtgaaccaaaaactgtgctaaaacacaaagtctattttttaaaactgcatagacataaatac

SEQ ID NO: 106960 - DNA, 418 bp, Homo sapiens
  misc_feature (1)...(418): n = a,t,c or g
cccacgcgtccgagggtttcaccatgttggccaggctggtctcgaacccctgacctcaggtgatccaccctccttgaccttccaaagtgctgagattacaggtgtgagccattgcacctggccaggtgggagatttttaatgaccaggcctggaggtggcacacatcacttatacccacatccattggccagcactcagttacacggccacttctaactacaagggaggttgggaaatgtagcctagctgtgtgctgaggaagaaaaagtaaaagctttggtgccagccagtctctgccacatcagatttaatttgagcgctgtgaagtaattaatgcccattaaactaagggtgggacaagattaatgctaaaatcactctccccagccaccattttctctcttgttctttgncatg

SEQ ID NO: 106961 - DNA, 389 bp, Homo sapiens
  misc_feature (1)...(389): n = a,t,c or g
tgacattgatggctcatttatttatttttttaaatgtatcgctgagcatgttgaatgccttacttgggccgatttaaactaggaggctttcgcaaaaatttatcggagtatatagcaaaagattatgatgatcatttacatgagcacaatctttttaaaatgtatatgcacccagtctcactaataccttctactcttcatctatattgaaagccctcctaaagtaaggcttactgattcacaaattagagtttaaacacttctggctgggaacagtggctcacacctgtaatcctagtactttgggaggtcaaggcaggcatattacttgaggtcaggggttcgagaccagcctggccaatatggcggaaccctgtctctactaaaan

SEQ ID NO: 106962 - DNA, 432 bp, Homo sapiens
actgatacctgaagacccctgattacgtgtcgacccacgcgtgcgggtttcaccatgttggccaggctgatctcaaactcctgaccttaagtgatccacctgccttggcctcccaaagtgctgggattacaggtgtgagccaccgtgctctgccaaggttaataattcttactgctttatcaaggaccttaggtgaaagtggctttaaaaaaaaaaaaacaacaaaaaactgtgagtatggggccatgaaaaatgcagggagtttggggccactgacttgaaactaccactaaggcagggttacccaccatcattttcacatcatcagggcaaatgtcaatttggtttttccaaaataaaccatgggattccaaaaagctatttaaccttttgagtatttcatcaccacttgtgttcattgccaaggattca

SEQ ID NO: 106963 - DNA, 396 bp, Homo sapiens
ccaagatcaatgtgtgcatgtgtgtgtgtgtatatgttgtatgtgtaaaaccttgagcaaatagtgaaggataggataaacataaaaagtaagctaagtaaacccattgtaatagtaattacaaaatatatatgtacgtgtgtgtgtatgtgtgtgtgtgtgtatatatatatatgtagttctcttggtttcaaaaatttgctagcacaatttagccaaatatatgaaaataaaattaacattttatcacaaggtcaaaatataaggagtaaagggtttatggggggggtaataaaaatggtctagatctataaaaaaaaatataaaaaaaaataggggggggggccgtttataaaaatccttgggggggccaaaatttaagggttatattatttt

SEQ ID NO: 106964 - DNA, 495 bp, Homo sapiens
  misc_feature (1)...(495): n = a,t,c or g
gttcaagaacacggaggaagtacccttgaaacccttcctganagcctgcgaacgcnccgaattcgggtcgacccacgcgtccgcccacgcgtncggggagggagaaatttgagttgcttattggatatggagtttcagttttgcaggatgaaagagttgtggagatctgttgtaaaacaatgtgaatatacttaatactactgaatcatacacttaaaaatggttaagatggtacgtttggcacacctgtactctcagcactttggaaggataaggcaggagctcaggagtttgagaccagcctgggcaacctgcagtgagccatgataatgcctctacactccagcctgggcaacaagagcaagaccctatcttataaaaaaaaaaaaaaaaaaaaaaanaaaaaaaaaaaaatannnnnnnnnnnnnnnttatttattttnnannnnannnnnaaaaaaaaanaaaaaaaggtantttttttttttttttttt

SEQ ID NO: 106965 - DNA, 847 bp, Homo sapiens
ggaattctaaaaagcgctgcagtagctgtggcctcaccctgaagtcagcgggcccaggcctacctcactctctcccttggcagagaagcagacgtccatagctcctctccctcacaagcgctcccagcctgccctccagctgctgctctcccctcccagtctctactcactgggatgaggttaggtcatgaggacaccaaaaacctaaaaataaacaaaaagccaaacaagccttagcttttcttaaagactgaaatgcctggaagtgtccctttatttataaaataacttttgtcatatttcttatacatgtttcttgtaagaaattcagaaactacagacaaagagagtggaaattacccactgtcaggcctctgagcccaagctaagccatcatattcccagtgacctgcacgtatacatccagatggcctgaagcaactaaagatccacaaaagaagtgaaaagagccttaactgatgatattctaccattgtgatttgttcctgccccaccctaactgatcaattgaccttgtgacaatacaccttccccacccttgagaaggtgctttgtaatattctccccacccaccccacgcccgcacccccgcacccttaagaaggtattttgtaatattctctccgccattgagaatgtgctttgtaagatccaccccctgcccacaaaaaattgctcctaactccaccgcctatcccaaaccttacaaggaactaatggataatccccaccacccttttgctggattctttttggggatttagggcccacctggcacccaggggggattttaaaaaggtttattgtttcacaaaaaaaaaaaaaa

SEQ ID NO: 106966 - DNA, 473 bp, Homo sapiens
  misc_feature (1)...(473): n = a,t,c or g
agaggggggtgncctaggactgatggcagtcggaancggcacgagcctccatctgcagctccaggttctcctccgtgttcctctgggccaggaagcggctagtgatgtcctggccagtccgggggagagagaagcaggtgtgggccaggatggtgggcagagggggcttcacagaactggtttcttctgggcccctcctagacgctagtgcactttctctgtgctcattcacaagtgtgatcacagctcactgcagcctcaacctcccagactcaagcgatcctcccacctcagcttcctgagtagctgggaccacaggtgtgcaccaccacacttagcaggggtgaagcgctttgtggatgtcattgcacacgaccctaatggcaggcagagagggtagataaccccatgtagagataaggagatcatcacttgagggacgtgggtcacttgagtcacttgtctgacagtgg

SEQ ID NO: 106967 - DNA, 409 bp, Homo sapiens
  misc_feature (1)...(409): n = a,t,c or g
acagactggctgtcctggcagggctttcaactgcacatgttttttatactttccttttttttttttttttaaaaatttttaacaaaaaaaaaaattttatccagccaatatatatagggatttttataacccctcgaggggaaacagaaaaaaaatgctagggttggttggtaaaaaacaaataccccccagttccggccttggggggaaactccaaagacctgaattctttgggggccgggggggcccagggcgggggcggggggcattcccatccttgaaaacctttaatagaactcagccctgtatcgctaaaaaaacatggcttttacttaaaaaaaaaaaaataataaaaaaaaaaaaaaaaaaaaaaaaaanggacccccggcagtccgatgtggcctcctcg

SEQ ID NO: 106968 - DNA, 470 bp, Homo sapiens
  misc_feature (1)...(470): n = a,t,c or g
cttcgcccaccctnnnattgtacgtcctctagtccgtgtggtggaattcccttgtactcctgacctcaggtaatccacctacctaggcctcccagagtgctaggattacaggtgtgagtcaccgcacctagtcctaatttggcttttctataaacactgtgctgtgttacggttttagacccctctgtggcagttgtaaatgaccatgttaaatgttactagtctgtcaacctaagttatcaggaaaatcgctgaaaacttggaaagaagttgccgagcgctctgagcttctggagtggatcctggggccgcacactcagctgccctgtccacctctgggagtgcctggctccgtcctgccttcccacttgtggtgcatggttagcagcccgccagaaggggacaaagacctgctaggagcccgctctgctctcgtaagaaaaaaatggagaggcaaatagcctcattct

SEQ ID NO: 106969 - DNA, 463 bp, Homo sapiens
attgacgacacttggaagagcggtggaattccattcatacttccatatgccatttatctaactacccacctatccatccatcccctcatccatccatccacgcatgcatatacctattgatacacccacctctccaaccactcatccattcatccatcatccatccttccaaggactcatctacttattccccccccccgctgcccccccgccatgtggcaaaggtatgacaagcaacatcaaccgcttcaggcacaggttgctggtgccctttggaaaaacacctccaaagcattctgtgctgagatccagttgctaacacagattcaactttaatctcttaacctaaagatacttaaatgatcagttccttcctcagggatacttttacattcaacattaagcattgaattttctccattctcaggagaaagggctttggagtgaggggaatggagatggt

SEQ ID NO: 106970 - DNA, 470 bp, Homo sapiens
  misc_feature (1)...(470): n = a,t,c or g
atccgagtccctaattcgtgtccatagtcagtgtggtggaattcccaaaagccagatagccaaccccatgtgtctccaagagctgtctcctacatcccagggaatacctaggaagatagcatattagaaatgaggaaaggtctcagcacaataacctaagttcccaccacaagaaacaaaaaaaaaaaaaaggattttttcttataaaaatatgacctcatggaaaggatgacttaaacccattaccaaagggagaaaaccaagggggttttttttacccttcaaacccaaacaaaaaaaatatttttgggggtttaaaaaaaaaaaaaaaaaaaaaaaaaaaaaaaaaaaaaaaaaaaaaaaaaaaaaaannnnnngggcccccttttaaaaaaaggggccccaaaaaaccccgtaaaaacccctggggggttttttttaagccccccctttttgggggcccccccccc

SEQ ID NO: 106971 - DNA, 459 bp, Homo sapiens
  misc_feature (1)...(459): n = a,t,c or g
acgcgnaaatgagttcgatacaatctgccagngcggtggaacacaactaatgctgatcatgatctgaaagacaatattcttagtcctccccaaattaacttgtatattcggcaaaattccagcaggctgttctgtagacattgacaaatggattctaaaagtccagtcaaaatcccagcaggatttgttttatatatatagatatatagatacacacacacacacacacacacacacacacacacagattctgaattatacatggaaacacacactagaatggccaacacaattgtgagaaagaacaatagtttggaacactcctattatctaatgttaagaatgactataaagctaccgtaattagtgctatattgacataaggctagccacatacctatgaaacagaaacacgtccagagatacccccataacaatatggaaaactgttacttgacc

SEQ ID NO: 106972 - DNA, 480 bp, Homo sapiens
  misc_feature (1)...(480): n = a,t,c or g
gggtaccganaatcgagaccatagnnnatcgtagaccatagtccgtgtggtggaattcttttgtatttttagtaaagacagcgtttcaccatgttggccaggctggtctcaaacccctgacctcaaatgatcttcccaccgtggcctcccaagttgctgggattacaagcgtgaatcaccacacctggcccggaatccgtatttaatgtttgctaacaacctaagactcagcgttccctttttcccttgtgaccacacctggacaagctgatgagtctaagggctcccttctctgtcataggcaagagatttaaaccatgtaactacatgcccatacaggggatcttgtgcccaactctaccccaaccacagtaaacaaccaggccaggctcctttctttgctctctcaggccatttcagttatgcttgatgggtctgtcctgctcttcccaagatctcaacaatgtgagcaataagcct

SEQ ID NO: 106973 - DNA, 468 bp, Homo sapiens
  misc_feature (1)...(468): n = a,t,c or g
catcgacaccctattgaagacatctagaacangcggnggaattcatcacatagaaatcctgcctgagtttctagcctgcctgccttttgtacttattagcccccacaatcctgtgagccaatttcttacaataactttccctgtctctcccaatatctctatctctgtccctctctacacacacacacacacacacacacacacacacacacacacacacacacacacacacacgtgagtgtggggagaagatctctcttcttttctggcccacacactgaagcgccaagatcccgcgtgtctgtatacacctgatagaacacaggagaccacacaaaaagagagcggtgagataaacagctcacactacacagaactgacagtttatacattttttacacatatatatagtgagcgcattgtgtgtgagacacaccatgcttaagaagcaccaaaaagtcatgtgag

SEQ ID NO: 106974 - DNA, 457 bp, Homo sapiens
  misc_feature (1)...(457): n = a,t,c or g
ccctagtgcatagaaagaatgaggacttccgnagaagcgcctctcccacccagcagactagctccctgctttgcctcctttcctttaaaaacaggccattcaggcatttgcctgaaaacttaaaatgacccacaccctattcccttacatatactgccagtccctccctccatccctcctctcctccctcattccctctctctctgtctctctctctgtctctttctctctctgtctctctctctcaatctaactcttcattgctgcctcaggtgacatgaggatggaggactgatctcccggctcattatgccctccttgcacaggattaagtaaaaatctttgaacttgtttcctattgttgaggtgtattgaatttgtccttctatctaaagaaccagaataagttttctgtgtgaaggactctctggtcacaggtcagacaactaggcattag

SEQ ID NO: 106975 - DNA, 440 bp, Homo sapiens
  misc_feature (1)...(440): n = a,t,c or g
gatggggncgnattgagccctnnnattgtagtccatagtccatgtggtggaattcctgaattacaactgtggtaagagttacaaaggagagtgcgctaagaacctgaccttttctgggagacacaggaaaagttctttgagcaagtaatgtttggacacgaaggataagtagaagttaaccagtggaggaaagaacattgtgcgaagatattttgtgttttcccttctctgtgcttttgtgtattcagttccatctgcttatacagcatgcctgtttcaagtatccaaatcctaactcaagatttggctcctggcctggcgcggtggctcacatctgtaatcccagcactttgggtggtggaggcaggtggatcacttgaaatcaggagttcgaggccaggctgagcaacatggtgaaaccccgtctctacaaaaatata

SEQ ID NO: 106976 - DNA, 432 bp, Homo sapiens
  misc_feature (1)...(432): n = a,t,c or g
attgagcccttngnnatcgaggacattataccgtgcggtggaattcactcaaggtggtctcaaaattcctgggcttcagcaatcctcccaccttggccccccaaagtgctgggatgacagggataagccaccgtgcccagcagagtttccatttttaagatggtagagggcacacctttctctccctcttaaagaaccagatgtgaaaatgagaaatatagatgtcatctttgatgaaactaagaggttcagaaagtgagaacggagaagaaatcataaacagtacaagaaaacagtagggctgaagggcatggttgaaggcccagtcagtgcacagcatcaaagcaggtcacagaatttcaggtcacgggagctataacaaaaattctgaaagattctggaggtagagagctgcacagaggagatttgctg

SEQ ID NO: 106977 - DNA, 472 bp, Homo sapiens
  misc_feature (1)...(472): n = a,t,c or g
agagggccgnnnccnnnaactgagaactgaggacngtcgnggaancccaggccagggccacaccagggctccatagggctgcggaagcctgtgagtgtcaagggggcttcacactctggtggtgagcccctggggaccattccagcccctgctctgcctgaagctcctgatgcagcctccaccgtgagccaggccaccctgtaagggaagagactcctcagctgagggccctccaggaccgcccttccccagctggagttcccttggatgctggacacgggagccacctgggcgaggggagcccatccaagtggctgtgcgtcgggaagagtctgcccaggactgggctagaccagagcttataattaaggagtggtggccaggcttggtggctcacacctgcaatcccagcactttgggaggccgaggcgggtggatagcttgagcctaggagtttgagaacagccaacan

SEQ ID NO: 106978 - DNA, 497 bp, Homo sapiens
  misc_feature (1)...(497): n = a,t,c or g
agcngccngcnnnctattgattncactangcatagcgnagngngcnggaannnctngattgatgattagtacacaacagaaatagttacaaagaacccggctctattttttttattttatatattaggatgagtgaccaggaggcagagtaacagtggctaaaacaggagcaaagtttaattctttctcataggcaggacagggctgagatgaccatcagggatctaggcttgctcttttttttttttttttttttttaaaaaaggggttccccccttccccccgggggtaagggggggggggaaaaaacccccccgggggggggtcttttccctttccccccccaaaagatggggaaccggggctatttccccccccccgggggaaattggggtttttttttttaaaaaagggggtttttcccaagggggggggggggggttaagggcttaaaataaaaaaaaaccccccccgcgccccccccaaagggggggaaa

SEQ ID NO: 106979 - DNA, 453 bp, Homo sapiens
  misc_feature (1)...(453): n = a,t,c or g
atcgagccctctgattgatgcctatcgaaganncacaccctcttagccttactactaataattattacattttgactaccacaactcaacggctacatagaaaaatccaccccttacgagtgcggcttcgaccctatatcccccgcccgcgtccctttctccataaaattcttcttagtagctattaccttcttattatttgagctagaaattgccctccttttacccctaccatgagccctacaaacaactaacctaccactaatagttatgtcatccctcttattaatcatcatcctagccctaagtctggcctatgagtgactacaaaaaggattagactgaaccgagtaccanaaaaacgaaaaatgaaaactaatatgcagaaaaaaaaaaaaaatttgggggcgctctaatataaaaggggcctttaaaaccctgatttatcctcgt

SEQ ID NO: 106980 - DNA, 1612 bp, Homo sapiens
  misc_feature (1)...(1612): n = a,t,c or g
cacagtcccttgaactcctcgagggacccacagaaccccagccaccgagaaccacttctgccccaaaagagtgcagttctcaccaaccatgccagggtggaccttgggtgacaggaacttctgccgtcccaccttctgagcccattctcagctatgagaacattttaaagtgtgcttttcaagaaataacagtccagcaggcagctgaagacgtttccaccatagaccatttcctagaaataagcagtgaagaaaaacctggcgttgaacgtgtacataaattgtgtaacgaatccagaaaactctggagagcccttcagagcatacacaccacgtctacttctcagcgcctctggagcgagtcccgttgccaggagaacttctttcttgttctcggaatagatgctgcgcagaagaacctttctggaggccagggccacatcatggaagattgtgacctcaaagagcctgaaggactcctcactgtcagcagcttctgtctccagcattgcaaagccctgatccagaccaagctctcggggccgcctggcagcaaacaggggaggctgatgacatgcagccgcttcctgaagaccccctcatgcggaggtggccagcacatcactattccaaggaaaaggatgttcactccacgcaagctcaaactgacactctttaatagcgacgtttgctaaaatcaggaggactttgtacctttatgaggaatttttcattttcttcctggctgggttgatgtggaaaccagaggtgttttttggagctgtttttcagaccccaggcccattcctgggatctctccaacaggacctgtcctgtgttctgggcttgtctcgggtctgaccaggagatggaggatgtgtccttggcagagccaaggggagacagaggtttctggatgccatgacaggctgtcggggtccaggtggcactcatgggccccctgccccatgtgaatgctgctggcaccctngtggggggttgcccagggatggacccctgggcatggctttctggggctgctttaagtccaagggggagccaacttgtggcccaaatccatgagttcagaggaaaaaggggaaggcactgaaacgtcacccagaggagaccacttgttgagaccggctcagaaacccctctgtctgtcacactctgccctggctgctgtgtggtcagggcaccatgagggtgtacagatgtgctgtgtcctcagagcctcgcaggtgccctcacttactgcctgggcccctgcccagcagcctcaaggacaggcctttgtccctcacggttgtggacaggaggtcgcaccactggcctgcgagagcctctggtgggcccgtggcttcccccagttatctgctaaggaaaactgtgctcttcgaagggcagagccaagaagtcagccctgacttttgtaaaattttactaaataaaaccacctggataagcctgttgtcactggttcatcagctggggggactgatacctgaaatcctgtccccaggggaggcctgaagtcttaagcaagcagccaccctggctgtctcttttccacgaaatcgtcgncgcgggaattccgggcgtctcaccg

SEQ ID NO: 106981 - DNA, 492 bp, Homo sapiens
  misc_feature (1)...(492): n = a,t,c or g
aggcgaggcgccnatcgaacccttactgagagcctagtcagtgtcgtggaattccgccatgcttgaattctcgccgggcttcagctgcctcacggggcagggcttgggacctgcagcctgagccctccccaccccccaacccccagtgggctcccatgcagcccgagcctccctgacacgtgccgccccctgcttcacggcgcctggtcccatcgaccaccaaagggctgaggagtgcgggtgcactgtgtgggactggcaggcagctgcgcccgcggccccggcaccggatccactaggtgaagccagctggggtcctgagtcgggtggggacttggagaaattttatgtctagctgaaggattgtatatgtaccaatcagcactctgtgtctagctcaagctttgtaaatacaccagtcagcactctgtgtctagctcaaggtttgtaaatgcaccaatcagcaccctgtgtctagcttaaggtttgcaa

SEQ ID NO: 106982 - DNA, 480 bp, Homo sapiens
  misc_feature (1)...(480): n = a,t,c or g
agagcggccccgctgataccntgcttgataccctaggcagngncgtggaattcggattcggctccctgagcgagatggccaagacaaaactgcccacgtaatttttgtattttcatggaaatacgaaggggatataatttcagcaaaaccctgccagcttcacttggtgactacaaccaaagattatgtgtcaagtgcacgagggtccctctctgacaggtctgattagtggtgacccccccatcagagtagagacagagctcacggtttaaaagtttcatcggggccaggcgtgatggctcacacccgtaatcccaacacttcaagaggcagaggcagaagcatcactcaagcctaagagttcaaggccagcctgggtaacatggcaagacccatctctacaaaaaatttaaaaataaaaaatttaaagctaccatgccggcttgttctcacctttatactctatgcttgtgtgtgngt

SEQ ID NO: 106983 - DNA, 506 bp, Homo sapiens
  misc_feature (1)...(506): n = a,t,c or g
tggataaacggggnncncgnnnttttgagaccccttnnncgnatcgaggaccntaggaagngnggtggaattcccaaagaggattcccaagcaggtgcattcacgggcattggtgaaaggcagcaggggcttgtcatcccgcttctgaaaaatgggcaactctccactgatgcctgtgttcccccatgggggagagtgggggtggagagggcaggaccgccaaaccagcctgccggggaaggtgggggacaagggcaggagtgcagcctgggcctgcttcctgaggccaacagatgccacccctgcaatcccagcactttgggaggtcgaagtgggcagatcgcctgaggccaggagtttgagatcagcctgggcaacacagtgagatcctgtccctactaaaaaaattttttaaaattgagagagagacagatgtctgccggccagcctcacacagcgggccaggccggagaaagcaatggaggaacagaaaggccctgagccct

SEQ ID NO: 106984 - DNA, 453 bp, Homo sapiens
  misc_feature (1)...(453): n = a,t,c or g
ntttgaaacattanccttgagggcgtttcggtttcactgtgttggccaggctggtcttgaatgcctgacctcaagtgatctgcccgccttggcctcccagagtgctgggattgcaggcgtgagccaccacgcctggcgaaaattaagattctttatgaccaccaccactactattgcagatggtgctctgtgtcttgaagatggcaagaccatgcattgtgtggttgaagtgacagatttaggttatgttcttagcacttccacttattagttgtgtgacctttgcaaataaacaacctcagtttcctcagcagtggaacgagaattaaaatacctgcctttcaggattggatgagtcttgctcatataactaactaatctagagtctgtcccagaccatagtggttttcttcatgaaaggttttacatatgtcatcttattgaatcttgaag

SEQ ID NO: 106985 - DNA, 1296 bp, Homo sapiens
  misc_feature (1)...(1296): n = a,t,c or g
ttttttttttttttacgttttatcaactgccaagatcctttattttttccaggccccttcctgcccactccacatcggggcagctccagcataagggagatgacatgatgaaggggctaagagtagggcctggccagcatccactgagggcccaaccagggaacagttgctagccgctctcttccatgcagctggagcactagcaaggccttccagaggctcccagggcgacctccacatcactcccgcttgtctctgccctccagggtgctccgggcctcctctccctgtgtaccctagaggtgtgagggccacagtcctcctcaggtgaacctccctccccaagcccagggccctagcacaggctgcagttggacggcttcgagctgcggctctgggcctgctgccgctggtattctgcctcactggctgacagtgcttgtgctaaagctaggtcttcttcctcctgacaacttggaacctggggtttggtttctgccagggacatttccagggcccgctgcagagcttcatcctcactcaggccattctgcaaagcaatcactggaggggctgtccaggacggagatcgggttgtggctctacgacagacattgaagaggtggaggtcagaggtgtgaaggggaaaaagggggagcagggaaacgggcaggcctacctgctgggagaggtacaggaaggcatggtttgacttgggctggggacagtgcttgtagaagccacagcttgtgctctggagatggcagcaagtcctgcccggctggttgggtgcccctccccagagcaatcatggtccagtggatgccggtgcttgatgcagaagtttcggctacagcgttcacaggtcagtttcatcatttctcgctgccggcagccagcgcgttcacacttattggtgaagatcttacgtttttgctgtgctggatcagagcgacagtctctgtcaatgtgctctcccacagcacggtcagggggctcccctttggcctcaggctcaggcacatttcagagtgggcgctcaggtacctggatatccnnnnntnnttttctctctccaggggtttttttggggttccccccgggttttccccctcccccctgttttaaaaccggccccgggnnnnnnnnnnnggggcccctttaaaaaaatttttatttcccccccccgggggttaaaatttgttctttttaaagggggcccccnnnnnnnnnnnnngaagagcaatggtttattgagtcatgtggtaatggcaggttgtctttaaaaaaagaaag

SEQ ID NO: 106986 - DNA, 569 bp, Homo sapiens
  misc_feature (1)...(569): n = a,t,c or g
nattcgaacctctagtccaccgtggnggaattcccttctgattctccacctcctcttcatcctccatcccccttttacttctctctcccccgtctctcctccctcccgcctcctttctccctctccccctccctctctcctctgaataagcaagcttttgcctctaaaagtcacaagtaatcctcgtgtgtgacagagagagagagagagagagagagagagagagagagagagagagagacacgcgctggcggagaggaacagaacgcgggaggggatatctggcacaacgggtgagagaggaaacttgatgcttgtgggccaccatttgccagggcctctctcgagccggcgcctcggtttctgcccagatggatttggggggcaacattgtctggcgcagggagatcaagtgagactgcanagacgcataatgtgaatacactctccccccacccaaaggagagtgctgtggagatgaagacacactctcttatggagacctaagagactgaagacatctggcgtggactactctgatggtaanagtggagcacatctatatgtgn

SEQ ID NO: 106987 - DNA, 675 bp, Homo sapiens
  misc_feature (1)...(675): n = a,t,c or g
aatcgagacccttggaagtgcggtggaattcattccctatgagaatacttatcaaacttatctaaaaaagaaaaataggaacagccatatgcaaagtcagcccaacaggaaaggacatattagattaaaatacattgcggcctgggcttagtggctcacacctgtaatcccagcactttgggaggctgaggcaggcagatcgcttgagtccaggagtcgaaaccctgtctctacaaaaaaaaaaatacaaaaatnnnnnnnnnnnnnnnnnnnnnnnnnnnnnnnnnnnnnnnnnnnnnnnnnnnnnnnnnnnnnnnnnnnnnnnnnnnnnnnnnnnnnnnnnnnnnnnnnnnnnnnnnnnnnnnnnnnnnnnnnnnnnnngctccnnnnnnnnnngtgtatatgtatgtgtgtatatatagcaagagagagttctgtgatcaattgaaggcaaaaacagtaacactgagaggggctttgcttcccttcctgaagatcatgtcattggggtgggttcctgtaaagggaattttccaagagaaaagagaattttcatgacctgtagactcttacaaatccattttacctgcttccttatgcgatgtttattcaaagcacctgtgtaccatatttattcacttacacagcattactgaatctggaaattttcagtta

SEQ ID NO: 106988 - DNA, 1038 bp, Homo sapiens
  misc_feature (1)...(1038): n = a,t,c or g
gagtccaggagtttaaggttgcagtgagctatgattgcaccattgcacttcaggctgggccacagagcaagaccctgtctcagaaaacagaaagaaagaaagtcaaagaaataaagtcaaagacaagaaggtgatacagagaagacagaaaaggaggaggagagagactgacaggtacacaaatcagagaagtcccagagataacaaaaacacaaccacagagatagggagacgtaagccggagaaagacccagagattcgcatagaaagcaacgtggagactcagaagcaagcacagcatcaaggaatgatcaataaaaaganaaaaaaatatttcctgaggacttccaagtacaaggccctgcaatctcaggccacttctgtcccatctctgccttcagagggggggacaggtagtccagacaattagaatacagagggggctgtgttctgacggggccacgcgggcattgaggaaacgctgcaggcccctcccctagctggggcggggatgtctgtgtgccatcatctcactccatctggtcattcctttgcccattcatccatccattcattcaagtcaccccatgcacattttccaagactgcctgtgacctggccctgtgccgggcagagctgaggatgccaaggtgaattcctcctgtgcctggccccggccccagtctgctggaagaaccagacacagacaatcacactgcggggaaacacgtgctccatcggaaaagtccagagcagggggtgggcagagaggcccagcgtgcaccaaagcctcgctcaggtcagcgccaggcctgcctggagcagccaactgtgggagaagaaggagttggtgaaaggtgggtcccacctgggccgtccacagaagggctgaggggtagggggtgaggggttgaagawkcaggccctgccgccatgccacacggctgtcctctgtccctgctcctgggggagctgaaactgcatggaaggtcccccaggggtgccccgtctaataaactcgatgaagaggaaaaaaaa

SEQ ID NO: 106989 - DNA, 459 bp, Homo sapiens
  misc_feature (1)...(459): n = a,t,c or g
aggggccggggggccccccctgattnntccctttgatccttgcaccgncnggnggaattcaatttttggatttttgtagagatggggcttcaccatgttggcctggctggtcttcaactcctgacctcaagtgatccacccacctccacctcccaaagtgctgggattacaagtgtgaaccaccgctgagtaatcctttcaggacaggaatctgatcatgttatcccattttgcttaaaagttttccctgacatccctgaggccatgaggccttccatcccacccaggcattctttctgctcctggggtgtgccacaggcccctccccatgggccccaggcattttcctctgccttgaaagctttcctccactctgcctggtttatgccaacccttggacctccacctaggcgtccccctcagaaaagcccttccttgcctccctgggtggtctgggct

SEQ ID NO: 106990 - DNA, 459 bp, Homo sapiens
  misc_feature (1)...(459): n = a,t,c or g
atgagaactagccctggngaatctgcacttaacctcccaagtgctgggattataggcgtgagccaccgcacccagcctattttctgtattcttaatgcactggccttgggcgtcttgatcctggagagatcacccctccagagcccacaggtgcctccttctcacagtcacacaaagccagggtccctgccctcagtcaccccagggcgaggtcctggccgaccaagggctgccgagcccacggcccagggaaggcgctacaactccaatcccgtactgatctcacctggcagcgtccaccctgcctcatttgcccttcccgcagagcccccatgaactggggctccctccactccgcggccctgtgtgctgcgcccccttctcttgggaaatgcaatggatcttctttgcacgaagttgtcttcacgtctgccaccttaccgcacctgactaaaacta

SEQ ID NO: 106991 - DNA, 468 bp, Homo sapiens
  misc_feature (1)...(468): n = a,t,c or g
agcnccntaatgatcccactgatatcgtgcggaancccgggcngatcacgcgtncgaaagtctttaactccaccattagcacccaaagctaagattctaatttaaactattctctgttctttcatggggaagcagatttgggtaccaaccaagtattgactcacccatcaacaaccgctatgtatttcgaacattactgccagccaccatgaatagtgcacggtaccataaatacttgaccacctgtagtacataaaaacccaatccacatcataaccccctccccatgcttacgagcaagcacagcaattaaccttctactatcacacatcaactgctactcctaagccacccctcacccactaggataccaacaaacctacctacccttaacagtacatagcacataaagccatttaccgtacatagcacattacagacaaataccttctcgtccccatggatgac

SEQ ID NO: 106992 - DNA, 408 bp, Homo sapiens
  misc_feature (1)...(408): n = a,t,c or g
gatttaaaagttgatctaatattaataaaggctcactttgttttcaaaatttgaagtaattcacatacttatagcctaaaaaaatcggcaggaattacaaaatttcaaaactggcacattgtaaactgcatatgcatttgccaggtagtggtgccacttgaaatggtgaacagacacactgttatcctttgtcagtatcctgtaaagcccaggattctttaccagcaccatacagcgattttggtgactattttaacattcacactgaggccaggggtggtgagtcatgcctgtaatcctagcactttgggaggccaaggtgggaggatcatttgagctcaggagttcaagattagcctgggtaacatagtgagaccctgtctctattaaaaaataataataaaaatn

SEQ ID NO: 106993 - DNA, 456 bp, Homo sapiens
  misc_feature (1)...(456): n = a,t,c or g
naactgtgngctggannacgtcggaaaggctcgaanattcgggcgaccgacgcgttcgcttactactaaaaattattacattttgactatcacaacttaacggctacatagaaaaatccacccgttacgagtgcggcttcgaccctatatcccccgcccgcgtccctttctccataaaattcttcttagcagctattaccttcttattatttgatctagaaattgccctccttttacccctaccatgagccctacaaacaactaacctgccactaataggtatgtcatccctcttattaatcatcatcctagccctaagtctggcctatgagtgactacaaaaaggattagactgagccgaataaaaaaaaaaaaaaaaaggggcgggcgggggccgtttccttgcctcttcctttgccccgcttgggccgccttccgcctttcaggggcggggtg

SEQ ID NO: 106994 - DNA, 481 bp, Homo sapiens
  misc_feature (1)...(481): n = a,t,c or g
catagaccgtnntccgcaatagacccgcntgcacgaattcgccacgagcacaagcgagatgacgaagggaacgtcatagattgtaaagcgtcgcattaagacgcacacgttgtgccgccgctgcggctctaaggcctaccaccttcagaagtcgacctgtggcaaatgtggctaccctgccaagcgcaagagaaagtataactggagtgccacggctaaaagacgaaataccaccggaactggccgaatgaggcacctaaaaattgtataccgcagattcaggcatggattccgtgaaggaacaacacctaaacccaagagggcagctgttgcagcatccagttcatcttaagaatgtcaacgattagtcatgcaataaatgatctgcgtttatgacataaagacctccaaaccgtctgtgaactgctaagtaagaagagcccagaagtctcctgcttgcggggggggggggcgccctacc

SEQ ID NO: 106995 - DNA, 805 bp, Homo sapiens
gagcatgactgaggttgaaacttcacaggtcagctgtggcgctgagcgctagccttcatgtcttgtgggggaggggaagaaaaggtactggtaagagtctccaaagcactgatagtggactgaatctgcttgatgacccaccttgatccagggcccctttactccagtgggagaccttatacatttttagtgtctagagatttaagttgccactcttcttagtgtttgaaaactacctttttaattgcaagagggaatataaacatacaccaacaaaagacagcacaatggaaggcagcccagaggcagtcctgctcattgctgacttcagttcaaaatattttgcatgcctggaattttcaccatctcagaggtttcctctatgagcaattaaagaacagcctatggatcccagagtttccataaaatagttcttatttaacttgcaacatttggtcaggcactctcctgttaaattctttaaatacatctttgttatttaaagaacaaaacaaaacaccgggcacttgtggctcatgcctgtaatcccaacactttgggaagcccacgtgggaggatcgcttgaggccaggagtttgagaccagcctaggcagcatagtaagactactgctctctacaaaaaatttaaaaaagaaaaagaatatgtaagtggggctgggcacagtagcttatccctgtcaccgcagcactttgggaggctcaggtgggaggatcacttgaggtcagcagttcagaatcagcctgggcaatacagcctgtacaacagagtgagaccctatttct

SEQ ID NO: 106996 - DNA, 474 bp, Homo sapiens
cgaggggaatcgagacctagaccacgtgcgggaattcgaaggaaccaatatgagatattaaagaagtgaaagctataggtcccagtgccttaataaaggtaaggagtaagagaagattcgagattgactcccagactctccagtctgctggacatgggagatggaatagaagttgatctcggtgtggtcagaggagagcagttactgtgttgagcatggagagcctgtcgttccccaggagaaggagtacagctggctggaaataggcaaggcagagatggagagatccaccttggagtcactcctaggggcgacccttgaagccctgagtagcaatcccaccagaaagatgcaagggctgaagctgaaacttcagagagcatcggcatttaaggaagaaccttggctgggcgtggtggctcacgcctgtaatcccagcactttgggaggctgaggcgggcggattgcttgacg

SEQ ID NO: 106997 - DNA, 468 bp, Homo sapiens
  misc_feature (1)...(468): n = a,t,c or g
aggtgcannnattgatnncctcgagatcactagtcagtgtcgnggaattcctggtctcaaactcccgacctcagatgatccgcccgcctcgacctcccaaagtgctgggattacaggcatgagccattgcgcccggcaatgattatattttctaaactaaaagtctaaagctcatgattttacaatagatattttctgtttggtaagttttagtgtattaaaaatatcttttaaattttgataaatctagtacagaaatacatgtttttttacaacttgaactatagaagtatataacgtagacataaatcccttaaaatcctaacaatcgaaagcctaaagctcatgattttataacagatattttctgtttgggaagttttagtgtataaaaaaatcttttatatttttatagatctagtacagaaatacatgatctttattagaagtatataatgtggacattgn

SEQ ID NO: 106998 - DNA, 501 bp, Homo sapiens
  misc_feature (1)...(501): n = a,t,c or g
nggggcnnnnnnccttgaaattgagagntctctgcagagtgctggaattcttcatttggcaatggagacatttttgatagtcacactgaggggatattactggcatctagtgggtagaggttggagatgctcctaaatatcttataatacacaggacagctctcaaaacaaagaattatctgacacaaaatgttaaaactgctgagatcaaaagaccctgctgcatagaaattttttctctttccctctctttttctcccatttgtataataattattttcacaatatatagtatttgtacattattcctcctttgtcctcattttgtttgtaatactccataattatacatatatatatatacacacacacacacacacatatacactcatttttttgctgatattttctcagatatctcttggttggatgaaactcatcctttagtactatgttgtctagtaagttagtcactagctacatgtgacattgagaactgga

SEQ ID NO: 106999 - DNA, 456 bp, Homo sapiens
  misc_feature (1)...(456): n = a,t,c or g
atttgagacccttgaaagcgcgnggaattcgagaaatggggtttctccacgttggccaggctagtctcgagctcctgacctcaggttatccgctttccttggcctcctaaagtgctgggattacaggcatgagccaccgctctgggccaaattttcttaacctgttggcagatacactttctgtgaaatttcagaaattctttttaaaaatcttgtttgagtcaacagtgcttaccctcactgcttctattttgcattatattacatgaccaagacaccacaataaaggcaaagaagtaaaagtgaattatttgagggtaataagctgatgagttatttgtgggtgtcattctattctgataaccccaaatctgtatacgaggttagcagaatcctagagtggtaagatcaaaatataatgattccattcttacctgccaagaacagaatatatan

SEQ ID NO: 107000 - DNA, 468 bp, Homo sapiens
  misc_feature (1)...(468): n = a,t,c or g
aatcgagaccctcgagnacactagtcagtgtggtggaattcgcttgagaccaggagttcaagactccgtctcttaaaaaaaatttaaaatctacaaaataagaagaggaaatttgaacacagacatgcacagaggaaatatgacctggagacacagggagaagatgccatctacaagctaaggagagagagaagaaaggaggaggagtaggaaaaggaggagaagaagaggagaagaaggaaggagaaggagaagaagaagaagaaaccaacactgctatgtctcaaaaaacaaagaaaccaacaccttgatctcagacttccagcctccagaactgtgaaaaaattaatttctgttgtttaagccacccactctgtggtaccttgttatggcagtcctagcaaactaatacagcagtcaatacattaatacaatataatgctacaggtccaatcctttgtctccttg

SEQ ID NO: 107001 - DNA, 470 bp, Homo sapiens
  misc_feature (1)...(470): n = a,t,c or g
ggggtcgcggntttnntaaaaccgtttgccgangnacngncgggaanngnnnggaacatagcaagagcctgtctacaaaaagctgggcacggtggcacacagttgtagtgtagctccctgggaggctgaggcggtagaattaattgagttcaggagtttgaggtcagtgtgagttatgattgcgccactgtactccagcctgggtgacaagagtgagaccctatctcttaaagtaaaaaaacaaaagtgagctatcttttttttttttttaaaacttataaaaccgaagggaacttcatttaaaaaaaaattatttgtggttaaaaaaaaaccacggagacggatgctttaactaagcccaggggtcctttttcaatcctcatttaacttgacctgtgggttccattaaaccaaatcttttccttgaaacgtttttattttttttttactttgcttccaggttttggtag

SEQ ID NO: 107002 - DNA, 477 bp, Homo sapiens
  misc_feature (1)...(477): n = a,t,c or g
ggtaggtaggcnagtngnnnnnnnacttgaaanccttagcnangctntgnacangcggngnaantncacatacaccatttctatacacagaaatggaaattctggacttggaaaaaagtgaagaaaaatgaatggagccttagagaaatgtgggacacaaatatgctcataatgggaataccagaagaggagagaaggggacagaaaaaatatttaaacaaataatggctaataatgccccaaacttgatgaaaaacaatctacacatccaacaagctcaaggaaatataagcaaatcaaatccagcaatatacagtcatgtgccaccacataacaacattttgatcaatgattgacaacatgtatggtggtagtcccataagattatagtgcagctgaaaagttcccatcacctagtgctgtcatagtgcaacgtgttacatgtttgtgatgatgctggtgtaaacaaacctgtgt

SEQ ID NO: 107003 - DNA, 463 bp, Homo sapiens
  misc_feature (1)...(463): n = a,t,c or g
tgtgctnnaaactaggacctcgtcagtngcgnggaattccccaggtcctcaggaggctgaggcaggaggatcacttgagaccaggagactggggttgcactgggctgtgattatgctactgcactccagcctgggcaagaccccatctctataaaatgaaataaataaaataaaactccccaaatttgtgttacttcaagccaccaagttgtcataatttgttgccgcagcgggaagctaatacatgtgttcattgcagagtttaacaaacagataccatgtttatttttttgtttgttttgcatcctcattttacagatgattaaaaaaaaaaacactttttaaaggccaggtcttgctgtgttgccaggctggtcttgaacttctgggcctcacacagtcctgcctcagcctcccaagtagctggaaatacaggctctatctgccatgcctggcagaaacc

SEQ ID NO: 107004 - DNA, 442 bp, Homo sapiens
  misc_feature (1)...(442): n = a,t,c or g
gggnaattgangaccactagtccagtgctgtggaactcgtggtgtgaggatattccacctgttctttgagctggtccagtgttgctggagagctctgcttgctgccttggtctgcagtggcagctgtgctttcctacaagcccaacttcatatattctgtggttttgggttttgaatgtttcctagtttaatcaaggatgggcatttctgtttccattttgtgttatttttagttatccatggaaagatagaaacagaactatctttagtattaaaattacaagtttccaggaatcagttctgaaattattttgcatctttgaagtgtcttaaattttaaaaattggtcttggccaggtgcggtggctcacgcctgtaatcccagcacttcggaggccaaggcaggcagatcacggngtcaggagatcgagaccatcctggn

SEQ ID NO: 107005 - DNA, 433 bp, Homo sapiens
  misc_feature (1)...(433): n = a,t,c or g
naatgatgacctacagtcattcnggnggacattcaatgcctgacctcacgtgatccaccctccttggcctcccaaagtgctgggattacaggcatgagccaccacaccaagcatcacaatactactctgaagtttcatgcattattttttcacatgatattgtcaagaacctattcatgtaacaatatctgtattcaaggaaatctggaaaacaatctttttttttttcccctgagtggccttacacctgctaaacatgtttactttaatagcaggggaaaccatttttggaaagataagttccagcttttgtcttactttggaggaatctaatttttgagaacctgaaattaatcttgaaattaaccattggtatgctttttcaaaaaacattcattgaaaatctaccatctccctaccaaaagtggatcgg

SEQ ID NO: 107006 - DNA, 451 bp, Homo sapiens
  misc_feature (1)...(451): n = a,t,c or g
aatgaggctgagnncctcggggaactctggccttagggctgagtagcattccattgtgcaaatatatcacattttctttatttattaactctgggatggagacttaggttgcttccataccttagatattgtgagtaatccatttccttccttttctctcatttgtttttatatcttttttcctttttttatatccaggagtattttacttttaaaatataaattatgaatgttaaatgccttcatttgagcttcatttgggtcattagctgtgttcccaggggaaattattttacatccttggtataagaattaaagagaagagaaacacgaagggtggcttgacagtcaacagggacaggtttattttgaataaacctaggggggcagctggccgagttaggtcagagccacactcttttacagactaaaaatttttaaggattcaggg

SEQ ID NO: 107007 - DNA, 334 bp, Homo sapiens
  misc_feature (1)...(334): n = a,t,c or g
gttttatttatggtttcctgagattatacttattgctgatgctctttatagaaggcttacttttttaaaaattttatttcagtagcttttggagtacacgtggtgtttcgttacatggatgaataatatagtggtgaattctgggattttagctcatggcttagctcccacttatgaaggagaacataaggtttttggttttccactcctgcattacttcacctagaatgatggcctccagtttcatccaaattgctgcagaagacattattttcttccttttcatggctgagtagtattccatggtttatatataccagatttactttatccn

SEQ ID NO: 107008 - DNA, 1315 bp, Homo sapiens
ggacgaaacttccctgaatattccagccctcctgagcctagtccctttgtgagatttgtccccatttcttggacaccatatgagagacttcagaggctgaagtgggaggatcgcttgagcctgggaggtcgaggatgcagtgagctgtggtcgtaccactgcacatctagcctgggcaacacagctaggccctgtcttaaaaacagccaccaccaaaaactatcttgggatttgaataggattaccttaaatttgtagattaatttgagaattgacatctgtacgacattctagaacatggtatttcatgtcatgtattcatttcttgttaatgtctttcagaagagttttagggtttccatcatatagatcttacacgtcttttgttagataacagatctttgtatttttgttcctaaatacttcagacatttgtattgccattgtaaatgggatctttcttccattttctagttagttattggtggtacatctgaaaagcatttgaggtttgtgtgctgctctcttgattttgtttctagccaccgtactgaattctcatattacttccagtaaaatcttagttgattctcttaggcttctttggctaacatttattattttatatgcaaataattatagttttgtctcttccttttcaatacttacactctttccttcctttcctttcttgtctttttctttctcagggccttgttgtcacccagactggagagcaatggtgtgatctagctcactgtaacctcaaactcctgggcttaagggatcctcctgcctcggcttcctgagtggctgggactacaggcaggcagtgaattttaaaacttttggtgtagagacaggatcttgctatgttgcccaggctggttttcctgccactttagagcaggtttcctttttttcatacttttaagaggtttttattaggaattgtccattgaatgttagctaaaacagtcaataaaatgcgttaagtaccagctacatgcaagaccctaagttagatacagtcagccctcttcatcagcaggtccacatcttcagattcaactagataaggctgaatatttgaagaaaaaaacaataaaaatacaattagaaagtacagtataacaactgttgccatgatacaatatctatacattttattagtgatgacctaaagttcatgggaccaggcacggtgactcacacttgtaatcccaacacttggggaggccaacctgggcagcatagtgagaccttgtctttagtaaaaataaaaataaaaaaattagccaggtgtggtggtatg

SEQ ID NO: 107009 - DNA, 356 bp, Homo sapiens
ttttagtacagattaggtttcaccatggtggctaggctggtctcgaactcctgatctcaggtgatctgcccacccaaagtgcttggattacaggcatgagccattgcacccggcttgctttgaatatatatttttttttttttttttttttgaaaaaaacacaggtttttcccctgaaaaaaaaaagtgtgggggggaaacagggaattatgtgaccccgtcttcgcgcgtataactcacttttggccctttcccccccatagaggggggttaaaggggtggacctccccccccgacgtgtttttttgtttttttattgaaacatgggtgttcccaacattgcaccctgttggttg

SEQ ID NO: 107010 - DNA, 486 bp, Homo sapiens
  misc_feature (1)...(486): n = a,t,c or g
agagggccnnnnnaactgataactgagaacntacgcaggngcnggaattccgtaatctcagctcactgcaacctctgcctcccgggatcaagcgattctccttcctcagcctcccgagtagctgggattacaggatggtgctagcatatataagactgaaacaccaaagtcctccgtggaagttaatgaatttctggttatgagttggattcttcagcggagtatttgagccatgccttgaggcacatacttcaagttgctgcatccagttttaaactccagattgagctttacatattaaatgcgcacatttgttttcacatttttgagctttgccagcggcaccctctctaattaatcatcccgcgggcttagaaaacttctgcccaatcctttctgatttgttaaaagaaagagagaaggttttagtctgaaaaaggccttatctgataaacatcacattatatggatttttacatttaagta

SEQ ID NO: 107011 - DNA, 1610 bp, Homo sapiens
tggcctgttcctgccttaactgatggcattatcttgtgaggcatctcaccaatttcaaatctggtcttctcggcttagcggctgaagactgacactgcccgatcgcctcggaagccccctagaccatcacggatgccgagctttagtataagaagacaggaatgtcaggcctctgagcccaagctaagccatcatatcccctgtgacctgcacatacacatccacatggccggttcctgccttaactgatgacattccaccacaaaagaagtgaaaatggcctgttcctgccttaactgttgacattatcttgtgaaattccttctcctagctcatcctggctcaaaagctcccctactgagcaccttgtgacccccaactcctgcccgccagagaaacaacccccctttttcctttacatacccaaatcctataaaacagccccacccttatctcccttcactgactttcttttcggactcagcccaccatgcacccaggtgaaataaacagctttactgctctcacacaaagcctgtttggtggtctcttcacacggacgcgtatgaaatttggtgccgcgcatgaaatttggtgccgtgacttggatcgggggacctcccttaggagatcaatcccctgtcctcctgctctttgctccgtgagaaagatccacctacgacctcaggtcctcagaccgaccagcccaagaaacatctcaccaatttcaaatccgccccctacaagaccatcacggatgccgagcttcgcgtaactctcacagtggaagcccacctgcacccaggtgaaataaacagccatgttgctcacacaaagcctgtttggtggtctcttcacacagacgcacatgaaatttggtgccgtgactcggatttgaaattggttcccacgctgcccctaatcccgcttgaagcagccctgagaaacatcacccattctctctccataccaccgcccaaaaattttcgccgccccaacacttcaacactattttgtgttatttttcttattaatataagaaggcaggaatatcaggcctctgagcccaagccaagccatcgcatcccctgtgacttgcacgtatacgcccagatggcctgaagtaactgaagaatcacaaaagaagtgaaaatggctggttcctgccttaactgatgacattccaccacaaaagaagtgtaaatggccggtccttgctttaagtggatggaggttaccttgtgaaaagtcctttacctggctcatccctggctcaaaaaagcacccccactgagcaccttgcgaccccccactcctgcccgccaggaggaacaaaccccctttgactgtaattttcctttacctacccaaatcctataaaacggccccacccttatcttcccttcgctgactctctttttggactcagcccgcctgcacccaggtgaaataaacagccatgttgctcacacaaagcctgtttggtggtctcttcacacggacacgcatgaaacatatagtcttgaaaaattaattaaacattcatctaaagaagttagaaaatgcaaagaagtgggtcaacatcgagcaggctacccattgcttgggag

SEQ ID NO: 107012 - DNA, 475 bp, Homo sapiens
  misc_feature (1)...(475): n = a,t,c or g
agctcgggcnnnnaattgagncccatagaccagcgcgtgtggaattctcaaactcctgagctctagcaatcttcctgcctcagcctcccaaagtattaagattataggcgtgagccaccacgcctgaccagataaattttcagaatgggaaagggatggagttgcagctttctgggagggtaggggatgaaggagtagaggaggactcacggatttatgtggtctccagattacttcatttctggagtagtttacagtatgcccattatgaatgcgtctcatcctttatgtgtgtagtggagaaaaaaggttgagtttctgatcctcaaggtgaagtcgatattaatagttatctacagcttcctacattctggcccctatctgcctgtctgcatatccacattcataccattcccttccaacctccatgcatgcttgtttctatcatcatggncctagacctagaattttcttt

SEQ ID NO: 107013 - DNA, 423 bp, Homo sapiens
ggaattcaaatagttaaaagctctatgctgttgctagcatctgtggagcagaatcctccacaggtaagtgagatactaatgtctcatcacagccataattcaattgagcatttcaacaaagcatgattatttcttagtaacgtggacaaattcgtagcagaaaggactcaatgaaggaaaagaagctgagtgcagtggcacacgcttgtagtctcagctactcaggaggctgaggcagaaggatcccttgaggccaggagttcaaggctgctgtgtgcgttgatcattcctgtgaattgccactgcactccagcctgggcctttcccatgtagggatgccagatcactcacatgaattttagatgggttttagcctttccagccatcttttgttaaagtgaatacaattcagaatgctctcta

SEQ ID NO: 107014 - DNA, 916 bp, Homo sapiens
gcaactccatgtccggtgtccagctttggacagggtttatgacgtttctgtttctctagtaatgattaatgattcctcaggagattcgtgatgttgtctggtctatctggaaatttaaagtcactaggagctttgcctcatcgtgagtgatgctgtgctgtatttttacaaactctcgcatacagcaccttcctggggccacgttggcttgtgcagtggagcttgtccaggcaccagcatggagcaagtacagggttgctgtgttgggttggagcacactgtcaccacagtgtctgaagtcttataaacaggaagatcattttctgttttccttctaaccagggtgagaaaatacaaagtaaagaactaaagaatattaaaacctagcatttatgttccacagtgtgtatttcagaagtttgtaatccagaaaatatagtagtgtataatatctgaaaagagaatcaagtatacaattgtacatatttttaaagaactttgaaaaactccgtcatatcttttaccatttgtctatttgatagtaatgcagaaaaaagtccctaaagaccctgtgttccaaaatttaccaagattgacatttctattagacatccttaacctaagtgttttaattagattattagactataataaggatgaaattgctgtctgtaattttgttgaggttttattgttaatataataaaagctcaactgtacaaaattaagctaaatgttatccagtcagaaacatcagcctgtggccaggtgcggtggctcacgcctgtaatcccagcactttgggaggccaaggcgggcggatcacctgaggtcaggagttcaggaccagcctggctaatatggtgaaaccccatctctactaaaaatacagtattagccaggcatggtggcaggc

SEQ ID NO: 107015 - DNA, 431 bp, Homo sapiens
ggaaaaaacaaatgggagttcttcctgtatatatatatccttgttgatttgcattgatgtgtacatatagacatatatactgatttacattgagatatatatacgtgtgtatatatatgtatatatgtgtatatgtgtgtgtatatatatgtatatatgtgtatatatatgtatatatgtaaatttaccaatgtagatcaacaagggtagctttaaaaaatactgatgcctatgtcccgcccccagataatcttatttaattgatctcggatttggcccaagggttgggatttataagtcttcccagggttctaatgtgcaggtctaggtggagtcaatgtggtatccttgtctcggaaggcctggggcctctatttctgttcaatttcattcatagacattgacctaccaatatttgtgatcttgataag

SEQ ID NO: 107016 - DNA, 459 bp, Homo sapiens
  misc_feature (1)...(459): n = a,t,c or g
attganaacgtttgacctcatacgccagcttgnnnnnnaaccatgggagttacaattatcattcctattttacagatgagaaaactaaggctcatataggctcattattaatttaaggtcacaaagctactcactgtgagcagctaactttgagcttaggactatctcactcagtttggataactaagttgagagtcagaagttaaggggtatcaagcttttcattatttgaatggtttcctggtttccctcattgttcttagaaagcaaattcaattaaatatttatgagctctgactactaggttgctcgtatgtatatatgtataatatgtatgtgtgtgtgtgtgtgtgtgtgtgtgtgtgtgtatatatatatatatatcatgatagtggggcgcgagaaaaaaatctaataatatttagatatactctctgccctccagagttttcagtataa

SEQ ID NO: 107017 - DNA, 522 bp, Homo sapiens
  misc_feature (1)...(522): n = a,t,c or g
aggagaggggnnnnnnaattgatancctagataaccctacgcagngnggcggaattcctggacttgaactcctgacttagatgatccgcccacctcggctccccaatggggggagtaaagggggagccnccctgcccaccccgccccaaaacaaatatatttttattgaagaaggggagtgagcagattggccaggctagccttgaactcccaaactcaaatggtccacctgccttggcctcccaaagtgctgggattacaggcatgagccaccgtgcccagccaatgctatgctgcttctatgatgtcaactttttagctcccacatatgtgtgaaaacgtggtatttatctttctgggcctgaatttacatcactcaacatcatgttctccaaagcttatctttatcttgccataaatgacagaattttattattttttatggttaaatagtgtacctttgtgtatgtatgccacattttctttaccattttctggtgatgaacacttagaatggntcan

SEQ ID NO: 107018 - DNA, 529 bp, Homo sapiens
  misc_feature (1)...(529): n = a,t,c or g
agccgtgcccccctcgaaccctatcgaaggccctgaattcgacaacttggaagagggctaagtgggtgacttgagaaaccaagtgcacctaatttgaattttttttgtagagatagagttttgctctgttgcccggtctggtctctaacttccggcctcaggtgatccttccatcttggcctcacaaagtgctgggattacaggtgtgagccaccacacccgaccaaaatatatcttttaatagttagattgtttgattcaggatccaaacattgacctttatggtcaccacttccttacttttctttaacattttaccacttaagcatgacttcctatttgtgtaggttagttttgcctggttttattaacatcatagagtcgnacagnatgtattctcttggggttggtttctttcattcaacaatatgcttttaagaatgatccacgttttaacatatagctgtgctttatcttcttgcctgtatagaatgaaatcaaccccagttttgcactaaactgaaaattg

SEQ ID NO: 107019 - DNA, 486 bp, Homo sapiens
  misc_feature (1)...(486): n = a,t,c or g
cgcgcactgagacatgatgacatctgnacagncnggnggaattcatccctcgagcccaagacttagagaccagccaaggcaacagggtgagacctcgtctctacagaaaatttaaaaataattaggtgtggtggtgtgcttctgtagtcccggctatgtgggaggctgaggctgggggattgtctgaacctgggaggttgaggctgcactccaacatggacaatggagagagatcctgtcttaaaaaaaaataaataaataaataaaatggggaaagatggaaattctgatttctttcgagttcttggatactgaaggccacatgacagaatttccaggttcctttaggggaaaaattaagctggtgacaccaggaagtttggggatgaactcggtgacacatagtngttatctgcttgtggtgcttatctgcttgngggtggaggcctttgggccatttcaggtgtcagagaccatggttcccan

SEQ ID NO: 107020 - DNA, 488 bp, Homo sapiens
  misc_feature (1)...(488): n = a,t,c or g
ncggcactgttactgatgacatctgtanagngcggnggaattcgcacccggccagtttgatgttttttaaatagcagaatatgtaaggctgtatttggtgtatgggagatatgagaaagtatttgccatacattatattctcacaaagcttgtattctagaagagatatgtcatatatgtaactgggaaattagcgatatgataacatataattaacacaggatatctattggaaggaaaataaaatatgcatatgagggagagaattgtgcagtgagtggtcaaggagacatcacacacggatggaacttgaactgaatcttaaagaatagtaggatatatggccgggcatggtggctcatgcatgtaaccccagcaccttgggaggccaaggtgggaggattgcttgagcctaggagtttgagaccagtctgagtaacatggcaagaccctggttaaaaaaaaaactagccaggcacagcggcgca

SEQ ID NO: 107021 - DNA, 481 bp, Homo sapiens
  misc_feature (1)...(481): n = a,t,c or g
cacgccccccnattganatcgatgacactagtcagngcnnnnnaactcactcagtcctgtgtggtggcagttagtgtggtaagaggggtaagagaggctgatatcagttgagatggaaccttctggcctcagggcttgtgggggagactgncttttttttttttttttttttttcaaaggcaaaaaaatggttttttttaaaaaggaattttttttttttttaagttggaaggcaggggggcaatttttgtttaaccaaaccttaccctcccagggtaagggaaatcccctgcctcacccctctgaaaagggggaaaaaaagggggggccccccccccctaattaatttttttttttttaaaaaaaaaaaagttaccccttttgggccagggtgggctaaaactccgggccttagggaaacccccccccttcccctcccaaaggggtggaattaacggggttaaaaccccctttggcctgg

SEQ ID NO: 107022 - DNA, 440 bp, Homo sapiens
  misc_feature (1)...(440): n = a,t,c or g
cattgactggaccatcgnacgngcggnggaantcgatcatttgccaatttccatggtccaaatattctctctccattttcaaactaccaaagtgaccctaatcagcttacaaaattcctggaaatgtatctgccacctcttaccaaccagtgtgagctgacttcagcacaccactgagacagattacacgatagacagatagatagatagatagatagatagatagatagatagatagatagatattgatagagaacatgttgtgtctatatacatatccaatgacacacagaataatcatgttttaaattatgccaaaagtactgattatatcaagcccagtaaacataatgctacacagcacccattctttaattttgatttctaaaattataaccttcctttgatattaataaaatgatatgaacttgcaggagaag

SEQ ID NO: 107023 - DNA, 488 bp, Homo sapiens
  misc_feature (1)...(488): n = a,t,c or g
gaggtccnnnnaattgagnnccatgantagctncagacangcggnggaattccggggtttcaccatgttggccaggctggtctcaaactcctgacctcaagtgatccgcccgcctccacctccccaagtgttgggattataggcgtgagccactgcccccggccctttggtgctacttatgcttcaagttcctctgaaatttcccaattttcatctggtgatagatcaatgcaggttgttgattttccgggtaaactttctacttgttacttttcgctggcagttcccatacagataggccctctgactgaggaacatgtgttctttcattctcttgattctcccgtaaacctactgggaagacacctgtgtaaattaaagactacctaccatcatctgcactctggatggaatattttgtggagctccttggagaaagagacacctagttggtacttgtatgccttctgaaagaaaggggtatggan

SEQ ID NO: 107024 - DNA, 401 bp, Homo sapiens
cccgcgcgtgcggacaggatgcacggagctgaaattgtgactctgcgctccaccctggatgacaaagtgagactccgtttctgaggaggaagaagaggaagaggtggaattagcgcatcctctagcggcggagagatatcattgcgagcgggcggagacatgagtaaaggccttgttgtggctggagctctgcgatgagcgtgtatcctctcgatcacatacagaagaggattgcacggaggagctctttgacttcttgcatgcgagggaccattgcgtggaccacaaactctttagcaacttgaaataaatgtggggacttaattcaccccagtcttcatgatgtgggcatcaaaatatttccttatggttttggaagaccatttgtttttatttgagaa

SEQ ID NO: 107025 - DNA, 436 bp, Homo sapiens
  misc_feature (1)...(436): n = a,t,c or g
atagatagcctngttgaaggcctgcagtaccgggtcgacccacgcgtccgatcaacaccctcctaggcttactactaataattattacattttgactaccacaactcagcggctacatagaaaaatccaccccttacgagtgcggcttcgaccctatatcccccgcccgcgtccctttctccataaaattctgcttactagctatgaccttcttattatttgatctagaaattgccctccttttacccctaccatgagccctacaaacaactaacctgccactaatagttatggcatccctcttattaatcatcatcctagccctaagtctggcctatgagtgactacaaaaaggattagactgagccgaataaaaaaaaaaaaaaatggccgccccttctaaaggacccttcggggggcccatgtttacgcgggt

SEQ ID NO: 107026 - DNA, 417 bp, Homo sapiens
cggacgcgtgggccagcccatgacccctaacaggtgccctctcagccctcctaatgacctccggcctagccatgtgatttcacttccactccataacgctcctcatactaggcctactaaccaacacactaaccatataccaatgatggcgcgatgtaacacgagaaagcacataccaaggccaccacacaccacctgtccaaaaaggccttcgatacgggataatcctatttattacctcagaagtttttttcttcgcaggatttttctgagcctttgaccactccagcctagcccctaccccccaactaggagggcactggcccccaacaggcatcaccccgctaaatcccctagaagtcccactcctaaacacatccgtattactcgcatcaggagtatcaatcacctgagctc

SEQ ID NO: 107027 - DNA, 699 bp, Homo sapiens
  misc_feature (1)...(699): n = a,t,c or g
actacttttaattaaatagccacatgtgtctcctgtattgacagtaccactgtgtattaagagtatgagtcccagattgtgtaagttcaaatccaagctctaccacttctcggctggcttgtgatcctgtgcaagttactttacctctcagtgcctcggtttctacatttataaaataataactngggcaggcacagtggctcatggctgtcatcccaacacttcaggaggccgaggtgggaggatcgcctgaggccaggagttggagagcagcctgggcaacatgggaagagcctgtctcttgcgggggggggagaagaaagttcttgtctcaggctagctttggggaccaaatgaagcactcccatgtaggcactcaaatggaactatgtaaaccttaggcaaggcacctctgcctcagtttcctcatctctaaaatggggtgatggtagtatgttagcagagtggttgtgaggagtgaacgggacagtccgtatgtgggttatatgtatatattcccaggtgcttgctgttaccaggccatatgggttattcacagattgaaatatcttagctgggcacggtggctcacacctgtaattccagcagtttgggaggccgaggcgggtggatcacttgaggtcaggagttcgagaccagcctggccaacatggtgaaaacctgtccccaaaaaaaaaa

SEQ ID NO: 107028 - DNA, 390 bp, Homo sapiens
gttgcatgaatgagtatgtacatattattttacagtcaagatacacggactgggagttaggagacctggcatttctcctttcctgggttttctcattgacacacacacacacacacacacacacacacacacacacacacacacacacgtgggtctcattttttttattgacacacacacacacacacacacttttttaaagagagagagagtgtgagagagatcttcacgcccttaattttttagctagaaaacctgatatacactcgcgtgctagagagacacagagaggcaaaagttcatttcccattctcaaacatctcttattctgacaagagaactgacacttttgttttaacaaaaacgcactcaatgtgaggaaatatctgt

SEQ ID NO: 107029 - DNA, 389 bp, Homo sapiens
  misc_feature (1)...(389): n = a,t,c or g
agngatatatatatatatatatatatttatatatatttatatatacaatacatatatatatatatatatcaccgctgtttttttgggggggccctctgtttttttttttttttaaaaaaaaaaccccccgggggggcttagggctccctcactgcccccccatcaagaaaaggggggggtttttttccataccccccttggggggggggaagggggggatgtgggagggggaaaaaaaaaggggggaaattccccccccccccccccccctccttgagaaagaaagaacacaataaaaaatcataacacacaaaatggggggggggggggctgctaaaaaaaaacttctctcgccccgcggggggaggggtgtttttttttttttgttg

SEQ ID NO: 107030 - DNA, 402 bp, Homo sapiens
  misc_feature (1)...(402): n = a,t,c or g
agaatcgtttgaacccgggaggtggaggttgcggtgagccaagatccagccattgcattcaagcctggggaacaagagcgagacttctctattaaaaaaaaagaaaaaagaaatttccttaaaattcatgaggctagaaagggggctggaacttaaagtggcagtgtttgtctgagatgttggtgctcttactatgtcaaaagtgagaccctatctcnnaaaaaaaaaaaaaaaaaaaaaaaangggggggggccctttaaaaaaaaccatttttatcgccggggggggggaaagtttttttttttttttggggccccaaaaaaaaaattcgggggcggggttttaaaaaggggggggggggaaaacccggggggcccccaattatagcggttgggaacaac

SEQ ID NO: 107031 - DNA, 415 bp, Homo sapiens
  misc_feature (1)...(415): n = a,t,c or g
aaattttatgactggtattatatttctttctcaaaacttttcaaaactcagtacttcaatacatgttttaccctgaaatgttattttcataaacataattaatttctactctggaaactcttggatttaaaaaattaattccagcactcagtataatgaccctatgtctaggagaagagccatttcatattatgaatgcagcagttacaacaggtctgccttaagtggcttgctctgtgagcctgacaaattatttactgctaacaaaactactgcggtatctggaatgcatccgattttttaaaaaaataattttcatcccagcattttgggaggctaaggtgggtggatcacttgaggccaggcgttngagaccaccagcctgggcaacatggtgaaaccccatatctactaa

SEQ ID NO: 107032 - DNA, 409 bp, Homo sapiens
caggtgccaaatcagagtgctacaggtccaatgcctctcaccgataccatgcggctgctgtgtgaacttccctcaccacgtaaccctcaccttagggaagagaaggatgagaagtcatgaattcttaagatgagcatatgcagaaattactgaggaaaatcagaatgatgtaagcttatctagaaatgactagattatgttttctgatacttggtgctacagaagcatgagagagaggaggtaagttctattgcagaaaacagtatgaccaggcacagtggctcatgcctataatctcagtactttagaaggttgaggcacaatgattactcaaggccaggagttttagatcagcctggtcaacacagtgataccccatctctatcaaaaaaaaaaaaaaaaggggcgg

SEQ ID NO: 107033 - DNA, 448 bp, Homo sapiens
  misc_feature (1)...(448): n = a,t,c or g
atcgaatgcagtacgcctgccgnaccggnccgnnnnaccgggccgacccacgcgtccgggttttcgtcatgttggccaggctggtctcaaactcctgacctcaggtgatccacccacctcgacctcgcaaagtgctgggattacaggcgtgagccactgtgcccggccaacactgccagattttgagactaaccaggaagttcatctcgggcaggcagggtctgggcctgggcagcgtgtgctgtgtgctcacctgatggggtgtcaccatgtgccaagccaggtatgagggatctcacgacttggtgggctcctgggacatgatcccttctccccatctgataagctcaggaggagcctagaaatatacagggtctttgtctaggggacattaaaagacaggtgtggtggacagaaggcagtggccaaggcttcaggatgccttgtc

SEQ ID NO: 107034 - DNA, 391 bp, Homo sapiens
  misc_feature (1)...(391): n = a,t,c or g
atcttttcaaacaaaagattattgagccaattagggtacannnnnttcgngnctctttgtctcctttagcttggaacagcttctcagcttgtttttgtttggagcgggagggtgcttgtttgttttggcctttcttaaccttggagttaaaaaactccaagcaagattatttagaaggtatataatttggttttatctatttccttctgattagatttaggttatatatatttgtcagggatactacagaagtaattttgtggtttttggccgggtgcagaggctcacgcctgttgtccctgtactttgggaggccgaggcgggtggatcacgtgaggtcagaagttcaggaccagcctggcccacatggtgaaaccccgtgtttgctaat

SEQ ID NO: 107035 - DNA, 398 bp, Homo sapiens
ctgatcaggaagaaaaggagttaaaaccaccttgtggtcttcagcagtatctagtctctctcacacactggtagccagagtgatggactcggctgtgttccatccctgcccccgctgttaaccatcacctgttgattccgctggattttcatttactactggagaagggaacagaaaacagaaacacatgtaggttttgaatttaaaaactttttttcctttttttttgagacggaggttcgctcttgtcttccaggctggagcgcaatggcgtgatctcggctcacagcaacctccagccgaggcgggtggatcacttgaggtcaggagtttgtgaccaccctggccaacatggtgaaacctcttctctactaaaaaaaaaaaaaaggggcggccgt

SEQ ID NO: 107036 - DNA, 389 bp, Homo sapiens
  misc_feature (1)...(389): n = a,t,c or g
ctcgaactcctgacctcaagtgatccattcgccttggcctcccaaagtgctgggattacaggcgtgagccaccacgcctggctggtggttcacgcttgcaaccccancactttgggaggtggaggttggaggatatcttgagcccaaaaattcatgaaactaaccattctttgaagtggggcaggaagtatgacactttaaaacaggggttagcaaaatatttcagtaaaggaccagacaggtaatagctcaagcttggccgggcgcagtggctcatgcctgtaatcccagtactttgggcagatcacctgaggttggtctcgaactcctgacctcaggtgatccgcctaccttggcctccagcctgggcaacaagagcaaaactccat

SEQ ID NO: 107037 - DNA, 379 bp, Homo sapiens
aacaaaacaccctattctctatttaaacatattgataaacttcctgaatacgagaggcctgcaaatatttattttttaatccaacaaacttttactttgggggcaaaatttttctgacattttttatcattatttttaacaaagttaggaataaggctgggtggctcacgcctgtaatcactagcactttgggaggccaaggccggcagatcacttgaggccaggagctacaaaccaccctggcccacaaggtgaaaccccatctctactataaaatacaaaaaaaaaaaaaaggggccgcccttttaaaaaaaaaaagttacaatccctggtctggcagaataaaattttttttttagcggaactaaaattactttgg

SEQ ID NO: 107038 - DNA, 860 bp, Homo sapiens
caatacaaactcaaggagattaataaagtataccaatttttttttaatatatttgtaaggtacccttaaggtcagagttatggtcttgtatgaatatagaaaaaaatttagtaattgaaagaaaataaatgtgttctcacacactttttaacaattaaaggatatagatatcgatattacgtacaaataatatgatatcaattaaaataaacctcaggttgtttatagacgagttaaaaaaaagagacccctttatttttccctatttttttttttttttttttttttttttttttggtggcaatcacagtctttaatcattaattgtcatatttctgatttgttagcaagtgccagcttgtaggctggttgaagtacagaactcagaggaaaaaagaaattaaattttagctttctggagagcagcccctctctggcaccatcaaacacttctttgtttcccttcaacttggaactcttcaaacatcaggggttgtgagggtttggccattcttttatcttgggtccatgtgagtgacagaaatggtgcggcctgggaaagatctccctcctttacattttctcttctccctcctcctccttattctaaaactgtgcctccaacagaggggcaggggctcttgtagagagatccctggcccaggacaggagatgccaaatctaatttatctcactgagggcctttgagaaaaacgcttcagggccagggttcagtggcttcatgcctattattaattcccagtactttgagaagctgaggcggcagattcacttgaaggccaggagttcgagaccagtctcgtcaacatggcgaaaccacagtctctacaaaaaaaaaa

SEQ ID NO: 107039 - DNA, 392 bp, Homo sapiens
  misc_feature (1)...(392): n = a,t,c or g
catagcacaattgtaatcatgtgggtcattgtggggtggtgagtcacagctggtgagtggcagaatcaagaccaggtccaggtggtacagccacagagctggtgcccccaagtactcggctgctcacacgggccccaagagacctcctcactggcaagaggaagccacctcctctcggaagaatgagcagggctagagtacagtggcacaatcacttctcactgcagtctcgaactctctggctcaagcaatcctcccagctactcaaaaggctaagacaggagaattgcttgatcttaggaggcagagtctacagtgagccaagattgcgctgctgcactctagcctgggcaacagagcaagactctgtctaaaaaaaaataataataatn

SEQ ID NO: 107040 - DNA, 411 bp, Homo sapiens
cccacgcgtccgcccacgcgtccgcagcctaggtgacagagtgagactcttgtctcaaaaaaaaaaaaaaaaaaggttggaaatttttttccccaaagggggcgacggccatttaattcaaattttttgcccctcaacctccgggaggggggaaaactatgggaatatttccccatttccgggaaaaaattacggcccttattaacaaaactttttttttgggccgggccttggggctcaccccggaacccccccctttttgggaggccaggggggggggatcttggggcagaaaatttgtttgaccctgggaggcgggggttgcagggacccaaaatcccatccttgccctccaccttaggggacagagggaaacttttgtttaaaaaaaaaaaaaaaaaaaaggggggg

SEQ ID NO: 107041 - DNA, 370 bp, Homo sapiens
ttgatacttgttttcaagctacattttattggacttgtgcttactttgctgaagcacaaaggttgtttaagcagaagggcacaagaaagtggaaaactcctgacctcaagtgatccacccacctcggcctcccaaagtgctgagattacaggcgtgagccaccacacccgatcacgggtcttcctgcttctgtgatcaccttctcataaccttgagaccactgcacattgatgaagttcagttaatctacaatgactgtagccatctgagtgaccccaggtgagaccaatagaactgtcgaactagccaacgcacagcattgtgagaaacaataaatcattgttttaagccattaaaaaaaaaaaaaaag

SEQ ID NO: 107042 - DNA, 481 bp, Homo sapiens
  misc_feature (1)...(481): n = a,t,c or g
agggatgccggggtccgnnaactgatgcccctgnagcgatcgtacggnctcaannnatgggncgacccacgcgtccgcccacgcgtncggcacaagaaaagatgcttaacatatttaaccattaaataaatgcaaattaaaaccaagatgagatatcacttcacacactctaggatgtttatagttaaaaaagatagtaaatgctggcaaatatgtggagaaattgaaatcctcacacactgctgttggaaatgtacaatggtacagtcactttggaaaatagtctaaccgttcctcaaaatgatggagaaaatgaggagtgagttctaataggtatgggcttcctttgggggtgatgaaaatgttcttaaattgatcatggtaatggttgcacaaccctgtgcatatactaaaacccattaaattttgtacttaaattgggtgaattgtggaataatattgttaataatatctcaataan

SEQ ID NO: 107043 - DNA, 444 bp, Homo sapiens
tttcgtagagcacagagggctctgctatggtggaaggcaacatgtggaacctccattcttgttctctttctaaatacacagtgcttcaaaatatataaaacaaaaaattgaagaaccaaggccgggcacggtcgttcacacctgtgatcccagcactttgggaggccaagagtcacactcttgttgctagggctggtctcaaactcctgggctcgggcggtcctccctcctcagcctcccacagtggtgggattataggatgcaatgtaggggcgtgatcttggctcctcactgtggcctcgacctcctgggctcgggtgatcctcctgcctcagcctcacaagtggctgggaccgcagcttttgaaaactgtgctacttccttctggcttccatgatttttgagccaggtgccaggcaactggcagccatctctatcctccaa

SEQ ID NO: 107044 - DNA, 405 bp, Homo sapiens
tttcgtggcactggcacaagctggctctgggcacaaccttgaggtcagaggcaggagaaagtaggcagcaccatggctctctcggccaacacctgaatatataaagttttcccttggtgtccgacggggattggttccagaacatgcccctgaccaaaggatacccaaatccacacatgctcaagtcctttatataaaatggtgtagtacttgaatataacctacacacatcctcctgtaaattgcaacactcctagattacttgcaaatacctaatacagggccaggtgcggtggctcatgcttgtaatcccagcactttgggaggccaaggcaggtggatcatttgaggtcaggagtttgagaacagcctggccaacacagtgaaatcctgtctctagtaaaa

SEQ ID NO: 107045 - DNA, 346 bp, Homo sapiens
tatgttaccactgcaagatgcagctgctgggctgggacagagagccacatgggggctaaagatttctaccgccaggagaagcacccattccacgctgactctgggataggctgggcgtgagacaggttaagacagaggtatggacgctttgggagaagaatgtgatttagctgggccaggggagcaggagaaaaacattcactcgcctaggcacagtggctcatgcctgtagttacaacattttgggaggtgaaggagggcagatcgcttgagcccaggagtttgagaccagcctgggcaacatggcgaaatgtctctacaaaaataaaaaaaaaaaaaaaggggg

SEQ ID NO: 107046 - DNA, 385 bp, Homo sapiens
ggaagaatcaattagtggcaaacatttataaatgcaattttttgcagaccaaagtataattttaaaaaatgcaaattttctaaaagacacatctcttgaaaaatgagatgacgtgagccaccgtgtctggctgcctttttattattatattatttttaattttaagtgcgtagtagtaaattaaacacctgggtgaggtggctcgtgcctataatcctaacactttgggaggcctaagccggaggatttcttgaacccaggatttccagattagtctgggcaacacagtgaaacacatctctacaaaaaaaaaaaaaaaaaaaaaacctgggggggggggcttggtgtgttatcctgtgacccccccttccgggggaggctgacc

SEQ ID NO: 107047 - DNA, 448 bp, Homo sapiens
  misc_feature (1)...(448): n = a,t,c or g
tggatgtccggatgccngacaactgaaanccctaaaggtgctggcacannccgaannnngggnnganccacgcgtncgggctgggtttcaccatgttggccagactggtcttgatctcctgaccttaagtgatccacctgcctgggcctcccaaagtgctgggattacaggcatgagccaccacgtccagccaagacttagataattttaaagatgcagttcaaatgagggaaggatataaatattctgtttttcaattagggaattaacaacacaaaagtgggtaacaccgtagggaacttgtgattccatgaaatcagtcaaagagtaaacctcttggattgacagattccttaatattatgtgtgtgtgtgtgtgtgtgtgtgtgtgtacacctaggtgtgtaatatatgtatgtgcacttcagccctagcactgtagtaacgag

SEQ ID NO: 107048 - DNA, 399 bp, Homo sapiens
  misc_feature (1)...(399): n = a,t,c or g
aatgaaatatgaatttttgtctttcagtctctgtagtttatctcaatatattaataaaaaggtctgttctcactgttttaaaaaaaaaaaaaaaaaaaaaaaaaaaaaaaaaaaaaaaaaaaaaaaaaaattttggggggggccttttaaaaaaaatctggggggggcccccataaccccgggggggaaaaaattattttttttttttaaagggggggattaataaaacccctggggttttttaaaaaaaaaacttttttttggggggggggaaaatgggcaaaaacccccccaaaaaaataaagcgccggaaaaaaaaaaaaaattttaaagggggaaggggggaaaaacccccctttttggggggggaaaaaaaaatgcncnncccccngagaaaaa

SEQ ID NO: 107049 - DNA, 393 bp, Homo sapiens
tgaagtcagggttctcaccatgttggccagactggtctcaaactcctgacttcaagtgatctacccaccttggactcccaacgtgctgggactacaggagcgagcgactgcacccaaactaactacttactataaatctgtatggaatgactgacttacctacatacatacattattacttttatgaaaaaaaaaggatgacatgatctatgtggagaaagaaagaatgagtagcatgcataaaaaaaacatgactgaagaatacactacctacatacatatattgactgccagtgtgtgaataagcacgccctgtacatacttggcaagcttcttcatcccacaaaaaagaaggttggactgccactcactttttcttaatatttaatagaa

SEQ ID NO: 107050 - DNA, 420 bp, Homo sapiens
attcctagaaattaaacaatatttacataaaggtaaaagattacattaactaacaacaggatttttcccaacatgtctttgtcactttggctgtataagtaattatcatgaatgattaatattcattttcatacttttgaacatttcgggggagaacatgagactagagttacacggtagaagaaataggaattgtcctgggatgtttggtggaaacaaggtatttaactttggttatggaaaattcaccgtggcagtgaattagcattgagtgaggaacaacttaggtagtttgggactattcagacttggatgagatacatctttaaaacatatgcagctgggcacagtggctcacgcctgtaaccccagcactttaggaggctgaggcgggcggatcacctgaagtcacgagttcga

SEQ ID NO: 107051 - DNA, 1051 bp, Homo sapiens
  misc_feature (1)...(1051): n = a,t,c or g
cgtggaattcaataagttaccatatatattaaagtccactgtaacaaagtatactgcatttgttcagttaaccaatatgactgcctgctatatgccaaacagcatgctagtccctgtgtgcacagagatgaacatggtttcattctcattgaattgacaatcttaaggagagtgacataaacaagtaaattattggtttgttaagatttaaaatattctaaaatattaagagggaatgcatctttcctccatgtgaaggaagctccagtagcataacactgtcgtcactcttcatccccttatccactctgccctaggtaaagtgacttgcccaattgtaaatctggaaggagaaacaaggtgcaattagcccacttcctccccactcctgtttgggaccagcccatctgaagagacattcattctgttctgcttctatgggatcaggctctgcctctgcaggatgaggcctggcccagtagagcaatgcttgagacagggtaaatctgtccagttctagagttcagtgataagaagcttactggccttaagatgaaacccatattctcttgctgagcacagtggcacacatctatagtccttgctgcttgagaggctgcggcagcaggattgcttgagccaaggagttaatcaaggctaaagtgtaccatgatcatacctataaatagtcactgcactccagcctggcaacacatgagaccctgtctcctaaaaaaaaacttctccaatagttttatcagcaaataaaggtgatttttaggcctctatattagtttattcattcttcatcctagttatattcacaacccagaatggaaaggaggtatgccatttattggaccttctcaagccccaacaaataaatatacttattcccaggttatacagccactaaatattaaatagatctgcgttctttctcattgtagggggtttaggcaaacaaagtgctttgtattcccattaacagaggataggaatttggctaccntaccctgttcccctttantttaggtcccatatccttttt

SEQ ID NO: 107052 - DNA, 470 bp, Homo sapiens
  misc_feature (1)...(470): n = a,t,c or g
ccgcgccatcgagatcgtagtctgtgcggnggaactcgnttctctgcgggtgagctcactgcagttttctctggagagcctctgttccctcatttgtaaattagatagaggaccacttctgcctcctaagggtgcattcaggattcaaggtagggtaagcaccaagcacagcgcccggcaacaaacagatacccagcctgtgtaggttactgtaggggaaactgaggctgaggcgggtaggggccatggcctcttaacatgctgtgttctgaaaacacaaaagtggctaggcacagtggctcatgcctataatcccagcactttgggaggctgaggtgggcggatcacttgagaccaggagttcgagaccagcttcttgggaagctaaggcagcaggatcgtttaacccttgaagcggaggtggagtgagtaaagatttgccactgcacttcacctgggtgacagatgaa

SEQ ID NO: 107053 - DNA, 475 bp, Homo sapiens
  misc_feature (1)...(475): n = a,t,c or g
agagtggnnnnnnnnnttcgtagactgagtcacgttcgnggaattccagggtttcaccatgttggccaggctggtctcgaactcctgtcctcaagtgatctgcccacctcagcctcccacactgttgggattacaggcatgagtcaccgcgcccagccaaaaatctcataatgttctaagaaagtttacacagttgtgttgggctgcattcaaagccatcctgggttgcatgggcaagcttcctccactgcctgcatctgtccccataggccacctctagaatgtgttccaaatagagtaatgtctcaccacctcctccactctacccaaaccccagccaccatcttccacaactcctgcagtagcctcgtacctgggctccagtcccatgcttgccctccttggtctcctttccagcagcagcaccagaatgtcacttccacctgcttaaaacctttcagtgcgcttaggacac

SEQ ID NO: 107054 - DNA, 483 bp, Homo sapiens
  misc_feature (1)...(483): n = a,t,c or g
ntttgtagagcaacctattcagngnggnggaattcggcctttggcgccagcatggaggggcttggaccannnntnnaaggggagtcctttgtccctgtctccctgcctcccagctgcccactgcccatccctgctcaagagaggaggcgggaaggctgtgtcagggaggcccagctgggctgggggtggggccgaggttgctgctgcgggtcttcagatgaggactcgaatgctcccaggggcctggctgaggcgggaccagcggaaggagtagggaggagggctgggacagagactgggtccctgagatacaaggcaagggcaggggcctggtgtgaactcgcccataactccaggttcgagtctctcctcctgagtgctccagacctgacccttgctcttcccttgggaccccactggcaaaagggactttgcagatatgactgagttaaggatcaagagaggggagatgaccctggatta

SEQ ID NO: 107055 - DNA, 395 bp, Homo sapiens
cggacgcgtgggtcgcccacgcgtccgcccacgcgtccgtatgtttaataatcgacaccctactagccttactactaataattattacattttgactaccacaactcaacggctacatagaagaatccaccccttacgagtgcggcttggaacctatatcccccgcccgcgtgcctttatacataaaattcttcttagtagcgattaccttcttattattagatctagaaagggccctccttttacccctaccatgagccctactaacaactaacctgccactaatagttatgtcatccctcttattaatcatcatcctagccctaagtctgggctatgagtgactacgaaaaggattagactgagccgaataaaaaaaaatgaaaaagaaacat

SEQ ID NO: 107056 - DNA, 400 bp, Homo sapiens
  misc_feature (1)...(400): n = a,t,c or g
ctgaggctggaaaagcaagtgagggtgggctgggctgaagccattgccgccactatctgtgtaataaaatccgtgagcacgaaaaaaaaaaaaaaaaaaaaaaaaaaaaaaaaaaaaaaaaaaaaaaaataaaaaataaaaantttttnntgcgngttnggggaattaaaaattttttttaagatgaaaataaattaaaaattttttgcctggtttaaaaaaaaaaaaaacgggaaaaaaaagaggaaaatccctatttattccctttggggngnnnnnnnnnnnnnnnnnnnnnnnnnnnnnnnnnnnnnnnnnnnngngnggtncccnccnnnnnccaacataggggtggagaacacttattacttatccttgccttgtgatnngnttcctttaaacn

SEQ ID NO: 107057 - DNA, 410 bp, Homo sapiens
caaaaaagttcaaggagaatccaaattaatggatgtggatagaaatcaaagtggcgattcctcttcagaagtgaagactgactgataggagaaatgagagaactttctgagtgatgaaggtgttttatatctagattggagagttggttacacaagcgtatatatttgtcaaaagtcatcaaattgcacacatattatttcacagtatgtatgttttaccttaaataaaaatgttttggccaggcacagtggcttacacctataaccccagcactttgggaggccacagcaggaggatctcttgagcacaggagtttgagaccagcctgggcaatatagtgagccctcatctctactaatgaaataaaataaaatataacataaaatagccacgcgtggtgatgcaggcg

SEQ ID NO: 107058 - DNA, 607 bp, Homo sapiens
aacgataaaatattgctgttttatttggaccaaaaaacctatcctcaaaccttcagtcttttggccaaaagtttcgatctagtgaggattggatttgtcagcttttaatagggtatgtcaataacaaaagtcctgtctcccaggaggaaatagactatgccctgtgttggtggtgggggcctgtcctctgttccctaaaggatacgggggacaagccagaagctacttcttctcaagaaattaatatccctcatcccaaaaagtcaaccaacacgtgggaccccttagaccaccttccccccaccaaacaccactaacttccctccccctccagtagctgcaactgccccagacccttccccagctcactttgtttcttccccttataatcctgacttggggtctccctagcctgaatgcccttccccaggaagacttcaacgtgagatagaacagtgtaaaaaagatatccaaaactttcctttccccactacctcgagaatctgctccaacgatctttcccttaagggaagtgcttctaggaggagggggcatttgttttgtgaacgccctgttaaccagttcagaagtccgaagcctaaaaagg

SEQ ID NO: 107059 - DNA, 390 bp, Homo sapiens
cccacgcgtccgcccacgcgtccgctttcccccagatgttaaattctcaattcctatagaatatatcttaattgaaaatgttacaccaatgctgaatgatgcaccactgttttataacttatcttaagaagactggatgtggtggctcactcctgtaatcccaactcctcaagaggttgaggtgagaggatcactggagcccaggagttcagagctacagtaagctgtgattgtgccatgcactccatctgaatgacagaggaagatgctgtctctaaaaaaaagtattatcttcagtaattttttttttctcagaagcaggcaactttagctgattttttttttcctgtttgaattttttagttggagatttcattttggagtgacttt

SEQ ID NO: 107060 - DNA, 388 bp, Homo sapiens
acttgaattgcataagtgagccatgttttacagcagttgatcagagttaagaaccaagaaaataactggttaagcctgtaacccacccaatgaaagggggaggggaagacggaggagctgtggagttggaggtcccacaggggaacccatctctgtcttttagcagatatatcggcgctccctcttcattattattattattattattatttttggcagagatggagtctccctgaccagcctggtcaacatggcgaaaccccatgtctaccaaaaatacaaataattaaccgggcgtactggcatgtacctgtagtgccaactgatcaggaggctgacgcaagataattgcctgaacctaataggcagaggtcgcagcgacctgaga

SEQ ID NO: 107061 - DNA, 380 bp, Homo sapiens
ctgaaaccttttaccctttagctatcaacctgaaataaccactaatctattttcagttcctatagatttccctattctagaaatttaatatgaatggaattacataatatgtgactcctttggattttaagttgaggggattcataaaaggtcagaagtgaaacattcataggaagtagttgattgagccaggtgtagtggcttgcagctgtaatcccagtgtggatgagggggaaggatggcttgagtccaggagttggaggctgcagggagccatgatcaagccactgcactccagcctgggtgacattgtgagactctgactcttagaaataaaaaagctgaccaggctcagtggctcatggctgtaatcacagggg

SEQ ID NO: 107062 - DNA, 452 bp, Homo sapiens
  misc_feature (1)...(452): n = a,t,c or g
gtggcannnnnttttgaaatgaagcatgcgcacccgaccgaattcccggtcgaccccgcgtccggaaaagtttggaatctcagaagagatttcttaatacaaagactgaaaaataaactttcagttttctgtgggatcagctctttggaggtctagggctttaaatttgtgtgtgtgtgtgtgtgtgtgtgtgtgtgtgtgtgtgtgtgatatatttcacaatgaagtgaagtgtcttcttagggccttacttattttgccccttgcacacacagaaaggggtttacttcacagtatcggccaggctttgggaatcctctcttagagagaattcataggacagtgttctgttatctagcgtggatctacttacccaaagagagaggaatttttgaccctgagacggggcacagaattttgtagagtgtctcacagattttcttgagaggtgg

SEQ ID NO: 107063 - DNA, 396 bp, Homo sapiens
caatttttaaaaaaattttttgtatagacagggtttcgccatgttgtccaggctggtctttaattcctgagctcaagcggtctgcctatcttggcctcccaaagttctgggattgcagacgcgagccactgtgcctggccaaaatcagttatttttttaatgcaggttgagtatccttatccacaatgcttggggctggaagtgttttggattttggattttttcaggttttagaatattttcatatacttgagatatcttggggaggtgacccaagtctaaacacaaaatttgtttatattttgtatacaccttatatacataacctgaagggaattttaaataatattttaaataatggtgtgcattaaacaaagttgtgtacattaaaaagca

SEQ ID NO: 107064 - DNA, 425 bp, Homo sapiens
gcagaggatcactcggtggctgtgtataccctgcctttggtggtggcaccccagtcagaaacgggaccctgaagctgggatttaggtaaggggaggacctttccaaggcttgtttacagctcagatttgcagaggaccaggtatttgggaactcctcttctgaagaaccagattgcagggcagggcacaacgaggggcctgttgcatcttgggagcacagggctgtgtgctctggtaacctgggcccactcacctggcaggcactggcttccttcccagtgagactgtagcattgacggaaaagtgcatggtggctcatgcctgtggtctcaccactttgagaggctgaggcgggaggatttcttgagcccgggagtttgagatcagcctgggcaacgtggggagacccccatctctacaaaaaa

SEQ ID NO: 107065 - DNA, 418 bp, Homo sapiens
  misc_feature (1)...(418): n = a,t,c or g
accaggttataagactggctgatttttgtatttctggtagagacaggattttgcccaggctggtctcgaactcctgggctcaagctatccatccaccttggcttcccaaagtgctgggaatgcagatgtgagccaccatgcccagccttccggtactttttcatcaattgctttaggagtgactttgtaaagttctctgatattatctgagtagtcaagttctttaggattgtgtcatcagtctcaagtttgcccagagctggggcttttccacaaatcttgggggtaagagagagagatgaagagttggagccaggacaaggatcgtcagtgggaaaatcaggaccagattctgcttctaccttcatgtgtagatgctgactcttttgaaagaactacaataaagtcacctgtggan

SEQ ID NO: 107066 - DNA, 484 bp, Homo sapiens
  misc_feature (1)...(484): n = a,t,c or g
gggctccaaaaaattgataacctgatatcggctcccgggccggaattgccgggaccagccacgcgtacgcccacgcgtncagaaactcctgacctcatgttatccacccgcctcggcctcccaaagtgctgggattacaggcgtgagccaccatgccgggcctatttaaataatttccaaagaagtattaaatactagcagtgtcctgaagttacttgaagctattagataacaactttcagttataatgaattaagactacattctcagcttgtagtttattaggctttatacctcttttttgatacaggaaatttatttgctccttcatccctcatgaacagtcttgcagaagttgtatttggttacatgctttggtcatgttgactttgtgaatgtgttactcagagtacttaattataggctgctgaaatatttcctctacctgaatctgatatccctaaatgggacccttggcctgaag

SEQ ID NO: 107067 - DNA, 392 bp, Homo sapiens
ttggtgaatgggtacaaacttagggaagaaataccttctaatgtttggtagcagactagggtggctacagttagcaacaatatattgtgtatttcaaagttgctagaagagagaacttgaaatgttcccaacacataaaattataaattctcaaggtggtgaatacctcaaataccctggcttgataattacacattctgtgtatataaaacacattcatatgcaccccataatatgcaaaatttcatgtatcaataaatgaaaaaaagccagatgtggctcatgcgtgtaatcccggcactttgggaggccaaggcaaatggatcacctgaggtcaggagttcaagaccagtctggccaacatgacaaaaccccgtatctactaaaaatac

SEQ ID NO: 107068 - DNA, 538 bp, Homo sapiens
  misc_feature (1)...(538): n = a,t,c or g
ctccagtcccgggagcccgctccacagcgtggagacgtccctctaacaagnnnnnnnnnnnnnnnnnnnnnnnnnnnnnnnnnnnnnnnnnnnnnnnnnnnnnnnnnnnnnnnnnnnnnnnnnnnntatggggacctgcacacctgcaaaacgagggaacaactaaggtggctgaagacctttctggcagggcatttgcaaggacccaaatccattcaacaagggtgcagcctgccacaggctcctcatccggactgaggaagacgaggacagggaggaggaaaaggaggaagaggaggacaaaaagggggaggagaaggttcttcgtccaaaggaggaaggagaagaagtagaaagtgcgaagagctgagttccccacctttttttctattgatgcttcttttttaacaaactacagttttaccgtgtgtttgccatttgagctgtgtgtggggcagggggctggtttgggtttatggggagcttttgttgcacccatgcaggggcaatcagatcagcatcttcatgcaaaaaaaaa

SEQ ID NO: 107069 - DNA, 386 bp, Homo sapiens
  misc_feature (1)...(386): n = a,t,c or g
cccacgcgtccggagtgagagaagccagacacaaggtttacccatattgtaacatgtattggtactttattcttttttataatttttattgcgatatatatatatatataatacaatttaccattttaaccattaatatgtgtgcaaatcagtggcatgaggtgctacattcacaatgttgtgctactatcaccatctattttcaggactttttcatcttcatccccaagagaaactctgtacccaatgaacaataactccctggcggggtgcagtggctcacgtctgtaatcccagcactttgggaggccaaagcaggcagatgacctgaggtcaggagttcaagaccagcctatccaacatggtgaaaccccgtctctactaan

SEQ ID NO: 107070 - DNA, 432 bp, Homo sapiens
  misc_feature (1)...(432): n = a,t,c or g
tccccctcgcaccacccgccccccccaccccgatgttccttatggtggagtggaaaaaacccagagtccagcacatctggattcttgtctctctctcctaaccaaccgtgtgtgacttgagtagagcacgtgcccctctaagtctcggtgctcttatctgtgagctggggatgatagtgataactccatgggattgttgggaagaatacatgagataaagtttttcaaatgcttgggaccgtgtatgactacaaagtttatcgtcccagcactttgggaagcagaggtaggaggatggcttgagcccanaagtttgaggttacggtgagctttgattgcactgctacagtgtactccagcctgagggacaaagcaagaccctctctcaggaaaaaaaannnnnnnnnaaaaaaaaaaaaaaaaaaaagaggg

SEQ ID NO: 107071 - DNA, 399 bp, Homo sapiens
  misc_feature (1)...(399): n = a,t,c or g
cacagggtgtcatcaattcagattcctaaataaccctttctctccacacccagtcctccagctggtgagccctgggccagattgtttgatcttcaggtattttaaattttagttacatcaattaatgtaaattaatccaaatgctaatttttgtggtgcaagaagtttcttatgtaaattcagggtatggataagctaattaagatatccatctttggtggctctaagtgtattatttgtttttaaataaagtgtacaaatatagatnaaaaaaaaaaaaaaaaaaaaaaaaaaaaaaaaaaaaaaaaaaaaaaaaaaaaaaaaataaaaacnnnnggggggggggacaaaaaaaaaaaaaaaaccccccccccgcgggcggtggttttttttttttta

SEQ ID NO: 107072 - DNA, 425 bp, Homo sapiens
gctttttgcgatatccagaataatttaagaaatcatagctggatgtgggtacctgtagtcccatagtcccagcttctcaggaggctgaggcgggaagattgcatgagcccacgagtttgaggttgtggtgagctatgattgtgcagctgtactacagccttggtgacagagcgagaccctgtctctatttaaaaaaataaaaaatcacagtggttggtgtgaggcttgtcatgttttgtttgggtgatgaataatgaaatatggacctgtttactggatctttaaacaccttattttgtggtagcaaataacttattgcaaaagagacagacgcgggggacatccttctttgatggggacgcaagccatgactgaatgttctatgtaaaactataagacacattttgttttttgcccgggttttg

SEQ ID NO: 107073 - DNA, 405 bp, Homo sapiens
agcctgcccgtctttagactagaactagaagctatcctgggtctacaggttgccaactgcatacctttggactagtcagcctttataattgtgtgagccaattccttataacaaatctttatatatcgatatatagagatatatattgatatatatatatatacctatatagagagatatatctatatatctatatagagatctatacctatatagagagatatgtctatatccatatatagatatatagagatccatatatatcctctatatatggatacatctatatatagagagatctctctaaatatctctatatctataactatatctacatctacatctatagctatatcaacatccaatttgttctttttctctgagaacacctactgataaataagt

SEQ ID NO: 107074 - DNA, 507 bp, Homo sapiens
  misc_feature (1)...(507): n = a,t,c or g
gtttccccagcctggcccggctttctnnaccctaatgccctcgcancatcnacaannncnnaatcccggncgacccacgcgtccgaattgttacaaagttcagctggagacttccttctccctgtgacattttccctgcacctctggctgccctccggaaggatccctgtggtgctatgcaggaatggcctactcagagatccaggaaactcccagggcctttcccgctgcttcctctacccctttatttcactcagctctctaacttgactcagcatcagacatcacccaggctggagtgcagtggtgcaatcatagcttcctgtaacctcaaactcctgggctcaagtgagcttccacctcagcctcctgagtagctgaaattacaggcctgagccagcatgtctgggtaaaaattataatgtctgtctctctgtctagctatacattcatacagcttcccagtattctattgtatggaaatacagcaccttaatttctttattt

SEQ ID NO: 107075 - DNA, 485 bp, Homo sapiens
  misc_feature (1)...(485): n = a,t,c or g
cgtattnnnagggcgggcggagtccnnnaattgaaaccctagggtgtctgngagcacnaccggccgganatcccggtcgacccacgcgtccgagcattttactgtgttggccaggctggtcttgaactcctggcctcaagtggtccacctgccttagcctcccaaagtgctgagattatgggtatgagccactatgctcggctgacctgttgtgtttttgtaatgagttgtcccatggtgtggtgtgaggaaccagagcacagtacagtgtgagagaatgtgctatgtcagtgttaacaggccgctggagagatcctgccattggacctgagaccccgttgacttgtcacgcaatttgttttttttctcccgtcttgtagatggattaataattaataaatctgagcctcttatttatgagcaaagtaacctgaggcttacgtacccctcctaagaaaaaggcagtcagtcagtagtgaggaagg

SEQ ID NO: 107076 - DNA, 400 bp, Homo sapiens
  misc_feature (1)...(400): n = a,t,c or g
attcagccttctttttctggactctggactttctctaataataaatagttcttctttaaaaaaaaaaaaaaaaaaaaaaacaaaaaaaaaaaaaaaaaaaaaaaaaaagggggggcccccctttaaaaaaaaacaatttttccccccgggggggggaaatttttttttttttttaggggcccaaaaaaaaaaatttcggggcccgttttaaaaaaccggggggggggaaaaccccgggggaaaccaaaaaaaaacctttggaaaaaaaccccttttttccccggggggaaaaaaaaaaaaaaccgnaannnnnnnnnnaaaaaaaaaaaaaaaaaaaaaccccggggaaaaaaaaattttttcctttttcaaaaaaccattttttgggggggcggaaaat

SEQ ID NO: 107077 - DNA, 502 bp, Homo sapiens
  misc_feature (1)...(502): n = a,t,c or g
gtgctcnnacgcgcccataaaggacgctcactgangctcctccgacggaacacccgggncgacccacgcgtccgaaggttaggaactgggctggggggcttctgggtacacttctatattaatactaattgtagnaaaaataataataaaagtgtctctaaaggcaaacctgaaaaatttagagaagggtgaaaaaaatctgcaaatgtattatatggcaaaacaattatttatgaaaaggaataaacatttgttccatgcccnaaaaaaaaaaaaaaaaaaaaaaaaaaaaaaaaaaaaaaaaaggggccccctttaaaaaaaaaaaaaaaaaaaaaatatcttgaggggggggggggccctttttttaaaaaaccaaaataaaaccccccggggggcgcgggtttttttttttttttggggaaaaaataatgttgttcccggcggtttttatataaacagaaagccctaaattcccgtggtgcaaaaataaaaaaaccct

SEQ ID NO: 107078 - DNA, 414 bp, Homo sapiens
cggacgcgtgggtggggtttcacccatgttggtcaggctggtctcaaactcctgacctcagatgatccacccacctcagcctcccaaagtgctgggatttcaggcatgagctgctgcaccaggcctcgagttgatttttgtataaggtaagagatgaggatccagtttcattcttctacatgtgagttgccagttatacctgtatagctgtgaacaaggtgatagctcttttggggcctcaagtttcttagtctgacaaaatgattgaaaaatgctttctaaactgtggaagcctgcatacttaaaccaagaggcaaattgtataggcagtccatctttcccctcacattatacctagaaagaaactggaatgtgatcttaccgtagctgatcactttatatagggtaaacact

SEQ ID NO: 107079 - DNA, 399 bp, Homo sapiens
cggacgcgtgggcgacccacgcgtacgattttatttttcctgtttacagatagggaaaatggggaccagagaaagttatagagcatagagttgaactcaattttgacctccagcctgggtgataagagcgggactgcatctcacaaaaaaaaaaaaattagttaggcaagggggggggaacctgtggtcccagctactccggtagctgaggggggaggattgcttgaccctgggagggggagggaggtctctccagaactgagattgtaccattgcaccctagcctgggccaggggagggccaccctgtttctaatggagaagagaggaatgtcttttattagggggggggggtggtgaggaaaaaagattaaatttcgggtgatagaacttttttgtg

SEQ ID NO: 107080 - DNA, 386 bp, Homo sapiens
  misc_feature (1)...(386): n = a,t,c or g
cagtggtgcagtcatagctcgctgcggtctccaacgcctgggctcatgcagtcctcccgagtagctgcaccacaggcatgagccacagcccccagcttccagaacctttttgttttccagaactgaaatgctgtactttacccattcaattttaactccccatttcccttcccctggccatcatagggaaaccctgtcaaaaaataaataaaaaatacaacttctagttcaggctgggtgtggtggctcatgcctataatcccagcactttgggatgccgaggtgggaggattgcttgaacctaggagtttgagaccagcctgggcaacagagcgagactctgtctctnnnnnnnnnnnnnnnnnnnnnnnnnnnnnnntgngngg

SEQ ID NO: 107081 - DNA, 396 bp, Homo sapiens
  misc_feature (1)...(396): n = a,t,c or g
cccacgcgtccgccagatcatttacctatttttaaaatttgggtgttcttcttttcttaaattgtattatttatgagtttttatatatttttgatgcaggttgttacacacacacacacacacacacacgttgttacacagacacacacacacacactctataaatattttctccaagacaggagcttgccatttttctttgcatattctcagggatgtctttcaaatactagatatttttaagatcaattttaacttaagtagatattcatgaagattaatttactttttaaaggagtcatgcttttgtgttttatttaataaatctctgcctacttctgggtgcaaaaaggcncattgtactttctttttttctttttttttgagagtcttacg

SEQ ID NO: 107082 - DNA, 410 bp, Homo sapiens
  misc_feature (1)...(410): n = a,t,c or g
aaaacatgagtagtaattatgtagatatcagtggtatttcttgtacctgaatccacgtgctggacatcctggttctgccaactcagatttgaggtctggagcaagttactgaacgtctctaccttagttttcttgtcttccaggattgttgtgaggactgaatgacatgctacaaataaaattcttagcttcaagccaagcaagacctcaaagtgttagcttccagtaccgctactactgatggtgtttgactctgccttcattcctgaaatgcttctccattgactgggtgtggaggcttatgcctgtaatcttaacactttgggaggctgaggcgggagaatcacttgaggccaggagtttgagaccggcctgggcaacacggctagaccctgtctctatttttaaan

SEQ ID NO: 107083 - DNA, 1340 bp, Homo sapiens
tttttgacagcatagactttctcagatttattgtatgtcctcagacagtagataaaaatgcatggggtttacttccagggatttacagaccaatataagtaaacagctggggtttctttttaggctgtttctcttggaggtggtgcaggaggttgaggaaagcacctctgatgagcagatagctggaggctgttcccacagtcatgtctcagcgaagaagtcggagttcagcagccatcagaaccaaggtatgtgtggtgatcttcggaatgccactcccaaattcctttgcacttttcttttgcacacagcaggagttgtaaaagaatgcttccttttattattaacactgagaatccatgcagagagtttacactaaacacatgaatacattgtgtttttaggaaggctgggtgccctcagtccccagatctttgaattctaccattaagttcaggtaggtttttggagacagagattggccgcatcatatctgtgacactgactcttctggtgtaggtttgcttggccagggagtctgagtgcagcccctgatcagtgcttcatgccaatctgtgagtctgttccaggaactagaggagagagagccttagccttgcctgcaaccagatgaatggttagctttagtggtgaacactttgctttttgaatagtgtggttggctggcagctcttgtcattgtttatctctcaatttaacaaaccaagctgaagcctgagcacagctacaaccttgtccaatctctttagcaacaaaatacctgtgtgtgcatatcttattgctcaaaacattaaacaaggctgtttacaaacacacacacaaacatacacagatacactgtacaggagacccctgataaaacacacaaattttaaaaatttatttttaaacaaatgcagtgggatgatcatagctctctgcagccttgaactcctgagctcaagcaatcctcctgcctcaggctcccaagtacctgggactacaggcgtgagccactgcacctggccatgtagtgaaggactttctaagcaagaccttgacttggaaagttgccaccaactccccagctctgtgagaagttttaggggcagggggtttaaattatcaaatttagctggtttgcagggggagttctttcccagtgatgagttggggctgcttctccccagagtaaaaaatggcagcaaataaatgttagatcacagcctcttcttagtcatacccatttatacatgtcatgagggtcattgccaaagaaagaagtgagttaagtgtaagggaatctggtcgggggtggaccaataaccagactcatcccc

SEQ ID NO: 107084 - DNA, 392 bp, Homo sapiens
caccatgccagctaatttttgtatttttgatagagacagtttcaccatgttgcccaggcttgtctccaactcctgagctaaagcaacccaccggcctctgcctcccaaagtgctgggagccactgccaccactcccagcccccttcctttcttaagcactgttagggattgtgtctagctacctaaagaacatagactgactcttcccttaagccacttccctcgctgccaagttaggtcttcttccaataatataagatgctagaagacttagatcttgatcttatttctactttaaggttcgatagtccctcttaatgatttcctgtttagcttaatgcttggatgaggcggggcttcatgagctctatctttaagggtaaagcccctta

SEQ ID NO: 107085 - DNA, 388 bp, Homo sapiens
agataaagtaaattcctatctagacttttgtcttcattcttctcttgaactccttacctcaggtgatccacccacctcggcctcccaaagtgctggggttacaggcatgagccacacacccaggcaaaagattcttgatgtatctaaaatggtatactgcatgacaacattttggccaaagataagaccacatgtattttgggagtcccataatattataacagaactcagggtgatgggtgtagcaaactaccatgacacatgtatacctgtgtaacaaacctgcacattgtgcacatgtatcccataacttaaagcattaaaaaaaaaaaaagtatttaccggaactgaaggatccctattccctagggactttttggagatcctg

SEQ ID NO: 107086 - DNA, 387 bp, Homo sapiens
actgggtttcaccatgttgcctaggcttgtctcaaactcctgggctcaagcaattcacctacctcagcctcccaaactcatggaattataggcatggatatggaaagaaatgcatagcagatggtaaaataagaaggaaacacaattgcacttggtggcaccaaagaaggcctgccctgtgctgcctgggctagggggacttcagaaggtgtcctatttgaaggtgcacccagtaagtgttggttgctcacctcacccaatacctacctgtccttccatcagggagcacatagaattgggctcaagagcatgaaacattctcaagcgatatctctttagcatatggggttccctctacaaagactgaggttactgtcttggcatcag

SEQ ID NO: 107087 - DNA, 389 bp, Homo sapiens
gccagctaaattttgtatttttatacagatgggatttccatcattttggccaggctggtctcaaactcctgacctcaggtgagccacccgcctcggcctgccaaactgctggaattacgggcatgagctaccacgccggacttaatcaattttctcttaatcccttaccgtagtcaaattatggagccagtactaaagaaaaaccaagctaatgttcctcatttccaaggcaagctccaagccccccgtatcttccacagtgtcagcttccaagttgttttcaacaatcgatgggaattttcaactttttaaaaattttactgagaacaaaagagagagaaatcaaaattctgaaactcgtctcttaacatcatagcaaagattgaccg

SEQ ID NO: 107088 - DNA, 377 bp, Homo sapiens
  misc_feature (1)...(377): n = a,t,c or g
gcagggcattttcacttcttttgtgattcttcaactacttcaggccatgtgggcatatacgtgcaagtcacaggggatgcgacggcttggcttgggtttgggctcacaggcctgacatagagaatgtgaccattaagtgtgcttctgtgaaatcatattaactatctgggcatttagtaacatcaaattatagccttatatttaatgaatgacatcttttatgttcaaaataactataatgtaaatctagtcaacatgtaattctaataaaaatagacatatttatgctacatttttaacatatgcctttttgtgggggaaatagaaaaacaaagattttttttttaacctgttgatttggtagtttggtttgcaan

SEQ ID NO: 107089 - DNA, 387 bp, Homo sapiens
  misc_feature (1)...(387): n = a,t,c or g
tatacttgttctgttttattactagttactgttaatctcttactgtgcctaatttataaattaaactttatcataggtatgttgaggaaaaaaacagtatatatctatatagagagaattcagtactatctgaagtttcaagcatccaccgggtgtcttggagtgtatcctacagtatagccatatatgtatacgtatacgtatatgtatatgtatatgtacatatatatatatatatatatatatatactctgtctctgtctggatggatagaaagactggtgttaataaggctccatctgcaccaacatctctatggaggcatgggacagcggaaaagcgccatatatcacatgctgctgtgtcatctgcttacggtatatcacn

SEQ ID NO: 107090 - DNA, 415 bp, Homo sapiens
cttgaacttctgggctccagttatcctcccaccttagcctcccaaagtgctgggattataggtgtgagtcacggctcctggcataattatttttttattgtctttatttaatgggtacagtatggtgtttcatattcacatacactttcataaacacagaatgaaatgaatactatattcaagcaaattaacatatccatcacctcaaatagttatctttttttgtggtaagagcacctaaggctgggtatggtggctcatgcctgtgattccagcaatttgagaggctgaagtaggcggatcacttgagtccacgagtttgggacaagcctgggcaacagggcgaaaagccttttttgtattttataaagaatacaaaaattagcagggccatggggggtttgcctgtggtctc

SEQ ID NO: 107091 - DNA, 411 bp, Homo sapiens
  misc_feature (1)...(411): n = a,t,c or g
aaataagatgtcaaagaggctgtgacctgaggagattacctgtatttgcgggaggggtggcaggaacctgccaggagggaacagcatgcacagaacctggagccgaatagaacattcacgcctcacctgatatgtttgacgaattacaggttgttcagtctggcttggtcagagtgtgaggaaaggagaaatgagaccacagataagaaccagactgtgaaggatcttgcacttgatatgaaaagagttttgcctttttcctgagggcatcagaaagtcattaaggtgggtgtggtggcttacgcctgtaatcccagcactttgggaggccaaggccagtggatcacccgaggtgaggagttcaaaaccagcctaatcaacatggcgaaaccctatctctactaaaaatan

SEQ ID NO: 107092 - DNA, 542 bp, Homo sapiens
  misc_feature (1)...(542): n = a,t,c or g
catcttacacccgttcaggatatatggctatatcctatctctataaatctgaatcattacncaggagcgagcacaaanatttgaagccgttcgtaagcccgtccggaccggcaaacccgggncgacccacgcgtccgggcgtcagtctcctaacctcatgatccgcccacctcggcctctgaaagtgcttggattacaggcatgagccaccgcgcctggcctatttctttagttttagagtggcagaaataaatggaaactggcgacttagaatctgacttgggaactcaggaacaatcataaaattaatggccctcaacccactgtagccattaaaaatgtgttgcaccatgaaatactgtcccaacatagtggatgcttttattagtgtaactaatatcaagtaccactacccctatgaaaagagaatttaaatgtaggcttattcaaaattactcctcagacgactatacctattgatatttctacaatttatcatttcccaaattgcctcctaagggaacttagctccatgtggaata

SEQ ID NO: 107093 - DNA, 390 bp, Homo sapiens
gccaattacagtggacatcgtgtttcactcctcaacaacaatgtagtttctggaattgaccccagctctcggaatgagtcctgattactattgaaccaagcatagtaatccaatctctttggctagtgaaaggttcaaaatcaaaacatagcattcctgtgacaagagatttaatccaggttggtcctaatctgagtcaataaggctgagaagaagcacttgtattttgttgctagaaaagagattctacggcctggtgtggtggttcacacctgtaatcccagcactttgggaggccgaggtgggtggatcatttgaggtcaggagtttgagaccagcctgcctctaccaaaaacacaaaaattagccgagtgtggtcgcgggtgcctg

SEQ ID NO: 107094 - DNA, 440 bp, Homo sapiens
tattttcagaagagacagggtttcaccatgttggccaggctggtctcgaactcctgacctcaactgatccacccaccttggcctcccaaagtgctggtattacaggtgtaagccatcgcacccagccaatataggacatattttagttatataagttcattctgctttgtccagtaaagcaatgtaatctatcctaccagtaagtagagactacctacacagtagtgaaagatctagccatttcaagaggtcaagggacaattctgtaaataaattgcatctaagtagttccttactactcacaacatgctctaatagtgtgaagaaattaattcttatcccaaagaatatacttttcctagtaatgataggcttcatataattggaatttaagaatgctttaacaattctaccatactcaggggtaaatgacatgaatt

SEQ ID NO: 107095 - DNA, 411 bp, Homo sapiens
  misc_feature (1)...(411): n = a,t,c or g
caatctgtaaatatcatctagaagcaagtgtattacaggcttagattacatgacatggttgggtacaatgaaagtatttaaatatttaactttcagaatttaagtccatataagcagcagtatgggcagtggttaagggcacaatctcaaccaggtgtagtggctcgtgcctgtagtcccagaactttgggaggccaaggcagcaggaccactttaggctagatgggcggcatagtgagactccgtctctacaagagaaagttaaaaaattaaccaggcatggtggtgcatgtgtacagtcccagctgctggagaggctgaggcgggaggatcacttgggcccgggaggtggaggttgcagtgtgccatgatcattaccaccgggaaggtgctactggcatctcatgggtn

SEQ ID NO: 107096 - DNA, 390 bp, Homo sapiens
  misc_feature (1)...(390): n = a,t,c or g
aattaaaaaaaatttttttttttgaagagatggggtcttactattttgtccatgctggagctttgccatttgtaaacattaaaagggggggtagagaaaggggcagcagggactaaaataaaattttaaaaaaaaaaaaaggggggggccgttttaaagaatccaagtttacgtccccgggcttgcaaggtaatagtttttttatggggcccccaaaattaaattcccgggccggggtttaacaacgtcgggaaggaaaaaacctgggcgtaccccaattaaaaccctttgaagcaaatccccttttcgccagggggcctaataccaaaaaccccctnnacggagncggcacactatggctgccctctgggctcccagaacccacaacat

SEQ ID NO: 107097 - DNA, 486 bp, Homo sapiens
  misc_feature (1)...(486): n = a,t,c or g
natgagatcatagcatgacggaccgcnccggnnnnncgggtcgacccacgcgtccggccagacacacctggcccttcacaagatttttgcttaggacaagtctaagtagaaaaagtgagtccatttaaagaaaaatattaagtaaaaatatatatatacaggaggaatatggatatggcaaataacatgaagccagaacctaagtgactaaaatcgaggaagttctggcctagcacagagtgaacgtataattaatgggagctagagcgaccattagaataataatggccagaaaacagaactgactcgctaggtatgagccagcagtccgaacaagggcctgctgagcacagtggctcacagctgtaatcccagtgctttaggaggctgaggctggaggaccactagaggctagaaatttgagaccagcctgggcaacatagcgagactccatttatacaaaaaatggaaaatatgaggcgggct

SEQ ID NO: 107098 - DNA, 413 bp, Homo sapiens
  misc_feature (1)...(413): n = a,t,c or g
aacttttttcacattgaaatatgtgtatcaaatatttatggaggaaaaattgggaaaaaaattcctgtatatatgactaagaattaatgttcttaaaatacaaagatttcttattaaactaagaaaaaggtaaccaacccaatagaagatgttcaaaggacatgaacaggcagctcacagaaaaaaaaaaaaaagggggggccgttttaaaggatccaagtttacgtccgcgtgcttgcaacgtaatattttttttttagggccccctaaattaaattcccgggccggcgtttaacaacgtggggactggaaaaaccctggggttacccaatttaatcgctttgaagaaaatccccttttcgccagggggcctaatacccaaaagccgnannnnnnnnngntggnggngggag

SEQ ID NO: 107099 - DNA, 532 bp, Homo sapiens
ttttttttttttcctctcttttaaagtctggttcagccccaatcacttggctgatgggggggaacacgggggcacgttggctggtggacatgggcatgcttcagagaaaagtgtctgaaacgaagacaggaatctgagaggcggctgcccaggcagatgacttctgagaacagagggtgtgtgtagcaatcctgctggctggagtggcatccggtggtgtgaagaatcagggggtctcttctggagagttgtgagagggacagagtctgtgctcttctctggcctttttgtttgttgtgtttttgctcaggaaaaagccaaggcaacaggaagagctgaagtctctttgtgcccatagcacagggattggggactccagccctgggctctccctggggacgaaccctcctcctctctgggctgctcagaaaccaaagcaaacttggcaagaaaagagaggggagggaaggagagagaaggtcaggaaggcacggggccagcagagccttccttttcaggacctgctgcaaat

SEQ ID NO: 107100 - DNA, 387 bp, Homo sapiens
aaagtacatattgtatttataaagacaaaaactcctgacctcaggtgatccacctgccttgacctcccaaagtgctgggattataggcatgagccaccgcacccagccagattctgcattttgaaccagctcctcctgggtgctgcaggtaccactgctctgcccatccacacgttgagtagcaggaacccagaggtttgtccctttgcaggtcttctcacctgacatgaccttttgactcaactttgcctcttttcagagtttggattatgatcgctgtatcaatgacccttacctggaagttttggagaccatggataataaggtgggtcttacaattcttcatctctggggatcaaatcagtcttaacatggcattttttttct

SEQ ID NO: 107101 - DNA, 434 bp, Homo sapiens
  misc_feature (1)...(434): n = a,t,c or g
ctttttagtgaaaatttgaattttggaaaacatgatgccactgtaaacttgaaagctttattcttaaataattttctgatgagattggtggttattttaacatctgatgttttaaaagtttcatagtgaaagggtcaacatttggaatgcgtaaatcagtgaacatttccagatgaccagtgcttgatgttacaagatcatgcatgtgtaaaaagatccattcaaagtgcaacattagaataagaaatcttaatgtaacagagtagaaaatgttcactggtaatgtttcagattccacattattattacaataaactggatgggcatgatacctcacacctgcagtcctggcacattgggaggctgaggcaggaggattgcttgagcccacaagtttgagaccagcctgggcaacgtagaccccatctctacan

SEQ ID NO: 107102 - DNA, 423 bp, Homo sapiens
cccacgcgtccgtggctcactgcagtcttgacctcctgggctcaagtgattcacccacctcagccttcctagtagctgggactataggcatgcaccaccatgcctagctaatttttgttttgttttggtttggttttggttttggtttggttttgtagaaatagggtcttactatgtttccaagactgaactggatgcaagcagtcctcccacctgggcctcccaaattgccaaattacaggcatgagccaccatgcgcagtctgaaattatattctttcttgacttctaaacttgtttgctttatgtcctcaaaattcttttttgaatacctactttttgcaagtttttggcaccataaaattatgattctgtatgtttatacagctttcagtgaatgcatttataacagctactgtgcacc

SEQ ID NO: 107103 - DNA, 407 bp, Homo sapiens
  misc_feature (1)...(407): n = a,t,c or g
cccacgcgtncgatttcaccatattggccaggctggtctcatactcctgacctcaggtgatccgcccaccttgggctcccaaactactgggattatatgcgtgagccaacacacccggccaaaaaaaaaatttttaattaaaaaaaaaaagtcatatctgcaaaactcaatttgccatcttaactgaatgccttgattaacaaaaatgttggctgccttgcgtttttaaagaaaaagaaatatgacaaactcatgtgaggaatctattccttaaatatctgttgaggtggatatgaattgattctaagtcatacaccttttctttggccactggaatacattcatgatggtttgagggagggccccttttggtaatacttgatagggactatgaggccgggcgtggg

SEQ ID NO: 107104 - DNA, 424 bp, Homo sapiens
cggacgcgtggggattacaggcgtgagccaccacgcccggataatttgtattatcagtagagacagcgtttcaccatgttggccgggctggtctcaaactcctgacctcaggtgacccacccacccaggggaggtctcctagaacggagtgttccttctcagaagcaaaggcaatggtctcatttgttcagcagatacttttgagtcctccgggaagtgcaagaggtactgcttatgctgggagtcagagagcaaatgcagccccggatgctgacccctcttctgtggcaatggggtgattagaaagctccctgctttgaaaccatgctttatgatcaatacatacctcttcagaaatgcgttttgaggctgctgaacacaatctcaaatatttatacttgttactaccatccaggaaggtact

SEQ ID NO: 107105 - DNA, 422 bp, Homo sapiens
atgtattagccttttgttggactgtgtatgtattttaccatatgggttttaatgataatggtgtatgactgctttacatgagtccttatgcatccagatgttataataaagtggaatggtctctttaaaaaaaaaaagggaaagaaaagagaaaggccttgcccaaaaaaaaaaaaaaaaaaaaccccccaaccttttttttttttttttaaaaaaaaagaaaagaaaaaaaaaaaaaaaaaaaaaaaaagggggggggcccttttaaaaaaaaaaaatttttaggccgggggggggggaaaaaaattttttttttgggggccccaaaaaaaaaattcggggggggggtttaaaaaagggggggaggggaaaaaccggggggacccaaataaaaggggtgggaaaaaaccccctttttgggg

SEQ ID NO: 107106 - DNA, 416 bp, Homo sapiens
  misc_feature (1)...(416): n = a,t,c or g
cccacgcgtccggaaaaacctttaaaaaaattccatgtttcctaatttgcacgaaattttctaccacaagatgtgccttgccttccgagaataagtattacctttaaacaatatcagcgcacacacatagctgcatgttctgctcgtgtagtttaaaaaaaaaaagacaaaacagggacttgaaataaaaaataaaatttgggaaaaaaaaaaaaaaaaacaaaaaaaaaaaaaaaaaaaaaaaaaaaaaaatgacttaagaaaaaaaatgaaaatcttcgaactctataaaaaaaaaaaaaaaaanagggggggggccccttaaaaaaaaaattatttttttcccgggggggggagagattttttttttttatgaggaaccaaaataaatttggcgggcggggtgattcaagcgg

SEQ ID NO: 107107 - DNA, 409 bp, Homo sapiens
ttatcaattaactctaaaggctgtgattctgtgatcgttactgtaagatgactggcgccccaaataaagggtaaaacttaaggtttagaattgtatgcaggagcaaattgcctgccaatatgtaattcccaaaatttgtgtgttcttgtgagtcacctctaaaggtggccagtttgctgcttctatgacaatgaaatttccaggttaaatatagaagagaccaccatgggcaataaaggtaattccagtagaatgtggcaaaggaagggtaaataaaatgtttatcttacagaaagaaagccaccactttgggaggccaagggaggtggatcacctgaagtcaggagtttgagaccagcctatccaacatgtgaaaaccccaactctactaacaatacaaaaattaacg

SEQ ID NO: 107108 - DNA, 567 bp, Homo sapiens
  misc_feature (1)...(567): n = a,t,c or g
actcaacactatcacatactccacatgacacatcgtaataattcgtaccacgcgtaatcaataacccacctagttccccccccnccnccagcgggattgangccaattgtangcctgtcccaancacaaancccggnncgacccacgcgtccgcttgtgtctactaagaatacaaaatctctccatgctggtcttgctgggcttgaactcccaacctcaggtgatccacccacctcggcctaccaaagtgctgggattacaggtgtgaaccaccgcgcccagccacaaggcaattcttaaaagggtgtgattactgcagaatattctggaaggatggatgatttcccagcctttgctcatgttattccctttactggatcttcgcaccaagcccatctgttgctgccatgtatgttttgcaaatggagagacaagagcgatgggtgggattcaatacgtccccaaggcgaggtccacaggcctgagagaccttttttatccgcactggggctgtgcgctgccccacacttttcctcatgtttgccctgtacagaaaacacttccccg

SEQ ID NO: 107109 - DNA, 2004 bp, Homo sapiens
tctgagatgttagttttctaggatatggaaatcttaggattcataaaaaatgaaacaactttttgaaatgttagttttccaaaattggacaatctttttgagccattctatttttaggactattcgttagctgactttagagcctttaatgtttcgttattatttcaaacaatagagaactttactcccccccaaattttgagacagggtctggctctgtcatgcaggaggctgtctgtagtgcagcggcacagtctcagctcactgcaacctccgcctcttgggctcaagtgatccttccacctcagcctcctgagtagctgggactgtaggtgcaggccaccacatctggctaattttaaacaatagagaacttccaaaacaaaagttctttattaattcttcaagaaatctgttttttacttaggtcgattaatgtccatctcatgttgcctcaatagcccatgtatgaatcactcttcttgcagattttgttcagttttgttgtatgtagacccatctttctttgagttggtttctttgattgagttgatttgtctgtattaaaacccagtcagtattaaaacccaaacaatacctaagccaaaaaagcaatgtaggcacctgtaaactcacacacttggttgcaattgcttcagtaaaaaggacagtttacactcaaattgaagcaaccattatgtttccacaaacaacattccttattatcccacctcaccttttcattcttcctatgctgtctaatctgattctgtacaagagataaggcaggtactgctaaatgataacttagatgcaggggccatcatgaaaatattcatcccatatcttacattaagcaaactactagcaactgtttgttgaaaagtataaatgaataaatcaaaataggacagataggcagtgtgggaagctaaaatatggaagtgttattgctttgctttatgtggtataatgatctgattttatcttcccagctctcccaggaagtatgcagaataatatttatctcatattgtgggtgtggcaatcaagacagagaggctagatgctttacctaaagtcatccaacaaatatttggtagaaccagtgctagaatgcaataaatggaaacagagtttatttcggtgtttcttttcctgatacttgccctattcctgacaaatgaataatggcttcagaaggtgtcacttgttgctagggctaaaaggataaattttacctgtaataccgtaccacttactattagttaacgacccagtatttattctctttttttctttggaatctttggaatgtgtaaatatttgcctcccgggaagctcactttatcctctcctcaggaaaaaatccctgatttggtctgaaccaatcttggtaactatctttcttgccagttttgttttaggaatgggcacgcaactcagttctagccaacgagatatgaggagcagtctactggggagtttctgggaaagtttgtttttcttgtcctaataaacaaacaaataatggggtcactggattggagatcctattgagtcaaaggaatattgaatttgacacagtagaatagtctggaaggaaaggaaatgatattcagtaaatgaaatgctgaaaattgatattatgaaggtggcgcagtagttgttattgattaaatgaaacagttgagattaagaaagtttagccagggccaagttatatagcacaaatcatttcaggtaaggaagttaaaaaaaaaccctgagaggctaggaagtcctggctccaaactcctgctcctgctggacttgagccccactagcttctcatcttccactaatctatgcacccctcctttcccactcctcaaaagccgagctcactcaacaactttaattttattcaaataaattatttacacagacattttgtttttagtagatgttattagtgattaggaaaaatgaaagagattgacatctttcaattgacagagatgc

SEQ ID NO: 107110 - DNA, 470 bp, Homo sapiens
  misc_feature (1)...(470): n = a,t,c or g
gcgctcngnnnttctgatnccgaggtcatancaagagcgtggaattctctggattgaaaggaagcacgttggccctgcccatcatgaggtctcagatgatgttcccatcttgattaaagacattaacactgccccaccaccacccccagtacatgaatgaatataaagaaactatacgctttcttttttgaacaatgaagtcttccttcagtgaagctcagcatctgctgtgagtttccagaggacattgtaagcaaagatccaatcccagtggttcttccagttgtgaaaagggaatcatgttctctgtgtgccctacccaatctcttgcccaagtgagagaagacaaatatacaagtgccttgagtttttcagagcacaattaaagccaaggctcagctaggcatggtggctcacgcctgtaatcccagcactttgggaggccgaggagggtggatcacctgaggccc

SEQ ID NO: 107111 - DNA, 531 bp, Homo sapiens
aacatgggatgagtcactgtattgctatattgcccaggctgggctcaatttcttgggctaacgcaatcctcctgccttggtctcctaaagtattgcaattacaggtatgagccactgcacctgcccagataatcaaattttttcatcaagtgttttgtgtttcatgccagctaaaagtaaagcaaattaaacttcagaatggataattctattacacctaaactaaaatctgaaatcttgcttcaaatattcaacagtgtaccaaactgataatattgtatatttttaggatataaaaattcaaagtttgctatcatccaaaattttcaggggtgatgaaaaacctaggtcttctcagatattagtattcaataccgactgcttgtttagactccacaacatttgttgaaaaagtcaaggctcattaataatacaatgaggccaacaagagagcttgtgttctcccattttcattctaccaaaaggtagaatcttaaatgtctttcatatatacatataaactcttcttcc

SEQ ID NO: 107112 - DNA, 493 bp, Homo sapiens
  misc_feature (1)...(493): n = a,t,c or g
gggggggaggcnccnattgcccgcctgcagttttcggcacgagcatagaacagatacagttaaaatatgatataaaagattagaaaataggccaggcatggtggtgtgcacctgtaattccaggtactcaggctgaggtaggaggatcacttgagatcaggagttctaggctgtagtgtgctatgagcacatctatgaataggcactgcgttccagcctgggcaacatagtgaggccccatctcttaaaagggcacacgtgtataggacagctccattataatcttatgggaccactgtaatatgtgtaatccattgttgactggaacatccttatgcagcacatgactgtgtacataacttaaaatttatcatttaaaccatttttaagtgtacaattcggtggtataaagtacatttacattattgtgtaactatcacctctatccatctccctaactttttcatcatcctaaacaagctctgcccattaa

SEQ ID NO: 107113 - DNA, 465 bp, Homo sapiens
  misc_feature (1)...(465): n = a,t,c or g
cttcgatgagcactcggccagngcggnggaattcgtctcctttaggaagccctttgacccaggctgggtcagaagccctctccgggcttccccggcgccctgcgtgtccttattaggactctgattgcatgtgttggctcttctctgggagtcccatgcaggcagaaagctcatttgtgccacctctttccccagcatcgcacacgtattaggtgcccagtacatatttattgaatgacgtgtgcaagtgagtgagtgtttactacacagagaaaagtgtctgtatttccagcttgggctgtcataactaataccacagactgggtggcttaaacagcagaaattgccaggcactgtggctcacacctgtaatccaggcactttgagaggccgaggcaagcggatcacttgaggtcaggagtttgagaccagcctggccaacatagtgaaaccccgtctctactn

SEQ ID NO: 107114 - DNA, 471 bp, Homo sapiens
  misc_feature (1)...(471): n = a,t,c or g
ctcgatcgcgatccctagtccangnggaggaattctctaagttttctgttctccgtttgctatgataggaggaagtcatgtggttagagacataacatgacagtggggatgtgggaagtgaaaagatatgtactaagctaagtccagctaagtgtattatcaattatagatgtaggcaagattcttttgattgccagtaacataaatccactctagtttgctcaaccagaaagagaaccaaagagccatatatgcagctagaccttgtgagtcatgctgggtactatggctgctgttttctctttctgtcctctggctacttgtctttcttttctggtctcatagtatatggtttagcccatgaagacataccagtgttaacagtaaagtcttcggctgggcacagtggcccacacctgtaatcccagcactttgggaggctgaggtgggtggatcacgaggtcaggagtn

SEQ ID NO: 107115 - DNA, 448 bp, Homo sapiens
  misc_feature (1)...(448): n = a,t,c or g
atggagaactcgtagaccactagtccgagtggtggaattcggggtggagagganagagtgaggtacctgctaagctatgtcttttttgttttttttgttttgtaaagatgaggtctccctatgttgcttaggctgttcttgaactcctgagctcaagtgagcctcctgccttggcctcccagagtgttgggattataggtgtgagccactgttcctagtctaagctatgtcttaatttagtcaagaagttcagcaaaaagataagaaactatcatgctttttatttatatataggatgttcactacattgtattgttttcctattcatttatgatagttgatgcactttaaataccttgctgttgtattctatttcagactttggggttagtgcttttttagcaactggtggtgatattacccgaaataaagtgagaaagacctttgt

SEQ ID NO: 107116 - DNA, 495 bp, Homo sapiens
  misc_feature (1)...(495): n = a,t,c or g
ngaggttnnnncccaggagcctgcnatcctctgggaanccnacccagctcctcctgagggggacgttgtgagcattctgctccctctgtctggaatgtgcccctcctgcctcaccacaacctttgcagagttagcttttacttctcctttcactctctactcaaaaatgccgcttcctccaggaaagtctttcctggaattcccacccctaatgcaactccaactccctaggatagatgagaatatgtctgtatttggtctcatagttccttgtacttttcctccagtttatatatacatatgtgtgtgtgtgtgtgtgtgtgtatatacatatgtgtatatatatgactgttggtgtgtacatatatatatacacaaacacacactcacatagtcacatgtcatgtcaatgtctagataagttgtgccttataaccaaaagtgtctaattagacaaaacacccacacaggggtttattcattctctcagtctat

SEQ ID NO: 107117 - DNA, 495 bp, Homo sapiens; identical to SEQ ID NO: 107116
  misc_feature (1)...(495): n = a,t,c or g

SEQ ID NO: 107118 - DNA, 467 bp, Homo sapiens
  misc_feature (1)...(467): n = a,t,c or g
agtagatatcactagaccagcgcggaggaatnctcggcacctgcctccgcctcgccttggggtataggagtcctgtaccgacccctggcttgcccagaggacaggttctcgcccgggccagaagcaaactgcggcgaaatcgagacaacagaactcagagtcactctgtcacccaggctggagtgcagtggcaccatcacagctccctgcagccttgacttacagggctccagagatcctccaccctcagcctcctgagtatctgagaccacaggtgcaagccaccatgcccagttgtagcaaggaaaccaaaaggtataaacattcactgattgaaaaacaatgtcataaagtcatcccagtatctgtgaggagttggttccaggacccctgaggacaccaaaatcctcagatgctcaagtccctgataaaaaaataaaagatgccttgggatatatggacactgg

SEQ ID NO: 107119 - DNA, 465 bp, Homo sapiens
  misc_feature (1)...(465): n = a,t,c or g
ccaagttaggctgatcgtccgaacgnccnnnnggnnnggnnnncccgggtcgacgatttcgtaaactcttgatctcaggtgatccacctgctgatgcctcccaaagtgctgagattacaggctagagccaccgtgcccggcttctgtgtccagattatcatcatcaggaatctttcaggttgaagcaggaaagacaggtgtgcaggcgtcccaacaaggtgggtggtcattgcaaatcctctccccttcagcaattgtttccaaggtggaggtagttaaaacgaatatctagacagcccttgttaaaggctggagtgcggcaggggttgggtggtgggtgacgggggtggtgctgcagcanccaaagggggaataactgcagaggaggaagggtcactgggctgcctgcagcagccctgggctgaggaagttccctgcaaggtgactactatgactccagaagaa

SEQ ID NO: 107120 - DNA, 408 bp, Homo sapiens
agctaattttttgtattttttgtattggggttttgtcatgttggccaggctggtctcaaactcctactctcaagcaatccacccacctcagcctcccaaattgctgggattataggcattagccactgcacccagccagactttatagaaaatcttgatatctggtcatggaagtcccctagcttggttatttttttttggtaccgctttgtctattttcggccctttccatttccatgtaacttttaggatcagcttgtcagttcctaccaaaaaaaaaaaaaaaaaaaaattaaaaaaataaaaaaaaaaaaaggggggggccccctttaaaaaaaaacattattgcccccgggggggggggggaaaaattttttttttttggggccccttttatgaagcggcggg

SEQ ID NO: 107121 - DNA, 760 bp, Homo sapiens
  misc_feature (1)...(760): n = a,t,c or g
agagtgaagtgaatgcaagatacaaagtgggatggaagaattaaatccagagttccaggcaatcaaaatgagtgcaggttgaaagaaaacaggtgaattttagtggcatatggatgataaagctgtaaataaaattcttttgatgaaactctccggttatgagacaaagactgtaactgaacaggagctggtgtgactgttaccagacagaggcaactgatgaaaaagccctgtgaaagataggatgtgaggtgagcatgagcttgagctgagagacagacacaacagtatctgaaaagaatacatactctttccatgcatatatggaacatggatggaaactgaccacctactttgtccagaaaagaagtcttaagatatttcaaggaatcagtgtcgttatctgaccgtatcccaatgtcattaaaaaaaannnnnnnnnnnnnnnnnnnnnnnnnnnnnnnnnnnnnnnnnnnnnnnnnnnnnnnnnnnnnnnnnnnnnttcatatttggaatttttaaaacacacttataaattacctatgagttaaagaattccgaatggctattagaaatatttgggactaaaggataatgaaaatgctacgtattaaaatttgtggaacagggcctggcatggtggctcatgctgtcaatcccagctctttgggagacgggtggatcacttgagatcaggagttcaaggccagcctggccaacatgataaaaccccatctctattaaaaataaaaaattagct

SEQ ID NO: 107122 - DNA, 446 bp, Homo sapiens
  misc_feature (1)...(446): n = a,t,c or g
nttggagacctctagcncgtgcggnggaattcggatcaccccaganagcgacacctnccnntttctagactagcatgtgggtattccaagcaggcttacctcagtgtctcaccccaggcactgcaaacaccccaggacagaaagtgaacatgtgtattgtgcaattgaagcaagacactatcagtgcaaagtgagtagaccctcagatgctgctgggtcagagggaaggcccagggatatgacacaggacacagaggtggcagatacaccacctcccaacatttcctctatcacagcaactagaacaatggcaacaataggggtgggtgtggtggctcacgcctataatcccaataccctgggaggccaaggcagaaggattgcttgagcccaggagttcaagactagcctgggcaacttggcgaaaccctgtctctacaaacatc

SEQ ID NO: 107123 - DNA, 3461 bp, Homo sapiens
cccacgcgtccgaaacgattaaatgagggaacatatgcagaggtgcttttaaaaagcatatgccaccttttttattaattattatataaaatgaagcatttaattatagtaataatttgaagtagtttgaagtaccacactgaggtgaggacttaaaaatgataagacgagttccctattttataagaaaaataagccaaaattaaatattcttttggatataaatttcaacagtgagatagctgcctagtggaaatgaataatatcccagccactagtgtacagggtgttttgtggcacaggattatgtaatatggaactgctcaagcaaataactagtcatcacaacagcagttctttgtaataactgaaaaagaatattgtttctcggagaaggatgtcaaaagatcggcccagctcagggagcagtttgccctactagctcctcggacagctgtaaagaagagtctctggctctttagaatactgatcccattgaagataccacgctgcatgtgtccttagtagtcatgtctccttaggctcctcttggacattctgagcatgtgagacctgaggactgcaaacagctataagaggctccaaattaatcatatctttccctttgagaatctggccaagctccagctaatctacttggatgggttgccagctatctggagaaaaagatcttcctcagaagaataggcttgttgttttacagtgttagtgatccattccctttgacgatccctaggtggagatggggcatgaggatcctccaggggaaaagctcactaccactgggcaacaaccctaggtcaggaggttctgtcaagatactttcctgggcccagataggaagataaagtctcaaaaacaaccaccacacgtcaagctcttcattgttcctatctgccaaatcattatacttcctacaagcagtgcagagagctgagtcttcagcaggtccaagaaatttgaacacactgaaggaagtcagccttcccacctgaagatcaacatgcctggcactctagcacttgaggatagctgaatgaatgtgtatttctttggtctctttctttcttggctttgctctttgttctctatttaaagtgtgtcttacccatttccatgtttctcttgctaatttctttcgtgtgtgcctttgcctcattttctctttttgttcacaagagtggtctgtgtcttgtcttaagacatatctctcatttttcattttgttgctatttctctttgctctcctaagatgtggctcttctttcacgctttatctcatgtctcctttttgggtcacatgctgtgtgctttttgtccttttcttgttctgtctacctctcctttctctgcctacctctcttttctctttgtgaactgtgattatttgttaccccttccccttctcgttcgttttaaatttcaccttttttctgagtctggcctcctttctgctgtttctactttttatctcacatttctcatttctgcatttcctttctgcctctcttgggctattctctctctcctcccctgcgtgcctcagcatctcttgctgtttgtgattttctatttcagtattaatctctgttggcttgtatttgttctctgcttcttccctttctactcacctttgagtatttcagcctcttcatgaatctatctccctctctttgatttcatgtaatctctccttaaatatttctttgcatatgtgggcaagtgtacgtgtgtgtgtgtcatgtgtggcagaggggcttcctaacccctgcctgataggtgcagaacgtcggctatcagagcaagcattgtggagcggttccttatgccaggctgccatgtgagatgatccaagaccaaaacaaggccctagactgcagtaaaacccagaactcaagtagggcagaaggtggaaggctcatatggatagaaggcccaaagtataagacagatggtttgagacttgagacccgaggactaagatggaaagcccatgttccaagatagatagaagcctcaggcctgaaaccaacaaaagcctcaagagccaagaaaacagagggtggcctgaattggaccgaaggcctgagttggatggaagtctcaaggcttgagttagaagtcttaagacctgggacaggacacatggaaggcctaagaactgagacttgtgacacaaggccaacgacctaagattagcccagggttgtagctggaagacctacaacccaaggatggaaggcccctgtcacaaagcctacctagatggatagaggacccaagcgaaaaaggtatctcaagactaacggccggaatctggaggcccatgacccagaacccaggaaggatagaagcttgaagacctggggaaatcccaagatgagaaccctaaaccctacctcttttctattgtttacacttcttactcttagatatttccagttctcctgtttatctttaagcctgattcttttgagatgtactttttgatgttgccggttacctttagattgacagtattatgcctgggccagtcttgagccagctttaaatcacagcttttacctatttgttaggctatagtgttttgtaaacttctgtttctattcacatcttctccacttgagagagacaccaaaatccagtcagtatctaatctggcttttgttaacttccctcaggagcagacattcatataggtgatactgtatttcagtcctttcttttgaccccagaagccctagactgagaagataaaatggtcaggttgttggggaaaaaaaagtgccaggctctctagagaaaaatgtgaagagatgctccaggccaatgagaagaattagacaagaaatacacagatgtgccagacttctgagaagcacctgccagcaacagcttccttctttgagcttagtccatccctcatgaaaaatgactgaccactgctgggcagcaggagggatgatgaccaactaattcccaaaccccagtctcattggtaccagccttggggaaccacctacacttgagccacaattggttttgaagtgcatttacaagtttctggcatcactaccactactgattaaacaagaataagagaacattttatcatcatctgctttattcacataaatgaagttgtgatgaataaatctgcttttatgcagacacaaggaattaagtggcttcgtcattgtccttctacctcaaagataatttattccaaaagctaagataaatggaagactcttgaacttgtgaactgatgtgaaatgcagaatctcttttgagtctttgctgtttggaagattgaaaaatattgttcagcatgggtgaccaccagaaagtaatcttaagccatctagatgtcacaattgaaacaaactggggagttggttgctattgtaaaataaaatatactgttttgaaaactttga

SEQ ID NO: 107124 - DNA, 1476 bp, Homo sapiens
tttttttttttttgagtttaaattttattttacaaaaagagaaataaagaaaactgataggcagttatactgacttacaattgttctgtttgcttttttttaaaaaagtgacatgaaacacaagtaaaaataaatacgtcatagaaacagccagttgcccagtctctggggcaggagcgcctgccctgctgagaggagggaagcccatgatcacaccagcagctggatcacccagccacagatgctcctcgaagccaggcacaggtcccaggcctcaggggcgtcctgaggaaagaagacggaaaaccaaagccaggtgccaggaccctggggccacctcattatcccccactcctcctggcagcagtctggtcttagtggttatccatagcgaccccccttaacccacctggaccctcttcccctgacctctctgaagatggtacaagggaaaaacctgtcttgggcaggctgggggggattcttctggtgagtccccagcccaccctgagtaacacaaccagataacagtcattttacacccaggtgcacatgagcacagcacacaaacacacacacacacactcaaggcattcacacacacacaggttgggctgagctctcttccagggagggtcctgggtccagtcacagtatgaggtcctctctcttctgaatatcatcccagtagtggcagcagagagtacccaaacctccccaagccctctgcattgcagacactgcagcctgcttggctacccctccccaacacactagattactatgtcaaatagacctgcaaaagggaaaggtgcacactcaggtccctgaagagcaaagaagttggacactgcctgctcaagaagttcattgttataagactcaggtattcataaaaggcctagggctaagctagtagcacagaaaagccgttaaggggatcacagcagaatacacagggcagaagagaagagttggcagcaggggaacggagtctcaaggtgaccaatagagagcacaacattctcaaatagtccttgaggtgctgattcctgggagtagtcagcagagggccagaacatctcccaggggtccttttggggaaggatgacttcacttagttttaggggtgaagagccactgagctgggtgcacagaaggccatggctcagaagggaaagactgatctgagaaatcaaaaggaagtgggggccaggagcaagttgtcacgcctgtaatcccatcactgggaggccgaggagggtggatcacttgaggtcaggagttcaaggccagcctggccaacgtggtgaaaccccgtctctactaaaaaatatacaaattagctgggcatggtggtgtgcacctgtaatcccagctacttgggaggctgaggcaggaggatcgcttgaaaccgggagtggaggttgcacggagccaagatcacaccattgcactcaagcctgggtgacagag

SEQ ID NO: 107125 - DNA, 486 bp, Homo sapiens
  misc_feature (1)...(486): n = a,t,c or g
cgaggaaaattcgcccgcctgcggaatttggcacgagctttttaccatctttaaagagcagagtcttgctctcttgccgaggatggagttcagtgaggcaatctcagctcattgcaacctcctccccccaagtagctgggattacaggctcctgccaccacggccaggaagattcacttccagagccttgagacaacatgtaaaaagttcaactaccctgagactgcagtgatggagatgtcatgtggagagaccacatggaaagtccctgaagctacaggaggagagcgagagagagagagaaagagatcgatcccccaagagacttcaatcatttgagtcatcccagcccaggaaccagacatgtgaatgaagaagctaccagataatcccagccaccagataccagctcccagccactggaggcactcccccactcttcaagtctccccaccttaagccctagatgtcatggatcagagacan

SEQ ID NO: 107126 - DNA, 505 bp, Homo sapiens
  misc_feature (1)...(505): n = a,t,c or g
nattgatcgcctgtggaattccgccttggcgagccgaccaaaggaacgtcatcgtttggaaagcggcgcaataagacgcacacgttgtgccgccgctgtggctctaaggcctaccaccttcagaagtcgacctgtggcaaatgaggctaccctgccaagcgcaagagaaagtataactggagtgccaaggctaaaagacgaaataccaccggaactggtcgaatgaggcacctaaaaattgtataccgcacattcaagcatggattccgtgaaggaacaacacctaaacccaagagggcagctgttgcagcatccagttcatcttaagaatgtcaacgattagtcatgcaataaatgttctggttgtaaaaaataaaaaaaaaaaaccagcctgaggctgtgggccgcctccgcgccacctttgctggcctttactcactggatgngggngaaaaaggggaccaggccatcgccgaggcccttgctgcccctaagccgtttgtgt

SEQ ID NO: 107127 - DNA, 408 bp, Homo sapiens
ggtctagagccacttttctacccacatctgacttgaagtctctgcagtatttagcaatattgattattcctcctagtaaaacattttttttaagtttcacgttccagatgacatcttgagcacaaagatctagctcatatctttccaaagttctcatagacccatcagaaatttcacaaaaacaagccaggcattgtagcatgcacttctagtctcagctacttaaaaggctgggacaggaggattgcttgaacctagaagtttgaggctgcagtgtgctatcattgcaccactttgagcctgggttatgtagtgataccctatctctaaaagaaagaaagaaagaaaacagacagtatgacatcattacaatgataataaacataaacaaatgccagcaatggatca

SEQ ID NO: 107128 - DNA, 419 bp, Homo sapiens
tccaggcctctgtccttccccaaaagcaactaatgagctggcaaaaactgtcagaatcaactttcgtaaaattctggaatcttgtcaaaactggaagacttggtgaagaaataagctgctgcttagtggtgagagagtactatagcatttcagactgcctggctaccattaagttgcctgcctcccacctgtccatgaggaagcccaggcacaaagactttaagtcaactttcttaataagcacaaagaaccaaggaaaccatggacatggaactaaaggaaatgaagtcaacaattttcaacagagaatatcagtatagaaaacttattttaaaaagtataatatgaggccgggtgcggtggctcacacctgtaatcccagcactttgggaggctgagactggtggatcacctgaggg

SEQ ID NO: 107129 - DNA, 480 bp, Homo sapiens
  misc_feature (1)...(480): n = a,t,c or g
agggggtaaaatgagtacatngcatgcggcaccggnccggaantcccgggtcgagccacgcgtccggtgctgtctgcgtgccttttccagaagccttccatttagcttcacacactcgcaggtggatattgggggtgggcctcagtttcaccttcttgcttacataaaggatcgagaaggtgaagaaagtgcagaacgccacatggcacccgtttcccactgcatgacgtggtcactgttagtttatccttccagaaatgtttctgatatagaagattaatttctaaaaagttctttaaacacagatggaaatctgtttcattctttaaattttcatttttttggctgggggaagtagctcacgcctgtaatcccagcactttgggaggccaaggtgggaagattgcttaagcccaggagttcttgaccagcctgggcaacatagtgggaccctgtctctataaaaaataaataaaataa

SEQ ID NO: 107130 - DNA, 437 bp, Homo sapiens
accctatagagcggccgcgcgccgaggccggaagtgctgcgggtggtttccatcatgaggagctgctggttttccatagcagctccaccatctaaggttcccaccaccaacacgaggttgcggtttctccacatcctcaacaacctgttactatgtcttttttgttctggccatgctgctgaacgagtggcttgctgtgggctcttctcagttccctgttgaccgacgctgagcgtcttttcatgtgcttggccatttgtgtatcatcttctctggggaaatgtctattcaaatcctttctccatagtttagttgggcttttgagataggatctcaggctgaagtacagtggcatgaccttcactcactgtagcctctgcctcccaggttcaagcgattctcccacctcagcctcccgagtagctgggactacaggg

SEQ ID NO: 107131 - DNA, 400 bp, Homo sapiens
cagtgagccaagacggcaccactgttcttcagccaggcgaccgagcaggactctgtcggagaaaaaaaaaaaaatttttgggggagggtgggtccggtgcctcatttttggaatcccaccgttttgaaaggcaaaggaccgaggatcactttatttcaggagtgctaaaccaccctgggaaacatggggagaccctgtctctaccaaaaattaaattttttgggcatgatggcccatgcctgtagccccggctacttgggaggctggggggggaggatcacttgaggttttaatcatggaagtctcttgccctggaggtcgaggctgcaatgacccgggatcgtgccactgccctctagcctgggcaacaaagcaagacactgtctcaaattaaaaaaag

SEQ ID NO: 107132 - DNA, 478 bp, Homo sapiens
  misc_feature (1)...(478): n = a,t,c or g
gggcctgcagtgctccgcgcgctcttgacgtccggagcccctggagtaggcgcttccggccattcatactgcagtcggtcagtgttcggttgaaggattctgtgtgctgtcggacccagagggtgacggcgccgctaggatgaagctcgtgagatttttgatgaaattgagtcatgaaactgtaaccattgaattgaagaacggaacacaggtccatggaacaatcacaggtgtagatgtcagcatgaatacacatcttaaagctgtgaaaatgaccctgaagaacagagaacctgtacagctggaaacgctgagtattctaggaaataacattcggtattttattctaccagacagtttacctctggatacactacttgncgatgctgaacctaatgtgaaatctatgaacagggaagctgttgcaggatgacgctgaggataagctaggaaatgacctgctctgggactgacaccc

SEQ ID NO: 107133 - DNA, 376 bp, Homo sapiens
cctccgcctgcctaattcaagtgattctcatgcctcagcatcctgagtagcctttcaggggttacaggtgcctgccaccaacccagctaactttttttttttttggaaagggggttttttttttgttccccaggggggaaggcaaggggaaaaaattggtttaagggacccctggcccccgggagtaaggaaaatccccggccctaccctttcagggacccgggaaaagggggccccccccccacccccaatttatttttaatttttttggaaaaaggggggtcaaaaaggggggccgggggggttttgaacttgggacccaaagggacccccctcccccacccccccaaaggggggggattaaagggagggaccc

SEQ ID NO: 107134 - DNA, 394 bp, Homo sapiens
ttgcagtgagccgaaattgtgccactgcactccagtctaggtgacagagcgagactatcttaaaaaaaaaaaaaaaaaaaaagggtttttttttaaaataaaaaaaaaaaaggccccccccctttttttaaaaaaaaagggttggaaaaaaaaaaaaaaaaggggcccgggcgggggggcccccccctaaacccccaccatttggggggccaagggggggggggccacggggccagaattcaaaaaccccccggcccaaagggggaaaccccccttttaaaaaaaaaaaaaaaaaaagaaatatttttccggccggcccaatgggacttaaaggggggggccatttataaatttggctcccaaggaagaccctcgccctggcttaaaaaaaaaa

SEQ ID NO: 107135 - DNA, 416 bp, Homo sapiens
tacaggcgtgtgccatcacgcccagctagtttttcgtgtttttagtagagacggggtttcaccgtgttgcccaggctggtcttgaactcctgagctcagacaatccacccaccttgtaatatttttcacacttaacacgagacactttaaattctaagtccattactttatctttgcacctccatctactgaagatatttttatgtaattttaatattaggatgagataggtttatttattttatcctacttcatcccacgaaaattgaaaggtagcttttcaacagttaataccactttgctggcatccatcacaactctgaagtgacctggagactcggtctgattcagaggtggagaaaaatgccatggccttcaagataggaaggctcaatggaaatttcacagaaagcaaa

SEQ ID NO: 107136 - DNA, 432 bp, Homo sapiens
tttcgtttgggataacaggtgtgagccactgcccctggcctaaaatctctcttgagtgatgatagagccatagggagatgccccaactcttggagagaaaataacatctattcaaagacgtgggggttgtggggcaggggggttagtcttctcctcatctccaagtttttctttctaaaaaaaatttttttttatagatggggtcttgccatgttgcccaggctggtctcaaactcttgggctcaagcaatcctcctgccttagcctctcaaagtcctaggattacagtcatgagccactgtgcctgttttttttgttttgttttttgagacagagtccctgtctgtcacccagggtgactgagtgcagtcacaatcttggctcactgcagccgcaacctgttgggctcaaatgatcctcacacctcagcct

SEQ ID NO: 107137 - DNA, 418 bp, Homo sapiens
  misc_feature (1)...(418): n = a,t,c or g
atgtttctgagcttcttaaagcaccactctgatggctcggtaagaacggactagagagatcagtcaggaagctgtcgctatagcctatgcgagaggcagtggtgggcccaagtagagtggttgccacagaggtggtggaagtggtcagtgcctgcctgaattttgaaggtaagtccaagaggctgtgctaacagattgggtatgggatgtcagtgaaggaaaaggagtgtgccgggtgtggtggtgcatgcccgtggttgcagtcacttgggaggctgaggcaggaagattgagcccaggaatttgagtccagttttgggcaacatagtgagaccctgtttaaaaaaaaaaaaaaaaaaaaaaaaaannnnnnannnnnnnnnnnnnggggnnnnnnnnaactactctctccttccct

SEQ ID NO: 107138 - DNA, 737 bp, Homo sapiens
ggtggagatggggtttcaccacgttggccaggctggtctcaaactcccgatctcgggtggtccgcctgcctcggcctcccaaagtgttgggattataggggtgagccactgtgcctggcccaaaagaaggtattttcaagagccattatggtggcatatcatttatgaacagtggatgtgcaggatatatctgtactttgtctggaagctggagtcattggaccattcatgctgtatagaaagaactaagaacactggcttgggagtcaggatacccaagattcctgtcataaccgtggtgtgtgaccttgaccaagcctcatttgtatctcctgtgaaatgaaagggttattagacctttaatatctaaggttctttctggctacaaaagtctttttctacaaagtcttgtgttatggtttgaatgtgtccctcaaagttcatatgttgacctccaatgcagcagtattgggagctttaagaagtgtttaagtcacaagggctccaccctcacgaatgaattaatgccattatcttgggagtgggtttgttatcttggggctgggctccttgtaaaaggctgggtttggccacctcttgcactgtctctctctttacccttctgccatgggatgacatggcatgaaggccctcgccagatactggcacccagatcttgtacttcctagactctagagctgcgataaaataaatttatcttctttgcaaaaaaaaaa

SEQ ID NO: 107139 - DNA, 381 bp, Homo sapiens
tttgtacttttagtagagacagggtttcaccgtgttggccaggctggttttgaactcctggcctcaagcgatccacccgcctcggcctcccaaagtggttttggggattatttgattaatgccggccttgcccattggaatggagggtccctgcagacagggaccactttgctggccttttctcatagagaagactgtttccttaccactgtatccttagtgtcacacataataggtgctcattatatatgtgttaaataagggactccattttagtggcacctcctcacctgtctaataccacacactatctgagagtttacgttcctccagaagcctttgtgcctcccacccttgcttgagctgacaatggctttgccc

SEQ ID NO: 107140 - DNA, 391 bp, Homo sapiens
gaagaactgagtactccactttctggctacaactacctacaaacacttacaaaaatggcaaaatgttactaaaggtaatttaaagttgcagtagaacatttcaaatgaaaaatgctacactttagaagtacatttaaaaatgaggactctctaattaggcttattcagggatgcctattggtgtgcagaagcttctgaaaagatttcagtatttttattgcctgttttaaaagaccctttataacaggtagccagggccaggaacagtggcttatatttccacatgcctataatcccagcattttgggaggccgaggcaggcagatcacttgaggtcaggagtttttaacaccagccaggctgggcaacatggtgaaaccctgtctctact

SEQ ID NO: 107141 - DNA, 407 bp, Homo sapiens
ccaccagtctttggagactgtccagtaataaacttgattctaaactggtttggtttggaaaatccttaggctacttgtgttaaaaattaaagaactagctgggcatggtggtgtgtacctgtagttccagctacgcacgaggctgcggcaggaggattgcttgagcccaggagttcgaggctgcagtgttctgtgattgcgtctgtggagcgccaccgcacttcagtctggacaacataatgaaacctcatctcttataaatgaactggctgatgttaggtacttgccagggtagacgaccttaactaagcccctggggttctgtgagacctctgcaaatagatcttctgcttaactgttcaaaaaggcaagggctgtccccctcaaaaaacaacattgacttctag

SEQ ID NO: 107142 - DNA, 416 bp, Homo sapiens
actatgttgcttaggctagtctcaaactcctgggtgcaaatgatcctcctgcttcagcctcccagagtgctggaattacaggcatgagccactgtgcctggccctaacaattttttgaagagagcatttcattcactgttaaatttatttcttccctaaatctctatagaaaatgtgccactctatttctagcatgttagtaaacttggcgaggtttattctagactgcatcacggtggtggctttcttccatttggacattcagattggtcactgtctagttataagactctttccaccattggaaggataccataaattaaagtgaccttgctcagtagcaatccctttgactttgaagaaggctataccatataagtaatacactctggtagtcaatttgacacttgattttg

SEQ ID NO: 107143 - DNA, 503 bp, Homo sapiens
atttttttgtatcaaatttttccagaaatcaacccatcctgtcacttttcatttctttttgctcagaattttaccaagagatttttactatttcaaaacatcatgttactttgattctgccaaaacaacacacctgaatcagtccacactactaagtgcagctctaggcagaagtacacatgttcaagtacttcatacatgtagttgcttccaagcatttgaatactgaaatgcatattatgttattacaaattgttttcctttaatttccctttatattacaactatgaaataatactgtgggggttttcgtttgagacagagtctcacttctgtcacccagggctgggagtccaaatgggtgcaatcttgggcttcattggcaacctctgcctccccagctcaagccatcctcctacctcaggaggcggagcttgcagtgagccgagactgcaccactgcaatccaccctgggtgacaaagtgagactccatctaatattt

SEQ ID NO: 107144 - DNA, 719 bp, Homo sapiens
gacaaattcttaaaactggacacaagaacacaaaacgcttgggctgctgagagattagaccaacaaccctccacagctacacaccttttccacgttatatggcacgttataagtgggtgttcctagtgatggttctgattttttttaaaaaaagtctaaatatgtttaatgttgtctcagaagacaaaatatattttagacagatattcctcagtgatgagtaagcctcagctatctggaaaattcatgcaggcgccagagatcgttactgagtaattcaagctaactgcgtcatgctggttgtaccctgcatgccaatatcagctaaaagcagcaccacgaaagggaaatacgaatctcactaagcactcgcccattcttgttaacgacactggaactgatcatccttaataatacacagataaatctatcaggagcatttccttgcttcctgtgaaaggaagcactcattccatgtgtcctgtgaaattcatccaacttcaggaagctggaggaatacatatggccaagctatctgggcagagagtagacagggaatggaggttgggcacagtggctcacacctgtaatcgcagccatttagaaggcaaaggcgggcagatcacttgagctcaggtgttcaagaccagcctgggcaacatggctaagtcctgtctctgcaaaaaataccaaaaactgagctggatatggcagcacac

SEQ ID NO: 107145 - DNA, 524 bp, Homo sapiens
  misc_feature (1)...(524): n = a,t,c or g
gttgtactgtattaattattaaaggtttatgtaagttttgatatctggaaatcttaactctcccacttaactcttcttcagaatttccttgactatttttggtctttgtatgtccctatgaagtttaggatgaacttaccaaattataggaccaactctttagagattttgactagaagtgatatgtgcatccttctttttctttttctttttcctttcttgagacaaggtctcactctgtcacccgggctgggagtgtgggtgggtgcaatcacagctcaccacagcctccatctcccagggttaaactatcctcctncctcagtcccctgagtaggctggggaccatggggcagggcaccaccatgcncgggntaattttttttttttttgtaggaaatggggntcttcaccangtttgncccagantgggntttgaacccccggggggttaaagtgatcntgccccattccgaactncccaagngctgaggnttacataaggcttaaggcattttgcncgg

SEQ ID NO: 107146 - DNA, 1325 bp, Homo sapiens
tcccagctggtaacaggttcttctgggctgggcagtaccctgaatttacaaggcgccttcctagtttctcaccctcagcccacggcccagccccaggtctgcctatttggcagtccgggacataggcccaaaaatggccagagacacagtgaatctctggcctcaggcaagagatccatctgagaacgcgtccccagcctgctccagactcacgccgagaaggtcctcgtccggcgagtgggcagtgggcttgggaccacgttgccgcgcagaggggatggtgagcgctcacggctccaaggggtgtccagcagcccgactgaagcttgatgggtggggggctgtggtggtgggggaggctcagatgacatggctgacctggaaagagaagaggctgtcaggggctcgtgccttgcaaggtagggaccctgtgcttacccccatgtccacgtctgacagtccagtatctgaggctcattcctctcgggcacctcagcaccattgtcaccttgtctgggagcacgcctggcagggtcagatgcctactctgggctcctgaagcaaccgtggggccccctcgatcatagctcttcatgaaaatgccacatcctcccccatgaccaggatggcatcggtcccctctgtgtccccagcacaaggcatggatcccggcacatttgggacacatagtatttgtgggagggaaggaggaaggtgagcagaaaacccaaagccaggggccgggcgcagtggctcacacctgcaatcccagcactctgggaggcccaggctggtctcgaactcctggcctcaagagattcacctgccttggcctcctaaattgatgggattacaggcgtgagccagcgtgcccggtcagaatatactccattttcttgatccattcttctgtcagtagacacatgagttgtttccgtatcttggccattatgaataatgcttcagtgaacacgggggtacagatacctctttgagatcctgacttcgtccttttggccatctacccatggattaaagacttaaacacaggacctgaaactgtaaaactcctagaaaaaaaacatagggaaaaagcaatgatattttagatgtgacaccaaaagcacaggcaacaaaagcaaaacaaacaagttggacaacgtcaaactaaaaagtgtctgcacagcaagggaaataatcagaatgaaaaagcaacctacagaggggaagagaatatttgcaaaccatatatctgataaaagggctagtatccaaaatgtataagaaactccaacaactcaatggcaaaaaaaaaaaaagtcgac

SEQ ID NO: 107147 - DNA, 661 bp, Homo sapiens
gagacggactcgcttttgtcgcccaggctggagtgcagtgtctcagtctcaactcactgcaacctccgccacccaggttcaggcaattctagtgcctcaacctcccaagtagctgggattacaggcatgagccaccgtgcccggcttctccaaaataatttctatgtcaaaaaggcatattttggagtgatacgttctggttttcttcacacattttaaggctatttacatattgccaaattgcatttattagtaggttagttgctgatacgtaacatctctgaagcagagctgcctgtttattatatatatgaaactgaaacaagacgcagtaaggtaattgtaaagagacttgttatacattatgatttttattactttgtgtactgggtgtcccatcaaattccacagatataacagcttagagaagtgggagctagtgcagtgcctagcctaaagtagaaattttgtgggaacctagtccatttgggtgatatatatgccttcaagacaagaaagcaatagaaatgtgcattgttaggacaatgggtggtggttccctcctgtccagacttctttacttctccagtagcattcattaatctacaatgtacagctcaaatatttgcctcaacaggtaaagctaaaacctgttttccta

SEQ ID NO: 107148 - DNA, 457 bp, Homo sapiens
gaacagaagaaaactaggaagaaaaccaagctgggaagggcaatgaaggaacaggttagagttcaaaagtaaaagtacgttccacacaaaggaaagatttcagagagaaggctttgctctgttgcccaggctggagtgcagtggtgtgatcatggctcacgcagccttgaagttctgggctcgaatgatcttcttgcctcagcctcttgagtagctggaattacaggttgctggggcagctctgatccacatacgacttagggacccaggatgcagctgcttcaacatcttgtagccgtactatctggaatacatgggctgccagttgtcatgactactctcctatgttcagcccaaaagctaagcactttatttctttcatattagccctttggccagaattattcatatgtctcacttacaggatgggccggggagtgtaccttcatgttaggga

SEQ ID NO: 107149 - DNA, 380 bp, Homo sapiens
ctcgcgcctgtcattctagcactttgggaggctggtctcgaactcctgatctcaggttatccacccgcctcggcctctccaagtgctgggattacaagtgtgagacaccgcaccccgccctaatctcagcctttttatatcttcttggtaggcccactttttggcatcccctaacaagaagtcctcagagatttttactactcaacatgtgtgcgtcccactcagatgtattgtgttctttctgttcaccctctacttcccattccatttcttcctctgacttagggttagaatggcccaatgatcctacaactttttgatgctatttcatttgattcctctactggctaaatcacaagttggctaactttacttactgt

SEQ ID NO: 107150 - DNA, 981 bp, Homo sapiens
gaggatatgaagagatcaaagaagaaatacaaatggccaacatgtagatactgttcggtccacttgtgattaaggaaatgcaagatcagaatatcttctatttaatttggaattattaaagtttatattagttttgaaatgtttagttttgaaaatataggagaaagctttctcctgtacctttgtacaaagaaataagagtggaacgtgtgtatgtggtttgcgtgggttgggaaatctacctactacatgattgatggccttgctcccaggaagtagtgatgtggatctgagtgagtatgggtgggagcattttaattttgtaattctaatttcaaaagagatttttattttattatttttttgagacggagtctcacatctgttgcccaggctggagtgcagtggcatgatctcggcttactgccacctctgcctccagggttcaagtgatagaagagattttttgaaaaaacagtgaactaattgtttactaggccccattttaattcagtcagtgttaagagttcaagcatcaagacaatctagtttatgttcaatgtaaattttctagttgctagaaatatttggatataatacagtcctttgctagaactgacattttaaatggtgggaaaaactgtccagccctttaagagatgccctcttttcaaagtttcccgtgatactaaagttccccagctggtaacaaatgtatctgcttccttgagtttcaatgtcccaggcctctttaaagtaatcaggtatgcaaagacaggattatgcaagtttcttttagttggaccacctttattgatgaatttcttaggtttctgtggtagtgttgttagattaaatacagtcattccctcttgtctagtttcgttttatgtgatttcgctcttatggtttcacttaccccatggttcgaaagtattaaatgaaataaaccattcctgagttttaaattgaaaaaaaaaa

SEQ ID NO: 107151 - DNA, 369 bp, Homo sapiens
gtttttaatgcctttagatgaacacaaattctcagttttaaggtagtcatgtttactaatgtttccttacagttaataggtttgtatcttgtttttgaaatccctccgtacagtgatgtcataatatcaggaacatagtttcaaacttttgtagttttattttttatagttaaacttttttttccccctccatgtttgtagagccaggaccttattatattgcccaggctggagtgcggtggctattcacaggtgctatcatagtgcactgcagcctcaaactcctggccttaagtgattctcctacctcagcctcctgagtaactgcgactacagggatgccacctcaccttgcttttacagttaaaa

SEQ ID NO: 107152 - DNA, 371 bp, Homo sapiens
gaatatttgtgagtaaccccagatggtggcgatcatttaatgccctccatccctctcagggtatattaggttatgttttttttttagaatatggaggaagggttttactatgttgcctaggccagtctcaaactcttaggctcaagcgattcacctgcattggcctcctaaattgctgggattacaggcatgagccactgtgcctggcccaagaagtctgagccagacgttgctgcataggtcagaactctgtgggctatgaatgtaggatattcacgagtcacatctattccattcattggccaacacttacctgaaaccatacagcacaggagattctggagaatgcaccttccagccttagaaaaaag

SEQ ID NO: 107153 - DNA, 486 bp, Homo sapiens
ggaggaaggtgaggcaggcgggcccaattcattcgcctccggtacttgcaagcctcgctcagtcttaagcaagaggggatggattcgcccgcagcactgagaatccaggggcaggcgggatggcgttcaggcgctgttgctagaaatctctgtctttactctgttttgaaggcagcatggcagggtgaacacaagcacagactgaaggcagcttgccgcggttcacatcctggtcacaccacttcctgaccatgtcacgtgggcaaattatgtaacttctctgagcttgctttcctcctctgaaaatggggttaacaatgataatacccacttcataggattgttgttaagagactataaatgaggctgggtgtgatggctcacacctgtaatcccagcactttgggaggccaaggtaggaaggattgctagaggccaagagttggagaacagcctgggcagcaaagcaagaccccgttttgtaca

SEQ ID NO: 107154 - DNA, 400 bp, Homo sapiens
  misc_feature (1)...(400): n = a,t,c or g
aatacagccttgggagtgtcttctgcagggagcgtacaccttctctcatcacaagcattcaataccctgcatctgtctgtcacctcattccccaaacaggtgtggggggaggggcgtcacccaggtcacctcggccctctggatgcgtgacttgataatccaaccttgttcgcaaaacagaattatagttccaggtgagctcagcaattgaagcagggtcagaggatgctttccatttaatttgccaaaaagcagttgtatttaagaatgtggccagggtgcggtggctcatgcctgtaatcccagcaccttgggaggtagaggtgggcagattgcttgagcccaggagttcaagaccagccagggcaacgtggcaaaaccccatctttacaaaattaan

SEQ ID NO: 107155 - DNA, 436 bp, Homo sapiens
aatacactcctgtttctggccttgatacagtcctgtacatactgacaaatgcagtggcgtcagaaagttgggactcttttttttttttttttttgaaaaggaatttcattttttttccccggcctggaaggcaagggcaaaaattgggttaaatggaacccccctttcccagggtaaaggaaattttcggcctaaaccccccaaaaagcggggaaaaaggggccgggccccccaacccggcaaaattttgaattttaaaaaaaaaaggggtttttccatgggggccaaagtgaacccaaacttcgggcccaagggaaacccccccccttaaccccccaaaggggcaggaaaaaaggggggaaccccccgcccgggccctttttttttttttttttaaaaaaaaaacctggggcgcccccaagggggaaggacaggg

SEQ ID NO: 107156 - DNA, 398 bp, Homo sapiens
aatacagtgtgtgtgtgtatcaactatatataatgctagatacaggtagtaaaactttacgttaaatgcaataatattttaggtatcattctgcaacctgccttttcactcaacactgtttttgagaattacctgtgtcgatatatgctgcttttgaaatttacatatgttgacagttgtagttctagttcaatttttttttttttttttaaaacaaagcctcgttttgtccctagggcgggagggcaagggcacaattttgtttaaccgaaccctccacttttggggtcaaaggaattctcctgcctcaccctcctgaggagggggaataacgggggtcggccaccacccccagttaattttatttttagtaggcgcaaggcttacccttgttgccg

SEQ ID NO: 107157 - DNA, 402 bp, Homo sapiens
aatacactccctgatctaagacagaaatacttttccagggaaaacaaatgccacaaataacttgaaaagtaaggtcataattggtggacagatatgtgataaagcaagtaaagtgtcaatagtagaatctagttggtggggatggggatgctgactgtataattctttcaacttggctgtatgtgggaaaatcctcaataaaatgctaggggaagacgaaggtttttttttttaattgtcactttctatagggttaaatataagttagccttcaaagatagctcaaaggccaggtgcagtagctcatgcctgtaatcccagccttttccggggctgaggtgggaggatcgcttgagccgaggagttcaaaaccagcctaagcaacacagggagaccccatct

SEQ ID NO: 107158 - DNA, 740 bp, Homo sapiens
ttcccattcgtgcatttttcttgaataatgacatttctaaaaagaatctgaaactgaggcattagaaggcaagtgctcgttcatatatttgaagaggtcaaatatttaccagaataacttctcaatacagaggggacagctttattttattttactataaagatgtatgtgtagcagaagacaaattatgcagagctttgagttagttaagaatcatctgatttaattctttggagaaatgagacaaattgtagctaaggactatggagttgttttagtttgccagttatatttaatttgactatttctttatttattgagagacaaagtctcactctgctgcccaggctggagtgcagtgatgcaaacacagctcacttcagccttgacctcctgggctcaagcagtccctcctgccttggcctcccaagagtgctgggcttacaggtgtaagctatggcacttggcctatttgacttgtttaatccctccgaagaactcatacatactattgccacctcattttccacgtaagaaaatggaagcacgaagcccttaataacttgcttaatggctagtaggtggtagagcttgaatttagaccacacagtgtggagggtatgctattaaggaaaaacgatgttctagtggggtttccatttaatattgcagaaaaaagaatctatatatttaagaaggtgttatttcatgcacactcgtaggttttgttcatatatgca

SEQ ID NO: 107159 - DNA, 415 bp, Homo sapiens
aatacaatgtggggagacccaaaaagggtggaagtggttttgaagcatcccctggagtgcctgtaacatagttcctgcccagcttgctgtccccactggagatttttttttttaaaacagggtcttgctgttacccaagggggagtataggggcacaatctctgctcactgcagcctcaaactcctgggctcaaaacgtcctcccacctcagctgcctgaggagatgatgagactacaggtgtgtgccaccacacccctgtctaatttttaaaaacattctttatagagattaggcctggctatgttccccgagttggccactggagattctgatggagcaggtgcatggtggtccctgggatcctgcttttccaacatgctgaagctgccacccatggaccacaccatgagtgg

SEQ ID NO: 107160 - DNA, 405 bp, Homo sapiens
aatacaggtctggggcatttcagatcatttcactttattaaacaccaacagcgggccaggctctgcactaagaacacagagatgaataagacactgtccctgtccctagagggcttacagtctagtaggaaaaaccaggcaagtttcggctaattactgtactgttggattaaggtaaaatgttgagggggagttggtatcctagaccacctaacccagcctggggctttagacagtgcctgaactgagagctagttgtaggttaaaaaaaaaaaaaaaaaaaaaaaagggggaaaaaaatttaaaaaaaattaagggtttccccggcccgggcccccgggtttagggccccgaggcaaaaaaccccggggggggggggcccggaatccccaaggggccggggag

SEQ ID NO: 107161 - DNA, 448 bp, Homo sapiens
ggtacggattcgcaattcccgggccgaaccacgcgtccggccatcttggccaggctggacaagaactcctgacctcatgtgatccacctgccttggcctcccaaggtgctgggattacaggggtgagccactgtgcctggccttgtttttttttaaatgagaaaaaaaaaaaaaaaaaaaaaaaggggctgggggggccctttttttttggggggaaaaaccccccttttgtaacccccccccttaaataccacaagggggaaaaaaaaaaaattttttaaaaaagggggggggaaacccggaaaaaaaaaaaaactcgggcccctgtttaaaaaaaaggaggggggaccatttataaaaaaaaatttaccgggggggggggttttaaaataatcacaaaaagtttaaaacccctgggaaaaaaataaaagggttttcccaacttaac

SEQ ID NO: 107162 - DNA, 407 bp, Homo sapiens
tttttttctttcttggggactaagtttagtttgagaaccgggtctgtaagctcccaagtgcagattcttttgtctagcggtgacattggacaggactagacatctccaagcctcggtcattgcctcttaaaatctcacaacgtgtttatgaggcttttgtgacatacttgcaaattctctttgaaaacgaaataatctgtacaataatcccccaagacacaggtttacctttataacaaacctgcacttataaccctgaacttaaaagttaaataaaagaatttaaggccgagcgcggtggccactcctgaaatacaagcactttcggaggccaaggcaggtggatcgcctgaagtcaggaattcgagactagcctggccaacatggtgaaaccccatctctactaa

SEQ ID NO: 107163 - DNA, 384 bp, Homo sapiens
  misc_feature (1)...(384): n = a,t,c or g
ttcaagtgatcctccagcctcggcctttcaaagtgctaggagttacaggtgtgagccactgcacctggcctaacctttaactttttttttttttttttttttttaaaaaggggggccccctttgcccccccggttaagggggggggccgggcctaatccccgattttttttttaggggggaaaaaattttttgggccttggtttttggggggaaagggttttaaaaaaaagaaaaacctggagggggggggaaaaaaaaaagtttttttccccccnaaaaaaaaaaaaaaaaaaaaaaaaaaaaaaaaaaaaaaaaaannnngggggggggggccttaaaaaaaaaaaaaatttttgccggggggggggggggaattttttttt

SEQ ID NO: 107164 - DNA, 439 bp, Homo sapiens
  misc_feature (1)...(439): n = a,t,c or g
gtgcaggagctgcagggcgacccacgcgtgcggagaggcacggtctcactatgttgcccaggctggtctcaaactcttgggctcaactgggcctcccatatcaggctctcaaagtgctgggattacaggcatgagccactgtgcctggcccactgaatctttgattgcattcattttgaaagatatttttgtaaaaatctgtttgttttcttttaatactttccagtgttatctgggtttcttaatttctgacttaaggtctgtaataatttctgctttcattcctcttaatatattgggtctttctttgtctacatttaagattttatctttatcacgtgttttgaaaagttttattttgatgcgctctttatgtttttctttatttngagagcttggaccttgnggagcttttcttatttataattttcatcacatt

SEQ ID NO: 107165 - DNA, 404 bp, Homo sapiens
cttagttgttgagaaaaaaatcatttgtcaaggaaaatgatggctaaccctgaggctgaagtaccagatagtggagaggggaagggatggtacaagaggatggtatttaccacataggaggagtgacaagtacaaaagcctggaattggtaaaagacgctgcgttcaaggtaccaacaaatagttctgtttggctggaatgaggatagaagatagatgaaagataaaaggaaagacccctgctgggtgcaggggatcgcttgagcccaggagtttgaagctgcaataagctaagatcgtgccactacactccagcctgagtgacagagcaagacttcaactcaaaaaaagaaataaatgtagagaccctgaagggacttgaaacccatactattgagtttacac

SEQ ID NO: 107166 - DNA, 424 bp, Homo sapiens
  misc_feature (1)...(424): n = a,t,c or g
cggacgcgtgggcagatctcgtgagactcacccaccatcacaagaacaccatggaaaagaccaggtcccttccacaacacacgagaattcaagatgagatttgggtggggacacagccaaaccatatcacacataatttttaaaaaatcataaaaataggcaaccagcagcccatgctgctgctctgcccatggagtagccagccattctttattcctttactttcttaataaacttgctttcactttgaaaaaaaaaaaaaataaaaaaaaaaaaaaaaaaaaaaaaaaaangggggggggggccttttaaaaaaaaatctttttttccccggggggggggggagaaattttttttttaaggggcccaaaaaaaaaaaattggggggggggtttaaaaaccgggggggagggaaaacccccgt

SEQ ID NO: 107167 - DNA, 398 bp, Homo sapiens
aattctttgtggcttctggatataggtttttctccatgatgcccaggctggtcttgaactacagggctcaaacgatatgtctgcctcggtctcccaaagtactgggactacaggcatgagcctctgtacccgacctattcttacatgtgagtcaaagctgggctagcgagagactcagagatcaaagcctttcctgggccatccccagacctccgagctgcacctggcacctgcctcacccatagcaggtcccttggcctggagtcaagcctgcaccctaagatccagctttttcaaataccctattcaaggccgcaggggtaaagacatcatggaatgatttagcttggtgaggaataagaactccaggaaactgtgatttggaatatgattcagag

SEQ ID NO: 107168 - DNA, 395 bp, Homo sapiens
cccacgcgtccggttccagaaagataatttaatagagaacaaatcatttaaaaaaaaaaaaacattgggccaacatttaaaaaccccttttttacaaaaaaataaaaatttacccgggggggggggggggggcctatagccccagctacttgcggggttgaagtgacctcaccaaatgggggttagggatctgggataatgccgttgcactccaccctgggggacaaaggaaattgttttttcaaaaaaaaaaaaaaaacccttcatggaaaaaaacccctccttgtcctaagggatccggaggggctaattaaaccctttcaaaaaaattgggggcttgggtttggggggttcccgggaaacccagggaaacaaacaaaaaatttttttttttc

SEQ ID NO: 107169 - DNA, 498 bp, Homo sapiens
gatccacagaccatagtcagattttgaccatttcaccaatattgtcctttatttttttccccgttgaggagccagcccagcccagggttctacactgcacttagtcatcctgccccggtatttttttaaaatccccacagtgagaactgagagcttttcaggctcattggtgaccagccccccgcccctccacttccttccactgaacaaggaacgtggaggcccaggaatccccctgccctgtccgcagctgttgcaggtgctgggtggcaccagcctgccccccgttccttctctgccagacacctctcaggacaagtggcctctccacggagtaccaccaggccatgtctgctcctaaccccttgctggtgatggggcatggccaccctctccccactggatccccctcaacccagggacctccaaaagtcttcagccagctcccccatggaacagtgcttaagggtgaggtcactagagacagatgagacacat

SEQ ID NO: 107170 - DNA, 405 bp, Homo sapiens
tctcaatctcctgacctcatgatccacccactttggcctcccaaagtgctgtgattacaggcctgagccaccgcgcctggccttttgtgttcttataaaatcttttcttgccaactacagtggtgtgttcctgttacccaacttgcttgggagactgaggcaggaggatcacttgaggccagaagttccaggctgtagtagactatgatcacacctgtgaatagacactgcattctagcctgggcaacatagcaagactctatcaaaaaaaaaaaaggggggccccctttaaaggacccgggttaaaaaacccgggggcggaaaaaaaaaaattttttttggggggcccttatttaaaaaaaaggggcccctttttaacccgggggaaaggggaaaaccctgggt

SEQ ID NO: 107171 - DNA, 471 bp, Homo sapiens
cgatgggccgtgtgcggtggaattcctctgtgcatggggggctgctcggggcagggtgccggggggtaggaggcagcgccgatcggctggaagagagtgtggtgtgatggacgggcagcttcctgtgtgctccaagggatgagcctcgtggggcagagggcccggggccgccgcctggcctgggagtccctccctggtttttattctcagtacctcaggctcccctgtgtacttggaggggcagggagccctttcctcggttctggcctccagaccagggtaagggcaggcccctccaacaggtgctcacagccaccgaggcaggggctgcagccacccactgggagtcttgtttttatttataataaaattgttggggacaaaaaaaaaaaaaaaaaagcgcccgctcgattttaagggccccgttaaaccccgtggatcaccctcgctggtcctttttattggccaccc

SEQ ID NO: 107172 - DNA, 427 bp, Homo sapiens
  misc_feature (1)...(427): n = a,t,c or g
tcttttttacgtgcctgtagncgcagctactcaggaagcttatgaggctgaggcaggtagttcgcttgagctcaagttgtcaaggttgcattgggctggaatagcaccactgtactccagcactctagcctgggcgacagagtgagactctgtctctacaaaaaaaaaaaaaaaaaaaggccccccggggggggaaccccccttttaggggcccggggaacccggtttttttgtttgttaagggggggggaaacctttttatttaagaaggggtttccaaaaaaacaaaaggggagggggggggccctcccccttaaaatgggtttgcagaaagggggggggaaaaaaaaagtttttttatggccccccggtttaaagaaacccaaacccagggggttggacccagggttttacaccttccacggaa

SEQ ID NO: 107173 - DNA, 263 bp, Homo sapiens
  misc_feature (1)...(263): n = a,t,c or g
gggangnctannggtgcggcctctttgggaaacacgccggcacttccttaaaagactaaacaagctgggtgtggtggggcacgcctgtactcccaactactcaggaggctgataagggaagatggcctgagcccggaaattcaaatccagcctgggcaacatagcaagagcctacctctaaaaaaaagagttaacaaatgactcagcaatttcgctccaagttatacagtgaagagaaagacttgcgtatgaatgttcatgag

SEQ ID NO: 107174 - DNA, 457 bp, Homo sapiens
  misc_feature (1)...(457): n = a,t,c or g
cgatagctgtcgcctgcgctaccgnnnnaaacgtccgggtcgacccacgcgtccggggtctagccatgttgcctaggttggtcttaaattcctgagctcaagtgatcctcccgcctcagtctctcaaagtgctgggattacagttgtaagccactgcacccggccccaaacttattcttatctgctcgtgaacattaaacagatggtaaaatatgtagtttatttcttggttttctggcttctttcattccacctaacatttgggaaagccaatcacattgtgcatagaaacaacttgttcactcccactgccgtggagtcttctgttgtatgaataaaccacaatttgttcatatttactgattgaaaaattgaactatatccaacagcagagaatgcacacgaccacctagacaaaagaggggaatctatacatcctttttttttttgactaaac

SEQ ID NO: 107175 - DNA, 701 bp, Homo sapiens
gctgcagcccccaggcagcagtactgggagcccctctcatctccgagaataaactctgaagccagcgaccctgcggacctgaatcatcagggagcctgtcagaggaggggcagtgactctgcgggacaagcaagcaggctatataagtttcagaaggctgggctccactcagatcttttccagcagctgctgcctgccagagaggcgccttcagagacccagcgcttacacaatacccaccatgtcccaggctggtgctcaggaagcccctatcaagaagaagcgcccccctgtgaaggaggaggacctgaagggggcccgaggaaacctgaccaagaaccaggaaatcaagtccaagacctaccaggtcatgcgagagtgtgagcaagctggctcggccgccccgtcggtgttcagccgcacccgcacaggtaccgagactgtctttgagaagcccaaagccggacccaccaagagtgtcttcggctgagaagtgtgcgccactccccttgctgcccgaatgctcggaaacaggagccttacccaggaactcttttttatgccagaacgcttcctctcccctgctgtctctggggctgccaccctcccccacagtccaggcccttcagccaagggctctgcaccagcaccttggaagcaccaataaagaggatgcccacgtggccccagcaaaaaaaaaa

SEQ ID NO: 107176 - DNA, 434 bp, Homo sapiens
cagttgggtatggtggctcacacaatcctatcgtggccccaatccctgttggactgaacaaagggagacgaacgtgggaataaaaataaagacaaaagagtatatttggaagaaggggtcagggggctccttgctccagtgaacaagggtcctgagcttttagcacccttcgtatttattgagtaaaggagatagggaggaggtggttgtcagtcagctgcttgactcggtgcaggcttgcacaactgcattctctgaacagtagtctccagatgttccagtagataacctcaaggagcacggcgccagagagtgactgccctcagcaaaccttctggcggcaggtgcagatgtgagtttgcctacatcctgcattcatgataaacagtttgctgtttgatcatatagcctcagtggaatgctaagttggtcac

SEQ ID NO: 107177 - DNA, 429 bp, Homo sapiens
gcaggaggggtctggctccacctttgacttttcagcagttgaaaattaaggcaaaaaaaaagcaaagcccaaaggggagaaaaaaaaaaccaaaaaaccaaaaaaccaacccccaaaaaaggcgggttggccctaaccctggaacaaaacttcgttgttggggaagaagggccctccccaatttttcccacccaagggaagaaccttccttggggttttccaacccttgttaatcttgaacaaaaaagaaggggccctttaaaccaaaaaattttttcaaaaaaaaaaaaaaaaaaaaaaaaaaaaaaaaaaaaaaaaaaaaaagggggggggggccctttaaaaaaaaaaaaatttttcccccgggggggggaaaaatttttttttttttttgggcccaaaaaaaaaaaaagggggggggggtttaaa

SEQ ID NO: 107178 - DNA, 509 bp, Homo sapiens
cgaccgccccggacgaccagggtcgaccatatcaggccggagagcctgctgcgcatgtcagggctgacagcacacacggcctgggggcctagagaagggttgctggtcacctgccacccagggtcggggccccgcaccatccgggggcgagctcccgggaaggggctccgcctctacacccaccccccaacctctgacatcgccggccgaacgggagctgccgcttccttcccggccccgctgcacctccccagggagccgagggcgggcgtggacgggaccgacgtggaacgcattctgtagcccagacgggcggccccggcggcttcgggagtggggtcacgcccagctggagaagcagttagggcggacgaagcaggagccgcggggctgggaggattccagtcggaacgcaaccgatcctggggaggcgagagccttggaagccgccagccccagaagatgcctgccttcaatagattgtttcccctggcttctctcgtgcttat

SEQ ID NO: 107179 - DNA, 913 bp, Homo sapiens
tttcgtgcggagggagccgcgggatggaccgcagggctgcggcgaaaccacgtgctgcctgaaccccactttcctcttgcagcctgccagttttctccattcaagatagtccctttggagatgcgcccctgggtcgaagccactactggccatcccagagccagacctggtgtcccaagaccctgagcccatccaggtctcagagatccaggctcccacaagctcccaaggctctagccacaggtcccaactcccctgagctgtttgaggagtcctggccatccagttcagggaccccctccctgcccagcaccactgagggacagatgtgggcctccccagcacccaccctgattgacagcggggactccgtggtggccaagtatataaacaggttccgccaggctcagcccaccagtcgagaggagcgccagcctgcaggcccaaccccagctgacttttggtggctgcagtctgactctccagaccccagcagtcaaagtgcagcaggtacctctttcagtgccatccactactcccacccctaaacctttgctgatcaatgcccccagcagccactcctcctggccctcatacctcaactggggcttctcagcaggagccaacaaaccataaggaagaccccatacagctgtccctactgcggtcaacgtgaccagtgcatcccatgctgtggctccccttcaggaaataaagcaggtgacatccccattcactccctcccttgggtgcctgaactgacaacaccagccctaggacagaattagaagatcaggagcagtggctcacacctgtaatcccagcactttgggaggccaaggtgagaggactgcttgaggccaggagttcaagaccagcttgggtgacatggtgagattctgcctctactaaa

SEQ ID NO: 107180 - DNA, 384 bp, Homo sapiens
aatacacgctgtgttttttgtagagacagggttctgccatgttgcccaggatggtctcaaactcctgggctcaagcaatttgcctgccttggcctcccaaagtgctaggactgtgggtgtgagccaccatgcccaaactagctggacttcttataaccatttttccttctgaaactgtacttttcatagcgaccaaagacttttcaaccaatatgttaactaatttttaataataaaactgttcattctctattcagcttgctttcaccagagaattaacactagcgactattcattccttacctgctgaaacaacctgctctttttcgtgatctctcctccaatctttatatttattgtaagcaattgacctcttcgggagag

SEQ ID NO: 107181 - DNA, 377 bp, Homo sapiens
aatacattggctccttggattgatttatttccttgaacttatattaagcatatttattttaaactcagagcctgataatgccactaaccaaataccctacaggtctgtttccattgttgtttgcctcagttttcttcatgtgtcttataacctcctgtgcttggttatatttgtattgagatctgcaaaccgcatatgaataactgacgccaggtgcagtgactcacgcctataatcccagaaccttgggaatccgaagtggtaggatcacttgaggccatgagttccagaccaccctgtcccacacaatgaaaacccgtctctaccatgagctactataaaattaactgcgcatgatggcacgtgcctacactccc

SEQ ID NO: 107182 - DNA, 378 bp, Homo sapiens
aatacatgtgtgtgtgtgtgtgtgtgtgttttaagacagggcctcgctgtcgcccaggctagagtgcagtggcatgattgtggctcactgcagcatcaacctttcaggctcaagcgatcctctcactccagcctcctgaggagatgggactacagacacatgccaccatgcccggctcatttttactggtgcggatttctgtatagatgcgtcctcatagctcctgaactcctaggcttgcaccatcctactgcctcaccctatcagagtggtgaaccacaggcgcgactcatatcatccgggtgggcccgactgactcaattgttagcggcggaccgcgccgcagcatatgcaagtacacagagccgtttctctttt

SEQ ID NO: 107183 - DNA, 376 bp, Homo sapiens
  misc_feature (1)...(376): n = a,t,c or g
aatacaggccttgatctcttacaaaatacatactgacacacatacagcatttagggctgaactgtcatatccgtaatgcactttgaaacgttcagaaaacagaatgtgagataagtggaaaaatgcaaatatggcaaaaaggtagcgttaaaactaagtgttcaaatgggctatttaactttccaatattttcgaaaaaaatagcaagttgcaaagttaagaaattaactcgagaataaaaatataaaagccaggctagatggtgcacacctgtaatcccagctacggaggctgaggtgagaggtcagcttgagcccaggagtttgagaccagcctgggcaacatatcaaccgcatttcaaaagttaagtataaan

SEQ ID NO: 107184 - DNA, 489 bp, Homo sapiens
aatacaggggcatgtgttaagtacttggagcttacttggagcatgggtaccagaaagggaacagaggaaaacagggttggccaaagaggttaaatgtgactgtggcaggccttaataaggagacagcctcgataggaaactaatataatattctaggaagaacgtctgaatcaaggcagataccagaaacattttaacaaataggatggagagcatttgggaatgacttattatgaggagcaagagacatgtaggaatgaagctgggtaaatgagaggatggtagtaggttaataaaaacatgaaacaagccaggcgcagtggctcatgcctataattccagccctctgtgaagctgaagtgggaggatcacttgaggccaggagttgggagaccagcctgtgcaatatagtgagactccatctctccaaaaaaaaaagagggaaagggagaaaaagggggggaaaccagatcgccccctctagggaaa

SEQ ID NO: 107185 - DNA, 423 bp, Homo sapiens
gtctgattcttaacggcgcttcccttctgcatgctggtcacaaactcctgacctcaggtgatccacccaccttggcctcccaaaatgctgggattacaggtgtgaattaggcacctggtccctaattcacttttaaacctgttattcccaggagtatttaccttcaggctcatatggagcaaaccaaatgtacttacatttgccgggatcctaaagagccaccaaagacaatcattttatcatctatcacacaggaggagtggccagccatgggaggtggcccatgggttgtcacaatgcagttccacctaatgtaaaaagacaggaggaagtcaagaagtcaccaccacacactttatgtaaaaatagtaagtaggcatccatttaaaatgataatcctatcactttcagcagagatttgtt

SEQ ID NO: 107186 - DNA, 730 bp, Homo sapiens
ccgggcgactatttcgtctggatggtggggtgtaaagggacgtgcacagatctacttaccaagctgggagcaagcaggattgggggcctggagaagctgaaaggttaagcagcagtaggcgaggtgcctactcctgtcctgtgcctatcacatttgcagagggtaagacaagaatggggagggacaagatgaggctcatcctgggcctctcctggggcccctccctcaccctgctccttcccatcaccaacgcacccaggcgtccaggcatgtgagagcctgccttgccaggaaacagcacaagctgaagtggggcagtaagattccctggtggtggaaggaaataggaggactctgctgaatcctggtcctgcttctgttctcatccctcccccagctctggccccaatcctcccagcccaccttctgcagtgtgtatgttgcctggtctctctggcctgcagaggtgacccaaacaactcagtcccccacctgccttatccttgcctgtttccagtctcctggtccggctgagcccctggcctcctacctcctcccacctcttgcctcaggccctgccccagtcactccaccctcagggctctcaccgggctgtcaatgacagcttttccatgtaaggcatggtgctaggttccaggaggaacaggggatgcatggaggcataatggttagggagtcatgacacacaaccatgaagaggccatgtatt

SEQ ID NO: 107187 - DNA, 468 bp, Homo sapiens
aatacactggggcagttttctctttattgtcatcaaagcacgtgtgaaaatacatgcctaagaacatctctactggattgggtggaccaagtgattagatgaaaatatggtcttggatggccaaaattttgttacatcgttgatagtaagccatagactgtccttttccaaagacgttgggttgggggggaccccctagagagaaagcccttttgggaaaagggagaggaatgggatgacctctggctcaaggaagtatgtgaaaacaggagacagccaacggaaagaattgcaatggaagaatctatggttcttttagtattgctcaagtccccactgggcggccagctgtacaaacaactgtgaaagaagcagaggcgaggccgggagccgtggctcacgcctgcaatcccagcactttggaaggccaaggcggggggatccccttaagttcagagttcgagacca

SEQ ID NO: 107188 - DNA, 393 bp, Homo sapiens
aatacagggctggggagagcatggtctggaatagatgcctggtgtgaggacaggtcctgagcctgtgccagtcctgggagaaaggggacaagaaggggctttgggacaaaaggagtcttgcaagagtagggggagggacagtggccccaagagacagcactgaagagcagaaaagacagtgactaacttctatgttagcagttgacaacagctcagtagagaaaacctgtccacaagcaatgagaatatcacggccgggtgcagtggctcacacctgtaatcctagcattctgggaggccaaggcgggctgattgcttgagtccaggagtatgagacaaacctaggcagcatggcaaaaactcatctctacaaaaattagccgcacctgtagg

SEQ ID NO: 107189 - DNA, 1757 bp, Homo sapiens
ctgagtggagcccggctgcggatctgggaagcgcctcttcacggcactgggatccgcatctgcctgggatcatcaagccctagaagctgggtttctttaaattagggctgccgttttctgtttctccctgggctgcggaaagccagaagattttatctagcttatacaaggctgctggtgttccctctttttttccacgagggtgtttttggctgcaattggcatgaaatcccaatggtgtagaccagtggcgatggatctaggagtttaccaactgagacatttttcaatttctttcttgtcatccttgctggggactgaaaacgcttctgtgagacttgataatagctcctctggtgcaagtgtggtagctattgacaacaaaatcgagcaagctatggatctagtgaaaagccatttgatgtatgcggtctgagaagaagtggaggtcctcaaagagcaaatcaaagaactaatagagaaaaattcccagctggagcaggagaacaatctgctgaagacactggccagtcctgagcagcttgcccagtttcaggcccagctgcagactggctccccccctgccaccacccagccacagggcaccacacagccccccgcccagccagcatcgcagggctcaggaccaaccgcatagctgcctatgcccccgcagaactggctgctgcgtgtgaactgaacagacggagaagatgtgctagggagaatctgcctccacagtcacccatttcattgctcgctgcgaaagagacgtgagactgacatatgccattatctcttttccagtattaaacactcatatgcttatggcttggagaaatttcttagttgggtgaattaaaggttaatccgagaattagcatggatataccgggacctcatgcagcttggcagatatctgagaaatggtttaattcatgctcaggagctgtgtgcctttccatcccttccggctccctacccctcacttccaagggttctctctcctgcttgcgcttagtgtcctacatggggttgtgaagcgatggagctcctcactggactcgcctctctcctctcctccccccaggaggaacttgaaaggagggtaaaaagactaaaatgagggggaacagagttcactgtacaaatttgacaactgtcaccaaaattcataaaaaacaatagtactgtgcctctttcttctcaaacaatggatgacacaaaactatgagagtgacaaaatggtgacaggtagctgggacctaggctatcttaccatgaaggttgttttgcttattgtatatttgtgtatgtagtgtaactattttgtacaatagaggactgtaactactatttaggttgtacagattgaaatttagttgtttcattggctgtctgaggaggtgtggacttttatatatagatctacataaaaactgctacatgacaaaaaccacacctaaaccccttttaagaatttggcacagttactcactttgtgtaatctgaaatctagctgctgaatacgctgaagtaaatccttgttcactgaagtctttcaattgagctggttgaatactttgaaaaatgctcagttctaactaatgaaatggatttcccagtaggggtttctgcatatcacctgtatagtagttatatgcatatgtttctgtgcatgttctctacacaattgtaaggtgtcactgtatttaactgttgcacttgtcaactttcaataaagcatataaatgttg

SEQ ID NO: 107190 - DNA, 876 bp, Homo sapiens
ggaaaatgttacatcacatttttttctatatagcagagtttatgatagaacttttaagggggagctcttttatgtaatgctggctattccgaagttcgcaaagtgctgaggccacggtgagcagtcttaacagtggattgtctgcctagatacgttcccagcggagaacttaatgtaacctactttcgtgcagctccgtgtgttaggatgatttttccctttattaggaattcattattttattattcatttaattgccttcttagttccctgggatcccctccttggagctaggagaatgaactttcttcagggagctctaccaaagaaagaagaccactgtgtcttctcttaatttgaaattgctttttggtattttcaccagcccggagtactgtaggagagttcgcttccatgtcttctgaggaatgcatctaaatgcatgtggtattcctatttccattaactctgtgtgtggtgtcgctgtaggagcgtcaggaagcagagaaaatgttcaagggcaaacggggtgcacagcttgcaaaggatattgccaggagaagcaaaacgtaagacacggatatccaacttaactctacttcaccttcagaaacatgatctgatctgtctggcagttcgtctcctacaaaattaaccaaaaactctgacatattaatgtggtattaaatttgagtgcttatagtccatgtacatcaatggtccacacatcacaagaaatttctaccagcttagcagagcaaatatttcagtagtcagtcttcatgtgataccatgtacatcctattttctatataggaagatgaactggatggtgtttctgaaggagagagttcttgtatcagtttgttaacaaag

SEQ ID NO: 107191 - DNA, 423 bp, Homo sapiens
aattcatggcctgcaaaatttctcagaatattaaattgttttaccaaaacatacagtaaaaagaacataggataaatccaagaggtccaatacttaaaagagtctgagtaagggaattaaatgatcaaagtaaatagttttggtttgtacctatacagtcaggttatatacatctatataatgaaatactatacagctatttacttaaaagattttttctttaaagatggggtcttaacccgtcacccccgctggaacacagtcacaactcagtgcagccttgaaatcttgggctcaactgatcctcctgcctcagcttcctgagcagctggcactacaaacaccagccaccatgggcagctgtacagctattttaaaaaaagacctacatatgctgaaatggaacaatacaaaataaaaaag

SEQ ID NO: 107192 - DNA, 1925 bp, Homo sapiens
gtgggtagacagaggagtgaaccccaaaggtgtccatgccccagttctaagccctgtggccaggtgctgtcacacagcaaaggggactttgcaggtggaattagggttagggatctaaggatgggaggggaacttggtttatctgggtgggctcagtgaccccttggaatggctgagggaggcaggagagcctggaaagattcgaagtgtcacagagatggtgccgtcattgctggcttaaagacaaggggccaggagccaacaccagaggccactccacaaccccagcgccagtcagcaaggaagccgggtgtcgctcacacaaccagaaggagctgagtttggcaacaacccaagtgagcctgaagcagattcgccccagagcctccaggcgtgagtggagcccagtccagcgacaccttggtttggcctgtgagactgagaagagagccagccacgccatgctgtgcctggggtccacagagccgggaggtcacacatgtacatcctggaagctgcccaaggtgtggccacttgtagggcagtgagaggaagccgtcgcggggaccatgctgccttctctgggctcacgactgttctggaaaggaccccatggcagacttggcaaggtctccacttcaggggcaaacatctccatcatcagcaactccaaaccccagccacttcctgggagttcaggaactgtgtttagccataatgtcccttggggtttggtgaaaaacaacttcctttttatttgtgggaaaactgtattatattgccttatttatttttaatcatgtacaatattcatgtacaaatgttagagcccattcgggtatgattctctctaaattatttattgaagaggctttgtaaatagtgcaccagtgacaggtgctgcctgtttactcgtaccaaaaatgaagacaagccccacacccacctcagcccttgcttggccatgctgtggccctttggaaatgaccctgtgtgctcccctcgcgacccttgcatgcctttcatgcctgatgccgtagagtagaacacagccccggaatgcttccagttgcttgcaagggaccatgccggcccgggtggtccatgcctgcggggtgtctgtatcctgcaggaggacgcccctacagacccagcaacccaagttgccagcccgtgtttctcagactttaaagccacccagggcttctggaacacctgtcatagaagcaataactctaactctatactgtagagatgagtctggtccgaagcagattagtaatttagagataagccatgcatacaagtttgccccattctctggcttggggtggtgggaggcggggagctgccactcccaaagcctccaccccttcctgaagacccagctatgaaaccgcagttcctgtgggttgggctgcccaggctggtcagagctcagcaccccaggtctggtgagcagacagagccggcgttaaaccccgatcaggtcattgtcaccacacccttgcttggatgaggaaggaaggaggcaaaggcacccactccatccaagatccgttccaattgatgagcctcagtactggcctcacactgaccaacggtggtatgctgcagtttgttggtttggtgcagagtctaaaggataacatatcaaggcttacctgtgataggccattttaaggaaatggtggcactctgaaggctgtccccattcaccttccacaatgctggtaccatcctggtagaagagccctctgaacaggacacctgttcaggcctgggggccccatgctaggcttgcctgggtgtgagaaggtcgaactgggtggcttaggccttcaaattgagcttgggggtgtccaagagaggggtcttattcgaggaactcacataccccaaataaccatcagtgcacaaatcat

SEQ ID NO: 107193 - DNA, 460 bp, Homo sapiens
  misc_feature (1)...(460): n = a,t,c or g
natttccttccgatcgcacgnacccaatctaggattctatacatcggacgcaatacatggcaggattaaaagaagaatgagagacatgttgcattaaaaacaacacattgaagtaaatttaaagccagatgctgtggtgtgcacctatagtcccagctacctggcaggctgaagtgggaggatcacttgatcccaggagctctagtctgtagtgtgctatgatcacatctgtgaataaccactgcactccagcctgggcaagatagcaagatcttacgtcttacaaaaaaatcctaatttacatattaaccaaatgcaatgtgtggaccttgtttgaatcttaatttgaaaaaactgtaaaaagaaaataataggtctggcatggtggttcaagcctataagtccaccactttaggaggccaaggctgtcgaattgcctgagcccaggagttgattaccc

SEQ ID NO: 107194 - DNA, 418 bp, Homo sapiens
aatacacttggtcttcaattttaaaacaatgaataattattaatgaatttcaattgtaagaatctaggaaaaatttaccaaactaaaatgtgagcttaccaaacaaaatatcataccctgcagctcatactctgtttgctatcttaaatgttagatgtaaaaaaccccacgtggtcacataaaatgacagaatcgaagtaactcaagttctactttcttagtgtttataaacgctgtactgtcactatttcatagctactatgtaaactcacgcgtcgggcatggtgactcacacttgcaatcccggcactttgagagtctctgctggaaggatcacttgaggccaggagttcaagaccagcctgggcaacatagcaagaccccatctctacaaaataatcataaataagtacataag

SEQ ID NO: 107195 - DNA, 471 bp, Homo sapiens
  misc_feature (1)...(471): n = a,t,c or g
gcgacgcacgcgacgtnnnnnaatcctctagagcgggcgcaatacacggtgtgggagaaggatacctctcagagtcaagggtgacttggggacttggcggagagggactacctggaagacctggggccagcctgggaccaagggatgtggagaccaggctgggtcctggaatcagggcatatctaacgggcaaagtctgaggagcagatccaaacggctgaggcagggaggccgtgggccacggggaggacttcactcagcagcaaagagaagagcattggggctggagtgtttcggcaaagacagagccagcagctgcggtgggggagttaccatcatctaggatcagcccagtgattggtagtgtgagtattggctccgactttaacgttggttcccgctttcgtgggttgctttcagggcattaagatagcccggtgtctgttttttcttatcttcgtggtgtaggcc

SEQ ID NO: 107196 - DNA, 442 bp, Homo sapiens
gcgcacgttgcgaggatcctccagagcggccgcaatacatgggggctgatgtgagtagagcccatttattgcactggcactgaactaagcacacagaattagaggaggccacccagagtggttctggaaaggcaggctggcacccaaggactgggagccacatattgtgggctctggtccctgctcagcttctaactaactgtgtgaacttgaacaagtgactcaccttttctcagtctcagttgccttgcttatacaacttataaaggcctcctccaactttaaaagttccttggctgggtgtggaggttcacgcctgtaatcccagaactttgggaggccaaggcgggagtatctcttgagcccagaagttggagaacagcctgagcaacatattgagacctcatctctaccaaaaacaacaaaaacaacaaaaaaaacc

SEQ ID NO: 107197 - DNA, 425 bp, Homo sapiens
aatacaggttgtcggtcatctgtgaggatccgatgagagagcgagagcaaacctgctttcctcctccgccctccttccctcccaacagatactgcagcacgagggatggcgggatggagggatcccaaggggacttcaggaagggcttccctgcataggcaccttgtcgatctggaggtggctggagagggtgctgttccccagctggcgctcctgggtctcctctttgcggtagctcccagggaggccccgtaagtccatgggggcagaaaagaagctagctatgcccccgagtcacgttacctttctcgaaaaggtggctgaaggcttggcaatggctttggaggcacgtgggatcctcgtagctctcttgggcgcaagcattatcggaatggatgtccgtagcagaggggcgacatctggcc

SEQ ID NO: 107198 - DNA, 447 bp, Homo sapiens
acttcttggatcctctacagcggccgcagggaccaggctcctttacccctttcccccaatctgtgttctggctcctgcctccccacaaaacacagcctggcccgcatgcccctcagggtcaagtcatacagctcagcccagcttgggagaaccacctgcaccagaccctcacctcccaccatcacctttgactccagctaagctccaggccaccactctgaactctgagcttttgcacatgctgttcctctcccttcccttcatgggttgtgagccatgtgcccttttttctcagggtaaatgccttctgaccccaactctgctcttcctccgtaaccccccagtgggcatttgtcacactatgggtctgggtagtgaagccctcagcctgtgcggggctgggtgaggaggaatctgcaggggaggggccagccagccagcagtagg

SEQ ID NO: 107199 - DNA, 457 bp, Homo sapiens
atagatgtgtacgtttgcgaggatcctctagagcggccgcaatacaggctggggatgctgcagcagaagaatttctagaacctgggaggcagaggtcgcagtgatctgagatcatgccaccgcactccagcccgggcaacagagcaagactccatctcaaagaaaaaaaaaaggagtgactgtttatcgggtattgctgtgtgttttgggtcacatctgggtgatatggggtgtgtcggtgtgttgtaaagcaagtctgtgtgttatggagtatatatgtgcattctgaaatattttaatttgtgttgccaaacaagtttgtattttatgaagcacatcttagtgttgtatagggaagacagtattttgctggaccagtatttatgtcacggggataatgtatgtgttatggcacatgtcctggtttcttgtctgttaattgtagtcaagtttatgg

SEQ ID NO: 107200 - DNA, 434 bp, Homo sapiens
  misc_feature (1)...(434): n = a,t,c or g
aatacatgcttggtcagaagttctagagatccgaacttataactggtgtctgaaaagagggtagtcatggggactgagccgtcaacctgcaggatatggcctatctccaggcaggtggtgtgagttgaactggaggacacccagctggaaaagccccacacctctgctcacagaagtcttcttctgtgctgatgactgttgtggtggtgtgagagcagaggaaaagcacagtctgtttttccgaaattgtgttatatacaattccacatgccagcaaaccactaagcaaagctggctaagaaaatgaaagccttggccgggcgcagtaactcatgcctgaaatcccagcactttaggaggccaaggagggtggatcacctgaggtcaggagtttgagaccagcctgaccaacatggtgaaacccccgtctctan

SEQ ID NO: 107201 - DNA, 478 bp, Homo sapiens
  misc_feature (1)...(478): n = a,t,c or g
ngaagcacgttcacgaagtttggatccatctagaccggccgaatacatgctggtctcgaactcctgactcatgtgatcctcccgtcttggcctcccaaagtgctgggatggcaggcgtgagccaccgcgccccgcaagatactaaattttaaaacacatcttgctgaggccagacaaaaaaagccccacacactaaactagccaggcacggtggtgtgcgcctctggtttcatccattctgattgcagcacaacagcactccagcctgcgcaacagagagcggccctgtttctaaaaataacaaaacaaaacaaaaaacaccacacacatcttgctgaaaaacgtatcacaaactgctagagttagggcaagtttatacttgaaaatactcaaagatatcaacgatcacctctccctcaggctgaaactgccttttgtgctcaactttgctagaagtttggtctgggaaacagctgat

SEQ ID NO: 107202 - DNA, 438 bp, Homo sapiens
tcgtatgctggatcctccgagcggccgaatacatttctggctgttgaatatattatctgttactcacaactaaaaacaaaaaattgaaattcggttgatttttaacaatatgtctaggctaactcaaagaaagcgagaagatttattaagaaggacccagaacttggagcttccagaaaagaaacggccttgcctgaggttccctcagatacttccagccatgggggccagcaattatgtatgactcgtgggcactggtgcccacggtttatagcagcagcctccgtgcaaccaaaatacagatatgccggctgggtgttgtggttcatgcctattagtaatcccagcactttgggaggccgatgtgggaggactgcttaagcccaggagttcaagaccagcctgggcaacatagcaagaccccatctctaaaaaaaa

SEQ ID NO: 107203 - DNA, 396 bp, Homo sapiens
aatacattccctattactcgaggatcacacagcaggaatttgatcccccgttttggttctctcagtccccctgtctctccctgttatccctccatctccttggccaagccaccaccacgcattcccccacccaggagtctccagcctcaacccaggcctcctcaggcttttttctttctttctttcttttttttttttttttttttggaaaaaaaaattttgtttttccccccaggggggaggggagggggttaatttgggttaaagggaaccttaaccctgggggttaaaggaaatcccccgccccccccccccggggaggggggaataaggggccccccccccaggcccaaaaaatttttgtttttttaaaaaaaagggggtttccccatggtg

SEQ ID NO: 107204 - DNA, 430 bp, Homo sapiens
  misc_feature (1)...(430): n = a,t,c or g
actgccacgtagcttgaatcctccagaccggccgcaatacatgaggccttatttgagtctgggcctcatagataaggctcccacttccgggcaaggctgggttagaactgccagaaggggatatccagtggtatgtcctgcctttctaggagctctgctgatgggcagatggttgaggatggttgtatgcatatgaaaaaccatggtgggattaaaaacaagtgcttcctttcaccaagatttcatccagatacctcttaatcacaacctctctgttccctagacgatgctagggtcccagccaagattcctctttccaccaggcacggtgtctcacatctgtaatcccagcactttgggagggcgaggtgggtggatcacttgaggtcaggagttcgagaccagcctggccaccatggtgaaaccccan

SEQ ID NO: 107205 - DNA, 550 bp, Homo sapiens
  misc_feature (1)...(550): n = a,t,c or g
tcgcttgatcttctagagcggccgactacacggngtctggtagtgggctgagggcgtggtttcagcaaagccagccaggaaaagcctcgttgagaaggtggcgtttgagcacagcctgaacctagtgaaggagagaaccatgtacgcaactgggaagagggttccaggccgaacggtcaacaactgtgaaaatcctagagcagtgaagtgtgtgagaaaatgaggcagccagagtgagcgaggtggagagcggtggagatggagtcagaaagacggcaaggggcagcctctctcccggctcgtaagtaccgtcatcatacatttacagactacacccccaagacgcccaagttactccacagccagggactgcatctgagcatcgtcttcctactgtcaagcacagtgcctcccagaaaatgcactaggggttgaaaaaaataaatttctatcacaaggggccgggcgcggtggctcacgccggtaatcctagtactttgggaggccgaggcaggcggatcaccttgaggtcggagttcgagactgccct

SEQ ID NO: 107206 - DNA, 454 bp, Homo sapiens
  misc_feature (1)...(454): n = a,t,c or g
ccaccatggtgctgtctcctgccgacaagaccaacgtcaaggccgcctggcgtaaggtcggcgcgcacgctggcgagtatggagcggaggccctggagaggatgttcctgtccttccccaccaccaagacctacttcccgcacttcgacctgagccacggatctgcccaggttaagggccacggcaagaaggaggccgacgcgctgaccaacgccgtggcgcacgtggacgacatgcccaacgcgctgtccgtcctgagcgacctgcacgcgcacaagcttcgggtggacccggtcaacttcaagctcctaagccactgcctgctggtgaccctggaccgccacctccccgccgagttcacccctgcggtgcacgcctccctggacaagttcctggcttctgtgagcaccgtgctgacctccaaataccgttaagctggagcctcggaggccan

SEQ ID NO: 107207 - DNA, 1136 bp, Homo sapiens
tttttgttttcaaacatgtaatcttttattcagtacactctcaaaacagcatttctgtatctagttccaagctgggtgatcctgcggccccaaaggtagtgatgactctgctgggaggagacacagacctcccagttcagtggatcccgagtgagtcagaaggtgagactggaagcagcagggtccttgagggaagtaggctctccttgaaggataagcaatggctgcatgaagtagcaggtattgaagctagggctttgaaggatgaataggagcttgccaaacaaagaaggtgggacatgcaaaccaagtggagggactgtggcccaaactcagggatacatggatggagtagcaggagaaaaacagactgggggagcaggaagagtcagtgtgagctttctccagatccaaaatcagcagcctgtcattcaaggccaagacattccacaatagttccccttggccctgtcaagcctatcaggcctggagcttcctcaaagcagctctgacaactccagccactgtcatctcccctctttgtgtcacgaggaccatgcactttggtgcatggtgacattcagtgggggctgctttcctcggtgtggctgtgggaccttaggcccatgcctcagtttcccaacctggaaaatgggctgcaggaagccacttttgcaacttatgtttatctcaggccagggaggtcttggacaaatgatgtgaaggaagaagagaaaaatggaagatagggagggagaggaaaggaagggggcgaaggaagggagaacagatgggaagggaagggaagggaagggaagacggaggaaggaaaaggccgtgcacctcccgacccaggtcatcatcaagggacaggtccaacattattatttcagaacatgccagcgctgtcgaggcttaagaaatgggtggtgatttgcatgcgatttgcatgtgatttgctactgtttgttaaatgtcaaaacaccctgaaaatgctttctcccacctccacccccagtggagaagcgggaaacccttccccacttcctccaccagctcccggcatgggttggggacgcctcagttcagagggtggtccccttgggcaagccaaaagccatctgtaaaatgggctg

SEQ ID NO: 107208 - DNA, 968 bp, Homo sapiens
aacatgtggaccaggaatatgggacccgtgaaaacaatatctgcgttggtgttctctaaatattttcaggcatgtctctttcttctgatattttatttctatttaatgtttaagtattttactataattaggtaactttccatttcctggttattgtaccaattaccgtaacgttattaatatattaaattaacatgatgttttccaaaatgtaaattaaactgagagcagaagtgacaaagccctgacataaaacagtgaagcagtgctcttgtttttaccacacaaaggccaattgttttaatctgctgacccacccatgggtgtaaaataagaaacattcactaaatcaagagccacatgcaaactgccaggagctctgctctgctcagggaagataccacatcctacagagcatttgtaagtagtgatttaaatttatggaaatctgcattcattttatagtggatctggttttggtagaggccagataggttaagtggataggcatataaaaagactaccatcccctgcaactttcaagtgttttgtcatggtagtgatcaattccattccttggagaatgtgattattatttttcaatcattgttgccagtggaggagaatttcacaggcttccccttggttctgctctaataatgtccctgactctacaggtcaggaagaaagtgagagtccctgccagctgcccatgtgtgtcccattacacatttcaaggaagagggcaataacggcaaaactgattagatccaccttggtatggacatgagtcaaaactctaggtagcatctgaccttcaaaactccctctgcaggctgggtatgatggctcatgcccgcagtccccgcacttttggaggcggaggtgggaatatctcttgaggcccagagttgcagaccaccttgggctacacagtgacagcctgtctgtacaaaaactaaaaaaca

SEQ ID NO: 107209 - DNA, 430 bp, Homo sapiens
ggagagaaaaggcagtacattagcttggctaatgttataggaatggctctgttgccctgtggcgtcatattccatcttgctgacctggccctcctggattgggcaggctgtatgattgggcttaaaacattcaaaatgaaatgtggtagccagtacagtggagattggtcgccagcgggggggttagataaagaaaaagcccaggtttatttaaccatgtaggctgtctgactattaataaatgtaaatgttttctgggctgatatatacagaatggaagtactcacattgaaaaagttgatcacgtgcagaataaagtcagtcttgcgccttcgtaagggccagtaaaatctatggtcctggccaggcgcggtggctcacgtctgtaatcctagcactttgggaggctgagacaggtgtatcacaaggt

SEQ ID NO: 107210 - DNA, 458 bp, Homo sapiens
ccacagactcagagagaacccaccatggtgctgtctcctgccgacgagaccaacgtcaaggccgcctggggtaaggtcggcgcgcacgctggcgagtatggtgcggaggccctggagaggatgttcctgtgctttcccaccaccatgacctacttcccggactttgacctgatccacgggtctgcccaggttaagggctcttttcaatgaattgtgttctcgtgctgatcaatatcgttatttactgggacgatttgtttagtgatgcctaatgtctttaattgttattttcgctgtatagtctcttttggtcttattatattttttggaattaagtattatgtttgctatgattgtttagttcgatttgtgttactgctggtgttttgatgtggataatgtcttttttttatcctcaatgattttatctagaaaatccttttttgtttgtattttcg

SEQ ID NO: 107211 - DNA, 455 bp, Homo sapiens
gaacgaacggcttgggcgcggactggtatccggggactgagacttgcagggtccgccatggagccagagcagatgctggagggacaaacgcaggttgcagaaaatcctcactctgagtacggactcacagacaacgtttagagaatagtagaaaatgagaagattaatgcagaaaagtcatcaaagcagaaggtagatctccagtctttgccaactcgtgcctacctggatcagacagttgtgcctatcttattacagggacttgctgtgcttgcaaaggaaagaccaccaaatcccattgaatttctagcatcttatcttttaaaaaacaaggcacagtttgaagatcgaaactgacttaatgggaagaacagaaaaatttagttgctactgtagatttacatgattaagaggcagctttaattgccatgatcattccctctttttggatggag

SEQ ID NO: 107212 - DNA, 2254 bp, Homo sapiens
gcgggcctggagtctgagccggcgccgctcagtgtgaggtggtttctgcgggtgaggctggcgcccgtaccatgagcgaggcggacgggctgcgacagcgccggcccctgcggccgcaggtcgtcacagacgatgatggccaggccccggaggctaaggacggcagctcctttagcggcagagttttccgagtgaccttcttgatgctggctgtttctctcaccgttcccctgcttggagccatgatgctgctggaatctcctatagatccacagcctctcagacagatctctggaattgcattattttgcagcttcaaagaacccccgctcttgcttggtgttctgcatccaaatacgaagctgcgacaggcagaaaggctgtttgaaaatcaacttgttggaccggagtccatagcacatattggggatgtgatgtttactgggacagcagatggccgggtcgtaaaacttgaaaatggtgaaatagagaccattgcccggtttggttcgggcccttgcaaaacccgagatgatgagcctgtgtgtgggagacccctgggtatccgtgcagggcccaatgggactctctttgtggccgatgcatacaagggactatttgaagtaaatccctggaaacgtgaagtgaaactgctgctgtcctccgagacacccattgaggggaagaacatgtcctttgtgaatgatcttacagtcactcaggatgggaggaagatttatttcaccgattctagcagcaaatggcaaagacgagactacctgcttctggtgatggagggcacagatgacgggcgcctgctggagtatgatactgtgaccagggaagtaaaagttttattggaccagctgcggttcccgaatggagtccagctgtctcctgcagaagactttgtcctggtggcagaaacaaccatggccaggatacgaagagtctacgtttctggcctgatgaagggcggggctgatctgtttgtggagaacatgcctggatttccagacaacatccggcccagcagctctggggggtactgggtgggcatgtcgaccatccgccctaaccctgggttttccatgctggatttcttatctgagagaccctggattaaaaggatgatttttaagctctttagtcaagagacggtgatgaagtttgtgccgcggtacagcctcgtcctagaactcagcgacagcggtgccttccggagaagcctgcatgatcccgatgggctggtggccacctacatcagcgaggtgcacgaacacgatgggcacctgtacctgggctctttcaggtcccccttcctctgcagactcagcctccaggctgtttagccctcccagatagctgcccctgccacgcaggccaggagtcttcacactcaggcaccaggcctggtccaggaggagctgtggacacagtcgtggttcaagtgtccacatgcacctgttagtccctgagaggtggtgggaatggctgcttcattcctcgaggatgcccgggccccacctgggcttgtctttctgtttagagggaagtgtaacatatctgccatgaggaacataaattcatgtaaagccattttctcttaaacaaaacaaaactttctaagtacagtcattctctaggatttgggaagctccttgcacttggaacagggctcaggtgggtggagcagtaaggcactacccagagagcttgctgctgcggccctgtcctgcggcctcaaagttcttctttactatatataacgtgcggtcatacctttcttcgttgtggtggggatggaagagcagagggagcatggcccaggggtgttgaggccagcggtgagagccgtgttagccaagacatggaactgtgttctcaagggttatgtggggcgtgggctctccatagtgtgtatgaaaagcttgttgactctagcggctcagagaggactttgctgggtttctttctgtgaatatctccgtgctgaccatgctggaattggatgattctgcaattcgggacctactgcaggggtccgtttagtaacgtcttgtctgtgatctttgttcttgacctctagaccccaagatgtgaacagtgcacgtgttaatgtcatctttgctcatgtgttataagccccaagttgctgtatattttcacaagtatgtctacacactggtcatgattttgataataaataacgataaatcgacttctgctgattaacctttccgcaaaaaaaaaa

SEQ ID NO: 107213 - DNA, 2254 bp, Homo sapiens; identical to SEQ ID NO: 107212

SEQ ID NO: 107214 - DNA, 384 bp, Homo sapiens
cagtccttccgcgggacggggagaaagagagagcgcgaacgaaagaggatgtctctctcagactggcacctggcggcgaaactggctgaccagccacttactccaaagtctattcttcggttgccagagacagaactgggagaatactcgctagggggctatagtatttcatttctgaagcagcttattgctggcaaactccaggagtctgttccagaccctgagctgattgatctgatctactgtggccggaagctcctagatgaccagactcttgacttctatggcattcaacctgggtccactgtccatgttctgcgaaagtcctggcctgaacctgatcagaaaccggaacctgtggacaaagaggctgccatgagagat

SEQ ID NO: 107215 - DNA, 1814 bp, Homo sapiens
agcaatctctgttccatcaaggttctagttgctggccctgtgtcctcaaagttcattacatcttatcaaggcctgtttgcaaaggggagatcccttttcttaaaaaaggctcaacccaaaagaaaccatttcttaaaaaattttacatagatcagttgtatttctatttagcaaaaatgagtgctctgcttttatttgggaatttcgatgaaaaagcgttcagagtagataatgttcatttatcaaaaatctggtttgggaaataccaaagaggctttgattgaattcccttttgacccgtgtgtaacttcctctggtagttagaccccaggcagctccgaatttgtgaacctgcttcctgatgaattctcccttgttcccccttggctctgccattatttcgttttcagtgtaatttgccaagccgcagttttctgtgctggctgtgcctctagtcgcagctctgtgactgattccctcccgggtgctgagtcccctccccggccaccatcctgcgtgaatatcctgaaattcatgggcttcctcgggggcccgcccgcaggtggtgctgggtgggttccgccaccttctcctggaaggtgagccttttcctggccaagggcagctgccttaacctctgagagtctgcgcttggccttagtcctggagacccagcctccagggactgaaccgtgctgctgttgggagccaagaccggccctttggagccggcagcccaggggtccctgctggatcagagaaatagaaagcacccgaagacggttagtggcaattccttgacccggtttgcttccaaatgaaggccatttgtccaccaggcattgaaaagacatgacttacccagtccggcatcggacttgaaaaatcgaaattgacatcactcagctgttacatttcacatccgattcagcccccttttatttccatgtgcttttcgcagccttcctgtgttggatgaaagagaataagaattcagctgacaggaggcctctatcctgtccctccaccccaccctccacctcaatcccctcccatcttccccagacctacctcacctactaggacctgaggcagctccttagcagagacccctggggtttagctgactctgggggtcaggggttcctgtccccaaacttcgcaagacagccctgaagtcacaagtgctttcttttaagtggcattggcaattggcgtgtaatgatggcagtagaatctgaatctcggatcccaggcagggttcacatttccaaacctttttgatttcccctgacctctaatggctggatcctatttttctacaacctttcagtgacatcgttcaggtttctttcttggccatttaaaaaaacaaatttttttttctcacttgtaaagtcacccgcccagtaccctaggttaggcctaacggagactttgacaggactggatttttccttccaccagaagagaagccttttccgttggtttggggccacctctttgaccatgaccaatgtgatgttccgtttacagtgacttgctttgggggaggggaggctctcttaaccgattcccatgttgtacagtagatggttagaccttttgtatattagtgtgttttaagttattgatttgttttatataaaataatttatttttcaggtgccatttttcattttaactttgtttttacatgggtttgttttcaataaagtctgacactggtgtccaaaagtcaacaataaaatgaatcccattgtgttcttttgaagatgcctatgtaacttttaagctttttaaattattttcag

SEQ ID NO: 107216 - DNA, 587 bp, Homo sapiens
tttcgtcgggctccggaaagggcgggcataaggctacggatgggcgggacggagcagcccaccgcaaagtggcggtttacttgaggcggttaccttagtactccgagtagactgagtctgtggcgagctgcgggccgattcctggccagtgccatctcagccggagcaggcctcggggcctcagaagcaggcttttatctggcccgaggctcccagccgttcagcgcgtcttcccataacctataccgattattgggactctcggctgcagacacaggagtcacagatgctgggaagtatggcccgaaagaaacctcgaaatacctcaaggttgcccctggctttaaaccccctgaagagcaaggacgtgttggcagtgctggctgagaggaacgaggctatagtaccagttggggcatgggtggaacctgcctcaccaggtagttcggaaatcccagcatatacatcagcatatttaattgaagaagaactaaaggaacagctaagaaaaaaacaagaagctttgaaacattttcagaaacaagttaaataccgagtaaatcaacaaattacgttgagaaaacagc

SEQ ID NO: 107217 - DNA, 668 bp, Homo sapiens
gggaggggtgataatggaaccaggagggtgtggtggtcatggcccagtgagaggatgccaggctgtggccgtgccagactcagtgtgcctggccctggcatttcaggcagggaccactgaggggtgatgggagagatggggctgggtgagtggcatttccacaggcatccagaggggtgcgaaaaactgaggttggggaacagcaggggcagggaacagcctgtggagggtgtggtcatcagtgtcccccaccgacatggcacatccagcgagcccactgtgtccccagcacctgcggtgcagggggctggcaccttcaggggcgggcttcgtgcagacgtccacccagtcagtccccacaggtttatcaaacacaagtggggcgacaggacccacacttcggcgttggacgtgactcacgcggggagttggcttggagttcctttattcatccctatttgctttctgtctgtaatcctttgtaattccctggtttcatgatgtaattctaatggaaataaacccgaacctttcaaaattatgtaattaattgcattcagcttcaatgacaatgactaattatagtgatacctggtggcaaggcaggtacctactgctggggggctcctgtctgcttggtactgggactgccacttctgggcgcgtcg

SEQ ID NO: 107218 - DNA, 461 bp, Homo sapiens
ggcacgagccaaaacacaaatctagaattgcaaagccagcctttatttccctggcaggcagccttgccagaaggcagagaggcagttctgaatcattctctcattcaccagtggtgacatccttcagtccctcacatctctgacagagtgggagagaatggatatttggctgaccttggtgagacctggagctgcctctttcttccctaggggatcaccacggctctagggcattctaggatgaggtcagaccccttggccattggtgttattttttgtatagcttcagactgggttccagaacttaccattgaaaacagagcttttaggccaggtgtgagtggctcacacctgtaatcccagcactttgggaggccgaggcaggtggatcgcattgagctcaggagttcgagagcagcactgggcaacatggtgaaagcccgtctctaccgataaataca

SEQ ID NO: 107219 - DNA, 470 bp, Homo sapiens
ataccctgaagcttcaccggcgcagtcattctcataatcgcccacggacttacatcctcattactattctgcctagcaaactcaaactacgaacgcactcacaatctattttttcttaatgatttttttttttcttaaacagggccttgccctgtttcccagcctggggtgcagtggcgtgaacacgttcactgctgcctcagcctcctggacttaaccaaccaatcctcctgcctcagcgcgctgaggcagggagaatcaatctcttgaatctgggaggtggaggtttcagtgagcggagatcatgccattgcactccagcctgggcgaccaagagagagactccgtctcaaaaaaaaaaataaaaaagaaaaaaaaaaataagggttgccttggggaacgggatttcggagtttttgttccggcccatccctaatttttgggaggatttaaaaaggtttttttaaaaa

SEQ ID NO: 107220 - DNA, 997 bp, Homo sapiens
ctttaaatgcctattgtttattgggagaaggaaagaaacttttgtatgtctgacagagccccaaactcccctcccaaatcaactgaaaaagctttaaaaaaagacaggaaaaaaaggagtaagaaagcaaaaagaacagatgaaggaaaacttaacaacttttgggtggtttgattcctcctttgatttctttttcggttctcttttgtctgacctctctcctcccctccttcctctctcctcccctccttcctctctcctctcctccttcctgtctcctctctctccctttgctctcctctcttctctctcaatcttgttctttctgtgtctctcctcaaaccaaagtgttgcagtgaaggacacgagccattgaaatcagggtggggcctgacagccgtagtgtggcccctgccccttgttgggcaggagcagagagagaggagagccctgagaccgcagggctttggcctgggcagcttccactttctgccggacactctgaggagaggcagatggagctccaggcctcagcgttctcttttttccttgtctcccttctcccacccgggaaatgaaactgttgggctgggcgacggaggcagcagagactcggccaattgcaggggcctctgggtgccttgtccgggcagtggtgaagtagccgcccctcccaccccggcacgatggggcctggcacctcgtctacccaacctcaccggaatgtaagcatctccgctgaacgactccctgcccttaccctacctctgagtttgtccatgtttatttcctgaagagagaagggactggcaagagggcttgggccccagcccaagggtggagagggggccaagggctcctgaccaaataggaaggacatttgagcagagcaaaatgaaaggaattacaaccaaaaaccccctccgagaagacaggcagcatggaaggcatggtggagatgactcaaacaaaaactatgattctagaccaaaaagga

SEQ ID NO: 107221 - DNA, 829 bp, Homo sapiens
  misc_feature (1)...(829): n = a,t,c or g
tgagactctgatcacgtacaaactcaccatctatagagaagaccgcccaagtntgcccttgtttgaggccttcacagcatgtggttttgtgcatgattgtggtttgctgattcatccagaggaaacctgtgggttacagcctatttcttctgactacattgaagccattttacagtctgaactaaaaagatgtccatctggggacatgaaaggccagtggattgtgccttgccttagttgttcggacaacaggacgtgtgactggagagaaataacctggcagccccacaactgccaatatggtgtcctaactaagcctcaactccagcagtgcctgggaggaaggaagattctgttcattggagattcaaccaacagagggatcatgtactatcttattgaaaggctgaatgaaacgttgcaggaatggcagaaagtacatggcactaaattctatcacaacgtcaatggtgggaagactttgatcagttattcctactatccccagttctggataagcccttcattgagaccaacatttgaaaatgcacttgaacacctcttgcaaagatcacgtcccctagagaatactggccagactgtattggttgttggtggtgttcagtggcttaattccaatcacctgcaaattattcacaaagttttgaagagccctttcacgacccttaaccagccagttaccaaatcctgtttacaagctatatattttccacgtctttctcctacactacattccaactgccttgaccttgtttattcttttactaaatcattcaacatttattttgtggtccagttcttgaactaa

SEQ ID NO: 107222 - DNA, 1236 bp, Homo sapiens
cgaaaaatggcggggtctcctgagttggtggtccttgaccctccatgggacaaggagctcgcggctggcacagagagccaggccttggtctccgccactccccgagaagactttcgggtgcgctgcacctcgaagcgggctgtgaccgaaatgctacaactgtgcggccgcttcgtgcaaaagctcggggacgctctgccggaggagattcgggagcccgctctgcgagatgcgcagtggacttttgaatcagctgtgcaagagaatatcagcattaatgggcaagcatggcaggaagcttcagataattgttttatggattctgacatcaaagtacttgaagatcagtttgatgaaatcatagtagatatagccacaaaacgtaagcagtatcccagaaagatcctggaatgtgtcatcaaaaccataaaagcaaaacaagaaattctgaagcagtaccaccctgttgtacatccactggacctaaaatatgaccctgatccagcccctcatatggaaaatttgaaatgcagaggggaaacagtagcaaaggagatcagtgaagccatgaagtccttgcctgcattaattgaacaaggagagggattttcccaagttctcaggatgcagcctgttatccacctccagaggattcaccaagaagtcttttccagttgtcataggaaaccagatgctaaacctgagaactttataacacagatagaaaccacaccaacagagactgcttccaggaaaacctctgacgtggtactgaaaagaaagcaaactaaagactgcccccagagaaaatggtatccattgcggccaaagaaaattaatcttgatacatgagctctttctgtttattttgggagttgaaaataggcaccatcaacatttagattacagcctaattaatacctagataagacttcatttgaaataagaaataactcttttactagtgattcatttatacagatataatatctctgtgcggggatatgatataatattgtatttccttactgttttatctattgtaaataaaaagcattttaaaaagtattgacacaaagcccatcagtgggcattaaaaatattaaaagtgcagactttttactggtcctttaagtgccatcaactctcagctcccttgtagcttttgtggggatttaacaagtaacaaattctgttgtgtttccaatggtatacatctttctaggaaaaaaaaaa

SEQ ID NO: 107223 - DNA, 3091 bp, Homo sapiens
  misc_feature (1)...(3091): n = a,t,c or g
gaagtggtccctgtagaaccactgtggcaccgctactccgtgccgcgcccgtcgagcattgcgttgctgcattgcgccccaccgactccactatgttgaagaaattcgacaagaaggatgaggagtcaggtggaggctccaacccattccagcaccttgagaagagtgcggtactccaggaggcccgtgtatttaatgaaactcccatcaaccctcggaaatgtgcccacatcctcaccaagattctttatctcataaaccagggggagcacctggggaccacggaagcgaccgaggccttctttgccatgaccaagctctttcagtccaatgatcccacactccgtcggatgtgctacttgaccatcaaggagatgtcttgcattgcagaggatgtcatcattgtcaccagcagcctaacaaaagacatgactgggaaagaagacaactaccggggcccggccgtgcgagccctctgccagatcactgatagcaccatgctgcaggctattgagcgctacatgaaacaagccattgtggacaaggtgcccagtgtctccagctctgccctcgtgtcttccttgcacctgctgaagtgcagctttgacgtggtcaagcgctgggtgaatgaggctcaggaggcagcatccagtgataacatcatggtccagtaccacgcactagggctcctgtaccatgtgcgtaagaatgaccgcctagccgtcaataagatgatcagcaaggtcacacggcatggccttaagtctccctttgcctactgcatgatgatccgggtggccagcaagcagctggaagaggaggatggcagccgtgacagcccactgtttgacttcatcgagagctgcttgcgcaacaagcacgagatggtggtgtatgaagccgcctcggccatcgtcaatctgccaggctgcagtgccaaagagctggccccggctgtgtcagtgctccagcttttctgcagctcacccaaggctgctctccgctatgctgctgttcgtaccctcaataaggttgccatgaagcatccgtcagctgtgacagcttgtaatctggatctggagaacctggtcacagattcaaaccgcagcattgccacgctggccatcaccaccctccttaagacgggcagcgagagcagcatcgaccgcctcatgaagcagatctcctccttcatgtcagaaatctcggatgaattcaaggtggtggttgtccaggccatcagtgccctgtgtcagaaatatcctcgcaaacacgccgtccttatgaacttcctgttcaccatgctgcgggaagagggtggctttgagtataagcgcgctatcgtggactgcatcatcagcatcattgaagagaactcagagagcaaggagacagggctgtcacatctgtgcgagttcatcgaggactgcgagttcacagtgctggccacccgtattctacatctcctgggccaggaggggcccaagaccaccaatccctcaaagtacatccgcttcatctataaccgagtggtcttggagcatgaggaggtccgggcaggtgctgtgagtgctctggcgaagtttggagcccagaatgaagagatgttacccagtatcttggtgttgctgaagaggtgtgtgatggatgatgacaatgaagtaagggaccgagccaccttctacctaaatgtcctggagcagaagcagaaggcccttaatgcaggctatatcctaaatggtctgactgtgtccatccctggtctggagagggctctgcagcagtacactctagaaccatcagaaaaaccttttgacctcaagtctgtgcccctggccacggcgcccatggcagagcagagaacagaaagtacccccatcacagcagtcaaacagcctgagaaagtggcagctaccaggcaggagatcttccaggagcagttggcagcagtgccagagttccgcggtcttgggcccctcttcaagtcctcgcctgagcccgtggccctcaccgagtcagagacggagtatgtcatccgctgcaccaaacacaccttcaccaaccacatggtttttcagtttgactgcacaaacacactcaatgaccagaccttggagaatgtcacagtgcagatggagcccactgaggcctatgaggtgctctgttacgtgcctgcccggagcctgccctacaaccagcccgggacctgctacacactggtggcactgcccaaagaagaccccacagctgtggcctgcacattcagctgcatgatgaagttcactgtcaaggactgtgatcccaccactggggagactgatgacgaaggctatgaggatgagtatgtgctggaagatctggaagttactgtagctgatcacattcaaaaggtcatgaaactgaacttcgaagcagcctgggatgaggtaggggatgaatttgagaaggaggaaacgttcaccttgtctaccatcaagacacttgaagaggctgtgggtaatattgtgaagttcttgggaatgcacccttgtgagaggtcagacaaagtgccggataacaagaacacccacacgttgctcctggctggtgtgttccggggtggtcatgacatcctggtgcgctcccggctgctgcttttggacacagtgacaatgcaggtgacagccagaagtttggaggagctgccagtagacatcatcttggcatctgtgggataagaggcccagcctgcataggacctcatacccttccccaacactacctggaagttgtgccttcctcatgaaactggcagaaacccccttcccaagcttctgtattggaaaaacatttagggaatccttggcagatttttttttattattctgctcccaccctccccacccggggactacttgctggtgactttttttttttttttttttttaaataggggatgattttagcttgttcctaaatcttggctgttccacccttccagggnaagggacattgtaaatgaataaaacattctcaactcctcttgaatctatcccccaagaaaccatcttatccctgtaataaatcagcatgtatttattgaaaaaaaaaa

SEQ ID NO: 107224 - DNA, 920 bp, Homo sapiens
gctggctctgactcttcacccatcttcacccaggctggcccctttggtgaaactacaactcccaggggtctgtgcgcgagaaggcaggcgggtttttctaccggaagtccgctctagctctgggccctacaactgcaccctgagccggagctgcccagtcgccgcgggaccggggccgctggggtctggacgggggtcgccatgatccgctttatcctcatccagaaccgggcaggcaagacgcgcctggccaagtggtacatgcagtttgatgatgatgagaaacagaagctgatcgaggaggtgcatgccgtggtcaccgtccgagacgccaaacacaccaactttgtggagttccggaactttaagatcatttaccgccgctatgctggcctctacttctgcatctgtgtggatgtcaatgacaacaacctggcttacctggaggccattcacaacttcgtggaggtcttaaacgaatatttccacaatgtctgtgaactggacctggtgttcaacttctacaaggtttacacggtcgtggacgagatgttcctggctggcgaaatccgagagaccagccagacgaaggtgctgaaacagctgctgatgctacagtccctggagtgagggcaggcgagccccaccccggccccggcccctcctggactcgcctgctcgcttccccttcccaggcccgtggccaacccagcagtccttccctcagctgcctaggaggaagggacccagctgggtctgggccacaagggaggagactgcaccccactgcctctgggccctggctgtgggcagaggccaccgtgtgtgtcccgagtaaccgtgccgttgtcgtgtgatgccataagcgtctgtgcgtggagtccccaataaacctgtggtcctgcctggcaaaaaaaaaa

SEQ ID NO: 107225 - DNA, 444 bp, Homo sapiens
  misc_feature (1)...(444): n = a,t,c or g
ggctgaagtggagagatcgcctgagcccaggaggtcaaggctacagtgagccgtgactgcaccactgcactccaccctgggcagaggtggaggagacactgaagcgactgcagagccagaagggagtgcagggaatcatcgtcgtgaacacagaaggaggctgggagcccttgggacactgtggagacaggagcaggccccctgctcagggctgcccctgatcagttgggtggcctgaggcaactcctttccccgcttcagccctcaactgcctcgagtcctgtgatggtccagggaatctcttttgggcacttcttgctctaagacctgaaagacttttgtcactaagagagaaactgtcttctgggactggacattntgactccaaggagacaaccccaggggccaacagcctcagctgtgacccccaggcttccacatgaa

SEQ ID NO: 107226 - DNA, 2353 bp, Homo sapiens
gctgacaaaggagcggaggagcagtcgcagctgctttccgaggaagccggtgttgccgagattgccaaaatgctttggagtttttaactgaatctaagaaaagtccaaaatagatttgagactgtaaaaacagaaactgcagcaagggggattcagtgccaatgcatcaacaaaaaagacaaccagagttagtggaaggaaatcttcctgttttcgtgttccccacggagctcatattttatgcagatgatcagtcaacacataagcaagtgttgacactgtacaatccctatgagtttgccttaaagttcaaagttttgtgtactactccaaataagtatgttgtcgttgatgctgcaggtgcagtaaagcctcagtgttgtgtggatattgtgattcgtcatcgagatgttcgatcctgtcactatggtgtaatagacaaattccgtctccaagtttccgagcaaagccaaaggaaggctttgggaagaaaagaggttgttgctactcttctcccatcagcaaaagaacaacaaaaggaagaagaggaaaaaagattaaaggaacatttaactgaaagtttattttttgagcagtcgtttcaaccagaaaacagagctgtatcctcaggacctagtttactaactgtcttcctgggagtggtgtgcattgcagccctgatgctgcctacactgggggatgtggaatcgctggtgcctctctacctccacttaagtgtgaatcaaaaattagtggctgcttatatcttaggtcttatcacaatggccatacttagaacatgagcaaggatttcaattgacttctgaagtaaatctgtcttgaaaatatgaatgtggactgccttttatctctatttcactccattaacatgcaacaaactattgaatgatttcaaataattgcaaatgtataatatatattttaaattataatttaatttgaaggactgcagaacattattttacagacagcaaggatgcttctgagtgacacctaggaaattatttgaagaaattctttttatatctacacctgttgtgtaagaaactttaaaacattggttattttctcacctttttttctaattcactttgattgctaggggtcatgtatgcttcgaagttacaggactaaaagagcaaactgaccggcctaaaactaaaatgacatttattccctagctacaaacatcagcgttattatgttaattataccttgccctctatcattataaatggttgccatggtgtttctaaaaataagtgttttaccattaatgtgtagagggcaaacaaagcataaagtactaagggatcatgcttatcctagggtctcacagaagagaggacatatttaattaatcttgtgaattacagaacaggttgtggtccagacaccaagaatcataggggtttttttttaaaaaacctaatagaagtagggtgacctctctctttggtctaagagttctaaaggaaggtaggcatctgtttaattagttggttcaccctggctttacctctggttaatgctttgtgttaataggaaggaaaaatcactttatcttttcttccaagcccctccctgcctgacttacccagactgggattaccagataccaggtgatttatgtggagatgatttttcacctttaaactctaagccaagtgtaagaaactcttgatagctatgtctattttatatcagtcactgagactttttttttaagtttttatttattattaagacaactttgccaaaaaagtcccctaagcacaactatttacatttctttatagcctcttctgatctctaacacatatgcagttttaactgttattttcatagtaactgatcttttgtctaaggatttttacctgaaagcacaatgtattgagtctcttgaaaatcatctttcagatctttttacagaatgaacttatgcactgctactgtagtattctcaaggaatatatgtaaacacaaatgtatgcctgaggttggtttttgcagaaaaccagtctctggcttcttaaaaacttctatgtctagtcttccataggaaatccctcactgtttaaccatgtgaggagcctaagtcccctaagtcattaaacggaatcatgtctgtacattgtgtaatgaatgaaaagcacataaatgtaatctactttgaactttgtaaaaatgatgtgtggaggctattcttgtttctccatctcaagtcctgtgtgtgcacgtgtgtgcaagtgcacatgtgtgtgtgtaataacacattgtaaagaacagaaattactttaaaaaataaacagaaatggagacctgaaaaaaa

SEQ ID NO: 107227 - DNA, 1963 bp, Homo sapiens
ttttttttttaataagatatacatatttaatgattcaaggggaggagtgctaatgggagtcgcgtgagtggtccatggggctggggctctgccctagggttgccatggctgtggggacatggatgtggtctttgtcctgtggtccccaactctgggtctttctcaggactgcctcagtctcctccttcccaagagcataacagcgtcgcccacaccccgtggggcctctcacggcttcttggctttcttcacggaagatgagctggaggccgactcccgtcgctttctcgaattgggcgtgaggggtgcgcccaccacatcaatgatggtgtccttggggtcaggaccaagtccgggttcagtcactgccggctcagcagaggccgggcctgggcctgatgctggtgtggcagggccccctagcacaccagcccgggccagtgcctcatgacggtgccgcagcatctgcagctcatactcgcagttggcacaggcctgcttgagctcgtagagcagcaccaggtcgcttcgcagctcattgaacatgtgcaccagctcctccgtaggtgtcgggctcagctccacaccaagctccagcagcatctgttccagggccttgatcttcttctgtcccacagagcttggcagcttcatccgttggctccgcagcgtgacacctgcagacttgaagtctggaaacttgatgcctgcagtctcaggaacagccggcttctcagcctcctttttctggggtagcttctttttgggggccttgcgttccgtgcgccgctgctctgcagtggtgtctgccgctgtgatcagcttctgcaggtcctggctgcgtttctcccgctccttcttccgggcctcaatcttgcgcagctcctgtagcaggtactcctcctctgccacctgctctggggtccggttgtagagacgctcaagctgttccttccgccgtcgttcgtgcccagcatcaaatactggtatcttaaggtctgtgcctggcacagcccgcacgttggcaagcttagcacagatgtggtagtaccgctccttcaggtcttccacagaacgcttcttgaactgctggtggtcataccggtcatggataacaacaaaacgcaggtcaaagcggcggctgaggtcaaagaggtggtcagtttctgccttagtccaagcatcatcgtggagataaagctggtactcctgctccgagtacacaggcacctgcacagtcttattgaacctggcaaaggggtagtccttgccctcctccgctgcacgtcgccagtggaagaacattgctccgtccttgcgggccgggttggtgaatggcatccacttccaaggccgcaccttcttggagcccaacttggccttcactgtacggtatccctggccagtgtcactgggtagcagtgggggtgcatccttcttgtcagagtagagcaaggcatagacttcccggtgcatgccctcgggcctcttgaaagtcagtgtctcagaggacttcttggattttttcttgtccgggttgataatgtccttcttgctgatggtcccagaggctgcatccccttctggacccccgagttctagaatgtcccgtacatccgcgcccgtagccatcgcgcctgagagatgggggagccaccggaggtcaagggtcagtgcctgaagaaggaccaggctcaggtcagggggcggggccaatccagacctaagcggaggcgagttgaaggggcgggccaagaggagaagggtggtccaggtcaggtcggggatctgcctgtgcccctccgcttggatgttcctaacggccccttcagccacctgggccctcgcacttccgcacctgggtccggcagctgcagcccccactaccactcccccacgcgtccgcggacgcgtgggtcgcgccgggaatcagcgccgtcaaacgggctcaaaaccccatttc

SEQ ID NO: 107228 - DNA, 585 bp, Homo sapiens
caaacttatatcctttaattccagatgggggcaaagtatgtccaggggtgaggaacaattgagacatttgggctggagtaggttttgaaagtcagctctctgtgtgtgtgtgtgtgtgagtgtgcgcgtgtgtttgtgtgtgtgtgagagcgtgtgtttcttttaacgttttcagcctacagcatacagggttcatggtggcaagaagataacaagatttaaattatggccagtgactagtgcttgaagaagaacaactacctgcatttaatgggaaagcaaaatctcaggctttgagggaagttaacataggcttgattctgggtggaatcttggtgtgtaattatctggaggccatgctggagctctcagctcactatgggttcatctttattgtctcctttcatctcaacagctcctgggaaatgtgctggtgaccgttttggcaatccatttcggcaaagaattcacccctgaggtgcaggcttcctggcagaagatggtgactggagtgtgcagtgccctgtgcttcagataccactgagctcactggccatgatgcagagctatcaaggataggctctg

SEQ ID NO: 107229 - DNA, 950 bp, Homo sapiens
  misc_feature (1)...(950): n = a,t,c or g
ggatccattcttatcaacagaatgtaacctccaaggaccttgttagtcttgttcactgccaggcttctaatactaaaaatagtgggcataaagaagctgctctataaatatttgtggaaaaaaagaaaaagagaaaggaaggcttgctgttatattaaaaagcaatggggctggtaagctccaacccagtgtcatgccaaagacaaaagatcttcaaaaaaagcaatggnnnnnnnnnnnnnnnnnnnnnnnnnnnnnnnnnnnnnnnnnnnnnnnnnctaggcgaattcacttactgaccggcctgggctgctctgagacatggaggaagccagtgaaggtggaggaaatgatcgtgtgcggaacctgcaaagtgaggtggagggagttaagaatattatgacccagaatgtggagcggatcctggcccggggggaaaacttggaacatctccgcaacaagacagaggatctggaagccacatctgagcacttcaagacgacatcgcagaaggtggctcggaaattctggtggaagaacgtgaagatgattgtccttatctgcgtgattgtttttatcatcatcctcttcattgtgctctttgccactggtgccttctcttaagtaacagggaacctctcccacctgcccttcttttcagggacaaccctccataaatgtgtgccaagagggtctcctttcctgtcttcctctacagagaatgctgctcggtcctcctacccctcttcccgaggccctgctgccatgttgtatgccccagaaggtaccttggtcccccggaaggagagaaaaaagagagatggactgtggctgcatttcttgggtccttagagtgggctggagagacctagagggcccagcatgtggctgggaaactgttggtggccagtgggtaataaagacctttcagtatccctacaaaaaaaaaa

SEQ ID NO: 107230 - DNA, 2162 bp, Homo sapiens
ttttttttttttagtagcacgattattttattatatgctttataaaaaaacaaacacccaaagacatacaacacaccgccctcaccccccagcggccattagggagggggcttatacttttcctaatgtagatctggccatcttataaagcagaccacattatttgtttccatatatacctgtagatatttctctcccctcaaatatttatatctcgactaaaaaaaggaggtgcaaagagtatataaagataaatgagattttcttgctgttgttatagtacaaacaccagatgactaccagtggagtaacagggcaaaacaaaaacacaaaccccaccttcagtgaggaatggaaggtctgttaccgacctcaagtagctgaatcacctgctgtaactggcacctccctgacaatcatgggtttgtagggacatgggccaggtgatggcttctacttgtttccagaaggctaatgtgtcctacaccctttcttagtaactaaagacgaactacgggagaacccagtatttggattctgcccagaggtattaaatgcacaaggaaaaattagttatgtccaagtagcaagcaataatatttttaaaccaacatggttaaatgttaagatttgtagaaatcaaaatatttattcacataattttaaactaaagttgaagctaatatatcttccgtggtaatgatttaagtgcaagtgatgcttggctttctttcacattcatttcttttcttctgagtgaaggcatatcagttattcttgaacaagtcaatacagctctgcaaaagggagacattgttcctggcatgttttatttccagttcagacatttcaattagattctttctaaatgctgccactctcttccgtttgaaatttatcagttcttcttttgcagattcggaaagttgttcaaatttctggcagcactcctgctggtgtgcctcagccaacttgacgtctttgctctttaaccgggccttatccagagctttgtttgagttctcatagtcaatgagggctttggtgcgtctgtataagagatccttagcagcttcaatgttgagcatgtagtatcggaggagctctgttagcttcaaatcttcatctgatgaaactcgaccctctactttccttagtttttcaaatagctcagcaaccttcaataggtactttttgatgactgtgggctcttctaaagccaggctatgtaagcaggctgcggtgtggatatagtcatcggcaacatttttatgagatctggtcattttgtcagctttcacacaagaatctttgatcctattgtaatagttaataaggaagttcttctcttgctcaaagaagtcatctacctccttaactccagtaaaaaggacttcatcagcacttttcaccacacttttgaagaagccaccaaacatctctttagtatttttccgcctaacacttagatcctgatcatattccaggaaaacatgaaagttgcgatctttactgagaacagggtgagaagaaagccgctgaagaaagacttcatgggaggacacagtcttcttaaacacagcgagatactcagcttccagttcttgtttcatcttggcaaattcttctttggtcatagacccttcaccttctcccagtttctgcatcttctctcgaggaccatcaaagtcgggcttcgtaggagcaggtggaataataagcccagcatagtctgttgtttcaataagagtgtcatgtagccacacaaagtcttcatgttgccttgtaacagaaaactctgggctctgaaacgtgggcagtgtggtctttgtgtgcactgtaaatttgactttgtctctctcactgagcgcatcaggtatgtcaatctgaagcgagggatcaacattcaggtccacagatacagatctcagcttgctgcggtcctcctcctgctgctgcagcaactcgggaaccgcggccatggcgacgcgggactcgagcaggggccgcctggccttgctccgctccacgaggaggccgccaaccgcagggccgcgacacggacgggaagcaacggacactctcccagcaagacgcgtctagagaaagaccgcgtttcggtgcggggggaatttattactcagcccgagtccaagatggca

SEQ ID NO: 107231 - DNA, 803 bp, Homo sapiens
ctgaggtgagtgtttctcctgcgttgctccgagggcccaatcctcctgccatcgccgccatcctggcttcgggggcgccggcctccaggcccccgggaggagaactcctagggctactaaatcctcgctggagggggtggcttcttatgcgggaggacgtggcggagggcctgactttgggagccggggtcagtcggcctctgaggtgatctgtgaaaatggttcgctattcacttgacccggagaaccccacgaaatcatgcaaatcaagaggttccaatcttcgtgttcactttaagaacactcgtgaaactgctcaggccatcaagggtatgcatatacgaaaagccacgaagtatctgaaagatgtcactttacagaaacagtgtgtaccattccgacgttacaatggtggagttggcaggtgtgcgcaggccaagcaatggggctggacacaaggtcggtggcccaaaaagagtgctgaatttttgctgcacatgcttaaaaacgcagagagtaatgctgaacttaagggtttagatgtagattctctggtcattgagcatatccaagtgaacaaagcacctaagatgcgccgccggacctacagagctcatggtcggattaacccatacatgagctctccctgccacattgagatgatccttacggaaaaggaacagattgttcctaaaccagaagaggaggttgcccagaagaaaaagatatcccagaagaaactgaagaaacaaaaacttatggcacgggagtaaattcagcattaaaataaatgtaattaaaag

SEQ ID NO: 107232 - DNA, 2713 bp, Homo sapiens
  misc_feature (1)...(2713): n = a,t,c or g
tcacgatgcggttaagctgctcctgctctctctctaaattattgcttttaaacttatctttaagcatatctttgtctttctttttattttctttgctgggactcttgaaggcgtgtgcttcggcatctccagagtcctctctctctctctgccagcagcctccgncctccccactctgtgaggtgtctgttccatctttctgctttcgagttttctgcaagaagcacaagaagcacaagtcggacaaacacctctacgaggagtatgtagagaagcccttgaagctggtcctcaaagtaggagggaacgaagtcaccgaactctccacgggcagctcggggcacgactccagcctcttcgaagacaaaaacgatcatgacaaacacaaggacagaaagcggaaaaagagaaagaaaggagagaagcagattccaggggaagaaaaggggagaaaacggagaagagttaaggaggataaaaagaagcgagatcgagaccgggtggagaatgaggcagaaaaagatctccagtgtcacgcccctgtgagattagacttgcctcctgagaagcctctcacaagctctttagccaaacaagaagaagtagaacagacaccccttcaagaagctttgaatcaactgatgagacaattgcagagaaaagatccaagtgctttcttttcatttcctgtgactgattttattgctcctggctactccatgatcattaaacacccaatggattttagtaccatgaaagaaaagatcaagaacaatgactatcagtccatagaagaactaaaggataacttcaaactaatgtgtactaatgccatgatttacaataaaccagagaccatttattataaagctgcaaagaagctgttgcactcaggaatgaaaattcttagccaggaaagaattcagagcctgaagcagagcatagacttcatggctgacttgcagaaaactcgaaagcagaaagatggaacagacacctcacagagtggggaggacggaggctgctggcagagagagagagaggactctggagatgccgaagcacacgccttcaagagtcccagcaaagaaaataaaaagaaagacaaagatatgcttgaagataagtttaaaagcaataatttagagagagagcaggagcagcttgaccgcatcgtgaaggaatctggaggaaagctgaccaggcggcttgtgaacagtcagtgcgaatttgaaagaagaaaaccagatggaacaacgacgttgggacttctccatcctgtggatcccattgtaggagagccaggctactgccctgtgagactgggaatgacaactggaagacttcagtctggagtgaatactttgcaggggttcaaagaggataaaaggaacaaagtcactccagtgttatatttgaattatgggccctacagttcttatgcaccgcattatgactccacatttgcaaatatcagcaaggatgattctgatttaatctattcaacctatggggaagactctgatcttccaagtgatttcagcatccatgagtttttggccacgtgccaagattatccgtatgtcatggcagatagtttactggatgttttaacaaaaggagggcattccaggaccctacaagagatggagatgtcattgcctgaagatgaaggccatactaggacacttgacacagcaaaagaaatggagcagattacagaagtagagccaccagggcgtttggactccagtactcaagacaggctcatagcgctgaaagcagtaacaaattttggcgttccagttgaagtttttgactctgaagaagctgaaatattccagaagaaacttgatgagaccaccagattgctcagggaactccaggaagcccagaatgaacgtttgagcaccagaccccctccgaacatgatctgtctcttgggtccctcatacagagaaatgcatcttgctgaacaagtgaccaataatcttaaagaacttgcacagcaagtaactccaggtgatatcgtaagcacgtatggagttcgaaaagcaatggggatttccattccttcccccgtcatggaaaacaactttgtggatttgacagaagacactgaagaacctaaaaagacggatgttgctgagtgtggacctggtggaagttgaggctgcctggtatttgattatatattatgtacatactttttcattcttaacttaaaaatgcttttcagaagatattaaatatttgtaaattgtgtttttaattaaactttggaacagcgaatttggatgttccagaggttggacttgtattaggtaataaagctggacctgggactcgtgaggaaggaatgtgcttggggctgttgccatacctgtgcagcattctttcaaaatagtgccttccaatgcttcttccttatgtcccacagacaggatcatcactaagaagcgttcttaaaacggccccatccagtgagattttccgttatacgaacatacttgaaaaaattttagaatttactactgtggttctgcccctgcatacccagtgggaatgatgcccttgtatgggtaattaggcacctcccacccacccctgacaaaagcacactgggagttttatagcactgtcacatggctagtgttcttttttggttttttccgttttttaaagaaagaggagttacttagtactatagcaa

SEQ ID NO: 107233 - DNA, 1105 bp, Homo sapiens
  misc_feature (1)...(1105): n = a,t,c or g
tttaatattcaaaatcctcagccataaaaataaaggccttttatttggtttttctatgccagtacagaaacatctggacaacactcttgagcctgcagaggctcacggccacacccacttctgccgcagggactgtctgttgaggagccgaaccgttgaggcacagtagccaggccctcccgagggctccagaagctctaggtttacggggtcaccttcttgtaggtgacgtgaagatgctgagtcattggctgtgtcgtggttgccatggagaccgtctgctcaagtttgccttcagaattcagcctgaacttccgggtgatctgctctacgtggggctccttggcgaaggagatcctggcgatggagtgggatgcgatgcacagctcctgcccgttcacctcgccctcctccacttccaccacgcctgtgttctgggcgctgacaaaggccaccttgttggtgtcgggcttgaggcgaatgaagccacactctctgtgcatcggcttgcgcgtgtccgggtggaaggagttgaacgagaagttcagcatgggctggcccacgtgggagatgtgaacctcctccaggtactggaagggctgcagtgtggggtaggtcccggctccaggtgggtccgacagccaggtgcccagcatccaggacagtggctccaccactgggttcatcttggggggctcgcggctgggcgacagcaggctacttggataggggacgctcactctcctcagctcatccagcttctcctgtagcttccgcacctggctgtcggagcggctgaccctctgccgcaggctcttcagctcgccgttcttcttctccacctgctcccgcaggcagcacacctggctcttgttctgccgggaggagaagcagtaggagtgcagtgagtcgatgagcttgcaggcccctgacgccgacaggatgacctcgttgatggacatggggctggcgtcgctgtgctcgctctgcacggcttccgtggctggctttggggtgacgtcggcaggaannncaaagggnctctggnaaggcttctcgggaatgcctccaacgnnctagggtctcaattncccctnnnaccacg

SEQ ID NO: 107234 - DNA, 2304 bp, Homo sapiens
ctgccgaggatccgagggtcaggctgcagaagcccagaatcccaccccagtccccaagtacagaggtgaggggaagcgaggcgaacgaggggacgtcccccgaccccctagccgcagctcggccggggcgtccgtgacgtcagcacgaccgtttgtgggaggcggaggcccctgctgtcggggttcggaatgagagcggctccgggtcgcggggttcactggcctcctcttgagcttcccaacccaccttgggctccgtgttgggcatggctaaggcggagatgggcggaacttgtgggaagttcgacagctcctccgctgtgaaacttggcgtctaagtcatcccgtggtttctatggaggtgcggccgaagggaggctctgtcgtcgcctaagcaatcgccccacctgcgctgaggtcgctgtcaagatggagtttccaacccagtaaatccaagggccagaccgtgacctcataaagcatgatctccttctgtccagactgtggcaaaagtatccaagcggcattcaaattctgcccctactgtggaaattctttgcctgtagaggagcatgtagggtcccagacctttgtcaatccacatgtgtcatccttccaaggctcaaagagagggctgaactccagttttgaaacctctcctaagaaagtgaaatggtccagcaccgtcacctctccccgattatccctcttctcagatggtgacagttctgagtctgaagatactctgagttcctctgagagatccaaaggctccgggagcagacccccaacccccaaaagcagccctcagaagaccaggaagagccctcaggtgaccaggggtagccctcagaagaccagctgtagccctcagaagaccaggcagagccctcagacgctgaagcggagccgagtgaccacctcacttgaagctttgcccacagggacagtgctgacagacaagagtgggcgacagtggaagctgaagtccttccagaccagggacaaccagggcattctctatgaagctgcacccacctccaccctcacctgtgactcaggaccacagaagcaaaagttctcactcaaactggatgccaaggatgggcgcttgttcaatgagcagaacttcttccagcgggccgccaagcctctgcaagtcaacaagtggaagaagctgtactcgaccccactgctggccatccctacctgcatgggtttcggtgttcaccaggacaaatacaggttcttggtgttacccagcctggggaggagccttcagtcggccctggatgtcagcccaaagcatgtgctgtcagagaggtctgtgctgcaggtggcctgccggctgctggatgccctggagttcctccatgagaatgagtatgttcatggaaatgtgacagctgaaaatatctttgtggatccagaggaccagagtcaggtgactttggcaggctatggcttcgccttccgctattgcccaagtggcaaacacgtggcctacgtggaaggcagcaggagccctcacgagggggaccttgagttcattagcatggacctgcacaagggatgcgggccctcccgccgcagcgacctccagagcctgggctactgcatgctgaagtggctctacgggtttctgccatggacaaattgccttcccaacactgaggacatcatgaagcaaaaacagaagtttgttgataagccggggcccttcgtgggaccctgcggtcactggatcaggccctcagagaccctgcagaagtacctgaaggtggtgatggccctcacgtatgaggagaagccgccctacgccatgctgaggaacaacctagaagctttgctgcaggatctgcgtgtgtctccatatgaccccattggcctcccgatggtgccctaggtggaatccaggtgggaagagcttgtgaggcttaagcctctcgccccttgccctcacccgagccctgccccaggctccaggagacacttcccagaggctgttccacgttcataccagggcccagcttcccagggagacactgggtttttccgcacggtccttgaacttcccagcctcaaggaatggcaagtagcagaaacccggctcaacttggctttaaaaaaagtggggattgattggctgttgtagctagaaaattacaagggggagcttcaggcacaacgggattcagggcctcaaaaatagcatcaagacgttggttgtctctcgccatcttctgtcccttcttgcatccatgcctccctctgtccttccacccggccacctgtagtctctac

SEQ ID NO: 107235 - DNA, 1223 bp, Homo sapiens
cgtcgactttttttttcaaggagtgggaaggttttaatgagcatcccagagggaccaggggatacaaactccaaatccagcctttatatcatcattatttcaagcaacaggaggaggctcagccttgcttagctcattcccagatgaagaggcagctggagggaagtccctgaaagtgcctctctacccagcagaggggctaagggaaagtggagaggtctctgctgctgctgctgctgctgctgctgctgctgctgctgttgctgctaccactgccaccaagagcagggagacctcaagcaccaagctgacctttggaggtcaggacggacccagaatcaggcaggaatttggcaggaacatcagacattggaaggttagatgagactgaacaggtgagaaaactcttagggtccccagacagcattgagatctcacagaggggccccaagggcctgcgactccaggagctgagaccccccagggagggaggtacctctagactgagacactcacaaagggaccccagttcagcaagggtcagaggaaggtctggagggagaagagagtaaagggccctgggtgggcaggaggctgaggagggagcctggggagagcaccagggcggggcatcaggccagtgcctggaaggtgtggccaaaggggtctctagctgctgctctgctgctcctgctcatggatgagtttggcgatggggccggtgatgccgcctatcaaggtccagtactcatcgaagctgatgcgcccatcatgattggcatccaggttctggatgagcttatccgcagccttccggttccctgtgtcctggggaggaagcagggtcagcaatgcgacagcatgtggttcagctctttctggagcatctcgcggaagctgctcttgctgatcttgttcttgaccaggctgtacttagacacatatttgtagaagttttccaccaggacaatgactgccttctccagctccgtgtagcagtctgacatctccctgcttcgcctgctggcggggcctgctgcctcagtctgcctcctctccagcagggctctggggcctgggctctggcactgccaagcagctccctgcgctcagcccagccgggactcctccccgctgcactcccagaatctgtcccactccctcccagccctgcccgctgagctggctcagtggggagatagtggctgagctccttcttgact

SEQ ID NO: 107236 - DNA, 2162 bp, Homo sapiens; identical to SEQ ID NO: 107230

SEQ ID NO: 107237 - DNA, 4572 bp, Homo sapiens
atgtctacatcccagtctccttgtgaatctatttgtgactatgttacctctcatgataaaagcaactttacagatatgattaaattaaatatcttgagatgtgaggttatcctggattatccagcgcctggaggcggctccttgggtgctaagcattgttgcagctgctacactgtgagtagtggtgtaacagaaggagaaaggaatgctggagaaaaaggggtcaagctgaacgcagacggtgcccgcatccggggaaccccgggaaggggaaggagggcggaggcggaggccagttccccagctccagccgccgtcgctgctgcctgtgtagttgcagccgcggccgcctcccgccagctcgcctcggggaacaggacgcgcgtgagctcaggcgtccccgccccagcttttctcggaaccatgaaccccaactgcgcccggtgcggcaagatcgtgtatcccacggagaaggtgaactgtctggataagttctggcataaagcatgcttccattgcgagacctgcaagatgacactgaacatgaagaactacaagggctacgagaagaagccctactgcaacgcacactaccccaagcagtccttcaccatggtggcggacaccccggaaaaccttcgcctcaagcaacagagtgagctccagagtcaggtgcgctacaaggaggagtttgagaagaacaagggcaaaggtttcagcgtagtggcagacacgcccgagctccagagaatcaagaagacccaggaccagatcagtaacataaaataccatgaggagtttgagaagagccgcatgggccctagcgggggcgagggcatggagccagagcgtcgggattcacaggacggcagcagctaccggcggcccctggagcagcagcagcctcaccacatcccgaccagtgccccggtttaccagcagccccagcagcagccggtggcccagtcctatggtggctacaaggagcctgcagccccagtctccatacagcgcagcgccccaggtggtggcgggaagcggtaccgcgcggtgtatgactacagcgccgccgacgaggacgaggtctccttccaggacggggacaccatcgtcaacgtgcagcagatcgacgacggctggatgtacgggacggtggagcgcaccggcgacacggggatgctgccggccaactacgtggaggccatctgaacccgcagcgcccccatctgtcttcagcacattccacggcatcgcatccgtcctgggcgtgacccgtccattcttcagtgtctctgttttttaaaacctgcgacagcttgtgattcctacccctcttccagcttcttttgccaactgaagccttcttctgccacttctgcgggctccctcctctggcaggcttcccccttgatcgacttcttggttttctctctggatggaacgggcatgggcctctctgggggaggcagggctggaatgggagacctgttggcctgtgggcctcacctgcccctctgttctctcccctcacatcctcctgcccagctcctcacatacccacacattccagggctggggtgagcctgactgccaggaccccaggtcaggggctccctacattccccagagtgggatccacttcttggttcctgggatggcgatggggactctgccgctgtgtagggaccagtgggatgggctctacctctctttctcaaagagggggctctgcccacctggggtctctctccctacctccctcctcaggggcaacaacaggagaatggggttcctgctgtggggcgaattcatcccctccccgcgcgttccttcgcacactgtgattttgccctcctgcccacgcagacctgcagcgggcaaagagctcccgaggaagcacagcttgggtcaggttcttgcctttcttaattttagggacagctaccggaaggaggggaacaaggagttctcttccgcagcccctttccccacgcccacccccagtctccagggacccttgcctgcctcctaggctggaagccatggtcccgaagtgtagggcaagggtgcctcaggaccttttggtcttcagcctccctcagcccccaggatctgggttaggtggccgctcctccctgctcctcatgggaagatgtctcagagccttccatgacctcccctccccagcccaatgccaagtggacttggagctgcacaaagtcagcagggaccactaaatctccaagacctggtgtgcggaggcaggagcatgtatgtctgcaggtgtctgacacgcaagtgtgtgagtgtgagtgtgagagatggggcgggggtgtgtctgtaggtgtctctgggcctgtgtgtgggtggggttatgtgagggtatgaagagctgtcttcccctgagagtttcctcagaacccacagtgagaggggagggctcctggggcagagaagttccttaggttttctttggaatgaaattcctccttccccccatctctgagtagaggaagcccaccaatctgccctttgcagtgtgcagggtggaaggtaagaggttggtgtggagttggggctgccatagggtctgcagcctgctggggctaagcggtggaggaaggctctgtcactccaggcatatgtttccccatctctgtctggggctacagaatagggtggcagaagtgtcaccctgtgggtgtctccctcgggggctcttcccctagacctccccctcacttacataaagctcccttgaagcaagaaagagggtcccagggctgcaaaactggaagcacagcctcggggatggggagggaaagacggtgctatatccagttcctgctctctgctcatgggtggctgtgacaaccctggcctcacttgattcatctctggttttcttgccaccctctgggagtccccatcccattttcatcctgagcccaaccaggccctgccattggcctcttgtcccttggcacacttgtacccacaggtgaggggcaggacctgaaggtattggcctgttcaacaatcagtcatcatgggtgtttttgtcaactgcttgttaattgatttggggatgtttgccccgaatgagaggttgaggaaaagactgtgggtggggaggccctgcctgacccatcccttttcctttctggccccagcctaggtggaggcaagtggaatatcttatattgggcgatttgggggctcggggaggcagagaatctcttgggagtcttgggtggcgctggtgcattctgtttcctcttgatctcaaagcacaatgtggatttggggaccaaaggtcagggacacatccccttagaggacctgagtttgggagagtggtgagtggaagggaggagcagcaagaagcagcctgttttcactcagcttaattctccttcccagataaggcaagccagtcatggaatcttgctgcaggccctccctctactcttcctgtcctaaaaataggggccgttttcttacacacccccagagagaggagggactgtcacactggtgctgagtgaccgggggctgctgggcgtctgttctttaccaaaaccatccatccctagaagagcacagagccctgaggggctgggctgggctgggctgagcccctggtcttctctacagttcacagaggtctttcagctcatttaatcccaggaaagaggcatcaaagctagaatgtgaatataacttttgtggaccaatactaagaataacaagaagcccagtggtgaggaaagtgcgttctcccagcactgcctcctgttttctccctctcatgtccctccagggaaaatgactttattgcttaatttctgcctttcccccctcacacatgcacttttgggcctttttttatagctggaaaaaacaaaataccaccctacaaacctgtatttaaaaagaaacagaaatgaccacgtgaaatttgcctctgtccaaacatttcatccgtgtgtatgtgtatgtgtgtgagtgtgtgaagccgccagttcatccccttagaggacctgagtttggggagagtggtgagtggaagggaggagcagcaagaagcagcctgttttcactcagcttaattctccttcccagataaggcaagccagtcatggaatcttgctgcaggccctccctctactcttcctgtcctaaaaataggggccgttttcttacacacccccagagagaggagggactgtcacactggtcttctctacagttcacagaggtctttcagctcatttaatcccaggaaagaggcatcaaagctagaatgtgaatataacttttgtggaccaatactaagaataacaagaagcccagtggtgaggaaagtgcgttctcccagcactgcctcctgttttctccctctcatgtccctccatggagaaatgactttattgcttaatttctgcctttcccccctcacacatgcactttttgggcctttttttatagctggaaaaaacaaaataccaccctacaaacctgtatttaagaagaaacagaaatgaccacgtgaaatttgcctctgtccaa

SEQ ID NO: 107238 - DNA, 476 bp, Homo sapiens
  misc_feature (1)...(476): n = a,t,c or g
gtggcgacggtggcggacacttggggtctggacgcaacggcggcgggagcatgaacgcccctccagccttcgagtcgttcttgctcttcgagggcgagaagatcaccattaacaaggacaccaaggtacccaatgcctgtttattcaccatgaacaaagaagaccacacactgggaaacatcattaaatcacaactcctaaaagacccgcaagtgctatttgctggctacaaagtcccccaccccttggagcacaagatcatcatccgagtgcagaccacgccggactacagcccccaggaagcctttaccaacgccatcaccgacctcatcagcgagctgtccctgctggaggagcgcttccgggtgagggcggggcctggaggggcagacggngtgggctggacactggcccgtgtgcccaggcctgggacagccctggcctggttctttggaggtcctcaaggagaggcggcg

SEQ ID NO: 107239 - DNA, 618 bp, Homo sapiens
agcaggccaacgggactacgggaagcagcgggcagcggcccgcgggaggcacctcggagatctgggtgcaaaagcccagggttaggaaccgtaggcatgctgcgccccaaggctttgacccaggtgctaagccaagccaacactggaggcgtccagagcaccctgctgctgaataacgagggatcactgctggcctactctggttacggggacactgacgcccgggtcaccgctgccatagccagtaacatctgggccgcctacgaccggaacgggaaccaagcgtttaatgaagacaatctcaaattcatcctcatggactgcatggagggccgtgtagccatcacccgagtggccaaccttctgctgtgtatgtatgccaaggagaccgtgggctttggaatgctcaaggccaaggcccaggctttggtgcagtacctggaggagcccctcacccaagtggcggcatcttaacggcattggtggaagctggggtcagaaaagagaaatgaccatttggaggggcggggcctcctagaagaaccttcttagacaatggggggaggatgggactttgttttttccaagaataaacttcaactcctgtcaaaaaaaaaa

SEQ ID NO: 107240 - DNA, 1430 bp, Homo sapiens
ttttttttttttagtttataatgttttactatgatttagggcttttttttcaaagaaccaaaaattataagcataaaaactcaggtatcagaaagactcaaaaggctgtttttcactttgttcagattttgtttccaggcattaagtgtgtcatacagttgttgccactgctgttttccaaatgtccgatgtgtgctatgactgacaactacttttctctgggtctgatcaattttgcagtagaccattttagttcttacggcgtcaataacaaatgcttcaacatcatcagctccaatctgaagttcttgctgcattgtgtcaaaagaaatttccttattttctactgccattcccataaaagtaagtagtctcatttttgccatattctgttcatgtaacaggccaagtgaatcaatgaagtctttattattctgataaaacttgacatatgatgccaatttagcactcacaaaaatggttaaaagatcatgaataagctcgccttccaaaaacttgactggttttaaagtaagaaggtggtcaaaaagaaatgcatttggatctttcaatgctcgtacaatacacctgtgggcatcaactcgagcctgggaagcattgtcctctgtgtaacttccgagcaattccaccatgacttttgaagcagcatcactcttcttacaatccacaagtgcctcataaagtagtcttaaaagggtgtgctttttttcagtggtgagattccagtcagaaatccattttctaacttgatccagctcagttgggatgtactggatggccccacaagatgctgccactttaataaggctgcaatacactgtgtatcttacaggagtattcttatccatcccgtggaaaaggttgcttaacaactgcagtctcagagacgggcgttcaccttcgcgaaatttgaccagcttttcacataggctttcaatcaaagcttcttgcttgtctggttccaggatcaagagtagggataccacactgttcatcacactttcaacatctttatcatcctccttcagacacacatcacaggcttcaataatttgagctaaatcaacatgaagtccaccttccgagttctcttctgaaatctcagctcctttagatttcagataagcacgaagctcagcagcctgatcttcttcactgatgtcgatgaaggccgggacgctcatggtgcaggcccgggcacagcggacactccactcgcaagaccacgccgaccggaaaagggaactgggccgcgcgacgctgctggcgcaactgcttccgggccaaagggactgtgttccaccagtgtagcatcagtgtcagagcagcagttccttaatgaatgtttttggaatgtactgtacacgtcttatgtgtcagataccattccagatgcttttgatacacgg

SEQ ID NO: 107241 - DNA, 2498 bp, Homo sapiens
acgacagcgagcgggagaagcggggtcaaagggagcactatgtctgcggaagtccccgaggcagcctccgcggaggagcagaaggaaatggaagataaagtgactagtccagagaaagcagaagaagcaaaattaaaagcaagatatcctcatctgggacaaaagcctggaggttcagatttcttaaggaaacggttgcagaaagggcaaaaatattttgattctggggattacaacatggctaaagcaaaaatgaagaacaagcaacttcctactgcagctccggataagacggaggtcactggtgaccacattcccactccgcaagaccttcctcaacggaagccgtcccttgttgctagcaagctggctggctgattaagaggctgaactgcatgaatctgctaaatctcattatttctccttaatatgttacttatctactttttatttcctttcattcactagtcatttgagactgacagctttgcaggtagcagtagtgtgtgctgctattgtggaatatacgtgtgtagagtttttgattagtttaacagtgcactggtgaagaggacatgttagagcaacataagtaaactacttgaaaatagttgtatatattacctaacttctagtgtagtactggttctaacaagtaacaagcaagttttaaaattttaatgttttggctttcattacttcatcttaattatagctttgtatgttactcttatttaatataatctctattgtattgatttcttctgtatttaccttttggattttgtaaaacagaagtttaagaccacaagttagaagaaaggtcacatatttcaaacacaactagatggggctctgaaagatttgtatctctgtgcttgaacttgaatggccttaaacctgtttcagctttaacagtagaattttacttgggcaatatttgcccattctggtgtaacttatgtgactctagtgcttaacagctgccgttgaagctaatattcagttctgtagagttagaataccttttgttgttgaagatgtgaatgaagtatgcatgtgcattaactgttgaattcacttttgtgccatttttgtaaatacagtagttttgcacaacctctcacaaatgtctgtattaatttcacatacttaaaaagtagataatgtgccaaccagaagcacaagagttcctacacaaaactctgtaaatcattatagcttttgtataataagagtagtttacaatctcgggcttatagaataccaaactgaaatcttagttcaatctgccatagacttaagcttttcatttgttactaatatccatgacattcagtggccttgtgcaaatacgatatgttgcttaggcatatcttttgtcctatgcagaacctttcattttgatttttatgaaagttgcaattcatgtaatttatataaactttttaaatgtagaaactttttacttccacactcagttttggagaccctagaataaaaggcttcaatactctgcattccatgccctctgccacctgcttttttttcccctttgttctttgactcaaatggtattgagctgtttgttgtatatggaagcataggtgtctatatccttactcttttatataacacaataatggcgttttccttctaatttctcagttgttaacttctttctcttttttttttaggatagggccttgctctgtcacctgagctctagtgcagtagtgcaatcacagctcactgcaaccttactcctaggctcaagttaactattcttgatcctttattattactaatattctacaattgtttaaataaaaggaactttataatgaaacggttcggaatactggctcaagaacctatgtcaagatgagctgaattttggtaaattattttaggaattatgacaagctaattgaattaggcttgtgacaattagagtaatttacatgacaggtaaaactcctattaaaaatgtttagatgtttgcttctgtagatgtcactttagtaaaataccaatttagttttacttgtggcttatctagttagaacttagcagactttactgggacaagtttactgctcttgtaggagctcctctcacaagtagttgtaatgctgtagcatgatactcaggatcagtagcttgagatgttactatttttctcttcatctttgacttgcagagagcctcccgtttttggatccaggcatcttttctgaatcctggttccatcagtatacctgctctcctatgaccccaaatcatagtcaatggtgcctcaaacatagcaccttaagttaaaggctgcctagtgctctgaggaaagcttgctgattatcttcctgatctactcaccccaaaaggcagaaaagcaacacagtcactgctgtggtcatttgtaatgtaaagatcagttatatatatatatttgtaatgagagcaagtatatactcattatagaatcaatttaagaagtg

SEQ ID NO: 107242 - DNA, 620 bp, Homo sapiens
agcaggaaccactgcacctggccaggacctatttttattgtagactttactgaatatacataattctgagtgcagatatgaaagctagtactattcctgcaaaaaatgcccaaagccaagatgcgatgagtgaaatttcactacagatttgttgatggaagggcctaagtttttcctcgttcactatcatgttttgcctagtgatggtcctgcttttgtatggcaaagtcacatatagcaagtattcttttctacactgttcgttgtgtaaggaattccctttgcaaagaccatgtatcccaattcttgcctagattatgagcaattttgaattagtgaaagttttattttcaaatagtaaatatagccagttgccctgcctcaccttattgctgatcatgcaaattatggtgaaaatcttagagcttaaaaaatatatatgggctcagttgtagaaaaaaaaagaaaggagctgttaaaaaaattattttagtccaggcatggtggctcatgcctgtaatcacagtgctttgggaggcggaggtggggggattgcttgaggccaggggtttgagaccaaccagggcaacatggtgagaaccagtctctataaaaaaaaa

SEQ ID NO: 107243 - DNA, 448 bp, Homo sapiens
tgaatccgcgtttccgggatttctctgtaggtgaggcgggaggctggagggagctgagcccccggggagggggcccgattccgcctcgccgcgcctctggctgctgggccgtgggtttttctcttctcctgcgagtaagaaggacgacggcccctaacccctgaattagccttctatttccattagtgacttagaagctacccggcgcctcatctgggctcacctgagctgaggatcaggaaggggagggggcacagtcattgcctcgcgggcgcggcgggaccccagcggacggctttgtgcggactttcggcaccgttatgcccccctagcccgacaccacctggggctggcgcgccacgttactgttcagggtcagacgcaccgccctgcctgctccggggagccggacctccgatcccggggatgggggaccccgagacctcaa

SEQ ID NO: 107244 - DNA, 2537 bp, Homo sapiens
  misc_feature (1)...(2537): n = a,t,c or g
ttcgtgaaaaggctaaggcgtatgtcacctgcctactttaggaatgcttgaggtccggtactgtgggggtctaagggtctggttaaaagtctaaaagcactaagctgggtacgcggacaatacagctaaaatcttccctgtcctctagtggtacgcggatctgacgcctgacgtaattgtgtagacgccattttagccggtcagacaagcactggacgtggcggccattttgttttggacaccgagcaggagctggcggccgctgcagacgaaaggcaggaaagggcaggccgggtgagcagacggatcggccgactagacagccaaccagcaacaacgaactgagctcgcatactaccgcttacgcatctaaccaaccgcccatctagctaacccgagcccctccaccgtcaactcaggttcggccggtccccggcccgcctgccggagccgtggtggcagccccgggaggagcactggcgtctgtttccttcgattctcgggattcgaagatggctgcacagtcagcgccgaaagttgtgctaaaaagcaccaccaagatgtctctaaatgagcgctttactaatatgctgaagaacaaacagccgacgccagtgaatattcgggcttcgatgcagcaacaacagcagctagccagtgccagaaacagaagactggcccagcagatggagaatagaccctctgtccaggcagcattaaaacttaagcagagcttaaagcagcgcctgggtaagagtaacatccaggcacggttaggccgacccataggggccctggccaggggagcaatcggaggacgaggcctacccataatccagagaggcttgcccagaggaggactacgtgggggacgtgccaccagaaccctacttaggggcgggatgtcactccgaggtcaaaacctgctccgaggtggacgagccgtagctccccgaatgggcttaagaagaggtggtgttcgaggtcgtggaggtcctgggagagggggcctagggcgtggagctatgggtcgtggcggaatcggtggtagaggtcggggtatgataggtcggggaagagggggctttggaggccgaggccgaggccgtggacgagggagaggtgcccttgctcgccctgtattgaccaaggagcagctggacaaccaattggatgcatatatgtcgaaaacaaaaggacacctggatgctgagttggatgcctacatggcgcagacagatcccgaaaccaatgattgaagcctgcccatcctcccatgagagactcttgttagtcaacacatctgtaaataaccttgagataacagatgagaagaaatctgattgatgctggatggacctatcacaataggctgtggacttacttgccaccagcttgtgcatttagtgtgttccttttactttttgatactgtgttgtatgaaacccttttgtcctttgatttggttttttgtttttgtttttttaggggggagggggggtttcccctcctttgcccagacttctctttgaacacaaatgcattagccttgtggctagaacaccctcttcctacctctgtctcccctcacttgtcatatgctctgacatgctaacatttcttttgttcatccctgttgcccccacagaaacatcccagaaaaaccggtcagtgttccttcctccctgatccttaggtttctgaaatagggttctgttacatcctcttcgatagcctgtttaaaatgtttagaaggtctggagctcaaaaatgcgttcttccacattgataatttagtaaactgagaacattgacatcactacagggcagcataagaggttgcttacatgtggtagcagctctggtttgattcaagttgctaccatgtacattgacagcacatataccataaccagcgtgttgggttgaattgcactttctacctttgtatgagatttacagactttccttctgggtttgtatcatgaccagaggggtactatagggttggtttatactgcaatatagaggatcagaagccatttgatttggtaggtgtgtcagaagggagaatgatggcagacgaactgctggaagaggtcagaagatagccatgctaaaatgcaattatatcctcatgtttatcccaaactaatcttggacttttccactcattagctttgttttgcccttgtttcccttgaaggtttaagttcaaccatattctgtcaactgttcagtttcagtggaatcttgtatttctggttcattataacaaactgttcgcttaaatccacccaggactctctttatttgaggtgcctcaaaatgccatggctactttaatgatgnnnnnnnnnnnnnnnnnngaaaccaagtttccttcctgtccccaggttgaagggcaggggcgcaattttggttttcaaccctccacttttttggttaaagcaattttcctgcccaacccccccggggggttggaactacagaatggggnnnnnnnnnnnacttatttttggtttttttagaaaaag

SEQ ID NO: 107245 - DNA, 1857 bp, Homo sapiens
ttttttttttttagatttctcatagatttatttctgcgtcatattatatatagatatatgcatatatacctttttttttttaatacaatctatatacccttcccttccccaccaaactcacaaaaggagattaaacccttccaggattgccatcaagcttcccgagatggccagggccaagaaagaatcatctctcaacatgttaagaaacggctgccattcttaggctctggggttgaagcagcagcattcccaggacccaagggccagagagaggaaaagaaatgactgtagtgtgacaggattctaggatgaacatgtccagtgactcctggcatggcagactggctcccagaattctcagggtgtgagtaaaggtgggggccctatggctcttcagaggctgctcaataggtcaggggtagggtataggaactggggatcaggcatgcagggatggggtggcagaaaaaacgcctgtgggttatgctccagacagagcgacccccatcagggctacccacctactcaatgacatgtaatgaacagggacagatgctgagctcttaaggaaacaagggagagagcatggcagcggggagcaatggaacacatgaagtcacaaaaaacagaaagtaccaacaaaaacatgacctacatttgactcctccctagagaaggtgtgatctatgtttggggttaggggaggtgaagggtcatgaacctaggattatcagctggccaggggcacagaaggctctctgaggactcctaagaggcaggcaggcagctgggaccccacatccccagggaggaaacgacagttctttcaattcgacttggaccaaatcttggcgctccctcggagccccttgccctttgaggctttcttgctgggctggcgctggttggtgccaggagctggttccctcagctcagtcaggtgttgctcagggtcctgagatgtggctgcggctgctgctgccgtcgtaactttaatggtttttttaaggttggcaacctcactctcaatctgctgcttcaggcccagctgctgctccttgtgttggttggcacggctcacctgctcctcaatgcctgacagcacgacctcacagcccacacaccattcctgcagggttcgggcaatggcactgaggtcctggcgctggatgtcccgcccgatgctgtagtcaacctcgagccgctggttgcgctggtccagggagccacgaagcacgtcagcatacacagcctcaatcacaaggtcttccagctgccgcacattacgcagggcaagagcctccagcaacactgcatatgggatacactttactttagcagccagggtgacaactgagaggtgtcgaagcttattcttctgagcctctgttagtggaggaagattccgggcttcagctaagtagtcagcgtatgtcccataagcaaacactgtgagcagccggaaggtagaggcaaagtcactctcagccagctctctaacattgggcatgtccagcagttctccaaacacgtagacaccaggggcctccagcacctgatggatgagtgtggccagcgctgcccccttggccgacttggctaggagcagaaattgctcctggttctgccctgtcaccttcacttccgcactcatcactgcactgagtgtgggggacttgggctcaggatgtccagagcctgggtcaggctctgcgggccgctacctggaagcttcgacctccagcgcaccgggcggggccgccgctccgtcacctccggcagctgttccaagcctttcctgccacctccctgaagagtcgctctggccactaaacacgaaatcgtcgacccggg

SEQ ID NO: 107246 - DNA, 1773 bp, Homo sapiens
ataaaactaaaaagtaatcacctctcccaacaaaaatgtaaacaggaccgataatttatgattttattgtctttcctttgtccggcctttaacatgtttctgtaatttaaataaaaatctatttactttctccattttagcaaatggtttctttacccaaataggttgcactatagtccccatatggttttctactgttccacaaccactatttcacaaagattgacaaaactttaataaaagttaaatttacagacatcttaagataacttgggaaatatgtagtaaaaaagaatcgagtccacaaattaagaatattttgctaatatgcccaacaccaatttcagcaaatccaatctacttaactcatatatttaatgtggtaatttttctaacaaaatttaatgggggtatgaatgatatatttatgcccttgacaaagatgacatgtgtgattttgttgtgactaagaaaggagagtatgatttctggtggttatgatatcactctggctcatcgaagctcacagaatatgtaaggttctgccacgtccaaagatgttaggcaaatgtaatagaaggcgcaccgggctgacacacgttttcatcatacaaatcttctggcagttcctcttcatctccatcaggaaaatatgtagggaatggtagatttttaccgagatccttatatgcaggcagtttagaatctttgacctttactaagcaatttttatgtccaggtacagagccatttacatagattatgttgtgctttgtgtttattctccacactttcagtccatattctgtcctgtatatgtttcccatttttccaggcattttagttccaggccagactctgccaatatcaccagttgcaacagctccaggtctcctgtgggttttcgtttgaccatgcgtagcaggctggcctttaaatccccatcttttcatgacaccttgaaaacctttaccaatagttttggctgtgacatccacatactgtcctggacgaaagtgagcagcataaagaggagtgcctggtttaattgcagcattatctgttatattaaagattttaactgtctgtttcggcggcaatccaagttcccggtaaaattccaatatggatgtagctttacgaaaacgtgatacagtttttcctcctacagacagggttgccatttttccattacagttttcctttgacgtatattttaagacatgacagtcttgtacctgaagtaatgtgaccacatgcttttgaccatccttggtccataaaggcatcatgcccagcttcaaggcaataagaccaactctaaaggaacctggttcccaaggatgtataggccatggttcatctttcagaggacacagtttacttgctaattgggctttatcttcatcagagaccaactgcttaatgaatgggacattttcttcagaaagatgctcatcccaccatgtaccactctttccatgaagacctctaacaaaaagccagatgtgtgttctgttccccgggcccagggcagcacccaggccgtccccgagtcgacccagcacctgggcgccgacctgcgtcagcagcctccaacccggcatggattagcccgggaagactcgactcacgacttccgggcgccctgccgctctgctttcagggagtccccacgccaccgccacgtggacgcagtagccgtggggaagttttcgcaatggccgccggaacggtcgccggccgatgctctctgctacggaaagaaagccg

SEQ ID NO: 107247 - DNA, 3543 bp, Homo sapiens
cggcaaaacttttttttctttgtctttttttttcttttaggtaaattaatgtttattcataacgatttttaatgttatttgttattctaaaacttgcaaaaattccatctgttataggagttattgaaatagtcatagatgggtgtatgtgcgggcgagaagatggcggcggcgggggaagcagcgtgagcagccggaggatcgcggagtcccaatgaaacgggcagccatggccctccacagcccgcagtatatttttggagattttagccctgatgaattcaatcaattctttgtgactcctcgatcttcagttgagcttcctccatacagtggaacagttctgtgtggcacacaggctgtggataaactacctgatggacaagaatatcagagaattgagtttggtgtcgatgaagtcattgaacccagtgacactttgccgagaacccccagctacagtatttcaagcacactgaaccctcaggcccctgaatttattctcggttgtacagcttccaaaataacccctgatggtatcactaaagaagcaagctatggctccatcgactgccagtacccaggctctgccctcgctttggatggaagttctaatgtggaggcggaagttttggaaaatgatggtgtctcaggtggtcttggacaaagggagcgtaaaaagaaaaaaaagcggccacctggatattacagctatttgaaagatggtggcgatgatagtatctccacagaagccctggtcaatggccatgccaattcagcagtcccgaacagtgtcagtgcagaggatgcagaatttatgggtgacatgcccccgtcagttacgcccaggacttgtaacagcccccagaactccacagactctgtcagtgacattgtgcctgacagtcctttccccggagcactcggcagtgacaccaggactgcagggcagccagaggggggccccggggctgattttggtcagtcctgcttccctgcagaggctggcagagacaccctgtcaaggacagctggggctcagccctgcgttggtaccgatactactgaaaaccttggagttgctaatggacaaatacttgaatcctcgggtgagggcacagctaccaacggggtggagttgcacaccacggaaagcatagacttggacccaaccaaacccgagagtgcatcacctcctgctgacggcacgggctctgcatcaggcacccttcctgtcagccagcccaagtcctgggccagcctctttcatgattctaagccctcttcctcctcgccggtggcctatgtggaaactaagtattcccctcccgccatatctcccctggtttctgaaaagcaggttgaagtcaaagaagggcttgttccggtgtcagaggatcctgtagccataaagattgcagagttgctggagaatgtaaccctaatccataaaccagtgtcgttgcaaccccgtgggctgatcaataaagggaactggtgctacattaatgctacactgcaggcattggttgcttgcccgccgatgtaccacctgatgaagttcattcctctgtattccaaagtgcaaaggccttgtacgtcaacacccatgatagacagctttgttcggctaatgaatgagttcactaatatgccagtacctccaaaaccccgacaagctcttggagataaaatcgtgagggatattcgccctggagctgcctttgagcccacatatatttacagactcctgacagttaacaagtcaagcctgtctgaaaagggtcgacaagaagatgctgaggaatacttaggcttcattctaaatggacttcatgaggaaatgttgaacctaaagaagcttctctcaccaagtaatgaaaaacttacgatttccaacggccccaaaaaccactcggtcaatgaagaagagcaggaagaacaaggtgaaggaagcgaggatgaatgggaacaagtgggcccccggaacaagacttccgtcacccgccaggcggattttgttcagactccaatcaccggcatttttggtggacacatcaggtctgtggtttaccagcagagttcaaaagaatctgccactttgcagccatttttcacgttgcagttggatatccagtcagacaagatacgcacagtccaggatgcactggagagcttggtggcaagagaatctgtccaaggttataccacaaaaaccaaacaagaggttgagataagtcgaagagtgactctggaaaaactccctcctgtcctcgtgctgcacctgaaacgattcgtttatgagaagactggtgggtgccagaagcttatcaaaaatattgaatatcctgtggacttggaaattagtaaagaactgctttctccaggggttaaaaataagaattttaaatgccaccgaacctatcggctctttgcagtggtctaccatcacggcaacagtgcgacgggcggccattacactacagacgtcttccagatcggtctgaatggctggctgcgcatcgatgaccagacagtcaaggtgatcaaccagtaccaggtggtgaaaccaactgctgaacgcacagcctacctcctgtattaccgccgagtggacctgctgtaaaccctgtgtgcgctgtgtgtgcgcccagtgcccgcttcgtaggacaccacctcacactcacttcccgcctctctttagtggctctttagagagaaactctttctccctttgcaaaaatgggctagaatgaaaaggagatgccttggggttcgtgcacaacacagcttctgttgactctaacttccaaatcaaaatcatttggttgaaacagactgttgcttgattttagaaaatacacaaaaacccatatttctgaaataatgctgattcctgagataagaaagtggatttgatccccagtctcattgcttagtagaataaatcctgcaccagcaacaacacttgtaaatttgtgaaaatgaattttatctttccttaaaaaagaaattttttaatccatcacacttttcttccctaccctttagtttttgataaatgataaaaatgagccagttatcaaagaagaactagttcttacttcaaaagaaaaataaacataaaaaataagttgctggttcctaacaggaaaaattttaataattgtactgagagaaactgcttacgtacacattgcagatcaaatatttggagttaaaatgttagtctacatagatgggtgattgtaactttattgccattaaaagatttcaaattgcattcatgcttctgtgtacacataatgaaaaatgggcaaataatgaagatctctcctttcagtctgctctgtttaattcttgctgtctgctcttctcataatgctgcgtccctaattgtacacagtttagtgatatctaggaggtataaagttgtcgcccatcaataaactgtgtacaattagggacgcagtttagtgatatctaggagtataaagttgtcgcccatcaataaaaatcacaaagttggtttaaaaaaaaaaa

SEQ ID NO: 107248 - DNA, 382 bp, Homo sapiens
agtgtattaactttttatttttgtgtaacaaatcactataaactttgtggcttaaaacaatacaaatttatctcacaatttcccttggtctggggtcagattatggcttagctgggttctctgctttaggttgccaccaggctgcagtcaagatgttgacggccttcattcttatccaggggcttgacttaggaagaagccacttccaagctcattcagggtgttggcaggattcatttccttgtgacagtagaatccatggaggcttgcttcttcatgttcagcaggagagcccctggttccagtctgccgagagagtctcctgtataacaaaatgtaatcataggagtgacacccatcacctttgttcaattctgttggt

SEQ ID NO: 107249 - DNA, 436 bp, Homo sapiens
aaaaaaatagcaggaaaaaactcaaatgagggtctcaataaattatcttgtcacattaaggatagcagaataccttattaacatgacaaatgagtttggcttcaggctgcagaccacataaccttaaagtcagaaataagacaatgatattcctatcacactcatttatttttttaggatatggggccttgctatgttgcccagactgttctcaaactcctgggctcaagtgatcctcccacctcagcctctcaagaagctgggactacttgccaccatgcccacctgctgtcacacccattcttaatgatttatagaaattttagctttatacaatgccttgaaacataataacaggaataattattagaatagaggagaaacataatcattatttcagttgatactatgtactttttaaaatattccggaaata

SEQ ID NO: 107250 - DNA, 417 bp, Homo sapiens
aactggaatagtgtggaccttaaatggagtaataatggcttcctcatgggaagagaagaagagacagagacacacaggggagaaggccacatgagaatgaaggaagagaatggaatgatgtggccacaagccaaggatttccagcaaccaccagaagccagaagaggcgaggaaggattcatccctggagacttcagagggagcacagtcctgcccatttcagacatcaggcttccagaactggagagaatgactttctgttgtcgttagccgtccgtttgctggaagtgcgtgggcttcggcggtgtctgggatgtggcgtgtatgtgttgggggtgacgtcatgattgtttgggttggtgcccgtggggcgtggatgtggttactgcgggagtgttatatccgtagcgagggttg

SEQ ID NO: 107251 - DNA, 987 bp, Homo sapiens
cgacccacgcgtccgggatgttgttctcttttccctgtctttatttccttaccattcggctgccatccgttgagctgaggaagcctagagctctcagaagcagtcctttgagctggtgtaggggcactcagaatggtccagcgtttgacataccgacgtaggctttcctacaatacagcctctaacaaaactaggctgtcccgaacccctggtaatagaattgtttacctttataccaagaaggttgggaaagcaccaaaatctgcatgtggtgtgtgcccaggcagacttcgaggggttcgtgctgtaagacctaaagttcttatgagattgtccaaaacaaagaaacatgtcagcagggcctatggtggttccatgtgtgctaaatgtgttcgtgacaggatcaagcgtgctttccttatcgaggagcagaaaatcgttgtgaaagtgttgaaggcacaagcacagagtcagaaagctaaataaaaaaatgaaacttttttgagtaataaaaatgaaaagacgctgtccaatagaaaaagttggtgtgctggagctacctcacctcagcttgagagagccagttgtgtgcatctctttccagttttgcatccagtgacgtctgcttggcatcttgagattgttatggtgagagtatttacacctcagcaaatgctgcaaaatcctgttttcccccagagagctggaggttaaatactaccagcacatccctagatactactcaagttacagtatatgatcactaatatagtatgctcttggtaccaggagctctgatatatatctggtacatgtttgataatgacttgattgttattataagtacttattaatacttcgattctgtaaagagtttagggtttgattttataaaatccaaaatgagccttttattgaatccagttctctatgtgaccagttctctgtatgaatggaagggaaaagaattaaaaatcttgcaaaggg

SEQ ID NO: 107252 - DNA, 2153 bp, Homo sapiens
cagcgtggaggaattcgaccgaggctgcaccggcagaggctgcggggcggacgcgcgggccggcgcagccatggtgaagattagcttccagcccgccgtggctggcatcaagggcgacaaggctgacaaggcgtcggcgtcggcccctgcgccggcctcggccaccgagatcctgctgacgccggctagggaggagcagcccccacaacatcgatccaagagggggagctcagtgggcggcgtgtgctacctgtcgatgggcatggtcgtgctgctcatgggcctcgtgttcgcctctgtctacatctacagatacttctttcttgcacagctggcccgagataacttcttccgctgtggtgtgctgtatgaggactccctgtcctcccaggtccggactcagatggagctggaagaggatgtgaaaatctacctcgacgagaactacgagcgcatcaacgtgcctgtgccccagtttggcggcggtgaccctgcagacatcatccatgacttccagcggggtctgactgcgtaccatgatatctccctggacaagtgctatgtcatcgaactcaacaccaccattgtgctgccccctcgcaacttctgggagctcctcatgaacgtgaagagggggacctacctgccgcagacgtacatcatccaggaggagatggtggtcacggagcatgtcagtgacaaggaggccctggggtccttcatctaccacctgtgcaacgggaaagacacctaccggctccggcgccgggcaacgcggaggcggatcaacaagcgtggggccaagaactgcaatgccatccgccacttcgagaacaccttcgtggtggagacgctcatctgcggggtggtgtgaggccctcctcccccagaaccccctgccgtgttcctcttttcttctttccggctgctctctggccctcctccttccccctgcttagcttgtactttggacgcgtttctatagaggtgacatgtctctccattcctctccaaccctgcccacctccctgtaccagagctgtgatctctcggtggggggcccatctctgctgacctgggtgtggcggagggagaggcgatgctgcaaagtgttttctgtgtcccactgtcttgaagctgggcctgccaaagcctgggcccacagctgcaccggcagcccaaggggaaggaccggttgggggagccgggcatgtgaggccctgggcaaggggatggggctgtgggggcggggcggcatgggcttcagaagtatctgcacaattagaaaagtcctcagaagctttttcttggagggtacactttcttcactgtccctattcctagacctggggcttgagctgaggatgggacgatgtgcccagggagggacccaccagagcacaagagaaggtggctacctgggggtgtcccagggactctgtcagtgccttcagcccaccagcaggagcttggagtttggggagtggggatgagtccgtcaagcacaactgttctctgagtggaaccaaagaagcaaggagctaggacccccagtcctgccccccaggagcacaagcagggtcccctcagtcaaggcagtgggatgggcggctgaggaacggggcaggcaaggtcactgctcagtcacgtccacgggggacgagccgtgggttctgctgagtaggtggagctcattgctttctccaagcttggaactgttttgaaagataacacagagggaaagggagagccacctggtacttgtccaccctgcctcctctgttctgaaattccatccccctcagcttaggggaatgcacctttttccctttccttctcacttttgcatgtttttactgatcattcgatatgctaaccgttctcagccctgagccttggagaggagggctgtaacgccttcagtcagtctctggggatgaaactcttaaatgctttgtatattttctcaattagatctcttttcagaagtgtctatagaacaataaaaatcttttacttctgaagatcctaaaacaacatacgctgacataaaattagggggggggcgttagaagtatttctttttcagccccggggagagtgggggtattactcttttttatgggggacctcaaatcagtctacccgcgggc

SEQ ID NO: 107253 - DNA, 524 bp, Homo sapiens
tgtagagactgggtcttgccatgttgcccaagttggtctcaaactcctgggctcaagcaatcctcctgccttggcctccctaactactgggattacaggtatgagtgaccatgctcagtccttatttctttttcatgaaacaatctgagtctaaaggatccagggcggacatggtgccatcacagtactgaggacctaggtgctttttatcttgctactctgtcatcctcagcatgcagctttaatctcaggatctgaaatggcaggtccagcccataccattgtatttattttccagccagaagaaagaagagaagaaaagaaggaaggcatgctcttttccttttaaagtcatggcccaaaacatcacataaagttctgctcccatcccagtagacagaacctagtcatatgactatcccttaaatgtatagtctttacttctgttatagaaatttctattactatgaaaaaggatggatattgaggagacaattagccatctctgtcacagtaacacgaaa

SEQ ID NO: 107254 - DNA, 3656 bp, Homo sapiens
atacgtcaacgaattaatttttctcggaaaaacaaatgggactctagaaagcttgatcaagcgggcgtcagcgaactggcaacgaatcaaaaattgattctggtgtgcggtcgctacgaaggtatagatgagcgcgtgatccaaaccgaaattgacgaagaatggtcaatcggcgattacgttctcagtggtggtgagttaccagcaatgacgctgattgactccgtttcccggtttattccgggagtactgggacatgaagcctcggcaacggaagattcctttgctgaaggattgctggattgcccgcactatacgcggcctgaggtgttagaagggatggaagttccgccagtgttactgtcgggcaaccatgccgagatacgtcgctggcgtttgaaacagtcgctgggccgtacctggcttagaagacctgaacttctggaaaacctggctctgactgaagagcaagcaaggttgctggcggagttcaaaacggaacacgcacaacagcaacataaacatgatgggatggcagcagatgaagcaggacgtaccttccttcgtgctgacttcaatatgattgaagaaggcgatcgcatcatggtttgcctctccgggggtaaagacagctataccatgctggagattctgcgcaatttgcagcaaagcgcgccaatcaatttttcgctggtggctgttaacctcgatcaaaagcaaccgggcttcccggaacacgttctgcccgagtatcttgaaaagctgggcgttgagtacaagattgttgaagagaatacttacggtatcgtgaaagagaagattccagagggcaaaaccacttgctcactgtgttctcgccttcgtcgcggtatcctttatcgtaccgcaacggaactgggggcgacgaagatcgcgttgggtcaccatcgtgacgatatcctgcaaacgttgttcttaaatatgttctacggcggtaagatgaaaggtatgcctccgaaactgatgagcgatgatggcaaacatatcgttattcgtccgctggcctactgccgcgagaaagatattcagcgatttgccgatgcaaaagcgttcccgattattccgtgcaacctgtgcggttcacagcctaacctgcaacgtcaggtgattgctgacatgttgcgtgactgggataaacgttatccagggcgtatcgagacgatgttcagcgcgatgcagaatgtggtgccgtcgcatctgtgcgataccaacctgttcgatttcaaaggcatcacccacggttctgaagtggttaacgggggtgatctggcgtttgatcgcgaagagatcccactacaaccggcgtgctggcagccagaagaagatgaaaatcagttggatgagttacggctgaatgtggttgaacctgacggaccgcgacatagacatgcgccggatgcacggcgattttgccaatatctgcgccatcaagcccgatatctcctgtcagtggtaccgaatctcgatgttgccgttaccgagccactggcaaatggcgatggcctgaacgtgttgattaaacgtgaagtcgtcggttttcgtgccaatacggtcgagaaaaccggagaaaatcagtaccgcgtctggcccaatgaaatgccagcagatttgcacaaaattcgtccacatcacccactaaaccgtaatcttgatcattttttcccgttggatttgacgaattctaccttctctgggggctacgtgcacgtgctgaagggtgtgctctcagacgacctcctcctgaagagcttccagaagatgggctacgtacgcagagacagccatcggctcatggtgaccgccctgccccccgcctgccagctggtgcaggtggccctgggctgcttcgccctccggctggagtgtgagatcctgggtgaggtgctggcccagctgggcaccagtgtgctgccagctgaggagctgctgcaggcacggcgtgccagcggggacgtggcctcctgtcagcggctggcccaggatgaggagccgccacccctgcccccccgaggctcccctgctgcttacagggccccactggacttataccgggacttgcaggaagacgaggggtcggaggacgccagcctgtatggggagccgtcaccaggccctgactcgcccccggcggagctggcctacaggccaccactctgggagcagagtgccaaactgtggggcactgggggccgggcctgggagcccccagctgaggagctgccgcaggccagcagcccaccatatggggccttggaggaggggctggaacctgaaccttccgccttctccttcctctctctgcgccgtgagctgagtaggcctggggacctggccacccctgaaagctctgcagcggccagcccgaggcgtattcgggcagagggggtaccagcctcagcctataggtctgtctcggagcccccaggctaccagggcacacagctgcctgtcccctggcgccctgcccaccctctgctgcgacacctgtcgccagctgcatgctgcccactgtgcagccctgcccgcctgccgtccaggccactcgctgcgtgtgctgcttggcgacgcccagcggcgcttgtggctacagcgtgcacagatggacactctgctctacaacagccccggggcccggccctaggccagctgggccccaggtcaagggctcttgggagacagctcccgtggtgcttctctttgctggggaggggtctgggcctctggttgccttgtccctgggggagtcctgggcacagcagggggttggagagtccaggccaacccttgctggaggtgggactctctgtatatggaaggctccaagggcagcaggcctaagccggccagcaggagcctttccacatttccccaccctcggaacccagacgcatgcccacatgtgctgggtagaggggtccagcctgttccagccagtgcctgaacctgtccctgagaaggaccctgtgccccaaggcccgtggctcctggcctgctccctgcagtacggagtacggggctcaggagttgggggtcctccacgtgtcccagggattctccacacgagtgtcctcaagggcctgttggtgacaccgagctccccccaccccaagctctgctggagccaatctgcggggctctgccgggtgcacggctgacctggcttcgggggcgccggccctccccttgggtgtcacagcagctgggcccacagacaggaaatgacctgacctcaaaccagatgtggaggtgcacgagaggcgcaggaacgggcagtggctgacagctgggaaggccctgagcgtcactgctgctgggcggaagggcctgtggacagcccacccaggcggcggggtcttggtgggtccagtggtaatggtgcccctcccctccattccctgtgggtgcagcccacaggctggcgaggaggtgcctctgccctaccctcgggtctggcgagggagggggcagggtgcatccactgtgacagcccctctgggcccacaactccctgaccctggaagctgagcctgctttcctgaccctccgccccaccccctcctccccagaacactcagagggacggtcaacatcagagcacattaaacgctggtgaaacc

SEQ ID NO: 107255 - DNA, 2482 bp, Homo sapiens
atgaactacaggtaaaatctagaagaacatagataataaaaaatttctgatttaacagacatagtaaatataaatgaattaactcacacaacctacttacaccaaacaaaactagaatgaacaacttgtaggaaccacctctagttgatttcaccacttaacaggggcaagatcttaggtggatcattttgtttaaggatgacttgaaattttacaatactaccttagctcccacatatgaaaactcttcaagaattttttctcatcaaccagacgttgaggaaaatacagtgagaaataaaatgaaacggcttctcacacatatgaaggcccagatcacccctaaatttctagtgatttaacttaagaagctccttgccctgagagattcctttatcccacaacactctactcagagggggcagagaatcccaggacactacacaagccacaggataaaaacacaacctgtcttctatctggcaccaactgactaatatctaggtatacacaggactgactttaaagttggttaacaaatattttaattcattaaaataaaacttaaaaattacatgcttagtctacacaagtttaacttactttagtcacttagtgaattgtgaattggctcccattagtggtcaggagaatgtatttggtgtagaaaccaaataaatcaagctattatcgccgccgtgagtacaaaacaatgtttatttgtttgtaaagtgccaggtttatatttaagtaaacattaaaatctgcgttgaagcagtgaggctgcatcttttaactggctgtgctggttaaaggactgtttaatcccgctgtgctaagctcactaaagggtcacccctcacttttaaagccaagactgccattgtcactgctatggtaagtccacaagcccaacccaggccttctgggcaaaaggtgaatactaccagcactataaacagacaggactggttgtgaggtagctacacagttttaaagatgctgttaatgaacattacggacaattcatggtgtggctagttggtaacacttcagctgatttttcttatgagatggaaaaaaaaaatcagccaagtaagggcacatcttcagttcatttagaagtcagcatccaaggtaaaagaattctctgttggacttgacatcactcccatcctctgatactcgcctactctcttctcaaagaagttagtctttccttccagtgaaatattctccataaagtcaaatgggttctctactctgaaaaccttgctaaaacccagttccagcataagtctgtctgccacaaactcaatgtattgcttcattagagtgcaattcatcccaatgagcttcacaggcaaggcctcagtgaggaactcctgttctatccgaacagcattgataattatttctcttactctctcctccgatggtttgtgtaccaggtgtttgaacatcaggcaagcaaaatcacagtgtaaaccctcatctctgctaataagttcattagaaaatgtgaggccaggcatcagtcctcgtttcttgagccagaatatcgacgcaaaagaaccggaaaagaaaatgccttccactgcagcaaaggctacaacacgttcaccataggtagcctctttgtccccaatccagcgcaaggcccagtctgccttcttcttgacacaaggcatcgtttcaatggcattgaagagaaattccctttctttgggatcttttatgtaagtgtcaataagaagactatacatttcagaatgtatgttttccatggcaatttggaagccatagaaacagcgggcttctgtaatctgaacttcttggctaaatcgctccaccaagttttcatttactatgccatcgcttgctgcaaagaaagccagaacatgggatataaaatatctctcctcgggtttcagggattcccagtgctgaatgtccttggagaggtcaacctcctcggcggtccaaaaggaagcctctgccttcttatacatctgccagatatcatggtactcgatggggaagatgacaaagcggcgggggttttctctcagcagcggctcatcctccacgccgggggcagctgctttagttttcggctccgtgggctcctggaagatcctcctcgcggtcttgctggccaggacgcgggtcccgctcagggccggcggcgtgttctccttgtcgaccaagctgagccccttcagcggcgagagctgcagctgctgcgggtccgtgatgggcgcgagcgggacacggagggagagcatagtggaggcgcagcgaagcagagcgagcagccaggacaggacggctgggacagggtgcacgggcgacccctcactccagcagcctttaaatctcccgcgccgcgcgctcccggcccttcccattggctttggtgccccggcccttcccattggctgtgccatgcctccgacccttcccattggctgcgcctggg

SEQ ID NO: 107256 - DNA, 448 bp, Homo sapiens
cggacgcgtgggcggacgcgtgggcggacgcgtgggcggacgcgtgggctgtcccgctgcgtgttttcctcttgatcgggaactcctgcttctccttgcctcgaaatggaccccaactgctcctgctcgcctgttggctcctgtgcctgtgccggctcctgcaaatgcaaagagtgcaaatgcacctcctgcaagaagagctgctgctcctgctgccctgtgggctgtgccaagtgtgcccagggctgcatctgcaaagggacgtcagacaagtgcagctgctgtgcctgatgccaggacagctgtgctctcagatgtaaatagagcaacctatataaacctggatttttttttttttttttttttgaacaaccctgacccgttggctacatttttttttttatgaaaaatgggaagggcaaaaaattcatctagcctaaaaaaaaaa

SEQ ID NO: 107257 - DNA, 691 bp, Homo sapiens
gcggtggaattcgcgggacccaaccgcggcgaccggacgtgcactcctccagtagcggctgcacgtcgtgccaatggcccgctatgaggaggtgagcgtgtccggcttcgaggagttccaccgggccgtggaacagcacaatggcaagaccattttcgcctactttacgggttctaaggacgccggggggaaaagctggtgccccgactgcgtgcaggctgaaccagtcgtacgagaggggctgaagcacattagtgaaggatgtgtgttcatctactgccaagtaggagaaaagccttattggaaagatccaaataatgacttcagaaaaaacttgaaagtaacagcagtgcctacactacttaagtatggaacacctcaaaaactggtagaatctgagtgtcttcaggccaacctggtggaaatgttgttctctgaagattaagattttaggatggcaatcatgtcttgatgtcctgatttgttctagtatcaataaactgtatacttgctttgaattcatgttagcaataaatgatgttaaaaaaactggcatgtgtctaaacaatagagtgctattaaaatgcccatgaacctttagtttgcctgtaatacatggatatttttaagatataaagaagtcttcagaaatagcagtaaaggctcaaaggaacgtattcttgaaggtgac

SEQ ID NO: 107258 - DNA, 1944 bp, Homo sapiens
cggccgcgtcgacgcggagcagagtcgactgggagcgaccgagcgggccgccgccgccgccatgaaccccgaatatgactacctgtttaagctgcttttgattggcgactcaggcgtgggcaagtcatgcctgctcctgcggtttgctgatgacacgtacacagagagctacatcagcaccatcggggtggacttcaagatccgaaccatcgagctggatggcaaaactatcaaacttcagatctgggacacagcgggccaggaacggttccggaccatcacttccagctactaccggggggctcatggcatcatcgtggtgtatgacgtcactgaccaggaatcctacgccaacgtgaagcagtggctgcaggagattgaccgctatgccagcgagaacgtcaataagctcctggtgggcaacaagagcgacctcaccaccaagaaggtggtggacaacaccacagccaaggagtttgcagactctctgggcatccccttcttggagacgagcgccaagaatgccaccaatgtcgagcaggcgttcatgaccatggctgctgaaatcaaaaagcggatggggcctggagcagcctctgggggcgagcggcccaatctcaagatcgacagcacccctgtaaagccggctggcggtggctgttgctaggaggggcacatggagtgggacaggagggggcaccttctccagatgatgtccctggagggggcaggaggtacctccctctccctctcctggggcatttgagtctgtggctttggggtgtcctgggctccccatctccttctggcccatctgcctgctgccctgagccccggttctgtcagggtccctaagggaggacactcagggcctgtggccagcgcagggcggaggcctgctgtgctgttgcctctaggtgactttccaagatgcccccctacacacctttctttggaacgagggctcttctgtcggtgtccctcccacccccatgtatgctgcactgggttctctccttcttcttcctgctgtcctgcccaagaactgagggtctccccggcctctactgccctggctgcagtcagtgcccagggcgaggaatgtggccaggggatccaggacctgggatccagggccctgggctggacctcaggacaggcatggaggccacaggggcccagcagcccaccctttcctctccccactgcctcctctcccttcctacactcccagctcgagccgtccagctgcggtgggatctgagtatatctagggcgggtgggcgggtagcagtgctgggcctgtgtcttgagcctggagggagtctgctcctgccgccctctgccctgccagagacagacccatgcgctgcctgcccaccgtgcccctttgtccccatgtcaggcggaggcggaaggcccaccgtgccagaggctgggcaccagccttaaccctcactctgctagcacctcctccctttccccaaggtagcacatctggctcactccccactccgtctctggagcccaccagggaaggccctcatcccctgccgctacttctctggggaatgtgggttccatccaggattgggggcctctctgctcacccactctgcacccaggatcctagtcccctgccctctggcacagctgcttcctgcaagaaagcaagtctttggtctccctgagaagccatgtccctcgtgctgtctcttgcctgtcccacctgtgccctgccctccagcttgtatttaagtccctgggctgcccccttggggtgccccccgctcccaggttcccctctggtgtcatgtcaggcattttgcaaggaaaagccacttggggaaagatggaaaaggacaaaaaaaattaataaatttccattggccctcgggtgagctgagggtttttgcaaggaaaaaagcttcaaaaaaaaaaaaa

SEQ ID NO: 107259 - DNA, 398 bp, Homo sapiens
  misc_feature (1)...(398): n = a,t,c or g
agagctagcaccatgacaataccctgatctataaaagagcaaattgataaatttcatcaaaatttaaaattcctgttcttcaagacactgctgagagaatgaaaagatggaccacggcctagagagaatgtatttgcaaatcatttgacgagggacttgcatcccaaatatgtaacgaattctcaaaactcaattacaagaaaacaaccaaccaacaacaacaacaaaaaataggcaaaagacaagaacagacactttgccaaaagggatatacagaagacatataagcttatggaagttgggcacatggctcacacctgtaatcccagcactttgcgaggctgangcaggtggacgacttgaatccaggagttcaagaccagtctgggcaacatatg

SEQ ID NO: 107260 - DNA, 483 bp, Homo sapiens
gagggatgacacagacagacatcagcacttaaaagttttaaacgatatgtgaaaaacaaaatttaagggcttctaggagaaatgtaggagggaaggtgttactgggaaatatgatagaaggttaatttttattttattttatttttagagaaagggtcttgctctatcgcctaggctggactgcagtggtgcaatcacagttaactgcagcctcaacctccagggcttgagcaatattcccatctaatttttattttgtttaagaaatgcagtcttgctcttagcaaagctaaagtgcaatgggtgtgatcataggcttactacagcctcaaccttctaggacttcaagtgatcctccagtcttagcctccccagtagctgggggacttacagggtgtggcactggcaacgtgttaggcttcattttttttatttttatttttagtaggagacaaagtgttcactatgttgaccggggtggtg

SEQ ID NO: 107261 - DNA, 359 bp, Homo sapiens
accctgtaatttctaagtacacataattactgcttcaggggctaaattctacattcacaagtatctacaccccagccctccaaaacaaaagacatcagctagctaaatacaattaccatattataaaatgtacaaatttcagcaataaccatggcttaagaatattcaaacatagacactcttcctcaaggatttcttcctagtgaaatataggctttgttttaacaattttgacttcaggatacctctttaataagtggccagtctccatggctgggcacagtggctcacacctgtaatcccaacactttggaaaaccaaggtgggagaattttttgagcccaggtgttcaagaccag

SEQ ID NO: 107262 - DNA, 331 bp, Homo sapiens
ggctagagatggggtcttgcaatgttgcccagactggtctagaactcctaggctcaagggatcctcccacctcagcctcccaaagtgctgggattacaggcataagccactggtgcttggccaaaccagagccttttaaatgctacaagagtaggtccctgtcatcaggagccactattctatctgtgatgggagctaatgaacaatttagtaatctgtctgaataaccagcacaagcctgtgtggttcctgagagctgactaggttactaccaaccctgctgaaccctagggaggaaagtcaaggtccttccctgcccatgcctccttgc

SEQ ID NO: 107263 - DNA, 638 bp, Homo sapiens
taaggctccctgtaccctgttagtcggctttacagcacctggaattgaccgccacacggagcctggcgctaaggcctggctgtgcccaggtcttcctgcagaacccttggggaggcgctgtgctcccgagcccgggggtgggtgggtttatctgacccgtcctcaggaccgccatgcgggtggggtggtgcagggtgcccccccacagggtgcccccaggggaggcacccccacacggtgcccggcagtcctgcctgcctggagagctttctctgcagaggagactccatgatcccagcctccatcctggaatctgagagaaggaacagaaaacggaaggatgatccagcctctacactcacaaacgaacttcttgtttgaagacataacctttttattcccaagtcttcccccaacacccagctttactgaggtataaatgacaaataaaacttgtatacaggaggctgaggcaggagaattgcttgaacccagagacagaggttgtagtgagccgagatcgagccattgcactccagcctgggcgaaagagtgagactgtcttaaaacaaaacttgtatatatttttggtgtacaacatgattcaataaacatctacactgtgaaatgataccaca

SEQ ID NO: 107264 - DNA, 371 bp, Homo sapiens
cggcacgagctctgctgcacccccgcctccaccaatggcagtgcctttgccacctgcagggcacagggggctgccctcagcaatctccgagcagtgaggggagggctgacctgctgagcccagctttggaggaggggtatcctcctccagcctcaggctgcttcattccccacttcctttgtggctgcagcatcttcaactgccttccccccattatgagacatgcccacaaatctccagatgcattgttagaaaccctggggccctgtagagcctggcggctcatgcctgtaatcccaacactttgggaggctaaagtggacagattacttgagtccaggagttcgagaccatcctggccaacatggtga

SEQ ID NO: 107265 - DNA, 360 bp, Homo sapiens
  misc_feature (1)...(360): n = a,t,c or g
tcatagggttgcgtcctgagctctccgtctcgctgggtagacagcggctcactgccatacgactgcagccgctgctgccggcccgaactccgtgcggcttcttgagggcgcgagtggcactggcgctgatggccgatgagacagatctccctctgttgcccagactggagtacagtggaatgatcacagcttactgcagcctcgacttcctgggctcaagcgatcctcccaccttgggctctggagtagctgggaccacagagaactgttgtgaagattaaagcagatcacagagacttaaagctcttggtacgtattctgaatctacaggggttacagtaaacacctataaatttattn

SEQ ID NO: 107266 - DNA, 397 bp, Homo sapiens
ctgtatatagatgcttggtcactggttaagtgcaaataaaggagtaaatgtaaactggattagaactggattttgaggtttaaaataacctggacttttgagtgaaatacagataaaaagaggtgaagcattcttctaattcaatatgaaaataaaagttaaaaacaatttctgagagaaaagaaactggcattggtgtcagttatagaagggagtttggagtggtttgcagggggaacttttatagcaccatcttgatttcattttgtaatactgcagacaaatagagaagagtaagaaaaagagatgttggctgggcacggtggctcatgcttgtaatcccagcacttggggaggccgaggtgggcggatcacgaggtcaagggattgagaccat

SEQ ID NO: 107267 - DNA, 363 bp, Homo sapiens
gtgttcttacgcttttcctcctcacaataaccctggggggtcggctttagccccatcttactgataaggaaactgaagcacagagaagataaggaactcaccctagctcatacggcttctaagaggcagggtaggattcagatgcacggctgtttgaccaagagcctggggtccttctacacctctatgccatcaagcttatgaagtccagagacagaatgcttgtggagaagaggaactagactttggacactggatagaattcaagttgggggcatgcacggtggctcacatctgtaatcccagcactttgggaggctgaagtgggcggatcacctgaggtcaggagtttgagaccagtcc

SEQ ID NO: 107268 - DNA, 355 bp, Homo sapiens
gaagaagatggtgactggagtggtgttgaactcctgggctcaagcagtcctcccaccttggcctcccaaagtgctgggattacaagcatgagccactgcacccagccaatacattttctttaaaacagaaacactcataacacaagattatgtattgatctgtggacaaaaatgtaaccagaggctcacaggaacctaaccttgtatttcccctaagaacaatggttcagtgttcgctaattctatcttcatagcaatgctatagacataacaaccatgaataacaagaatcaactgtatagatttcacagtagaatgtgagggttaggtttgtagtgacacagaggcttgaaaa

SEQ ID NO: 107269 - DNA, 339 bp, Homo sapiens
  misc_feature (1)...(339): n = a,t,c or g
ctggctaatttttaaattctttgtagagagagggtcttgcttggtttcctgggctggtcttgaaatcctggccttgatctcctgccttggcctcccaaagttgctaggattacggatatgagccactgcacctggctcatgtgtgtgtgtgtgtgtgtgtgtgtgtgtggtgtgtatgcatatatgtatacatacagttttttaagatgggatctccctatgttgtccaggctggagtgcagtggctattcacaggcacaataatagcacattgccacctcaaactcttggcctcaagcaatgctcccacctcggccttccaagtatctgaaactacan

SEQ ID NO: 107270 - DNA, 332 bp, Homo sapiens
ccagctctcccatttctgtgtataccaaaatccacgcatactcaagttttcaaagtcagtcctgtggaatccacatataacacaaatgggaaaattagtgaggtgtggtgacaagcacctgtagtcccagctacttgtgaggccgaggcaggaggatcgcccgagcccaggaggttgaggctgcagcgagccataactgcaccactacactccagtctgggcaacagagtgagacagaaggttgactttttaatagaatttttctgttcacttgaagatatggtcaggattgtggcatatgaaaattcttcataaaataactatctaatcca

SEQ ID NO: 107271 - DNA, 346 bp, Homo sapiens
tggcaatccccctaaaaccaccacctcacccagccccaccctcacctggacataaatgacttttttttttttttttttttttttttttttttttttttttttttttttttttttttttttttaaaaaaatctccccggccggccggaaaaaaaaaaaaaaaaaaaaaaaaaaaaaaaaaacccccccggtttttttttttggggggcgcccccccccccttatttttttttttaataaattttttttttttttttttgtgtaagattatctcccttgtatataataggcggggaggtccctgcctaagcaaaagattttttttgaaagaaagaaaatccccccttt

SEQ ID NO: 107272 - DNA, 243 bp, Homo sapiens
cagtattgtccttcgagaagataacagaaattaatcatccttttttcttttttcttttctttttgacagtttcgctcttgtcacccaggggagaaggggggtcacaaaaagaaagatcctaggctgggtgccatgactcacacctgtaatctcagctctttgggaggccaagcaggcaaatcacctgagctcaggagtttgagaccagcctgggcaacatggtgaaacacgtcgacgcggccg

SEQ ID NO: 107273 - DNA, 779 bp, Homo sapiens
  misc_feature (1)...(779): n = a,t,c or g
ctttcctctccacggatactctccccagcactaaaagggtttagtataatccttttgtaggccagaaagcagattttcacttgggaagagacgacccgtagtatgggatgtggtatgataccagcaactggtctattatatcatttaaaccacatggctatctaaagaggtatttggctattataaataaaatagtgatgaacacgtgtacaggtgtttgtacggacataagttgtcatttctcttgagtaaatacctaaaaagtgggcttgctggagttttactacccttggatgctgctgttgacatggaaaagattgaggaacaatttgctaatctgcacattgttaaatgttccttaggaaccaaagagcccacttaccttcttggtatagacacatcaaagactgtccaagcaggaaaggaaaacttggttgctgttttatgttctaatggatcaatcagaatatatgataaagaaaggttaaatgtactacgagaatttagtggatatcctggacttcttaatggagtcagatttgcaaattcctgtgacagtgtatattcagcatgtactgatggcactgtgaaatgctgggatgctcgagtagccagagaaaaacctgttcagctcttcaagggttacccttccaatatttttatcagttttgatattaattgtaatgatcatattatttgtgctggtacagaaaaagttgatgatgatgcattgtttggtggttttggggatgcaaggatggaatttctccagaatntta

SEQ ID NO: 107274 - DNA, 374 bp, Homo sapiens
atttattcctgcctctcatatgatgggtcactggcaaagcaaatagtagatgagggaaagcactcttcataaatgtactccagatgcaaaattaaaaagaaatgacaggatattaccgtttggcaaccttaattaattaatggatttaggtgggctggggactgtggcttgtgcctgttatcccagcattttgggaggccaagatgggagaatcccttgatcccaggaatctattaccatgctgggcgacttaattatcgccatatgaacattctatcagaagtttatgcccgtgtgtggcctctagtctgtagagacatctattgctgtgatttgcggcaattagtcgatcttacgcccagatgttatggccg

SEQ ID NO: 107275 - DNA, 873 bp, Homo sapiens
ggtcgacttttttacatttttgtgttgttttattagatgattttttaagttacaaaaaaaaaaaaagagggaagaaggaaaagcaataaggcaaacttgccaataggttcatgaacaaaagtcaattatggaatgtggcagaaggcaaatataaatgtattcaaagttttacctttaacaattacacttgtggttccagttatctgttgataatataaattactccgtatttagtgactcaaacaacaattttatttctctctcatgggtctggagtttggctggattcagctaggtagttcttgctgagggtcattcatggggttgtcatcggatggtggctggtgatggaagcatctgaagacttactaattgcagccagggcatggtggctcatgcctacaattccagcactttgggagactgaggtaggaggattacttgagcttaggagttcaagaccagcctgggcaacatagtgagaacccatttcgatttattttaaaaaaaaaaattaacacaccaaaaagaaatgaaggcttactacttgcatatttggagcctggggctgggaaggctcacacatttggtcctcttctctctctctgtggttcttccacatggtctttccagtgttgtggcttcagggtaggtggttttcttccatggcagctcagggctccaaaggcacatgttctgagaaagaactaggtggcagctgtatcaccccttattaccctgtctcagagttcacacagcatccttctgctgcatttaatcacaaaggtccactcatgttccaaaggaagagacacagattccacctcttgttgagagtagtattaaagaattggtggacacattttcaaacca

SEQ ID NO: 107276 - DNA, 1175 bp, Homo sapiens
attgaatgtcactactccagtgcggtggaattcggtgttttaagatgcctgagccagccaagtctgctcccgccccgaagaagggctccaagaaggcagtgaccaaagcgcagaagaaagatggcaagaagcgcaagcgcagccgcaaggagagttactctgtgtacgtgtacaaggtgctgaaacaggtccatcccgacactggcatctcttccaaggccatgggcatcatgaattctttcgttaacgacatatttgagcgcatcgcgggcgaggcttcccgcctggcgcattacaacaagcgctcgaccatcacctccagggagatccagacggccgtgcgcctgctgcttcccggagagctggccaagcacgccgtgtcggagggcaccaaggccgtcaccaagtacaccagctccaagtaaacattccaaggggagacaacagcttttagacatatcttttccaacagtcgtcactgctggacactgtttcatcttgcaaataaaccaatgaaaatgagtgatcctagaagaagataaatggaggtattttgaacaatcaaagaaggacaaatgaacacctggctgagaaaaattagctcttttttctatgcataaaactattaaaatattcttcatagaaatttatgacacaggaaacataaagacaaaattaaaataactcctagtatctcctattctttttatatgtatattatatatactcatattcatatatacatatatctcacatcatgtatcatatataaaataaatttaggtgtcatgatatatatttagataaatatacttagaaacttttttatggatgtataatttatggatatattgataattatgtatttgttattgactacttcaattgattcccatttttatgcattatattatagattatatagctcacacatctttgtacataaatctttgttcaaatattatttcctaaggatagacttcatgaagtggaaatactaaatcaaaagtgaaaaacattttctaaggttcttaacatatacattgccaaattgctattcaggatcataccaatttataatcccaaaataatatggaaattcctgttttatagcactcatatttacaataaattttaaaaatcattgttaacctaatagtccttcaaaaaaaaaa

SEQ ID NO: 107277 - DNA, 326 bp, Homo sapiens
cggagattgtgtcttaccctaaggtagagacagtaagttaaccaaactctctagttgacagtgtataggggttaaatgtgccccacatggtctccactccaaaatgattctgttcatatcagaatagaatcttttctttcttatcttttctctgggactcagtttttccatctataaacagggtatagtagccaggcacagtggctcatgactgtactcacagctacttgggaggctgaggcaggaggatctcttcagcccaggagtttgagaccagcctgggcaacacagtgagaccctatctcttagaaaacaaaacaacaaag

SEQ ID NO: 107278 - DNA, 691 bp, Homo sapiens
tttcgtccaagctggaggaacgggaccgagggatcgaccgaggctggctggctaggggtgggactggcagagctacggacaggtgggagcagtcagacagcctgagagagggagaccagaacgcaaagagagcgagagcattaagtaggcagggagaggcacacagaaagatagacagcaacactcgcgtgctccctccctccacacgccctcctcttaccgagcgaagcggccaggggcacagagtgggagaggactgtgggcacagaagaccggaagagggacgctgcattgctggtgggacggagggattcggacggacggacagaccagcgcacagactggcagcctgcgagagtggcagctttgagagcagagcgcagcaaagcgagaatcccgcgccgagctgctagtcggacccacagacggtcggactgacagacgtgcagacggacagaagagcagacaggaggcgggggcgcgttcactcccggcggccagccggccagagaaggcggcggtggcaccttctgagcgcgtccggagcagagaccagcagcagcaggggcagcggggacacaagccgcgaccgagccgccgccgcagccctggctgccacagctgtgtgggatcccagccgacactgcagaaagctccttttactagcagttaaataaatcgaccaaaaaaa

SEQ ID NO: 107279 - DNA, 426 bp, Homo sapiens
ttgcccgggctgttctggagctcctgggctcaggccgtccgcccaactcagcctcccgaagcactgggattacaggcctgagccaccacgcttggcctggagcatgcccttgatgtgcaaactaaccaatccagagcctcacccctctacctggtccacacaccgcaggagacagtattcctctgtcttaatcatccccggaacaggagccaagcagctggggaacactcccacagctgaaagcccacaggaattactccagctagccagtcctgtgctgtaggctctgctctgccttgcttttcccttggaaaccccagtaaaggctctggcttagagctcccccttggtcctgcccctgctgcctctgacagatgctggtgcttttctcatgtgtccttccttgtgggccgtgcctcctgtttc

SEQ ID NO: 107280 - DNA, 394 bp, Homo sapiens
atgctcacttttcaccacttttatttaacataatattggaagtcctgttggagcttcccaggaaaaaaaaaaaaaaaaaaaaaaaaaaaaaaaaaaaaaaaaaaaaaaaaaaaaaaaaaaaaaaaggggggcccccttaaaaaaacccccgggggggcccccatctatccggaccgccgcaattatatttccccccctttaggggggctttttttaaccccggccctgccccctctttaaacacctgctgggggggaaaatctcttcacgggtattttttagggagccccttttttttgggggggaaaattatggggcaaccccccccaaggaatttaacccccttgggggaaaaaaaaatttttaagggcttatgggggaaccaccccccctt

SEQ ID NO: 107281 - DNA, 471 bp, Homo sapiens
  misc_feature (1)...(471): n = a,t,c or g
taagattattagtataaaaggggagataggtaggagtagcgtggtaagggcgatgagtgtgggaaacaaggtacataaacttaggaggcagaaatttttaaactttagggttagacattcaccagattggacaatttttaacatttaaaataaaactttttgtcataaaaaacaaatgtattaaaactagtttccagaactgcccaaatgactttttaaacatgacttaaatgtgttttgacaaatctatccaaaatactaattttccttttagaacttagtttataatttatatattaaagtgcccttaattgatattcatcgggataccttcctctgagcccctaatggttttgggaggcctctagcggtggatctacctgaaggtcatgagttcgagaccatgcctgggccaacgtggtgaaacccagtctctactaanaatgcaaaaattagccggggcatggtggg

SEQ ID NO: 107282 - DNA, 1475 bp, Homo sapiens
ttttttttttttccatctggggaggtgctcactcaatgtttattgaacagcgaatacagaaaagacagtccctggagctctatatgtggaaagtagcccttctggacagaaagaatattcgtggtccatgtggtttgagtctgttaagaaggacactaaggcacatggctggtgatctttgcgtcatagacacgggtgagctcatggtggaactcctccttgtctgtaggtttccaggctgggcacagaggtgagggcagaatgttgggggtcccagtggatctccccacaacttcctccagggcaggatttccacccaggcccaggctgcccgttcctctccttctccgccagtctgcgctgcggctgccacggctcacaccagagggatggggtaggaggcgcaggcagccaggccacacatgttctttccgcgctcgatgaggaagtacccgttcattccccactggggaccccaagagtttttcacgatccagtaagggatcccatttttttctccatacccaacagccagtactgcatggtttactttatctggagttttatggcaggaagtactggagtagatgcccgttctatacatcatgaagtcctgagtcacctcaaaggcaaagctcacagggttgtagagggccacagcctccaccatcgcttcctcgtcatagattgtgatgttggctacatccttgacaaagccgatggcctttccaggttggaacttgcaataaccatccttgccctggtaggggtaggtgtcttcacccatgatccccttgttgtacaggatatactcgaaagcctggctggggagacccccttggcagccgtgattattgaagtcctgggcgcagtccaccagctgctgttccgccaaggacagcatctttccggttgcgatggcgatcgcagactccagggccccagtggtggagaaagtccagcaactgccgcaggcaccctgatttttcacaggtgagacaaaatttccttttttccgccagtccacggaaggtgggtagggaccagtacctcgaaggtagttacttttggtggctgagcaattctgaggctctgaccagagatacttgtgttttatttcagcaaagctcatgtctgaaaattggttcagtgccattttaaatgtgtggttcccattgttgtgggcgtttatcttcctccagttgctggcaaacgtctgcagcctgtggtggtactcctccgtactgtaggtcttacggtgcttagacatccatgacttgaagtgaaacttctctaaggagttcacgcacagttcggcggcaccgcagacggggactcccaggagccaggccccggcgcagagcagcggcagcgtggcccacatcgcagcgctggcggcttggctcttgcgctcagggtccgcggaggtggcggcccagagcgtcaactcggacgcgagggtcgaccaggaattc

SEQ ID NO: 107283 - DNA, 287 bp, Homo sapiens
tcaaactcttgaactctggtgatccacctgcctcagtctcccaaagtgctaggattacaggtgtgaaccaccacgcccagcctggttagaccattctttaatgataaacaaaacctctagaaaatttccaaaacaaagcagtcctccaagtaagatctctgaaggttaaggtcttctgcataaacagcaatatacaagaagcacaactccttttctacttagcttcaatgaaagaaaaatgtctgccttcttatcatttgggagatcagtgggcaccacaggcaggc

SEQ ID NO: 107284 - DNA, 3827 bp, Homo sapiens
ttttttttttttaggattattctatttttatataagtcaaaagtgagcaaaaatgtaaacacaatattgttatacacataacttggtaaaataattcattaaaaggacagagggagaattaccatacgtcaggatagttagctctgggggaaacagtgagtgtcaagaggggacacacagagattttggagtgctggcaagacctcctctgcatctagtttgtgattacacagctgttgctttacccattaagctctgttttaagtacttatttgtaagttatatttcacaaaatttaaaagaacaagggagaacctgtgtactaccaaatattaacaccaattaaagcgataattattgacagtgtagaaaaaacccagaaggcccagaaattggcctaagacacaaaagacacataagaatttaatattctataaaaatagcattactaatcagaggggaaatggtggtttcacatactgaaccaattggtaaattcttcgaaataaaatcaaatccctaccttatataatataaccaaatacatttgagatggattaaaaatttccttttcaccccaaacttgtactgatttagttaatgtatataaacaaaatttaaattccttttaaagataggtgtaaaagtgaaataagaaaatactagaagaaaataaggacatttatccattcttggattacaaaaatactttcaagcacatacacaaaggtagactcctaaagaaaacaacttctatactgaaataccacaaactatgttaaatgacaaataaggctaaaaaaagttacaatatatgacaaaggacggacattcttaagaacttatatgccaaaaaaagagcaaattctccaagcaagcaacagaaaaaatatgaatgagcaattctcaaaagaatgaatatagcatggccaatgaatatgaaaaaaaacacaaccttcactaagtaagaaaaacaaatacaaattttaaatgtagcccttttctgtaattattcaatttgcaaagattttaagtagtaattttcaattctgagcattggatatattgctaatgggaatgtaaatgaacatgatctctgcagtgagtaatatatataaaaattctcaaaaacactttcacctaacaatttcatttttagagcggtatcttctggaaataagtcattttctatggatgtgattaagatgttaatcatatcactatttacagattacattataatacataatcaaattgctgaataggaaataaatcttaaagttatggtatacccatgaaataaaatatcctacagctgtctaaaaagcaaaatatttaatatgggaacatattgacaatatatagagcagactacaaagcaatgtacattatgatttcatttttgagaatataaatgcataactatgcatagaaaaataagcaaaaacacaacatcaaaatgttaacagagtttatctccctagatggcaggattacagggaactgtgtgtccaggcacatgaactcttccatatcatccagcttccagaaataacatcaaatttttacgctgtgaaatcatttactattcgttttaaggaactaaaactaatgaggaatcttagggtcagtatacttttcacatttgcttgagggggggtaaggaatgaaaggcaataattacacctggaagcaaatgtgaacagtctttttcgaaaggaaaaagttgtatttaattaagtcccggtaaaacatcaccttagcatttgaagttgttctaattaatattttattcttcaacacttttaaagactccaatatattagacaaagaattttttgataatgtaagttaatttctctggagacaaccatataatcctctaaaatgacatgaacgtttatatatgggactgaagcttctgcagtctatatatacctatttggggggaaaaaagtaaagtactgacaattcaattttaacaaaaaaaaaatgctttccttatcaaacattaatgttgtgtacatgaacctatcatctgtgacagcaaggaactcaagccaggtgatgcacaagccttcacccagctcagttagcttgggcttctcctgtaccagatttgcctgaagtaacatgaggttatttaaaaagacctccacctagattgcagtgagccgagatccctgccactgcactccagcctgggcgacagagcaagactccatctcaaaaaaaaacacaaaaccaaacaaacaaaccaacaaaaaaaacctccactttccagcatctactcaaaagggaagtccttccctaatccagaagagagataacgttccttccctaagggaagacagaaaaaggagaagagcatttgttaagcattctcccatacatgtcttccctaggtatttcacatccaatgtctcaataaccccatgcaaacatgcatacaattctttagactgctcccttcattacccaaaaaagaagggaactatgtcttcctaattgattttaggtgcctggaacaactaagtatttcactgaaagacatgtaataaatgctatttgataggtaaaaaaaaggaaaaaagcaaagttacctcttttcatttggcttaaagaaaaaaaaagtatgttctactatatactaaaatatcagaccaatacacaatatattgcaaaattttaataccatgtggttaaacacaatattcaaatattaaacttttcaagcacatgaaagtcaccttctgaaagacaaactgggctttttttataactacctttgtgtaactttataaaattacttccctcaacaatatctgacactgatcttgatactagttagaaagtctgatgtaagatgatgacatctcaacgtcagtgatttaggagattatcttcagaattcatcagaggaccaatcgtcatcttcatcccttacttctcggtatctccctgaagactccccttctggattataactccgcattttaatattcagtctttcagctaatttttgcgctgcgagctttgcttgcatctcctcataattctgtttctgctgtttctgaagtgccaaggattcttctatggagagcagctgcgtgggcatatggtgaagtggtagaagccgagctgctgtgatgtcatcaagatgctgcttatccctgcgccgccgctcttctgaggaaataggagacccactcttctggcaatgactagatgaatcattttgtcgaaaaggtaacacattggttttaaatttacgcagctggggcactgggtttttggctcgcatttctagcacttccatgtaatgaggtttcttctcagtcccactggaaaggcctgtcaagttcttagtacttgcgttttcttctgactgttgttcaccttggtccgcaatggtgatcctctgtaacctgtcaataaacaggttgtcaaagctgctggaagtatcttccgcttgacttgaaacacgatgccgcgggtgatgctcactagcttcagatgaaggtggtaccctgtctctattgctggaagctgggcccttattcactgtgtactcaacctctgaagtctcttcatcaccttcaagagtaggacgtccaagtccctggttttgtgaggtttgagatgacttgatgttatctacagaggaacatccaggaactagtgatgaagtatcaagtatcgggtcagaattctgggccttatctgtacccacatcaacttctgcaattgctttttgccttagcttacagtctaaactaacagggttaaacagttcactttttcttctaacttcttcacattctgcc

SEQ ID NO: 107285 - DNA, 390 bp, Homo sapiens
ggcacgagggctggtcttgaactctcgacctcaggtgagccgcccggctcagcgtgccaaagtgctgggattacaggcatgagccaccatgcccagcagacctgaattattattattaaaatgttacatcaacatgtacaaatataaaactacatctaaactctaagtacagacttcttatgcttaaaactcttacacagtgttaaccccaagacagatttgcaattaagtagataaaataagacaacaaagtcaataataatcaaataaacaatatatgaaaaaaatacataatttaaggtgtgaatgattgaagtgtgtgtattgatttatacttggattgatgtattaagagatgcattaactgatatatatattgaggcggtgggg

SEQ ID NO: 107286 - DNA, 392 bp, Homo sapiens
ggcacgaggggttacaggtatgagccactgtgcccagcatgttgtctctacagaaaattaaaaaagaaagtaaaaaaaattagctgagtgtggcacctgtggcctagctagctactctagagactgaggtgggaggatcacttgaacccagtagtttgaggctacagtgagctaagattgtgccactgtgctccatcattgacagacaaatgatacttagttgatatgatatgacgactttcaacgaccgacacactgtacctggacacttagtgagaccctatcactatgatgatgaaatctcgatatccccaccattactactaactctatcagactctgtgcttactctgatcgaacatctgcactggcagggaaatctctaaattcac

SEQ ID NO: 107287 - DNA, 385 bp, Homo sapiens
ggcacgagcgggcgcctgtagtcccagctactcgggagactgaggcaggagagtggtgtgaacctgggaggcggatcttgcagagagccaagatcacgcctcagcactgctagatcaatatcacagacaatctctagagacatagatgatctgaataatgtcataaccttgactttgttgacggttatagaacactataatcaacaacatggaacaagaatgtattgatgggttgcgtatggtgtctcacgcctgttttacccgatcattctcacgcaccttctacccttctcctccagctcaactattactcctcttttcatgatgaccagctttactatcgggaccatctccagatacgtcggcggccaacatcttatctacg

SEQ ID NO: 107288 - DNA, 461 bp, Homo sapiens
ggcacgaggagatggagtttccctctggttgcccaggctcaagtgcaatggggcaatctcggctcactgcaacctccgccccacaggctcaagcgataaaaactttaaaacaagattttaaaaaatccaagtagaagaaaaaggcaaagcaaaaaagattatatgtgttgataatttccctcaaaaatactgcttaaaacaaacagcattgattcttatcagtttcatctttctttcctttcttgaaattgcattaaggagctcagagaagactaatgggttacaatcaggacactattggaaaaggaatatcaaagcgataaactgataaacatagaacaatatgatacgagaaagtgacatgtaatgaatgttagtcactatatctacctagtaggtctactatttcaaaaactgctaagaccattcggaatctcaatgctacgaaatcggaaagaggg

SEQ ID NO: 107289 - DNA, 429 bp, Homo sapiens
  misc_feature (1)...(429): n = a,t,c or g
tcgaggccgggaattcggcacgagcgctgttgctgctcgtgttgaatctagaaccgtagccagacatgggactggaggacgagcgaaagatgcttaccgaatccggagatcctgaggaggaggaagaggaacaggaggaattagtggatcccctaacaacagtgagagagcaatgcgagcagttgcagaaatgtgtaaaggcccgggagcggctagagctctgtgatgagcgtgtatcctctcgatcacatacagatgacgattgcccggaggagctctttgacttcttgcatgccaaggaccattgcgtggccctcaaactctttaacaacttgcaataaatgcgtggacttagttcaccccagtcttcatcatgtgtgcatgacaatatttacttatggctttggatgtaccatttgtttcttattn

SEQ ID NO: 107290 - DNA, 1282 bp, Homo sapiens
attagaaaaactcgagaacactaggccagtgcggtggaattcgcgggagcctctgtcggccgcggaagcctggagtgggcggtacgcagacgcgcgcggtgagacccgctgtctgctcagcggactctgcccgcccccacctccccctgcgtcgggccgacatgaaggactcgctggtgctgctgggccgtgtcccggcgcacccggactcccgctgctggttcctggcctggaaccccgcggggaccctgctggcctcgtgcggcggcgaccggagaatccgcatctggggcacggagggtgacagctggatctgcaagtctgtcctttctgaaggccaccagcgcaccgtgcggaaggtagcctggtccccctgcggtaattacctggcctctgccagctttgatgctaccacttgcatttggaagaagttgaccttgagaatttataatattctgagaaaactggaagcatgcataaagcccctctgctgtgcactgaagtatgggtgccttgaggaaaagcagttacacagttgagttgcaagctgaattggctgtgttcaaggcatgccctttagaattgaaagaactagcagattacggtatttagacttgaatatttggctgatattttctggaaattaatggaatgagcctctcacctcaagggaaacaactgatagtgttgccagtgataaagctttcaagcaaaaattggaatttccgaaaatctgtactccaccatgagctttattgttggggatattaacaaatgtgatttgtataatgaaatgcatttcatttggaagaattcaatgaaccatttttccaagtgaccagtacgtgatgttacaaaatcatgcatggctcaaagattgattcaaaagtgtaagacaggccagtggattttaatgtattaacaatataagagtgcattaagttttcggagtctacattgcctttaagaaactatgacttgtagtaagccgggcgcggtggctcacgcctgtaatcccaacactttgggaggccaaggtgggtggatcacaaggtcaggagttcaagaccagcctggccaatatggtgaaagtccgtctctactaaaattacaaaaattagccgggcgtggtggcagatcccttgtagtcccagctactcgggaggctgaggcaggagaatagcttgaacccgggaggagagaggttgtagtgagtcgagatcgtgccacttggacttccagccttgggtgacagagcgatgactccatttcaaaaaaaaaa

SEQ ID NO: 107291 - DNA, 346 bp, Homo sapiens
ggcacgagcagctaataagtgatagtgcacagatttaaaaataggcctaccttcagatcctgagctgtaaagtactatacaatatctctcatacataaattacatttttataaaaatgagatgacactgtatacattctttgtaatgtcctttcacttaataactttcttatatgcctagatgtattcaataacataattttaaggatgtataaaatacccttatcataaaagtataggccaagcgtggctggctgatgcctgtaatcccagcactttgggaggccaaggtgggcaaatcacttgagcccaggatttccagaccactctgggcaacatggcaaaac

SEQ ID NO: 107292 - DNA, 340 bp, Homo sapiens
ggcacgagagaatattctatggaataaaatactttacaaatttctgcagaactgcatttattagcctgtatattttatgcgaaataataaatcctttaaaaatgtttgtctccatttctttgttaaaaattttgatttaagagcctgaatatttttccattttccataactgggtttatttaaaagtcaaatggggccagttatggtgactcatgcctgtaatctcagcactttgggaggctaaggccaggggattgctggagcccaggactttgagacccgcctgggcaacatggtgagactccatctccacaaaaaaaattttttaattagccaggtg

SEQ ID NO: 107293 - DNA, 951 bp, Homo sapiens
acgcttgcacgaggatctgtggcagcaatcttgcagacatgaaatgaaaagtacaaacatgaaaaaccagcatattaaagatgccaggtcagaaaaatagaaagaacctgcttctgtgagccactgaatggtgccattaaccatctgcatttgagcattttgagaaaataaacctctatttcttaaagttctgtatcagtcagggtttcccagagaggcagaacaatagggatagagagatacatagagagagatatgagagggatagagagagacacagagagagatatgagaggggattaagggagttggctcatgtgattgtggaggctgagaaaccccaccacaggccattcataacctgggagaccttgggatgctggtggtctggctcagtacaagtccaaaagccttgggaaccagggaaactgatggtgtaattctcagtccaaggctgaattttcaagtctgagaacctgggggtgggatgggggagtgatagtttaagtcctggagtcccaaggttagaggatctggggtcctaatgtccatgggcagttggagaagagtgtatccctgctgcaggggagagagagaagccaattctcctttcttctgtttttattctacccaggcctccagtggattggaggtgcctgcccatattgagggcagatcttctctgtctagtccacgctaactcacatgccaatctcctctggaaacaccctcacagacacaccccaaaataatgccttaccagttctctagatattccttaatccagtcaagttgatgcctaaaattaaccatcacaggctttatggctctattacccaagaattctgttactttcagctgaaaacatttctaatggacatattccaattctgtatagatcacatctcaggttcatttcccattatatccttctctctcttgagctagaag

SEQ ID NO: 107294 - DNA, 895 bp, Homo sapiens
ctattgacttctaattttttcacagtgtaaacacagaatatatatagtctgtaatgatatagatttaaaactctaaaattttttaaatttctatcaaagtaatagttcacagtttaaaatacgtaagctccaggccctgctcaacactaggccctactccccacaccctgcccctaagaagcaatcaatttcaaactctgtgacttctaaatgtcttgcttacacagctattttttcttttcctttctttgagacagtcttgctctgtcgcccaggcgcgagggcagtggtacaatcatggctcactgcagccttcaactcatggggcaagcaatcctcccacctcagcctcccaaagtgttgggactacaggcatgagccacgaccatggcctatttcttcatttttcaactttagacattttctcttcactgtagaaagtcatgctttagctaatccatcccccactccaatatcttttacaaagaatcaaattttctatgaccttgcaaatctgaaaatatttttactccgaaattcaaagttgggttaagcatgcaatcttaggttgaaaatcagattcactttgtattttgaatgaacagcttcattagagtctaagtttccactgttcctaatggtaagtctaggactattctgattcctaaattttaaaggtagtatgctacctgccttccctcctattgccccctaccccagacaggaactttctgggagttttactttatcgcaaaagttctaaaatttcagtcagtgtggcaatttttacattttttaagctagtctctctcaatggtgtacctttgcaaactgaaggctcctgctctatcagttcaaggaaatgttcctgtctttttgaaagtttctcttctgg

SEQ ID NO: 107295 - DNA, 2224 bp, Homo sapiens
gcacttcgtaaggtttaaaaaggatgcttcgcgttttctctctcctttttggagacagattcgcagtggtcgcttcttctccttggatttgttaaggattccaagtaactcttatttggagagaagacgatctgcacttcgcattttggcattgacatttaattttagggtcctttatatagaagggagagtaggtaaactgattttttttttttaacagggagggtttgacaatctttggcagacttggagcaaaagattgaggtgcatttcatgcctccttttgagagtcttgctctgtcgcccaggctgtagtgcagtggcgcaatcttggctgcaacctcagcctcccaagtagctgggattacaaacataagccaccacgcccagccctcatacctcttttaaaagtcgacctgttttgcagaaagtctgctgtttttgtactaaaggctttggaatttggcatttagctaggaatgcacattctttcacctcattcatactttaagaaccacagaagtgactctgcttggccagaaggcacactgtgttggtggttatattaaaagtccttgagtattttgcttttcatgatcttgctcactgcaacttccgcctcccagggttcaggcgattctcctgcctcagcctcccaagtaggctgcgactacaggcgtgtagcaccacacctggggctaatttttgtattttttagtaggagatgaggtttcaccatattgggccagggctgttcttcaactcctggacctcgtgatcccggcccacctcaggcctcctcaaagtgctgggggattacagctgttgaggccaccctggcccggcccacttttgtatgatttctaatgtatttgtaatttacctaacaaattgcctaatctgctatgttaatgtatttatgaattaaaataaatacgactgcatgtttgtggttcatttttgtggaggtggctgtggtgacatcagccaagaatctgaatggtactgttgaaggaaactagcatgatagcttcagttctaaaggccctgaaacctagtctcaggtgggtcccccttgggttcactttatattggcagtttattgggaaaatggatattaggtcctgaccaataggaccgtaagtctgggttgagtgcaagatgagttagaccgattctttagcttcctgcagtgtagtggaggaaaaatcgatggtagcaacgggaggttgtatccctagctgatgagttgtatgagcctctactacctggcgcacctccgcctgaagattgccagaattgcttgcctcatgacgtgagtcacaatggaaactttgtcaagccccctgcactggctgccaacataaatgttcagtaccctgaaggatgggactgaagggggatcatctagaaggtaaagttacctactggcataggggaggtgggacagccgttaagccatttggaacttgatggagacaggtttgagggaggtgggtgagattggagtttggtggactgtagagcttgcttgccaaggtgttgaggtcagggttggtttgagaatggaagctagttactagctatgattgtgggggaacacagcttgatttttcttacaagctaagaggagtgaggcagtgtttaagagggcatgttaaatgcagccaggcttggtggctcacacccgtaatcccagcacttaggctaaggcaggcggatcacaacatctagagatcctggccaacgcggtgaaaccctgtctgtactgggaatgcaaaatggctgggccgtggtggtgtgcacctgtgggaggctgaggcgggaattgctggaacccgggagatggaggttgtactgagctgagaccttgcccactgcgctccagccctggtgacagagttaagtctcaaaaaaaaaaggcatcttccctaaagcaattgtatttgtgccttaccctgtcccaggcactgttcctaggtaagcactaagtgggctttaatacagcatattccaatggggaatccccaggaaccaaaagactaattgtccaagtccacaactagaagtgggcaccttttgcagaaacaaggcattcaaattccctgctcaggaaggaaggccagattgagttcagccccattcgtctgtatgcccagtcccatccgtgtcctgctgtaactacatagatctcacctgagtaaagtgatttttttctgaaaaa

SEQ ID NO: 107296 - DNA, 334 bp, Homo sapiens
cctggattaaatttgcagggggtcagctcaatatgggactacatatttgaaaggtatattaaggaattaaatactgaatgaactttaaaaatgtctttccttgctctttaatgataaagaaattaggtatcttcaaatggtaaactgaatttagctttagcaatagattagacgagctaattttaaaattttaactgaaataggctggacgcagtggcttacacctgtaatcccagcactttgggaggccgaggggggtggattgcttgagcctgggagtccaagtcttgtgtttcttttttttatactgaccactatactaatgaggaaaaag

SEQ ID NO: 107297 - DNA, 352 bp, Homo sapiens
ggcacgagcggcacgagattgtagagaagccagactgcagttgagttatagaatgcagcagacatctgcaagtgggagcggtgagtgcagctgatcctcacaaaaagttttctggcaaagggaaggagagatggagtcatacattaggaaggaaggaataggcaagattgaaagaagggtagttttgttaagtggaaaaatgttgagcgtgtttctgtgctgaaaggacactgccatggaagaagagattaaagatacagaaaagactggtaaaccttggctgggtgcagtggctcatgcctgtaatcccagtactttgggagaccaaggcaggcagattgcttaagcccag

SEQ ID NO: 107298 - DNA, 1475 bp, Homo sapiens; identical to SEQ ID NO: 107282

SEQ ID NO: 107299 - DNA, 1098 bp, Homo sapiens
  misc_feature (1)...(1098): n = a,t,c or g
ttttttttttttcctttatacttctgtttatttttcctgcttatgaaaacagccaacaattgcctttcaagggaagggaaggtaatgctgggaaaggtcctcaggagccctgagccaagttctcaagagagaagtgaggcagctggggatctgggtaggccagagtccgggccagggcctcagcatcctagaaccagggctgcctcccgaagagcagttcagagggcgtgactccatacgggcagggcggctccnaaaacaggcctgggaacacccttttcctcagcccaggggagcttcatcagggtcttgggcctgctttcagttcttgccagggaggacctggggaactttgtcttgcttgaaaagggacatggcaaacaggctggggcttggggtccctgggggcaagttgccaccttccagccgcagtggcaccatgggctctttccacggatttgcagcaggctggagctcagggtgtagtccacccgccagcccacacctgccaacctattcatgcgtaggctgcagacccgcaagtgcttctgcaaggggctttgcttctcctcataacagcggcacaggctggccgcgtgctctttgggcagccccagctgctgcagttcactggacaaggattcgccatcgacactgtgcttggccgcactggagaggatgaaactcagcactgccactgtggccttcacatcgcctgactcaaacttggcgtcagccgtgagcttcaggatcttctcatactatggggaaaggagaccttcagggggtgccaggcccctgctcaccagcccctcacccccagcctggatcctgcgataaggaacagacaggctggaaagaaggaagggaggtgcccagagaggttgagaggctggctcacccgtctccctgggcctagtgcagagtttcagggcagtggtggtcataaggtcatgggacaatggggtgctggatcttgtactcacatcaatcccctgtcccagcagctcctttagtacctggctgcagagcagccgcaacttcacagaggactggaagggaagtccttacatcagccaggctggcaaacctcgtgcc

SEQ ID NO: 107300 - DNA, 467 bp, Homo sapiens
cccacgcatacgacgcatctcaccagatatccctccccatggaatagtggcaatcatctcagtccataatcaagatattgggagctgaacctgccctatgaccccttgagtgctcaagtgctgtctggttaagtgctgagtaagtctggaaatccatactggggtctcagtactaaccatgagattaaaggtcaagaaggctgtgcatggcagctcacgcctgtaatcccggctctttgggaggctgaggcgggaggatcacttgagcccaggagtttgagaccagcctgggcaacctcatggctaccaagagagatcaagctggatctactgaaaaatgggtgcgggccttctaaaatcacccagggggggccaatggttgccggttctttgaagctataaatcttctacataaggtgggcgggaataataccactatggggtgctttttgaacagaaccctttct

SEQ ID NO: 107301 - DNA, 391 bp, Homo sapiens
cccacgcgtccgcccacgcgtccgcccacgcgtccgctatcaacattatagaaattttgccttgttgccttatgttcttccaaatgtactgttaaataaaaataaagggttaccccatgcaaaaaaaaaaaaaaaaaaaaaaaaaaaaaaaaaaaaaaaaaaggggggcccttttaaaaaaacccttgggggggccaaatttatccgccgttaaaaaaaaaaaattttttcccataaaggggtctaaaaaaaacccctttgggaattttttgaaaaaaaactttttttttggggggaaaaaaatgtgaaaaacctccccaaaaaaattaaatcttttaggggaaaaaaaaaattttataggtaaaaagggagaaaaatactcctattttct

SEQ ID NO: 107302 - DNA, 475 bp, Homo sapiens
  misc_feature (1)...(475): n = a,t,c or g
catcgatcngcagtaggtaccgctcgagaacctttgggtcgacccacgcgtccgcgagttaatgggtgcagtgcaccagcatggcacatgtatacatatgtaagtaacctgcacaatgtgcacatgtaccctaaagcttaaagtataataaaaaatacataagtaaataaataagaaaaagaaagccaggcatggtgacatgtgcctgtggacccagctattagggaggctgaggtgggaggatcccttgaacccaggaggttgagtctgtaacgagcagtgattacgccactgcactccagcctgggcaagaccctgtctcaaaaaaaaggaactctttaaattttaccacccctgcctaccaagggcatcaactatagggtcaccagtataatatactcagggtgcccaatgacttttgaataacgggggcaaaacgcaaaaaataggaacttttaactcgggtataaccaag

SEQ ID NO: 107303 - DNA, 436 bp, Homo sapiens
tttagattggcttagataaataagcattcataaaaaatatgtactaattaacccaaatgccttttagttcatgtgacttaagtatatctttaataaacaaatcacctttaaaattgttggtataataaaaatacaaatgttctcacaattgtcagcatatatttttccctgagtttactcgtcagacagctttatatttgtctctgatagatgttttaagatatcagggtttgacactaagatgataaaactataaacccatcctaaaacagaataatctttgtatgatctttgataaataagactaatttggctgagtgcggtggatcatgcctgtaattccagcactttgggaggccatggtgtgcagatgactaaaggtcaggactttgagaccaacctggccaacacagcaaatccccatccctactaaatg

SEQ ID NO: 107304 - DNA, 373 bp, Homo sapiens
tattttttgtagagatggtgtttttccatgttgcccaggctggtctcaaactcctgggctcaagcagtccttctgtctcggcctcccaaagtactgggattgcaggcatgtcccaccatgcccagactaatatttacttttaatcagactaagatagggttactacttgagttgctatggctccagctgaaagaaagcccgtgcagtcatatcacgcgtaaacatttgctttatgctaaaaatatggtggacctggcattacagctattacaaatctcctaagatgtctcgggtagtgtattagttacttttcatactgctatgaagaaatactggaaactgggtaatttataaagaacaagaggtttaatgt

SEQ ID NO: 107305 - DNA, 433 bp, Homo sapiens
cggacgcgtgggtataaatccccctacacacacacacacatacacacacacacacacacacacacggttatcttttagctctatcagggacggaatttttgtctgtcttgtacatggcatctgaaagggagtgtcgcacatacaatctgatgctgaataaatgacgcacacaattatttataaagtgtgtcttttaattagaaaaaaatcctgtatactccactgagaaatgtttgcaaaccaaagcacctcaccagatgtatataatatctacaaaataattttgtgcttgaaccttgtttaaaaatctttttctggcttgaaaaaaagcagtgctctaaaaaatatggctggaaaaaaaatataccctcatattttgaagcgctgtgataaaaacattgtctccaaatgtattgaataacactctattttg

SEQ ID NO: 107306 - DNA, 404 bp, Homo sapiens
  misc_feature (1)...(404): n = a,t,c or g
tcttgctgtgttgcccaggtaggtctcaaactcctgggcttaaacaatactcccacccgggcctcccagagtgctgggattacaggtgcaagccactgtgcctggctgacattgggcttttatatcttcatgcccttcctctctctgtcctctctgcttaaaatacctctctccacttatttatttgactgaatgcttactgactattcatgataatcaggagaaccacctcaacttctattccagaataaatatagactccctcctggtaaaaataaacagagagagaaaaagtaatgatatgaaaacacaaaaagattgagactttcaacagaacggaacatggtcagagaaaattagtttcctttgaaatgaaatttccacaagaagaagaggaaaaaaan

SEQ ID NO: 107307 - DNA, 484 bp, Homo sapiens
  misc_feature (1)...(484): n = a,t,c or g
ctagaancccatagaangccctagaanngncgcnnaaannnnggnngganccaagcgggcgngggattacaggtgtccgccaccacacccagctaatttttgttatttttagtagagatggggtttcactgtgttggtcaggctggtctccaactggtgccctcaggtgagccactgtgccccaccttttcctgggtttcataaggatctgaagtggtggattccttgtttttgctagtatctcatttagagttgagatggaccttaaaactcatctgttttaactcactttttaatagatgagttaaacttaatttacttaaggatgtacagttagagcctggaacttcaaccattattcactccccatgccctgtttccccccacttcgaaattaaatgcggttagcatcatatagttcattttccccctccatgctgctgtgtgattcttgactttgggtatgagtttttcatccttcatg

SEQ ID NO: 107308 - DNA, 390 bp, Homo sapiens
cggacgcgtggcacggctgaaaagatggtcctaaggggacaggaggaagtgagacgaacgaatccgtggaaatgaccgagtgttgctcagttacccaggctggagtgcaatggcatgatcttggctcactgcagcctccacctcctgggttcaagcggttctcgtgcctcggtctcccgagtagctgggattacagcaggaatgattgatatgagcagagcatcatttcaaattctctcataagactggattgtaaatcacttactgtcaagacggcggccagttgccattcaactataattaattcatacactattgctattgacatggttctccgttgctttggtatttgcgctacatatgcatctccgttctccactgtaatccgcg

SEQ ID NO: 107309 - DNA, 439 bp, Homo sapiens
cccacgcgtccgactagttctagatcgcgagcggcgcccttttttttttttttttttttttttttttttggggggggagggggaaaaacttcccccccccggtgttttaaaccctttttaaaaaaggggggaaaaccccgggggttttttaggggtggggggggggccccctttttttttttcccccccaaaccccggaataagggttttttttttcccccaaaacttttttttttgggaaaaaacccaaagggtttttcaaaaaaaaaaaaatttttccccttttttttttttttttttccccctttttccccggggaccccaaaattttttttcccaaaataattgggaaaaaatttttttttttttccccctttaaaaaaaaacctctttatttttaaaaaaagggcggttttttttttaataagcggtattttcc

SEQ ID NO: 107310 - DNA, 438 bp, Homo sapiens
  misc_feature (1)...(438): n = a,t,c or g
tttgataccttggttacctggccgcaattcccgggaccttgtgatccacccacctcgcctcccaaagtgctgggattacaggcgtgagccaccacgcccagcctcctttaaatattcttgagctttgctctgagatgcttgaaaataattgatctttctcaggcttctttctaagttttgttaggtaccaccagagaaagcgttagtattagggctattttcccccctactactaaggcaatatccttctgagtacactagggtgcccatttatttatttaggatgttccatttattataaagtattttcattcagctggtgggaagaagaaatagtctatgctttgtgtgagtgctagagatattttacttcataaatactttccatttactttactttttcttcattttttgttaatagctctagcatttctcaan

SEQ ID NO: 107311 - DNA, 499 bp, Homo sapiens
  misc_feature (1)...(499): n = a,t,c or g
cgccccccccagnnacnnaatggacgccttcngnactgatcccgatctgacgggccgacccacgcgtncgtgacattttacaagcagatggagcacactcactcttcccaacaaccccatcactgaatgcatatatcatattctcttcccccattggtccccacactcatcgcccttaccacgctactcctacctatctccccttttatactaataatcttataaaaaaaaaaaaaaaaaaaaaaaaaaaaaaaaaaaaaaaaaaaaaaaaaaaaaaaaaaaaaaaaaaaaaaaaaaaaaaaaaggggggggggccctttaaaaaaacccccgggggggccccaattttcgggggggggggaaaataattttttttttttttggggggggataataaaaccccccgggggtttttggggaggaaccctttcttggggggggcgggattggggcgccccccccccccccgagatatgagtcccgggggggaaaaaaattg

SEQ ID NO: 107312 - DNA, 1988 bp, Homo sapiens
aaaaaacagcagggttagcttgtccctcccctccctcttcagcttcccagacactgattctggaatgaaaattcacctgcctctgagttggctcctaatgggggcgggagtgttacttcggttcccaggttggaagattatctcacccggccccagctatataagctgaccggtgtggaggggcccagcagggccaactccagggattccttccacgacagaaaaacatacaagactccttcagccaacatgatggtactgaaagtagaggaactggtcactggaaagaagaatggcaatggggaggcaggggaattccttcctgaggatttcagagatggagagtatgaagctgctgttactttagagaagcaggaggatctgaagacacttctagcccaccctgtgaccctgggggagcaacagtggaaaagcgagaaacaacgagaggcagagctcaaaaagaaaaaactagaacaaagatcaaagcttgaaaatttagaagaccttgaaataatcattcaactgaagaaaaggaaaaaatacaggaaaactaaagttccagttgtaaaggaaccagaacctgaaatcattacggaacctgtggatgtgcctacgtttctgaaggctgctctggagaataaactgccagtagtagaaaaattcttgtcagacaagaacaatccagatgtttgtgatgagtataaacggacagctcttcatagagcatgcttggaaggacatttggcaattgtggagaagttaatggaagctggagcccagatcgaattccgtgatatgcttgaatccacagccatccactgggcaagccgtggaggaaacctggatgttttaaaattgttgctgaataaaggagcaaaaattagcgcccgagataagttgctcagcacagcgctgcatgtggcggtgaggactggccactatgagtgcgcggagcatcttatcgcctgtgaggcagacctcaacgccaaagacagagaaggagataccccgttgcatgatgcggtgagactgaaccgctataagatgatccgactcctgattatgtatggcgcggatctcaacatcaagaactgtgctgggaagacgccgatggatctggtgctacactggcagaatggaaccaaagcaatattcgacagcctcagagagaactcctacaagacctctcgcatagctacattctgaggcaaacgacagactcttaatcagtaaatgttcactggcattttgaaggcatggcccaagagaagagacactagccataaaatctagtttctatttatcaacgtgttgtgaagatgtacctaatgaagttttgagaaagcacagggttataggtgtttaaatttcctttagtgaaactcttatttatttttatgtattcctgtttatttatttactgccacgctactgatattcagaccttcatgatcatccatctggtgagcagagcttcatttgtatataacactttcagagccttcccacccataggtagttcttaaaccaggtgaaagagcaaagttcaagtgcctacttatgtgtcattcgctcatgtaagagtttttaagagagggctgattatcacagccctcttttctcctgaatttttaatgcagaagtttgaatgaagcaagggaaggcatgtagggacaggaaaggaaacaatggaaggaaagtgattctgtgaaaaggacagtgaagccagctattttacccccaggctggattttttttttttttttttttttttttttttttaccgagtacacagagtacccaagtgaagagaacgtcatgagtgtaagtgcaaatcagtggaaggagcggcaaactgggacatgcagaattgaatttgctcaaaaaagatgaaaggaaatgcaaactgtaaatgtataaatgtatattgtattgtatgtacattttatattcataataaaggcaatcaaactctaaaaaaaaaa

SEQ ID NO: 107313 - DNA, 398 bp, Homo sapiens
cgattacattccattcatgtacattccattccagtcaattacattcgagttcattacgttacattccagtatattccattgtattcgatcccattcctttcaattccatttcattcgactccattatattcaattccattccactcgaatccattccattagaggacattccattccaatgcattccattccattccatagcattccactgcattcgattccattccatttgatgccattacatttgatgccatcccatgacattccattccattcgagtccattccgttccaattcattccattccgtttcatgaaattcgagtcctttccagtacatttcattccaatcccatccaatcccatctactccattcaattcctttccattccatttga

SEQ ID NO: 107314 - DNA, 500 bp, Homo sapiens
  misc_feature (1)...(500): n = a,t,c or g
gggacaaaanttttgagttcagatgagcctcggaaaancgcgnngacccacgcgtccgaacgagagagtgggactcattaaattatgagaatcatatttacctaatgcccttcatttacataaatattatactagggggtaccatctcacttctaggaagactagtatatcgctcacacctcatatcctccctactatgcctagaaggaataatactatcgctgttcattatagctactctcataaccctcaacacccactccctcttaaccaatattgggcctattgccatactagtctttgccgcctgcgaagcagcggggggcctatccctactaggctcaatctccaacacatatggcctaaactacgtacataacctaaacctactccaatgctaaaactaatcgtcccaacaattatattactaccactgacatgactttccaagaaacacatattttgaatcaacacagccacccacagcctaattattaagg

SEQ ID NO: 107315 - DNA, 429 bp, Homo sapiens
atctgtgctcaaattattggtttacctgcaaactatacagacaagaggtagctgctagagagccaggctaaaacattgaaaataagaataaagcaatggaatagagatatcagaggctgcacactgttgaggagacagtttcactctgttggccgggctggtctccagctcctaaccgcgagtgatctgccagcctcggcctctggaggtgccgggattgcagacggagtctcgttcactcagtgctcaatgttgcccaggctggagtgcagtggcgtgatctcagctcgctacaacctccacctcccagccgcctgccttggcctcccaaagtgctgagatagcagcctctgcccggccgccaccccatctgggaagtgaggagcgtctctgcctggccgccaatcgtgtgggatggaggagccactg

SEQ ID NO: 107316 - DNA, 468 bp, Homo sapiens
  misc_feature (1)...(468): n = a,t,c or g
gaatggganatatgtaactatgtatcagncngganannncggnnganccacgcgtncgctggatttgttaggaggttagaaaggttttagagctacttatagagattcttactattctcaaggaccttcagagatctcagagcacccactctaaaagcaactgtcacttgtagtccgtgcgagaataccaaaaaaaaaaaaaaaaaaaaaaaaaaaaaaaaaaaaaaaaaaaaaaaagggggggggcccataaaaaaaacttcggggggggcacaattttccgggggggggaaaaaaataattttttcctattagggggggcaaaaaaaaacccctgggggaattttgaagaaaaaacttttttttgggggggggcttattggggccaaacccctccaaaaaaaacagacccttagggaaaaaataaaaatttaaggggaatagggggagaaaaaccccttcagcgcc

SEQ ID NO: 107317 - DNA, 397 bp, Homo sapiens
  misc_feature (1)...(397): n = a,t,c or g
gaaaaacgttcctcttgcctactgatctttttgtcatatttcccctcaaacttttctttctttcctttgtttttttttttttttttttttggggggggaaaaccccttttttccccaaagggggggggggggggggggaatttaaatttaagggacccccccccctggggtttaaaaggattttttggccccaaccccccgggggaaaaaattttttaataaaaaaagggggggggccttttaaagaaaaaaaaaaagagaaaaaaaacaaaaaaaaaaaaaaaaaaaaaaaaataaaaaaaaataaaaaacatgattcgtangaacaagtgccggcccgacctnnncntggggggggggcggaaaaaaaaaaaccatgctgggcagccataattac

SEQ ID NO: 107318 - DNA, 380 bp, Homo sapiens
tagactacaagaagccagcctctccccagttcctgaaatcctgggaggcgcactgccaagcgccaagagaacatcctaccttctgctgagtactctctgcttacttttgtctgagacggcctcaagaggcaactctctcacaggccttggccacagatctgatcattacaatagcgtcaggagtggagggcaaagtctatattctgcctgcccaatcgttaccacaattcacggcacctgttacggagggaaggccaagtgctgcaagtgagctgggagtgaccaaaagaactgacacagaagtgaaatgaactttttataagcattcttttaataaaggaaaattgcttttgaagtataaaaaaaaaaaaaaaaaaaat

SEQ ID NO: 107319 - DNA, 402 bp, Homo sapiens
  misc_feature (1)...(402): n = a,t,c or g
atgttgccaaggctggtctcaaactcctgggctcaagtggtccgcccacctcggcttcccagagtgttgggattacaggtgtgagccaccgcccccagccccttccccactttttacaccggtgaactgctcataaaaattctttcctcttctctcccagctaaagatctcatataaagcaataatcatttgccaggtgacagtcaattaaaagccggttgtcacctccaggccacaggtccctcggggctcccagacagagaggcttagggcagccccaacggaggggctgtccttccactgctaagcggctgctgcagtcaagtgagtgagcgcttctttgctgggtaataaaagctcccattgttcncnnnnnnnnnnnnnnnnnnnnnnnnnnnnnnn

SEQ ID NO: 107320 - DNA, 891 bp, Homo sapiens
tttcatctgatatcaaaataatcattgaaatacaattccattgtaaagttgtacagaaagttatagagattatattgtgatgctggaacttggagtgagacacacatcatttggcatttgagttgaatggtaattcacagtaatgctgccgttgttcgggacttaaagacacttgacctgtttgggctgttgccacttaaaagttcatgaccacaaatgtccacagtgtcttcctctgaggaaactcgaatcctgaaatggaaattctttgtggcagataactggcttatgacaccttgaaaagttcaagtgctcatataacacaccacactgaaccccctttcctacagcaatatgttcactatgttaccaatttgcaacttgtgcttcaatagtggaatctactttcattgttaacactgagctaaagaaaaaaagccgtgtgttttatgaatgaccttatctgtttcctggataatacctttaagaataatgtcctgagtcaggcgtggtggtgcgtgcatctagtcccaactatttgggaggctgaggcaggaggatcgcttgagcccaggagtttaaagctgcagtgccctgtggttgcacctgtgaataactgcactccagcctgggcaacatagcgagacctcatctccaaaaaagaaaacaaaaaacaaaaaaaggaatgatgttctgtagagatggcctttcacttgaggagtactcagttttcaggttcttcctagctcggggcttttaaattttgaaatctaaacattctttcccaccatcctttttgactgttgaccttggttttctcttctaagattctgtccctctgcttccttactttttttcctttttgaatgctatctttatctggcttttgct

SEQ ID NO: 107321 - DNA, 445 bp, Homo sapiens
  misc_feature (1)...(445): n = a,t,c or g
gaaaagagaacatttgacaaaagtattttaaggcaggttttttgtttgtttgttttttgttttttgttttttgttttgagaccgagtctcgctctgttgcccaggctggagtgtgcagtggcgcgatctcggaaaaaaaaaaaaaaaaaaaaataaaaaataaaaaaataaaaaaaaaaaaaatatttanggggtgccctttttaaaaagcctccaggggggggaaaaatccccgggcattggaacactatatttttttttttatagggggggttttaataacccccctgggggtggtggggagaaacttttttttttgggtggggtgcttcgctccccccccccccccacaatttataggtggggggaagataaaaaaatttttataggtaatgggggtaaacaaccccgcctttctcttggagggaaatttttttaattaaac

SEQ ID NO: 107322 - DNA, 423 bp, Homo sapiens
cggacgcgtgggttgaactcctgacctcaggtgatccgcctgcctcggcctccccaagtgttgggattacaggcgtgagccacagccccacgctgattatagtgttagatgtagaaaagttgcaggcgcggtgcaaagagctccctgccaccctgcctcgctcccgtggaggcccccatggggcagtcctcccacctgaggagcccccgccgacccgcggtgttgggtccacacgtgattcagatgtgctgagtctccccagtgtcctttccggtcttgggagtccacgtggcgtttgatcgcccatcttcttaggctcctctggggtgacagttcctcagacctcccttgttttgagggctctggcagttttgaggattggtctcatgttttgtaggacgttcctcagttgcgattgtctga

SEQ ID NO: 107323 - DNA, 408 bp, Homo sapiens
cggacgcgtgggtagttcttaatcgcgagcggccgccctttttttttttttttttttttttgtttttttttttttttttttttttttttttttttttttacaattttttttttttttttaaagaaaaaattatataaataaaatcctttttttaaaagggggggggggttttttgtaaacctaaaaaaaaaatttttataaagtttttaaaaaaaaaaaaaaaagacacctctcaaaaaaaatggggggggggcgcaaaatttttttaaaaaaaaaaaaaatcggggggggaaaaaaaaaaaacggaaaaacccccccctctccccgcggggggagggaaaaaacccctcctaaaccccttttttggggggggggggggaaaaaaatgggaaaacaccctcttttttg

SEQ ID NO: 107324 - DNA, 410 bp, Homo sapiens
ttttttgttttttgagaaggagtttcactcttgttgcccaggctggagtgcagaggcacgatctcggctcactgcaacctacgccaccgagggagacgctgtactcctgcctcagcctcccaaatactcaggaggctgaagcaggagaatcacttgaacctgggaggcggaggttacagagaccctataaaattgcaaagaacggcatcctaggcgacttagggaaactctgaaaccaaaacaaaaaaaaagtggttttttaaaggcttaactgtataaaaaatacttggaaaagggaacccagaaaaaatattttgtcccaaatttggaaaaaaaaaaggagttttccttttagctctttggaaaaaaaaaaagacccacccttggggcaggagtttcccccccctctc

SEQ ID NO: 107325 - DNA, 475 bp, Homo sapiens
  misc_feature (1)...(475): n = a,t,c or g
tattgaacntcctgtaccggnccggatagaccggccctacccacgcgtccgggcgggtggatcacttggggccgggaggtcagagaccagcctggccaatgtggtgaaaccccgtctctactaaagatagaaaaattagccgggtgtgatggcacgtgcctagagcaaaactgtctacaaaataataatagtaataataaagtaggaataaggtgatgttaacaaatatgatttttgttaggtatgatgatgataatatggttaaattggacaattttttatagctgcatgtgaaagaatttcgagatgaactatcataataactgcattttattataaaatacctaggcccaaaaaggagggctaaatgtagaaaatccttaaatctaaatgtagagtatatggatgaaaattttcataataaaaagttaagaaaccaaacaaaatgaaattatattatttagtgatgcatctg

SEQ ID NO: 107326 - DNA, 498 bp, Homo sapiens
  misc_feature (1)...(498): n = a,t,c or g
gggagatggganaaaatcggatgatcctaaaccctcggaaannncggnngacccacgcgtccgcaaggcgggaggatggcttgagcccaggagataatgaccttttgggcatcatagtgagaccccacctataccaaagtagaaaggaaaatagcctggcatgggggtgcaggcctgtattcccatctattggggaggctgaaatgggagaatcgcttgagcccaggagtccaaggttacaatgagctatgataatccccctgcagattaaaggcagagtagggaagcatgcctggtgaggacaaggaacagcagggagactagtgtggccagagaaacacaggtgctcaaacagtgcttgctgagtgattgaattaccccatcatgtgtggcaaacactttagtttggtccccagagtgccacagtagctctcaaattgtgactcccactgactcctttttcccaggtttttaataaatatccttctccattgaaag

SEQ ID NO: 107327 - DNA, 431 bp, Homo sapiens
atgggatgggataatatgtttaatggcaaagatattaagctcaatgactaaaccctgtggccctcaggtagaggtttaaataataaaaggaatggccacaagtgggggaaaataaactagtgaattggggggtcatggaagccaaacgaagaaatgaagaaaatagttgaaggccgggcacaggagcacatgcctatctataatcccaacactttgggatatcgagacgggcggatcacttgagctcaaatgttggagaccagcctgagcaacatggcaaaaactccctctacaaatacaaaaaaattaaccagggctgggcttggtggctcacgcctgtaatcccaccactttgggagggccaagtgggcggatcacctgagggcaaggagttaaaaacacccctgcgcaacttggggaaaccccacctg

SEQ ID NO: 107328 - DNA, 394 bp, Homo sapiens
  misc_feature (1)...(394): n = a,t,c or g
gtccaggagctggaggctgcaatgagttatgagctataagaagaccttgtctctataaaaaaaattaaataaaaaaagaggctctcagctgggcgtggtggctcacacctgtaatcccagcactctggaaagccaatgcgggcggatcacctgaggncannattttttttttannntgttttttatgttgattntttttttttgtggtttttatgagggttaggtggtttagttatggtaaaattataaagtggaatagtattgtggttggaaaaaaaaattgtttttttttgtggtggcggggcggtaaataatatagaaaagatggggttttttataaaagaggaggtgggggccacccctttttaaaaaccaacaaatatttttttttttt

SEQ ID NO: 107329 - DNA, 467 bp, Homo sapiens
  misc_feature (1)...(467): n = a,t,c or g
ctagttctagatcgcgagcggccgcccttcnttttttctttctttttttcttttttttttttttttttttgggggggggggcaaaaaaaaaacaaaaaaatttttttcccaagactttctggggccacccaaaattttggggggggggggttttttttcttttttttttggggggcccttttttttaaaaaaggggaaaaaatccccccaaaaccttttttttttaaaaaaaaatccccccccgtttttttttccccccccaaaaaaacccctttggggtttttgagaagcttttaaaaactcaccaaaaccccccgccaccagccgcctttgctttttttttttttttttttaaaaaaaaaacctttttttttttttttaaaaaagccccctttttttttaaaaaaaaaaaaaaaaaaaggggcgccctttttatttttcccttgtgggcccccttcttccccccg

SEQ ID NO: 107330 - DNA, 370 bp, Homo sapiens
cttcaagagtccatggaatgtggaatgggaaagactgaagtagtgcaagtcttggctaagcttctattaaggggtgttaggagctgataaaataacctggtctttatagacatcccacactgtagttctctaagctacagattctcagatttttctattttataaacgagtaaaaatatttttttaatttgagaacaaacataaggttgctatctttttttcttttgggtaagaaggaacttttttaaactaccagtttcacacacacacacacacacacacacacacacacacacacagagagagaaattccaccatgattggtaaaataagggagggttttgctgcaataacacacaactcctatatt

SEQ ID NO: 107331 - DNA, 353 bp, Homo sapiens
  misc_feature (1)...(353): n = a,t,c or g
gttctaaaccctggggattcagctctgaaccaaacgcaagggttataagacaaataaaggatattgggcctgggcatggtggctcacacctgtaatcccagcactttttatagctgaagggaacctaattttacagatgcagaaacaggctcaaccagaggcaggttgtggatgtgtgtgtgtgtgcgtgtgtgcgtgcatgtgtgtgtgtgtgtgtgtgtttaaagttttcttttagaggcagggtctcactgcatcgctcaggctggagtgcagtggctattcagacatgatcatagcacactgcagtctcaagctcccgggccncaagcaatnctcccgnctcagcctgt

SEQ ID NO: 107332 - DNA, 514 bp, Homo sapiens
  misc_feature (1)...(514): n = a,t,c or g
ggcacgaggagagatttggtgatgaaagaatctagatttcttaactccttattaatacgtactttaagtattggactacaaacttgcatatgtcactggtaatcattgaacacatgttatcatgtaggcactatcaaattggagcctataattgatgaatgagggatatcactactcatctacagtaaagggtcctgaaatgcagaaatatggaactggtgtgactgtatctttggatatttcaagagaagccagaatacatgaattggattcntgtgtgtgtgtgtgtgtgtgtgtgtgtgtgtgtgtgtgtgtgtgtgtgatnntngcccatctattacactctaacacttttttttttagagagagatactttctctctcaaaagcgggagcgccggggggatcttgtggcacactgctctccacacatcgtggtgacaaggctactctctcccctccgccaatagagtttgtgaacacgcgcacacatccccgctcccagatattgttgg

SEQ ID NO: 107333 - DNA, 426 bp, Homo sapiens
ggcacgagtgatctcctgggcacaagggatcctcctccctcagcctcctgagtagctgggactccaggtacatgccaccctgcctggctaacttttaaaacagttttttgtagagacaggatctcactatgatgcacaggctctgttgaacttaaatttttagaatgtctagctttggacagtggggcggcaaattttttcaaggttaaggcaatctggagaaatagaagggtgttttgtgttccttgggttatgaagaccttatttgaatagttattaaaatgagcttagaaaataatactaggttggctgggggtggtggctcacacctgtaatcccagcactttgggaggctaaggtgggtggatcatgaggtcatgagttcaagtccagcctatccaagatggtgagaaccctgcagtacta

SEQ ID NO: 107334 - DNA, 382 bp, Homo sapiens
  misc_feature (1)...(382): n = a,t,c or g
ggcacgagcacacctggctaattttttgcatttttttgtagaggcagggtttcatcatgttgaccaggctggtctcaaattcgccttggcctcccaaagtgctgggattacaggagtgagccactgcctcctgcctcatctcccatttcatctgttcttcaattttgttttttcagtcatttttttcccctaaaatgcatttgatagtgatagatggggatatatcagagacttcttttgtttccttgactaacttctggggtttatctgtctttgcctattatgtttcttctctcatcccccactccctgttttattggtggtgtggcgggtgtggggnntaacgtttctcctcatagaccctttgctggattgtttcttt

SEQ ID NO: 107335 - DNA, 1679 bp, Homo sapiens
atatttatatggtcattttcatagactttacttcctatagggaaataagtaattgaaccatgcaggatcttttgacccacttaatcaaacctaagtggatccctccttttcagaccacaaagttatagcccaggaaccaacgtcatatagataggttgcatgaaatcaggcatggtcctgggaagaggcagttccttgggagctgcctcacaaaccatagaatagccacaaatatcacacagccatactgatcagacgtttgcactgtgattcttctttcctagtttcagcacccatttggactttcacaatcagagatggcagcggtaaaggcatcaacatcgaaagctaccaggccttggtattctcatccggtatatgcaagatactggcaacattatcatcaagcaatggcttggatgcaaagccatcacaatgcctacaggaaggccgtggaatcctgtttcaatcttccatggtacttaccttctgcgcttcttccccaaagctcttacgataatgaggctgcgtatcctcagtccttctatgaccatcatgtggcctggcaggactacccctgcagttcttcacatttcagaagatctgggcagcatccacgttacagcagtaggatccaggcatccacaaaagaagaccaagctttgtccaaagaggaagagatggagactgagtcagatgcagaggtagaatgtgacctgagcaatatggaaatcactgaagagctccgccagtactttgcagagaccgagaggcatagagaagaacgacggcggcagcagcagctggatgcagagcgcctggacagctatgtgaacgctgaccacgacctgtactgcaacacccgccggtcggtagaagccccaactgagaggcctggtgagcggcgccaggccgagatgaagcgtttgtacggggacagtgctgccaagatccaagccatggaggccgcggtgcagctgagctttgacaagcactgtgaccgaaagcagcccaagtactggccggtcatccccctgaagttctgagctcagggcacagggtacccagcctctccttcttccttttgggtacacgctctttatctctccttctgtacatttcttagggaaaggggactttgtactggggtacaggcatgttcaccacagtcccagtgggcctgtcacggggtggatgtactatgccagccacttggaggtctgcaggacatgttctgttgccaacatgataaattttctcctgacataaaataattttgcatatactatactggttttttatgttgttggtaacagttcaattcattaacgttcttgcctagagatactgcctggtgttttgcttttttatcttttcttgtctttaacctgtctgaactacacaaatgcctttaaaaaaccagatatcctctctgactctagctccattagcccccactaaaaatgagccaagtgtgtagtgagacaaataccactacctgtagtggagagggatgcatgttctataaagggccagagagtgaatatctttggcactgcaagccacacggtcagtgttgtgactactcaaccctccctttgtagtgtgaaagcagctgtagacagtaagtaaacaaatgggtgtggctgtgttctaataaaactttatttataaaaaca

SEQ ID NO: 107336 - DNA, 559 bp, Homo sapiens
  misc_feature (1)...(559): n = a,t,c or g
cggacgcgtggggtcgttttccgtgagagacgtagagctgagcgacccagcccgcgagcgaggtgagatgccggtggccgtgggtccctacggacagtcccagccaagctgcttcgaccgtgtcaaaatgggcttcgtgatgggttgcgccgtgggcatggcggccggggcgctcttcggcaccttttcctgtctcaggatcggaatgcggggtcgagagctgatgggcggcattgggaaaaccatgatgcagagtggcggcacctttggcacattcatggccattgggatgggcatccgatgctaaccatggttgccaactacatctgtcccttcccatcaatcccagcccatgtactaataaaagaaagtctttgagtagtcnnnnnnnnnnnnngaggggggccgttttaaaggacccctcggggggcccaactttacgcgggcatgcaacggcatagctttttccttatagggagccgaattaataactaggccctggccgnggttttacaccgccgggacgggaaaaccttctaacttgcgatctttgggagga

SEQ ID NO: 107337 - DNA, 559 bp, Homo sapiens; identical to SEQ ID NO: 107336
  misc_feature (1)...(559): n = a,t,c or g

SEQ ID NO: 107338 - DNA, 930 bp, Homo sapiens
gcacgagcgcgagttggactgtgaagaaacatggcggccgcgacgttgacttcgaaattgtactccctgctgttccgcaggacctccaccttcgccctcaccatcatcgtgggcgtcatgttcttcgagcgcgccttcgatcaaggcgcggacgctatctacgaccacgtcaacgaggggaagctgtggaaacacatcaagcacaagtatgagaacaagtagttccttggaggcccccatccaggccagaaggaccaggtccacccagcagctgtttgcccagagctggagcctcagcttgaagatgatgctcaaggtactcttcatggaccaccattcgctgttggcaagaaacggctttacttacaaaacagactctttaccttctgctgtgtttgaagtatgtttagtcagcatgctcaggaaataaatgtgaattgcccttgagacctgcttctacattggttgctttgttaactctacctgatcttcacttgtcagtaatttgagaccacttcaaagccctctgcaaacaccccaaaggcagaatctgctattttgagttttccattaacttccaaagaattctggttttcaaaacaggagccagagttggagatattacagtcaactttggcttctaagccagtaattccattcttaaatacctcactgtcttggccatggggaagcactatggcctcagctgggggaaagaccctggcctaggggtcttagccactccccaccctagggtatagttcaggggtatccaatcctttggcttccctgggccatgttggaagaattgtcttgggccacacataaaatacagtaaccatagctgatgagctaaaacaaaaaacaatggtttgtgcaaaaatctcataatgttttaataaagttgaagaatttgaaaaaaaaaaaaaa

SEQ ID NO: 107339 - DNA, 423 bp, Homo sapiens
ataatgggcagggtacaggtataagcataaggagacctggctcctggttgcatatctgtctctggcttgctctgggacctcagaagttcacttccttccccaggcctcagttttcctcatctgagaaataggggtttaggactcatgagctctcaaagacctttcagctttcaattcttgtgaagaccacccttaagaggcttacagacaagttggggagaacaggagaaatggtgagcagttagctgggaccagcttacgtggggaacaggggttcaggagaagaaaatccaggcccaggcatgggggctcatgcctgttatcccgacactttgggagggtgaggtgggcggatcacctgaggtcaagagttcaaggccagcctgccctcatggcaaaaccccatttctactaaaaatgcaa

SEQ ID NO: 107340 - DNA, 454 bp, Homo sapiens
ctaattttttgtttttatttaaataacttgaactactaataattatacacacacaactaggactactaacacaccattactggctattacatctattatttcatagtggacccatgatatacttggcctttttaaaagcatgactcatccgagagcgttaaaaaaaaaaaaaaaaaatcccagggccaggcacaggggctcacaactttaatcccagctttttgaaaagcccagctggaaaaatcacttgaccccggaatggggaggcttcagggaactttcaaacccaaaaaactgaggctgcggggagctataactgccccactgcactccagcctggatgacaaagcgagaccctgtctccataataaaaaattttttttcagaaagaaaagttccatatggttccaaaaagcaaaagttaagttggaatatgccaggtcctacagagatc

SEQ ID NO: 107341 - DNA, 421 bp, Homo sapiens
tatacccacacccaccatacacacacacacacactcacacactcacacacacacacacacacacacatcttttttatatatgccacctgatctgaaatgaccctcggaaaaatcaagtcagtcccttcccactgtttctcctcaatgcatttggatatgtggggctctcacctctcaaactcacaatcaccataagggtgagtggcaaaaaaatgaataagtctcacaatatatgcttactagatgtggggaacagcctcagatttatcttcttggtgtttctgaggccttacgccacacagagattgtttttttttaagaagtgtacaaaaccttgtaaagagtcagtttggttcaaactgccgggaacacagggcagttcaccgtcctctgataaaagggcccttaagaaagcacaaat

SEQ ID NO: 107342 - DNA, 450 bp, Homo sapiens
gaagcactgcatgccgagtctttgaaaaaaacccaacttctttccaacttttgttttcttgtcagtggccaaggaataaatgagataatgaaaaatggaaaaaaaaaaaaaaaaaaaaaaaaaaaaaaaaaaaaaaaaaaaaaaaaaaaaaaaagggggggcttttttaaaaaaatttttgggggggcccaaatttaacaggggggggaaaaaaatttttttttttttttaggggagggaaaaaaaaaatggtgggagtattttaaaaaaaaattttttttttggggggggaaatatggggccaccccccccctaaaaaattaaagcctttgaagaaaaaaaaaatttttaaggttgtaaggggtaaaaaacacaattttttcggttgggataaaaattttttccattggggttttatacaaaaaaaattctacccgggttgctgtgtgg

SEQ ID NO: 107343 - DNA, 1034 bp, Homo sapiens
ctccccacgcatccaaacaagcagacggggtaccagcctcctggtgtgtatcataggatttgttcacatagtgttatgcatgatcttcgtaaggttaagaagccgtggtggtgcaccatgacatccaacccgtatatataaagataaatatatatatatatgtatgtaaattatagcactgagggccctgctgccctgctggaccaagcaaaactaagccttttggtttgggtattatgtttcgttttgttatttgtttgtttttgtggcttgtcttatgtcgtgatagcacaagtgccagtcggattgctctgtattacagaatagtgtttttaattcatcaatgttctagttaatgtctacctcagcacctcctcttagcctaattttaggaggttgcccaattttgtttcttcaattttactggttacttttttgtacaaatcaatctctttctctctctcctccccacctctcacccttgccctctccatctccctctcccgccctcccctcctccctctggctccccgtctcatttctgtccactccattctctctccctctctcctgcctcctgctgccccctccccagcccacttccccgagttgtgcttgccgctccttatctgttctagttccgaagcagtttcactcgaagttgtgcagtcctggttgcagctttccgcatctgccttcgtttcgtgtagattgacgcgtttctttgtaatttcagtgtttctgacaagatttaaaaaaaaaaaaaaggaaaaaaaaagaaaaaatgaatttactgctgcaggtttttttctctctccatgtgtcactaagtgaagtttgtgccttctatagcaaagagaatattttttacatcctactaacagtagatttttttgtagtgaacattttttgtatttttatttataagtctcataagaaaaatagcaatgttcagttgtataccttgaatctgcagttagaagagaataaagttaattcagttgtctctcgaaaaaaaaaaaaaagtcgacgcg

SEQ ID NO: 107344 - DNA, 437 bp, Homo sapiens
  misc_feature (1)...(437): n = a,t,c or g
cccacgcgtccggttctagatcgcgagcggcctccatgactttttcaaaaaaaaaaaaaaaaaaaaaaaaaaaaaaaaaaaaaaaaaaaaaaaaaaaaggggggcccttttaaaaaaaactttgggggggcccaaaattacccgggggggaaaaaaaaaatttttttttttttaggggggtaaaaaaaaaccccccgggggttttttgaaaaaaacccttttttttggggggggaaattttgccccccccccccccaaaaaaattacccctttagggaaaaaaaaaaatttttagggggtaggggggaaaaaaaacccttattttttttggtggaaaaattttttttcttcgggttttataaaaaaaaaaattcccccccccccgccgcgcggatttgnnnnnnnnnnnnnnnnnnnnnnnnccnnnnngnngnntn

SEQ ID NO: 107345 - DNA, 588 bp, Homo sapiens
ttttttttttttggggctgggtaccaataaaactttatttatagacactggaattcgaatctcatatcattttcatgagtcacagaatcttcttcttttgctatttaaaagcaaaaataaaaattcttggctgggcacggtggcttgtgcctgtaatccctgcactttgggaggctgaagtgggaagatcatttgaggccaggagttcaagaacagcctgggccacctatgggggatcccttttctacaaaaaataaaaaatgaaataaaataaaattcttagttcatggtcaaaaacaggatttgctttgcggaacaccatttgcagtcccctatgctaacctatctaggtgcttaaaacagtacctaacaccctgttcttgggttggctttaaacaccaaccaaggatttaatacctgttagccatttcaggtggaaagatgtgaatgtggtatgaagtgggtcatctgtggcagttggcttgttggtgagggacaggccattggtaatggaagggtcagctctgtcttggaacagctgcccagagcatggcccgccatgctccccctcaacacccaaagtgacac

SEQ ID NO: 107346 - DNA, 372 bp, Homo sapiens
  misc_feature (1)...(372): n = a,t,c or g
aaattattgcaaataaatattgcaaagagatatgggactcataatagggggcgagaggttagagaataccctcaacactgaaaaaagtggcattaaagctgtgacactaatatgggagataggagggctgaggtggagtgctgtcttctttcgtatgatccatcatttaagaaataggctgggtgcagtggctcatgggagtgctgtcttctttcgtatgatccatcatttaagaaataggctgggtgcagtggctcatgcctgtaatcccagcagtgtgggaggccgaggtgggaggattgctggagcccagaagtttgagagcagccagggcaatatagcgagacccggtctccattntttttttcttan

SEQ ID NO: 107347 - DNA, 365 bp, Homo sapiens
cctgcgccgaaccgacgagggggacacatacaggaccgagccaccaacagcactgagctgggggcaaaccagtgcttttttttttccccccgccctcccagcttggaaaaaaagacaccagaaattaataaagaaccgcgtcccgcgccccaaccatccaaccctggaaatctggggacgcgggaagggggggactcctgggctgggaccacaagatgcctgcgccgaaccgacgagggggacacatacaggaccgagccaccaacagcactgagctgggggcaaaccagggcttttttttttccccccgccctcccagctgggaaaaaaagacaccggaatttattaaagacccaatttttttt

SEQ ID NO: 107348 - DNA, 350 bp, Homo sapiens
cttggtgctgtggaagggaagaattgggagacaggaagggttttgccatgattgagatatttggtcctgcccaaattaggggctgatcacacacacacacacacacacacacacacacacacacacacacgttttacctacatgttgtaattcactttgatatggaaattttaggtctctaagagagagatgagcaaaacgcgctcttggtgtgtctttaaccgcctctctctatcgtgtactatgttaaacaagatccagctgtaacctacacggttcccagggctcttatcaatctgtgtggtgagagcccacatagctctgcctgctgtggggtttcccttacgtat

SEQ ID NO: 107349 - DNA, 322 bp, Homo sapiens
gcacgaggagagagagagagagagagagagagagagagagagagagagagagagagagagagagagagagatatagagagggcgggcgccttctccttactatgggggagggagagacagagcgcgcgacagatctctatcacacgccccccccctctattaaagcgtggagactttgtgaaccccgccctagagctgggatattgtgtgggcgcaatattttttagtgtctcttgtataaaacgccccccgcgcctagcgagtgtgggagactcctacaccttttacaatagctattttgggaggaaagaacctgctgttg

SEQ ID NO: 107350 - DNA, 394 bp, Homo sapiens
ggcacgagtttcattgtttggttccagaaagaaagataattctttatgctttaatactcaaagtatttggtataatgactgaatattaaaaatttaaatgagtttttattacataaagcagtattcttgttcattcagtagataaaaatttttggttttgaacctactgagagaataattggaactaattatttatgtcatagcaacagaaacctcagatagctttgagaggaggacagcaggagccagtctcacaaacgcaatgacagggtcttccaaaaagtcttcttctcccatgagaacactagttgccggctgggcacggtagctcacacctgtaatcctagcactttgggagacccaggcaggtggatcacagcgtcaggagttcaaa

SEQ ID NO: 107351 - DNA, 364 bp, Homo sapiens
ggcacgagggtatttcttgtcttctgctagcttttgaatttgcttgctcttgcttatctaggtctttttttttttttttttttaaaggggagttttgttttgtcccccaccattggaaagtaaaaaaaccccatattgggcccccggtcctcccccagaggcattaaaccaaacccctgttttttaaaaaaaaaaaaaaaaaaaaaaaaaaacaaaaaaaaaacaaaaacaaagaggttttttctccccccccccccccccaacactgcatattaaaaaaggggggggggtgtattttaccctcctacaaaaccccgcgccccccgaaaaacccccccccctctcccacaaaaaaaagggggtt

SEQ ID NO: 107352 - DNA, 376 bp, Homo sapiens
cttttggattgattataacatctgcttggttccctcatgtaattaaataaaatatttaacacgtattcatttcataattatgataatcatgacatacttttttgggaaaattatcttttaacagaataagcaagtaaataatacatcgatggtgtactgtgtgatgcagaaaataaagcagagtattgaggaatgcaggacatgttagtttagaagtgttccaggaaaccagggaggtggaggttgcaatgagccgagatagcaccactgcactccagcctgggcgacagagcgagactccatctgaaaaaaaaaaaaagggttccaggaaaacccttctgtgaataaaaaggcaggcccataggccgggcggggg

SEQ ID NO: 107353 - DNA, 393 bp, Homo sapiens
  misc_feature (1)...(393): n = a,t,c or g
attccaccgtgtggctggaccacattatatttctccattcatctatagatggggtatgagggctgtctccacctcttggctattgtgaataaagctgcttgttccttttcatggctgtgtaatattccactgtgtggatggacattatatttttccattcatctatagatgggtatgagggctgtctccacctcttggctattgtgaataaagctgcttgttccttttcatggctgtgtaatattccactgtgtggatggacattatatttctcccttcatctatagaagggggtatgagggctgcctccacctcttggctattgtgaataaagctgcttgttccttttcatggctgtataatattccactgtgtgtctggaccacattatan

SEQ ID NO: 107354 - DNA, 443 bp, Homo sapiens
  misc_feature (1)...(443): n = a,t,c or g
gatggcctngnaactgagnactgccgtcactctcannacgccaagcttggcacgaggacaataccccagccaaattggcctcttcctggttttctgcattcctgcacccctctctccactaaggataatcttggaacagttgcgattaatggtgccagcaatcaaggaagattctctagttttcatcagggacatagctgtaaagctcatgagtggaggatgctatttccttttccagacctgtgtgcttatgtgcttatataggctgcctctggagactttatattgtgtgtgatgtgtgtgtatatatatatacacacacatatatatatatatgtatatatatatatatagagagagagagagagaggaaatggccgccactctcttaggctcatgcagcacagactccagttagggtttgcactggcttccttgctgct

SEQ ID NO: 107355 - DNA, 364 bp, Homo sapiens
ggattttactttctttttgagaaaaaagaacaaaatctagctggctacagtggcaagttcctgtagtactagccacttgggaggatggcttgagtccaggagtttaaggctacagtgcactgtgatcatgcctgtgaatagccaccgtactttagcctgggtgacatagaaagaccctgtctttaaaaaaaaagaacaaaatctgtggtagcattgccacagtggtagggggtaattagtggtattaagaataaataacaacatttgtagtagcatgcatagttcagtagattttggcagcagcttcctattctgtgtatttctattttcctgcagaatgacgacatatcagtaaacatataag

SEQ ID NO: 107356 - DNA, 382 bp, Homo sapiens
  misc_feature (1)...(382): n = a,t,c or g
cgggattataggtgtgaactactgtaactggcctagttgttgcttttggataaagagacaaaactttttaaccactttaaaagagagtaataagtaatgtaaattaaataaaattggctccagattacattgtatttccttcaccccacttattattttttttcattgtgtgagacaggatcttgttctttctcccatgatggaacgcaatttgtgcatgccccttctaatggcagtctcatcctcccaagccgaatcacgcctgtcacctcagcctccctattatctggcaccacatgcacacaccaccatgcctgtgtaattttttacttcatttttcagtagagacagagtctcactgcgttgactatgctgcttttan

SEQ ID NO: 107357 - DNA, 409 bp, Homo sapiens
gttctgccaggtaagttttcttaaaaatgtttttttctgtcctggcgcggtggctcacgcctgcaatcccagcactttgggaggccgaggcgggcagatcacttgaggccaggagttccagaccagcctggccaacatggctttcttctagtcaagatgagtgataaaccagacttgtcggaagtggagaagtttgacaggtcaaaactgaagaaaactaatactgaagaaaaaaatactcttccctcaaaggaaatctttttcagcttagtgggagttaacatccaagactgaagttggatggagaaaggggcaggaggcacttgctaccaaacaccatattaagcacatcacatcttctaatgacctgtagcactgaacttctgagggagtctcgctctgtcgccag

SEQ ID NO: 107358 - DNA, 705 bp, Homo sapiens
aattaaattaaaaaaataaaacatagaaatgtcttaagaggtcttggctctggactaagtcacaaatgcatatatttaagttgcctcttggtctaaggatctaaagtttaaccgaagcctatggagccctcaaggagtccttcctcaaaggtctagtctcaaatggggtccatgaccacggtgtgtgacagtaacctggtgtgagtctggagaaagagtccaggtaaacatttggcaaagtggtccctccgctatggacattcaggatttggcatttcagatagtagtgaaatggataactcgatggcttcctataattcccagatgccaggttttgtgctaaatcagactctccacattctgaatccttacagtgatcacatgaggaaagtccttttcttattttcatttttatgagaaaaccaaggtttcagagaggttaaagtaatttgggccaaggtcacctggcttacatgtgtttaaaaacatgaatatgtatcatgtgaattatttatatggctaactcatttgcaaaagctattaggtataattaaacaacagggacagtgggttgacgaggataaaaatgtcttggcagccggacgcggtggctcacacctgtaatcccaacactttgggaggctgaggcaggaggatccctgaggcccaggagttcatgaccagcctgggcaacatagtgagact

SEQ ID NO: 107359 - DNA, 487 bp, Homo sapiens
  misc_feature (1)...(487): n = a,t,c or g
atggttananaaattgaattcgtgtccagtgtggtggaattcctggtcggtggatgggaaactgcctccccctgggaggaaggctttgcgctccggggcctggatgcggcgccctcgggccgcctgcgagcccctctctgcctccagaccttgggcagaaggaggcctccttgggcctggtccccctttgccctgcagtggaatgagggcccctcagccccgcattgatctaaataaaggactgccgagttccnnaaaaaaaaaaaaaaaaaaaaaaaaaaaaaaaaaaaaaaaaaaaaaaaaaaannnnnnnnncnnaaaaaaaaagggggaaaataaaaaanggggaaaaannnngggttttggcttttgtggcccctctttttgttgggggcccctccccctgttcttttttggggggggggggggcccccacccttttttttttttaaaaaaaggaagaaattttctttctcttggggagggg

SEQ ID NO: 107360 - DNA, 1489 bp, Homo sapiens
tttttttttttgcagatcatagaacttttatttagatggaatcattgcgaattacatagaagctaccagcctaagccaaaacccatgaggttcatgtgaacttacagttacacaaataagaaacaaatggtacatccaaaaccataaggaaatattctgatgcccagatgatgaagactggggtgaattaagtccacacatttatttcaagttgttaaagagtttgtgggccacgcaatggtccctcgcatgcaagaagtcaaagagctcctccgtgcaatcctcttctgtatgtgatcgagaggatacacgctcatcacagagctctagccgctcccgggcctttacacatttctccaactgctcgcattgctctctcactgttgttaggggatccgtgcagaaggccagctggcagagccacactgccgccagaaatggcagaatgcggtctcccattcaattctgatgcccagatgatgaagactggggtgaattaagtccacacatttatttcaagttgttaaagagtttgtgggccacgcaatggtccctcgcatgcaagaagtcaaagagctcctccgtgcaatcctcttctgtatgtgatcgagaggatacacgctcatcacagagctctagccgctcccgggcctttacacatttctccaactgctcgcattgctctctcactgttgttaggggatccactaattcctcctcttcctcttcctcctcctcaggatctccggattcggtaagcatcttttgctcgtcctccagtcccatgtctggctacggttctagattcaacacgagcagcaacagcgggcacctaacccagttcaggatcaagaaggacttgtaagggtcactcagcggaaatccggcgatctggccggaagtgcggcacactcatcgtggtcgcgaacacatgctcagattggcatgtactaccagccgcaggcagagatggcggcgcccgaggcctggcgcgcccggagttgctggttctgtgaggtagcggcggcaacgaccatggaggccacgtcccgggaggcggcgccagcgaagagctcggcctcgggccccaacgctccccccgccctgtttaagctgtgcgggcgggcggggagcgcccatatgggggttctggagagcggggttttggtccctcccaggcccaatacttcaaagcatcctacctctgctcaatatatattacttggagaggatggaggaaactgccctcaagaaagggctctcaactcaggccatctggcgccgactctgggatgaactgatgaagacaaggccttccagtttggaaagtgtgacatgttggcgagccaagtttatggaggcctttttttcccatgttctacgcgggaccattgatgtgtcttctgacaggcgtctttgtgatcagcggatctcacctcttctgcacagctgccgccatgtccgacagcttaccatgtgttacatgctg

SEQ ID NO: 107361 - DNA, 436 bp, Homo sapiens
  misc_feature (1)...(436): n = a,t,c or g
aaactgaagacgcttgaaggacgngggccggaacggccgcggaatacccaggcggacccacacgcccggagcttcctgactgagttcatttggactctcaaggatgccctggagctagactcgatctgagtggttggactaactcctctttgtttttgtatgagagccagcttaccccgccattctaaacctcaggccaggaaaaccaaaaaaaaaaaaaaaaaaaaaaaaaaaaaaaaaaaaaaaaaaaaagggggaagccttaaaaaaaaaatatttgggggggccaaaaaaagcggggcaaccaaaaaaaaaaattttcccaaaaaaagaggccaaaataaaaaaaacccggggttttttaagaacgaaattttttttggggggggggccattntccccaccccccccccacaaaaaaaaatcttttggaaag

SEQ ID NO: 107362 - DNA, 988 bp, Homo sapiens
ttgttattcttgacaggccagtgtagaacaggtggggcatctatggtgacagaactaggttccaattctgtcccttcacctgtcccaggttcctcatctgaaaactgtgacccagtaaacctaatttcatgagcagctttcattaaaattgaaataatgttggaaaatgccttgtaaccgtgcttgatatagagtagttacttagccagttatttcctctcttcttccaattcctaacaaaatggaaaaacgtttggttgctaggaaagagctctaaggggattttgttgttgtttgagacagggtttggctctgtcgcccaggatggagtgcaatggcacaatctctgctcactgcaacctccgcccacccgggttcaggcaggagaatcgcttgaaccctgggagtcgaaggtttcagtgagccgaggtcgtgccactgcagtccacctggccaacagagcaagactctgtctctaaaataataatttttattattgttattcttgacaggccagtgtagaacaggtggggcatctatggtgacagaactgggttccaattctgtcccttcacctgtcccaggttcctcatctgaaaactgtgacccagtaaacctaatttcatgagcagctttcattaaaattgaaataatggtggaaaatgccttgtaaccgtgcttgatgtagagtagttacttagccagttatttcctctcttcttcccattcctaacaaaatggaaaaacgtttggttgctaggaaagagccttaaggggattttgttgttgtttgactctatcgcccagggtgggagtgcaatgggcacaatctctggcttcagtgcaacctccgccatagacaggagccaagcgtagtggtgtgcacctgtcggtagttaccagcctcttaggaggctgaggcaggaggattgcttgaggccaggagtttgagtctagcttgggcaatatattgaaaccttgtctctta

SEQ ID NO: 107363 - DNA, 2833 bp, Homo sapiens
ggtttgcaaagcctagcagatttattatctggccttttacagaaagtctgtctacccctgagtaacggcatcatggatttatatttactttattatttatttacttttgagacagggtcttgctctgttgctcaagctagagtacagtggtgtgaacatggttcactgcagcctcacacctcagcctcaagcgatcctcccacctcagccaccaccacatgccaccatgcccggctaattatatggtgaatttaaatgaccagtgatatcccaggacagtcaatacctacaacaagaaccaaagagcacaaaaacacttgaaatatcattactttcactttagtgtgtccaggctattttaaatattcatacaatcgccttatttcagcagtcatttcctctccagtacagattttgtgtccagaaccagagccatgtacgtcactgaattttctctacagcacccgcatgctacacgggacctactccggtgcccatgtctttgctagtagagcctctcaccacacttgcaagagggctggacctccccttgcttgatgtagcctccactgtgaatgaaaacacactttgtcacttcgatcccagtacatttccagcactcccaggtgttccatgtatgtggcaatcatcccacagagctagtgacacatcatgtcagctggtacctatgtcagcacctgctccactatatcatacagatgctgaggcacttaaatgttcttggtaaaatggagttcataattgccataggagttgagttttggggaaagggactttcaataattaatacccttaatacatatttagcagatttataatttcgtgtctgtttacatttgttgtcaaagcttcataaactatttatgtaaatgaaagcatgtttgagtttccaaatgctgctatgacaagcaaacagagaaactgcttagacaacacctgcttgtgccataaatacatacggcaacatccggtcatccttaaagaaatgcttgtgtttccaaaaagaatttttttttataagtcataagccttatgcaattcttccaagataataatgtgtttgtccttccttctcaagcatggttcaaggcatctcaaggcatattgctgtctgaggttctgatttaactgtccgggggtacaggggaagagtgggcactaacattttttaaaagcttcacagtcattccagcatgtagtcagtgttgagaaccttggtactaaaggctcttgcatcttcctactgtcacttgtcctcatcaaaagcccttgaggtagtccctgggtcaggcaatgatctctttcatgggctaagaaactaaggcacagagaggttaacaggctcctctgatactgtgcagtcaaatgacagaaccatgattgcaactgacatttccaaataaaccatgactcctcccccagcaacgggtagcacttacatggaccaaaagtatgaagcctgactgggagccaggcataaccttctgtgtcaaggacatcatggaagggaaaggaacagttctgaaccaatcattccgcatgaacagaaataaatacataaagccaggccttggtggtgtgcaccctgtagtcctccagcctacctcaggaggctgagacgggaggactgctcaagccccagaaattcgaggctgcagtgtgctatgattacaactgcgaatagccactgcaatcccagcctgggccaaccatagtggagaccacgtctctgtaaaattttatttaaaaatttatttaaaatttatttaaatttatttgaaatttaaaatcaaattttaaaaatttaaaaaatattttttaaaaaggaaataagttcctaagatacttattggaagccacatgaggaatgaggcataactttttcttttcttaaaagtcttacttccctcttatatatgccattgagtcaggtttctcagaaaatccatcaagattcacagacttcctgacatctgaattcttagctctgttactgtgagggctagaaaactcgtgaatgtctctataatttgggtccaaaagataattacaaacctctgttagcatgtgacagcaatacaaaaatgcccatgctttccctgtcacccgcccacctagacttgccagggacccagaaccctacacgttctaactgggtatacatcttcccaggatccgatcagatctcactcccatctcagaatttcccaaacaccaacccatcggctgcgttgggcctcaaggattaatgactacaactgactgttttattttgctctacaggcaaacttttaaatctgtattctgggtaacccccaggacgtttatttcgtaattccaaatttccatgagagccaattcacctgggaccttttccacttcaccccaaggtaacaccctcacatcctatcaactattgctgtacctaagaaataatttctatcattattgcctttttcattgtaagttctcacatctcatcatgttcaaggaggcattgattttctcctcttttgtaaaagtctcacctgactgcagaaatgttttcttgagccaagtagaaatgaggaatggagcacacataggcatgaaggaaagaacgtagcacgttctggtggggagggcagttttcaatgggttgctgtgatttcccaggacactctagggaagggcctgtttactcagcttacactgaacacaaatgacatcttgttctccctactgctagtgatgtggcctcctgaaaagcctataaagtattagttaatccagtaagcggaagccacttctaacagtacacatttgttgagat

SEQ ID NO: 107364 - DNA, 988 bp, Homo sapiens; identical to SEQ ID NO: 107362

SEQ ID NO: 107365 - DNA, 494 bp, Homo sapiens
  misc_feature (1)...(494): n = a,t,c or g
cagctcacccggtgccccagtgggggagccggggaagggagtccctccctccccacccgccctggatgcttatacacttctcctgaaggaggcaaaagaagtatgagaaaaggccaggtcccccgaaagggccagggaccaggaaggagggacagagagagacagaaacagcgagagagagaaaatcctgcccaagctcagagaggagcttccgtgggtatctggagggtggagatgcccgtggccgcaccagggctggtcccactgggaggacaacccagggtgggggataccgaccggaccaagtgtgggttggggagagaagaaggggccgggggagggcaggtcacataagtatggtacaggtagaacaaagtgtgagttaggggttagcattggtaacagtgcgtttacctttctgctccacttctactttaagcatcggaagagagagagaaaacaaattgnnnnnnnnnntgtgcaagaaaaaaaga

SEQ ID NO: 107366 - DNA, 307 bp, Homo sapiens
  misc_feature (1)...(307): n = a,t,c or g
cgaactcctgacctcaggtgacccgccctccttggcctcccaaagtgctgggattacaggcgtgagccaccgtgcccagtgacatttaaaataatataattcaaagaggggaaagaaaatgttttaagaactaaatttgagtgctcaattaattacaaccatacaggctnnnntttttttttttttttttttttttggaaaaaaaattttttttgtttccccccgggggggggggggggggggaaatttagggccttggaaccccccccctcggggtaaaaaaaattttccgccctacccccccaag

SEQ ID NO: 107367 - DNA, 303 bp, Homo sapiens
aaaatcagtctctcatagttgtgctcccatgttcatggaagtgttaatcacaatagctaagatatgaaaacctaagggataaaggaaatgtgcgatgtgtgtgtgtgtgtgtgtgtgtgtgtgtgtgtgtgtttagagagagaatgagaatagcatattctgccttaaaggaactcctgccatttgcaacaacatggatgaagccaaacatgtgtggcttcacttacatgtggactctaaaaacattgaattcatggacgcagagagtagattggtgcttaccagtgcctggcggtagtggtg

SEQ ID NO: 107368 - DNA, 341 bp, Homo sapiens
  misc_feature (1)...(341): n = a,t,c or g
gcccgaggagagagagagagagagagagagagagagagagagagagagagagagagagagagagagagagagagagagagagagagagagagagagcgtctctctttctctttggggggggggggcgccctaaaaaaaaaaaggatttttttgtgtgtgactcttgaggggaaacacctcccccccctcacacacacgggtttttttggggaaaacacacacacactctctatgaagacgcgcgagggggggtttatttgtgcgggtggggacgagagaaggagcgcgagcgtcatgcgcgcatatatatatagagagtgcgagcctcacacacacgtggn

SEQ ID NO: 107369 - DNA, 854 bp, Homo sapiens
tcccatgtcgacccagaagaacattaagcccaattggcttttcaacatcaccagtcaggttagttaggaaaccaaaaaggccctatgtttcccggttcaaacttaccatggtgacccttattataaaggatgaccagcttaaaaatttgatagcctaaaagaaatgacactgaagagtagtgagaagttctcagactgtattctttggagtactagggtactaggggtctccaaggagcctctcaaggactgagagaggtggggaagtgaggtggacaagcaggtagggccgtacccccaactcccctgccaattcaagcaatgcagtgatccatttatctggatgagatagagatggaaagatagatagatagatagatagatagatagatagatagatagatagagatacatacatacatacatacatacatacatacatacatacgtagagagtgggggaatatggaatgtccaagcccaacgttccttacctccagaagagagagaatcctgaggtgctcatgtggagaaacactggccccctgtttgcttctgattttaaccttgtggttgccgtgtctcctgtaacacagtgcagaggaacacctcctctaaattgtgatttctcagatggatgggccccgttgggcagattgtgtttaggactttgtaaccaagactgtcactactgggtggggtggcctggtgcggtctagctcagtaggggaaaagggcagccaccatttccacaccttcaggcacacacctccatgaaagccaggggttaatgtcccaggagccagggccatccgcccactttacccctgtgtggggcagcccttggccttgct

SEQ ID NO: 107370 - DNA, 389 bp, Homo sapiens
  misc_feature (1)...(389): n = a,t,c or g
ggcacgaggtctgtaccactcacctggcacttatttattattggtgtggaagacagactcaaagacagcctcccttcgtgatcctcacctcttggaattcatgcccttgtttggtcccctccccttgagtgtaagtgggatctgtgacttgcttctaatgaatggaataaggcaaaggtgatagggtgtcactctggcaactgtgttgcattgtatagaactcctccttgctggcccacccttttagagcccctcctaggagccaagagcagcttccagccaacaacaagcagaggccctcagtcttgtggctgcaagaacctgaattctgccaacaacccgagtgagcttggaagcagattcttccccaactgagccggataagaacn

SEQ ID NO: 107371 - DNA, 419 bp, Homo sapiens
  misc_feature (1)...(419): n = a,t,c or g
attgttcgagcccaggagtttgggatcagcatgggcaatatagtgagaccccatctcaaaaaaaaaaaaaaaaaaccaaaaaacttaaaaaaaattttcttgggggggggggggtttccctttggccccattttttgggaaggccgggggggaagaataatttaacccaaaaaggtcaaggttcccggggtttttatttttcccccaccttgaataaaaaacaaaaattttttttttaaaaaaaaaaaaaaaaaaaagaaaataaataaaaaaaaaaaaaaaaaaaaaaaaagtaaataaaattttgtnnttggggggggggtttttttattttcctggggaggggccacacccaagagacaacacaatgtgcgtttctttttttttgagaagtcttttttaactcacccgggtggttg

SEQ ID NO: 107372 - DNA, 449 bp, Homo sapiens
ttcgagtcgcctcgcacgcaccgcgcccacacttccggttatagatcgcgagcggccgccctttttttttttttttacatttacccccattccaaaaggcctttgtttttggggggggaggaggcaccccctttgaatatcaaaattttgttgcctacataaaggggaaacagggcaacccctttttatttggctgcggggacctttttaatgctccccagttaataaaacagttgtcccaacttggacaaaagtaccccaaaaaacccttactttgataatctacttggaagggggataaatgtaaaaaaaaaaaaagttaaaaaaccaatttttttccttttttgtaacagggccctaacagggaaaatcaaagttttttgttattttttaaggaaattatatccttaatatgttttgattaaaaaaaacttttcaaaaaaaaaaaa

SEQ ID NO: 107373 - DNA, 412 bp, Homo sapiens
cagacgccccgcgccccgcgcccgcttgtaatccggtccgctccttattcagccgccgggaactgcgaggaggcgtcatgtagcagcagcagcaaatccgcctcgcatttgcaactcttttttttttttgggggggggggggggcccccggaaaaattttgtccccccccccctttttttggcccattccatttggaaagcggaatggcccttttaaaaaaaataaagaatttcgggaaaggccgggggcccaaaaaaaaaagtgggcccggcaaaaccccccccccctacggggcacccttgaccggggaaagctttaccttccccggggggtggaaaaaaaccaaaagggaggttttgggcaaaaaaaaaaaatttcccggaaaaaaaaaggaaaggtggaaagttaggg

SEQ ID NO: 107374 - DNA, 1597 bp, Homo sapiens
ttttttttttttaaaaaactaataaatttttaattagaattttttcctttttttaacaggacaagtaacagattacatcaaacttcagaacttctcaaatacctagttattatacacattcccatctgtcttgcaaggagggatcttggtcggcttaacagtttcaggtaaaataagctgcataatagtatatattacaataataaaatgtacaatgtttacatggaaatatgttttagaaggcaagaaaaagatgcatctgcatcaaaggcgaccttttaaaatgccacaactattttttacattcactctttgcaacagggttacaaagatggggggtcaactaagctcagataaatcactatggatggcacataaaatacaggaagactggttactttatatattatatatatttatattttccacacgttagcatctgagacataaactggagaatttaaaatttattctcttcagataacaaatcattttttattcttcataaacaaggtgcccaccaaaagcacacaggtaaggcacaatagggctttctgttacagaatagtgtgcatcatgtttacttaaccagaaaacgtgcattatctgtgcaagttcatgctgcaaacccaacgcatacaataaaacaaaaaggaaactgagcttttaaatacaaccaaaatttgtacaattccagctgtttcacatattcatttggactgacaattatatatcaacaggttatttttaaaaagccaattgtagattacaagtaaaatttactcagcaactatttttatctgaaatcataaacagtaataaagtaagtttactgaaacaaattaaatactgaggcacaaagcaacagtcaatcgtgcatttactatattgcaaactttcatgacccaaaattgcaagtataatttgtcaaatacacattttgctgcaacaatgtgccctgctttaaacttgacatataacagaggcactaacatatcattaaattataaatagattgggaaaatgacttaaccccaatggtactatgtcatggccctagtatttataataaatacagcttttcacaaaatatttttccaatatctgccaatttcttctttattgctcacataaatttgactctattacaactggtatcagaactttcacacaaaatcatactcagacatttttatataaaacctataaaagatattttaaacttgtatctaatacttccaggtgtttggctgtttgatctatgcaaaagtacagccatatgtagatatctctgtgtgtgtatatatatacatctatatatacacacacatactcacatacatatatacacgcacattagattatgaataaaatggaaagcttattttactgctttaatgcagacatcctcataaaacaagactactttcaccgccaccagcatttatacatatatacaaagccagtttaagtacatatacatccacttacacatatttgtaaccactaagcccaaattaattttcccatattccagccgtagcaaatgaatcgattataagcaccagaaacctaaggttaaattcgtacgcgtggg

SEQ ID NO: 107375 - DNA, 425 bp, Homo sapiens
acctttaattatgataacatttatggagctaatttttattgagcacttctgatacgcactttatatatattaattcatttcattctcacaagggtatgaagtagacactattattatccccatttcttaaaaatttatttcaattattttttgtttttagagatggggttcttgctattgcccaggttatccccatttaaaaatttttaaattattattattattggtattggttttagagatgggggtcttgcccctgttgccaaggctggagtgcagtgggatgatcacagttcactgcaaccttgaattcctgggcacaagttatcctcctatctcagtctcccaaaccaaaaaaaaaaaaaggccttttacccttccccctctacccaacttacaaattggtcttcccctcaggggagaac

SEQ ID NO: 107376 - DNA, 458 bp, Homo sapiens
  misc_feature (1)...(458): n = a,t,c or g
atttgaaacccttgatgaaactgnccagaaacnccggggcgacccacgcgttcgggcagattatcctgagacttaatatccataacagctttagtcatttcccctaataaattttatatctatctatctatctatctatctatctatctatctatctatctatctatcatctatctaatctttatatctaccaatcttctgtgggttttgtctctttgggaaaccctgaataaaacaaggctattaaacttattcctaacaattcaaaataacatatggaatccaaaattacttgttagtgcactcatataaataaacctagctgaatccaacagngnatttctttctccttggtctaacactcttacaatcaattcccaaagatattcttctagttttcactaacacaaattggcaaaatattaaaattcttttgtgtgatagcatatcctccacgc

SEQ ID NO: 107377 - DNA, 930 bp, Homo sapiens; identical to SEQ ID NO: 107338

SEQ ID NO: 107378 - DNA, 424 bp, Homo sapiens
  misc_feature (1)...(424): n = a,t,c or g
tccttacagggaaggaaatgaaagcaagagaaactgatagtaagcttttttccaatgtgattgcttttgaaggacctcgtagtcttgaagtgccttaaataaactttgctaaaacgtttgaaacaaaacaaagattagaaaggtctgtagtcccagctactcgggaggctgaggcaggagaatggcgtgaacccgggaagcagagcttgcagtgagccgagattgcgccactgcagtccgcagtcccacctgggcgacagagcgagactccgtctcannnnnnnnnnnnnnnnnnnnnnnnnnnnnnnnnnnnnngggggggggcctttttaaaaatttcttgggggggccaaattttagcgggggtggaaaaataattttttttcttattaggggggggataaataaaacaggctggggcttn

SEQ ID NO: 107379 - DNA, 411 bp, Homo sapiens
  misc_feature (1)...(411): n = a,t,c or g
ctccatgtaaatgaaaaagnnactttatacttctttctttcctctttctttcttggagctcccaggctcaagcaatcctcccaccctggcctcccaaagtgctgggattacaggcgtgagccaccgcacccagcctccttactcttccttctagacatgggtattctttgctgtaacaattattccgtaattagtcaccaatattcacatgtagttctctgtgaggagaagagaactgccctttggacattcaggactgattctttgcaggatcatttgtaacaagctggaggggagttcggtgctgagatggattgtcacccagtggccaccttctgggacccactggccctgctctgactcaccatgctttatttcagatctcacctattaagtgccccagaaacagcc

SEQ ID NO: 107380 - DNA, 331 bp, Homo sapiens
ctcactatgttgcccaagctgatcttacactcctaggctcaagcaatctaccagccttggcctcccaaggtgctgagattacagttgtgagccactgtgcctggccatgtgttaaacatctttggcaagaatattacataagtattgggtgttttttagactgtcacatcaggaggtatataagatattgctttgttttattattagagatcctaaatttgactagttggataaggagggagcatttttatcttttggctaagtaatccttaagccatacatggagattatgtgagtactttattttcctactcctttcaaccagtgattt

SEQ ID NO: 107381 - DNA, 337 bp, Homo sapiens
attaatagattggaaaaggtaagataaattgtcgtgcttttacattgcctagttttccaatggagaataaattggcccaaaataagaacatgttcaccgtacattaatagaagctagtgtttctggctggggatggtggctcacacctgtaatctcagcggcttgggaggctgaggtgggaggatcacttgagggtcaggagtttgagatcagcctggggaaatgtagtgagactccatcactaacaacaacaacaacggaatcactgggctcctttgcagctacttcttagtattctctaattgattcttatggcaaatctcagttttcctaatca

SEQ ID NO: 107382 - DNA, 276 bp, Homo sapiens
ggctttttaattttttgtatagacgggatcttgctatactgcccaggctagtcttgaactgctgggctcaagcagtctgcccacctcagcctcacagagtgctgggattacaggcatgagccatcgtgcctggctggggtagattattttttattcaaccttccacctttctactacttggaatttctacactcttttgctactcttcagtgggtaccctagagagtatcacatacatctttatcaaaattttctacgcaaaggtcgacgcggccg

SEQ ID NO: 107383 - DNA, 344 bp, Homo sapiens
  misc_feature (1)...(344): n = a,t,c or g
ctgctttacttagtgcaggcttgcacaactgcattctttgaacagtagtctccagatgttccagtagataacctcaaggagcatggcaccagggagtgactgccctcagcaaaccttctggtagcaggcacagatgtgagtttgcccacatcctgcattcatgataaacagtttgctgtttgatcatatagccttcagtgggatgctgagttggtcatgaccctcgggcctttagctccctgcagttaactcttatcacatataatttgcaaatatttttacttattttctacaaggcattgtcactctaatgtttttttgatgtgtggaaattttgtagtgan

SEQ ID NO: 107384 - DNA, 347 bp, Homo sapiens
cagaagggaacacatcagtggtgtctccctgccattccctggagggaatatgacatcaggatttttttttttttttttttaaggaggaaaatagctgaacccattgctgcttaaggttcagaagccatgttcaccttacccttggctttaaaaactggaggggctccagcaaggggggggactaaggaaccgaactccttttgctttaaacacctgcccttgataaatagcccagcaaaaagttaaataggtggcccgggcatgggggctcgcgcctgtaatcccagcactttgggaggctgaggtgggcggatcacctgagggcaggagtttgaaaccagccttgg

SEQ ID NO: 107385 - DNA, 3827 bp, Homo sapiens; identical to SEQ ID NO: 107284

SEQ ID NO: 107386 - DNA, 344 bp, Homo sapiens
ttactatctaattatttgattgtttaagatgtctttcccgcttaactatgtgtgccacaagagctgtcaccagacctgtaacattcactatcatatactcacggcatagcatggttccttgaacatagcagggaagcaacatttgcttaaagattaattaaaactaagtattctaggtgcagtggcacatgtctgtagtcccagctattcaggaggctgaggttggaggatcacctgagcccaggagtttgaggccagcctgggcaacatattgacaccctatctcaaaaaaacaaaagaactaagtaaatcctttgaccccacttgtaagaattcatcaggga

SEQ ID NO: 107387 - DNA, 406 bp, Homo sapiens
gaaatttggaggatgaagttaatgaaagccagaattgtaagagaaagcttgatggcgaagataaacatacacacacagggatataaaggaaaatttccaggagaaaaacaatgatgaaacattacaaaaacctacataaaaaatattaaagtactctaaagcttaaaatatacattattttttctaatttttaaaattgcacagctcagccactatatgtacagttaatgtagtaagttaaaacagacttttatacatgatatgtagtaagaatggcctaccatggcaattcaggagacatattaaaagtttaaaaaaggctgggcatggtggctcatgcctgtaatcccagcactttgggaggccaaagcaggcggctcacctgagagcaggagtttgagaccag

SEQ ID NO: 107388 - DNA, 378 bp, Homo sapiens
  misc_feature (1)...(378): n = a,t,c or g
gttctggattctgggcatcgtcggcgcatgcttgtaatcctacttgggaggttgagacaggaggatcacttgaggctaggagttggaggctgcagtgtactatgttcgcatctgtgaatagccactgcactctagcctggacaatatagtgagaacccatctcaaaaaaaaaaaaaaaaaaaaaaaaaaanccccttaaaaatttttttttttttgggggaaccaattacccaaaaattaaggggccgaaaccacctaaatttttggcccccccggcccttgcccttaaaaagccaaaaggggttgggggggtttctttgctgggggtcaaacagggccaatttaagggggccaccttcccgggcctttattgggaaa

SEQ ID NO: 107389 - DNA, 361 bp, Homo sapiens
ggcctcgccagactgtgaccagggagggctgggatcaggtgttgttcccatgtgcctcccaccagactttgacccccgagggctgagaccgggactgtttctaccacatcataatatggcttctaaagggctggaacaagctttcagcctttctgtggccttgtgtttcagtcatggtctttttcttttcttttttattttattttgagacagagtctcgctctgttgcccaggctggagtgcagtgagccgaggtcgcaccactccactccagcctgggtgacagagcaagactccgtctgaaaaaaaaaaaaaaaaacggaaggtaattaaaagggggacaatcctgtttgttaactgg

SEQ ID NO: 107390 - DNA, 335 bp, Homo sapiens
gagacagagaggggaagggagagagagacagagaggggaagggagagagagacagagaggggaagagagagagagagagagagagagagagagagagagagagagagagacagagaggaggggagagagagacagagaggggaggggaaaaaaaacagagacagagaggaaaacagacgcagagagacagagagagtgggtgatgtagtttgtgtgtgtccccacccaaatcttattttgaattgtagcccttatatctcccacgtgttgagagagggtctgggtaagacatatctgaattatgggggcagtttccccacactctgttctgggta

SEQ ID NO: 107391 - DNA, 2531 bp, Homo sapiens
cgcggccgtacttaggtttgctcaaaatggcagcgctggaggaagaattcacgttgtcttcggtagtcctgagcgccgggcctgaaggactcctaggcgtggagcagagcgacaaaacagaccagtttctagtgacagacagcggcaggacagtcatcctctataaggtttctgatcagaaacccttggggagctggtcagtgaaacaaggtcaaattataacatgtccagctgtgtgcaactttcaaactggagagtatgttgttgtacacgataataaggttttaagaatatggaataatgaagatgtaaacctggataaagtatttaaagctacattgtcagcagaagtatataggatactttcagtgcaagggacagaacccttggtgctcttcaaggaaggtgctgttcgtggtttagaggccttgcttgcagacccccagcagaaaattgaaactgttatctctgatgaagaagtgattaaatggacaaagtttttcgtagtattcagacatcctgttttaatttttattactgaaaaacatggaaattactttgcttacgtgcaaatgtttaactcacgtatcttaaccaaatatacactcttacttggacaagacgaaaactctgttataaagagttttactgcatctgtagatcggaaattcatctctttgatgtcattaagctctgatggttgtatatatgaaaccttgataccaatacgtccagctgacccagaaaaaaatcagagcttagttaaatcactgctgctcaaggctgttgtatctggtaacgctcgaaatggagttgcactcactgccctggatcaggatcacgtcgcagtcctaggaagtccactagcagcttctaaggaatgcctctctgtatggaacataaaatttcaaacactacagacttcaaaagagttaccacaagggaccagtggtcaactctggtattatggagaacatttgtttatgctacatggaaaatctctaactgtgattccatacaagtgtgaagtgtcatcattagcaggtgctcttggaaaactcaagcatagtcaagatccaggaactcatgtcgtgtcccattttgtaaactgggagacacctcaaggatgtggacttgggttccagaactcagagcagtcaagaagaattttaaggagacgaaaaattgaagtgagtttacagccagaggttccaccatccaaacaacttttgtcaaccataatgaaagattcagaaaaacacattgaagtagaagtacggaaatttttggctctgaagcagacacctgactttcatactgtcattggggacacagtaacaggacttctggaaaggtgtaaagcagaaccatcattttatccccggaactgtctgatgcagcttatccaaacgcatgtgctttcttacagtttgtgccccgacttaatggagattgccttaaaaaagaaagatgtacagttgttacaactctgtctacagcagttccctgacattcctgaatcagtcacctgtgcttgcttaaaaattttcttgagcattggtgatgacagtcttcaagaaacagatgttaatatggagtcagtttttgactatagtataaattctgtacatgatgagaaaatggaagagcaaactgaaattcttcaaaatggcttcaatcctgaagaagataaatgcaataactgtgatcaagagttaaataaaaagccccaggacgaaacaaaggagagcacttcatgccctgtggtacaaaaaagagcagctctacttaatgcaattcttcattcagcatatagcgagacatttcttctgcctcatttgaaagacatcccagcacagcatatcacgctgtttcttaagtatttgtatttcctgtacctgaagtgtagcgaaaatgctactatgactcttcctggaatacacccacctaccttgaaccagattatggattggatatgtctacttctggatgcaaattttactgttgttgtaatgatgccagaagcaaagaggctactgataaatctttacaagcttgtaaaatctcagatatctgtttattctgagctcaacaagattgaagtaagttttcgggagctacagaaattaaatcaagaaaagaataatagaggattatattcaattgaagtgctggagctcttctgatattatcaattctccttcatagacattttataaagctcttttatgtgaactcttgcttcatccaggcaagaacggtgttttgtttgcgaccatctcagtgtcaagagaaacgtgtcagtgagtacctggaccatcacttaactgatgctccggggtaggactgcaggtttcacatgaacctgttctaggctgtggacattggtgtggagaggttctgcaattttttaaaaatatgtaactgggttgattttaagtaaaattatttgtgtattgataaaagtctaatttcttatcatgtgttttgaattttttcttttaataaaaaatgaccattgaagcagtgaa

SEQ ID NO: 107392 - DNA, 504 bp, Homo sapiens
  misc_feature (1)...(504): n = a,t,c or g
agaggcgcgaggncgggttttctttgatcgctctcggtaccgttcgagaaccctcgggtcgacccacgcgtccgcacttctaggaatactagtatatcgctcacacctcatatcctccctactatgcctagaaggaataatactatcgctgttcattatagccactctcataaccctcaacacccactccctcttagccaatattgtgcctattgccatactagtctttgccgcctgcgaagcagcggtgggcctagccctactagtctcaaaaaaaaaaaaaaaaggggcgcccgttttaaagaacccttggggggcccaaagtttacgcgggcaggcaaggaaatatttttttccttatagggagccgaataaaaacctacctgggaatcttggaaaagaacccttccttggggggggggacatattgggccaacctccctacaaaaattaaggctttagggaaaaaaaaaacttttaaagggaatagggggtaaacctacc

SEQ ID NO: 107393 - DNA, 3623 bp, Homo sapiens
  misc_feature (1)...(3623): n = a,t,c or g
cggacgcgcgggcggacgcgtggggacccatgattttttgtatggttaaagatttattagacattgcggagggccacatggtttgtgaagaaggtgacaagctaacctactcaaaatatgggcgattttgtcatgaggtcaaaattaactattctccatatgtgaattatttcactagagtatactggaacagatcctactttgtatataaaatcaacactgtgatatccttccagtcttgaaaaataacagagccttcatttcaaagactacctgaagtaaaatgcagttttcttctacctactcggtgtcttttgcagatcagagtatggacatttgaaatattgctgcttttttcccccttctgctgttaactggatccagagttctgtgggaaatagaagatcaagcattactgtcctttgattaaatgtgatatctaccactctgcaatattccagacaggtgtcttccttaccgttacatggtctttaacacttttactgattgcaatattttccccataaaatcttcattctattataatattgatcttgaatttgaatatgtgcaaggtcagatacatatctcaaacataacatttaataaataatgtgatataattatttaatagaaagaataattccgaccttcaagcaagtttctgaaggtattttatgatgtataacaactgaagttttacaataaaaactaatttaaatgttagctgaagatatgtggcatttaaattaaaatggaaattatataaaggaaagtgatttttaaggatatacataaagatatatttagaattttcatgatactgttctcctcatctactgcttatgttaagtgagaactttcttagtaatacataatgcatgatgttactgcattttctaaatgactagtaagtgattagttttttcacttatgcctattaatttgataccaatttaatcatgataaaacaataaccgttaacatatattttgttaaatggacatttaaaagaatgttgttcaggttttttttttaaatactgatatggggcatacaatctattcacatgttttctactgaagtactaagtaaaaaaattaaatcattatcagaataaaaatatgtgttctaaaattagcaacaatttctggggatacatgcagatgttgttaaacgtacctctgcatacagatatattataaaacacaagcaatgttatttatgaaactgtgatgcagtcttcaacatcaagaaaaaatgacaactataataaaatttacaacacagtttcacagtctaaatgctatgttcctttaagtattttcatatttttaatcatttattaagagaaaattgtgaaaagttaatttggccttatagagagattcaggatagatgtagcctatagatgtgtcattttaataagttgggatacatgttctagtttttccttatattcctgttcagtgaacagattttcataattctcacttgttaaagtgctgcaaaaattgcattttcagtactctaaattactacattagaagagagcatttctccattgtctttattttctgttatatatgtgttgtaaaagtacactacattagaagggagcttttccgttgtctttattttctgttatacatgtgttgttaaagtacatgcattcttagactaactctcagatggctttgctctcttggagctgaagaattgtttgatggtgatgtcatatatctgatagattagtttcagtggttctcatttcacttttatacgtaatttcttaactatattaagatagttgcaggcagtgtacctcaggttgactctgtacatctgaatagtgagtcactagtattttgcttcaagccttctgaaaatataaccatagttacctaagcacacagtgaatagtcacatggtagtacttgtgattagagcatgtaaaacaatgtaattgaaaagtcagcttccatattttgtaggggaaatagaacaccctactttttatctagtgtgaaatatttaatcgaatttttgttgatttatattatgttacctgtgctgaattaggtttggtacttgtgttttgtttgacatattagtaagttgcttttgcttctttctgtcaacttattttttaaataaaattgatctggaaaaattgttaatgggatgttttaaataatgaatttttcatccagcatcagttgaaaaggaaaagaaagcttcattatggaaatgacaatattgaatatgacagataagtttatttgcttctgttttaactgcaggtaatagtactagacaactttaagtggaaagcatttagtttatttcttcacttatttgtagagtgaacaaatgattcacaattctacaagtaattccacttaggtaacttacagttgttaggtttgacaataaagatctactatgagaggagaagaatttatgggttttgggtggaaggaatttctcaaagaaataaaaaatgttctttgcccttgatactgcaaacccactgatacaagtgccttgaatnnnnnnnnnnnnnnnnnnnnnnnnnnnnnnnnnnnnnnnnnnnnnnnnnnnnnnnnnnnnnnnnnnnnnnnnnnnnnnnnnnnnnnnnnnnnnnnnnnnnnnnntctctagcctcctaagttaatttagcctcccaaatgccagacaaagaatctaacataaaatttaccttgaataagatatatgatattgattctgagctgctttgtattttttctgactttggcatctgtatcttggtgctttctgttagactggtagagtttaagaacctaaggagtatgcattgtacttcagtgctaacttttttcttcatttactttctgtgtatataggcagcatattttttttgtagaacattaacccagattgctaatagcttcatgttacggcattcttccacacagtccagattgatttaaggaaaagcagaaatggaagtcaaagtgtgttataaattgagactgaaaaacatgctttaaaaaatagatttaatttcttacactgtgaatagccattgtattgttttgtttctgataaatcagttgttttgggcccctatttttgaactgttaaaaaattttgatgcttttcgtggataaaagtagtgcctctctttatacaactgatggggttttaaaaagtgtaaattgccttttttgttaaacttattttaaatgctttagtatttaaagggtgtatgttattaattaatctgcatatttgtaacgcaaataactacttcctgatttacatctcaatatattcttctttcatttgcccaatttaaaaaatacgtagtctctattgttgctgtttactaatagttttagatcccaatgtgtattagaattatagctacaaaaagttgcaagtaaaatttagcaatttcctattcaaacaggatctcattagtatgttttttaatgtgtagaattaacactttaaaataaacaggtgtgaaaattataaaggaatatatatggacaattattttctgtacattaatgtctaaacattatactttactttttcataataaaggaaattttggaaccaaaaaaaaaaaa

SEQ ID NO: 107394 - DNA, 397 bp, Homo sapiens
ccagcgctagagcgcgagcgggccggccagcgggccgcccttttttttttttttttttttttttttttttgtttttttttttttttttttttgttttttttttttttttgtttgggggggggaaaaaaaaaaaaaaaaaaggggccccccccccaaaaaataaagggggggggttttttttttttttttttttggggggcccaaaaaaaaacaaaaaaaaaaatttcccccttggggggcccccaagggaaacccccaaaaaacccccccccccccattttttttaaaaaaaaaaataattccaaaaaaaaaaaaaagggggggggggaaaaaggcccccccctctttccccacaattataaaccccccccccgccgccccccccaaaaaaaaaaaa

SEQ ID NO: 107395 - DNA, 560 bp, Homo sapiens
aggctgggcggcgttgctctgcgctctgcggctgacggcgcttttgtctccggtgagttttgtggcgggaagcttctgcgctggtgcttagtaaccgactttcctccggactcctgcacgacctgctcctacagccggcgatccactcccggctgttcccccggagggtccagaggcctttcagaaggagaaggcagctctgtttctctgcagaggagtagggtcctttcagccatgaagcatgtgttgaacctctacctgttaggtgtggtactgaccctactctccatcttcgttagagtgatggagtccctagagggcttactagagagcccatcgcctgggacctcctggaccaccagaagccaactagccaacacagagcccaccaagggccttccagaccatccatccagaagcatgtgataagacctccttccatactggccatattttggaacactgacctagacatgtccagatgggagtcccattcctagcagacaagctgagcaccgttgtaaccagagaactattactaggccttgaagaacctgtct

SEQ ID NO: 107396 - DNA, 387 bp, Homo sapiens
gtaggaaaaaccgtatttacaaggtataacatttacttcaaagactactcatttgatatatgaatttactccatataccataatagttaaagaatattcaactaattatgtgctactaattggtaacacacaaataactaaaatatatcacatagttttcaggaaattttcaatgactccaatatataaattccaggacctggcacagtggctcacacctgtaatcccaacactttgggaggccaagccaggaggactgcttgagcccaggagtctacagtcaagttattcactaatcattttgatattatagaatcatccaatattagcagcaatgcctgtggaaaaagcacataggtatatgtaactgcctttgttttcccaacc

SEQ ID NO: 107397 - DNA, 364 bp, Homo sapiens
cacccacgagaataaaaggacagggaagccatgggcattttagcctgagtgctctacataaatatcaagcacagcaaaggtggtcagtcagcggagttacaactaacaaagcaacctttggcttctcccaggtatcgatacaattcattcaaatgaaaaaataagaacttaattttattgagtgattacccaattagataagacagagcgggcacagtggcttatgcctgtaatcctggtgctttatgaggccgaggtgggaggattgcttgaggccatgagttcaagaccagcctgggcaacaaaaacttggtagagaaacaaaaatttctctacaaaaaatttaaaaaaaattagccaagga

SEQ ID NO: 107398 - DNA, 2506 bp, Homo sapiens
tttcgtccaccccccagggctccctaaagagggccacgagctgcgaaagggcgggaaaggcagttggagaagaggtaagcggttactcactccatggctgcagcaaggagaggcggcggcggcctcggctgaagaaagaaggtgggagcggagagcgcaggcgtgaaatcttcccaaggctgcagacaccgacggatttgctttgggagccagagtagctgccgccaccagagtccggagccatgagcgggtttaattttggaggcactggggcccctacaggcgggttcacgtttggcactgcaaagacggcaacaaccacacctgctacagggttttctttctccacctctggcactggagggtttaattttggggctcccttccaaccagccacaagtaccccttccaccggcctgttctcacttgccacccagactccggccacacagacgacaggcttcacttttggaacagcgactcttgcttcggggggaactggattttttttggggatcggtgcttcaaagctcaacttgagcaacacagctgccaccccagccatggcaaaccccagcggctttgggctgggcagcagcaacctcactaatgccatatcgagcaccgtcacctccagccagggcacagcacccaccggctttgtgtttggcccctccaccacctctgtggctccagctaccacatctggaggcttctcattcactggtggaagcacggcccaaccctccggtttcaacattggctcagcagggaattcagcccagcccacggcacctgccacgttgcccttaactccggccacgccagcagccaccacagcaggtgccacacagccagctgctcccacacccacagccaccatcaccagtactgggcccagcctctttgcgtcaatagcaactgctccaacctcatctgccaccactggactctccctctgtacccctgtgaccacagcgggcgcccccactgctgggacacagggcttcagcttaaaggcacctggagcagcttccggcacctccacaacaacatccaccgctgccaccgccaccgccaccaccaccaccagcagcagcaccaccggctttgccttgaatttaaaaccactggcgccagccgggatccccagcaatacagcagctgccgtgaccgctccacctggccctggcgcagctgcaggggcggctgccagctccgccatgacctacgcgcagctggagagcctgatcaacaaatggagcctggagctagaggaccaggagcggcacttcctccagcaggccacccaggtcaacgcctgggaccgcacgctgatcgagaatggagaaaagatcaccagcctgcaccgcgaggtggagaaggtgaagctggaccagaagaggctggaccaggagctcgacttcatcctgtcccagcagaaggagctggaagacctgctgagcccactggaggagttggtcaaggagcagagcgggaccatctacctgcagcacgcggatgaggagcgtgagaaaacctacaagctggctgagaacatcgacgcacagctcaagcgcatggcccaggatctcaaggacatcatcgagcacctgaacacgtccggggcccccgccgacaccagtgacccactgcagcagatctgcaagatcctcaatgcgcacatggactcactgcagtggatcgaccagaactcggccctgctgcagaggaaggtggaggaggtgaccaaggtgtgcgagggccggcgcaaggagcaggagcgcagcttccggatcacctttgactgagcgacagcagccctggggcccgcaggtccctagggagttcatgaggggaatgcgccctgttgtctgtagtttggggttgtggcaagatacttgtttgtttgtttctttctttcacatgactgcccttgacatgatcgctgtgtgctttgcgtttttccatttaggagggtattctgggccttctgcccaggcagcagcctcatgggtgtggcttctgtggctttcatttgagtatctttggccccttttcacctactgcgaccacccacctcatcctggctcagcctggtgatggagaagtgctgatggtcttggtcccagccagggtcgtgggggcagccactctctccaaagcatagtcatgggtgtcatgaaaaaataccaaatgtaagagaacctccaagtcagggcgcagtggctcacccctgtaatctcagcactttgggtggccaaggcgggcagatgacttgaggtcaggagttcgagaccagcctggccaacatggtgaaaccccgtctctactaaaaatacgaaaaattagtcaggtgtggtggacgcctgtgaatctcaatcttcagctactcgggaggctgaggcaggagaatcacttgaacccaggaggtgttgcagtgaaccaagatcacaccactgcactccgagcctaggcattcacagactctgtctcaaaaaaaaaa

SEQ ID NO: 107399 - DNA, 340 bp, Homo sapiens
ctttgaaaacataagttccataacaaaattttccctagaggttacttccagtattacagcatctaagtgattcattataagcactgaaaagggtcacatgtattactttattcatttaaatgaaaagaaataaaaaaattctttatttaaaaagaaaaataatggcaggccttggccactcatgcctgtaatcccagcactttgggaggccgaggctggaggactgcttgaacccaggggtttgagaccaacttgggtaacataacaagacccacacaccaccccccagccctgccgccccgtctctactactactactactactacgtcgacgcggccg

SEQ ID NO: 107400 - DNA, 415 bp, Homo sapiens
  misc_feature (1)...(415): n = a,t,c or g
caggcgtccgccatcacacccagctaatttttgtatttttttagtagngatccacctgcctcggcctcccaaagtgctgggattacaggcgtgagccaccgcgtccagccaattggtgggttcctggtctcactgacttcaagaatgaagccacggaccctcgcaaaataagcttcaaatgaaataggctttcgatgtgacagtgtttacaggaaacattatgctgttatgaacttcccttagaatcaacccatttgtgaaacaccacattaataagagcagtatctttggagattggagagtccaccaaggatgcccactggctccctacaaagttttttatgtgaggactcggtctcaggctcagaagtggaagagatgtgccttgactcagatgagactttggacttggact

SEQ ID NO: 107401 - DNA, 547 bp, Homo sapiens
  misc_feature (1)...(547): n = a,t,c or g
agaggaattgacgactgagcggctgtagcaattcggcacgagggaggcatgaggaagaataaattgaatagaacacaaaatatgagagcccatcacatgtagttttttgttttttaaattttatagagaccaggtctcaccatgatgcccaggctggtcttggactcctgggctcaaggagtcctcccaccttgacctcccaaagtgctgggatcatgggggcgagcccggcctcatggagttaaagtacatgttatttgtgaacatttcatcttggttgcatgtgtgctggattatgttgtaaaacgtactttgtgctgtgcactgatgtatggtgaaatatatattangtgatatgatctgttacatcacattctccctcgccgtcactgccaggtcaccacccccaaccccagcagacagggaagctcgggattaggcaatggataagctgcctttggactctgaataggctggtttacgataacttgggcgactaggccagaaagatgggaagaattagggtggagggccctaatgctttgcc

SEQ ID NO: 107402 - DNA, 542 bp, Homo sapiens
  misc_feature (1)...(542): n = a,t,c or g
aggcggntgnnnnnnaattgattgactgtctgttgattcggcacgaggaaacatctagaagagggcagacccagtggtgaaccgcatccaacagtggtgagatgggtgcagctctacaggggcgtaatttacaaaccaccagactccctggttatgtgtgtgctgcggtggtgtttgctctccggcagatcaaatttgtgcaatgatccattttgagaatctctccgtcaccccaagaagtcctctcgcacccatcagtccgaccccttccccgtgctcctccccagccctggcagccactcacctgcactccagacgctccagatgtcatgcatgtctcctggcttccttcggctgttttcacgcgccatcctcacggcaggctgtatcaggacttcattccatttcatggctgaagcacattccattgcatgcagggaccacattttgtttgtctgctcttctgtccatggacatctgggttgcttccagtttggggcttctgtgaatcctgctgctgtggacatttgcgtagtcctcgn

SEQ ID NO: 107403 - DNA, 548 bp, Homo sapiens
  misc_feature (1)...(548): n = a,t,c or g
gggatggggccnngnnnnaactgtgactgacggtgctgacggtcccgctgctctgaaggcggtgtatgacatggcccgcaagggtgcccgtgatgaaattcagacacananncntgatggtggcctgttctccggaggtggacgatgaagaccttccgctggaaagtgaaacccggtatggatgtggcttcggtcccttctgtaagaaaggtgcgctttggtgatggctattctcagcgagcgcctgccgggctgaatgccaacctgaaaacgtacagcgtgacgctttctgtcccccgtgaggaggccacggtactggagtcgtttctggaagagcacgggggctggaaatcctttctgtggacgccgccttatgagtggcggcagataaaggtgacctgcgcaaaatggtcgtcgcgggtcagtatgctgcgtgttgagttcagcgcagagtttgaacaggtggtgaactgatgcaggatatccggcaggaaacactgaatgaatgcacccgtgcggagcagtcggccagcgtggtgctctgggaa

SEQ ID NO: 107404 - DNA, 532 bp, Homo sapiens
  misc_feature (1)...(532): n = a,t,c or g
gttaaagggcggccggggattggtggaaactgatggacgctcgaaancgnccgaggccgngagtcagagagacgcccctgaagacacattacctggaggagataagctccccagcctcccccacagccattccccagtctcttctcttcagcttcttcatttctcctccttccagtctggccactggctcaggccacagcggacaccctgttcacagcctgcatcaccctcctgagacagaaccttctccaagtgtttgcctttgggcaggtcccaaggtaccacctggagctgctggaaagggtagtcctgacagcaaccccctggtgatccggtccttgctagctcctcccccggcctccctgtaatgctgggtgcagagggatgcaccagggagctgcgtgtcgcagacagaccaattccacagcagaggaatctatttcaacgttgtatcagactccagtctaggaagcagaccacactgagtgagtatatcagtcagagttccccanagaaacagaaccagtctatt

SEQ ID NO: 107405 - DNA, 1587 bp, Homo sapiens
gttgacggctgcgactccattttgtaggccgcttatttgtgtgcatccacggcgattcttcccgcagagttgtgaagcgaaaggcttacaattaaaaggaagaaaaaaaaataaagataattcgggagtacaattgacaaagcgtgtgggtcgctcagcctccagcagtaactgctgatctccagttcttggagggttccggtgagaagaacgcccctactgcggtactgaggaagcggcaggaggagatgcggcccctggacatagacgaggtggaagcgcctgaggaagtggaggtgctggagcccgaggaggatttcgagcagttcctgctcccggtcatcaacgagatgcgcgaggacatcgcgtctcttatacgcgagcacgggcgggcgtacctgcggaccaggagcaagctgtgggagatggacaatatgcttatccagatcaaaacgcaggtggaggcctcggaggagagcgccctcaatcacgtgcagcacccgagtggcgaagccgacgagagagtgtcggagttgtgcgagaaggctgaggagaaagccaaggagattgcgaagatggcagagatgctggtcgagctcgtctggcgaatagagagaagcgagtcttcttgaaggaggagatcggtggttcacagctgaggactgtagtcaactggtaaggatgaactgacaccttgaggaaactgaaacagcttgtcattttctctgttttgtttttgtatgttttttacccccatgtaacagtctcccttatggtcagtgattgatgacctcgatatggatttagattatcaaatgtgtttggttttggaaatataacttttgtcaaagaaatactctcagaagagaaatggggcttaattaagttgtttttgtggtcacgtttattcttgttacttcgctgtgtttttgaaatgttgggcatggcctcgtattttgctgttacctttgtgacctgattgttttttggaacacgtcaagacgtgggatcagaatcttccaactttagaggtgcaatggaagacactacgctacttggttgagcctggtgaagaatgtattaatgagactgctttgcataaaactgggaagaaagagaagacagttggagatggaagatggttttgtatatattttggaactttagttcctctgtgagacgaaagaggagagctatgttttgtgtcacattgtctgatatatattgtgtaacctgtcaggtgagttgatttagacaacatagctgaccttttatgacaaggcagtttgaatagggactattgtaataccctcacacattataggggcatcagagaatggcatggaagagacagtctacagagagctttaagaggccggagaaaggaaaagacattatcagggcctggaaagtctcttccagttcatcagggtagtagacctgtcagattggaggtcaaagtcaaaagtataataagtgttaatttgccttgaaaaacaaagacctaaaaagccttttttaagaaataaattttttgttcacatgaccaaagcccctcctgtgtgtgttaataaaagaatcataaac

SEQ ID NO: 107406 - DNA, 430 bp, Homo sapiens
  misc_feature (1)...(430): n = a,t,c or g
tttcgtcgaggctgtgaggggagatggacgtgtgaggagggatgatggggcttgagcaaagtgggggagggggcaaaggcagttggcccaacacattccccacccctttgagaggtctgaggcctgcagacctggctcggagcccacctggtagtcctcagactgtgtgtgtgtgtgtgtgtgtgtgtgtgtgtgtgtgtgtgtgtgtgtgtgaaaaagagagaatttgtggagaaagggggggctgattctgctcatattcatcagggtgagtagaaggcacccatctctcactctggcctgacgtgtgtgtccctgaacangatacagctctctgtgagcctgtgcttcatatatggacctttgtgggcagggcttctgagcttcttaacactagcgggaggcgctacaggcgctctctctatatgag

SEQ ID NO: 107407 - DNA, 717 bp, Homo sapiens
tttttttccagtctcaagttgtctttatttgcagcatgagaacaaactaacacaggaggccacatgccaatgatgcctgggcccccagtgatgagtcctcccaccctcccacaatggtgcccacttggacccaaatgactcgaccagacagataagagtagaggggaggcctctttagatcagttttatattacttgttctgcttcacaaggagatcatggtgctgtgactctgggtattttcttaatagcatgacaaagaagacttgctcctccttcctcatgatcttgatcatatgtggaatccaaagaagttcacctcataaaagtattgagtagaacagtggttaccagaggctcttgatatggtttggctctgtttcctgacccaaatctcatcttgaattgtaatccccacatgttgagggcaggacctggtgggaggtgatcagatcatgggggtggtttccctcatgcggttctcgtgatagtgagggagttctcaatgagatctgatggtttaaaagtggcagtttctggctgggcatggtggctcacacctgtaatcccagcactttgggaggccaaggcgggtggattacctctggaaggtcacggacatcggtgactacgacgacgacttcccagacgtgcgcccccgcttagccagcatcgtcagccctagcctgacctctacgttcgtgcccagccagagcgc

SEQ ID NO: 107408 - DNA, 427 bp, Homo sapiens
cggaattcccgggtcgacggctgcgagaagacgacagaaggggaaaaagggttctgttatcatctgatgtgaagattcctttaaacattgactttttctggtgtgaggaatgaaagctgtggaatacgtgaagttttatgaaatagtgtttttttgtgtgtgtgtcaacaaaattaagagagtttgggttattgaagatacaagagtgtttttgaaggtatatataggaaaccaaatctcaaatgtggtctgtccttgtgattaaaattagagcaatagggaagccaggtgtgatggctcacgcctgtgattccagcgcttttggaggctgtgacgggaggatcgcttgagcccaggagttgagtccagcctgggtaacatggcaagacctcgtctctacaaaacattgttaaaaattggctgggtg

SEQ ID NO: 107409 - DNA, 437 bp, Homo sapiens
gctgcgagaagacgacagaagggtaagaagtaaaggagagggaggaaaggagttgaaagaataagagaatgaggtgaaagctgaagtccccacagagggaaatgccacaagactaggccgtgcaacatttccgcagtgctcctcgctacaaagacattcccctaaggctggtgggcaactcaacactcagctcagtacgtggtcagctcgtcctccataggagccttatgccttggtgagtcttgctctgtcacccaggctggagtgcagtggtgtgatctcagctcaccacaaccttcacatcctgggttcaagcgattcttgtgcctcagcctcccaagcagctgggaccacagaggagatctctgaagaaattgctgatgaaagtccaacaggctcttccagtttgtctggtcggtcacatttgctgaaacctg

SEQ ID NO: 107410 - DNA, 1424 bp, Homo sapiens
tttcgtggcaaggcggcttctggctcttccgcaggctcagttatgggttcctgtgtgcttagtcatcgggtccgacacaggctggactgatctggggagccgcgaagggcctgccttcacaaagggacgtaacgcaagtactgcgggcagtgtttgaatatggccctgaacaatgtgtccctgtcctccggtgatcagaggagcagggtggcctaccgctcttcccatggcgacctcagaccgcgggcgtcagcgttggcgatggtctccggagacggcttcctcgtttccaggcctgaagcgattcatctaggacctcggcaggcggtgcgaccaagcgttcgggccgagagccgtcgagtggatggtggcggccggagcccaagggaaccagatggccggggccggagccgccaagccagattctcaccttacccaatccctgccgttgaacccgatctcctaagaagtgtgctgcaacagcgtttgattgcattaggaggtgttatcgcagctcgaatttcagtttaaacgaacacctttcctctggccctcacttagcttgtgaacaggcctttttaaaatcctttcttggtgtagcagcaatcttgttgttttatttttagatggatgtattttcatttaatacgtgggagttatatgaatatgtcctagcactaagggaagtgtaacagttgattgatttaggtggttttatgcagccagaacgattggatcaggaaaggtgtggaagggatattcttaggtcgtcacaaagctgagctgatgggagcaccctccccagaggtcaacaatccattcgttaactcagacacttaacctttacctttacttctgttggcgaaaaagaagtgctcctttttattacactgatttatccttccatcttttccttggcatttaccatcttccatctcccccttcacttttttcagatatgtctacaaacagactccaatctcagtcgcactaaaaataagaacaaaacctaaaccttacagttctttcaaattattaaatcaatttattattcctttctttggcaaaggttccaaatttttactttatatttgtaattttactatttgcattcagtcccagcgcattaatctgaatctgctgtcctaaaatacactggtgaaaacattacttgtacaatctcctatcagaaaactgttcatctactcactgtagtgccctccttgaaatgtgtgtttgttcattcaactaacaatatttggggatccctgtagtaaacactgtatgaattttacacagtctggccatcaagaaagatcacggagtatattctagatggggaggctactaagtgaataggaatcaccacgctgggctgtttattaggtacagtaataaacataagtactggttgcagtgaaaaa

SEQ ID NO: 107411 - DNA, 3908 bp, Homo sapiens
ctgggtagacccacgcgtccggcaccgacattttgggcggtggccgtgagaacacgttgtttggctgaaaagtgaaggcaagagctgatttggcctctgtgctcccctccgcaaggggatcgttttctccagaagagctggatattctttcgcccagttatggcagacaagttaacgagaattgctattgtcaaccatgacaaatgtaaacctaagaaatgtcgacaggaatgcaaaaagagttgtcctgtagttcgaatgggaaaattatgcatagaggttacaccccagagcaaaatagcatggatttccgaaactctttgtattggttgtggtatctgtattaagaaatgcccctttggcgccttatcaattgtcaatctaccaagcaacttggaaaaagaaaccacacatcgatattgtgccaatgccttcaaacttcacaggttgcctatccctcgtccaggtgaagttttgggattagttggaactaatggtattggaaagtcaactgctttaaaaattttagcaggaaaacaaaagccaaaccttggaaagtacgatgatcctcctgactggcaggagattttgacttatttccgtggatctgaattacaaaattactttacaaagattctagaagatgacctaaaagccatcatcaaacctcaatatgtagaccagattcctaaggctgcaaaggggacagtgggatctattttggaccgaaaagatgaaacaaagacacaggcaattgtatgtcagcagcttgatttaacccacctaaaagaacgaaatgttgaagatctttcaggaggagagttgcagagatttgcttgtgctgtcgtttgcatacagaaagctgatattttcatgtttgatgagccttctagttacctagatgtcaagcagcgtttaaaggctgctattactatacgatctctaataaatccagatagatatatcattgtggtggaacatgatctaagtgtattagactatctctccgacttcatctgctgtttatatggtgtaccaagcgcctatggagttgtcactatgccttttagtgtaagagaaggcataaacatttttttggatggctatgttccaacagaaaacttgagattcagagatgcatcacttgtttttaaagtggctgagacagcaaatgaagaagaagttaaaaagatgtgtatgtataaatatccaggaatgaagaaaaaaatgggagaatttgagctagcaattgtagctggagagtttacagattctgaaattatggtgatgctgggggaaaatggaacgggtaaaacgacatttatcagaatgcttgctggaagacttaaacctgatgaaggaggagaagtaccagttctaaatgtcagttataagccacagaaaattagtcccaaatcaactggaagtgttcgccagttactacatgaaaagataagagatgcttatactcacccacaatttgtgaccgatgtaatgaagcctctgcaaattgaaaacatcattgatcaagaggtgcagacattatctggtggtgaactacagcgagtagctttagccctttgcttgggcaaacctgctgatgtctatttaattgatgaaccatctgcatatttggattctgagcaaagactgatggcagctcgagttgtcaaacgtttcatactccatgcaaaaaagacagcctttgttgtggaacatgacttcatcatggccacctatctagcggatcgcgtcatcgtttttgatggtgttccatctaagaacacagttgcaaacagtcctcaaacccttttggctggcatgaataaatttttgtctcagcttgaaattacattcagaagagatccaaacaactataggccacgaataaacaaacttaattcaattaaggatgtagaacaaaagaagagtggaaactactttttcttggatgattagactgactctgagaatattgataagccatttattaaaaggagtatttactagaattttttgtcatataaaacttgaatcaggattttatgccccacatactctggaacttgaagtataatatacttaatataacataaaaagccagttgggttctaaattgtagttgaaacacagaaaatgccacttttctgttcctgaagaggctcttttgtgcataatattctaaaatgaagacatttcaagctatacaaattacttccaagttttcatgatgtatgggaagattttcagtaggtgtattatattcacggtaccaaatgctgaccagtgttgctccattttttaaatcttgaaaagggtttctgtacttacctggtttgccaagtatgccagtgtaatgaaactgcccttattttaaaagccagtcaaagattccactgattgacatttgataaataaacatcaggattatgtttattgtttgttttcagtctttgcactatattaccagtatatggtttccgaggaagattatctactgcaaaacaccactgttggaaaaataggtatttttaaattgtttttaatcttttttggtgcttttaaacatgtttagcaaaaaccaattcagttccattccccgcaaaaaacccctaactttactctgaactttttttgtttttgcattccatgaggttctgtattcagtcattctctaggtaatgtcatttttgtacacatatatttatataatcactgattgagatttaggaaaaagcatttctaaagaatatttgcttcccttagaactacagactcgaaatctttaaagatggtgcctaagcatctatgtattttttttaagttccacagatttttctgttgggcagccaaggattataaaccacttccctaaaggcaacattaatgcaaaagtccccagatggcaatacaaagtatcccctggtaccacatatattcatttgtgagtttggatatagagcacattatctaaaccattttgtagttccaaaaacccatctaaatttcttgagttcctgaattttgaacaggattacctggagcctggagccactttaagttgtacttctgactaaactggaattatgagtgaggaagagtgtttactaaataaatgactggggcaagcaaaattgaggaggaaattagaaactgtttgacaaactttaagagctacttgaaataacagaagtcttgattaatatgcaaataatggctagaaagtatggtttaactggaccctattatgccttttaaaaataatttcagtaacccataaatacatgttgtaaaaaattcaaatatacagaatggaataaaaaaatgatctccctttattaccctcccaaaggttaccagcgtttgaatttaataatgtatattctttcatgcttttttctgtgcacttacctaagtgtgaatatgtaaagggtttgttttgtatacaaatgggattatactaaaataagtaatgcctatttttaaggataggttaaatttgtgaatgatcatttcaaatatattgaataaaataagccaaaagctattgttatttactgatcctggattgtcttaaagaaagtacttgtgatataagagcacagttctacttactgctaatgacagaatatgtattaaacgtattttcatgtaaatgaaatctttaaaatatgtatcttaaaattttacatagcaacagaaaggcctacaattgctaacacaagaaaaatacttataaaatcagtataaaatcaatgcagatgttagcaaaagaatgagactacttcatatgtcctaattggaaaaagtctcaaatacttaaaaaaacaaaaaactggaacagtttattatactaccatttttgtgaaaatatacaaaatattgaaataaaggaatactcaagaaac

SEQ ID NO: 107412 - DNA, 419 bp, Homo sapiens
  misc_feature (1)...(419): n = a,t,c or g
caaagtgctgggattacgtgcatgagccaccgcgccctgccccaatgcagacttatcaggttgatctcagatgctgttttgtcagcacaattaacttgttagtgtgtggagaaagggcgtcacttccatcagttgagagcctggtgttttctggtctggctgaggtctggatgaaagcagtcttggcaccgagcagagaaagtgggaagctggtgctgcagcaggtgccagagtacgcagaggccatatggggagcccgccctgcctgcagaggcctcgtgttctcagcctgagggctctggctctgctcctccagctgctgcagnggaagtcagagaagatgccctggcagggtcactagaggagtggagggaagggcacttcgtaccgtggcacttcatatttgggagcaaagaaag

SEQ ID NO: 107413 - DNA, 404 bp, Homo sapiens
  misc_feature (1)...(404): n = a,t,c or g
actagttctagatcgcgagcggccgccctttttttttttagaacaactcaccaaaaaaaaattcctgtttattgttggacaacattgtttcacacatacataaaacagcctaaaaaaaaagaaaaaaaaaaaaaaaaaaaaaaaaaaaaaaaaaagataataaaaaaaaaatgaaagacttcaaaaaaaaaaaaagggggggggcgaaaaaaagaaccccttgggggcccaaaattaaccttatattaaaagggntaagctttttccaaaaaggaatattattaaaagggaatttggggattttgggaaaaaaacttaattttgggggggggcaaaaatggaacaaataacctcaaaaaattaaaccctttggggnanncnaccactggtaaaacgcatggggg

SEQ ID NO: 107414 - DNA, 384 bp, Homo sapiens
agaaaattcacccgtgtggcagaatcctaccccaatgttgttgacagacagcgtgaatctctaactcaggaaggtctgtgttggaattccacctcactagctaaatattcttgggactatatgtgtatgtatatatatagatacacatatatacacacacacaaatatatacttatatatatagtgtgtgtgtgtatatatatatatgtgtgtgtgtatatatagatatatacttttttttttttttggagaaagggttttttttttttgcccaggttaaaaggcagggggggaacattggttaattgcaccctaaaactctaaaactaaggggattccccggcctcaccctttacggggggggaacccacggggggacccccc

SEQ ID NO: 107415 - DNA, 477 bp, Homo sapiens
  misc_feature (1)...(477): n = a,t,c or g
attgaacgccttctgaacagtgatggtcttcccggncgacccacgcgtccgctatcatctattgtgaattatttttgtatatgctatgacttatgggtcaagcttcaggtttttctcatgtggtatatccagttaggtaaacaccatcaattcaaaaggctatcctttcctcagcaaattgcagtggtgtctttgatataaatatacaatacatatatacacacacacacacacacacacacacacacacacaatgtgtatctgtatatacaatcaggtgattgtatatatgccgttttgttgggagaattaagcttcatttacatatttgtctttttgtcttcccttatatcaatactatttcacctcacttactaaagctttatagtaagtcttcaaattaggtggtataattcttccaactttgttgttgctaatatatattgaaggcactgatgtctctgagctggatctttg

SEQ ID NO: 107416 - DNA, 491 bp, Homo sapiens
ttttgtctttttaagactggacttgctttatattaaatttgtaaaagtgtgcactggcagcagcctgggcggggctggggtggagcccggggtctgcttgggcctgagccacccacaggtccttttcttccccttcttccttggaaggcagaactgcccaccaaggcagggatctgtctgacttgaagctccgttctggggtctgggaggcgtgggcaggagtgagggccccaggccctctgagcgctcaccccagctggggacaggccccgtggttttcaggcacaagacggtagcccggcctccagcaaccctaaacagctgggctgctgccctcttcctcctcctcagcccagagggtctcccaggaccctgagggccatccacagaagaagtgggccaggttgcgggtcatgcctcggtcgaaggggttgctggggcgctggcggagataggcgatgcggtgtgaggagatgaattcccaggtggtg

SEQ ID NO: 107417 - DNA, 417 bp, Homo sapiens
tattttaagtgaggctgtcagagcaggcctttttggggaggggactttataaagaccttaaggaggggcaagagcaatttttctaaatgttccccacttaaaaaggcccatgtttttcctagaactctgtttgtcgactaaatgtccagttggcactgagtttgctctggactctttattaaggttatataacagtaatactttttgctgggtgcagtggctcatgcccacaatcccagcactttgcaaggctgagatgggaggactgcttgaggccaggagtttgataccagcctgggcaacatagtgagacccccatcactatcttttaaaaaaatgcatttgtcttattatgaatgcagttatctgtgatatgtgttgttactaattggattttcttttcttttcttttttttt

SEQ ID NO: 107418 - DNA, 478 bp, Homo sapiens
  misc_feature (1)...(478): n = a,t,c or g
cgagcagggccgcntccctttgtcgctgcggaattcgccgatagaaaggcctatgaatcttgcatcttgctccataatttatctgttttaatgtaaaaataatgttcttcaatcttttatcatggagccaaactgacaattcaggaagatatgtgtattccttttgggatttatgtgcctcccaccctattgggagatatccttagcagtttatgtacccctgtttaagttttatagaaataatctctaagccattagttctgataaatttggttccttccaatcctttgtttctaaactttgattcaggatgatctgacaaattaaatagcacccttaaacaataaggcatcatggcccagtatacagagaaatatggagatagaatagaattggcatggtgtctcacgcctgtaatcccagcactttgggaggccaaggcaggcggatcatgaggtcaggagatcaagaccattca

SEQ ID NO: 107419 - DNA, 484 bp, Homo sapiens
  misc_feature (1)...(484): n = a,t,c or g
agtgccgnnnnnnnnnaactgacattcactgcgcgatttcgcacgaggaactgctgctaaggcagtgcagaagggagatgtggggttggagcccccacacagagtccccactgggacactgcctagtggagctataagaggagggccattgtccttcagaccccaggatggtagatctgctgacagctgttgctatgtgcctggaaaggctgcagacactcaacatcagcctgtgaaagcagccgggagggggtctgtaccctgcaaagccacaggggcagagctgcccaaggctgttagagcctacctcttgtatcagcatgacctgaatgtgagacatggagtcaaagaagatcattttagaactttaatatttggttaggctgggcatggtggctcatgcctgttatcccagcactctgggaggccaaggcgggtggatcacttgaggtcaggggttcagggccagcagccaacatggtga

SEQ ID NO: 107420 - DNA, 486 bp, Homo sapiens
  misc_feature (1)...(486): n = a,t,c or g
cgggagtnccggagncnnnnnnaattganngccctgcccgctctgcggaattcggcacgaggagagagagagagagagagagagagagagagagagagagagagagagagagagagagagagagagagagagagagagagagagagagagagaggggtgatctgtgtgtgcccctgtgctctcctgtgtgtgagagagagcgaccccctctctcaaaaaaaatactgtgtgtgtgtttttgtagtgagatacacagagagcttggctctctctcctttctgtctcgggagatgcctcgcacttttgatatttttggaggggatgtggagaaagatatgggccccttcttttctctctctctgtgtgggggctctgtttttttctcaacaccctccccctttctggtgtttgtgtgttctctctttagtgcgccctctccccctctctctctctggaggggtgtttgtgtctcagcgcgcgctcata

SEQ ID NO: 107421 - DNA, 1412 bp, Homo sapiens
cttagtacagtgcggtggaattcgcgatggcaggtgtcggggctgggcctctgcgggcgatggggcggcaggccctgctgcttctcgcgctgtgcgccacaggcgcccaggggctctacttccacatcggcgagaccgagaagcgctgtttcatcgaggaaatccccgacgagaccatggtcatcggcaactatcgtacccagatgtgggataagcagaaggaggtcttcctgccctcgacccctggcctgggcatgcacgtggaagtgaaggaccccgacggcaagatgttgcaggtggtgctgtcccggcagtacggctcggagggccgcttcacgttcacctcccacacgcccggtgaccatcaaatctgtctgcactccaattctaccaggatggctctcttcgctggtggcaaactgcgggtgcatctcgacatccaggttggggagcatgccaacaactaccctgagattgctgcaaaagataagctgacggagctacagctccgcgcccgccagttgcttgatcaggtggaacagattcagaaggagcaggattaccaaaggtatcgtgaagagcgcttccgactgacgagcgagagcaccaaccagagggtcctatggtggtccattgctcagactgtcatcctcatcctcactggcatctggcagatgcgtcacctcaagagcttctttgaggccaagaagctggtgtagtgccctctttgtatgacccttcctttttacctcatttatttggtactttccccacacagtcctttatccacctggatttttagggaaaaaaatgaaaaagaataagtcacattggttccatggccacaaaccattcagatcagccacttgctgaccctggttcttaaggacacatgacattagtccaatctttcaaaatcttgtcttagggcttgtgaggaatcagaactaacccaggactcagtcctgcttcttttgcctcgagtgattttcctctgtttttcactaaataagcaaatgaaaactctctccattaccttctgctttctctttgtccacttacgcagtaggtgactggcatgtgccacagagcaggccctgcctcactgtctgctggtcagttctgggttcacttaatggctttgtgaatgtaaataaggggcaggtcttggccctagaggattgagatgtttttctaaatcttagaactatttttggataaattatatattttccttcctagtagaagtgttactgcctgtaactagctcaaaataccaatgcagtttctgcattctgggttttggttttccttttatattttttttggtttttgaaaatttgccttttggccccccagcttgagggccagggggggattctaagtaattgggaaaatttggcccccgggtt

SEQ ID NO: 107422 - DNA, 471 bp, Homo sapiens
  misc_feature (1)...(471): n = a,t,c or g
atttgccctcgccncccggctgcaggaattcggcacgaggcgagagagagagagagagagagagagagagagagagagagagagagagagagagagagagagagatactcactcttttttacatggctgaaccaatctcgccatgatgtgagggatatgacaattcccggttaggccgtcaggtcctactctggccagaacagggacctcgcccctggcccttatattaggaacttggtcctgtgcaggtcaggacactatcacatgagttctggagagcaaaagccacagatggaactgaaggttagggagtgatacattttctgaattagagctcatgaacattaagatggttaaatatgacaaatagaaattactgtctagaattaaaataaaaaaaatggcaagataacaaaagacttgtgaaaatgcctaacataggtgtaagttcaatataggctaaatgatgtg

SEQ ID NO: 107423 - DNA, 460 bp, Homo sapiens
  misc_feature (1)...(460): n = a,t,c or g
cctttgcnccgcgctgtatgaattcggcacgaggagagcaggtcctccagggccccagcaaatgccaggcctgtttactaatgacagcaaaggtccaccatcacttatcaggaatgagagcattcgctttcagcctgccctgccagcctcacagggctgcggcatgaacccctgtagggttagtttatgagtgcgtagggaagtgctccccagaaagcaggagaaacacggatggccagatacacgtttgagcctctgacaactacagtcactgtgtactaactagtggtgaggttggcaatttgtaaaaattactcattaaagagggagacagagccaggctccgtggctcatgtctataatcccagcactttgggaggccaaggtgggaggactgctcgaggtcaggagtttaagaccagcctggacaacatagcaagacccccgtctctacaaaaan

SEQ ID NO: 107424 - DNA, 499 bp, Homo sapiens
  misc_feature (1)...(499): n = a,t,c or g
nttggccccgcttttgcacagcgctgcaggaattcggcacgaggagagagagagagagagagagagagagagagagagagagagagagagagagagagagagagagagagagagagagagagagagagagagagagagccacttctctctcgcgcgcgcgcccctcttttctttttccctccgcatgtgtgtctcacaccccctatgtgggtgagagagaaaatctctctctccacactctgaaacacacacacacgcgagagaaacactctctctcttacacaaacgcgagcgcacgagacacgcgcgcgcgtttctcggaggggcgcgcgccccctatatactctgtgtacctcacacacggtgtgtttttttttttttttttttctctctgtctctctgtgagacacgcagaggggctcgctcatgtataagagtgtgctctctctctctcacaacaaagatatagtgagagagagcggcgcgtgtgttttatata

SEQ ID NO: 107425 - DNA, 2469 bp, Homo sapiens
ttttttttttttgagacagtctcactctgttgcccaggctggagtaaagggcagtggcatgatctcggctcactgcaacctccgcctcctgggctcaagccatcttccttagcctcccaagtagctagaactacaggtgtgtaccaacacgtatggctaatttgttttgttttttttgtgtgtgtggagacagggttttgccatgtttgcccaggttgggctcgaaagccttaggctccagtgaatttgccccacctcagtctccctaagtgctggggattacagacgtgaaccactgggccccagcccaaaccttcaccttctaagggcactgggatgaacagaccgatcggcttgagggtgggcaaaggggtgtgggctaggttataaggaagtggtaccaaataactgtgtgcctgagttccaccgcaagattactaaaagcaggaccagaccagaaactgctaaagaacatggcctgtttgacatgttcatgagtcacctgacccacagcatatatgcttatgactaaaccctccactcctgattctcaagagtgtatcacctgtcagcaaaatgaatagtgggatattttgggccattttaaatgtgaaattttgcctctttaatgttaattcaaaactatatcaatgttttcttgttcccacctctaacccaaggaaaaaagagaaaacatactatgcaaaggaagtttaaacttaagttttccttaagggtcagcccaacaatgactttcagtcaaatggattaaactggaaaatgtttttgtttctgttgtaaacagatcatcctaggcggaaagtttttttttgtttgttttgcttttaaattagtttatttcctaaatcctagtcttccacatttcctagagggccacctgacacaagtccctgtatctgaagtctagcatctcaaggctgatctggaagtgtgctagtatgctccctagtggataacttaatcttttaatacagttccgtcattcccatcttgttttcagaagagaaggtggctacagccaggcataacatatccactgtgtgcatagagggtctcttcacgttgatgcttggcattccatcagctttctctaagtctttgctcaagttcaaccttaaaatgatgttagacaacaggtcccagtcagttccctctattttcacccattttgctcacaagccatattggcccgattagtggtactgtctgactcacgtgtgtgatccaaataaaggtagctgctgaccactgcctggtttgttttgtggactaggggatagagaatccagggttctctcatgaggagttaaacatatttcaagagcaacaggaaaaaaggtacatcaagccatttggaaaccaaaaatttattgctttctccttccaaaagcttttgtgaattttacaaaaaaaaaggatgaaagttcaccaaactgcttagtcccagctaaagcataagagggtgagaacggtacactgcagggccacccagcagcagctgtgcactgatgttaaaactggctcccccagacttgtagtgctgtcttcagggggctgcattccttacacgccacctcttgtgacataggtcattggtcaagccgctggaatgctacagaggtttttttggttttgagaggcttttttttgttttgccttcctactataaaagcgaaattttcagttcatttctgaaaaataaattggtcaataaattcattttgttctgcttctactttacacaaagcttcatattcaacccgatacctttctagctgcattttcttttctgctattagggcttgaagttgctgctgttgagcttctctctgctttgctatagatttgagcaagttccgagcaccgatggccttcatcttttcattttctgcttcttttgcaagttgatcaacaagctcaattaaaccaccaactattttctgaaactggccaattttgtccacaaagtctttgcactcttccttcagctctatggtctgctgggtaacctctgggtccaacaccctcagcttgttcagttcatcaaagtgtagccctgcttcacccaggatgtccttggccatggctgtttcccatccaggttccctagaggagttctgctctgaaggagtgacagtggcagtcaggaggaggtgtgtcataggagcaagggtcaggaaagaataaagtccgcttgcttgtcacaggcatcgttcattcaacacacatttcttgagtgcctactacatgccaacactgctagatgctgggggtacaaagatgaatgcaacacggtgcccgccctgaagagcacatagttcagctgccggccccgcggcggcagcgcgctgcagcccaggctgatgtagacaggcagcttctcctgggtcagcgacagccggtacccagccagcctgccacggccgctgccacggatacagagcctgt

SEQ ID NO: 107426 - DNA, 565 bp, Homo sapiens
  misc_feature (1)...(565): n = a,t,c or g
ngattggatcacgctcagngggatcgattctccctaggagctgngcaggataggngcccaccacaacgcctagctattttttgtatttttagtagagacggttgtttactgtgttggccatgctgatctcgacacctgcctcggcctcccaaagtgctgggattacaggtgtgagccaccgagctcggccaagaatcagtattcttaatgctttccaaggagggtaaacagtggagcaccgaggtcatgattgagagatcggctgtgcctaaatcctgccactcactctggacgtagtaaaggtctgagagattgccggtgaatttggagatatgaacaagagtccttcactcatagaacaaaggagacatcccgggaagtcacaaaaccaagtctatgttcaggtagagacttttaaaacagtgcagatccccagaccttaccttttttgatcctggtgagtgagtgttggtggggcctgggatttgtctgggaggctgcccaggtgcttgggtcactgtctcaagacccacctgtgctggtgcagcatctcagaactgaactg

SEQ ID NO: 107427 - DNA, 499 bp, Homo sapiens
  misc_feature (1)...(499): n = a,t,c or g
aggagagagngnnnncttatgagnccctattgatgacgtancgcaanngcgccgnaanttaaanntataatctgcgatgcggaaaagcgtacaacaaacaagcctattttgcttgtatttttttaaacaatacaggtgggggcttgctatgaggcccatgctactcttaaactcctaggctcaagtgatcctcctgtctcagcctcccaacgtgctgagatgacaggcaagaggcaccatgcctggccaaaataaaaatttttaataggcagtccagtagtccgaaaaatgaagcaatgcgctccccagagatactttttataacaaaaggtttaatgaagattttccagtgtgcagatttctactttgcagagcagatagaatacatctgcgcatttaaattattaaaacattacagaatcattacatggactaacaacaaatttttattttctaacagtgtgttatggagaaagcctgccaaacggaaaatgagaat

SEQ ID NO: 107428 - DNA, 454 bp, Homo sapiens
gtttgaaacccccttgaggacccctagtcagtgtggtggaattcttttattttggggataaatagtagaaaaaagtgaaacagaatgaaggcaggtgttttttattctaatgatggaataatacagagatactggacgatctctagcagttaattattgtgacccatataaaattatacaggtcacagtataattctctattaccgtttttacaccagtaagtcttagataaactaagcatgcttatgaattatgtatacagttagaatgcattatttttacagaggaacaattgcttgtatgtactaacactgttctcttggcttgcctcaagttctactcattattttatataaaatactattaggctgggcacggtggctcacgcctgtaatcccagcactttgggaggtggaggctggcggattacttgaggccaggagttcgaggccag

SEQ ID NO: 107429 - DNA, 456 bp, Homo sapiens
  misc_feature (1)...(456): n = a,t,c or g
ccgcgcccccnnnnttagagatcgatgtccatgcggaggaactcccgatgtgctcaaatactgcgtgtgtgtgtatgtgtgtatctttaagaaaacgtgtgccaaaattccatgaggagacaattgcgcaggggaaaaagtcaagaatgtgaaattccctgaattatattttttctgttggatttgaaactccagggggcaatgactatctatgtatctatctatctatctatctatctatctatctatctatctatctatctatatacacacacgctatggaatactcttcagctgtagaaaagaatgaaatcatgtctttgcacaatcatggatggacctggaggtaattatctaagtgaaacaagtcgaacacagatagacaaatatcacctgttcttacttataagtggaagctaaataatgtatacatgtagatgtagaatgtggaatgat

SEQ ID NO: 107430 - DNA, 671 bp, Homo sapiens
ggagagcggacggaaggaaacaaaaagggtaacttgaccaacatccaacacctagatcaccccttctgtgtcattctctgaggaaaacaagttcttctcaaggaggaaagtctgaacttgtcaaacagtcccttaagaagccgaagttaccagaaggtcgttttgatgcaccagaggattcccatttagagaaagaaccactggaaaaatttccagatgatgttaatccagtgaccaaagaaaaaggtggacccaggggcccagaacctacccgatatggagattgggaacgaaaaggacgctgtattgatttttaagtcgcatattctttaacttcaatattgttttctgaatatgtacatctgaattaacttatttctgattattttctttctttatatcctttatgtcgtgtagtttgtataatgtgtttaaatatatatatatatgatggctttggaagaaaatatgctgctggtctcgaactcctgacctcagttgatccaacctgcctcagcctcccaaagtgctgggattgcaggtgtgagccaccacgcccagcctagaaatgattcttagagctgtaggcctttacttcatcatttttcagtttaaattaatcagttgcttataaaatgcatacataaataaaataatttttaaaaaaaaaa

SEQ ID NO: 107431 - DNA, 5399 bp, Homo sapiens
ttttttttttttaacttaaaaagcagctagtttttatttcctaggttcgttccaccagtcataaaccagatgaaatctatggcatgattgaaagactatctcctggcactcgcaagattgagttatttggacgaccacacaatgtgcaacccaactggtaaggtgaccagagaacaggctagtcctcaaggggctattatttagggattagggacagaacttagtagagcttcacattgttttacactagtccataaatgagcttcacaggattcataagccacttaagcttgtatttaaactgttttatgagattctacaaatattcattagaaactcaacaggttctaggacccaaaagcactgctccctagggtttctactctcttcacaacccaaggatcttcctcagccattctgtgatgtattgaatctgccccctggtggttacgaagttatctatttaatctgtcaataattacatctttcaccccttaacagagcttaaaacacatgctgctagcattttgcttatccaaagaatactccctggtagcaactctgtgaagcaggcctggctaagcattagttactaaccctcagataatacagatccagtctattttaacaccagaatctatgccaattctgaactagtaattctaccatatactattctaatgttaagctctttttaagaaattggcatatttgatatgatgataggcagtccttcatttggttatgcattttttaacaatattaacccctctaatcccaggatttctggtttgcccctcccttttaacactgtttccaggatcaccccttggaaacccaactggatgggatcccaccctactaagaccccagaatgtggttgcacggttccaagcaaaggtacccagatggtatcatctctaaacctaagaatttatagaagcacttccttacagagctaagaatccatagccatggctctgtaagctaaacctgaagagtgatatttgtacaatagctttcttctttatttaaataaacatttgtattgtagttgggattctgaagtccattctggctctgctacttaacagtgtataatcttgtgcaactcatctctcagtattatatgtgaaatgggagtattacctcattgggttgctgtgaaggttcaaactaaatgagtgcatgggaaacattaaaatgatcattataggctaggcacaagtggctcacacctgtaactccgagcactttgggaagccgatggtaggagggtaactgtagcccaggagttcaagactagactgggcaacatagtgagaccccatctctactgctaccctccaaaaccattaaaaaaacaggaatgcaggctgggtgcggtggctcatgcctgtaatcccaacactttgggaggtcaaggcgggcggatcatgaggtcaggagttcgagaccagcctggccaacatggtgaaaccctgtctctactaaaaataccacaaattagctgggcgtagtggcgggcgcctgtaatcctagctactcgggaggctgatgcaggagaatcgcttgaacccgggaagcagaggtttcagtgagctgaggtcgcaccactgcactccagcctgggtgacagagcgagactctgtctcaaaaaaaaaaaacaaaaaacacagaaaacaggaatgcataggataaaactatgtacgtagctggttgaggaggaggttctctaggacagcattcctgtctacaaacagtaaaaatttgagttttatttaaagttatcaccacttggactatcatgctgtaaacttctgcttattctgttacaaccaggtggcttctctagtctgtttttctttagattatgtctaagaaataatgatagacctatggtcttttaaagatagttcatcaaacacaagtgaatacaactttagactttggtggaacctcttactaatgatgtagagttccgcctcttagattcatgaactgtgataactcagataaggatggtaactgcagaaataatatatataaagagaaatcactcctgggtgatgtcattttccatgtagcccagtatgcccatgttgaaaagttttgttttcaaagcagtgtactgatgtgataatggggaataacatttttttatgagggaaccctttaaaatggatgcacacagtggcattttctcctaggctcaaagctgagtacactcccgtaattttaataatattttaggcaagtcctatgacaattataccaacaagtttcttcaaccccaccaccaccccaccatctctatgctttgcttgcccagactcccttcaccctttcctctgctattaccgcttatggttgaaagtaaaaagcatctccagattacagcaaattcagtggccctgctccatagcctggcctctgctgaaggaagaaaaggggtgaaacatgaacagccatcatgggttgtgatgaggcactaccagaagcccagcttgtgtttcaaaaacaggctcttggacactttcccagcagataactcttcactggcttggagaacaggaaggactatttcacaaacaccactgtgtttgaatttctagaggctacccaggccaagaatacatccctgcagtgcttcaccacacactcattgctgcagtattcattgtcccagtccttactcacaatgggagggttctcacaaccagacctcacacatcgaggctggggtgagagtgccacaggagacccactcaccaattcaacatccatctgagaaggagactcaacctcaggaactacatctgtgatcatctcacagatagtctcaggagaaggtgcctccactgtatgggcctcagggctgttgttcataggccgctcaggactactttccacagttggtgggactaaggtagtctgcattttcaaagtgggtagaggcacactcttgatctgcagaggaggaggctgttgctgtaaattgattcgaactttctgaggtggaggctgttgcatggcctggagtggaggaggctgctgcagaatggtaacttgctgctgagtcgggggctgtggcatctgttgtaatggagggggctgtagtcggggtggaggcagttgcatagaagcagcagcagcagcagctgctgctgcctgcaacactgaccgagtgacaatctgggcttgttgactgggctggatagtagctgtactggtttggcctagttggagcccccgggaggtcaccactgtggctgggataacagtaaccatccctccttgagacatagtaatagaagagggcaacatttgtttggtaataatcaacttggtgatattgggctgacccccagctccagaagatgcctggtttgccacataggatgaaagggtggagttaacaacaatggatggggacagggcagggggctctattgaagctggtgctggagatgctgggtcaacagtagccataggaggtggagaaggagtttgtgatggtggtgctggatccaattccactgtttccacagtggcctgacactcctggttgtctttgtaagcagccagtgccttcagatactctttcttggcagcctcagttttcctcttatatatctgtttttgctcctctccaagactatcccacatggaggccacaatttttgaaacctcaccaaaagtggcattaggattctgtcccttgatggcagcctgtgtatcacgaaagaataaagcatatgctgaaactggtttctgaggttcattaggatctttcttttttctcttctttggggccttctgctttttccctgcttccaccacgactgtcttctggctgggaagttgcctccggaaatcctcaacaccatcctcgtgaagtgaactagtaggtgaaggggtggttgaaagacgatcttcaggtgactgggcaggtggcaggatggtgccaccccctaggctcaaacccagctgggaactcagttctgactgatcaatggtggtcaactggctatgccccatcaagccagatgtcatgtctgtcattggtacatcaattgtaacaggtgggttggcactatactgagttcctatagagtggtccaagtccatggtcaagcccccactcaggagccccccgccctgctccatcaagccatgggtcatgcccacaggcatgtccaatgtctggaccccatactgggctgaaaaactgccatcctgtgaagaggaagggtctgccaggtcatcaaagtggccaaccacatctgagacagccaatgagggatcagaatccaaggagataggtgggatttcaaattcctcatcacccaagcttggtgtatggaatgtctcggcccctgacaggaaggggtgcgaaggccctgtgatcgtcaggtaattgtcatttcctccgggaaactccatcttcacacaaccgctcccaccgtctcagaccctcatcgctcccaccgcccccactggactcggaactgtgagaccacttcttgtatcatgtgtatcctatttaactttccttaaacaagcctgtgttccttgcatctaaaaaccttaaaatgtgtgtgaaacccagcatctcagaaccaggagcgcaccaaactcacattatgtggtaggcaacactctaaagatgccctcccccaagattcttatctgttggttgttcaaacagtaatacaggcactgctgtaaagtcccaagtcagttaacttaattaattaataaattaataagtattaattaattaattaagacagagtctctgttgcccaggctggagtgcagtagtgcgatctcagctcactgcaacctcagcctcctgggttcaagtgattctcctgcctcctgccttagcctcctgagtagctgggactacaggcacccgccaccacacccggctaatttttgtattcttagtagagacagggtttcgccatgttggccaggctggtctcgaactcctgacctcaggtgatccgcccccccttggcctcccaaagtgctgggattacaggcatgagccaccgcacctggccaaatctcagctctatttgttagccttatgtcctgtgtatttcgtttcctcatctgaaaatgaagaaaatagacatactcatctctgactgttattctaaggattaagtgctatataaagcacagcaaataattttgccagatgcaatagaaattagtttcttgaggaatgtgtcaatatctagcaattttacataggcatttaccctttgaaccagaaacttcacttatagaaatctatcctaaagacacacagtcaaaaattcaagacgggcatggtggctcatggctgcaatcccagcactttaggagacagaggaggaggt

SEQ ID NO: 107432 - DNA, 489 bp, Homo sapiens
  misc_feature (1)...(489): n = a,t,c or g
tgagtcccaggggnccnaaatgagacccatcgagnacactagaccangnggnggaattctatagaatgaacagtccctccccactctggctctgtgtgtgtgtgtgtgtgtgtgcgtgtctgtttatgtgcttgtgcgcactcacgtgcatgtgtgtatggtataaaagcctgttacattcaaacctcacccaagtcctgagcagtaaattctatgattccatttctccagcagagaaccctggaaagtaaacaatcttgctttctgtcacagcggaacccactggaagcaacagcctgacgctctcttttagatgccgncaaccttaaatgatgaaattcagaaaatatgatgaagtatattagatatatgattaagagtttattagatcccaaagctgggaataaccggatacccagggaacacagactacagaaaaatggggtcaatgctcccaagttagaagttaaggtcttgcttacataggtn

SEQ ID NO: 107433 - DNA, 450 bp, Homo sapiens
  misc_feature (1)...(450): n = a,t,c or g
attgactcgcagtccctaggccangnggtggaattcgaactcttgacctcaggtgatccacacgcctcggcctcccaaagtgttgggatgacaggcgggagccaccgcgcctggctgccttcggacctctcggtgggaggaacgtgtgggtcctatccaagcatcagctctgtctcctacctgctctcacctccgtgggcacgcctggttctcggcacccgtggcagccgggctgttgagcctcggctggggtttgcagaggttttctgggaagagctactccaattcaggcggactggcagatctggagaattccatgaccccggggacccagggcagctgtcgtgactgtggggtgcaaggacctggtggccaggtggatcccaggcattgcgatgggctccacggtgagctgtggaaaagagcctgggtcctggattttatgtctgg

SEQ ID NO: 107434 - DNA, 473 bp, Homo sapiens
ggcacgttttgatagcctctttgtagcctacccggcggggaatcggggttggaggctgtggtgagctatgatggcgccctgcactctttcctgaacaagtttgagaccctgtctacaaaagaagaaaggctgtgcctgcgtctagcccctgcctctcttcggtccatttttctccctttgtcttaggagtctgaggctctggcccacccctccccaccttcagtgtgtttccttccacggggtgaggtacaaagagggagggctggggtcagggctgggcacagggcgggatgaggtgggtgagggtacccgtgagcttctcgccaggtctcctgccccacccacaactcccccagccgctgaggagcccccgtcagagctggggttgaagaggcagcttgtccccccaccttcaggaatggcagcctgcagcaactggaacaaggccccaccgtaaagctctgtgtgtcccg

SEQ ID NO: 107435 - DNA, 479 bp, Homo sapiens
  misc_feature (1)...(479): n = a,t,c or g
cgccgtttccgaagggggggggggatcgaggncctcttgagatcctaggacgngcggnggaattcgcagagacactcctcagttctcagacggggtcgcggctggacagaggcgctcttcacatctcaaacggggcggcggggcagaggcgctccccacatcccagacgatgggctgccgggcagagacgctcctcacttcctagacgggatgacggccaggaagaggcgctcctcacttcccagactgggcggccgggcagaggggctcctcacatcccagacaatgggcagccaggcagagacgctcctcacttcctagatggggtggtggccgggcagaggctgccatctcggcgctttgggaggccaaggcaggcggctgggaggtggaggttgtagcgagccgagatcacgccactgcactccagcctgggcaccactgagcactgagtgagtgagactccgtctgcaatcccg

SEQ ID NO: 107436 - DNA, 499 bp, Homo sapiens
  misc_feature (1)...(499): n = a,t,c or g
agcggtggaattgatccctnnnnnnnnntatcgatttctcttgtgcagtgtcgtggaattcctttgattctctgctttcaaaacttgtgagtaagattcagagatagtgtcttgcaatgtcgcccaggctggagtgcagtggtgcccctcctgttgtgaatgtatctcctgatctgtttaactcctgtgtgtgaaactttgtgattcatgcaatgagaacaaggctttacgtgaacagaccagagcccaggtgcagggcggtcattccagagcccaggtgcagcaggtgcagggcggtcattctgcccacacagtggttcagatccgttcagcagccagccgccggaaggccttctccacctgttcttcccacctgggcatggtgctcctgttctatggcaccggcagctccacctacatgcgacccaccacccgctactccccgctggaagggcgcttggctgctgtcttctactccatcctcatacccaccctgaat

SEQ ID NO: 107437 - DNA, 500 bp, Homo sapiens
  misc_feature (1)...(500): n = a,t,c or g
ggggcgggnnnnnnnaatcgagatcctttggacagccccgtggaattcgctatttcctcagatgcaaacattttccttgaccatagccaattaacctctcaacatctaatccacctccctttggaactggctgataccttgagaaacctttcttctccacagagggtctgccagttcagatgctgaaaagtttttctatctggagaaacccataagccatactattagacctatgccccaaagagctaagctaagttaaacacacagtgtttacaaatgagcagctgaaaaggcacacaagcttaagttgcagaagacacacacttgattttccttgctatggagggccctttagaacattccctacaaagttattttagaatgtgaagagacagctgggagcggtggcttgagcctctaatcccagtactttgggaggcccaggcgggcagattgcttgagcccaggagtttgagactagcctgggcaacatagtgaag

SEQ ID NO: 107438 - DNA, 484 bp, Homo sapiens
  misc_feature (1)...(484): n = a,t,c or g
cgtggcacggggnnnnnnnaaattgaganccatcgatgaccttgcgaagngtcgnggaantctttctgttccctatgagataaaactttttttgtcttccatatgagtgggatcatgtagtatttgtttttctgtgtctggcttactttcctaaacataatgtcctccaggttcatccatgttgttgcatggtgttaatcttagcatgacagtatagccattatagggctcatacttaaatgccaaatcttgttatatatggaacccagctatttcaaggatcaatgttctcttataaagtcacattagcatttacacccagattttgctgactcagaattccatcacatgtgagatctcggtcgcctgaaaagtcctctccccaagtatttttggaagtctcaggggtttcctcactgattcacaaacaagttcacactcttgggtgcagcctactcgtgccaggcttctgttgggcctccan

SEQ ID NO: 107439 - DNA, 698 bp, Homo sapiens
accagggtgggcaggacccggtgctcacagggacacacatggatggtccattcgctttattgggtgcgtgtagtgttgtcatgacatctcctaaggaactggggggcacgtttgacactcatgaggtcagaacaggtctggtgggcggggggggggggggggccccagggtggtgaatacccacagcacacccccccaccaaaagagaaaacggggagaggagcctggcaggccagactttgatccccatggtccacacagggaaacccccaacagcggcctcggccccccccggcaaaaccgaggggctggcaggcctggccccctcccattgcccgatcagcctgctttagggtgtcatttggccccttttcccaactgacaactgtggatgggggtgaattttaaaaaaaggcgggggggggggttcaggagggtgagcggtgagttcacggggccacgagacaccacagctgagtggggaaagggctatatgtacaggaggggcagggcttggggcgggcaggggagcctgggcccctgggggacatcttcaataaataaataaatagctacaataataaataagggtgacgggctaagtcaggagcaggggtcttgtgcccgtggctggtaggggccgggtcaggcccgggtagttgggggaaggtggggcagacagggaagaggggaaaggg

SEQ ID NO: 107440 - DNA, 488 bp, Homo sapiens
  misc_feature (1)...(488): n = a,t,c or g
agggnagtnnccnagggggnnccaactgagaccntnactgagaccatcgnaagngcgnggaantctagaactcctgatctcaagtgaccctcccacctcagccttccaaagttctgggattacaggcgtgagccaccgcgcctggcctgtgctcccagctaaaagctagaaaaagggcagataatagtgctggagtttaacagtctcctggccaggggtactggctatattctttgtgttaggatagatcctctagggtcagtgtctagtgacaatggctccgatctccctaggcctgattttcacggcccctttgtggccctgaagcagatggtgtcattctcgtgcatcagacacaaatgctaggtgtgggggaggctgagtctgagaggagaaccaagaagggggaaataagcacaaactcatttcatgctgattcaggctttcttccaccccttactcctaaggagtgcctgggaagtgtggat

SEQ ID NO: 107441 - DNA, 1429 bp, Homo sapiens
  misc_feature (1)...(1429): n = a,t,c or g
aagaggcgtggcggcgctgtgcgcgtgcacaaaagagagctgaggggcgggggcgctgcggcacagctggtttgagcaactgaactggaaacaagatgcaggaccccaacgcagacactgaatggaatgacatcttacgcaaaaagggtatcttaccccccaaggaaagtctgaaagaattggaagaggaggcagaagaggagcagcgcatcctccagcagtcagtggtgaaaacatatgaagatatgactttggaagagctggaggatcatgaagacgagtttaatgaggaggatgaacgtgctattgaaatgtacagacggcggagactggctgagtggaaagcaactaaactgaagaataaatttggagaagttttggagatctcagggaaggattatgttcaagaagttaccaaagctggcgagggcttgtgggtcatcttgcacctttacaaacaaggaattcccctctgtgccctgataaatcagcacctcagtggacttgccaggaagtttcctgatgtcaaatttatcaaagccatttcaacaacctgcatacccaattatcctgataggaatctgcccacgatatttgtttacctggaaggagatatcaaggctcagtttattggtcctctggtgtttggcggcatgaacctgacaagagatgagttggaatggaaactgtctgaatctggagcaattatgacagacctggaggaaaaccctaagaagccgattgaagacgtgttgctgtcctcagtgcggcgctctgtcctcatgaagagggacagcgattccgagggtgactgaggctacagcttctatcacatgccgaactttcttgtgacaaattgtctggattttttaaaaaaggaaaaagcaagaatgaatccttgtggtttttagttttgtataaattatgtttcaaatctttacattttggaaataatcattgctggagattctgttaaatattttggaactcttttttaaattatagtatttcctctaaaaaaaattaaaaccagctattggtatggcacatgggtattttcctcatttatattttaagtaagccataaaacctagtcactattttttgacatataactataaaaagaaatacagttttaaatgtgaataaattatacagtggaaaattgcagactaagccttatagatacattgtttatttttattttataaagagagcagtgagattattaaactacaggaatggtctctaggacaaaagaatgttagtattgaagaaacagacaatttttgtgaaacattcccttattgaagcaataactgaaagtttccagtttactgccatatttggttaaatgtgttttcttgttaaaatagtttatctcagactgttaactaannnnnnnnnnnnnngagagggagcttttttg

SEQ ID NO: 107442 - DNA, 403 bp, Homo sapiens
  misc_feature (1)...(403): n = a,t,c or g
actagttctagatcgcgagcggcctccatgactttttcaaaaaaaaaaaaataaaaaaaaaaaaaaaaaaaaaaaaaaaaaaaaaaaaagggggggccctttaaaaaaaaccttcgggggcccaaaatttcccggggaaccaaaaattttattttttttttataaggagcggtctaaaaaaccttttcggggattttttaaaaaaacccttttttttgggggggaaaaaaaaggcaccccccccccccaaaaaaaaaaccccttggggaaaaaaaaaaatttttgagggggaaggggggaaaaacccccctaatttcttttttaaaaaaaattgngnnnnnnggggaagacccccccttttgggggggccttttttcccccccccccccacaaaaaaaaccca

SEQ ID NO: 107443 - DNA, 414 bp, Homo sapiens
  misc_feature (1)...(414): n = a,t,c or g
nattgaccctccgtgagcaattcggcacgagtgtcaatgagccttggaaaaatgcctgtcttaaattgagggcacaacaacccagggggtctgaagtgcaggaatgtcatgtcctactggctcctagaatggaacttgagtcattttgatttgggtttggttaacatcaggaagtgatcacatccttttgtaccggcattgctgagagctgctggtgtaagatgtatactttggtccttctagtctgtttgttaaatctgcctcttcattaaagatagtgaccggggccagacacagtggctcacacctgtaatcttaacactttggaaggctgaggcaggcggatcacttgagcccaaaagttagagaccaaaacccagtctctacccaaaaaaaaaaaaaaaaaaaactcag

SEQ ID NO: 107444 - DNA, 414 bp, Homo sapiens
  misc_feature (1)...(414): n = a,t,c or g
gtgcagcaaccaacaagaaaacactggcagattacgcccgtgccttatccggagaggatgaatgacgcgacaggaagaacttgccgctgcccgtgcggcactgcatgacctgatgacaggtaaacgggtggcaacagtacagaaagacggacgaagggtggagtttacggccacttccgtgtctgacctgaaaaaatatattgcagagctggaagtgcagaccggcatgacacagcgacgcangggacctgcaggattttatgtatgaaaacgcccaccattcccacccttctggggccggacggcatgacatcgctgcgcgaatatgccggttatcacggcggtggcagcggatttggagggcagttgcggtcgtggaacccaccgagtgaaagtgtggatgcagccctgttg

SEQ ID NO: 107445 - DNA, 505 bp, Homo sapiens
  misc_feature (1)...(505): n = a,t,c or g
ngaagctcgatggccgtggaanatcgaccgcctgtcggattcgcacgaggagagagagagagagagagagagagagagagagagagagagagagagagagagagagagagagagagagagagagagagagagagagagagagagagagagagctctcttttgtgtgtgcgccacacgtgtttcgcgccccccacatacatatttttgtgggagacactgcgtgtgtgccccacaccctgtgtgtggggcgctctctctgtgttctcacacacagagagagcgcgtatctttttttatacgtgtggggggtctgtggcccgcgcgcccgtgtgtgcacacacgcgtatattttcttcccgcgcacgtgcgcgcgcgctctgtgcgcgcccccctctctctcgcgagagacgcgcgcacacacgtgttttttttatataaagaacacttttttttctgtgtagcgcaaaaaaaaaaaaaaatctggggggggggggccccccccctt

SEQ ID NO: 107446 - DNA, 494 bp, Homo sapiens
  misc_feature (1)...(494): n = a,t,c or g
cgcgcccgcccccaacaacggctgattagaacgcctgaggagaacggcacgagaagacctctacaactcttggctggaccctgtgtttgaccagacccggacacgtctccactgacgacggacagaggagagacaccactgggagccaccctgccctcctgctattgtggaggccaacaaagttttgaaccgaaaaccaaaaaaacaaccaaccaaaaaaaaaaaaaaaaagggaagaaatttaccccccaaaagaaaaacccaaaaatattcccaccaaaacccttttgcccaaagggacccaggggggaaaaccaaccaaaaaaaacccaaaaccaacccaaaaaaaaaaaaaaaatcctaggggggggcccggcccccaattcccctttagggggggggaaaaaaaattcctgggccgggttttaaaaacgggggaaaaggaaaaaaanannnnnntnnnntanatctccaccttatttatttttcttaaa

SEQ ID NO: 107447 - DNA, 1209 bp, Homo sapiens
ctttattgaatattgacacggaagaggctccacacacaaaaactctttataagttctcatatattttgatgatcatgttcgtggtagatatgaatattgtgttaaatgtaagaaaagtggcttttgttctggaatattactttggtcagttaggaatcagatctgccacacataaagggcaggttcataaaggctgtacaattccactgtcctacatcaggcaaggagggtaaaataactcttcaggcctttattcacccaaattgaatgtgtttcataagaaattctactcagagagaaagtctgcatactgagaaaattatatagcaatcatgttttcctaacccaaaaataaaacaacaagatggaaaagttcacagcactttatgccccacacgctcccctacgaccatctggagacaagactgaactgggaggagggactgtggactctctgagggctcaatatcaagagtctgtgcaataacttcgagatccttctttgattagctgtgttttctcatttgcatttgtaggctggagaaaaactggaaagtccacatctttttccatgtcagacttgatctgctcctccagatcctctggggacacatagaagtcctcttctggcactgatgactcgggccggcagtgtccacagcagcagttgcagcagcagcacaggcagcagcaaaagtagcagcccgtcaagaggccaacgatgacaaacagggcctttgcacaccagctcgacagcatgaagtaggtgttaacgttttcgtctccaaactgctcggccacgtagagtcccagcgatccgtacttgtcgtatatgcttctctttgaaatgtcggtaagtattgcgtgggcgtctgtgatttctttaaacttctcagtagcagctggatcatctggattcttgtctggatggtgtttcagggccaattttctgtaggttttcttaatttcttcatttgatgctcccttatgcagaccaagaatttcgtatagagcttctcctgttgttgacagagtccgctgtctttggttaggtatgttacatgccattttctaaggctgcaaaactgttccaccgtttcaaagcaaacagctgctcctttccatccttcccccccatgcagggttaagcaggtcaatagagtcaggttacttttcatttgttactttgccagccaattggttatccct

SEQ ID NO: 107448 - DNA, 483 bp, Homo sapiens
  misc_feature (1)...(483): n = a,t,c or g
ccggtcccccaggtgacaacaataggcgnngcgnggaattcaccagtaatcccagctacttgggagactgagacatgagaatcgcttgagccttttatttggaggttgcaatgagccaagatcgcaccactgcactccagcctgggcgacagagcaagacactgtctctctctctctctccatatatatgtgcgtgtgcgtgtgtatatatatatatatgtgagtgtgtgtgtgtatacatatatgcacatatatacacacacacatacatatacgtgtgtatatatataccatcccatatatgtgtgggatatatatatatatatatatggatgtggttatatatatgggatggttaggatggccccaccaaagtatatgaaaattacagttctgcgacagtgaccaaggaattgctgtttctgcactgcaaatatgctgtgggttctcggtggtcactctcttctaaggaaagacacacag

SEQ ID NO: 107449 - DNA, 473 bp, Homo sapiens
  misc_feature (1)...(473): n = a,t,c or g
tggtgaccaggcggccnnnaattgaaacccctgagatcttcgnacagngcggnggaattcgacaagtgcatgagcccaggagttctaggctgcagtgagctatgattgcacctttttactccaggctgggcaatagaacgagatgatagatagatagatagatagatagatagatagatagatagatagataaaagaaaaatagccaactaaaagttctattcttcctatgcattttagataatttagccaaataaggaagccccttgtcccaggtaaatacttataccatcactatcatgatttttattcttcctatcaatagccaattagtaactcctcctatttatagctactttattgaggaattagtaaatgccagcactgatcttcgtgctttccatgcagcatctcatccatttgtcactgtaatactatgaggtatatactattattagttccaactttaacaaa

SEQ ID NO: 107450 - DNA, 681 bp, Homo sapiens
gcggcggaattatttatatcatatacttacatgattcatcctataaggaaattcctttggaaaggcatatgaaaatctagtttttactgcagaaaataaaaaaaaaatttaaactgagaaaatgggaaataaattaactcaaaattcctttaacagagcagaatattagagggtagagcaaaattattttcagtaggaattcttggcaacacttacggacgcagatttttatttactttcagggaaggggaaagactggggggcaggacactctacacagcttcaattttatatttactaccttaagaaaggattctgatgtttaaaaaagaaaaagatcaggaaaaaaaaatcactggcttttatcatttctaaaatcttttcagctacagaatggtattcttctgttttccagtgactgagcttagaaggaacacaggggttacatatgtgtttacaatatatacaattggtaaaaaatatacatataaaatattgggaggatagtacaccaaaaaaatgttaacagtggttatttgtgagatttaagaactttttactaatctgcactttctaaactttttacaatgaccaggtatttatcaaaatatatattttaataaaagcattagtatatatgcaaaggtctcgagttactcataaagtagtagtagtaacacc

SEQ ID NO: 107451 - DNA, 447 bp, Homo sapiens
  misc_feature (1)...(447): n = a,t,c or g
gggcggnnnnnnnnntatgtagtccttagcncgtgcggaggaattcctcaagcgatcctcctgcttcagcctcccaaagtgctgggattacaggtgtgagccaccatgcctggcctagatcacgcacactaacacacatgtaagtgcctggcacagtaaaaactcatcagtgatagctgccgtcaccatcaccgccattattcatcattgattcatgcttaggctcacgggtccttagctacaaagcttttggtatgtgagtactgcacatgtgtaatccacgctgttagaacaaggctcctttttgttacaggaatgggggtaccactgctaagatagtgtgactagaagttagctcattctaagactttttttggttattgagagaaaaatcatagaaagttggtaccatcagggaccacagggtgctgtttccacctgtatccc

SEQ ID NO: 107452 - DNA, 478 bp, Homo sapiens
  misc_feature (1)...(478): n = a,t,c or g
cgagcccnnnnnnnnnnnnngggttactgtagaccactagtccagttactgtaggatcactagtcagtgtggtggaattcgttttatgctaaatttcatgtggggatagttattttcttaatgtggtcttgtattttatttgctaatagctaacagcatatttgaatccatattcataattgatatggttctgcaatttttcattttttgtactctaccactttttttttttttttgaaacggagtcttgctctgtccccactggagggcaacggtatgatcccagctaatttttaacctaacccccctcctcctctttggctttaataatgctaaggtgggaggaaaatgattaattaaggggattctttgcaaaaaaaaaaaagaaaaaaaaataaaaaaaaaaaaaaaaaataaaaaaaaaaaaaaaaaaaaaaaaaaaaaaaaannggaannngggggggggggccgcttaggg

SEQ ID NO: 107453 - DNA, 445 bp, Homo sapiens
  misc_feature (1)...(445): n = a,t,c or g
gattgtagacactagtcagngcggatagacgacccttacaacgaccangaaatgggaagcctacaaagacagaaaaacttttaggcagtaatggctctacttcagccaaacaccacaggaaaaaccctggccccactcactcctacatgaacagaggctgagtagaaatcctagactcccgccttttccaggctgtaacaaggtgaagatgcagaaatctttaacaacgtattaccaaacagaattcagcaatatataaaaataattatacaccacaacatagtggagtttttttcagggatgcaaaatcaaaattctaaagtcaatcaacccaggcgtggtgcctcatgcctgtaatcccagcactttgggagaccaagtccagcgaatcctttgagcccagaagtttgagaccagcctgggcaacaggacacaaccccatctn

SEQ ID NO: 107454 - DNA, 439 bp, Homo sapiens
  misc_feature (1)...(439): n = a,t,c or g
nttgagaccctatcctttgagggcaattcctctacaaaaaataaaaataattagccaggcatatagtctcagttactagggggactgaggtgggaggaaccacttgagcccgagaggatcacaccactgcactccagcctgggcaacagaaggaaaccctgtctcaaaacaaacaaacaaacaaacaaaaaaacaaaaaaacaaataaatcctgctaaggtcagagggagttgatgtaggactcagccctacagggtcattttgcattcccttaccaacatttgataagaatggcaattcaaggcaatgccataggagtaaagcggagaagagagaaaacaagaaggaggggaacttgggagaaggagacaagatcatctaggataactcaagcaacttctgcgtcatgcctggaagaatatttctcctagcaggttta

SEQ ID NO: 107455 - DNA, 370 bp, Homo sapiens
tgtccgtttcgacccaagcaccatgctttacacaacatatgctttttctttttcttctttgcttgctttcttcctccttaccctaccccccactcacacacacacacacacacacacacacacacacacactttttataaaacttgaaaatagcaaaaaccctcaactgttgtaaatcatgcaattaaagttgattacttataaatatgaactttggatcactgtatagactgttaaatttgatttcttattacctattgttaaaaaaactgtgtgagacagaacaaaaaaaaaaaaaaaaataataaaaaaactataaaaaacataaaaaaaatgaaaaaatttttatcttcgggattttccattttcc

SEQ ID NO: 107456 - DNA, 675 bp, Homo sapiens
aacacgcgtccggtgaggcagaagcaacacaaaagatcttgatatgaagcaattatttttggtcttaaactgctgggactccagatgacccagaccacggtcagcaggcagaagccagatgctattgtcaacagaattgccttcaagattccttttctgattgttcattgctgagatgacatctcactatattgcccaggctggtcttgaacttctagcctcaagcaatcctcccacctcagcctctgaacgtactggaattacagatggagcaactgagattcttccccaactacgactataagttctctgagggataacggaacatgtctggtttcctcatctctctgtcacagcaccctgtgaatgcctaagaagacagtaagaatcaacttgaatggttttgtaagaaaagaataacgatacttacctatagtctaaaggtttagtgatgaaatgaagtccactaacttctctctgcttacttccaccctcaataacatatttcctcaaaccccacagaggaaagacaattcattttttactattgtttaatagagccatgtttgtatgtagcttcctgttccgcttagcccaagacattaagtgggtcaggagtaaactctgccctctgtttttttccattcctttgtcacctgctcaagtggcagccca

SEQ ID NO: 107457 - DNA, 458 bp, Homo sapiens
  misc_feature (1)...(458): n = a,t,c or g
nattgtagattagtagtccagtgcggggaactcgaaaggacccctaatttttgtattttttagtaaagatgagtttctgcatgttggtcatgctggtctcaaactcccaacctcatgtaatccctcccctcagcctcccaaattgctgggattacaggcatgagccaccacactcggcctatgtcctgttattgagtatgtccttatgtttcatttctttttcttttaggtctcttttattcaaaaccttgtattttgtgtggaaagagtttaccgtgtgcctgactttggtgtctgggaaagaggaagcaaatataataatggcagcacagagctacattcgaagtaatttgctgatttctgaggttttttttttaaattaaatgtatggaatttgaatatgaagaaatactgaagcattagattggaactgtgattcatatgttaatttggagcan

SEQ ID NO: 107458 - DNA, 468 bp, Homo sapiens
  misc_feature (1)...(468): n = a,t,c or g
nttcgaagaacactattcgcagtgtcgtggaattctgcaagtcctcactccctttctcccatgatgacacatttctcctccgtggctgccttttagcttttgttgtttcaaagctggcttctgtctgagctctgattgttgtagagaaagatgctgtcattcattaggaagtgatagctgaatgctacaatggatgcttccagactttatctctctgtgtgtgtgtgtgtgtgtgtgtgtgtgtgtgtgtgtgttattagttgatggacctgcaacagctaggctttgtcatttccaaaattcaaatatataaaatatatataactttatcaaatattggccattgaatcatgccattgttaatacagagaacaccacactggatacagagaaggttcacgcccccaaagaaagagcccgctagtaaccaaactgtgaagcccctcactgcactgagaaacatagatc

SEQ ID NO: 107459 - DNA, 494 bp, Homo sapiens
  misc_feature (1)...(494): n = a,t,c or g
gccggggannnnnnnnnttcgtggtccctagtcattgtggtgcaattccggctactcaggaggctgaggcaggagaattgcttgaacctgggaggcggaggttgcagtgaaccaagatcgcgccattgcccatattttagtcaattagttttcctttttggtacaataatttttctagttaattacaataagaaaaaccttaaaaattttactagctcaagcattttaagtgtaccattgagttagtttgacaattttatataacttctctaagatgagtcatactgcatttttctttttctgactggtcttttgcagttagcttagtatcatgaagtttcatgcctgttgtagtatgggacaggatgtcattttataagaataaataatatcctgttggtatatatatacattttcattatccattcatccattgattggcatttaggttgatctacctcgtggggttgtgaacaatggatttcaattcattt

SEQ ID NO: 107460 - DNA, 438 bp, Homo sapiens
ggagacagaggtctcagtatgttgcctaggctagtcttgaaattctcggctcaagtgatcctcccacctcagcctcccaaagtgctgggattacaggtatgagccaccacgcctggctgactacaacttttaatattttttaatttttgcaactttttttttttttttaaaaaaaagtttattttttcccccaaggttgaagggaagggggccaatttggttttgttgaaacccccccttccgggtttaagccatttttctggcctaaccctctgggggggtgggggttgaagcccccccccccccccccagttatttttggatttttaagggaaaaggggttttacccgggtggcccggaagggtctcaattgaccctgggaaccacccccctttgccctctaaaggggggggaatacagggggggaccccccgccg

SEQ ID NO: 107461 - DNA, 403 bp, Homo sapiens
ggatttttttgaagagaaaaaaattttgctcaggctgttctctaacttttggccttaagcaatcctcccaccttggcctcccaaagtactggaattacaggcatgggacactgcatccagcctgagttttaacaaatgtatgcacccatgtagatgctaccacagtcaagatatatttcagtcacccccccaaaggtttccttgtgcccctttgcaggaacctgggactgactgcactgggtggttctgcctcagtgtctctcatgaggttgcagtcaagcttttgcctgggactgtgcagtctctgaagacttgactagaactgaaggatctgcctgttggtaggtggcttcacttcctagtcatgcttctccatagagagaaaaagagtgaagccaccatg

SEQ ID NO: 107462 - DNA, 478 bp, Homo sapiens
  misc_feature (1)...(478): n = a,t,c or g
cattgacantcgatcagcattaggccagngcggtggaattctgtggtgggtgagtgagccccattaacaacataaaaccctcatgcacatgatggtattccccattctcctcctatccctcaaccccgacatcattaccgggttttcctcttatcaaaaaaaaaaaaataaaaaaaaaaaaaaaaaaaaaaaaaaaaaaaaaaatgggggcgcccttaaaaaaaaaaggggcctaaaaaacccggaaaaaaacccgggggggtcctttaaagacccaacacagggggggtgcccccccccccggcttttttttgacggggggggggcccccccccccttttttttaaaaaaaaaaaaaaaaaaaaccccttcttgtgggggaagggggttttttttttgggggcnccnccncctcaagctctctctccactaaagtccctctatagatataaaaatacatagtattaatagtagatta

SEQ ID NO: 107463 - DNA, 1922 bp, Homo sapiens
ggatcacaaactgttgggagaagagtggtatcttgggcctctagctgatctgatgaatattaatatccaatgtcctgtagtgaagtcatgtgtgcgtgtaacatcacttcttcacgcagtgtcataggaaagtgggttcctggaccccaggttaagagcctaagcactaaaggcacagagctagagctctaggaggggagggatggctggggtggaacctcgtcttgtcatttagtcctggggccttttcactccttacatggtgggtggtgggcgtctggcaggtgccgatgttgatggagtcaagggagggaactagccgggacagggaaaaacagggttggagagataattaaggtggacattattttttctgagcgtaagtcgtggctggaaatctggagagcctgaaagagtatccccctacccaaacctgttttttccttttccctcaagcctcatttggccacaggcccagtgtcaacaccagggggcgccacagaccatgaaggcaccgtgcagctgggattgtttgtggtcggctactgggtccctgacttaaccaggggagccaagaccctgtagccaagtggcctggattcaacctgcagctcaggtcttactgacacttctccccctggtgcctcagtttcttaatctgtgaaatggtgaggacattacagcatttacctctggggcgggtttctcaacagtcagcacttatttaacaatttgggacagagaatcttgtggagtggtctgtcctgtgcattgtgggaggtttgccagcaacaccccactcaccccctcccaccaatccccatgtgacaaccgaaaatgtcccaggatttttaggtctcccttgggtctagaagctgcacttaggcattttcccacctgacacttgagttcatctctgctttggtccacataaggccactttaaaaaaatgttgtttctttaaagattctaaccatcttttaaacaaatccattttcttcctctatttctgcattcagttaatccttccaaaccctttgtttagtatatcttgaaatgtatcaattcctgttctagtaattaacatatgtgacttgcatgatatctgctatgacccttagtagagctctgattcctttagcacagggaatgtgttctcgattctgctctggatgatgtaaatcaatttattttactttacttgtctgggatgttgctcctcatctgtaagatgtaaatgtggatatggcttggattactaagtggttttatttcttaattcacctgacatttgttgtgtgcctgctgcaagtcaaatacatggcatggtattgtttccttgttcacaccacagcaaatgagaaaatgagacattatagccaggtgtggcggcacaggcttgtggtcctagctactcggaaggctgaggcaggagaattgctccagcccaggagtttgaggttacagtaaggtatgatatcaccattgcatttcaacctgggcaacagaccctgtctctgaaaaaagggaaaaagaccttgtgagctgtctacgtgtactctatgtctcaggagactcatatcctgtaatttttctaaatggcgtctccatgtggtctttcatgaatgtttgtctggtattctctatccttttactttcaacttttctttaccttctactgaaattatgtcttttgtaaacagcccatgattatttatttagttatttatttttacccccctgcactatttgtcttgtaattggagtgtctgagtccattatgtttaatgtaattattgacctcattgggtttaagtctgtccattgtcatttgctgccttctaatattcatctctttcttgctcaactatttttcttatgttaccttctttagatgaataaaaacctttgcattaaaaaaa

SEQ ID NO: 107464 - DNA, 460 bp, Homo sapiens
  misc_feature (1)...(460): n = a,t,c or g
ggaggtagaccnagnnnnnnctgaactgagttccctaggacangcggnggaattcgtgccaggcactgctctaggtgccatcatagtgcactgcagcttggaactcctgggctcaggtgatcctcccacctcagtctcctgaggagctgtgaccacaggcatgtaaccctgtcccaggctctgttgcatattgttgatgttgactgtaatggattttattgtaaattgacttttgaagcactgaccaagcccatttggtttccagtgctagctttgggatctcaatcttggcagctcattaaaacagcctgggatgattttatagggtagctaggattgagaaccactgcaataggtatatataggtggtacatagtctggtaaggttgctttgcttgtactacagtcaacatgcacatttcttggagatgctgtctctcttttatgtaggcatggcaat

SEQ ID NO: 107465 - DNA, 496 bp, Homo sapiens
  misc_feature (1)...(496): n = a,t,c or g
agagatccgggccnnnnnaggaatgacgccgtggaccggatagaataccctgggcgacccacgcgtccggtacattcttagtctgcaaggaaaagagctcctgactgaccagccagaatcctctctcatgtcttttctataataaacctgtctttgactgtcanaaaaaaaaaaaaaaaaaaaaaaaaaaaagggggggggcccttaaaaaaaacccctgggggggccaaaattaaccgggggaggaaaaaaaaaatttttttccaaaagggggggcaaaaaaaaacccccgggggaattttgaaaaaaaaaccttttttgggggggggaaaaaaggggccaaacccccccaaaaaaattaaaggccttagggaaaaaaaaaaatttaaaaggggaaagggggcaaaaccggcccaaaatccctgggggaaaaaaatttcccctcccggtttttttttaaaaaaatttttcccccggggccgggggttttttatta

SEQ ID NO: 107466 - DNA, 391 bp, Homo sapiens
ctagcctttctattagctcttagtaagattacacatgcaagcatccccattccagtgagttcaccctctaaatcaccacgatcaaaagggacaagcatcaagcacgcagcaatgcagctcaaaacgcttagcctagcaaaaaaaaaaaaaggggggggccgtttaaaaggacccctggggggcccaaatttaacgggggagggaaaggtaatagctttccccttatgggggggggtattaaacccaacctgggaattttgggaaagaacccttatttggggggggggactaatgggaacaacccccctacagagattaaaggctttggggaaaaaaaaaaattttaaggggaaaagggggaaaaacaacctgaataggctgggggctggag

SEQ ID NO: 107467 - DNA, 403 bp, Homo sapiens
ggaggcggaggttgcagtgaaccaagattgcgcctaggcgacagagactccgtctcaaagaaaaaaaaaaaatggcggggaccccccccaaacttgggagggcgagggaagcaggaccacccctggccatcattgtttttttgacgggaacatcccatcctgaaaggcacctgggttgggacccgcccccgggggggatctgattccgggatttccccatccgggggacgggggacccatcctgttctcctccttaggcccaggggaaatcggaggcccttgttgtcaagtggccacaaaaaataaactacgcaaagagcctttactatgaacagcagtttaggttaaaactcagggaaaaccgaaagcagtgggagctggactcctgaagccccgttgttga

SEQ ID NO: 107468 - DNA, 480 bp, Homo sapiens
  misc_feature (1)...(480): n = a,t,c or g
ctttcgcacatcgatgagcactcagcccagngacggcggaaggaaggntacaggagtttccttcccttctatttggaatttaaaattctactaacactgacaatatatactcagccttcccccacatacaccttgtccccaccaatctgtcctttaagtctgtgaggtacaaattctctccattaacatggtcatcccatttatggaatagatacattctgacaaagctgaccagaagatggaattccctatttcgacctcagcttccccactggcttcaatttaaagcagaaggtaggtggcttctggtttggagtcagaagcttcaatgagtacaccccttgaggagtgctgaagggcccaggccagaatcaaatatgctacatttgactttaaagagtaaacaacagtggctcacgcctgtaatcccagcactttgggaggccaaggcaggtggatcacaaggtcaggagatcgaat

SEQ ID NO: 107469 - DNA, 374 bp, Homo sapiens
ccaaagatacattgtaagatacaacacatagtggttctggtttctttctttccctctttctttctttctttctttcagggggaatcttgctctgccgcccaggctggagtgcagtggcatgatctcggctcactgcaagctccgcctcctgggttcaagtggttccgttttatagaattattgggactggggttccactctaggagaatgagggggaaggattcttgaggccaggaattcaaggccagcctgggcaacatagtgaggccactgtctctataaggaataggctgggcatggcgacacactcctgtaatatctgcactttgtggggccaaggcaggtagatcacttgagcccaggaattcaagagc

SEQ ID NO: 107470 - DNA, 379 bp, Homo sapiens
ttacaggacatttctctagaatcttggagtgttgggtagccattgtggttctgcctcaggcttgtgccaaatatcagtatggtgtcttcctaccatgccgaactttagcccataaatgtttagaactagtgtttgttgatagattgattttctgaaagtatatagattccaatgatgacatttctaagtctttttataagactaaagatctgccttagagtttgacgatggctttccatcagaattagacagatttttttaagaggtcattatgaggctggccctggtggctcacacctgtaatcccagcacttttggaggctgaggtgggaggattgcttgagcccaggagtttgagactagccttggccacatagtg

SEQ ID NO: 107471 - DNA, 389 bp, Homo sapiens
gcccatgcagttttccttatttacaaagctcatgtgagaattgtgactctgcccattcgtggatctgcacaacatatggtgacgaatataagttcgggggcgtggggggaatgcgcatgtgctaaggttcagtgctgggcactgggtgttgtggttcagtgctgggcactgtgtgccgtggttcagtgctgggcactgtgctgattgcttctgcgactccggacagatacttaaggctcagctcaggttcgtcattaacacgaatcacaaattcagacctggtgccgtggctcacacctgtgatcccagcactttgggaggccgaggcaggagtatcacttgagcccaggatttggaggccagcccgggaaacatgggaagacccccat

SEQ ID NO: 107472 - DNA, 412 bp, Homo sapiens
atccccctttctgtcatagagaggcagatgtatgtgccacttcagctttttaatcaaatgaaggaaaccatataagcaaagggttgaggaaacagtgtaggtacttatgatactattatttaacatctagtattatttaacatctattattcagtgagccatgactgtgccactgcaattctgcctgggtgacagagcaagatgccggacgcgtggggggaaaaaaaaaaaaaaaaaaaaaaaaaaaaaaaaggggggggccctttaaaaaaaaaaaaatgtgggggggggggggtaggaaaaaaaattttttttttttgggggcccaaaaaaaaattttttgggggggggtttaaaaaacccggggggggagaacccgtggggttcccccattttggggcctggcgcgccc

SEQ ID NO: 107473 - DNA, 401 bp, Homo sapiens
cggacgcgtgggcggacgcgtgggcgcattttagccatctcagattacttaagaaaaatggtgttagctatgaccaattttgtgaaatgtgattctaaaggcataatataagccttggacagtgaatgggttttgattaataaaaagctactaaatactacttaatccctgggttagtcagctgaagactttgtaggaccttggagtggttgttgtgaacacctttatgttgaaatttaagtgtttaaatgttagtaggggccacgtgcagtggctaataatccctgtaattccaatactttggaaggcagaggcgggaagatcccttaagcccaggagtttgagaccagcctgggcaacatagtgagaccctgtttctacaaaaagaaacagaattggct

SEQ ID NO: 107474 - DNA, 421 bp, Homo sapiens
cagaaagacaaaaagcccttcccaggttttatgacctctttcagcgaaaggtgagaaagtccttcctgcacatttggtttctgaaattccttcagcttgaaatattcattatgccaactttccatattttgggttggcatgtcctgaatatattgtcagagcattacagaaaaaatacacccaaacacacacacacacacacacacacacacacacacggacaacacattccctatgactatcttaaaattgattaacctcacacatttaattttggatgactgagtcaaaaagagaattgaaattgccatcacatatctggtcaagctgaaagatggcatttggtattggaaattgatggctgctggtcatttaacacccatgcctcagttacatatctggctcatgagataagaatgct

SEQ ID NO: 107475 - DNA, 2644 bp, Homo sapiens
aggcttgcggccgcgggagctgaccctgcggggtcccggggggggagggggagccgcgaagcccccactgaggccgcgcggtgccgggcctcccctcccccccgggcgggcgccatgcgggggagcccgggcgacgcggagcggcggcagcgctggggtcgcctgttcgaggagctggacagtaacaaggatggccgcgtggacgtgcacgagttgcgccaggggctggccaggctgggcgggggcaacccagaccccggcgcccaacagggtatctcctctgagggtgatgctgacccagatggcgggctcgacctggaggaattttcccgctatctgcaggagcgggaacagcgtctgctgctcatgtttcacagtcttgaccggaaccaggatggtcacattgatgtctctgagatccaacagagtttccgagctctgggcatttccatctcgctggagcaggctgagaaaattttgcacagcatggaccgagacggcacaatgaccattgactggcaagaatggcgcgaccacttcctgttgcattcgctggaaaatgtggaggacgtgctgtatttctggaagcattccacggtcctggacattggcgagtgcctgacagtgccggacgagttctcaaagcaagagaagctgacgggcatgtggtggaaacagctggtggccggcgcagtggcaggtgccgtgtcacggacaggcacggcccctctggaccgcctcaaggtcttcatgcaggtccatgcctcaaagaccaaccggctgaacatccttggggggcttcgaagcatggtccttgagggaggcatccgctccctgtggcgcggcaatggtattaatgtactcaagattgcccccgagtcagctatcaagttcatggcctatgaacagatcaagagggccatcctggggcagcaggagacactgcatgtgcaggagcgcttcgtggctggctccctggctggtgccacagcccaaaccatcatttaccctatggaggtgctgaagacgcggctgaccttgcgccggacgggccagtataaggggctgctggactgcgccaggcgtatcctggagagggaggggccccgtgccttctaccgcggctacctccccaacgtgctgggcatcatcccctatgcgggcatcgacctggccgtctacgagactctgaagaactggtggcttcagcagtacagccacgactcggcagacccaggcatcctcgtgctcctggcctgcggtaccatatccagcacctgcggccagatagccagttacccgctggccctggtccggacccgcatgcaggcacaagcctccatcgagggtggcccccagctgtccatgctgggtctgctacgtcacatcctgtcccaggagggcatgcggggcctctaccgggggatcgcccccaacttcatgaaggttattccagctgtgagcatctcctatgtggtctacgagaacatgaagcaggccttgggggtcacgtccagatccttctgctgactgccagatccctgcatttcaagcactacgccttccacccccaggcactggatcccagattcccaagccttcacccaccagattctggctcctaaaacaagtgcgggggccccagtggcacagcaagtggatcctggcaactgcagctgctggattccagattctgggtccccaatccctctgcccagtccctcaatgttgaaacctcatctcttgaaggcagatcctgatattccaaggcactgaatcccaagccctgaatccccggtttctgatctgaatcttccaggcgccgggtcccaaatgttcaggccccaagtctagatcctggcagcccagtcacagagtatcccacacacactggtgcccagagccggcttctcatgacatgaaattgcatggtcgagggagtctgtggggaaggaagcccaggtcctggctgcaacctgcacggatgctggattccccctcaccccacctctgcatggccaccccctcccagccctgtggggaaactgttccctggaaccactccactccctgcatccccacacttcacagcatcttccatccccctcccaccttctaggcgaatagtccccagagctgtgttcctccaaggggtccgaggaatcactcactcctggaggctggcaaggagacagtctgaggccagggacacatgaagggatgtccccaccccagcactatcagggcctccccaggcttccagagttgaaagccaggagaaaatcggcaaagaccacccttccctaaacccaagcaccccaatgatgcaaaaaacaaaaacaaaaaaaaacccacccaaatcccccaaattcattccagatctatttttctaccagagagaggagcaaagtcctcctcccctgcgcccttacattctgcacttcatagttggattctgagcttaggatcatctggagaccccatggagggacttggaaaggggaactgggatttggggaggggctggaggacttccgcacgcttccacctccttcgacctccactgcgccccacctccctgcctgtgtgtgttatttcaaaggaaaagaacaaaaggaataaattttctaagctcttaaaaaaa

SEQ ID NO: 107476 - DNA, 418 bp, Homo sapiens
  misc_feature (1)...(418): n = a,t,c or g
taattaatgccactgaactgtacacttaaaaatggttaaaatagggctgcacatggtggctcacgcctgtaatcccagcactttgggaggccgaggtgggccgatcatgaggtcaggagctcttggtaacttctgcctctgaatttgcctgttcttgatagcttgtatcagtagactaagaagaaacataaactaattaaaaaaaagaaaagagtgttagtaatttgaagacatgaaaatacaaagttctctggtagagttaaatatatggacaaacataaaaacttgtattactgtcatttgggtttataactttaaattcttttataacatttaacacacaaatatagtccagccaccttggcccagccaaagtactggatatataatataatttattaactactgtactgaaagn

SEQ ID NO: 107477 - DNA, 384 bp, Homo sapiens
tcttattaaaaaacaaaacaaaaaaaactgaaaagcaagctgggtgtggtagtgtatccctacagtcccagctcctttggaggctgaggtaggggaagtgcttgagcccaggagttttaggccagcatggagaacctagcaagacccaatctctaaatttttaactgaaaaacaaactaaacatgtcttagagttttgaaaaggatagacattctagtcacatagatgtttcttattataactcctctttataagggaaaatacttaaatcataattcactaaaggcattcctgtggaaaggtgaaatgacaagttctaagtacactcctttctgatggcttacttaacacagaagttagaaagttagttagcttatctataaa

SEQ ID NO: 107478 - DNA, 412 bp, Homo sapiens
ttacaaaggttacagtcctgtgcaaacatctgattgacctttgatgtgaagcaacctttacagtgattcttggagaggtgacagtgcaaaatagggagaagtgggtatattaatctcttgagcatccttttgatgttaacttaaatttacacctcaacccctgtagtaactcccagtcataggggagagtaaatttcaggaataatccttcacatgcattcaagcagaaaaaagttttaggaactgaacccgtgtcatctctttttctttccctagagacgtggtctcactttgttgtgcaggctggtctcgaattccaaggcaggtggatcactggaggccaggagttcgagaccagcttggccaacatggtgaaaccccatctcaccatgtttaaaatacaaagtttagc

SEQ ID NO: 107479 - DNA, 448 bp, Homo sapiens
  misc_feature (1)...(448): n = a,t,c or g
attgagaccctgataaccgtccgaangnacgnaccggnccggaattcccnnccgacgatttcgtgttttgaactcctgggctcaagcgatcctccctccttggcctcccaaaatgatgggattgcaggcctgagcctccacacctgccctgaaaccagttcttctaagggaaaataagagtggtcaaagagtgtatagcacaatttaaattctcactaaatttttcattgccttgtagaaattttcatcccattatttagctttttggctccaatgagattttcaaaatagaaaatgcatgtgtttagttactaaggcataatttacatgcagtgaaacacacagagcttgtgtccagttcaattgttttgacaaaggattcaccagactcctgtcgtgatgtagaatctgcctgtgatccatggagattgcctcgcaagctgctccn

SEQ ID NO: 107480 - DNA, 324 bp, Homo sapiens
  misc_feature (1)...(324): n = a,t,c or g
tttcgtctgaccccaggcccagctcgtcctggctggcctgggtcggcctctggagtatggtctggcgggtgccccctttcttgctccccatcctcttcttggcttctcatgtgggtaagtctcccctgagtccctcaccccatttctaggccccgaggccctgatttctacccaagaaaccctattttannnnnnnnnnnnnnnnnnnnnnnnnnnnnnnnnnnnnnnnnnnnnnnnnnnnnnnnnnnnnnnnnnnnnnnnnnnnnnnnnnnnnttacaagatttttacttggttttacaagattaaaagagttataaacatgg

SEQ ID NO: 107481 - DNA, 406 bp, Homo sapiens
gcgtgcactgccatgcctggctaatttttgtatttttagtatagacagggtttttccatgttgcccaggctggtctcgaactcccaggctcaagcaattctcccaccttggcctccctaagtgctgggattacaggcaagagccaccagaaaatctttgaaaacagctatgacctgctaagccctctgcttcaagacatctcacctctttagtctgaaccaatgtacatcttccatgtgttgatttatgattttacctaaaattcctgcctctctaaaaatgtgtaaaaccaaaatgtagcctgactgcctcaggcaaactttctcaggacttctagagactgttccccagggccatggttactcataattggctcagtataaacctctttatatattttacaggg

SEQ ID NO: 107482 - DNA, 499 bp, Homo sapiens
tttttttttttgagcaacaaggctgtttatttcacttgggtgcaagtgggctgagtccaaaaagagagtcagcaaagggagataggggtggggcagttttataggatttgggtaggtagtggaaaattacagttaaaggtggttatctcttgtgggcaggggcgggggtcacaaggtgccaaggtgctgggtggggagatcatgagactcactgtcgggggcagggggaatgtcacaaggtcgattgattagttggggtggggcaggaacaaatctcaatggtggaatgccatcttttgtggttcttcagttgctccaggtcatctggatgtatacgtggcggtcacaggggctatgatggcttagtatcatattgtcagaggcctgacaataaatgcatgcaggttaagtactttgtctatttttctattggcttgttcatatttttattttttggtaagataaaaggtctttgtatatcaggaaaatcagctgtgtc

SEQ ID NO: 107483 - DNA, 413 bp, Homo sapiens
tttgttttctaatctgtcttacataaagacttaaagtccatttgaaattcaaaatcataatccatgtaactcatcaacactctgaatgatctttagaatctctttattattccccattcactaaaatatttctcattaaggcctcaaaaacttggagggcattccatccttctgttttctttactatcaagctcttttgtttcgtatttcttttgccttcttgacacttatccatccatatcttaactttccctttcagtttaccagagcagtggtggctcgtgccaataatcccagtgctttgggaggtaaagatgggaggattgcttgagcccaggagttcaagaccagcctgggcaacacagcaagaccctcaggtctccaggaaataataataaaaaaaatagccaggg

SEQ ID NO: 107484 - DNA, 405 bp, Homo sapiens
cgccaggctaatttttgtatttttagatttgagggggacccaccatgtgggccaggctgggggggaactcttgagctccaagaggctgcctgactcgacctcccaaagtgctgggattataggcataaaccaacatgccagacaaatattattataattttttggtacagatgaagaaacacacacaagggtttagggaaggggacacagctagtggcaaagccaagcctggaatccctataggctagggggtagagacaggctcttaaacattcctggttttactatgctgccttcttaaagcttaaaacaaaccaaacttggtctctccttttactatgggtgggggtataaatctcagtccataaaccaaggcttacaaaaaaatatagtaaaaaattttat

SEQ ID NO: 107485 - DNA, 403 bp, Homo sapiens
cccacgcgtccgggatattagtgtcatttactgtgatggggaagactgaaggaggagtaaatttatttggtggtgggaggggaagcagaggaaaatcaagaggcagtagcctcacttataactctttcctatatccctgaagttacactgagatcaaagcatagcggatgtgctaatgtattatacacacacacacacacacacacacacacacacacacactctccagaaccaggtgccagggtagttctatttaacaccttaaacataactcattcagagcttgattctaatgtaaaactaaaattttggcacagttctgtataaaacaagagaaagggccctctattttgaccatgttcttcaattggcagccactctgaacctttgctactcattttgg

SEQ ID NO: 107486 - DNA, 406 bp, Homo sapiens
  misc_feature (1)...(406): n = a,t,c or g
cacagttgcttacccaccacacacagactcacctgtctttgccgaacaaaacaaaacaaagggcagtttcctacatgtcccaatttgaacctctaatgtttactgcttttctgattttctttctactcttcagctcacactcgttttcaccaatcaacaatgtttgttgggtagagtgcctagctggcttctgatgaccttgagattctccaggcaaaaattccttctttccttcctcttttccctcactttattttcttaaagcttaaatctctaccagattttttctctatagagacagggcctctctctgccatccaggctggagtgcaggggtacaatcgtggctacctggatcctcgaactctcaggctcaagcaattcttctgcctcagccacctgagan

SEQ ID NO: 107487 - DNA, 409 bp, Homo sapiens
  misc_feature (1)...(409): n = a,t,c or g
cttgatttacaacaggtttgcaagactgcattctttgaacaatagactgtagatgtcccagtagataatttcaatgagcatggcaccagggagtgattaccttcagcaaaccttctggtgtcaggcgcagtcgtgagtttgcccacatcctgcattcgtgatagtttgttgtttgatcataaagcctccagtggaatgttgagctggtcacatctcttgggccttcagcttcctacatgtgggaacactcagtccttttctggggatgtgtttcttctggcttgtggaagtaccattattaatgtctatacagctcttcttggatttctgattttccctaagaggctcatccctgcttcttcccagaagttttcagnctctgttgtatttctctgctcatagtctggtt

SEQ ID NO: 107488 - DNA, 389 bp, Homo sapiens
  misc_feature (1)...(389): n = a,t,c or g
nnnnnncttgcccaggctggtctggaagtcctgggctcaagtgatcctcctgccttggcctcccagagtgccgggattataggcatgagccactgtgcctggcctaattagctgacttaattagatcacgaagttaggcagtggtcttgagcccaggtccttggaccccaatgcttccttcttctgcttaacaaaggaagctgtttagcatcgtgactgagggtccaggctttgtggcttgacagtttccttcacctcccagtttcctcgtctgtagaatgagactcctcacagaacctcctccacaagactgttgtgaggaatgattggaaaggtgcgtttaagtcatctggcacacgccgactacttggttaacataggtactactt

SEQ ID NO: 107489 - DNA, 484 bp, Homo sapiens
  misc_feature (1)...(484): n = a,t,c or g
cggcgcccntttgatttcgatagccgtacgcctgcactaccggnccggaattcnnnnnncacccacgcgtccgatcttggctcactgcaacctctgcgtcctgggctcggatgatccaccagcctcagcctcccaaagtgctggggttacaggcatgagccactgtgcatggtctaatttgattattcatttaccctctcgatctactgctatttgtaccttatgataaatctgtacagaactatttaggataaacattagctgatggctagctaaatctagttcttcctcggactagtgattccccaccagtattacatcctgaataagctttaactcaatcttccaataaatttgattattaatatctgtattatcacatgagttatttatataaggcaatttaatcttactaacaatgccagtgttacaccctatcacagtatggtcagagtatgattcaagtcagtaagaattatagagg

SEQ ID NO: 107490 - DNA, 449 bp, Homo sapiens
  misc_feature (1)...(449): n = a,t,c or g
attctagatcattagtccacgtggtggaattcgtttgaggttgatgatggaagatttaggattagaaaaaagaaacatgaatgaatttctgatgttttattataggggtttgtaatgcaggtagaaagacctttttcagagttaagagtttgatccgacaaatgagctattttgatatttataacgttgtctaataaaagtttcctataaaaacacatttggtttggatgtctttgttagcttttagtcgacacttgaaaaaaccgcttagaacagtttctaaatctttgtggttactcttttctgttatcctccagggggtagttccagagaggcgttggtggtttagtggtagaattctcgcctcccatgcgggagacccggggtcaattcccggccactgcacgtgggtggttttcacttcgctatggctctttacttgtcttttn

SEQ ID NO: 107491 - DNA, 501 bp, Homo sapiens
  misc_feature (1)...(501): n = a,t,c or g
cgccccccccagnaggccnnnatagannnccactgagaccctagtcagtgtcgtggaattcaacccggctctgaggaatggcccaacagtggccccttcagggtggcagccacccttcagtgaggccccaaggcagagtcggctgggcgtggaccaggggccatggacacgtgatgtgctgctctgtacctccgttccccatctgtgggacgggctgcatccagcgacctcatggggtgttgtgagccccatgaggggtgcagggggcactgcccggcagatgtctgctcaataaatgagctgctcccggtcgggccccacaaaaaaaaaaaaaaaaaaaaaaaaaaaaaaaaaaaaaaaaaaaaaaaaaaaaaaaggccccttttattaaaaggggccggtaaaaccccgggggaccccccgggggggttttttttttcccccccctttggggggggcccccccccccggtttttttttgggggggggggggcccccccc

SEQ ID NO: 107492 - DNA, 493 bp, Homo sapiens
  misc_feature (1)...(493): n = a,t,c or g
gccccccccgccggccnnttttgancccatagtagtcactgtcagtgcggtggaattccagctgctcgggaggctgagacaggagaatcgcttgaacctgggagacagaggttgcagtgagccaagggctcatatgattatgtctgaggcattcgaaccagagcgactccatcttgagttaggactaggaaaaatgaggctgggacttgctgcgactccatcttgagtgaggactaggaaaaatgaggctgggacttgctgcgactccatcttgagtgaggactagggaaaatgaggctgggacttgctgcgactccatcttgagtgaggactaggaaaaatgaggctggggctttatcaggctgcattcccagaaagtgaggcgttcacagttaagggaacagataatgtttactaagcagacctagacttgggagtgtgctgatatcctgatatcttcagaacagaagcatccctaattttgctttaaagg

SEQ ID NO: 107493 - DNA, 470 bp, Homo sapiens
  misc_feature (1)...(470): n = a,t,c or g
aggagccggggnnnaaattggattcgagacactagtcagtgtggtggaattcgtcacttgatcttcttggtcattggtcatgctgggaaattattattatcatattgtgccagcagtgccttcttatcactgtacaacacacacacacacacacacacacacacatgcacaaacacacacaaacgtgaacatatatattattgacgataaggatgggtttgtccagtaccccataactggtaaatggtggaaccaggacccagactcaagactttcaactctaaatcccatgtctaactctggaatacttcagtggaaagatagcactagtggaagtggtcatctcttgagagcaaaattgtttctgggtcaccatgctgcattttcatcagcaactgtcatgtggtgttcccagtaagtaactcacatttggagtgatgcagcccctcagtcatgggcctaactaactt

SEQ ID NO: 107494 - DNA, 454 bp, Homo sapiens
  misc_feature (1)...(454): n = a,t,c or g
atggctgaccccaagttttgnnacgagngnccgaannnggnnnaccacttggccggctgtctcaactgctgggctcaggtgatctgccctcctcagcctcccaaggtgctgggattacgggcgtgagccaccatgtccagcctaatattctgaatttcttaaaatgcagtttgtgaatttgatgacttctaatttaagagcaaaactgtactgtgtacaattaggtttgttctttaaaaagtacaattttgaactgtatttagagacagaagggcatataaatttaagaaaaaagggttcttggaaaaaaatgagttctcttttaattttcccataagaaaacacctataagtaaaaaaatgagttttcttaattccagaattttttagttccccacaatctcctcctaataagtgtcatctcattataaggaacagtttttattcaagcacct

SEQ ID NO: 107495 - DNA, 424 bp, Homo sapiens
aaggaattgaaaacactttgctaaataacatgaatcatttcagattcccaagattaactggcgttctgtaggtcggcacaaagtcgtggctttgccatctgacggaggacgcgcagcggtcgtctctggctgggtagactgagacctgaacgctgagggacttaggaccagcagtgccgtccaggcctggctgcagacggaaactacttcaagataagctccaccaaaaatagagaggaaatcaagaagattaagacgcaggatccagcgcaacgctccagcacaggagagaccaaaagaacgtttgacaatccactgacttcctagaaaacagaagagtgggctgggcatggtggctcacgcctgtaatcccagcactctgggaggctgaggtgggtggattacctgagatcaagaattcggg

SEQ ID NO: 107496 - DNA, 403 bp, Homo sapiens
  misc_feature (1)...(403): n = a,t,c or g
cccacgcgtncggggagactgagcatcatttaaacagtgccttcttcaagaggccttcctgatgaccctgtcccattcattgtgagtcagccccttgcctcatattacaggtggcccttgagcaacatgggtttgaatcactcaggtccacttatacgcaggtatttttcaacctaattctgattgaaaatacacattcccagaatttgaaacccaaatatacagaggaccaatttatttatttatttatttatttatttttgagatggagttttcctcttgccactgcactccagactgggcaacagagcaagactccatctcaaaaaaaaaaaatacaaaattagccggctgtggtggcacatgcctgtaatcccaacttcttagggagatgaggcaggag

SEQ ID NO: 107497 - DNA, 470 bp, Homo sapiens
  misc_feature (1)...(470): n = a,t,c or g
cgggcgtccagaaanattttgaaatcgagagccgtacgcatgnacgnaccggnnnnnnattcccgggctctggcaattttccttgccaacgcgtatactgaagccatcccccagcgctcgcctttgccaggtggccaggcctcagggtggggcttgcttgtctttcccctctgctaagacctgcatacttagtgctctgagaacctttcctcgcctcacctgctctccttggtttttctgtttttgagaatggaaaaagttcatttttgtgttcccattttctaaaaaaaaaaaaaaaaaaaaaagatcctccccaaaacccccacccttttggggggcctaaacccgggcaagggcccaagggggggggggaaaaacccaaaaccccgcttttgggttgcccccccccttttttttggggggggccgggagttggaaaccctttccctttttttgcctggggggggccc

SEQ ID NO: 107498 - DNA, 477 bp, Homo sapiens
  misc_feature (1)...(477): n = a,t,c or g
cgggnnnannttttgaagccgttcganagccctaccggnccgcanaacccgggattagatacagcaacttataacaagaggaaacagctgtgaccacaccaaaaatattaattttagcaagactgagcttcaccacaatgccccaccactgcattaaacaattaactgattcatatacttatctttagataaattatcctaaaacacagtagagttacttaaatgtttaaaacatagagatggggtcttgccacgttgcccaggctggtgtaaaactcttggcctcaagtgatcctcccacttcagcctcccaaagtgttgggattacaggcatgagccactgtggccgacctgtaaagctacttaaaaggtaaaaatcagctatcacacccaccatttttttttctaggcaaaacacaatattcaaatcaaaatctccaaaatgttcgcagaaaattaacatacaatattcttgaa

SEQ ID NO: 107499 - DNA, 431 bp, Homo sapiens
  misc_feature (1)...(431): n = a,t,c or g
nttgagaccctaggccctngcgaggaattcgaactcctgacctcaggtgatccacctgcttcagcctcccaaagtgctgggattacaggcgtgaaccaccgcacccagctgggtacccattgtctaggctcccataggctatctaacataatacccagcacaatacactaaagttactcgtgtctatctcctcctgtagtctactggcttttggaaggagaagcttttttccttctccaattattagtgcatgtctaatgtctactgtgtctcacagatatctactctgagaaccaatctgcttaaggtggtcactctcctccacctcctcccgtcattcccagggcaccatatagttaaaagctgtgattaaaatcctgttattcagtatgtataaacatttattgcatacctacaatgtgttaggcaac

SEQ ID NO: 107500 - DNA, 491 bp, Homo sapiens
  misc_feature (1)...(491): n = a,t,c or g
agggctgnacggagggcggggnattgagacccctgatgaccntcggcagngncgnggaattcggaaaatactaagtctaccttggagaggcctggcagataccacctcagccaagtgatcaatgtgaacgtcagaagtactccatacagacatcagatagctgagacactgggaaggacacatggcttttatggtattcttcccaataatgtgtaaccttaaacaattaaaagtaatggcaaaacaattaaaagtaatgacaaaaaccgcattcatttttgcaccaacccaatagtcatgagaaaacattaggtaggcctcaattgagggtcattctctaaaatcactgacctgagccagacatggtggtatgtgcctgtagtcctggctctgcaggaatctgaagtgggaagatcacttgagcccaggagttcaaggctgcagtgaactatggtcaccattacactttagcctgtgtgacagagcgagac

SEQ ID NO: 107501 - DNA, 460 bp, Homo sapiens
  misc_feature (1)...(460): n = a,t,c or g
acctgatnacatcttgagggcgtttncgnngncngcatgacagagtcagtaacttatggaggagacttgaagattttatttattttggttactagaactataggctatggccctgcttgttttcttgcttacctcaaggtgtagaatgctttcatgtccactggatgtgaagtgctctcttattcagaactgaggcagagaaacttagtgtggtggttcctgcctgtaatcccagctactccacaggctgaagcgggaagactccttgggcccaggagttcaaggccaccctgggcaacaaaaggtgtgagagccttgtctcacaagcaaacaaacacaaaaacaaacaagttgagtcacagcacaggtgtctcttttgttttcacacatcacatacactccccaggaattctgtggagactcagccagtggctgttagctatgaatctggccacaaacg

SEQ ID NO: 107502 - DNA, 410 bp, Homo sapiens
taaagatcttgaactctattgcttagcaactaaaatgctttcaccattcagttagtagtacaagggagatgctaggttttctctctttagtttgcttttgtgtcttttttttttaaacccctgctggggttttaagtttataaagaacattatgtaagaatggtgggattagaataaatcagaatgcaaatactagaagtagcatcagagagtaaaattacaactaacagtcaggaacccgaaaaaaaaaaaaaaataaaaaaaaaaaaaaaaaaaaaaaaaaaaaagggggggccctttaaaaaaacccaatttttaaaccgggggggggggaaaatattttttttttttgggggccccaaaattaaatttcgggggccggtttttaaaacggggggggggggaaacct

SEQ ID NO: 107503 - DNA, 387 bp, Homo sapiens
  misc_feature (1)...(387): n = a,t,c or g
tggaaattaattataaagacaaaagaacaaccaaaagttaaaatatgacctgagaggctgaggaggcaagaggattgcttgggaccaggagtttaagattagcctaggcaacaaagcaagacccgtttctaaaatataaaacagaattggctgggtgtggtggcacacatctgtattcccagctactccagaggctgaggtgggaggactccttgagcccaggagtttgagaccagcctgggcgatatagcaagactctccatcaaaaaatgttaaaatacgaattctgataaactcatggcaaaggtaataacttatttccctggggcagcattttttcccataagttattggggtacaggtggtatttggttacatgagtaagtn

SEQ ID NO: 107504 - DNA, 1228 bp, Homo sapiens
  misc_feature (1)...(1228): n = a,t,c or g
ttttttttacctattatctttgttttaatgtaaayttatttaattacaagtacataaattaaacaacagctgtgttaacaatcagcttgccaaatttctgaaaattaaacggtagacccatgggctggtatgagttgcctcctaacaccacaggttctgcccgccctttcaccttaggcttggaaaagtggttgcatattattctttcttgcttgctcttatgctgtaaacatggcaacatttctgggctggccagctgaaggataaggcagtggaggagaactgagtagtccacctgtctcagccaagacaatcctagactagtaaagcagctgatcctagacatgtgtgagatcccagccaagataagaagagctagaccctgcagctgactgggtacaggtgagcccagccaagaccaatagaaatgttcacccaacccacagattcatgagctaaacaaatgtttaattttttgaaatcactgggttgtagggtgtgtgtacatgtgtgtatatacacacacatatatttatatacacatatacacacacacacatacatatacacatatatgctatatatgatggttaatacagagttatagtttcatcccataagattacctccttgcagtcactgctggtaactacttcaggggtatacgagcacttgtattctttactctttcaaagctcaaatacaggacctagtcaaactagactgcaggccacagacagagtacttccttagtacggctgtgtttccttccaattgtaactgtagacttgcttaatctagcctgtttgtccttcttttaagattggcaagaaggggttagaaaacatgaacattttggattttccttaccattttccccaatcctacattctcatcatttgcctcccaagacacagcacatgaaaatgtgatccattgttttgccatcacctaataaagaccaacagctttctagcctcaacaaagcctgcagcacctactgcttgactgtcttcaacaaaccaatgccacatttaaaatgtttaaacattaaccttcccagtcccaggtatgatgctttgtgttacttgtggtatctctctatatctctctctctctgnnnnnnnnnnnnnnnnnnnnnnnnnnngcctacaggtaggtagtccagggctggtattgtcattccacatctagaatccagcctacaggtaggtagtccactcgtgcc

SEQ ID NO: 107505 - DNA, 386 bp, Homo sapiens
tgcccacctgtagtcagagctacttgggaagctgaggtgggaggatcgattgagcccaggaggtcgaggctgcaacaagctatgatcatgccattctactccaactggggcgacagaacaagattctgtctcaaaaaataaaactttcatcctcctcactgctggtggtctcttactggtcctttggaaccagccagatgtatatgtcttcctaattagattattagcttctcaagggcaatatattaatctatatattggcttctgatactggcacatggtacttagtatttttgaatgaatgagagtgatgaaatttggattgtcatactttccctgataagtataagcttttaaatcaagattttatcgaagtattttgagag

SEQ ID NO: 107506 - DNA, 419 bp, Homo sapiens
  misc_feature (1)...(419): n = a,t,c or g
cctgtctctaaaataaataaataaatttttaaaagctgggaggtggggttggtaaattcataaaaaataatatttcttgagttgaatacaaacaatacaatcactgttttttctttgccttgttttatttttacttatttatttatttttgcagacattgggcctcactcctaggctggtctttaactcccggcttcaagtgaccctcccactttggcctcccaaagtgttgagattacaggtgtgagccactgtgcccaggctgtggttttttattttttaattttttatttttttgtattataatcatagtgtatatgttgcatcctgatttttttttttttttttttggaaacaccttctatttttgtattccgggttggagggcaggggcacaatcttggttaattggacctttn

SEQ ID NO: 107507 - DNA, 390 bp, Homo sapiens
  misc_feature (1)...(390): n = a,t,c or g
cttggcattcagcccagtgcccagatgaccagggaggtgtggtagtcaagggtccaggggacaggagggcacagagggagaggttgtatccaggctggggtgggtgagcaggaggcaaagagggaaacagaagggccaccttggcgatggctcacacctgtaatctcaaagctttgggaggccaaggcaggaggatcacttgagcccgtgagttcaagaagggccacctggaatcttctgaagagaatttactatactgatgaaagagaatatttgatacctttagcccttaacacctctcaggggtcgactttttctttttaagaactggttttttgtgttttttgtttggttggttttttgagaaggattcttgctctgttgccagan

SEQ ID NO: 107508 - DNA, 484 bp, Homo sapiens
  misc_feature (1)...(484): n = a,t,c or g
agtggncnngnncncccttagaagcccgtcgcatggagcaccgtcgccagcacgcccggccacccactcgtgcgctatttgctccctggagctcctgtggaatagtgcctggcacattgtattaacacatgttcaatcaatgtttgttgaatgaaggaatgtgtgaatctcagtttgagaagtaagctctaggggtgtcagccagaactgtggcctaatgctaaagactctgatctattagccaggctcagaatttgttctaacttctttttttttcttggttgtgattaatttaggatgtggtttaaattggataaaagtctatctgctttgtcacttctaatttttttcttagtgcctcattaaacactaaaatgattttttaatttatagaaataataggctgggcacggtggcttatgcctgtaatcccaacactttgggaggccgaggcaggtggatcacctgaagtcaggagttcgag

SEQ ID NO: 107509 - DNA, 402 bp, Homo sapiens
aagtgtacatctttgtagtttttaaatgaattctgataaataggacacattttgaggaagcaaggtgttctgttatccttctgaaggcaggtatagcagtttcttagaagaggtttcttctgctctctctgttgcttttgatttctcttctctatacattttcatctttcatgttgggggctattctcaaatgtctggcaatccttgagcatcttttcatatttaaaagtgaggctttatggccaggcatggtggtttactcctataatcctagcactttgggaggacaaggcagggggatcccttgatcctaggagtttgtgaccagccccatctctacaactctaccaaaaaacaaaaacaaaaaaaacaaaaaggtagccaggggatggagtgcacttg

SEQ ID NO: 107510 - DNA, 425 bp, Homo sapiens
  misc_feature (1)...(425): n = a,t,c or g
cccacgcgtncggaatgtcacttgctgaaatttttttttaaagaaagcacaatccttgcatcattgttgctaatagcaaataattggaaaccaccttaaatgtgtatcagcagggaactggttaaataaatgggtatgtatacacaagggaaaactatgaaactgcaaacaagaattagggtgttctctaagtacagatatggaaaaatctccaaggatatattaaaagaaagaaggaaggtgcagaacagtatatatttgtgaactaaattgaggataagaaaatatattcgattttgcacacagaaaccctggaaagaggccaggcacggtggctcacgcctgtaatcccagcattttgggaggtcaaggcaggcgggtcatttgagcccaggagtttgagaccagtttaggcatcatggcag

SEQ ID NO: 107511 - DNA, 396 bp, Homo sapiens
ctttcattggtgtttaaataaaagtataactctacagtataattaatatttgtagagagtatcaattttcaacttcaccttctattagatgattgatactctctacaaatattaattatactgtagagttatactttcattggtgtttaaataaaaagctttttaaaggtggcatttcttctagagtgaaacaaatcatcattaatactttcccccttaaaatgaattttctttagttatgaaatcagtgcattattttttttaaaaatgcaacaacataggcaagcaaaagaaaaagtataaaattttggctgggcacagtggctcacacctgtaatcccagcactttgggaatccgaggcaggtggatcgcttgagcccaggggcttgagatcc

SEQ ID NO: 107512 - DNA, 387 bp, Homo sapiens
aatcaggattaaagaatctgtgggatatatagaatgatagaataaattctataatgtccattttcattgtgcaggatggagacattagtgtgcatctcagttaggatttaattgctccttccctgtgttcttgaaagcgcttggaaagcgcctccaatcctccatcgtatgattctagttcaggtctggctctttcaccagacaatgagctcctgtggtaagatgccatgtcttaattcatctgttttccgcttgtcctaatacaatgttaagattgccagataaaatacaggatgtcggctgagtgtggtggctcacgcctgtgatcccggcgctttgggaggccgaggcgggtggatcccctgagcccaggagttcgagaccacc

SEQ ID NO: 107513 - DNA, 395 bp, Homo sapiens
cgaacttctgacctcaggtgatccacctgcctcagcctcccaaagtgctggaattacaggtgcaagccaccatgcccagcctaattcaggacttttatttcattatcctttaatgatattaatgacagttacttattttcagtatatatttgaagcagtgtgctaccattactttaataaaaggatattactgttgacagatagttttatataatgtccctaattttcacatcctggcagactattaaaattatttccttcatgtgaagaataagatacaatgacacccttattcttcagtcagttaatgcctgtgcatctatttagaggaagcttatataggaattttccctaatgtttacatatttaaatattcctaaactatgtcaacttag

SEQ ID NO: 107514 - DNA, 400 bp, Homo sapiens
tgcactcagagtttgatactaatgaagctgtaggttctaaggttgtggtcaaataaactgaacttataaaccttgtccttgacttaaattttaaccattgtttacaagaatcaggtatataattggatgcagaactgggcaaaaaagtaatcatgaggaaaatagcaaattttagccctctctggtgaaaataatgtttgcttattcttagtggcttagtagcatcatgtattatagaaagacacgggaaaggtcaggcatggtggctcatgcctgtaatcccaacactttgggaggccaaggtgggaggatcacttgagctgaggaatttgagatcagcttggggaacatggagaaactccatttctataaaatatacagaacaattagcccaggggtg

SEQ ID NO: 107515 - DNA, 489 bp, Homo sapiens
  misc_feature (1)...(489): n = a,t,c or g
atgtctgannnngggaaaagttangcancggcanannncnnnnnaannnaangggnccaggccacgctgtttgaatttttaaaaannatcattaattgggacctttatctataactataaatactcctggctcacacaaaataacacgcggtgagaatgatgagataggcaaactctcaaatatggaacgaaaatatttnttagaacgtatatcttgacaaagggatttatattcagggatatataggaaagttcttataagttcaatacctaagatgaacaatctcatttaaaaatgggcaaaaatgcagacattgcacaaaggacgatatgcgtgtgtgtgtatatgtgtgtgtgtgtgtgtatgtgtgtatacatatacagatatatatattttttatatacatatttggccaatgaacacaaagtgctcaatgttattagtcatcggagaaatgaaaattttgtcgaggatgtggagcaaccaga

SEQ ID NO: 107516 - DNA, 416 bp, Homo sapiens
cccacgcgtccgcccacgcgtacgagcgagaccctgtctcaaaaaaagaaaaaaaaaagaataaatctaggggctggacctgggggctcatgcctgtaatcccagcaccctgggagaccaagacaggattgcttgagctcaggagttcgagatcaggctgagcaacacagtgagaccctgtctttactaaaaacacccacaaaaaaaaaaaaaaaaaaaaaagggggcccccctttaaaagaacaaattttaaggcccggggggtggaaaggaaaaattttttttttggggccccaaaaataaaaaaaacgggcccggtttttaaaaacgggggggggggaaaacccgggggtccccaattttaagggtttgagaaaaaacccctttttcggagggggggttttaaaagaaaaagc

SEQ ID NO: 107517 - DNA, 413 bp, Homo sapiens
  misc_feature (1)...(413): n = a,t,c or g
ctccgtttcaaaaaaagaaaaacaaacaaacccaaaatgtggtctgttcatacaatggaatatcattcagccctaaaaaggaaggaaattcggacacagaccacaagatggataaatcttgaggacattgtgctcagtgaaataagagtcgcagtcacaaaaggacgaatactgtatgattccactcagatgaggaatctagaggagtcaaatttgtagagacaggaagcattcatagaatggtgggtgccagggcctggggcgagggggacagagagctggtatttaatggggacttagggaaaatgagaaaagttatggaggtgaatggtggtgaaggctgtaccacgatatgaatgaacttagtgctgctgaaaattatacgctcaaagatgattaaaatggtcaatttn

SEQ ID NO: 107518 - DNA, 408 bp, Homo sapiens
atatatcctttatatatatgacatttcatgccacatatgcaaacacacatataaataacgtcgtgaataatatattctggaaatgaacctctggtcattctagtttagtcggtgttctcacaaaggaaagaaaaaaattagacacctacccaaggcaagtaaaattatttttttacatatactaataatgattttactttttcacatgctttttctaaacattttgtcactttattgcctttttgcatgtatataaaatgtttgtggttttctttttttcgttcattatgttcttttttcctcttaactgtaataaagcatttgaaaggaaaaaaaaaaaaaataaaaaaaataataaaaaaaaaaaaaaaagaaagaaaatctctctttccccgcccgccccccccc

SEQ ID NO: 107519 - DNA, 395 bp, Homo sapiens
acagaccaagattctgtttctcagggtggagtgtggtggcacagtcgtggctcactacagccctgaaccctcaggctgaagtgatcctcctgcctcagcctctcatgatggcatgctcctgtggtcccagctacatgagaggctgaggcaggaggatgccatcatgcttggctaacttttttggtattttatagagatgggatctcactatgttgcccaggagtttgaggccagtctgtgtaacacaatgaaactctgtctctcaaaaaaaaaaaaaaaaaaagggggggccgttttaaagaaacaagttttacgaccccgtccttccaaggtattattttttatttgggggccccaaaataaattccctgggccgcctttaaaaaacgaggggg

SEQ ID NO: 107520 - DNA, 371 bp, Homo sapiens
tctttccaggttgcccaagcttgactcgtactcctgggctcaagcgatcctcccaccgcggcctcccaaaatgctgggattacaggtgtgagccaccgtgcccaacccgtatttatttataaacttaagaaaaattcaattatgaatcaaaattaaaaatctgaatgaaaattgctctgaaaaaggtcttgctgaaaggaattgttgtgctggaaatatattgctttagattctgttcttacatatgtattaagcttttttttccatagaggatagagtgacctttttacaacagggtcactcaatatgggctaatttatgttgaacttctaatagacatttatagaattaaccacaacctttttttctga

SEQ ID NO: 107521 - DNA, 441 bp, Homo sapiens
  misc_feature (1)...(441): n = a,t,c or g
ngggacgaacgcttgnggcaanngcnnnggaatnnngggtcgacccacgcgtccgattttgcccaggctggtcttgaactcctgggctcaagagctcctcccgcctcggcctcccaaagtgctgagatcgcaggcgggagaggactgatcttgggctgggtggctctctgaggccaaggtcagcctccaaatggggtctcagccagggccgccagcctcctcctggtcttcccagcctgggtgcagggtgcagggcctcccgtccactctctcttgggtctgagtaggtggcatacatggcactggctcactccctgcccttctggtctttccccgcggggtggtggtgacgtccgtggcagggaggggagtgtcgttcagctgggtccaggaggaacgccgtggactctgtccagccctgctaggcagcatgccctgatg

SEQ ID NO: 107522 - DNA, 398 bp, Homo sapiens
  misc_feature (1)...(398): n = a,t,c or g
aaccagcacgtctcaatgtagtatagatttttatggttacttcgcatctcattacataaattgcaaagatttgaccacattggagttcttatttccacaaaattaaccatgttgattgattaatgtcccatagaatattttgtgcttttggcttcaagttctttgttgcagaaccttgctcatgaatgacaaagtgaatgagtcttgtgtgtggtgtttttaaaacttcttataagagcagctgccttaccagtggttgtacttgaacagttttcgatagaacactattttttattaaaaaaataattcacagctgggcaccatggctcacgcctgtggtcccggccctttgggaggctgaggtgtgtggatcgcctgaggtcaggagttcaggaccn

SEQ ID NO: 107523 - DNA, 394 bp, Homo sapiens
acggggtttcacgacattggcctggctgttctcgaacttctgaccttaggcgggccgccagcctcggcctcccaaagggctgggattacagacgtaagccacagtgcccagcccacccctatattttaaatcgtgtctagattgcatatcatagctagtcccatgtaaatactatgtaaattgttgttactggctgggtgtagtggcggtgcaggcctgtaatcaggaggctggggtgggaggattgcttgaactcagaagttctagaccagcctttgcaacacagcaagaccctgtctctatttttaagcctgtaatgccggcacttcgggaggccgaggtgggcggatcgcttgggctcaggggttcgaaaccagcctgtgcttcatggcgg

SEQ ID NO: 107524 - DNA, 398 bp, Homo sapiens
tcgctcaccttccatacagaagcactttgcattttagcgagactctgtctcaaaaaaaaaaaaaaaaaaaaaataaaaaaggaaataaaaaataaaaaaaattttttaaaaaaaaaggggggctttttttcccccttttttggaggcccagggggggggatccccccataataggttttttaaaccccccttcccaaagtggggaaccccccctttttataaaaaaaaaaaaaatctgcccccgggggtggggggcccttttttcccccactttctgaggtgtgggggagaaaaattttttaatccttggaggggggggttgtaagtctccaaaaatcccccttttttttctttcctggacaaaaaaaagattttttattttaaaaaaaaaaaaaaaa

SEQ ID NO: 107525 - DNA, 616 bp, Homo sapiens
  misc_feature (1)...(616): n = a,t,c or g
aattcccgggtcgacgatttcgtcggtgtagaaaatggcgctggtgcagcggctcgggcctctccccgcggcgctgcggagggcttgaggctcgcgagcctccttcgccgcgccccacttgctcgtgcactttacacacatgagagaattggaagctaaagctaccaaagacgtagaaagaaatcttagcagggatttagtgcaagaagaagaacagttgatggnnnnnnnnnnnnnnnnnnnngacgacaagaaaaagaaggaagctgctcaaaagaaggccactgaacaaaaaatcaaagtgccagaacagataaagcccagtgtaagccagcctcagcctgccaactctaataacggcacttccacagcaaccagcactaataataatgccaagcgagctacagccaacaatcagcagccacagcagcagcagcaacagcagcagccgcagcagcagcagccacagcagcagccacagccgcagccgcagcagcagcagccacagcagcagccacaggccttgcctcggtatcctcgtgaagtacctccacgatttcgccaccaggaacacaaacagcttctaaagaggggtcagcattttcctgtggaattc

SEQ ID NO: 107526 - DNA, 421 bp, Homo sapiens
  misc_feature (1)...(421): n = a,t,c or g
atagaatactggaaatttaggattttggaggataaacgcatctaccaagattagctttagagcactcattcaatgctcatctcacttttgtttttaataatcctgaatatcacttgttgaaatacagatttggacttggctttggctttgatagtgcgtgtgttaactagtgatgacaactttaagaattggggctgggttcagtggctcatgcctgttttcccagcaccttgggaggctgaagtgggaggttcaagtgaagccacgaatttgagaccagcctgggcaacatagcaagacccattatctacaaagtttttattaaaaaattaaaattattggggccagtctaatcacttgagcccttanaagcagagaagtttctccagctaaagtcagatgtgcagcagaaaaggaaatn

SEQ ID NO: 107527 - DNA, 421 bp, Homo sapiens
ctcctgcctcagcctcgagtagctgggattacaggcgtgagccactgcgcccagcctatttatcttttacaccatatttttactgtactttttctatgttagatacacaaatacttaccattgtgttacagttgccaacagtattcagtgcagtatattggagtcaaaattaaaatatagagacaaatctctaaatttatcatgttatttgggataccagaattgcagcttcaggcatacaaacagactgactggtcttcaatatgtccaaagaacaaagaggaggttgcggtgagccgagattgtgccactgcgctgcagcccgggtgacagtgcgagactctgtctcaaaaaaaaaaaaaaaaaaaaggggcctggaaattccctgggttgaaggaaaaaggggggcctcacgggggcc

SEQ ID NO: 107528 - DNA, 609 bp, Homo sapiens
  misc_feature (1)...(609): n = a,t,c or g
cgcgccgtcgagctcnagctgatcacaatgaggcgcatncgcagagtctactggacgggagagtaaatagtcggaagtcctcaactcctctcncccccccccccccaaggtgatagttgcctacgtagnggcaccgcacgggactctccggtatgacgctagcagacgaatacagagtatagcccacaggccaggcagccttgaattctggagtcccacaggaggctaggctggagcgaggcccttccagagaaccagcttctctgcagagcctcctcctgggagtcactgggcccacctgatccaccctgcctcaagcccccgtctcctgccttctggggagctgctgggggttggagggcaaagagcaccagcgtctctgagcctgtccccgtgggtaccctgttggtggctcttttcttggagatggccgtggggctgcttttgggcctgcctttctgcttccactctttgggggcgccccacctcctgtgtgaaccagatgggcccagtgtgttacccgccgaggctaggcagagtcggtgagccataggccacgttttattcctcttgccgagggagggcatgtctgctgctggctgggacacg

SEQ ID NO: 107529 - DNA, 415 bp, Homo sapiens
ctgaatatcagcaatatcaggatgccacggccaaggaggaggaggatgaggagtatgctgaggaggaggtggcctagaactctccttttctaggtaaagcgggggaggcagtgtgtattcttcactgtgttgtgacagctatgtgtcactacgcacttgttcatttgtgtcttcacatctcctgctgctgcattttaaagcacttttatagtgtgcagttttgactaataaagtattctcacagcaaaaaaaaaaaaaggggggggccgttaaagaggaccaagtttaacgcccgggggcgggcaaggtaatattttttttatggggccccaaaaatacattccggggcccgcggttaaacaccggggggagggaaaaacccgggggtgccccaaattaaaccccttggcaccac

SEQ ID NO: 107530 - DNA, 404 bp, Homo sapiens
  misc_feature (1)...(404): n = a,t,c or g
agctgactggtctacgcacggccgaagtatgaggtgaatcatcgngggactcattttccttataatttggacttgtatagtaaaaacttccactgattttccccgcatggaggactgctctcagtgtatacatcaggttactgaggagagcaacaagaggatgggattcctctcctattatgcaaacccacaccatggatccagcagactactctggccccagcatgctgctccttgggatgatgggagaagggggaaacctgtgttttctcttggttttgtaagtttcccctttccccagtaaaactcatcccttaatctagtggttctcaaactttggtgtgtatcaaaattatctggtaggctggataaaacacagattgctgtgccccacttccagaacn

SEQ ID NO: 107531 - DNA, 1768 bp, Homo sapiens
agccagggagtatctttggtggggagtgtggaggattgcatgaatctccctgaagccagtccctagggcatggtttagtattcttgttgtctagggatctgtgagggctttgatttgggggcagtgactttctttttacatccccattttatttttgtgagaacttgggagcctgaactcccatccataccactgaatagagattttgagtaatgatacttgtttccaaaaaaaaagaaaccatacatagatacgtatggattggagtcattaatatcctaggcaagaaacatggaagtgaagacttctttctctgcaagggaaaccgatgatcccactcctgggaaatagtagggaaacttggtatgtgtattcccatgtgtcctctagggagttggtaatggttaacctgacttcagcttccaggaattggctactcttcccgttttctatagtcatttgaatccacgagcttgatttgcactaatttgaccgacattgattttgtgtgtgacttggtttatggggccagctgactgaagtaagcagaccttttgggcaaaaatatgctttgacagtggtctcccacctatttgttccactgtctgccttcccctgggttacttaaaattcatcaccttgtccaactggaccttctttccttcctgctgaagttgatttgaagtaaaaccttagatttgatgttaaaacagttgtcaaatctgttggtaaataagatttgaaggaccctactctgtctcccttgaaaaaggggaggaatgtcagtgttactgtttttggaaaaagtagatttttaaaccgagtttggaaatggtaagtatgcagaggtgggtgggggcaatctcaaaaacgtgcaaaaatgaggaaaacaaaaatgaggaaatgtgtgcgtgtgtttaatgcaaaactttaaaaaagaaaacaactgttatgtgactgctaacttgctctgcattttatgtgccacaggtatgaaaggtgacattgcaaaatactccgctcttctcgcagtgtagaaaggggtgaccccgggggttgggggagatcaaaaacagctcagtagttaggacagagcttagctaagtttgtcttgctttaaggggaagttgcctttggttttgactttttatggaatggggttgggtctgcttgctgctttcaaagcaaaaaccacaaaaatgtgttcaaggctaccccagcctggtgtgaaatgtcttctgggtaaattggggtagggtttttaaaccaactacttggttgtcaaccacttgcgacaagaggaaaaaaacatctgctccatcggaagaacgaccaaggaaaatgggttattttttttccagaggaaatagataacgtaaccttttaaagcaaaatctttataaactgtgtctgagaaattgcacacgtgtgtgtgacatgctcaaaggtcagacaaggggtggtcaggaagggatgtattttagtagccacttgtatctttttccaaaaacacctacccatgtttggggaatgttaaacaaaatcaaaaaacaaccttttgtagccgttggaagcttcatgtcctttcttctaacttgtcttctccagcggaagtgaccgtggtggcttcaataaatttggtggtaagtgaacagagtttccaaaattcccaactcccagcaatgctttgtctgattgttcatttgcagatgtcttagcgtgttaatttaaatgtcaaaggttttgaggtgtccagaaccacctccag

SEQ ID NO: 107532 - DNA, 411 bp, Homo sapiens
  misc_feature (1)...(411): n = a,t,c or g
cccacgcgtccgctttgtgctatgtttaagtctgccagcatggaataagggaagcatgactgaggagtaggtgcttcatgcagtgtggccacactccttctgtggccttgcctctgccctttatagcaaccagtaacacacccaccaaacagaaccatgtgtagttccatgatctttctctttctttatctctgtttcctatctctttctccctttccatctcatttatctctctatgctcccccaaaaaaaaaaaaaaaaaaaaaaaaaaaaaaaaaaaaaaaaaaaaaaaaaaaaaaaaaaaaaaaaaaaaaaaaaaaaaaaaaaaaaanngggggggggggcccctttaaaaaaaaaatacatttccccccgggggggggaagaattatttttttttattgaaaaaac

SEQ ID NO: 107533 - DNA, 929 bp, Homo sapiens
  misc_feature (1)...(929): n = a,t,c or g
ttttggtttgacacttgttagccagcatttagttcacaagcatagtgaaagtgaccttcccacacctgggagagggatagaggagggagagccagcccagtgtatgccatgggcttatccgtggcagccccagtgtgcaactatcaaaaacagacatcaaaacagcatggtgaatgcctggcactcagcattctcagtttactcttcagtttggtggggtagctcctggactagatactgctgcaaaaagaaaacaagcacgaagggaacccaagatgatttcttcgggctgatacaacctgttctgacctgcaaaaatcctaccttcccccacctccccaccgtaatagtcatagtataagggttgtacagacgcctcaggagacctgcctgattcctttacatccttctccctaacatctagactatctctagagctgtttcctagtcgtgaatgcgtgatggtccttctttgtccctgcaagtatgatccaacatggcccagttcagaatcagaatatgtcttctgtgtcatggtggcatttggtccatggtgggagaaagaaatcaacttttcccagtggtggagtgaggacaggggagggccggccctctcagccttggatgtgatccatttgctgtagtcttccaccttggtgtacagaaacaggccagggcacgtctcaccaccgaagttcaggactcctctcagaacccacagatcgaactgctgtagctggcacatcattgggcttcctgggtccccctgtgataaaagacagaaggcttcaagtcttagaaaaactagtttttgttgtaaatctatccttgtgcaatatactgtttgttctnnnnnnnnnnnnnnnnnnnnnnngggggggggccgttttaaaggaacaaattttacttccgcgggcgggggaggtttt

SEQ ID NO: 107534 - DNA, 433 bp, Homo sapiens
  misc_feature (1)...(433): n = a,t,c or g
nnnnnttttagtgcttttctattgcttaggaagacaatacatacaaagcaaagcactataaagttagattaacatattttggcattgtgtgttattatatgttatcttgtatgcaatatcacaatttttgttgtttccctgtgtcaaaaatatagcttcctggctaggctcagtggctcatgcctgtaatcccagcactttgggtggccaggcaggagaatcgcttgagcccaggaatttgagacctgcctgggcaacataatgagaccccatcgctatgaaagaaattaaaaagcttatgaaaaatctaagagatggctgatatgccttttaggaagaagaaacagattcctgagagttcattacaacaagtgtattacaatttttttttccggcttggattttgaacctactgcacaatctgtcctctcat

SEQ ID NO: 107535 - DNA, 418 bp, Homo sapiens
cttttctgaatattaaactcaactgaggcccccatatgtcaagtaaatcagaatgggggaagggcttgacatcagtattttttgaagctcccaggtgattacaatatacagctgagtctgagaaccatgaagtaaatataaaccagcagttctcaatgtagtggcaccaggaccagcagtatccgcaatgcttggggaattgctagacatgcgccttccaggggccaggtgtggtggctcatgcctgtgatcacagcactttgggaggctgaggtgggataattgcttgagtctgggagttcaagaccagtgtgggcaatatagcaagacaaagtctctaccaaaaaaaaaaaaaaaaaaaaaaaaaaagggggggcccttttaaaggaaccatatttaactcccggggggaggaaaa

SEQ ID NO: 107536 - DNA, 406 bp, Homo sapiens
ttgttaaccattttaaaggtataggttctggaggcttaacaatggctgccatgaaaaattatatcctaaaccctggtgggaattttgtccttctgcttgaagaggtttctttaacccttttaaatttttttctaatcccatgccaggcacataccccatctcttgcatcgtatgctgactttgagggctatataattgttctggaatgaacgcttgtgctccccattgctgtaataaatctcttccccataaatttataggtacagcagttacaattggttggctgggattacaggtggagccaccatgcccagcctacatttatatttttgaatctgggtatttaatagagattggaggtcaactttctgtgttttttcatgggctatcattttttaatggctta

SEQ ID NO: 107537 - DNA, 404 bp, Homo sapiens
  misc_feature (1)...(404): n = a,t,c or g
aacaaattttactggcttttttggtctggaaaaatatattttcaaagggtataaaattttaggttgacgtcatcttttagctatttaaagatgtcattctggctgggtatgtggctcacacctgtaatcccagcactttgggaggccaaaacgggaggattgtttgaagccaggagtttgagactagtatggtggcaaagcaagaaagcaggatcccatctctaggaaaaaagaaaacaaagaacaaagatgtcattctcttttctgcagnaaattttatctttgttcctctggaaagtttctttttccctctggctactttttttttttttttttaaattcctccggcccccttttttttggtttttttttgggggaaacggttttctttttccccccggggg

SEQ ID NO: 107538 - DNA, 1500 bp, Homo sapiens
  misc_feature (1)...(1500): n = a,t,c or g
ttttttttttttggagagaaatgcaggagctttattataaatcatttaatattcttgaagttaacaactgataaactcatttaggcaaacattttggatttaatgatctaaagctcacagatgcatgccacatctagctaaaagtacataaaaagcgcacctctggaaataacagccctccctctggctgaagactgagaagcattaaggatgcttctggatttctgcagcggcagggcaggggtctgctttgtcctcccgggtttttttggggggcgcccccggtttttccctcctgctccgttttaaaacccggcccgtgctttttattttgttgccccctnnnnnnnnnntttattttcccatcccggggaggtaaactttggtttttttaaaggggcccccccnnnnnnnnnnnnatttttttttttttggtacaaaaggtgtctttattgaggtctgggttaaaattaggcacttggccagagcagcagcttaaatatgaggcaagcagtcaggggttagccatgcctggggctgggttggggtcatgaggcttacaggcacagactgtccccaggtggacagaagtttggagcaggaagaggaggaggaaggggccgcagagcagcctgggtcaaaagccctggtgggccgagcccagtgggactaggcaggaagctctgggtggcaggtccagcagggaggggaccaggatctcttgctccacgtgccccttagacccaggcctgagcctctggcagggggcagccgcacttggcagggcggtcttcccaagcctcacttcttcaccttggcatcgtaggtgcctgcattcttgtaggcgctcacgtagccactgtcgtccaggatgtcctgccgtcccgcaatgcccttgcccttgccgctctcatcgaagcgctccttgtgggagcccgtgtatctgctggtgtccgtcagccggtctacagcaccccctgtttttgctttagtgacgcccacattggctggctctttgcctgccaccagctggcagatggcatcgaaggcctcctccttgctcttccccttgaatctcttggtcgccagctcttccagggccttcttgaactcctcatagttgatgacccgagcagacttccccttgactttggagaagacgatgtccacatcggtccctgtcacggactttccgtcagccaccttgcagtccttgcacagcttggcccagttcttgccattcatctcttgcccactggccttggggtcaccatggatggcaaacttgcggaagctctcctccagcccagccatgtctgtgctcgctgccatgccaccctcgcggctgctcctgaagtgtgcgttcggaaggacagaacgacgcaggaatggaccgatggacgcgggagaccaggcggctccacagctccgctccctgccggctccccggacgctggtcgcccggnattcggcgngttccagactcttaagttcatcaag

SEQ ID NO: 107539 - DNA, 406 bp, Homo sapiens
gattacaggtgtgagccacctcgcctggctgaatgttatctgttttaaaacaaagaaaggaaagctctttgtatgtacaaccggggtttgtgatcacagtcttaaagatgacttgatttttgccaggcacggtggctcacaagtgcttgtgatcctaatactttgggagactgggatgggtgaatctcttgagctcaggagtttgagaccagcctgggcaacatggtgaaaccccatctctacaaaaaaaaaaaaaaggggggccctttttaaagaaccaagttttacgcccgcgggcgggcaaggtaatattttttttatggggccccaaaaataaattccggggcccgcgttttaacaacggggggagggaaaaaacctgggggttcccaaattaaatcgcctg

SEQ ID NO: 107540 - DNA, 390 bp, Homo sapiens
cggtgataagaacgttctcttggaagcgtgcggaggatgcttctcaatgctgtggttttctgagacggtctcgccacattgcccagactggtctgaaagtcttgggctcaagagatcctcccgcttccgccttccaaagcgctgggataacaggcgtgagccgctgcccgggccatccctcgaggaagtttcatcagaagaggattccaaggccttagaggatgaaagggccatgagatggaaagatcctgcatcctcaaatgaatgcaaggggccaacgccctctctaccaaacccaacatgagaaagaaagaaactttattctgtcaagccactgaaatttgggagatatatttgttatagagattcacctgtatcatgtcaacttct

SEQ ID NO: 107541 - DNA, 418 bp, Homo sapiens
ctgttcttcagtcaccttcctaagagaatctggttggcccagctaattaccgttgtccttgtttcggaagaggctgtcaggcctggctcacgctggtcattggccaacctgtctgttcccttccctgggatctggtgcccatccctgtccagtcacctgtgatacagaacaggtgtgcccgagactgctacctcaccagggccagggagaagaggggcaggcaccatacaaatacaagcctggtacgtgtgccatagcttgctttgtgcacccctattggttttataaacgttacattagataaaggaactgttttccacctctataaagaatttggtgagaccagcctggccaacatggagaaaccccgtccatactgaaaatacaaaaattagctgggcgtggtagcacatgccta

SEQ ID NO: 107542 - DNA, 406 bp, Homo sapiens
  misc_feature (1)...(406): n = a,t,c or g
ttataataaagatactaattcatctttgtcatatctggtgcaagtgttttcttgtgacttctttgccttattttctatagtctcctgagcttttaaaaaatgatttgataaccactttttttttttactggggttaatatatattggctgtaattgaacatggctcaaaaaatattttcaaagtactaaccagttacctccagcccacttattaaacgttcagcccctcctaccttttgggctgcctctgctccctctgaaaaaaaaaaaaaaaaaaaaaaaaaaaaaaaaaaaaaaaaaaaaaaaaaaaaaaataaaaaaanngggggggggcccccttaaaaaaaaaaaatttttcccccccggtggaggaaaatattttttttttttttgggccccctaaaag

SEQ ID NO: 107543 - DNA, 407 bp, Homo sapiens
aaaagagtcaagtacacagaagcagagagttgcatggtggttgccagaggctgcagggaggaggaaatggggagcatttgacaggtggagctccagttaagcaggatgactgtgctctagagatctgctgtataatgtaatgactatatttagccatactacattgtacactcaacagtttgttaagagggtagataaaaaatttgttaagagggtagatctcatgataagtcttcttaccacaaaaacaaaaacaaaaccaatgtccattgacaggaaaatgggtaaacaattcatggaatattcataccctggaatactattcagcagtaaaaggaatgaaacaactgatctagacccaacagtatgaacaaatgtcaaactcactctgttgggcaaaagagccc

SEQ ID NO: 107544 - DNA, 569 bp, Homo sapiens
  misc_feature (1)...(569): n = a,t,c or g
gagctnntnnnnnnnnnncttgatcanctttcgntccctactccgtgtggtggaattcgaggtagcatccaggatgggccccatgctcatgcctgggtgactgggtgcaccgcggggttgtctctggagtcgggagggaaggggaggaagaggttccggggagactgctgaggtcagtctggctgtgggaagggggggggaggcccagtgtggaagagagatgctgaagatattggatgaagctgcaggagtgagcgcaccaaatgaggtggacacacagctgaggaacgccaacgtcgaagaggaaaaaactctgcaaaggacgcggagaaaggtccagcaaagaggcagagggaaactatccaggtcaggggcagccatggaagagaccggagcaggtgggagaaggccaggaggccaggaggctggtgttgtcttcttgaggagggagctgccgggagcccacccccacgagctgaaggcggctggngctcangtccttccccgngacctcgatgcctgggaatctgccttatgaggcacagtacagagaagatcttgtcccngtn

SEQ ID NO: 107545 - DNA, 567 bp, Homo sapiens
  misc_feature (1)...(567): n = a,t,c or g
gagcccngnnnnnnnnnnctcgnaccntcgttgagtgtggcggaattcaattcttgttttttcaaattcctggaaatctacttgattttcccctttcaacccacaattagaattaagaactaagtgtgcattttccgtataaaacatcttgacccctataaacccaaaggcttgactaattttgcaagggaagggtatattaatgtttatttcttcctgagttgtctatagcagcaaataataagatcaagctaaaacaaaattacttaaatttcttcatagctcattttgttatattatgttctccattatcactgctgggtgttattattaatattgttaaacattaatggccaggtgcagtggttcatgcctgtaatcctatccttttgggaggctgatgtgagtggatagcttgaggccgggagttcgagacctcccaagtagctgggattacaggtgcataccaggacgcccagctaatttttgtattttagtagagactaagtttaccatatttgcctgtctttgacctcctgacctcaatgatctgcctgtttggtctcc

SEQ ID NO: 107546 - DNA, 498 bp, Homo sapiens
  misc_feature (1)...(498): n = a,t,c or g
aggggccnnnncactgaatacatgtactctncgccgngncnnggaanattacccagctcctcctgagtgggacgaagtgagcatactgctccctctgtttggaatgtgcccctcctgcctcaccacaacctttggagaggtagctattacttctcctttcactctctactcaaaaatgccgcttcctacaggaaagtctttcctggaattcccacccctaatgcaactccaactccctaggatagatgagaatatgtctgtatttggtctcatagttccttgtacttttcctccagtttatatatacatatgtgtgtgtgtgtgtgtgtgtgtatatacatatgtgtatatatatgactgttggcgtgtacatatatatatacacaaacacacactcacatagtcacatgtcatgtcaatgtctagataagttgtgccttataaccaagagtgtctaattagacaaaacacccagacaggggtttattcattctctcn

SEQ ID NO: 107547 - DNA, 485 bp, Homo sapiens
  misc_feature (1)...(485): n = a,t,c or g
ngtgtgcctggagcatagangntctgtggaannncngcccaccccgcctaggaaaggcggatcctttacgtctgaccctctagcaacccctgggccggtctgggaaagttccccagctgcacttgtgggaaatgcagaggctgcctgccgctttctttcgcagttttgcggcccaaggcttgggcgaatcagttcacatcaacacccctactagcctctccctccggggtcgaccatttatctccagcagcggaccaggcgcccgggccagggtgacatgcgcgccctgcctacacgcagctcggatcctctgctgtttctggagaggcctccacaggctgaagtgcagcaacgtgatctcagctcactgcaacctccgcttctcaggctcaagcgattctcctgcctcagcctcccaagtagccgggattacaggtagaagctccctggaacaactgctggaataaggttccagagtggaaggg

SEQ ID NO: 107548 - DNA, 477 bp, Homo sapiens
  misc_feature (1)...(477): n = a,t,c or g
gcgcgtttgagtcctagcaagtgtggnggaattctctagctgtattgacgaagctggtcttgaacttctgggctcaggtgatcctcctgcttcagcttcccaaagtgctgggattacaggtgtgagccactgtgttctgctactttttttaaaattatgaaatatttcttgcatccagaaaataatagaggatagcacgtagtttttcacatatttttaatggttaggaatttaaatatttaaggaatggtgtcaaaacactgtttatcattatggtgttaattgtgaaattttataaaatgaacttggtttataccattttaattggtggcaattttagttctatcaaaattttatttaactttgggatttgattttttttttttttttttgaggaaagncnnncttttccccccaggctggaatgccggggcaagacttgggttcactggaatttttgtcccttggtacaaggcg

SEQ ID NO: 107549 - DNA, 1347 bp, Homo sapiens
  misc_feature (1)...(1347): n = a,t,c or g
ttcgtcccgagttctcctagctggggctgcggagctggggggagggaagagaggaaaggggagggggtgcctggagaggcggaggctcgcgcgcctgcgcatccagctccagggaccctaggttttctatgggattcccaatctgcagcagagatttacccgagcgtgttgcggcagcggctgggcttgcaaggcgcgatccaagagggatttaagcagcccagagctccagagaaaaagagagcgagagagaaccacacacagagacggcttaagcgtttacccgaattaaatatatatttttaaaaagaactgttgagttttatcattttcgttaagtgaccgtgcgcagcgctgtaactgcaggatggggaagcagaatagcaaactggcccctgaagtgatggaggacctggtgaagagcacagagtttaatgagcatgaactcaagcagtggtacaaaggatttctcaaggactgtccaagtgggaggctaaatctcgaggaatttcagcagctctatgtgaagttctttccttatggagacgcctccaagtttgcccagcatgccttccgaaccttcgacaagaatggggacggcaccattgacttccgagagttcatctgcgctctgtccatcacctccaggggcagctttgagcagaagctgaactgggccttcaatatgtatgacctggatggtgatggcaagatcacccgagtggagatgctggagatcatcgaggctatctacaaaatggtaggcactgtgatcatgatgaaaatgaatgaggatggcctgacgcctgagcagcgagtagacaagattttcagcaagatggataagaacaaagatgaccagattacactggatgaattcaaagaagctgcaaagagcgacccttccattgtattacttctgcagtgcgacatccagaaatgagctgatgtcaatgctatggactgcacaaaagtctcaatgttccattcagtctgcagctattcacacacacacacacacacacacacacacacacacacacacacacacacaaatattgcttggactacctataaatggacttgctttttgtgtttgaaacactcgtgtgcatgagaatgtcatttgctaatgaattttaaaagcatatataaaacaaaaccaacccccccctaaaatcatttttttattgtacataacgacctcattcttctgtatatgcggaagatataaccttatatttggnaagtgtttcttgcgctattatatcacgcgacctgtttataaaaatatatattaaaaaaggtggaaaaaaannnaaaaaaaaacatcctccccccccgggg

SEQ ID NO: 107550 - DNA, 460 bp, Homo sapiens
  misc_feature (1)...(460): n = a,t,c or g
nnnnactctatttcgtcttgaccccggaagtggggtgtgaagctccggtgctggtgcggcgggggactgcggggccagcctcaggtagcagcagcagcagcagcagcagcagcagcagcagcagcagcagcagcagcagcagcagcaatgtttcacttcttcagaaagcctccggaatctaaaaagccctcagtaccagagacagaagcggatggattcgtccttttagaagcatctcagaggctctccagcgacgtgctgttaaaagtgctgaccctgggtcacaccctttgggttggcttcgtggctccacgacttactctctacccttggcaggagatacaacagatgagcaaagaatgacagcaggaggcaaaacttctgacatagaggccaaccaacctttggagaccaacaaagaaaattcatccagtgtgactgtatcagaccctgagatgga

SEQ ID NO: 107551 - DNA, 380 bp, Homo sapiens
  misc_feature (1)...(380): n = a,t,c or g
cggccgcgtcgacctccactattgtcctatgaccctgccaaatccccctctccgagaaacacccaagaattatcaataaatactaaaaaaaaaaaaaaaaaaaaaaaaaaaaaccccccccttaacagcttatttagggggaaaaaacaaaaaactttctttcgaaaaacgggaacaaaacaaaaatgttggtttccccaaacctatccaaatttggacgggaaattcccctacccggggaagggggacaaaaggttaaattaaaaaaaaaaaaaaaaaacccttgaattaaaaaaacttcccaattaaaagggaaaaagtcnaaattttttgccaaagggaggggccaaaaaaaaaaccaacccgttgcccaggagcct

SEQ ID NO: 107552 - DNA, 469 bp, Homo sapiens
  misc_feature (1)...(469): n = a,t,c or g
gagagaggcccgcctgaggaatccggcacgaggagagagagagagagagagagagagagagagagagagagagagagagagagagagagagagagagacatcccgcccgtgagatagatatgtgtgtctctaagagagacacgaggggggcgctgtgtgccctcttttaaaaaaaaagaggagtatgtacacacacacacgtgtttataacacacccgcgcccaagtctgacgtgcttctccacacagacactttttgtgccctctttaagagtgtggcacagtgtgtagcaacacatatatatttctttttttttcaaagagtgagttcagagggtgactctgtctacgccacgcttgtggacaggtgcctacaaagaagagagctttttttttacacttttttatctctagccagnacaacagacacccgtgctttacacatgaagattacagagggtgtatagata

SEQ ID NO: 107553 - DNA, 477 bp, Homo sapiens
  misc_feature (1)...(477): n = a,t,c or g
cgcgtgcacaattgatccggttngcatgacttctgcacgaggagagagagagagagagagagagagagagagagagagagagagagagagagagagagagagagagagagagagagagagagagagagagagagagagagagagagagagagagagagagagagacacacactctctctctctatatatatatgtgtgtgtttttatatatccctctttacttttcttttttatatatacacacacagagagaggcgccgccccccctctctgcaacactctctctctctatattatagagagacccttttttttgtgtgtgtgtgtgtgtgtatgcgctctctctgttttttttctctctccagagcgcgcgcgcgagacacttctctctctctctctctctcactctctgtacacacagagatatgtgtgcgttttctctctctctccccgcgcgcctctctatctctctctcta

SEQ ID NO: 107554 - DNA, 417 bp, Homo sapiens
gacgagggcaagggacccagctgaagcaaaggccgacagcctttaaagcgatttgttgctctgaggaacgctcaacggattggtgcagccaggcaactaaaagccattccttgatccactcttagagcccttggggaagaccacctccatctgtttaacatatggatgaactgaggcccatattaggccaagggtttctccaggtcacggcgaagtcgaccttacacaggaatccaaaactctaagcctataatgggcaaggctctcggggcgtaacgccggtaatcccatcactttgggaggccaaaacgggaggatcgcttgagcccaggagttggagatcagcctgggcaacatggcatactccccccgttcccgggcccagcaaagagatatctttatatatttaagcgggcg

SEQ ID NO: 107555 - DNA, 417 bp, Homo sapiens
  misc_feature (1)...(417): n = a,t,c or g
ctaatttaatcctcacaaaaactctacactagggttttttcctttttacagtaaaaacaacaacagcaacaacaaccacaacaacaaaatnccaaaaaaccaaaaacagagatttagaaactgccccaggacacacagctagtaaatgttggaatcagggtttgaacctagaccatctcattttttgctaccctatgaggaaagaaggataatttattataagagggttgttacagaatgaagggcagaaattcagaaggattacaggatgggctggaaccacaaagctgttgggaactcaggtcgtattctccctcagattcaactgtctgctttttagactaggtgtggtatccttgatgggcaaagggaatattggtaaaattacacaacagatcatttcactgatctcaactt

SEQ ID NO: 107556 - DNA, 456 bp, Homo sapiens
atgataacgcttgaaaagcctacgccaagcttggcacgagggaattgcttgaacccaggaggcggaggtagcagtgagccaagattttaccactgcattccagcatggccacaaagcaagactccaaaaaatatatatatatatgacaaaagggttaggaagcttttcctctgaggcccacgattacacaaccaaatcagaaaataatattttttttgttttaaacctgtttacataagatggaggtgtttacttaactaaaaacctcggtatttactcaaatccggttttgggttttatggctaaaacatttctccagattaaccttatcagtttggaatatgtttttattttccattaaatatttcatccaaatcatactgaattttatttatcatggcttttaatgttctctattcaagtcaaaattctgtttcctaattacttggcttggag

SEQ ID NO: 107557 - DNA, 468 bp, Homo sapiens
  misc_feature (1)...(468): n = a,t,c or g
gganattttttttgagacggggtcttgctgtgttgcccaggctggtcttgaactcatggcctcaagggatcttcctgcctcatgctcccaaagggttgggattataggcatgagccactgtgcccagctctaggggaccattttaattctctcttttttttttaaacatactaacaccaaccggaacctctgggttctttggctttattcttttgaggaattttctggatgggtacctttctcccacctagttcaacccctcaaaatcaccaagctaaaggatattaaggctggatctttttgtaaagacaaaaaccttttcatagggggaataaccgccccctgctatatttgtcatagtctgaaatcaaattgtcacatgttgtgttttctaggaatgaggttcctgttttaacgtaatacatgtcaggtaaaagggaagccagaaatagccattcaggagagaaa

SEQ ID NO: 107558 - DNA, 484 bp, Homo sapiens
  misc_feature (1)...(484): n = a,t,c or g
gcgggtcaaatgagaccctagttgagcgccgtattcgntctgngntattattcctttagataaaccttctacctctgtctctctctacctcctctttaagtccagtaattcttagatttgtccttttgaggctattttctagattttgtaggtatgctttattcttttatcttttggctcctctgtgtattttcaaatagcctttcttcaagttcactaattatttctttttttttctttttctaagatagagaaaggggtcttgctatgtaacctggcctcgtctcaagctcctaggctccagtgaccctcctgccttggcctcccaaagtactgggattacaggcatcaggcaccatgcccagccactaattttttcttctgcttgattaattctgctggggagagactctgatgcattctttaattttgtcaattgaatttttcaactccagaactttctgctgattcttttaataattcg

SEQ ID NO: 107559 - DNA, 2069 bp, Homo sapiens
actgggacagccctgaagccctgagccctcaactcaatgaatggattgtgctggtgtagacccacagccatccagctctgtcactgatgaaggtctgaactgccatactctgcccctttggtgtcagccttaaaggtcagttttaggtgagtttcaaccagtggctgtagatgggtcctttgtttaccagtttccccacatcctgtctgagaccattgctagtttttgtctgcaccagtcttagggaaaacaacctggacaccgtgggtgagatcaccagtgggctccaagccagagcatgggcctgggacagggtgggttaccttggcatactctaacatactcaaacctcatttcttttggggtgatcagacccaacagcaggtcatgggggcgacgaagtccagtggagtccaaggaatgagaaagacagtttgagagacaaaatgggaccagggggctatcacaagtgtggaggctgcaacaaacaggtggtgaggatgtgggggttgaaaggaaacggtgtatcaagtgaatgagaaacatatggctactcgagaacatgggaatgctagaagcaaggagcagcaagtctagcaaacatgcaagccctgcctcagcttctctcccaacactcagcttttcttccaacacatttcatgtgcaaggttctcgtgcccactcctcttgtacagtttggcagcctcatggagcttccctggtaggaaaacacatctgccagaaacaggtcattgttggtctctccccgcttcttcctctcctggaaaaattagaagcaaaggaaatggcctctgcagccatgggcagaaagcagcctttacaaaggttagatgtggctatttcaagtgaggcccctgggccttcctactggaacctgggcttggctcctggctgttgtctctctcccctaggttcccgctgggaaggcttgataacaaaagcaggcttttaccagacaagcaaagatcaaaaaaagatgcaaacctttgtttgtttaatggaaattcctcagggttgctttcctgtgtattccaaagctatgacggaatagtttgaatagtgtgtgctctgactcatccatgacccctaagctcccaagatctcccaaatccgcaggccccgtttggcagagttgtggctcatggggatgacagagcagaatgtttagggtttctgcccaagagggagaccaataaaataggatgacaagtcttacgatgtccctacttctaaagagaaggtaagaaatcccgtgctgaacatccactaggttctgggtatatactttatacacacatggcccctttattcctctcagtgaccctcagggtaggtctcactacccaagtgttagagtgaaggacgctgagactcaagaagaggaacaggtcagggtcagacagagctggaatttggacacagttctgtctgactccagatattccttgtatcacacaatactgtcttctgaagcaagtgattgtccccaacacacacacacacacactctctctctctctctctctctctctctctctctctctctctctctctctcagcagagctgaggataaagaggaatatcctgcacacttcttccttctgtgtcagggaacatttgcttgtctacagctcgagtatttgtaaacactcagtagcacccaaaccctgagccctagcagtttccttttgcttgtttactagcaagagtagcatgtcggaggacgatgagacattgaatcaaactcttagacaagctggtgaaagttttaacgactgctggaggcaacatgcttccacactgacagaaatcatctttcaaaaatcctgcacatatctcaggcttatgaaacaaactaattcctaatagttggaaatgaattaaaagcttgcggtgagataaaagatagattttggcgtggatgtgatgactcatgcctgtgatccctacactttaggagggcactagcaggaggatcgcctgagccctaggaattcaagaccagcctgggtcgacatagcaagactctctctctgcaaaaaaaaaa

SEQ ID NO: 107560 - DNA, 493 bp, Homo sapiens
  misc_feature (1)...(493): n = a,t,c or g
cgatgggaaaatgaggaactgagaccnctcggccggaccggaagncccgggacgacccacgcgggcggtggaggttgcagtaagccgagattgcgtttttgtacttcagcctgggtgacagagcaagactctgtctcagaaaatttttgtagacatgggagctcgccatgttgcccaggctgatctcaaactcccagcttcaagtgatcctcctgccttggctcccagtgctgggattataggcatgagccaccatgcctgatcacctttaattttaacaagttgtgttaaaatgtaacagttgtggcattgttaccagattttatttcactcaacctgtgacttacatacttaaaaaaaaaaaaaaaaaaaaacccccctttaaaaaatgtgggccgggcccggggggggcccctcttccctaaaaccccaccttttgggaaggctggggggggctgttttaaaactcctgacctcgagacccaacatgaan

SEQ ID NO: 107561 - DNA, 482 bp, Homo sapiens
  misc_feature (1)...(482): n = a,t,c or g
ggtgaaacgtaatctggcgtgcgcaagagcnncngaannnnagggtcgagccacgcgtacgatgccttcttatttgcgaagtgctttgatttttattttaaaggtgttcctatgttgtattctacagataggcttatgatgaaggatccctgttaatctggggtgtctttaagcaaagccatgtttgtgagactgtattatatactatgtttattagacgtctaatcagtgaaatgaatgagaccatttttaaaattgttttctctgtaccgtgctacagattgagggtgatataaatcagtgagaacacaggattcctgtgctcatggagttgatcgtctagttgggaaaataagatatgtgaacttatttgtttacatatgtcaacatagtgatggccgaacttggtggctcacgcctgtaatcccaccactttgggagaccaaggggggcggatcatctgaggtcgggagatcgggacc

SEQ ID NO: 107562 - DNA, 500 bp, Homo sapiens
  misc_feature (1)...(500): n = a,t,c or g
catgtctacaatggcatcagagctgtcacgccngcacgnaccggaccggaactgccgggtctattggaggcaggaggcgcgtaaatgggcccagttatgatcaagtaacttccttggagcttgncancctggagctgatactaggactctgagggcgaactccaaancccatgcttattctgtaaagcctgaagagtgtcttataattgatttagaagtaggagaagagggggaacctgtgagattacactgtcttccagcataacaagaaaagagaaaccagttggatgcggtggctcacacctgtaatcccaggtgtgatggagaggccgaggcaggaggatcacttgagcccaggagtttgagtccagctggggcaacatagtgagatcccatctctaccaaaaaaaaacaaaaacaaaaaaagaaaaacagaaacccatgaaatgatccatgggtacataggaagggagagaaacttggtcctatggctgtggaag

SEQ ID NO: 107563 - DNA, 496 bp, Homo sapiens
  misc_feature (1)...(496): n = a,t,c or g
cggtgtctactgagagctcatgatcatcgaccggnccggaanncccgggccgaggggaggcaggaggcgcgtaaatgggcccagagagatcaagttactttcttggagcttgtcagccttgagctgagggttggactctgatgtcgaactgcgaagcccatgcttattctgtaaagcctgaagagtgtcttataattgatttaaaagtaggagaagagggggaacctgtgagattacactgtcttccagcataacaagaaaagagaaaccagttggatgcggtggctcacacctgtaatcccaggtgtgatggagaggccgaggcaggaggatcacttgagcccaggagtttgagtccagctggggcaacatagtgagatcccatctctaccaaaaaaaaacaaaaacaaaaaaagaaaaacagaaacccatgaaatgatccatgggtacataggaagggagagaaactggttcctagggctgtgggaggaatgan

SEQ ID NO: 107564 - DNA, 414 bp, Homo sapiens
gcgccggggcacttctctccactttaaccaccaaagtatactcctcagctgttcccattgctctttggatcagaaccaagattcttaacttctttttgtaacctgtaagggcatcattcagctctcacctttcagagattgccctgcttcccatctggttccgtgtgtgtgtgtgtgtgtgtgtgtgtgtgtgtgtgtgtgtgtgtgtgtgtgtgtgtgtgtgtctatagataaacactctgtgaggccatgagccgcacattcaagctctcttacaagaattcttctttgcatacagcgtgtgtctttcacagcatatatctctgtgatacagggaccagatatcagaccagtgtggggagcggctctcacaaagagtgactctgactgtgccgcctctcttatttaagactt

SEQ ID NO: 107565 - DNA, 402 bp, Homo sapiens
cggacgcgtgggccttgaaatagcaacaattaccatgtgatctggcggatgacgcagcgcttgtaactggatcctaaagagtgtgagtgtgtgtgtatgtgtgtgacatttcgtaaatattaaactgcctttagacagtaacctgcacaaattcatcttggtctttgacttttacttcttttctatttttgatgcctggatggattcaaaaaggaaggcgtgtgtgtgtgtgtgtgtgcgtgtgtgtgtgttaattactttgaagtctcatggttctgaccctagtaagaatgacagggcaataccagttccaaggtttttcagcgtaaagccttactggacagagtgaactaaaattgttggtggggaagttggatgaacatagggtcatgagccaaatga

SEQ ID NO: 107566 - DNA, 401 bp, Homo sapiens
tttcgtaaaaataggggaaaggaaggagaattcgtagaggcaattccctatttgcctcatccaatttcagcccatgatcgttctgaaatgattttttgtaaaaccaaaaaacagcagcaacaacaacagcaacaacaaaaaatacactgtctttggggactattgatggataggggcactcactttttcccttctttttccttatccagggaaccgaagacgtgtttgcaaatgtccccggtgagtctcttttgaactctcagcctgctcaccttggccagccctggggtggggtcctggtttccccagcagcaaatagtgggaacttttcccagagagaggtcacggccgtgaaatcctggggcagggagtcagccagttcctgagcaaagagaggccaa

SEQ ID NO: 107567 - DNA, 204 bp, Homo sapiens
tttcgtaatacatccacttataggagataattaaagtagttaaaatagagacagaaagtagaatagtgggttccagggtttggggagggagaatagaaaattattttttggctgggtgtggtggctcatgcctgtaatcccagcaccttgggaggccaaggcggacggatcatgaggggacgagattgaaacaacccatgtgtt

SEQ ID NO: 107568 - DNA, 429 bp, Homo sapiens
  misc_feature (1)...(429): n = a,t,c or g
ttagagaaaaatcaataatttacacatttgtttttctctaattcatattctgattgatcacatacctaaaaaaggggcaacaattgtgtaaattattgattttttaggagaaaagcaatgcagtaaaacataaaatagcactcctcaaaaaacataaaaagcataaagaagttgccatacttattccctctttagcatatatactaaatataaacatgctagagagctttagaaaagtctccttaggtcagtggttcatatgcctttttagtgcatgaaccccattgagaactgggtttaaaaattcatggatttcccagccaggcaccgtggttcatgcccataatcccagcactttgggaggctgaggcgggtggattgcttgagtcaaggagttcaagaatagcctgggcaatgtggtgagacctn

SEQ ID NO: 107569 - DNA, 421 bp, Homo sapiens
  misc_feature (1)...(421): n = a,t,c or g
cggacgcgtgggttattttttgagatggagtctccctctgtcaccaagctgaaatcgcgccattgcactccagcctggaaaacaagtgtgaaattccgtctcanaaaaaaaaaaaaaaaaaaaaaagggggttttttttttttggaagaaattttttttttttgccccaaaggggggggaaacccccaaaattttgcataatgaaattttttcccccaaaaaaaaaaaaaattttcccgcccccctttttgggagggggggaaaaagggggcccccccccgggggggaaaaaaatgggggttgggtttttttttttgggaagagggggttttttttttttcccccggaggaaagggggggggggaaatttttttttgtaaaaccccccccctaaaaaaaaaaaaaaattcctccccccact

SEQ ID NO: 107570 - DNA, 421 bp, Homo sapiens
ttccaggtcatgaacacaatgtttgacacttgaagtattcaggtctttttttatctctttcattgacactttataattttcattatacagatcctgcacatgttttattagatttatacctggctctccgcttaatactcgaagccttttttaaaagggtagtcaatgtgtatatttttatatgcatttgcgtgtatgagtgggtgggcatgtaggtacgtaggtaggtaggcaggcagatagatagatagatagatagatagatagatagatagatagatagatagataaatataaatgtgcttctaattctttcctctgtaaggccaagaagcaaaaataagcaaacatagcacctattctctaatttattccccactaaacggcccaggaagccttggagaaatggctgattacaggg

SEQ ID NO: 107571 - DNA, 580 bp, Homo sapiens
taaagatgggggtctcattatattgcccacattggtctggaactcctggccttaagcaatcctcccgctttggcctcccaaagtgctgggattacaggcataagccactgaacctggctgatactaactcttaatttaaccattgagctatattctgaaataatgtaacagtaaggttttctactcaacttcttatgccaaatcgatttcaggcagtacatatgctgtcaccacaccatggagaaacaatacttagaaatctgaagaggagggaaaagaataatccacacagataatgttaaataatatccaacagttcagtccctcatccctactttcttgtgtccctgccactctaattaagataagtaaatgggaagtggaaggaaaaaaatatttagtcaaaagttggcattcctggaaaaatcagaaatgatcaagttgatggtacttgttacccctcacctcatctggacatgaaatttccactaatgttctctcacattttctcatccactggagcacttacttctgtgcttgactcttgtctatactgtatttgtttaattttggtcagaac

SEQ ID NO: 107572 - DNA, 382 bp, Homo sapiens
aattgctgctgagtccctacctccctgctcccctggcaggccccaccacactgctccacactacacgtttcctctctttctgggggtcatcgacaggccaccaaggctctgctgactcaaaacaatcagctgatcttcagcagctttggggaacctcagacaggtcttactctcccaccatggagctgaatggctggggtttacatagcacttacacacacacacacacactcataccccaaatggagtcaaacaaataatgactcaaattccaattctaccacttactggccctcttatcttagagaagtttcttaatttctccaagcctttgtctcatcctggtaaaagggatccttaaatgcctggcatgatccaggca

SEQ ID NO: 107573 - DNA, 389 bp, Homo sapiens
agaaaaagctgaaaatatggtcacctggctggcagaaatgtatccagctattagccacatgtgttggcacgtgcctgtagtcctagctactctagaggctggggcaggaggatcactggagcccaggagttctaggctgcagtgagccatgatcatgccaccgtatcccatccctgggtgacatattgagaccctgtgtctaaaacacacacatgcactcatactcttagctaaaaatcaaagttattttgctaaagaagggaagactggattgggaggttgcagtgagcctaaattgcaccactgcactctagcctgggtgacagagcaagactccgtctcaaaaaaaaaaaaaaaaattttttgagggggcaatatgggccatattt

SEQ ID NO: 107574 - DNA, 538 bp, Homo sapiens
ctatttggaaaggtctctcagaactctaattacaaatatatgggaccttctttatattgatctcatttttaaatacctagtcctggaggaagagctaaatatgaatacagtgatgagctgtgtaggggatctcacaggaacacagtcagatttcaagttgaaaatagattcagttgataatacttagtactagattctcctgaatcgactttgggaattctgagtcaacctaaggactatattacaaaggatcagaccttgacttttaggccagttgtagtggctcatgcctgtaatcccagcactttaggaagccaaggcaagtggatcacttcagtccaggaggttgagaccagcctgtgcaacacagcgagaccctgtctctaccaaaaatacaaaaattagccaggtgtagtgtagcacctgcctgtagtctgagctactgaggaggctgaggttggagaatcaactttaaccccggatatggaggctgcagtgagctgtgatcatgccagcctgggcaaggagcaagaccctc

SEQ ID NO: 107575 - DNA, 441 bp, Homo sapiens
ggcacgagatttgctatgtgttgttcttacatcattgattcatgtaagtagacttgtgtgacagctaattcttaaaaaattatgaagatgttagacttcttttgatatatatatgttgattgtatgaacagattgacatcaatatacttattcattataaaagatttgagtgggaactcaccaaatcccacaccaaaaaaatttaaaattttaccatagtaaaaaaaactaaaaagcaagatgaaattatacatagttcttggtgtagtatttttaatttttattatttatttttatagaaatggggtctcaccattttgccaggctgttctcaaactcctggcctcaggcagatcacttgaacctgggaggcagaggttgcactgagctgagatctcgccactgcgctccagccagaatgacacagcgagaccctgtctc

SEQ ID NO: 107576 - DNA, 359 bp, Homo sapiens
ccatgagcttcaataccctgtatctaccaaaaaacaaaaataccaaatacaaaacaaacaaaaaacaaaaatacaaaaattacgccggcctggtggtgtacacctatagccccagctactcagaaggctgagattccaccactgcactccagcctgggtgacttcttgagactgtctccaaaaaaaaaaaaagggggacccaattgggcccctaccccttcaaaatttttttaaaaaaaataaaacccccctgggggggaggccaccccccttgaacaaaaccatttggaggcccccgggggcaaaaaaaaagatgaagagttcttataaccactccccccaaagggggaacccccttc

SEQ ID NO: 107577 - DNA, 340 bp, Homo sapiens
ctcctgacctcaggatcacttgggcctagcagttcagggctacagtgagccatgatcgtgcctctgcactttagcctgggcaacagaatgagaccgtgtctcataaaaaaaaaaaaaaaaaaaaaaaaaaaaaaaaaggggggccttaggctaaaaacccttaaaagggaagggcactgggggttttaaggggaaacttttgtttaaggaaaaaaaaccgattttccattttaaatggggaagaaaaggttcttttttaaaaaattttggtaaaaaaaaaaaatggggtagttttaaaaaaaaattgaaaaaagtaatttccccaatttggaaaaatttg

SEQ ID NO: 107578 - DNA, 381 bp, Homo sapiens
caaactcaattgtcctttctcttagtgtctattttcctaaatccacacctgtgcttagctatgtatgattaaacaagatcataataaacttatttgcaaggataaataaggaggcatccttcctaagtatatttgctttactcctaagaataggagaaagccagttttgctagatgaatgaatttaaaatgtgagctgtcatgcagctgagactagagtgtggtgggaaaaagagaggccccttccggtgccctttggagcatatcttctggatggcatgcctctggtgtggctgctgtcagccagcagtatcttatctatctggctatctatctatctatctatctatctatctatctatctatctatttatttttgaga

SEQ ID NO: 107579 - DNA, 936 bp, Homo sapiens
  misc_feature (1)...(936): n = a,t,c or g
taccatcgtggctcgctgcaacctccgcctcccaggagaattgcttgaaccctggaggcggaggttgccgtgagctaacattgcgcccctacactccagcctgccaacagagcaagactccgtctcaaaaataaaaaaaggatctacttttgagaatactgtcattggttgataaaatacagcagaaacttgtgaagaagctattttccatattcacctggcatgtttggagatgattgccatcaactttgtgactgtgaaggagaaaccttctgccacccaaaaactgaaaaatgcctctgcccccgtgggagaactggagccagatgtgatgctggttagtctcctgtattgggcgttcagcatggatgttgcctttttctgacctcaagacaactatccaactttccctgtgtccttcacgatgcaaccactaaagctctactgaagtctctaattctgaagaggcaccttaagaattggaatctaatgacttgcttggaatcatatgctcctaagtggggcagaactcaggttgcccaatcaagaagcacagtcctgacgacagcatgctgcattgttaacgctcccacgaggtggaaatcatagccggaaattttgaaggtataaaattttgtggagccgaaaaagaagagaagagctgtttttagagcgaagcttttcccttggggggtgtttgtgtgccagccgcgttaaagcggtatggacaattggtcccaatagcgtggtgaccctgccgctgtgaatcgagcacccgttctctcatgccggtatggatgcgcgcgtgacctgatcgggtggtggaggatagcgccgggatattcttctcgtcgaccgaataaggtgtgttttctcaaaaaggtgggtggctctggtgtgtgaccattngtggtgacaaacgacgacctaacggtg

SEQ ID NO: 107580 - DNA, 382 bp, Homo sapiens
  misc_feature (1)...(382): n = a,t,c or g
gcgattttaatacaaactaaaaatatgaaacactggatagtgttagccttacctagcttgattttctttgggtgtacatgaatgcaaataaattctacaatttcttaaattcatatatatgtatatatgcacatacatatattcatatatatgtttatgtgtgtgtatatacatgtataggtatggtgagtacatatggggaaccagttgaaggatgtttcttcttttacaagaaaggagagaaaacaatcttcccgaaaagtggtatttactagcatgaaaaaggattgagcttcatataggtagacattactgtatttctatcatagggttatgtgtgtacataatccaatctgtgtttataattcacatacctactctn

SEQ ID NO: 107581 - DNA, 374 bp, Homo sapiens
tagaaacaacagaaattttacttcttacagttctgaaggctgggaagtccagcatcaaggcaccagcagattcaatgtctgataagggcttgcctcaaagatggtaccttaggctgggtgtggtggctcatacctgtaatcccagcactttgggaggccaaggtcgggggatcccttgagcccaggagttcgacaccagcctgggcaacacagggagacctcatcttaaaaaaagatggcaccttattgcagtgtcctcacgtggcaaaagggcactcatctcattcatgacacaagagccctcgtgacttcacttcctaaaggcccaacctcttaataccatcacactgggtatttaggttcccatatatgaa

SEQ ID NO: 107582 - DNA, 371 bp, Homo sapiens
gggtctttgtggtctgtttcatcattatttgcttacccaaatgtcatgtcttttgatggagcacatgtattcaaggcctttttcctccagattctgtgctttttacattctatgctacaagactgatattttgtctgtttgtaattacccagttgtggtcatttgcattaaatgacatgagaatttagagtagaaatgccattttcaaaaagcgctgggagtcatcatgtcaaagttcattcaactcattgggagttttccctcaagcagcaaccaaaggctgggtgcggtggctcacgctggtaatcccagcactttgggaggccaaggcaggaggatctcttgagcccaggagctcgagaccagcctga

SEQ ID NO: 107583 - DNA, 278 bp, Homo sapiens
agcctacaggattattgtgaagattaactgtgtatatatatgtgtatacacattcctatatatatgtacgcatacctatatacatacacacatatatgtatatgtatacacacatgcacaaacatagagcgcttggaacagagtaagcagatttgtatgttttttttattatgcttactttattttaaaaaagctagtgaaaaaaataataaacttcacagttgcccatttttaactctctgctgtgttttaacccaaattttgtcaggtttttcgcc

SEQ ID NO: 107584 - DNA, 440 bp, Homo sapiens
gacgcctctctagcttgcatcctccagagcggccgaaatacatggcggccatgctgctcttgaactcttggcctaaagaaattttcccacctcggcctgagagactctttctatggtggccatgctggtcttgaactcctggactcaagggatcctcctaccttggcctcccaaagctctcacgtaccagcacccattggcttaattatttcagtaaaatcaggcaaggaggaaccctacaaaataaacacaggcattctcaaagcagatataagtgaaaactcagagtatactgcggtcagctgtggtctctatcacaagtagttcgccaacttataataaagtactaaagtttgggaatgatctactctaaaaatacatccgacaatggtcaatgtcatttacaacattcacctcctttctgatacacatctcaggaa

SEQ ID NO: 107585 - DNA, 401 bp, Homo sapiens
  misc_feature (1)...(401): n = a,t,c or g
aatacaggggcagaaacaaatcacaacggtggaatgtcatcagttaaggcaggaactggctattttcacttcttttgtggtaattcagttgcttcagtccatctggaggtatacgtgcaggcttgggcccagtggcctgacatcatcatgttgtccaggtggtctcggacttctgacctcaggtgatccacccgcctcagtctcccaaagcgccgggactacaggcatgagccaccatgcctggctggtaggtttcttatatgtgaaaaacattgtataattaacaaagtgctcccatatgaatcaatcctgacaattgttgtgatgcaggccatctagtctcagagtttacaagattcagaaaggctttgacttgccaagatcaaagacaatggcaggan

SEQ ID NO: 107586 - DNA, 390 bp, Homo sapiens
  misc_feature (1)...(390): n = a,t,c or g
cagcaatagacccttcttaactcgtggtatcctgtacgccaagggtgacagactggaaagcaagatccaccggttcatctatgggaaaaggagggggaatgagatcaaggattgaggacgctaatggagatggggtttcaccatgttgcccaggctggtcttgaactcctagactcaagtgatccactcgccttggcctcccaaaatgctggaattacagatgtaacaagaagtcagctgcctgcaacccagaagagagccctccccagaacctaacactgctgctggcatcctgatgtccaactttcagcctctggcactgtgagaaatcatgttcagctgttaataagccacctagtctatgatattttgttatagcagcctgaatan

SEQ ID NO: 107587 - DNA, 404 bp, Homo sapiens
actgccccatatttggtccgtacaagcttcttcaagctggaccctgggtccttttgaaaaggtcccatcattctttgagcactttcttgctctctttcacaagaagcacaagaagaaaaccccagctcaacttgtgcttttcctgcccctgaatcagctgcttctccagggcacctggttgtttttagtggagaatgatatttagaaaccaagatctgagcattaagggtactcagtgaccttgcttctaggcctcactcaactcactcagcgtatagcacatggaactaggaagggagaaagagaaagagagagagagagagagagagagagagagcgtgtgtgtagctgtttgatgcatgagcttgcgtcacaccttctttttttttttttgtttagggagg

SEQ ID NO: 107588 - DNA, 668 bp, Homo sapiens
tttcgtctgagatagaatagttcttcagccaatcttatggctgacgtttttacaaacagatagcaataaataatccctgaatgattaagatgggtgacattagattgcacttctgaacatatttctttagttgctataaatatacttctccatgtgtatgctgttttctgtgtatttatgtatttgcaaattttgttcataatagcactacacattacttgcaactgagtttttcctattccttttcaaggcagtaattatgtcttaaaacattcccagagccaggcaaaggcatttgttgcttaaaaaaaaattcctctgtctttacagaagcagtgaacgagggtctgggagccgggatagaaaacacagaaactccgagatagggaagatgattaaccagtgggacggaggtgggagctgcaggggatggggctgggagtccgtacctggcagtcttccctgccatgccaaggtcccacctcctcttctgtcctgtctttgggcaggggaactcctggcatcagcaacacctgcctccctcccaggtcagccactgagttagggctcccagcccaagttcccttccccaatgtgcaatcccaggaccaagacctcagcttctccttgggatgtttccccaggacttacaatagacaaacactcac

SEQ ID NO: 107589 - DNA, 421 bp, Homo sapiens
aaagtttagtttgtcagttcatgagaggaaacataaatattgaaaggaaaaatacattcatataatttcctttaattaaactgagataagatcttgctctgttacctatactggagtacagtggctagatcacagctcactgcagcctcaacctcctggtctcaagccatcgtcctacctcaccctgttttttgttttggtttgttttttgttttgttttttgaaacagggttttgctctgtcacacaggctggagtacagtagcgatccttgcttactgcagcttcaaactcctgggctcaagggattctcccactttagcctcgcgtgcagctaggactatagtcaagtgccgtaacgtctggctaattaaaaaaaaaaaaaaaaaaaaaaaaggggggcgccgtttatagagaaccca

SEQ ID NO: 107590 - DNA, 397 bp, Homo sapiens
cgcctggctaattttttgtatttttagtgtagatggggtttcaccacattggccaggctggtcttgaactcctgacttccacacagatgaagcgtgcggttcggtcctgctttcctcaccttgagatcccacagaggacatttagaggctgaggcaggaggattacttgagccaaggagttcaaggctgcagtgagccgtgatggcgccactgtactccagcctgattgacagaaagagaccctgtctcttaaaaaagagtcatacatatagtagctgtctacaaaggcagatcgaagcaggtacggttgcatttggttgtaaagcagtaagcagaaagggacagttggttcctggaaacattcacttttatcaaaaaaaaaaggtcctgaaaaaag

SEQ ID NO: 107591 - DNA, 384 bp, Homo sapiens
cttacgtattctatagacaaaagcagatggtttgtttttacaaaatacggataaaaaatatgtttaatagaaaccgtctgaacctgggtcagtggtgtgtacccatagtacccgctactcaggtggctgaggcgggaggatcacctgagcccacgagtttgagaccaatctgagcaacatagtccgacttcgtctcttaccagataatataaactcttaaaccgccatctgtcatcacactacccagaagtagcgctgagtatcctgtcgatattttctctctgaaaatatatatatctgttgcttttattaaaaggatcaaacttcatgtgcttgttcataatatgttttttctcctacttagccactgaccacacattttcc

SEQ ID NO: 107592 - DNA, 898 bp, Homo sapiens
ttttttttttttgacaaaccattcattttatttcctgtattgtggtttatacaaacttgcaagatacaaatgcagaactcactgggattcttcagtacctaaatctaaaaagaatgctgctgaaagggggaagcaaactctcacctgtttcagtcaggccatccctcctcctggggagggggctcattggctagaaagatgctaaggggatgctacagctgtttgtcccctgacagaggattccatctatctaaccttcacccttcttctaaggccacttttatgctaaataaagacactgagataataaatttccttgtacagtttattgtctaatactagcaaatcaaattggccccaatatgtgcataaatagatatacgtgtgtgtgtgtgtgtgtgtgtgtatatatatatatatatataatgtgtgtgtatatcatattttttcttagttttaagagctgccaggtagagggtgcctaaaggggaaaggaattggttccctcttgccgtagccagccctgcccaagaacatgcctctcccaaaggccggagagcaagtgtgccacttgtgcccttagaaaatcttcaaagtgacagtagcagtatttgactgcagcctcttggttattgatcatggaggtaatgtgctcattgagaaggccctggatgaataatcagagcttccccaggtgggtcacttagctctggacccccatctgggctctgttcattcagagcaggatgttctaggctggcgacagggtgtcagtaaatgcccccaggtgggaggccaggcttcaaacgctggccaggagctgtgctatagattcccaagccgttgatttcagacctagacaacgacttccctcgtgcccaaatcgtacgaaatcatg

SEQ ID NO: 107593 - DNA, 382 bp, Homo sapiens
agcgcgcctcgtcgccatgccttttaaatatgaggaaatcaaggacttcctgctcacagcccgacgaaaggatgccaaatctgtcaagatcaagaaaaataaaagtgctgccgtataaaaaaaaaaaaaaaaaaaaaaaaaaaaaaaaaaaaataaaaataaatggggggggggttttttaaaaaaaaaaatttttaccccgttgtggggagaaaaataattttttttatatgctaacttaaaaatattttccgggggggttatttaaaaacagtgttgaaagaaaaaactgcgaataaaaaaaatatagttgttagaaaaaaaattaatatttatatatttttcttgtaatcaatcttctaataaaggttctctcttctta

SEQ ID NO: 107594 - DNA, 422 bp, Homo sapiens
tcgatcatgttgaattcaggaaggttttagatttttccctatgcccacttttctatcttgaaaagtattctcaagagtaggaattgcttcaaatcttgtttcatgttcccaaagggcctgtcatgggactgagtacaatagtaactcgatagacactttccatagagactaattctcctccaaacaggaaggctgcctggtctgtaacacatcaccaaaggaacacatgctttctgtaaaaaacaaatccaaatagtggaaaacattcaaaatagtaaagtgccaaagcccctctttcatgccttcgcactaactcccttctattaaaaaatggcctgcggggctgggcgtggtggatcacgcctgtaatcccaacactttgggaggctgaggtgggtggatcgcctgatgtcacgagtccg

SEQ ID NO: 107595 - DNA, 783 bp, Homo sapiens
taggaggcatcggggacagccgctgcggcagcactcgagccagctcaagcccgcagctcgcagggagatccagctccgtcctgcctgcagcagcacaaccctgcacacccaccatggatgtcttcaagaagggcttctccatcgccaaggagggcgtggtgggtgcggtggaaaagaccaagcagggggtgacggaagcagctgagaagaccaaggagggggtcatgtatgtgggagccaagaccaaggagaatgttgtacagagcgtgacctcagtggccgagaagaccaaggagcaggccaacgccgtgagcgaggctgtggtgagcagcgtcaacactgtggccaccaagaccgtggaggaggcggagaacatcgcggtcacctccggggtggtgcgcaaggaggacttgaggccatctgccccccaacaggagggtgaggcatccaaagagaaagaggaagtggcagaggaggcccagagtgggggagactagagggctacaggccagcgtggatgacctgaagagcgctcctctgccttggacaccatcccctcctagcacaaggagtgcccgccttgagtgacatgcggctgcccacgctcctgccctcgtctccctggccacccttggcctgtccacctgtgctgctgcaccaacctcactgccctccctcggccccacccaccctctggtccttctgaccccacttatgctgctgtgaattttttttttaaatgattccaaataaaacttgagcccactcctaaaaaaaaaaaaa

SEQ ID NO: 107596 - DNA, 394 bp, Homo sapiens
agcctgggaggcggaggttgcaatgatccaagatcgtaccactgcactccagcctgggcgacagagcaagacactgtctctctctctctctccatatatatgagtgtgcgtgtgtgtatatatatgtatatgtgtgtgtgtgtgtgtatacgtatatacacatatatacacacacacatacatatacgtgtgtatatatataccatcccatatatatgggggatatatatatatatatatgtggatctggttatatatatgggatggtgtgggtgccccccccccagtatatgaaaaataaagttctgtgataatgacaaaggaattgctgttactggactgcaaatatgctgggggctcttggcgttaaacttttttagagaaggacccccct

SEQ ID NO: 107597 - DNA, 419 bp, Homo sapiens
  misc_feature (1)...(419): n = a,t,c or g
ggctttgagtttgaaaccagcctgggcaacatagagagacaccatctctacaataaaaaatttttttttttttaatgaaccacacatgggggggagtgcctgtagtcctagctacttgggaggctgaggtgggaggatcacttgagcccaggagtttagggttacaggaaactatgatgacttcactgctttcccgcctgcctaggcaacagggggagattctgtctctaatattaaaaagaaattattagctattagtgggtcccatgccccattagtgacagaactgtgattcaaatcccctgggtttcatgttgccactctttacaagtatattttttcttttggaattcattaatcaagaaaaactcatgtaggctgggcacgggggctcatgcctgtaatcccatcactttggn

SEQ ID NO: 107598 - DNA, 402 bp, Homo sapiens
  misc_feature (1)...(402): n = a,t,c or g
gtcttgcctgttgcccaggctggtctcaaactcctagcgtcaagtgatcctcccgcctcagcctcccaaggcattggggttacaggcgtgagccactgacctgtccttccctgttttagagtgtcctggatagaaggcaggagccctgggacctgctgacagggccagcgcccagggactgcctaatcctagcaagtccctgccctctctgggccttggtttttctatctaaaaactgggaacaatatactagatcctgtaaggcttattattccttttaaacagcatgtagcataagtcctcaccagaaaagtagtgttctagcccacagacagcatggngggcggatttttttcctttctttctattcctttgcatgagagacagcatggttcttgatat

SEQ ID NO: 107599 - DNA, 451 bp, Homo sapiens
ttcttagccgttcggaattcccgggtcgagctcctggcctcaggtggtccgcctgcttcggcttcccaacatgctgggattatcgacgtaagccacctgcctggcctacttggctctttttaatgggtacattgtatttcattccatgacatataccataatttatttaaccagttgtcagttgatagatatctctattgtttaccggaattttctgttaccattactaccataaatagccagtgaatatctttgctcaccagtgggattagctttataggatgaattcccagaagtagaatgctgcatcccagcctaagtgcatttgatatggacagataaagggttttttttggaaactccagggcccactgctcatgaatctggtgaaagctgtggatccactctccagaaaactgggcacatttaaaattttcactctgcaatttcc

SEQ ID NO: 107600 - DNA, 401 bp, Homo sapiens
ccatccccctgtgacctcagggtgtgttttgttttccaccctagggaccagaaggagccaggagtaaagaactggcttacttggccggcactgggaaattctgggtaattcgagacgccctggaatttggacccactccgctgataggtggcggccagggttctagggaacacaagaggcggagccaggtggctttcctgagctggcattcttgcctctctctctctctctttctctctctctggctctctctctctctctgtctctcagccttgcagccgtctccctctgcgatacatgtaagtgtgactctatctcagggaaagggaactcgcttggactgaggagaccggacatgacgggctgtgaaatgcaccgtgaagcccgcaaccccgttcctg

SEQ ID NO: 107601 - DNA, 423 bp, Homo sapiens
  misc_feature (1)...(423): n = a,t,c or g
cccgggtcgacccacgcgtccgccatgctgcccaggtgtgnctcaatcttctgagctcatgcaatttgcccacctcagcctcccaaagtgctgggactacaggcatgagccactgtgcccggcctataacctttcttaaatacttcgagtggcttcccatcacactcagaataaaattcaaactcaaagggcctgccaggctgcctctcctgatctcttatgcctcttcccctcactctgctccagccacagtgacttccttgtttctctaatgccctaagcttgttcctccctcaagtctttcacctgcggntccctccacctggaatgttcttgccctgggtatacacatggctcagttcctcatttgttctgtctaatgtcagctcctcagaggccttccctggtgggcaaatgagaccg

SEQ ID NO: 107602 - DNA, 405 bp, Homo sapiens
tttcgtagcaaacagaaagatgtggacagacaccgagaaggagagacatacatgaatagttagatgtacacgcatgagcgtgcacacacatgagcatgtctccgggaaaaagaaagtcattctcggagaccatagggcagaacgcaaagaacataacataggagtcaaatggagccgaacacttcagtcactcacgtgatggctgtgtgtccttggatggagtctacttgctctgtcacctaggctggagtgctacggcccgatctcggctcactgcaacctccatctcctgcgttcaagtgattctcctgcctcagcctcccaggctctacaagaagcatggtatcagcatctgcttctgatgatgcctcaggctgcttccactcaagttggaaggaaaaaggg

SEQ ID NO: 107603 - DNA, 447 bp, Homo sapiens
  misc_feature (1)...(447): n = a,t,c or g
accgctccggaatttccggcacgacgatctggtgggaggtcaaggtgggaggtttgcttgaggttttggagtttaataccagactgggcaacataacagtgtctgtggaaaaactataacgggggcgagggcggaaaaacccaacttgaacattggggtgcacgtctgtagtcctagctacttgggaggctgaacctaggagttggaggctgcggtgagctatgattgagccacttcacttcagtctgggtgacagggcgagactctctcgaagagataaacaaatgtaagaataaaaaggtgattgtagaaggctttcatttctggtggaatcaagggtccctgccctttatttatttttattctgttggattgattctgcccctcccctcaggctgtgtaaacatgttaattagaatgtattttctttggggttttttttacaan

SEQ ID NO: 107604 - DNA, 459 bp, Homo sapiens
  misc_feature (1)...(459): n = a,t,c or g
ttccgtaagctctgtgtctcagacggggccctcccgtcgagaagctggtagtcagtgagtgagaacaagagaacaagaacaccctgaacagtcctggttgggatggtgtccacattcatgttctgcggttcttgaacacacggatgcctctgggccacctgtccttttccgagggtgtgagtgggagtggatcctccgggcgcaggtgccaggcaggtgcaggcgggcggtcggccactgctgctgctcgtccctgccagtgtctgggcctgaaggggctccctccagcggtgccttcctgcggcttagaagggaaagcgccagagagggcaggctacagtgcttcacaccctccgcacggctgtgaaactggaaatgggtgggttttgtatgttaattnttttttttgagacggagtcttgctctgtcacccaggctggagagcaatggcgtgatctt

SEQ ID NO: 107605 - DNA, 456 bp, Homo sapiens
  misc_feature (1)...(456): n = a,t,c or g
gccggaattgccgggnnnnaatttcggaaatttcgttgctatcactgggagtaggggctcaggcctgctgcattcccagtattttgggaggctgaggcgggaggattgcctgagcccgggaagtcgaggctgctgtgacctgtgagcacactaacactacttcattccagcctgggtgacagtgagcccctatctttaaaacaaacaaacaaacaaaaaaaaacattgctatatattctgttatagaggttctggagcattgctttgtgtaatgcctcataaatgctagcctatccttattgaaacgtaaaattgagcataaattactatagtattttggcatggctattttaaaggtttcatgtctcacagtcctctgggtatgatttattttaggataaaccttgcttacttacttatgtccttctccagccccactcttacacatttagaaat

SEQ ID NO: 107606 - DNA, 425 bp, Homo sapiens
tttcgtataaaaacttgaagaaaggaatttttcttcttggagcaaaagaaaaaataaaaaccagtcatcaccacctcaatttatatcctcatagagaagagacaaagaaagaatagaggggggccaggcgtggtgtctcacacctgtggtcctcggtctttttgaggcttttgcagtctggtctttatctcctgatctcttatgttccgaccgcctctgttctcattctgctgcttttgtatacgttatccctttatctttgtcttcttctctttgttatgttttgctttttcttggtgttccctcctcctctttttttttcattacctcaaactatttctcctgctttttcttttattttttttacctgtacttctttgtcttgattcctttttagtccacgatttctttcttctttcttcttt

SEQ ID NO: 107607 - DNA, 411 bp, Homo sapiens
tttcgtccaggatgggcagaggcacgaaaaccattgccttcgacatgaggtggtcctgtgaggttgacagagccaggcacagggacagagagagagagagagagagggagagggagagagagagggaaaagggtgctgaaccccaggagttccctgtgatttcaccctgggtggatcgtccctgcttagccgggattcttcatctgaaatgtgggtgtggacatcgtctgtgagtgtattgtgaggaacatgcaggagctgaccacatccgtgttcatgacatgcggtcagaggctctgggtcactttgaattcagggctctggcaacagctgggggaggcagcctgagactttttcgggggaagggggaaggaaatggttttacgactgtttggaacacctatgcttttg

SEQ ID NO: 107608 - DNA, 448 bp, Homo sapiens
  misc_feature (1)...(448): n = a,t,c or g
gtcttgaattcccgggtcgacgatttcgttgcaacttcaaattcttaggctcaagtaaatttttggccttggcctcccaaagcactgggattacaggcatgagccactgcacccagccccagatctctctctcgacacagatctggtcatgccaccgctctgctcacagacctcccatgctccccctttgtcctggttagcagtggccttcacaactgtggcagacggtcttgctgcaggtcagtgactgccctgacaaactttacaagctgctctccacaaaccctgcttattttcccacctcttccttccctctggatggaatcttcatctacccttccctgcctggaaaactcaaaccacactaaaggtcagactcgaaagacccctatttaatgaaatatcccttgcttttgtgtgctaacgcaatgctaaacattttcctgcn

SEQ ID NO: 107609 - DNA, 412 bp, Homo sapiens
tttcgtcctacagtagtgcctgggacttggtaggtacttcatacattaaaaaaatatatttttaaggatggggtctcactatgttgcccaggctggccttgaattcctaggctcaagtgatcctcctgcctcagcctcctgggaagctaggactacagatgtgagccactgtgcctggcttttgtttttttttttttttaactaaaaaaaatggccttatttaaaaaaaaattccttaaaaaaggagggaaaccgggggaaaaaacctataaactttttttttttttttttttttttttaaaaaaaatttttttttttcccccccgggggggggggggggggcaattttttttttaaagaacccccccccccggggggaaaaaaaattcttccccccccccccccaaggggg

SEQ ID NO: 107610 - DNA, 459 bp, Homo sapiens
  misc_feature (1)...(459): n = a,t,c or g
nagaattcccgggtcgacgatttcgtgtttcccaggctggtctggaactcctgggctcgggcgatcctcctgccttggcctcccaaggcactgggattacaggagtgagccaccacgcccggcagattagcagtcttaattccatctgcagcctcaattccctttgccatgtaacctaacatattcataggtttggttttaggacatgggcatttttgggaggccatgattgtgcctaccacacaagccaaagacccagagaggctaaataatttgccacaggttatatggctagaaaacggtagagccagacttcaaaagcaggctgaccccagcactttgaatgagtgctgacccaagcactctcattgttaatcattgcactacacttccgtagctcgttttcccttctcagcaaccctactgtgaggtaggtatggttatgactgctatgtgcan

SEQ ID NO: 107611 - DNA, 443 bp, Homo sapiens
  misc_feature (1)...(443): n = a,t,c or g
ctgacggaccgcttcggaattaccgggccgacgatttcgtgtgannnnaagggggacactttaggacatatcttctcaagcaagaggtgggtagccaagtgtcccatctcagtgccactgggaggctcagcccgacaggagctggctgagggggacggagttgcagcaggggcagtggctggcccaggcaggcccggctgcacttttgacacctttgtaactgcaaggtgaaaactgacttttcatgattcttcccaacaaattcttacctttggtctctctctggacatattttaggaaagaaattatttcccaaatagttattcacacctatcactaaattatgtccttctctgatggcataaaaaaaaaaatcaaaactggctgggcacaggggctcatgcctgtaatcccagcactttgggaggctgaggcaggtggaa

SEQ ID NO: 107612 - DNA, 429 bp, Homo sapiens
tttcgtgtcccaaactcctgggctcaagtgatcctcccatctcggcctcccaaagtgttggggctacaggcgtgagccagcctgccggccttcctcatggctcttacgtaccacaggtattgaaagccactgatctccaccatggtcagacttagccatcagcttcgcacgttcactctttttctctccccagattatttaacaagttagcctggatctcaatttattgaaacccgacacaaaaaccctgatttaaataaccaggaggcccagttatttccatgaggacactagaggaagaagcactagggtgaccacggcacgccccacgagggcctctgtggccttgagacacatcactctctgcccacaaggactctcagctctttctctgctcctctcctttgatccctctgctgggggtggaag

SEQ ID NO: 107613 - DNA, 387 bp, Homo sapiens
aaaaaacaagatacttatgtctctacaaggcacagtgtaaaatattgttgtcttcatctagaaggaaggaaactaataggtcagagtacatttaaaacgtccaacaaatagatgaaacataacgcataagagtgtgacttcacagaatacctcctgggggacacaggacctgagtgctgcatgcaggaggtggtggacaggtggggacagacagatgtgtggaagagtatgtggggcagatgaactaggctgaagagagaactgggcagagccttcttcacacagccttttaaacatttttttgcagctgggcacggtggctcgcgcctgtaatcccagcaccttgggaggccggggcgggtggatcacaaggtcaggagattgaga

SEQ ID NO: 107614 - DNA, 404 bp, Homo sapiens
  misc_feature (1)...(404): n = a,t,c or g
tcaatgcactgcagcctgggcgacagagtgagactccgtctccacacacacacacacacacacacacacacacacacacagaggaaaaaaaaacaaaaacaaaaaacacacaaaccccgagggccatctaaaactcctttttaagcgggcaggtatacattgggatgagaatggggacttctctccccttagaagtcgtgatcttcccatattcacattatatatactgcccattgtgctcaatgtgtcttatactcaagagatttgtgcgtgtatcatatccccccactaggggggaaattcttaaaagcattccagtttcattcattacatattcacacattttctttcacggaacacacacatgagtggcgtgagacagtaacactgtcattggaatgtcn

SEQ ID NO: 107615 - DNA, 1000 bp, Homo sapiens
  misc_feature (1)...(1000): n = a,t,c or g
cagggggatgggtgtttgtcctcgctgtccattggctgggagctgggcactggcaggcacgtggctcaccccatccctctccctccttccctgcccaccccacccattcccgctgctaaacccgcctcctttctcccaccncagggccggtctccgtggcaacttggtgtggtgggggcgctgattggctgacctcactgtcaggtcacaggctcaggctcgttcaccacgcaactcacacagggattgggcaagggtgggtgtttaactccttaggcccaaatccaatgcccatggccaagaggtagcaatgaaagagggagagaagcttatgaacaccctctccttcccacacatgtcctctgcctctccccctctttcattgctacctcttggccatgggcattggatttgggcctaaggagttaaacacccacccttgcccaatccctgtgtgagttgcgtggtgaacgagcctgagcctgtgacctgacagtgaggtcagccaatcagcgcccccaccacaccaagttgccacggagaccggccctggggtgggagaaaggaggcgggtttagcagcgggaatgggtggggtgggcagggaaggagggagagggatgggtgagccacgtgcctgccagtgcccagctcccagccaatggacagcgaggacagccccacccatcccccttaggagggacaggatccacttgggcccaggagggtgcctactgctgcttaagtagctgcagccactgttgctgctgctcctcctgctgctgctgctgcccacctggtttttgtttgttcccaagtctgggggccatttgccacttgtaccatttgtaaagtacaggcaggaggattaaagggagcagggagagctcccagatggcttggttcctagggagagaagtggtttgcggacttacggtgggaacaggtgagctatctaagggtgcctagaggtggcttacaagcaaagaaggacatgcggg

SEQ ID NO: 107616 - DNA, 724 bp, Homo sapiens
gggacctcctgggccctcaggctctttagctgagaataagggccctgagggaactacctgcttctcacatccccgggtctctgaccatctgctgtgtgccccgaccccccctaccctgctcctccaccaagcctgatgccaagggctataaaccactggcccaacagaagcttggttcccagagaactggtccctgcctgggacatgctccttgctacagccccttgtgggagctcagagggcatggctgctccccctacggtccctcgcccagtggttctgtctctttatggcaggaagcaatgaggctccccaagaacacacctgaggaaaaggacaggcgcacggcggccctacaggagggtctgaggcgggcagtctctgtgccgctgacgctggcggagacggtggcctcgctgtggccggccctgcaggaactggcccggtgtgggaacctggcctgccggtcagacctccaggtggcggccaaagccctggagatgggcgtgtttggcgcatatttcaacgtgctcatcaacctgagggacatcacagacgaggcatttaaggaccagatccaccatcgtgtttccagcctcctgcaggaagccaagacccaggctgcactggtgctggactgcttggagacccggcaggagtgacgaaaccccagggacagcaggaccttcgacgctggaaggatagcctcgcttcccaggtgcag

SEQ ID NO: 107617 - DNA, 420 bp, Homo sapiens
gctgttggggtccaccacgccttccacctgccccactgcttcttcgcttctctcttggaaagtccagtctctcctcggcttgcaatggaccccaactgctcctgcgccgctggtgtctcctgcacctgcgctggttcctgcaagtgcaaagagtgcaaatgcacctcctgcaagaagagctgctgctcctgctgccccgtgggctgtagcaagtgtgcccagggctgtgtttgcaaaggggcgtcagagaagtgcagctgctgcgactgatgccaggacaacctttctcccagatgtaaacagagagacatgtacaaacctggatttttttttataccaccttgacccatttgctacattccttttcctgtgaaatatgtgagtgataattaaacactttagacctgaaaaaaaagaaaa

SEQ ID NO: 107618 - DNA, 2889 bp, Homo sapiens
cgggcccgcgggcggggggatcggcgggggggacccgcggggtgaccggcggcaggagccgccaccatggagttccgccaggaggagtttcggaagctagcgggtcgtgctctcgggaagctgcaccgccttctggagaagcggcaggaaggcgcggagacgctggagctgagtgcggatgggcgcccggtgaccacgcagacccgggacccgccggtggtggactgcacctgcttcggcctccctcgccgctacattatcgccatcatgagtggtctgggcttctgcatcagctttggcatccgctgcaacctgggcgtggccatcgtctccatggtcaataacagcacgacccaccgcgggggccacgtggtggtgcagaaagcccagttcagctgggatccagagactgtcggcctcatacacggctcctttttctggggctacattgtcactcagattccaggaggatttatctgtcaaaaatttgcagccaacagagttttcggctttgctattgtggcaacatccactctaaacatgctgatcccctcagctgcccgcgtccactatggctgtgtcatcttcgtgaggatcctgcaggggttggtagagggggtcacataccccgcctgccatgggatctggagcaaatgggccccacccttagaacggagtcgcctggcgacgacagccttttgtggttcctatgctggggcggtggtcgcgatgcccctcgccggggtccttgtgcagtactcaggatggagctctgttttctacgtctacggcagcttcgggatcttctggtacctgttctggctgctcgtctcctacgagtcccccgcgctgcaccccagcatctcggaggaggagcgcaagtacatcgaggacgccatcggagagagcgcgaaactcatgaaccccctcacgaagtttagcactccctggcggcgcttcttcacgtctatgccagtctatgccatcatcgtggccaacttctgccgcagctggacgttctacctgctgctcatctcccagcccgcctacttcgaagaagtgttcggcttcgagatcagcaaggtaggcctggtgtccgcgctgccccacctggtcatgaccatcatcgtgcccatcggcggccagatcgcggacttcctgcggagccgccgcatcatgtccaccaccaacgtgcgcaagttgatgaactgcggaggcttcggcatggaagccacgctgctgttggtggtcggctactcgcactccaagggcgtggccatctccttcctggtcctagccgtgggcttcagcggcttcgccatctctgggttcaacgtgaaccacctggacatagccccgcgctacgccagcatcctcatgggcatctccaacggcgtgggcacactgtcgggcatggtgtgccccatcatcgtgggggccatgactaagcacaagactcgggaggagtggcagtacgtgttcctaattgcctccctggtgcactatggaggtgtcatcttctacggggtctttgcttctggagagaagcagccgtgggcagagcctgaggagatgagcgaggagaagtgtggcttcgttggccatgaccagctggctggcagtgacgacagcgaaatggaggatgaggctgagcccccgggggcaccccctgcacccccgccctcctatggggccacacacagcacatttcagccccccaggcccccaccccctgtccgggactactgaccatgtgcctcccactgaatggcagtttccaggacctccattccactcatctctggcctgagtgacagtgtcaaggaaccctgctcctctctgtcctgcctcaggcctaagaagcactctcccttgttcccagtgctgtcaaatcccctttccttcccaattgcctctcaggggtagtgaagctgcagactgacagtttcaaggatacccaaattcccctaaaggttccctctccacccgttctgcctcagtggtttcaaatctctcctttcagggctttatttgaatggacagttcgacctcttactctctcttgtggttttgaggcacccacaccccccgctttcctttatctccagggactctcaggctaacctttgagatcactcagctcccatctcctttcagaaaaattcaaggtcctcctctagaagtttcaaatctctcccaactctgttctgcatcttccagattggtttaaccaattactcgtccccgccattccagggattgattctcaccagcgtttctgatggaaaatggcggtttcaagtccccgattccgtgcccacttcacatctcccctaccagcagattctgcgaaagcaccaaaattctcaaaaaccctcttctcccctagcttagcataatgtctggggaaacaaccaaaatcgcaattttaacaatatgcctctctacccccgtgcaactttttcctgaacatggtttttcaggtcctaaatagtggctgctcccagtccatggaacttcaaagggtttgaaagctacccaccattggaactcccccatgggtggtttcatgatgccccctccgcaattcctcgcactttattctcctgggtggtttcgaactaccctgtttctcagtggccatttgttgtgtccctcaggggcttaatgactcaaaatctgggatccttcccctctcagacacccctctttcagcttagaatttggggaacctatagagaagtcacagaatcccatgaaagggaatggggcaggagacaggggtgttttttcccagtgcagggttgtgtctttgtgtctctgtctctgtgactgtaaatcctgccctgccccactcccaataaaagctttggtgtataggctcaaaaa

SEQ ID NO: 107619 - DNA, 424 bp, Homo sapiens
atacactgcctggctaatttcaaagcattttttgtatagacaaagtctcactatgtcactcaggctgggctcaaactcctggcctcaagcaatcctcctgccttgacttcccagagggttgggattacaggtgtgagccactgtgcccaggcaaccctaccttttaaaacggcggacaaaggaccttcattgaacctattcagttccaccccaccattactctgagctgtgaagactcagcggtgtgtttggcttttgccaccgcactaagtacccatttttgcaagccattcgatatcctctttttctttcagcacacagtcggcttacttctggcaattcccctctaatcttccaatatatcaagggctgggaaagttataggccactggcttacagggagatgcgcgagttccaatgcccc

SEQ ID NO: 107620 - DNA, 415 bp, Homo sapiens
  misc_feature (1)...(415): n = a,t,c or g
nnnaagaaggagtaacccccacgttgtttggtgatcatcacggcggccgcccacatgtccttcttatgttgtaggcctcacttgtcacctctgtgaaagaacccttcacgtggggccatatatccttcttatgtggaccttatcacccacttcctccccttcagagctgtccccacaccgtatgagcattctctcacactttctacctactgaccatgctcctatctgtgcgagggtacgcatctcatccatcttattcactgctgttatctgcagcaccttcactaacatgctgagatgggccgggtacagtggctcacgcctgcaatcccagcactttgcaaggccgaagcaggaggaccgcctgagcccaggagtctgagaccagcctgtgcaacatactgagaccccatct

SEQ ID NO: 107621 - DNA, 2466 bp, Homo sapiens
tccggggcggcccccggcagccagcgcgacgttccaaaatcgaacctcagtggcggcgctcggaagcggaactctgccggggccgcgccggctacattgtttcctccccccgactccctcccgcccccttcccccgcctttcttccctccgcgacccgggccgtgcgtccgtccccctgcctctgcctggcggtccctcctcccctctccttgcacccatacctctttgtaccgcaccccctggggacccctgcgcccctcccctcccccctgaccgcatggaccgtcccgcaggccgctgatgccgcccgcggcgaggtggcccggaccgcagtgccccaagagagctctaatggtaccaagtgacaggttggctttactgtgactcggggacgccagagctcctgagaagatgtcagcaatacaggccgcctggccatccggtacagaatgtattgccaagtacaacttccacggcactgccgagcaggacctgcccttctgcaaaggagacgtgctcaccattgtggccgtcaccaaggaccccaactggtacaaagccaaaaacaaggtgggccgtgagggcatcatcccagccaactacgtccagaagcgggagggcgtgaaggcgggtaccaaactcagcctcatgccttggttccacggcaagatcacacgggagcaggctgagcggcttctgtacccgccggagacaggcctgttcctggtgcgggagagcaccaactaccccggagactacacgctgtgcgtgagctgcgacggcaaggtggagcactaccgcatcatgtaccatgccagcaagctcagcatcgacgaggaggtgtactttgagaacctcatgcagctggtggagcactacacctcagacgcagatggactctgtacgcgcctcattaaaccaaaggtcatggagggcacagtggcggcccaggatgagttctaccgcagcggctgggccctgaacatgaaggagctgaagctgctgcagaccatcgggaagggggagttcggagacgtgatgctgggcgattaccgagggaacaaagtcgccgtcaagtgcattaagaacgacgccactgcccaggccttcctggctgaagcctcagtcatgacgcaactgcggcatagcaacctggtgcagctcctgggcgtgatcgtggaggagaagggcgggctctacatcgtcactgagtacatggccaaggggagccttgtggactacctgcggtctaggggtcggtcagtgctgggcggagactgtctcctcaagttctcgctagatgtctgcgaggccatggaatacctggagggcaacaatttcgtgcatcgagacctggctgcccgcaatgtgctggtgtctgaggacaacgtggccaaggtcagcgactttggtctcaccaaggaggcgtccagcacccaggacacgggcaagctgccagtcaagtggacagcccctgaggccctgagagagaagaaattctccactaagtctgacgtgtggagtttcggaatccttctctgggaaatctactcctttgggcgagtgccttatccaagaattcccctgaaggacgtcgtccctcgggtggagaagggctacaagatggatgcccccgacggctgcccgcccgcagtctatgaagtcatgaagaactgctggcacctggacgccgccatgcggccctccttcctacagctccgagagcagcttgagcacatcaaaacccacgagctgcacctgtgacggctggcctccgcctgggtcatgggcctgtggggactgaacctggaagatcatggacctggtgcccctgctcactgggcccgagcctgaactgagccccagcgggctggcgggcctttttcctgcgtcccagcctgcacccctccggccccgtctctcttggacccacctgtggggcctggggagcccactgaggggccagggaggaaggaggccacggagcgggaggcagcgccccaccacgtcgggcttccctggcctcccgccactcgccttcttagaggtttattcctttccttttttgagattttttttccgtgtgtttattttttattatttttcaagataaggagaaagaaagtacccagcaaatgggcattttacaagaagtacgaatcttatttttcctgtcctgccccttaagggtgggggggacccgggcccctctttagggaccccttggcccaagcctcattccccattttgtgtcccatgtcccggtgtctcctcggttgccccggggtttgggcttgaccatgttgcactgtttgcatgcgcccgaggcaaacgtttgtcaggggcttggatttacgtgtgccgctgccacccgcccacccgccttgtgagatggaatccgtaataaaccacgccatgaggacaccgccgcccgcctcggcgcttcctccaccggaaaaaaaaaa

SEQ ID NO: 107622 - DNA, 770 bp, Homo sapiens
  misc_feature (1)...(770): n = a,t,c or g
ccggaattcccgggtcgacgtttcgtcagactttaggcctatcatggctgaaagcaggaaggctagaggtggagggagtcacgattctccaaagggtagtttagcttcaaaggctgtatgtgtcctgcaagtcctgtcagtgtacactgagctcccatgatgtgcaaggtgctggcagaaggggtgggtgcacgtcagccaccaaacctgcccatccccaccatcgccatcccagtatctgggacacagctactgttattgtcatgccaggttaccaccacagacacagaagcacagacctaattaaataactcacctagggccatggtgccggttctaggcaggtaagggatttgaacttgggtggtgtggctagcagtctgtgtgctgagcccgtgcagcgcagcctcagtgggggcacaagggagcagggtttgaggaccagcaggctggagaagctttgacaggcggacacggggagcatgggtggaggcagggaacgtggccttggtgttccatccccaggctgtggccctttagctcactgcactgcagttgtggcctgggttgccggggtgaagtgcacgcatgttgctccaggcacctggcctgctcttaggatctcagcttcgtccacatgccgtgtgcaccttcctccctctctcccacggtagtttgctgttctccaggactagtaaggatggttctcaaaggtccagcaccaatgtattgcggcggctcgagaggntaaccgcatcggtcgcgtcttc

SEQ ID NO: 107623 - DNA, 1306 bp, Homo sapiens
cctggagtccagacccgacggccggcccagttccacgcacccagcgagcccaagcgccttctccgcaccagggaagccccacccaccagaagccaagatgtccagcaagcgggccaaagccaagaccaccaagaagcggccacagcgggccacatccaatgtcttcgcaatgtttgaccagtcccagatccaggagtttaaggaggctttcaacatgattgaccagaaccgtgatggcttcattgacaaggaggacctgcacgacatgctggcctcgctggggaagaaccccacagacgaatacctggagggcatgatgagcgaggccccggggcccatcaacttcaccatgttcctcaccatgtttggggagaagctgaacggcacggaccccgaggatgtgattcgcaacgcctttgcctgcttcgacgaggaagcctcaggtttcatccatgaggaccacctccgggagctgctcaccaccatgggtgaccgcttcacagatgaggaagtggacgagatgtaccgggaggcacccattgataagaaaggcaacttcaactacgtggagttcacccgcatcctcaaacatggcgccaaggataaagacgactaggccaccccagccccctgacaccccagcccccgccagtcacccctccccgcacacacccgtccataccagctccctgcccatgaccctcgctcagggatccccctttgaggggttagggtcccagttcccagtggaagaaacaggccaggagaagtgcgtgccgagctgaggcagatgttcccacagtgaccccagagccctgggctatagtctctgacccctccaaggaaagaccaccttctggggacatgggctggagggcaggacctagaggcaccaagggaaggccccattccggggctgttccccgaggaggaagggaaggggctctgtgtgccccccaggaggaagaggccctgagtcctgggatcagacaccccttcacgtgtatccccacacaaatgcaagctcaccaaggtcccctctcagtccccttccctacaccctgaccggccactgccgcacacccacccagagcacgccacccgccatgggagtgtgctcaggagtcgcgggcagcgtggacatctgtcccagagggggcagaatctccaatagaggactgagcactggaagaaatgagggtaatgaaaagagttgacggggccgcgatttagaggtatgttggcaccgcgggatttcggacgaggattatagggggacgtgttgtcgtagtggggggtcgttgat

SEQ ID NO: 107624 - DNA, 587 bp, Homo sapiens
  misc_feature (1)...(587): n = a,t,c or g
gcggtggaattcggcccggccgggccgggcagtctgggacgcgccgccgccatgatcatccctgtacgctgcttcacttgtggcaagatcgtcggcaacaagtgggaggcttacctggggctgctgcaggccgagtacaccgagggggacgcgctggatgccctgggcctgaagcgctactgctgccgccggatgctgctggcccacgtggacctgatcgagaagctgctcaattatgcacccctggagaagtgaccacgctggaacccacccacccgctgtgctgaccatgggccctgagcgtcctaccccgaattcacgaggctgaggcatccgggagctggcgtaatgcctggccgcagtgtgtgtgtatcccataccccactctggaaggaaccatccagtaaaggtctttcagaaccactaaggtcccagccctcactaggatgtcaggagccaggtctaggcccagctttcacactgtggcagcccagtgaaagcagactgggccatgaactctcctagccctggggccagcctggtttcaaagggacccctgcaggaggcgctncaaggagaagctttcc

SEQ ID NO: 107625 - DNA, 512 bp, Homo sapiens
ttttttttttttcacttttccaatgagtttttattagcaggtaagtcatgatttaggatcctggggtggggatcactgggtaccaggtcccccttcaccatcctgggagaaggatggaggacagaggaaagggagatgcagccagttcagatcttcccgggaaacgtgccttcagcccgttgctcatcccagtctgtgacccaggatgtggggcagagggactggtacacacgctggtaccattcgcacacagagatatcgcctcctttagcggtcattgccttctgacagcggtggaagtccaggtagttctgccagcagtttctagtctggttctggttggggaagcggctgtcaaaaggggcagtcttgtagttcttgattttggtctccatgtcttccgccatggtgctgaatcctaaaggcaccccggattcaacctgcagctcaatgtgaccctcagcaaagacaccacagtcggacaggaagcggaactactaccagccggaagc

SEQ ID NO: 107626 - DNA, 3969 bp, Homo sapiens
gccatttcgccgattcctccatgcgagttgctgtgcgtttctctgttgtctcggtagaaggccagagtcacacacggtcctaagagctgggcaccaggaagcgaaggctgatctgaagaagacacttgaatcatgggtgacgttaaaaattttctgtatgcctggtgtggcaaaaggaagatgaccccatcctatgaaattagagcagtggggaacaaaaacaggcagaaattcatgtgtgaggttcaggtggaaggttataattacactggcatgggaaattccaccaataaaaaagatgcacaaagcaatgctgccagagactttgttaactatttggttcgaataaatgaaataaagagtgaagaagttccagcttttggggtagcatctccgcccccacttactgatactcctgacactacagcaaatgctgaaggagatttaccaacaaccatgggaggacctcttcctccacatctggctctcaaagcagaaaataattctgaggtaggggcctctggctatggtgttcctgggcccacctgggaccgaggagccaacttgaaggattactactcaagaaaggaagaacaagaagtgcaagcgactctagaatcagaagaagtggatttaaatgctgggcttcatggaaactggaccttggaaaatgctaaagctcgtctaaaccaatattttcagaaagaaaagatccaaggagaatataagtacacccaagtgggtcctgatcacaacaggagctttattgcagaaatgaccatttatatcaagcagctgggcagaaggatttttgcacgagaacatggatcaaataagaaattggcagcacagtcctgtgccctgtcacttgtcagacaactgtaccatcttggagtggttgaagcttactccggacttacaaagaagaaggaaggagagacagtggagccttacaaagtaaacctctctcaagatttagagcatcagctgcaaaacatcattcaagagctaaatcttgagattttgcccccgcctgaagatccttctgtgccagttgcactcaacattggcaaattggctcagttcgaaccatctcagcgacaaaaccaagtgggtgtggttccttggtcacctccacaatccaactggaatccttggactagtagcaacattgatgaggggcctctggcttttgctactccagagcaaataagcatggacctcaagaatgaattgatgtaccagttggaacaggatcatgatttgcaagcaatcttgcaggagagagagttactgcctgtgaagaaatttgaaagtgagattctggaagcaatcagccaaaattcagttgtcattattagaggggctactggatgtgggaaaaccacacaggttccccagttcattctagatgactttatccagaatgaccgagcagcagagtgtaacatcgtagtaactcagcccagaagaatcagtgcggtttctgtggcagagcgagttgcatttgaaagaggagaagagcctggaaaaagctgtggatacagcgttcgatttgagtctgtacttcctcgtcctcatgccagtataatgttttgtactgtaggtgtgctcctgagaaaattagaagcaggcattcgaggaatcagtcatgtaattgtagatgaaatacatgaaagagatattaatactagcttccttctggtagtactgcgtgatgttgttcaggcttatcctgaagttcgcattgtttttatgtctgctactattgataccagcatgttttgtgaatatttcttcaattgcccatcattgaagttatggaggacttacccagttcaagaatattttctggaagactgcattcagatgacccactttgttcctccaccaaaagacaaaaagaagaaggataaggatgatgatggtggtgaggatgatgatgcaaattgcaacttgatctgtggtgatgaatatggtccagaaacaaggttgagcatgtctcaattgaacgaaaaggaaactccttttgaactcatcgaggctctacttaagtacattgaaacccttaatgttcctggagctgtgttggtttttttgcctggctggaatctgatttatactatgcagaagcatttggaaatgaatccacattttggaagccatcggtatcagattctacccctgcattctcagattcctcgagaggaacagcgcaaagtgtttgatccagtaccagttggagtaaccaaggttattttgtccacaaatattgctgaaacaagcattaccataaatgatgttgtttatgtcattgactcctgcaagcagaaagtgaaactcttcactgctcacaacaatatgaccaactattctaccgtatgggcatcaaaaacaaaccttgagcaacggaaagggcgagctggccggagtacggctggattctgctttcacctgtgcagccgagctcgttttgagagacttgaaacccacatgacaccagagatgttccgaacaccattgcatgaaattgctcttagcataaaacttctgcgtctaggaggaattggccaatttctggccaaagcaattgaacctccccctttggatgctgtgattgaagcagaacacactcttagagagcttgatgcattagatgccaatgatgagttgactcctttgggacgaatcctggctaaactccccattgagcctcgttttggcaaaatgatgataatggggtgtattttctacgtgggagatgctatctgtaccattgctgctgctacctgctttccagagcctttcgtcaatgaaggaaagcaactgggctatatccatcgaaattttgctggaaacagattttctgatcacgtagcccttttatcagtattccaagcctgggatgatgctagaatgggtggagaagaagcagagatacgtttttgtgagcacaaaagacttaatatggctacactaagaatgacctgggaagccaaagttcagctcaaagagattttgattaattctgggtttccagaagattgtttgttgacacaagtgtttactaacactggaccagataataatttggatgttgttatctccctcctggcctttggtgtgtaccccaatgtatgctatcataaggaaaagaggaagattctcaccactgaagggcgtaatgcacttatccacaaatcatctgttaattgtccttttagtagccaagacatgaattacccatctcccttctttgtatttggtgaaaagattcgaactcgagccatctctgctaaaggcatgactttagtaccccccctgcagttgcttctctttgcctccaagaaagtccaatctgatgggcagattgtgcttgtagatgactggattaaactgcaaatatctcatgaagctgctgcctgtatcactggtctccgggcagccatggaggctttggttgttgaagtaaccaaacaacctgctatcatcagccagttggaccccgtaaatgaacgtatgctgaacatgatccgtcagatctctgagccctcagctgctggtatcaaccttatgattggcagtacacggtatggagatggtccacgtcctcccaagatggcccgatacgacaatggaagcggatatagaaggggaggttctagttacagtggtggaggctatggcggtggatatagcagtggaggctatggtagcggaggctatggtggcagcgcaactccttcgggcaggatatgtgcaggtgttggtggaggctatagaggagtttcccgaggtggctttagaggcaactctggaggagactacagagggcctagtggaggctacagaggatctgggggattccagcgaggaggtggtaggggggcctatggaactggctacttggacattgaagaggaggtggcggctataaaacttggttatgtcagttctgtgtgtagacag

SEQ ID NO: 107627 - DNA, 542 bp, Homo sapiens
  misc_feature (1)...(542): n = a,t,c or g
acgctcgatcctcagagcggccgaatacatgtcgtcattttgcanagctgagttaggtcacatgatggacaaatctgaatgtttctcttgtttctttccatggcttgctctaccctgcctcaaaaagaagttgtccctttttatttttcctagtgggtccagagaacaataagctctaagaatctgaatcctgacaacagcctcttaacccatgggtacagtgccaggagtgaagacaaacagacaaataaaattagaggtggcaaagaccaagaaccctaactgggactgaggagactntaatgggttcggtgtttcattcagtagtaccccaatagacttctacagggtgtggnttccacactgtaatgaacttctaatgttttaagagctctttttagattaaagaagtattaaacccttaaattaagaaggtattacccccggctgggcacggtggctcacgcctgtaatcccgggactttgggaagaagaggcaggcggatcaccagggcgggagatcgacatcggcctggccaacn

SEQ ID NO: 107628 - DNA, 1852 bp, Homo sapiens
tttttttttatgttttttttaactgtttatactggtttaatccatgtcaaatgtagtttacaaagggaaaggacaagtacctttgtatagaatatacagacacagcatcacaccatagggcccacgggagggtcggggagacgacactttttccctgggaaaggcagctctaatcccaggaatggttctcagcagaggctgggtggccaggagcactgtcctctagccccctaactcagcctctgcttcagctcggttcccatttcctgcctctaccccccaactccttataaagagccccatgagctaagactaaggagaggatcatgtcccttggggcgtgtgccccatgtctgggagaagaaatatacaccactgaacaccgagcacatgggagagggaagggacaccacaggagagagagaggcaggtaccccaagaggtggatgggccgagctcccagccaaccctgaaggaggcgctgcttccaggggttcttaaaaaagaagaaaatcatacaaccaaagggggaggggacaggtagagggcgaggagttgtcccatttatacacaacattgtaaacatacacggtctatattacatgtgcttcagtctggtgtttgcatgtctgtctgtccgtctgtcagtatgggggctggatcttaggagccgtgccccactactcccccaacccccacctccctgccccaccctgggaacagagctggaacaggtatggcccccaaaccataggtgggagccagcaggtagtgcctgggccacagcctctactctggctccagagtcctgcgtgtgtaaatgtgtgtgtgtgtacgcatgtttgagtatgtgcatgtatgtacatggggaacctgtgtgcaagtatgtacaaagggagacggtcactgtcacagaggctgggggcaggtggggctgctggaggcgaggcctgcctggggcagatagctcacaagtagatcctccgcaggtctccgggcgctgtgatcgtgttgcactgagggcagagcttcttggcacccagggtccgcagccagcactcctcgcagtgcacgtgccaacactggatggacgttaggggcatcgagtacgagtccatgcagatgaggcatttgtaacggtccccacgagatagctgccgttcaagttctctgacccgagccttcagagcctcaaacgtggtcacagctgaatcttcggtgattttctcgatgtcgctgttcttgcaggtcttctgcatggcctcctgcttgctgctttcaccattgctggtggatggcatctcatcactggcccatttagagaactcaggtgtgatgcgcgtgctgggagggccgccatttaggactgcgccccgaagtgcctctctctccttggcttcaccaggctcctcgcctgtgcaggggatgacatcagcctctgtgtattgtggcttcccatactccagagtgtcatccccatccacatccaagtcagcatcactgtccgggttctctttgccgctgcacatgatgaagccagagcctcggaagccaccttccaggagagtggtggcccgtatccgcttctgtccacaccactcatactcctcaaagcggttgttgttctcatgctcgatgtccacagcatcatcctcagccatgcaggagccttccctctgcccttcatcttgcttcctccgtttcattttcccaatccgagcattcagtcgggtctgccggttggctcgtactcgcagaaaggtctacttcctccctcccgccggcccctctgctcctccggccgctccgggctctcggcatagccgccgggcgctgctctaacgggacgaaa

SEQ ID NO: 107629 - DNA, 677 bp, Homo sapiens
  misc_feature (1)...(677): n = a,t,c or g
aaagaccaatgttctgttaattacctgaagcgcgtatatattatggcagttgatttataatgaagctccttaaaagcatgccaattactaagaaaaacctcatcctaggtcattttgtgaattcagagacagtgataaagaatggatcatttgcgttggggagaagcaaacaaaaaattccaaaatgctctggggcaaaaagaagactaattccttgctgttggtctttattcatagagaaggtgtacatttttatctttcagaatgttggctcccagggtatatagcgtagttggcaagcgagcattctccccctctgtgtgtgtacgagctcatggtaagtgtgactattcttactcctaaatagcctgaactaatttcattttgctcctgctgtgtataaagccctgtgctggagttttaaagaccttaattcggctcttgagggtctataggggagatataaatgttctcacagggcttggttctagattaagaagtgtttataagtcaaatcgaatctattgtggatctttggttatactgatacttctccgcttacccttcccttccgttccacttttctaagcttcgagatctacccctttcaaaagatcttctgcaccataactgactgaccttaatgacctccctcnccaccttgcccgcaatgtatt

SEQ ID NO: 107630 - DNA, 6290 bp, Homo sapiens
tttttttttttttggttggttggttatttatttacttgatacacttcattttttagagtagctttagggttacagaaaaattgagcaaaaagtacagagaattctcatataaacctttaaccctcccatcctccacaggctccccaattattaacatcttgcatcattatggttcatttgttacaattgatgagccaatagtggtacactgttattaactgaagtccagagttgacactagggtttactctgtgttttccgttcactgttttccattctctgcgttttgacaaattacagtaccctagagagtactttcactgccttaaaaatcacctctctacctgccatccctcctttcccctcaactctcagcaaccactgggtcctttcactgggctcaatagttttggcctctcccaaaatgtcatataattggcaatcatacgaaatagaaagccttttcagattggttttcacttaacaataagcatttagggtttctccgtgtcttttaatgacttgatgtccaattcctttttatcatctacctgaggactgtatcctgcaatcctgctgtaattgcttattaatgtcagcagggtttttgttatttagaattctctacaaagacaatcatgttacttgtgaacaaagttgtatttcatcctttcaaatctatgtgcattttatttcttttttttttaacactgcattatatagcacttccagtacaatgctgaaaagcagtggtgtggtgttccttgccatgttcctgatcttagtaggaaagtgtctagttggaaacatcaaggataatgttagctgtagggttttttgtagtatgttctttaccaacttgagtaagttctcctgtattccttctgtgttgagaggttttaacatgaatggatattggattttgtcaaatgctttttctgtacctattgatatgatcgtatttcatctttgagctgctaatgcatgcaatggattacactgaatatcaaatgttgaacaagccttgcattcctgatttgctaatattttgaggatttctgcatctgtgttcaatggaaatattgatctgtagttttcctttcttgtaatatctttgcctggttttgctattagggtaatactggcctcacaaaatgagttgggaagtgttatctctgcttttattttctgaaagagatggtagagacttggtatcatttctaccttaagtatctcaaaaacacatcagtgaacccagctggtcctggcactttgttttggaaagtttcattattattttttgagatgcagtctcattctgtcacccaggctgcagtacagtggcacaatctcagctcactgcaacatccacctcccaggttcaagtgattcttctgcctcagcctcctgagtagcttcgactacacacgcatgccaccatgcccagctaattttttgtatttttagtagatagggggtttcaccatgttgaccaggctggtctcgaactcctgaccttgtgatccacccgcctcagcctcccaaagtgaagtgctgggattacaggcatgaaccactgtacctggccttggaaggttattaattactgctttggtttatttaatagatacatatgcctattgaggtctatcttgtgtgagctttgagagaatgcgtcttgcaaggaattggtccattttagctaagttatcaaatttatggacagagttgtccatgtttctttctaatccttttggtgaccataggattagctgtgatggcctctttcatttttggtattagcaatatttgtcttctgtttgttcttaagctagctagaggtttatcaattttactgaccttttcaaggaaccagttttgggttttatcgattttctcttttcaatttcaatgatttttactctaatgttttttcaggttactttggatttaatttgctcttctttttctagtttcctaaagtggaagcttagattacttgtgtaatctaggatcactagactgtataatcttagattatttgtatgatctgatcatgtaatatagtgtacaatcttcacactatcaataaaagccccacaccagcttgattctggttctgctccagcctcaaccctcctcttcatattctcaaaagtctgagggcccagatccctgtctggggacaatgagccttgaaatgacagtccaacagccctgggcagccctgggctgtatgtgtgggcctttccagggccctgtcttggagagcagctgcttaaagaaaatttggactaccacttatgctgaaggctggaatgttcacatatgtaccctaggcacttcatggcatggcatgagccacaggtaggaagagaaagggagtaacatggaggcgagcctagatcttcacatgtacaggatagattttttttagataatttgttattttgatttataccttttaaatggataaacattagctctgtgggtctccttttaaattgtttcaggacatcacaaacatctgggatgggcctgataatgtaaccactactaaactaggatacctacttcctattcacaattacgttaaattccattatgcatatgaaacacacgatttatatcacataccacttatacatatataagtcttttgaacttcagggataattcgcagatgtgcttaatgctattgccctgattattcaatttatctgtgctttaaaaaaacttcatagtcaagtggatgcaagggatagggttgcagaaagcgtgtggttattaatacaaaaagggaactacttgaggctaaatcctttgtaatcctgatacagtacagatctcagattccttttcagttctgtaaactaatcgtgttgatggttactcaaatgtaaaagtcgtaaaagtttgatataaccacacacacacacatacacgtacacacacacacagagtgcatgcaaaccatagtaaaatctgactaagtctctatctaccagcaaggtaacatcgatttcttggacttgaccatatactatgattatacattatccttagaggaagtttggtgaagtgtacatgggaattctctctactcattaaacttcttgtgaggttattttaattattacctttgtttaagttcttaaagctttacattccacaatatacatctataaattattgttaggtgccctaaaaactattatggcatcaaactcaaaatataacttgtcgtattttatttctaagcaaaattttcactttagatttcttaaattgacaattttctcctcagtgtaaattctaacataaccttatttgcatttttgccaaaaactttcacaaattcaaaaaaaatctgtaaggtgttatgcccgtattaaccatctgatattacatagaatatcacttcctaacaaaagctgtcctataattgttgtagtctatgggtttatcccctactattactttggagtaacataaggtgagtttgtggatagttactgaacattcaggatgtcatcagggctttctccacagtgtgaatactctgaggcattatggaggctgacttgtggctggaaatttctaatatccatttcattcataaggttttctcctatatgtcttctctgatgtacaatgagatttgacttttgagagaaagttttcctgcatgtgttacattcatagggcttttcccctgtatgtgatctctgatgttgagcaagttccgatttacggtaaaagatttttccacattcattacactgacaagatttctctcctgtgtgagccctgtgatgtactgtgagtgatgatttgtgcctgaagaatttcccacattcattgcattcatagggtttctcccccgtgtgctttctctcatggaaaataagtcctgattttacacagaaagattttccacattcattacatttatagggcttttcttgtgtatgggttctctgatgtacaattagagctgacttatggcagaaagcttttccacactcattacattcatagggtttctcccctatgtgaattctctgatgctgagtgagttgtgacttctggcagaaggtttttccacattcattacattcatagggtttctcccctgtatgtgttctattatgttttgttaggtatgatttattgtaaaagatttttccacattcatgacattcatagggtttctcccccgtgtgtgttctataatgttgagagagggttgacttatggctaaagaatttcccacattcaggacatgcaaagggtttctcccctgtgtgcgttctctgatgtattgtgaggtctgacttcaagcagaaggttttcccacattcataacattcataaggtttcaaccctgtatgaattatctgatgcctggtgagtactgacttgtggtagaaagttttcccacatgcattacattcataaggtttatctcctatgtgagttctctgatgctgtgtaagatgtgacttttgacaaaaggatttcccacactcaagacattcaaaaggtttctcacctgtgtgagttctctggtgtactgtaaggtgtgaattcatacagaaggattttccacattcataacattcatagggtttctgccctgtgtgtgttctctgatgtttagtgaggtcagatttctggtaaaaagtttccccacatgcattacactgatagggtttctcccctgtatgtgttctctggtgtaatgtgagggctgacttatggctaaaggctttcccacattcattgcattcaaaaggtttctcccctgtgtgtgatctttgatgtttagtgaggtttgacttatcccagaaagctttttcacattcattacattgaaagggtttctgtcctgtgtgcaccctctgatgtcgagtgagatgtgacttctcccagaaagctttcccacattcattacattcaaagtgtttctctcctttatcacctttctgaaggtgtgacagacacaatttcctcctgaaattattcccactttcgccacaatcatagtgtttcatagataccccatgaggtttagaaagggtggacttcacacataaaaacttctcacaatcactaaattcatagtgattgtcccttgacggagatatctgatggaacaagagggatgaactatcacagaaagttctcccaaattcattatagtcacagttattctcttctgcattctctctcttccgtgtattgaatactgccttttcaaggagggtttcctgacatatactgtattcaaaattgtggtctaaagtttgaatcttctcatgctgcaaagtgttctcacgatgactcagagtgttcctatttttcaaaacttcatttttctctcgagtatgagtttcatcatgcttaatattgagtaacaatttcccacatgcattaaattcgtcagacttttttcctaaatagtttatcttactgataaccaattctgaaacagtgttgaaactcattccacatgaatcacactgacagaacatttttctggaaggaaaagaacttacgtccacattaaatggtattcctattacatcaccttgttccttagtcagcatttcattattgatgaatacaacttcccacaaatgtttagattggttttcttggctcctctctttcaggtgatcagctgtccagacttctggaaagctttggcttgggaattcttcctcctgtttccatggctcttctccttgttgcagcctgaagatcacctctggtttgtgaacacaataccccactgagacaaggttgctgtagttctccagcatcacatctctatacagagccctctgactagggtccaggtgctgccactcctcctgggtgaagcccacagtcacatctttaaatgatactgactcctgggacttctgttctaccttgttcattttgttctgttcttggaaagacggagacaactctgaagatacagcccactccctcgtcgggttgcattcgccatagaaaagcgcgtagacccttgaaatcccgggaccgcctcccacgcaaaacctgagaaaaacaaaaggaaaggcggaaacgcagacatagccggcggacgaggcatgcgcagagcccacgcgcacagcttgatgctgttggcgccctacctggaaactacctttcccgtgaggccgggcgagcagcccttcggattggtagagaagtgccccgctaggcagtgggcagatgcggcctgagttggtgctggaactgcctgcagcacgaaa

SEQ ID NO: 107631 - DNA, 3083 bp, Homo sapiens
cagtggcggaattctagccaccggtgtctccttctacatccgcctctgcgccggctgccacccgcgctccctccgccgccgccgccttgctgctgctcaaagctgctgccgccccttgggctaaaaggttttcaaatggaacattttgatgcatcacttagtacctatttcaaggcattgctaggccctcgagatactagagtaaaaggatggtttcttctggacaattatatacccacatttatctgctctgtcatatatttactaattgtatggctgggaccaaaatacatgaggaataaacagccattctcttgccgggggattttagtggtgtataaccttggactcacactgctgtctctgtatatgttctgtgagttagtaacaggagtatgggaaggcaaatacaacttcttctgtcagggcacacgcaccgcaggagaatcagatatgaagattatccgtgtcctctggtggtactacttctccaaactcatagaatttatggacactttcttcttcatcctgcgcaagaacaaccaccagatcacggtcctgcacgtctaccaccatgcctcgatgctgaacatctggtggtttgtgatgaactgggtcccctgcggccactcttattttggtgccacacttaatagcttcatccacgtcctcatgtactcttactatggtttgtcgtcagtcccttccatgcgtccatacctctggtggaagaagtacatcactcaggggcagctgcttcagtttgtgctgacaatcatccagaccagctgcggggtcatctggccgtgcacattccctcttggttggttgtatttccagattggatacatgatttccctgattgctctcttcacaaacttctacattcagacctacaacaagaaaggggcctcccgaaggaaagaccacctgaaggaccaccagaatgggtccatggctgctgtgaatggacacaccaacagcttttcacccctggaaaacaatgtgaagccaaggaagctgcggaaggattgaagtcaaagaattgaaaccctccaaaccacgtcatctgattgtaagcacaatatgagttgtgccccaatgctcgttaacagctgctgtaactagtctggcctacaatagtgtgattcatgtaggacttctttcatcaattcaaaacccctagaaaacgtatacagattatataagtagggataagatttctaacatttctgggctctctgacccctgcgctagactgtggaaagggagtattattatagtatacaacactgctgttgccttattagttataacatgataggtgctgaattgtgattcacaatttaaaaacactgtaatccaaacttttttttttaactgtagatcatgcatgtgattgtaaatgtaaatttgtacaatgttgttatggtagagaaacacacatgccttaaaatttaaaaagcagggcccaaagcttattagtttaaattagggtatgtttccaagtttgtatttaagtttgtaatagctctgctttagaaaaaatymaaagaccatgatttatgaaactaatgtgacataatttccagtgacttgttgatgtgaaatcagacacggcaccttcagttttgtactattggctttgaatcaagcaggctcaaatctagtggaacagtcagtttaactttttaacagatcttatttttttattttgagtgccactattaatgtaaaaaggggggggctctacagcagtcgtgatgaaacttaaatatatattctttgtcctcgagattttaggaagggtgtagggtgagtaggccatttttaatttctgaagtgctaagtgtttttatacagcaaacaaaaagtcaattttgctttccaccagtgcgagagaggatgtatacttttcaagagagatgattgcctatttaccgtttgacagagtcccgtagatgagcaatggggaactggttgccagggtctaaatttggattgatttatgcactgttatctgttttgacacagatttccttgtaaaatgtgcctagtttaccaaaattaacaaagggggggaaaggaccttagaactttttaaggtaaaatcaaatatagctacagcataagagaatcgagaaatttgatagaggtaacttgtttaatgtaaatctaatagtacttgtaatttctttctgcttagaatctaaagatgtgtttagaacctcttgtttaaaaataatagactgcttatcataaaatcacatctcacacatttgaggcagtggtcaaacaggtaaagcctatgatgtgtgtcattttaaagtgtcggaatttagcctctgaataccttctccattgggggaaagatattcttggaaccactcatgacatatcttagaaggtcattgacaatgtataaactaattgttggtttgatatttatgtaaatatcagtttaccatgctttaattttgcacattcgtactatagggagcctattggttctctattagtcttgtgggttttctgtttgaaaaggagtcatggcatctgtttacatttaccttatcaaacctagaatgtgtatatttataaatgtatgtcttcattgctaggtactaatttgcagatgtctttacatatttcaatacagaaactataacattcaatagtgtgctgtcaaagtgtgcttagctcacctggatatacctacattgttaaatgtctaaacagtaatcattaaaacatggtaaactgatatttatgtaaatatcagtttaccatgctttaattttgcacattcgtactatagggagcctattggttctctattagtcttgtgggttttctgtttgaaaaggagtcatggcatctgtttacatttaccttatcaaacctagaatgtgtatatttataaatgtatgtcttcattgctaggtactaatttgcagatgtctttacatatttcaatacagaaactataacattcaatagtgtgctgtcaaagtgtgcttagctcacctggatatacctacattgttaaatgtctaaacagtaatcattaaaacatttttgat

SEQ ID NO: 107632 - DNA, 470 bp, Homo sapiens
aatacagggcctgtgataaatgtctcttccatctcctccaactgcctcagcccatttctggcaattcttcaggtccagagaaggccacagaggtgagatgcaagaggcttgtgatcacaggtggccagggaagcacgcggccaggaagccagatcccaagatgcaccccactgccacttccgttgactcacgatccccaaacttcactctgcacaagaaccagctggtcccgtgtcaccacccccacctccctcacccacattccagattgggggcaggtccagggcggagcccaggaatcagtattgtccacaggtagcccctgtcccagctctaagggggtgtctgccgctcagccctggggaaccaccccatgacaccagctcacctcgtcatctgacctgtggcgggatcgtcttttaaaaagtaattgtagtttatttcttctcccccgcctctctcttcaaaag

SEQ ID NO: 107633 - DNA, 472 bp, Homo sapiens
  misc_feature (1)...(472): n = a,t,c or g
aatacaaggggtcattatataggcagtgcttcacctcacaaaattacagccagatgaggcaaacagccactttccacttaaagagaaaaagggggctcacataggtatttaccaagcatgaataataggagtaagctgtataaatacttttgttggacatcttactatattatgcattcaataattatttttgagtaccaagcactgtgcaaggctatctggtagcaaacaaaaggaaacactattattttattcattgagcttagagatatggcaattacactatagcaaatctttataaacattcctacactaatatgcaaataacttgtccactaaaataaatttttgagctgggtgaggttgctcatgcctgtaatcccaacattttgggaggccaaagtgggaggatggcttgaggccaggagtttgaggatgcagtgagctatgagctataaccgccactgcactn

SEQ ID NO: 107634 - DNA, 1970 bp, Homo sapiens
ccctggttgagggagctgcagggcaaggagtatctgacggcgccaggttgcgtaagtgcggcacgaggagttttcccggcagcgaggaggtcctgagcagcatggcccgggggagcgccttccctgccgccgcgctctggctctggagcatcctcctgtgcctgctggcactgcgggcggaggccgggccgccgcaggaggagagcctgtacctatggatcgatgctcaccaggcaagagtactcataggatttgaagaagatatcctgattgtttcagaggggaaaatggcaccttttacacatgatttcagaaaagcgcaacagagaatgccagctatttctgtcaatatccattccatgaattttacctggcaagctgcagggcaggcagaatacttctatgaattcctgtccttgcgctccctggataaaggcatcatggcagatccaaccgtcaatgtccctctgctgggaacagtgcctcacaaggcatcagttgttcaagttggtttcccatgtcttggaaaacaggatggggtggcagcatttgaagtggatgtgattgttatgaattctgaaggcaacaccattctccaaacacctcaaaatgctatcttctttaaaacatgtcaacaagctgagtgcccaggcgggtgccgaaatggaggcttttgtaatgaaagacgcatctgcgagtgtcctgatgggttccacggacctcactgtgagaaagccctttgtaccccacgatgtatgaatggtggactttgtgtgactcctggtttctgcatctgcccacctggattctatggagtgaactgtgacaaagcaaactgctcaaccacctgctttaatggagggacctgtttctaccctggaaaatgtatttgccctccaggactagagggagagcagtgtgaaatcagcaaatgcccacaaccctgtcgaaatggaggtaaatgcattggtaaaagcaaatgtaagtgttccaaaggttaccagggagacctctgttcaaagcctgtctgcgagcctggctgtggtgcacatggaacctgccatgaacccaacaaatgccaatgtcaagaaggttggcatggaagacactgcaataaaaggtacgaagccagcctcatacatgccctgaggccagcaggcgcccagctcaggcagcacacgccttcacttaaaaaggccgaggagcggcgggatccacctgaatccaattacatctggtgaactccgacatctgaaacgttttaagttacaccaagttcatagcctttgttaacctttcatgtgttgaatgttcaaataatgttcattacacttaagaatactggcctgaattttattagcttcattataaatcactgagctgatatttactcttccttttaagttttctaagtacgtctgtagcatgatggtatagattttcttgtttcagtgctttgggacagattttatattatgtcaattgatcaggttaaaattttcagtgtgtagttggcagatattttcaaaattacaatgcatttatggtgtctgggggcaggggaacatcagaaaggttaaattgggcaaaaatgcgtaagtcacaagaatttggatggtgcagttaatgttgaagttacagcatttcagattttattgtcagatatttagatgtttgttacatttttaaaaattgctcttaatttttaaactctcaatacaatatattttgaccttaccattattccagagattcagtatcaaaaaaaaaaaaaattacactgtggtagtggcatttaaacaatataatatattctaaacacaatgaaatagggaatataatgtatgaactttttgcattggcttgaagcaatataatatattgtaaacaaaacacagctcttacctaataaacattttatactgtttgtatgtataaaataaaggtgctgctttagttttctgaaaaaa

SEQ ID NO: 107635 - DNA, 509 bp, Homo sapiens
  misc_feature (1)...(509): n = a,t,c or g
aatacatcgtggggtaatattctcaggaagtactctgcgagatgaatagatctggcgtggtctcaaatataaaacgaggctgggcctggtggcagctcacaacaacaatcccagcactttgggaggctgaggtgggaggactgcttgagcccaggagtttgagactagcctctccccaacctccacagcatgaggattacagtatgagctactgcgcccagcctagattttcactctgtatcagagggttcatcttctactctctgtggttttaaaatagaaatatatcaaattagaggaagagaagaaaaataataaattaaaagtttgaagtttaaataaactcaaaggcaatcagtgttatctaaaagaagaaaaaaattatgaattcataaagagagccttaactaagaaagtgggttgtaaatggccaccaatctatgccactgaataaaaggaatcatttcatcataaactcatggagacacacacaatccggaggggagacn

SEQ ID NO: 107636 - DNA, 520 bp, Homo sapiens
aatacatgcctgccagttatctgagaccacagctatgggcgcccatgcccagatgattaaaacaaaaaaaattctttttgtaaatacagagtcttgctctgttgcccaggctggttcttgaacccctggctcggagagatcctcccatctcaggctcccaaagtgccggaatttaaggaggaagccactatgcctggccaaatatcacttttatatttaccaaattgatagcacaatttttttgtttttttgagatgcagtcttgctctgtcgccaggctggagtgcaggggcgcaatctcagctcactgcaacctccacctcccgggttcaagcaattctcctgtgatggcacaaattttaaaaaatcagagaaaatcaaattttgatgaggatgctacattactggggctctcttacacactactgggggaaatataaattagcatacctgctctgaaaataatttgcccttctctattgagaaaggagatgtccacacagactttggatccaaaaat

SEQ ID NO: 107637 - DNA, 472 bp, Homo sapiens
aatacatttgctcttgtttttctagtttttaaggtagaaactcagacctttcttctttttaaatatattttaacatagatatttagtgctagaaatttccctgagtaaagcttagcagcatcccactaattctgagatgtatttttgcttttattccactcaaactactttcttttttttgagacagggtctcactctgtcagccaggctggagtcaagtggtgtgatctcagctcactgcagcctccacccctgggctcaagcgatcctcccacctcagcctcccgagtcccggccctttttttttttttggaattttaaaaaaaaacgggccccccccacttgggccgggggggcctccacccccggacccaaggggattggccggcctaacccccccaaggggccaaaaggacgggcaggacccattttgcccgccctcaaacaactttaaaaaatctttttggacccg

SEQ ID NO: 107638 - DNA, 477 bp, Homo sapiens
  misc_feature (1)...(477): n = a,t,c or g
aatacaccgtctgggtaagaattattacactgagaagcacttttaacataagcttcttgatactagtgaactggaatgaatgggatttgatgatatttcactgagttctacataaatttattttattatataaacatcagaaatttccagtcatgtaaatcagattcatacttacttgctagaagcaggcaggaaagcgcaactaaatgcagctgctggatagagatgtcatagcggtccataaacaggtccagtaaatagacagcaagatggcgggcagaagggcagagtgtgaagcgattgctcacaatggcaatcaagtcggcaaaataccgtctgagacttaactgaggggactggcctttataggagggcaacttcagctcctaagtcaaaaggaacaacatttagtctgacctatctgtaggcgtatccccacaaggcaatgacttaacattgnttttccaatatattagg

SEQ ID NO: 107639 - DNA, 458 bp, Homo sapiens
aatacatgggtgcagatgggtgtgaatcctggctttaccacttattaaaaatgtgaatttgtaccaccattttgcatacatacacatatacatatatgtatatatacacacacacacatgcccagtctctctctgtgtgtgtgtgtgtgtgtgtgtgtgtgtgtgtgtgtgtgtgctcaaatataaaaaaagacttagtgtataaaacgtgtgatatatattaggaaacggtcttacacttatgtaattataaattacctatttattttacgggaacatttcttatactggggataaaaaaaaaccgccgggttttaggccaactaattttatattttgtagaacacctgtcactctgggtgttataaacaaacctttttctccgctgttttttactgttattacctttggtttatgagtgctctcttactaaaaaatttctttttatttcatttttg

SEQ ID NO: 107640 - DNA, 470 bp, Homo sapiens
  misc_feature (1)...(470): n = a,t,c or g
caagaccacctttctgttgttaagttccctcaataaatcacccagttccaacaaactgtctctttgatttctcagctcctttggcatttgggtttgctttgcctttatgtgcctttcatggaacactactgaattgaaataaccttagtacccccatctctgcgctttcctcctccttccatccatcagttcattccgagctggggtattttttttctcctatctctctttgactgcataccctctgacatggaagcctccagagcctccagccactccccagcccacaccaaatcctccccctggccatccagcaaccaggggccccaaatctgcgcttctggatcacagctatgcctgtgcttctgctcctcctctcggtacagaaggcactgccccttctccttcttttgctttgatctgatgcactcaccaagacccagtttgctgacctcccttctgagaagtgn

SEQ ID NO: 107641 - DNA, 1532 bp, Homo sapiens
tttcgtcgctgtcaccgccatggctgccccgtgtttgctgcggcaaggacgagccggggcgctgaagactatgctccaggaagcccaggtgtttcgaggacttgcttctacggtttctttgtctgcggaatcagggaagagtgaaaagggtcagccacagaattccaagaagcaaagtccaccaaaaaatgtagtggaaccaaaggagaggggcaagctcctagccacccagacagcagctgaattgtctaaaaacttatcttcacccagttcttacccgccagctgtgaataagggcaggaaggtagctagtcccagtcccagtggcagcgtgctattcacagatgaaggggttccgaaatttttgtcaagaaagactttggtagagtttccacagaaagttctgtctccattcagaaaacagggctctgattcagaagctcgtcaggtgggtcggaaagtgacgtcgccttcgtcttcatcctcttccagctcctctgattctgaatctgatgatgaggctgacgtttcagaggtcactcctcgagtggtgagcaaaggcagaggggggcttcgaaaaccagaggcctctcattcctttgaaaacagagccttccgagttacagtatcagcaaaagagaaaaccttgctgcagaagccgcatgtggacattactgatccagagaagccccaccagccaaagaagaaagggtcccctgctaagccatcagaaggcagggaaaatgcgagaccaaaaaccacaatgcccagatctcaagtagatgaagagtttttgaagcaaagtttaaaggaaaaacaattgcagaaaacatttagattaaatgaaatagataaagaaagccaaaagccatttgaagttaaaggacccttacctgtccacacaaaatcagggttgtctgcgccaccgaagggcagcccagcgcctgctgtgttggcagaagaggccagagcagaggggcagctgcaagccagtcctcctggggcggcagaggggcatctggaaaaacccgtgccagagccccagcgcaaggcggcccctcccctgcccagaaaggaaacctcagggacgcagggaatagaaggccacctgaagggtggacaggcaatcgtggaagatcagataccaccaagcaatttggagacagttcctgttgagaataaccacggtttccatgaaaagacagcagcgctgaagcttgaggccgagggcgaggccatggaagatgcagccgcgccagggaacgaccgaggcggcacacaggagccagccccagtgcctgctgagccgtttgacaacactacctacaagaacctgcagcatcatgactacagcacgtacaccttcttagacctcaacctcgaactctcaaaattcaggatgcctcagccctcctcaggccgggagtcacctcgacactgagggccctcggtgtgaagatgaaccttccaccgtcttcactgcatcctggagtgcaaaaataaaatccactcaagagtcaaaaaaaaaaaaa

SEQ ID NO: 107642 - DNA, 2124 bp, Homo sapiens
tttcgtagctcagaacagctggatcttgctcacactctttcaagagaagcttccttggacaaaaggaccctgccttggtgtgagagtgagggcagagggagctggagcaagtagaatttctctaaataccagctggctggggcccaggagattaaaaaacaccgggctagggttaagaaaaaaaacgaacccttccagtcaggtcagtgactggagagctccaaggaaagtctctcagtgacctggctgctggcaccatggactcagaaaagaaacgctttactgaagaggccaccaaatacttccgggagagagtcagcccagtgcatctgcaaatcctgctgactaacaatgaagcctggaagagattcgtgactgcggctgaattgcccagggatgaggcagatgctctctacgaagctctgaagaagcttagaacatatgcagctattgaggacgaatatgtgcagcagaaagatgagcagtttagggaatggtttttgaaagagtttccccaagtcaagaggaagatccaggagtccatagaaaagcttcgtgcccttgcaaatggtattgaagaggtccacagaggctgcaccatctccaatgtggtgtccagctccactggcgctgcctctggcatcatgtcccttgctggtcttgttttggcaccatttacagcagggacgagtctggcccttactgcagctggggtagggctgggagcagcgtctgctgtgactgggatcaccaccagcatcgtggagcactcatacacatcatcagcagaagctgaagccagcaggctgactgcaaccagcattgaccgattgaaggtatttaaggaagttatgcgtgacatcacacccaacttactttcccttcttaataattattacgaagccacacaaaccattgggagtgaaatccgtgccatcaggcaagccagagccagggcccgactccctgtgaccacctggcgaatctcagctggaagtggaggtcaagcagagagaacgattgcaggcaccacccgggcagtgagcagaggagcccggatcctgagtgcgaccacttcaggcatcttccttgcactggatgtggtcaaccttgtatacgagtcaaagcacttgcatgagggggcaaagtctgcatctgctgaggagctgaggcggcaggctcaggagctggaggagaatctaatggagctcactcagatctatcagcgtctgaatccatgccatacccactgaccccagaccagtgcagccagcaggggaggtgagccatacacaggccacgacaaaatgcaggcattttattagggggataaagagggcaaggtaaagtttatggagctgagtgttagtgactttggcatttctgtagctgagcacagcaggggaggggttaatgcagatggcaagtgcaccaaggagaaggcaggaatgctggagcctggaataagggaggagaggggactggagagtgtggggaataggaagaagaaatttcctttagactaacgaatatattggggggaggaatagaggggaggtgtgcaggaaccagcaatgagaaggccaggaaaagaaagagctgaaaatgcagaaagccgaagagttagaacttttggatacagcagaagaaacagcggctccactaccgacctgcccccggttcgatgtccttccaagaatgaagtctttccctggtgatggtcccctgccctgtctttccagcatccactctgtcttgtcctcctggaagtgtatctcagtcagccagtggcttcttgatgatggcggtggaggtggtggttgtagtgtgatggatcccctttaggttatttaggggtatatgtcccctgcttgaaccctgaaggccaggtaatgagccatggccattgtccccagctgaggaccaggtgtctctaaaaacccaaacatcctggagagtatgcgagaacctaccaagaaaaacagtctcattactcatatacagcaggcaaagagacagaaaattaactgaaaagcagtttagagactgggggaggccggatctctagagccatcctgctgagtgccctgtgtgtaagtcctaataaactcacctactcaccaa

SEQ ID NO: 107643 - DNA, 2141 bp, Homo sapiens
caaaagtcaaccgtcatgacaaaatcaatggaaagaagaagaccgccaaagaacatctgaggaaactaagcatgaaagaacgtgagcacggagaaaaggagaggcaggtgtcagaggcagaggaaaacgggaaattggatatgaaagaaatacacacctacatggaaatgtttcaacgtgcgcaagcgttgcggcggcgggcagaggactactacagatgcaaaatcaccccttctgcaagaaagcctctttgcaaccgggtaagtttgcttgttttccttgcttttggacatagtctgccaggtcaggacatggatacatttttctccctacggctctgtgctcaagccctgcagagggagatggcagagaggaaggctgcctacaagcatcacagtcccatccctgttggtaaccgtgttgcgcaaaaacaccttcatccccacccagtggggcccctgatctaatattcaaagtgtcagaggttccgtatttgtaataacaaatgggccctgactgtaaattagtgaagagtgaatgtaacttattacccacagggacaattccaaatgaaggccttaaatgatgctcagctaagctggttcttgtgtggcctctgtaccttcaaaagctgccgagtcctatgattacacgtgatgggacttgtacacttgaagtgaaacacagttttaaaacttgctttgtttagaattcccacctcatttttccatggacaaaagtattctttatgtcctagtgcacttacaatttggtattacctgggagtgaaaagaaatattacagccatgcctaactgacttcttgaggtaagattgttctgtcagaaaaccctctcccagttcccctgcagctcttcaggaatccacatctctgcagagctctttgttctcatgggtggcacctccagagtgaagaagatcctttgtcaagaagggaaacagaggggaaatgagagggtcctgcaggcagagctggaatcaacttccactctgcctcttgcaagctgtgtgaccccgggcacaatttctccttcctctggaaacctctgttttcttagatttggagcagggtggtcacactgaccttgcagagttctgagaatcagagacagaacataaaaggcctggaaaacattctccaaaaagaagctgcaacatgtgtggacaatgggcttttcatgcctctcttactgtctcttactgtctattgacctggtgcaagaaacatgctctggtgatggctgtgagggaggaatgaggatagacatagacactcctgtgtctcaaacatgcttctttattactctgttatgactctgtcttccctggggcaggaccccagcctgcctacatttgcagacagacacagtggcatgtggagacaacagtgtgtcccaatgacttttctttaccccccagctgtcggcagtactcagtggaagggtgatattatgacactgatactgctattttgaaacctggaggatggaaaggtgcaaaaatctatcaccagcaacagaaggtgcagactgtgttggtggcggtaattttgtccatcaaatgaatatgtgtgaaaacattccctcctttggccctacaggtcagaatggcggcagcggagcatcatcattcttcaggattgccctactggccctacctcacagctgaaactttaaaaaacaggatgggccaccagccacctcctccaactcaacaacattctataactgataactccctgagcctcaagacaccttccgagcgtctgctctatccccttccaccctcagctccaccctcagcggatgataatctcaagacacctcccgagtgtctgctcactccccttccaccctcagctctaccctcagcggatgataatctcaagacacctgcggagtgtctgctctatccccttccaccctcagcggatgataatctcaagacacctcccgagtgtctgttcactccccttccaccctcagctccaccctcagtggatgataatctcaagacacctcccgagtgtgtctgctcactccccttccaccctcagcggatgataatctcaagaaactaaggaagaataaataaataatataaaaataaaatgaaaaaaaa

SEQ ID NO: 107644 - DNA, 7172 bp, Homo sapiens
  misc_feature (1)...(7172): n = a,t,c or g
cgctcttccagatggcggcgcgtccgtcgcgagcgaccgggccgaggggaggccagcgaagccgagtaaaaccgccgcccgggagaagactgaaggagcagttgccgccgttggcggcggcccgagcagttttcgctgctgctacggctgttgccatgaggcgaggctagggaggacctcacttccccggggtgtaataatgttaactgaggccagtctatccatatggggatggggaagccttggcattgtcctttttctgataacctttggaccctttgtaatattttatttgacattttatatcctctgctttgtgggtgggggtttagtggttactctcctgtttggaaaaacaaactcagagaagtacctagaacagtgtgaacactcatttcttcctccaacatcacctggggttcctaagtgcttagaagaaatgaaacgggaagccaggactattaagattgatagaagattgacgggtgccaatataattgatgaacctctccagcaagttatccagttttccttgagggattatgtccagtattggtattatacactaagcgatgatgaatcttttcttcttgaaattaggcagactcttcaaaacgcactcattcagtttgctactaggtcaaaagaaatagactggcaaccttattttactacacgcattgtagatgactttggcacacacttacgagtattcagaaaggctcaacagaaaataacagagaaagatgatcaagtgaaaggtacagcagaagatcttgtagataccttctttgaagttgaagttgaaatggagaaggaggtttgccgtgatctagtgtgcacttcccccaaagatgaagaaggattcctaagggatttgtgtgaggtcttactatatttattgctacctcctggagatttccagaacaagatcatgcgatactttgtcagggaaatccttgcacgaggaattcttcttccattaataaatcaactcagtgatcctgattatattaatcagtatgtcatatggatgatccgtgattctaactgcaactatgaggcctttatgaacattattaaattgagtgacaatattggagagctagaagcagtcagagataaggcagcagaagaattacagtatcttagatctctagatacagctggtgatgatatcaacactatcaaaaatcaaataaatagcttactattcgtaaagaaggtatgtgactcaagaatacagcgattgcagtcaggcaaagaaataaatactgtgaaacttgcagcaaactttgggaaactttgcacagtccccctggacagcattcttgtagacaatgttgcactacaattttttatggattacatgcagcaaactggaggtcaagcacatctattcttttggatgacagtggaaggataccgggttaccgcccaacagcagctagaagttttattaagtcgtcagagagatggaaaacatcaaaccaaccaaaccaaaggtcttttaagagcagctgctgttggaatttatgaacagtatttatcagaaaaggcatctccaagagttactgttgatgactatttagtagcaaaattagcagatactttgaatcatgaagatccaacccctgaaatctttgatgacattcaaagaaaggtatatgaattgatgctacgagatgaaagattttatccttccttcagacagaatgcactttatgtgcgcatgttagctgagcttgacatgttaaaagatcctagtttcagaggatccgatgatggggatggagaatcttttaatgggtctcctacaggaagcataaatttgtctttagatgacctttcaaatgtttcttctgatgactcagtacaacttcatgcctacatttcagacacagtatatgctgactatgacccatatgctgtggcaggcgtttgtaatgatcatggcaagacatatgcattatatgccatcactgtacaccggcgcaacctaaacagtgaggagatgtggaaaacctatcgtcgttatagtgacttccatgacttccacatgagaatcactgaacagtttgaaagtctctcaagcatattgaaacttcctgaaaaaaagacttttaataatatggatagagattttttagaaaagagaaaaaaggatctaaatgcatatttgcagttactgttagctcctgaaatgatgaaggcatccccagctttagctcactatgtgtatgatttccttgagaacaaagcctacagtaaaggaaaaggggattttgctcgcaagatggacacttttgtaaatccacttcgcaattcaatgaggaatgtttcaaatgcagttaaatcccttcctgatagcttggcagagggaatgactaaaatgtcagacaacatgggcaaaatgtcagaaagattaggtcaagacataaagcaatcattttttaaggtgcctcctttaattcctaagactgattcagaccctgaacatcgccgagtttcggctcaacttgacgataatgtggatgacaatattccacttagggtaatgctgcttctcatggatgaagtattcgacttaaaagaaagaaatcagtggttgcgaaggaatatcaaaaacctacttcaacagcttattagagctacatatggcgatactattaatagaaaaatagttgaccatgttgactggatgacttcacctgaacaagtagccgactcagtgaaacgtttcagagatgcattttggccaaatggcattttagcagaggctgttccatgcagagataaaagtattcgaatgagaacaagagtagcaggaaaaacgaaattacttgcaattatgccaggtgagtgagcatgtatagttaaaaatctttataatttgtcattcttctgagtttttagcattcatcatgccagtgtaactgccttttgattataacaactaccttttgatggcttaatacatatcaggcactgtactaggcatttctcatatgttcttaatcagtcctcatgacagtactgtaaagctaaggactgttaacatcaccgctttatatgtgaggaaacggaagctcagagaggttaaataacctatccaaggtttatagctactaagcaacagttggtattctgacttggctttaagtgatgtgaaagcttatgcttttagccacttcgctctgctgccttgaaacatattgggagttaagttaaataaataaaatacatgacaggtgaaagggctaataaaatataaagtatgaatttttcaggaagaatatttgttgtacttaggaaaacaagttatttcaaaaactccatttacatagaaagaactgattggctgattattaatctttattacttaaaatacaatcccaaacaaagtatacttagtagcattttgttggtctgattttggttgcttcattagggtatagctatctcactaccttagatttactttttctcgtttttcttctttcaatcagagaagttatataatgtaaaaagcaatttaatgcggctgggaggtggtgatggttgttttgccccttgttaatgagtatctttgaaaatgcctgcatgtcttttctctgtattttaattctggatgtagagaatgaacagacatatttgtacattctttaatatcacacaataccaatttttttctctaattttgttttcttacctgtattttctctataaattttaatgaccagccttctcttctgtcaattaaattaaaaatttgccacaattttaattcttacctatataccgtttcatttgctgataaaaaagcaaattatagaaatgacattttagaaaaataagaaacaattgcttaggatattatttaatatactattatagtaaacctgattgtgctatatggactgactcagttatctagctggaagaaatctttattcactaaatatttattgaaagttattatgtgccaggtgctgttctttgcacttatgtttgccttcttggagcttactttccagtagaaatagagagactcaaaaacacacagaacaaataaatggaacgtagtttgttagataagtggtaagtactaaagagaaagatactgcaggaaaatggaatagatagtgtcagatgagttgcagttttagatggggtggccagggcaggcctcactgagatgatgatggtggtgtgaagatctgaaggaagtgagggtaaatatgaaagcatataaatttatatatacataatccttgcctattttttagtaaattctcaaaatttttgctttaaattatatcgtacccctagttagataaagactttttggaaattgcatgtttctttccaaagcagcaaaataatatctatattatcagtattatgaataattatttgtaattatgaataagaatatgaataattaataatcatacatgttggtctcataacttggtgttatttatgattaaacaccaaatttgctcactcttagtcacagcaccatcggttttctattttctttgctttcttcactttgaatttaaataaaattcaacccaacttgtactatccctatttcttgagcatgctttgtttttctagttactgcttatttgctcattcatgttcttttcaccaaggctaatccttcatctcattgcacctatcaaaatcctgcccaagtagaaagtctcctttacctgccacttccttaaagggaacttttctttgttatcgcatctgaaagtctccccactaccaatattcttatacttttagcatttttatggtatagttactatgccaggggtttttgtagatcagggattaatttttttttttcctgtgttccaatgaaactttattcaccatcatggattagtttgtttccttacagcatttgtcactattcattaggcctactaagaatatttgtataatattacaaagtttacagatcactttttacattatttcattaaagacttataaatccttataaggatgttattataaatcctccttttcagatgagaaaagagagtcagggtggtgggtaagtatcacatgggtattaagggacatgtttgtaatcatagtttgggatctttgagactgttttttattttttatctcttacacctgtgctatattgtctcccagtagcttttgcattaagtgcgtaaatagatgcatgcatgcaaagatgcatattaagtttcagctatagtacatagctgaaatgcattaactggttacctactgttcatcagttactctgctgtgtaccttaatttaagaacatttaagagtttaggccttgtgtttcctttgaataattatgtgtgttttcctccacttcatttagatgagctgaagcacattattggggctgagacaacacggaaaggtattcttcgtgtttttgaaatgtttcagcacaaccaattaaataggagaatggtttatgtcttcttggaaggctttttagaaaccttatttccacagtataaattccgtgaacttttcaacaaactgcattcacggtcaaagcagatgcagaaatataaacagaaacttcaaactactcaagcgccttctttgcagaaaaggtgacactccactctatgaagctggtgttcattttgtccaggactaatggtatggacagatcttctggggcttaactcaaatactgttgtgtctgcaccagtcttttagtgtctcaaaatagattattaatacatccataagtctgtggttcttctcattctcatctataatccaccactaccaagagagatttctgtgtcttaaatgatttggtgcatattttgcaacattgagagaaaactgcccccatctcaagcaagaatgggcgttggtttcttccatttcaaactaatcagcattctccaggcaatgacacaagtgcccagagtgtatattatgaaaagctaaaggaaagcacaaaacaatggttcagaagataaattggctaatttgtttaacagttggagactgtgcaatgtacggacttggaggagtttgtttggcataatgattttgtaggtctgtcagcattttggatatattgtgggattagccaggtgtatgatcctttgaaacatctctttcaggtctggagaaagagacagaatgcccttaaagtgtgaaataaccttatacctgaattacagttttgtgatataaaataaagctgagtataaaataaaaccaatcaaacacagaatttgattggatttgttattcattggtatacaacaatttttattcttatgtgtgctttaagggctgtgttttgctcttagggtactcaattttatgtttccttttggcattctttgtgcaaaaagaagcatgtggtggctctcatttaaatttccaaattattagtttttatcttaaacagattactgattatacagaagatataatttattggaagaactgccaaatacattttgtccttctaaaaatatggaaatttaaatagtagtctggaaagttaccatatgataatttttaattgtgtgatctagacatgccttaggtaactgcagaaatagcaaattaaatgattaatgagcttattagtcatagtaaacatacagattcctaattctatgacagtgtacatatatgaaaataaatgatgaaaaaagaactataatatttttaaaaatatgcttttatttatatttcacataatgtaaagttctacaaaataaagctagtaggcaagacccctcagtgtatacctttaaacccataaattaattttatatcaataaaataaaatactttctctagttttggagcttttgcatttcctatagttttctgactgtccattttatccatcttagaagtattcacatcccttctatgcaggatttctgcatagttttaaatactttcattgcctaagggtttgggtgtgtcagctttttttgttttaaaaatatttaacactaaaaccttaaaataatgaagctacttatcagaccactgaggccaagatcctggggtatttaaaaggaaagtctggggtgcttaaggattaaaggggacaggagtattgggtatccccagtttatttgggggggctttaaggntggggaacc

SEQ ID NO: 107645 - DNA, 1449 bp, Homo sapiens
ttttttttttttgatagtgctttgtctttatttctgatgcccatcttcttcagaggttaagaagaaatgacactgatgtacaaatgactcaccaagggactctcacctgactctacccttgcaggggtggaataaatcccttctattttcaagtctatttgtcccatttctgtttagacataatttgaaagccagcttggaccttgtacttttcaattatgttaacgtaaaatactcgtaacgaatgtagtatgagtttaaagtgagcttttcagatcctataagtgcatcctaagtaatgacaggctttaagataaggaatatatgccttttgttaaggcagaaatttcataaaatttcatgaaaaaccatggtcaatccaatgatgccctttttaagacaagtttgtttggaaactggaagggtcaaaagacaacaaaaaagcccccccccaaaaacctccctttaagcaaatttataacttgaaaaaaaaaaaagcctaagaatattctgagagtggtacatagttttatagtagccacagtaacttccagtgactggcaaatttctttgcatcagctggcatgtgtggtgaatggaattcccatgaacagctcttacatccttccgctttccttctacaggcctcggtcttgtttccaaaggtgactgcagtgaggatgtaaggtccatgacctctagggataatgccatccactcaggaagaaagatgctgagaaactctagggatatctaagtttacatcacagggggagaatcaattgtggaggttttaagaagacatttgaatttttgcccctaatcaagaagtgttttgccatctggtttacattcaataactagttggctcatcatttgcagaaataaactttcctctagattaggaaacttcatcatgagatctgagatatactggtttggaaagtttcctcagtttctcttggcttcgaagtccccggcctcggagtggggtaaggcccattggaggcagatgaattggccttgggtaaggaatcttgtaatgcagtccaatttcaatcctggctgtgcattcatctatacactgtttaattaggtctgtgtccgtgagatttttgtttttccggaacagcgttctggcttcatttagtatgtactgtttttctttgatggtgtcttccatctgccctgatgtcgcctgccatttcctcgcaagcctgaaaatgctgcggtagaggccaaggacttcttgtcgtgttgccgttgtcattctgagtcagtcctgccttcccccacccacagaagcgcgcagcccgcggcgggctgggaggaggcggcgccaggagcccagcagagccgtggccgaccgagcacaggctggtccagtaggccaggccggaccaaaccaccgggcccacctctgtggagcaccagttccctcgtgccgaa

SEQ ID NO: 107646 - DNA, 393 bp, Homo sapiens
aatacagtgtgtgtgtgtgtgtgagtgtgtgtatgtctgcctctgcctctgagggagagggtgggggcaatgaagcaccagatgttgagagacggaaccaggaacattgccccaggggtaaatgaggctaaggacattgggtggattatgacagagccaaaaagaagaggtgagtgggctgaacacagtgactcgtgcctgtaatcccagggatttgggaggtcgaggagggcggatcacttgagcccaggagtttgagaccactgtgtaacgtggcgaaaccccgtctgtacttaaaacacaaaaattatccgtgattacaggcacgagccaccgcgcccaggcctataatttttttaatttaaaaagaaaaagggagtgggcagaggagcg

SEQ ID NO: 107647 - DNA, 543 bp, Homo sapiens
  misc_feature (1)...(543): n = a,t,c or g
gcgcccgtcgcatgcttactgtagagcggncgcaatacgtgcgtgtgcatgacgtcagcatattacctgtctagacatattttttatacacatgaattacaaatataaatacatcaatatctatctatctatctatctatctatctatctatctatctatctaatctatctatctatctcacattctagctacatcactgaaagagcctagaaacactgacacccaggagcaatgaacagattcagagctgagatctcagtttctaaatgccattacctacaaaaagaactgtggctacctgcagaaatgattgacttccaagtgtggggcactaaaggagaaagggtatcctgggatatcttcctgtgccagatagccaggatacactcatagtttaattaacggggacatatcataagggcacaggccagcttgaagtttcactaaaatgacagataagacccacatttaaaattatcttgtcaagctggaatgctcaaccaaaccaatatgatgaaaacaacagggatgactgtgaaata

SEQ ID NO: 107648 - DNA, 1795 bp, Homo sapiens
cgcgacggacgcaagatggcgacggcgaccatagctctccaggtcaatggccagcaaggaggggggtccgagccggcggcggcggcggcagtggtggcagcgggagacaaatggaaacctccacagggcacagactccatcaagatggagaacgggcagagcacagccgccaagctggggctgcctcccctgacgcccgagcagcaggaggcccttcagaaggccaagaagtacgccatggagcagagcatcaagagtgtgctggtgaagcagaccatcgcgcaccagcagcagcagctcaccaacctgcagatggcggctcagcggcagcgggcgctggccatcatgtgccgcgtctacgtgggctctatctactatgagctgggggaggacaccatccgccaggcctttgccccctttggccccatcaagagcatcgacatgtcctgggactccgtcaccatgaagcacaagggctttgccttcgtggagtatgaggtccccgaagctgcacagctggccttggagcagatgaactcggtgatgctggggggcaggaacatcaaggtgggcagacccagcaacatagggcaggcccagcccatcatagaccagttggctgaggaggcacgggccttcaaccgcatctacgtggcctctgtgcaccaggacctctcagacgatgacatcaagagcgtgtttgaggcctttggcaagatcaagtcctgcacactggcccgggaccccacaactggcaagcacaagggctacggcttcattgagtacgagaaggcccagtcgtcccaagatgctgtgtcttccatgaacctctttgacctgggtggccagtacttgcgggtgggcaaggctgtcacaccgcccatgcccctactcacaccagccacgcctggaggcctcccacctgccgctgctgtggcagctgctgcagccactgccaagatcacagctcaggaagcagtggccggagcagcggtgctgggtaccctgggcacacctggactggtgtccccagcactgaccctggcccagcccctgggcactttgccccaggctgtcatggctgcccaggcacctggagtcatcacaggtgtgaccccagcccgtcctcctatcccggtcaccatcccctcggtgggagtggtgaaccccatcctggccagccctccaacgctgggtctcctggagcccaagaaggagaaggaagaagaggagctgtttcccgagtcagagcggccagagatgctgagcgagcaggagcacatgagcatctcgggcagtagcgcccgacacatggtgatgcagaagctgctccgcaagcaggagtctacagtgatggttctgcgcaacatggtggaccccaaggacatcgatgatgacctggaaggggaggtgacagaggagtgtggcaagttcggggccgtgaaccgcgtcatcatctaccaagagaaacaaggcgaggaggaggatgcagaaatcattgtcaagatctttgtggagttttccatagcctctgagactcataaggccatccaggccctcaatggccgctggtttgctggccgcaaggtggtggctgaagtgtacgaccaggagcgttttgataacagtgacctctctgcgtgacagtggtccctctccccggacttgcacttgttccttgtttcctctgggttttatagtgatacagtggtgtccccggggccaggcgcgctctgcccagcccagcctacagtgcggataaaggtgcggatgctgctggccctgaaaaaaaaaa

SEQ ID NO: 107649 - DNA, 2199 bp, Homo sapiens
ctccgcaattcccgggtcgacgatttcgtgggagggatgcgcgcctgggtgtagttgtgggggaggatttgtttagctcagggcttcaggggacagacagggagagatgactgagttagatgagacgagggggcgggctgggggtgcgagaaggaagcttggcaaggagactaggtctagggggaccacagtggggcaggctgcatggaaaatatccgcagggtcccccaggcagaacagccacgctccaggccaggctgtccctactgcctggtggagggggaacttgacctctgggagggcgccgctcttgcatagctgagcgagcccgggtgcgctggtctgtgtggaaggaggaaggcagggagaggtagaaggggtggaggagtcaggaggaataggccgcagcagccctggaaatgatcaggaaggcaggcagtgggtgcagggctgcaggagggccgggagggctaatcttcaacttgtccatgccagcagcccctttttttccagaccaagggctgtgaacccgcctggggatgaggcctggtcttgtggaactgaacttagctcgacggggctgaccgctctggcccagggtggtatgtaattttcgctcggcctgggacggggcccaggccgggcccagcctggtggagcgtccaggtctgggtgcgaagccaggcccctgggcggaggtgaggggtggtctgaggagtgatgtggagttaaggcgccatcctcaccggtgactggtgcggcacctagcatgtttgacaggcggggactgcgaggcacgctgctcgggtgttggggacaacattgaccaacgctttattttccaggtggcagtgctccttttggacttttctctaggtttggcgctaaactcttcttgtgagctcactccaccccttcttcctccctttaacttatccattcacttaaaacattagctggtcatctggtaagcccgggacagtaagccgagtggctgttggagtcggtattgttggtaatggtggaggaagagaggccttcccgctgaggctggggtggggcggatcggtgttgcttgcctgcagagagggtggggagtgaatgtgcacccttgggtgggcctgcagccatccagctgaaagttacaaaaatgcttcatggaccgtggtttgttactatagtgttcctcatggcgagcagatggaaccgggagacagggagtccctggccagtgtgagtcctagcattgcaggaggggagaccctggaggagagagcccgcctcaattgatgcctgcagattgaatttccagaggcttaggagggggaagttctccaatgttctgtttccaggccttgctcaggaagccctgtattcaggaggctaccatttaaagtttgcagatgagcttatggggggcaatcttaaaaagtccacagcagatgcatccggctcgaggggccatcagctttgaataaatgcttgttccagagcccatgaatgccagcaggcacccctcctttcctggggtaaaggttttcagatgctgcatcttctaaattgagcctccggtcatactagttttgtgcttggaaccttgcttcaagaagatccctaagctgtagaacattttaacgttgatgccacaacgcagattgatgccttgtagatggagcttgcagatggagccccgtgacctctcacctacccacctgtttgcctgccttcttgtgcgtttctcggagaagttcttagcctgatgaaataacttggggcgttgaagagctgtttaattttaaatgccttagactggggatatattagaggaagcagattgtcaaattaagggtgtcattgtgttgtgctaaacgctgggagggtacaagttggtcattcctaaatctgtgtgtgagaaatggcaggtctagtttgggcattgtgattgcattgcagattactaggagaagggaatggtgggtacaccggtagtgctcttttgttcttgcttcgtttttttaaacttgaactttacttcgttagatttcataatactttcttggcattttagtaagaggatactcctcaatagccatcgctgtagtatatccaaagacacccatcattccccctaaataaattaaaaaaactattaaacccatataacctcccccaaaattcagaataataccaaaaaaaaaa

SEQ ID NO: 107650 - DNA, 474 bp, Homo sapiens
aatacacccttcgtgtagaaacgtgtgaaggccgtgtgcttcaggacggtggctgtggttctgggcgctatagaggagatccagatcttggattctttcagtcccaagggcctgggggaataaactgtgactgtcccagccatgagatagtctgtggccatgtgacagtacggactgacacagactcgggtggcccctgatgatcctagggtacagctgcaattatattcaaccaggcaaaagggacccgtggtgttggaagtgaggacagtgggccaggcctgtcatcccagcactttgggaggccaaggcaggaggatcactcgagcccagtatgttgagaccagctggccaacatatcaagaccccatctgtactaataacgtcaaaaaaaacatgagctacgtcatgggtggtgtgtcgctggttctatcagctatgttatgaggcttgcctctgctagtgactgtacga

SEQ ID NO: 107651 - DNA, 2176 bp, Homo sapiens
ttttttttttttgctctttcagcccatttctttttatttaccagttggtgttcaatgcaaatcaattcccataagaagttactatggaatcaaagcggtaaatacacaaacacaatatacaatccaaaataggatgtacagcattcctggaataaagcaaaagagtgttcattcacacacacagtagcttcaaaactgttacgatctgtttgttcccatggtagttttcctaaagatggaaaaaaaaggactttggtcatcaagactaactgtggccataattagattactgggaacatctaagccatccagtgtgttgaccatgccgaacaaaagactttcgggggagtgtctatttttaaaaaggtttatgtgtgtcgaggcagttgtaaaagatttactgcagaatcaagcccacttttaggcttaggaccaggttctaactatctaaaaatattgactgataacaaaaagtgttctaaatgtggctattctgatccatagttgttttttaaagaaaaaaaatgtatatacagaaagagtataaaagtttgtgaatttaatgcaaattagcttccagtcttcacttcccaaatacttgatttatagttttgactcctttacatttttgccttcttaatttcaagatttgcaattttgccttcaaaacagatcatttttttaaattgtaaaaagtattcaacatatgcagaaataaaaagcattttgatggcttgggcgcgggggcttcaagccttgtaatcccagcactttggggaggccgaggcgggtggaatcacctgaggtcaggagttcggaaacccagcctgggcaacattggtgaaaccctgtctctacaaaaaatacaaaaaattagccgggcatggtcggcaggtgcctgtaatcccagctacttgggaggctgaggcaggagaatcgcttgagcccgggaggcaaatggtacactgatctgagatcgcaccactgcactccggcctgggcaacaagagcgaaactccgtctcaaggaaaaaataaaaataaaaagcattttgaaattagtcgtggtcaatgcaattctactctttggaatccgtttagctaaatgaatgtagtgctcttgttgaatggaaacaggtgataggaaatgcctaccatttgactcaatatggataatcaagagttgctcaggatgcttggatctgggggtagattctcattcatcattgccctggcacatgtcaattactacataaaaggtcaaatgcaatgtcaaatccaaagcctcaggaggaaagtgagttcagttcccaagagaacagcaatagctcaacaatgtaaaacttcatctagagtatatcggcattaaattagtgctgtcgaaacaatacgttgaggaattacagtaacacctggaagttccttctcatgtacatataaatagaatcatggaagctttttatattacctgttttatggccttatagaattaatgaaccaaatgaaaactgaatctccattccacaatcacatcctttatttctattcttattttcaaggtagtattaagtgtccatatttctcaagccacattcaaggaaatcatgtcttaactattttggatgttgcctctccttcatcttgtacatgaaactccagcagatttaatattggcatccatcatctagtcaaacctctcacatgttcttcaaatcaatcaaatttgggattctcaacattttctgtgtcaataaaaggtgtggaattagtagattcgatgaagacctgtttttccttgccacattggacttccagacgccatttggattgggtttagaagatggggaagtttagaagacgtttcttggcctgagtctcttaagagtagagatgcagaagagagagtgagaccacgaagagactggctgttgactgcagggcaccaccagccgccttggtggtggcattagttggatttggggccaacccagtgttggaagtactctgggaggagttacttgaagttccagttgttgtttcactggaataaatctgcgtgggtaggagcagtgccagcagcagcagccacagcccgagcctggccaccattgctctgcccatgtcccctccgtcggtgcgcggcgcgtctagcaggatgctgggtgcttggagaaccg

SEQ ID NO: 107652 - DNA, 1095 bp, Homo sapiens
cgggtcgacccacgcgtccggaaacctttccaggaaggcttcgcctgcccagcctctgcaggactcattcaatggtgcaaattcaccaggggctggagggagctgtgaagcatgggagtgggcaggacctctgccagtaacggaagtgggggaaggaggaccgcctgttgaaagggccccagcagtgtctgtcacaccagagggtgggggaggaaggtggacatgaagggaaaacagcagagcaagagtgagaacagagtttcagcagataaaatgaagtgtgcacgctctccatgcagtgacgggctgagcgacagtgaggagcaggctgctgactcccttgccacaccgtgaaggagtcccaaaggtgggacactgagtgagacaagccagaggaaagaccactcatgttgcagttccctttccatggaatgtccagaaaaggcacatttacagagagaagcagatgagtggttgctgggcagaaatgggagccggccacagctgagcacaagaggactttggagggtgatggaaatggttttcgacctgaatctgaacatgggaagcactgcagtttagtagtcctggtccctaagcccttccagcccaggagccagacctgtgagcaaacaagcctttagtgattccaggctctggctggaaccttgagtcttctcagcttggggcatgcacctcagggggagccagcatcagtgtccagccccaagagcttccctgtacgtctcagtgagtcttcacatgcctccaactgcctggacaaccacacgtgatacctgtcctgccaaacgtgtcctgaacccataaaatccagagaaaagaaaatcgttttaaactgctgaggtttggggtctttcctgtgctgttttcgtgatagtgaatgagtgtcacgagatccgatggttttaaaaacgggagtttcctgcataagctctctctctgcctgctcgccatcacatgttaagatgtgactcgctcctccctaccttccgccgtgattgtgaggcgtccccagccatgtggaactgtaagtccattaaacctttttcctgtgtccattaaaaaaaaaaaaaa

SEQ ID NO: 107653 - DNA, 2383 bp, Homo sapiens
ttttttttttttcaagtttccaaacaagaatttattctttcttttttaatctttttttctaaaaaaaagtaccaggtacaattttttcctgtttttgatttgctttgttttttcaagtttcagcaaatgcttgttcccctcagcccagccccaggagttaggactgaggctgggtcagagtctggagtggggaatggggtagtttggaaccacatgactgagtttgaggggtgcccctcaccccagctgaggtaggtgggtcagagtctggccaggtgagaggaggcaccccagtgcttggccctgactctgccccctggacaccttcttcagtcaggaccccaaaacaaggagacacaggtaggaggagagggacaactggagtctggagccctaggtgaggggtggttaacccctgtgtgtgtgcatacatgcacactcacacacacataccacacaaagacaagcttgtgcacacacacatacgcataacttggctttcagagataggtcagagggtaggggaagtgaagggactggggaaggacaggggaagctgagtctttggctactgactcagtccctctggaatagcccctcttccctcagctgagggaaagcagttctcctcctgcccccaccgcataagcctcttcaactcctgaggttggagcaatatctgagagtgggaagcggggaggagtgatgccaattatcaggtgtgggaggttaccaaggcaatccaatttgaataaattataaattaaaaataaataaaataacaagtggcccctgcccaggacagggaggcaacgctggcataacttgcctgggaacttgagaaaatctcagggtagctccagttcctccctactacctaagctggcctgggaaacccaagggaggggacaggcacatggagtacccgaagtagggcagggtgtagtaagaatcagaagctttaaacacccaaataatccatttgggcgtgagcatggtgagggctttaattcaagcctgaagggtctcttgctgtctctccatatatgttctctaagatggagcaggatgggcaggtcattagcccgcatgggttcagagtgctggcaatcagggcaaaggtgaataacgtggattatgaggggcctcagtcacagcctgcagttcgtaggggagccctgtgtccagctccaggctccggcgggaaaaaagcaggcggatatctccatgcaggcttaagcggcctgagcgggagctccggaacctgaggtgcagcaagtagcagaggaggcggtgggtggggttagcatttccctcctcacccacaggcaccaaaaagaggcgatggcgcaggaaggtcatgtgggcagcaggcatgtccgagaagtcaaaggtcacaaggaacatctttaccacagtctggttggggttaaataaggtcacttggacggtgcccaccttgggcacgctgtaacccttcctccccaaggggttcagatccacgatgcccaggaagggagccggggcattttgctcagaaacatcaaagaatgtgacagtgacaggcagcgtgacgtgctgggggcagtatgacccactagctccaatttctgctgtgaagccctcaatgtggccagatggtgcaaaacgtcctcgcagcaatgattcctcaaagttgcccagcagggtacggctgacagcaggggtaggaacaggggaggctctgggggggctcagcaggcctggccccttccggaggcttcgaagggggctcagcttcaggcgacgggctcctttcagcctccgccccatgggaccgcagtctgttgggtccaaaacaggctctttgggcccaggcagcaggtggctccagaagggtgtggctttggcatcagaactgttggcagcagtagggtggcccagggatccccggcgcctccgaggggctggcccctcttcctcagagctgacatctggggcttctccagcaggaagcagccttcgcttggtggggcatgggcctgggggtccagggccagggggtgtgtgctcgggactgtgcccattggcagtgccaggggactccctaggccagaggctacccccattgcccaccccagccactgggctcttaccccctatttgtgcaagactgtgcaaatcagtgtcaagtgtgtgcagctggcctggaggggctggccctggggactcccccagggacccctgtccccctggatctggggaggcccagtctctggtgtgcaaagtattgcaggaagcatttgatggggggcaggggggactccaggcccctgaagtccaagatgaggtgacactacttctctgttccacaacacagaggccacggcgggagaaatgctgg

SEQ ID NO: 107654 - DNA, 416 bp, Homo sapiens
aatacatgctttgtgtaaatattgactgactgggactcctgaaggaggatgattctcagtggccacaggtgacgctgtcaggcgcctgacctatgcctgaccgggacacatccacaggccgaccagaaaccccagggattggtcagctggaggcgggagaggaggtgaaagggcacggggtgggttacagctcaggcagccactgcgggctcagagacgcccaatctatagggatgggcagttcaactgggcatcggcacagaaggcaaggagggaacgagcagttcagagagacagagagagggacggggagacggtaacaggaaaacagggagacggagagaaggcagacgctccacaaagactgatgcaccctccccctatcccgcacaccgacccaggagcaagttaatcca

SEQ ID NO: 107655 - DNA, 1456 bp, Homo sapiens
  misc_feature (1)...(1456): n = a,t,c or g
ttttttttttttatgagatggaaggttttattagactaggagatttgtgggaggtatgagcgctgggccaaggtggcacgggccatgctcaaggcaccctctcgggtgcggtgaccgccaatgaagccgcttgcatggacgaagatgcagccagggatcccactgacctggtccagggcctcgtcccgaagaccccgccatggctctggcaggggcagccggctttggaatgagtggggctccttgggcacacactgtattcgccactgtccagcctggtcagtgtagataacaaagaagatggccactggaggggacagcccagattccaggtggtagagatgctccttccagggacatgcacctttcgccagttccacaatctctccacttgggtccacctggaatcgctgggcaagggcctcttccaccaaggcccgggctggcagccagctgtgttggtagaaatctaatctctgcagaaactcctcttgaaccagatccattgcacgcttgaaccctgcctcagtgtcttggtcggggtggttccaggtaggattaagtcgagcaactcgtgcactcagggtagtggtcagtgcatatcgaggctccccctctgcccactgggagatcccattgtccacagcatccacctcctccacaaagttctcatacatcttgtcatagagggtgcccaccatgctgtcctcttcactagtgcccagcaactgggccagcagcttgtgcccgaagtgcagatagatgagtcccgcactgctcagcttggtctgccacggcttcccaggggacagggagctcatggtctctgtgaaagacctctggtgatggtcatatcggtgtctccgagggtcgtactcgccccccacgtccaccacgatgtcacaggaagcgagtttttcgggatcccgggtccgcacaatctctgcatcccggtactccggcaggaggcgaagcagtgcgcatgccagtgcctcgtcgcagtggaaggtgccattgtgcgtcccgattcggggcggtgccatgagtttgctgcgggatcgttttgggggcgggacggactctggaccgagcatgcggtgccgggtatacaggggtggcggcggcagcagcagcgttaagaggccgcgcaggaagcggtgtcccataagcagctccctgcagggaggcaggagcgccgacccggaagaggaagcgccagcgcagccccacttccgcttgccaaccgttcccttggcaaccagctctgcagagtgagcagcagcagactcccagcctaggatttcttccagctggtcaaagggccctgcgatggagcctccaagaggcgcatcgcatcacccctgcgcatcangctctgagacggngcccgcactctcgaccacacccccatctcatcacgagtcccttgcttaatccaagaaaagaccaacattct

SEQ ID NO: 107656 - DNA, 407 bp, Homo sapiens
tagcctagaactgaattccataaaaaagattcttctggtttagcatgcagaaaggaaaaggggaacaagccgtatcagaagacgaaaactctgcggaagctctgaaccaagatgagagatggggtctttctgagttgggcaggctgggctcaaactcctgggctcaagcagtcctcccgccttggcctcccaaatgctgggaatacagaatgaatgagagccacaagtctgaatttatatagctgaggaagtggctgaaagctacgaagtatcaagattcaaacttagcgcctgcttgttttccatgtacaggaagagggctgatgagtcaaacatccctgctggagggacagatgattatttcgctgcctgaaagttgcctgctcaccacggacacagtgattttg

SEQ ID NO: 107657 - DNA, 2792 bp, Homo sapiens
tttcgtgcgagagtaaagctacgccctggcgcgcagtctccgcgtcacaggaacttcagcacccacagggcggacagcgctcccctctacctggagacttgactcccgcgcgccccaaccctgcttatcccttgaccgtcgagtgtcagagatcctgcagccgcccagtcccggcccctctcccgccccacacccaccctcctggctcttcctgtttttactcctccttttcattcataacaaaagctacagctccaggagcccagcgccgggctgtgacccaagccgagcgtggaagaatggggttcctcgggaccggcacttggattctggtgttagtgctcccgattcaagctttccccaaacctggaggaagccaagacaaatctctacataatagagaattaagtgcagaaagacctttgaatgaacagattgctgaagcagaagaagacaagattaaaaaaacatatcctccagaaaacaagccaggtcagagcaactattcttttgttgataacttgaacctgctaaaggcaataacagaaaaggaaaaaattgagaaagaaagacaatctataagaagctccccacttgataataagttgaatgtggaagatgttgattcaaccaagaatcgaaaactgatcgatgattatgactctactaagagtggattggatcataaatttcaagatgatccagatggtcttcatcaactagacgggactcctttaaccgctgaagacattgtccataaaatcgctgccaggatttatgaagaaaatgacagagccgtgtttgacaagattgtttctaaactacttaatctcggccttatcacagaaagccaagcacatacactggaagatgaagtagcagaggttttacaaaaattaatctcaaaggaagccaacaattatgaggaggatcccaataagcccacaagctggactgagaatcaggctggaaaaataccagagaaagtgactccaatggcagcaattcaagatggtcttgctaagggagaaaacgatgaaacagtatctaacacattaaccttgacaaatggcttggaaaggagaactaaaacctacagtgaagacaactttgaggaactccaatatttcccaaatttctatgcgctactgaaaagtattgattcagaaaaagaagcaaaagagaaagaaacactgattactatcatgaaaacactgattgactttgtgaagatgatggtgaaatatggaacaatatctccagaagaaggtgtttcctaccttgaaaacttggatgaaatgattgctcttcagaccaaaaacaagctagaaaaaaatgctactgacaatataagcaagcttttcccagcaccatcagagaagagtcatgaagaaacagacagtaccaaggaagaagcagctaagatggaaaaggaatatggaagcttgaaggattccacaaaagatgataactccaacccaggaggaaagacagatgaacccaaaggaaaaacagaagcctatttggaagccatcagaaaaaatattgaatggttgaagaaacatgacaaaaagggaaataaagaagattatgacctttcaaagatgagagacttcatcaataaacaagctgatgcttatgtggagaaaggcatccttgacaaggaagaagccgaggccatcaagcgcatttatagcagcctgtaaaaatggcaaaagatccaggagtctttcaactgtttcagaaaacataatatagcttaaaacacttctaattctgtgattaaaattttttgacccaagggttattagaaagtgctgaatttacagtagttaaccttttacaagtggttaaaacatagctttcttcccgtaaaaactatctgaaagtaaagttgtatgtaagctgagattttgtatacagaatccttatttcctcatagacttatattttataatcagaatatgttgctttgaaaaagcctctaatggactgaccttaaaactcatccttcttccactgtctcatccacataagcactccccgaagaattaagggggttctgttttcaaggcatgccaagtactaaagcaccttgcagagcgtgtctattacaagatgtcatttccaccagcagttcccttaggggagctgaaataaattcacattttctcaaagtctcatagctttggaggagccatctgcttttttggctgctctttttagctggctttttattaggctcagtgacataaaaaggatccaggtaaatgggtataggatttgctggatttactaacaatttccccctgttcttaacacttcctattagtgacttttcagacattgagtttacttataaagagagatatttatgtactctctaagaagacaaatgaggtcataaacactgcataaagcaaggcaaaaatgtatgccacatctcagttatctaaactagattagatccaagccaagttttctcaacagagagcaaagggccaggcagtaaggtagaaatagagataaaaatcattccttccttgtgatccaaagctggtcgagcagctttcctggaggaaaaggttaatgaacttcaggtccctgcaactcagcccccaccacaaacacagccctggaaacatacagtggcgcaaggtcctcttgaaatgttaatggttaatgttcccaaaccagagaatgctttgaaaatgtatcattcagtgtaaattaattacatacatatttttctatatatttgtttcaaactgtaaaaataacataatatgtag

SEQ ID NO: 107658 - DNA, 398 bp, Homo sapiens
aatacaagtgtggctatccagacgatcgaatattattcagcctttaaaaggaaggaaactctgacacatgtcccattgtggatgaacctgaaggatactatgctaagggaaataagccagtcccaaaaggatactgtatgatctcacttggatgcagaatctcaaacagtcaaactcacagaaacagaaagttgagtggtggctgccaagggctgcagacagtgcgacagggagtcgttcagtgggtacagatgcgtaagcttgagggacctgctatgcagcattgcccctgaattacatgcttaaaaatgtgtccagagggtagatctcctaccacaatgtgaaaatgaattaaatgtagaataaaatagaagaaaatgaaaatacagacagttccg

SEQ ID NO: 107659 - DNA, 1652 bp, Homo sapiens
accagaatgcaaaggtgggcagcgaagccatccaggtgctccccgccttcccccgcgaggtccaacgcctgcccgagcctgccaagtcctgccgccagcggcagctggaagccagaaaggcagcagccgagaagaagaagattcagaaggagaagctgagcactccggagaagatcaagcaggaggccctggagctggcgggcattacgtcggacccaggcctgtctttgaagggtggattgtcccagcaaggcctgaagccctccctcaaggtggagccgcagaaccacttcagctccttcaagtacagcggcaacgcggtggtggagagctactcggtgctgggcaactgccggccctccgacccttacagcatgaacagcgtgtactcctaccactcctactatgcacagcccagcctgacctccgtcaatggcttccactccaagtacgctctcccgtcttttagctactatggctttccatccagcaaccccgtcttcccctctcagttcctgggtcctggtgcctgggggcacagtggcagcagtggcagttttgagaagaagccagacctccacgctctgcacaacagcctgagcccggcctacggtggtgctgagtttgccgagctgcccagccaggctgttcccacagacgcccaccaccccactcctcaccaccagcagcctgcgtacccaggccccaaggagtatctgcttcccaaggcccccctactccactcagtgtccagggacccctccccctttgcccagagctccaactgctacaacagatccatcaagcaagagccagtagacccgctgacccaggctgagcctgtgcccagagacgctggcaagatgggcaagacacctctgtccgaggtgtctcagaatggaggacccagtcacctttggggacagtactcaggaggcccaagcatgtcccccaagaggactaacggtgtgggtggcagctggggtgtgttctcgtctggggagagtcctgccatcgtccctgacaagctcagttcctttggggccagctgcctggccccttcccacttcacagatggccagtgggggctgttccccggtgaggggcagcaggcagcttcccactctggaggacggctgcgaggcaaaccgtggagcccctgcaagtttgggaacagcacctcggccttggctgggcccagcctgactgagaagccgtgggcgctgggggcaggggatttcaactcggccctgaaaggtagtcctgggttccaagacaagctgtggaaccccatgaaaggagaggagggcaggattccagccgcaggggccagccagctggtcttctaccagcacaagaacctcaaccagcccaaccacgggctggccctctgggaagccaagatgaagcagctggcggagagggcacgggcacggcaggaggaggctgcccggctgggcctgggccagcaggaggccaagctctacgggaagaagcgcaagtgggggggcactgtggttgctgagccccagcagaaagagaagaagggggtcgtccccacccggcaggcactggctgtgcccacagactcggcggtcaccgtgtcctcctatgcctacacgaaggtcactggcccctacagccgctggatc

SEQ ID NO: 107660 - DNA, 718 bp, Homo sapiens
  misc_feature (1)...(718): n = a,t,c or g
tttcgtctctaagccagggcattacaccactgctctctggtccagccaaagttggagtattcctgggacaaataatccaccccacgaggataaatcatcctaaaccatcctcaggcagctttgaggaaacacgggagagggagccagcccttgtggggtggccagggcttggccagctgggaggacagtctggcactggtgattggtgtgtcacagccgtgctgcgagctgcttccagtgcttttgtctggtgctgggagtgaggctcancagtgtgagggacaattggagatgctcgggggcaggctgccgcgttgtgtcctgcttttctgcggccagaccaagccgtctggagctgctggtcaggttttcttgctgacctcacctgaccacagtggcctgggtggactctacagggaaatgttgttttctccctgggagcagtagcagcagtcctggctcccctggactgagaactcctcatcagccccaggaagcccggaccccctttcagggatctggaaccggtgtgcctgtggccccaggtctgctcccaggcgtgggctgaagtcctgacttctgtcgctgggggcaaggagtgggagagcccatctgctgcctgggctttggcagacagcaggctgatggtgctggcttccccgagactgcttctcctgcctgctgtctgatttccctgcatggggcccgcagctgagcg

SEQ ID NO: 107661 - DNA, 400 bp, Homo sapiens
aatacacggtggtgggtgaaaaatgaggatgaaaataccacctgcctcaggctgcagacagcaaggattaaaggtggcactatggggaaatgttttgtgaactacaatactacaaatgcaatgtatgaagaggattaaattgggtacagttgtgaatgcctgtagtaccagctactcgggagaccgaggcaggaagattcgttgagcccagaagttcaagaccggcctggacaacatagtgagagccagtccttaggaaaaaaaaaaaaaaaaacattagctgctcttggatgaaccaacaaaaatgctttaaattctgccaccataaaaaaacattcaacatgactgtaagtgggaattatcaaaccctttttccagcacgctctcaggcagcaggggg

SEQ ID NO: 107662 - DNA, 413 bp, Homo sapiens
aatacatggggtttcaccatgttggctatgctggtctcgaactcctgacctcaagtgatctgccaccttggcctcccaagtgttgggattacaggcatgagccatcgtgcctggccatgtttttttattttgcactcattgcacctgagtaagaatcacacctggagacagggtttaaaacacgggttcctgggctcacaccccagagtcactgaacaggaacctccaggcctcaagtctaggaatctctgtgtgccaacctcacccacacagatgctgtaatgcatgggaaatgtgcctcttttatggaaagaaagagtaagacttggggagaatgaggcagggcctgcagggactgaaaccctacgttttttttttgtctggggggaagggggtggaattccactcttgtg

SEQ ID NO: 107663 - DNA, 1645 bp, Homo sapiens
ggcttaagtcacaatccaccatttgtttgtgggacaggcagtcagggcagatactttgaaaaaaaagagcccttcctgtttgctgtgcattgtcttcataccagttcccagaattgacctgacaaatattgaccaggttgctgtgatcttcaaacaccattttcctgtgggtagaggtgatgcagtgctgaagacctgggcccctgctcagtgcctttgctctagaatgggtccagcttggctttggctactgggaacagggatcctggcctctgtccactgtcagccccttcttgcccatggagataaaagtctgcaggggcctcaaccccccaggcatcagctctcagagccagcccccgcctaccacagaatcacacccaccattaccaattttgctttgcgtttgtataaagagctggcagcagacgcccccggaaacatcttcttctcgccagtgagcatctccaccaccctggccctgctctctcttggggcccaagctaacacctcagctctgatcctggagggcctgggattcaacctcacagaaacccctgaagccgacatccaccagggcttccggagcctcctccacacccttgccctgcccagccccaaactcgaactaaaagtaggaaactccctgttcctagacaagcgactaaagcctcggcagcactatttggacagcatcaaggagctttacggagcttttgctttttctgccaacttcacagattctgttacaactgggaggcagattaatgactatttgagaaggcaaacatacgggcaagtcgtggactgcctcccggagttcagccaggacacgttcatggttcttgccaattacatcttcttcaaagccaagtggaagcaccctttcagtcgctaccagacccagaagcaggaaagtttctttgtggatgagaggacttctctccaggtccccatgatgcaccaaaaggaaatgcacagattcctctatgaccaggatttggcttgcaccgtcctccagatagaatacagaggaaatgccttggcgctgctggtcctccctgacccggggaaaatgaagcaggtggaggctgctctgcagccacagaccctgagaaaatggggccaattgctcctgcccagtctgttggatttgcacttgccaaggttttcaatttctggaacatataacctggaagacatacttccccaaattggtctcaccaacatactcaacttagaagctgacttctcaggagtcactgggcagctcaacaaaaccatctccaaggtgtcacacaaggcgatggtggacatgagtgagaaggggaccgaggccggggctgcttcaggcctcctctcccagcccccatctctgaacaccatgtcagacccacatgcccacttcaacaggcctttcctcttgctcctttgggaggtcaccacccagagcttactcttcctgggaaaagttgtcaacccagttgcagggtaaccatggtgggaggccaggagttatcttatctcatcctggaccaaacagataggccagaaccagcctgcatcctggggctgctatgtggttcagttaatcagtgtgccaagattctaataaagttgaccttgggttctgtgaaaaaaaaaa

SEQ ID NO: 107664 - DNA, 465 bp, Homo sapiens
  misc_feature (1)...(465): n = a,t,c or g
cttaaaaggggttaattcccccattaaaaaacccagagtggccagtttttttaaaaaaaacccccgccccttggttttctgtttttaaaagaccccttttctgcaaatgcccccctggggttcaaaaaaaggggtggggaaaaattttcccagccaattggaaaccaaaaaaaaccgggggtggcctcctaaattttgataaaaccgccttttaaccccccaaatttttnnnnnnnnnnnnnnnnnnnnnnnnnnnnnnnnnnnnnnnnnnnnnnnnnnnnnnnnnnnnnnnnnnnnnnnnnnnnnnnnnnnnnnnnnnnnnnnnnnnnnnnnnnnnnnnnnnnnnnnnnnnnnnnnnnnnnnnnnnnnnnnnnnnnnnnnnnnnnnnnnnnnnnnnnnnnnnnnnnnnnnnnnnnnnnnnnnnnnnnnnnntatcacctcgtgccaagcttggcgtaagcatat

SEQ ID NO: 107665 - DNA, 2322 bp, Homo sapiens
  misc_feature (1)...(2322): n = a,t,c or g
tttaaaaaaaatttttttccgccaagggtttgggggtttttttcccccttttccccttaaaaannnnnnnnnnnccccaaggcctttatttttttggggggggttggccccatttttcccccccccaaaaaaaggttttttttcaaaaattcccaggggggggtttttccctttccccggtttttaaaaaccggccccgcccctgtttttttttaccccccccttnnnnnnnnnnnnnnnnnnnnncttcccccggttaattttggcccccccagggttttttttaaagggcccccccccnnnnnnnnnnnnnnnnnnnnnnnnnnnntgaggcagagtgtattgagaacatgagagaaaacaaagttgggggcagagctcagcctggccgcaggagctgcagaatgaagggcgggctcttccattggtggccctcaagggtagaagggagcaggggtccagggcaggggcttcactctgttctgggagaggccaggcctgaaggagctgagctcactcacaactcccccacgcataccccctcgatctgtgtgaaatgagctcaactaagaaggcacccctgttcccatggagacaagcccagagctcacaaaaactgcaggctcagcccagcatgggcactgcctcccaccaccccttgccccactggggaacccagaactagggctgggaaagagaagtgggtggtcctcggcccccagccttgcgaagcttccatctgaatcctgccacttgtgtctgtattctctcaccccccacaaagcctggtttggtcgggggctgtatcatatcacctccaaaagtgtcagaggcggatgggaagtctccagttacctgacttaacaccctcactgtatgaatgtggaaacttgagacctacagacacacatgcagttggtctgttagaatccaggtctcaagtcccagattttcctcaaaattctaagatctcctctgtcccttcccactgcactgctatgcacctgccccagctcctgccatgctcctactgtccccaggcaatcctgagcctaagccagcccagcccagcccaggcccaggcatcccttggcctcctgcagcagctcattccaacccttccctcaccaggtcaccctcacagccatcttaacgccacctgtcctttggcaatagcccatttcctttctctttcttcccaggggactgtcttgtcacttacaaggcctttcttcaaagcaccagcctatcctctcaatcctcacagattgttacagctagaaaagccctccttgtataaatgataaaactgaggcccaaagagaatgtgagtgggccaaagtcacacagcaaatgagaaggtgacatgggaccggaaccctcctctcctgcctccccctgggccccgttccactgcgctgaggtggcttcttttagtcaggcagatcttggttgaatctgaagccaaaacagccaatggatacatggctaggggcccaccctgggtgtggcacacccacatctgcacagccccctacagggctctccttctcctggggatcccctgggacgtcccccacccctagagcggtgacagcaagccaggtagaactggggctgaggcctgggcccagtggatctccctaaaacagagccaggcctcagagggggcaggaagaaaagcgtcagacagcagtggtgggccgagtccgcagccagcagaaggaccctggaggggagcgcaggcggaggcgaggcaaagctctctgaagcagcggagaggaaacggtgtccagaaggcagaggcagaagagacacggcccatggaggtgagaatccagcaacaggaagaaagacgccaggagcttgagcctcaggagggaggcccccctggggcagctgaaggaagccagaccctcggctggctgaactcccacaggcactggcaggctctgtctgctccagaagtccctgttaggatccccttctaggccactcccccagcaagacgctggcatcagactctgcatccctacagctcacaaaggccagaggatgcccctctaccgcatcagggctgccagacagttctctctccatgaccctcctccccgctcagacatggagtccgacccctgttgtagtaggggaggggcggcttcagctcagagaggggaggcgactcgcccaaggtcacaaagccagctggtggccgcatctgaccttgaaccatggactccccattctcctcactcagctctgtgccatttcctgccacatctgctctccatctggccctcaaggaggggaacttgaccggcg

SEQ ID NO: 107666 - DNA, 515 bp, Homo sapiens
ttacgccaagcttggcacgaggatcctgcgtttagtcaagaatcccccagctgctaccggtggctgcccacctgcctcagaggcccaggccagcagccaattcgctctctcttctgctttgtatctgccaggtgagggttcagagtatggtgccagtggagaagatgcgctcagcaggatccagaggctgatggcggagggcggcatgacagccgtggtgcagcgggagcagagcaccaccatggcctccatgggcggcttcggcaacaacatcatcgtcagccaccgcattcaccgcagctctcagacgggcactgaacctggtgccgcccacacctcctcaccccagccctccacctctcggggactgctcccagaggccgggcaactggcagagcgaggcctaagcccccggacagcttcctgggaccagcctggtacccctgggcgggagccaacccagccaaccctgccctcttcctcccctgtccccattcctgtttcccttcccagcg

SEQ ID NO: 107667 - DNA, 910 bp, Homo sapiens
gagcggccgccaccaccacaccgcggacacctagctagcagaccggtgtggcttgctctttaggggtcatgcaaaagaattatcccccagaaaaaaaatccccaaattatcccagacaggcagctccgtggaggtgacaaggtgagagggagaggaggggaggaggccccaggacgccagggtggccggctgctgggccacgtgctgtccgtggtgagccctgccgctgtcccatggcccagggagccactggtgcggagcccggcagatgtttaccctgtgttcatggatggggacagctgtcctgggcacagcgtggacggaagatggtgtccactctgagtgttcatcggtggacagtccccttggagtttaggatcctgtgtcctgttccccattctgtgcccctcccttggcttgatttgtaggggaagataaagaaaatccttgttgaaaacaatgtgaattgaaagtgggcaggcactggggcaggagcccctgaccctctgcagtcagggcttgtgaccacccccacccaacctggcttcagacccaccctgcagccccaccatgctcgggcttgccctgtccccgagctcccccatggtacacaccatcacaaggggccggggacccaccgcctcgaacccaggcagccgacgctcaggagcacagggctagaccctgccctccatccgctggtgtcctgggccctgtgcccacctgtttctgtccccagcccgccttatctccatagctgcatccctggcccacctagaaggtgccctcacacgcactgcagcccgccaaggcactggcacacctgacactgcacgggcagcactgccctcacgcctcccatgtgccataggctggctcccactgtagctgttgcgaattccccgacacg

SEQ ID NO: 107668 - DNA, 1250 bp, Homo sapiens
gcaagaacattcccgcttgctttggacgaggctgcaggccgaggtgcggctgctgaagggcccgccgcccttttaggtacccgctggctttcgatgggctgagcctggcgcggcacttggacgaggactcgctgccgtcgtcggacgaggagctacttggcgtaggcgtgggcgctgccctgcaggacgcattgtaccctctgtccccgcgcgatgcgcgcttcttccgccgtctggagcggccggccaaggacagcgagggcagctcagacagcgacgccgatgagctggccgcgccctacagccagggtctggacaactgaggccatgcccagcgcgcccggagtcaggaggccgcagccgcggggggcgcccgggcagtccgcgttctgctccccacctgccgcacttgacaaactacgcgccctctgtggctcggccacccctaaagcgaggcccggcgaggcagcgcagagggtagggtccgacctgggctcctcagggccccggggcaggctctctctccccagcagtgtttacccatcttggtctgtacccctccgggccctctggcgttccaggggtgcctggaggggctgactgctctcttaacaggagggcagagggcaggggacagacgacccagaggtcccagcactgaatgagcaggcagctcccacctcctggcaggcttccttttgggacaggggcgacattgctgggaagtgctcaggaggtagccgaggcctgaggaaggagagcgccagctctgggctggacatcagcaccccacaacactcctcgggatgaagtgacccttgactagcccctggccatctctaggggagtcaggccgctggggacagatggccaggccggcctctcctgcctggcgcaggcaccgtggcccctgcagcggaaaccaaagtccccctactatgtgcggggcgcctggggactgagtggctaacgggaagcctccctgcttctctggggccagagcagcttccaggaagtgaagagacccctctccccagtgccccacatctttctctgggagacactcgcgccccctatcctggccagtgatggaggggtatctctacaggggtccttggtctccatctacttccctctcttcatgtgtttccagccccaccctcagccagagccaggcccccaggcaggagcttcccagcgagcggcctctgccctcctgcctcccgtcgacccgggaattccggccagag

SEQ ID NO: 107669 - DNA, 318 bp, Homo sapiens
ataaacaaagacacaaagatttgtatgtaaagcatcgtatggacagccaccttatttctcttggagcagaaagggaccttaaagatgacagaccaaacatcaacttcacagatgatgacacagaaggtgaatctactgaaaagagctaaagaaagacaaatctcttgaggcagatgaagggaatgcaaatattcaaagaccctgcagaaaatcagtcaacaagatgctgtttgtcttggtcttagagtttgctatctgttgggccccgttccacattgaccgactcttcttcagctttgtggaggagtggagtgaatc

SEQ ID NO: 107670 - DNA, 419 bp, Homo sapiens
  misc_feature (1)...(419): n = a,t,c or g
gagggcagctcccagccgaggacgggggatgttattgtccttgctgctttgccaccccattcccgtcaataaagtggtttgaacccaaaaggnnnnnnnnnnngataagattnnnnnnnnnnngggaggggaaccttatagaagaaatgaagacaaaccagttgcgggcttgtggagctattgccaacagcgtgtttaatgatacattaaaaaaggttctcattggctttgattggtagcctatacctatgggttggaaaaagaatgggattgcttggcggacagataaaagggtgaaattcaaaaatccccctggaggagacaacctgggagaacgatttaaaggtacttcggtgcctgggaactggcttaaaccagcttacatgctggattctgaaccaaataataatggattcata

SEQ ID NO: 107671 - DNA, 482 bp, Homo sapiens
tttttttttgagatggagtctcgctctgtcgccccagctaaagtacagtggcgcgatctcggctcagggcaagctcccgggttcacgccattctcctgcctcagcctcccgagtagctgggactacaggcacccgccaccacgcccggctaatttttttgtattttcagtagagatggggtttcaccatgttagccaggatgatatcgatctcctgacatcgtggatccacccacctcagtctcccaaaatgctgggattacaggtatgagccaccgtgcctctcttgacatactactcttgaacgtactactctcttgacataaagatggacatcacacaagagcccctaattagctatgcaaatattttaggtctgcagctgaagtctaaaagccccaatttttacaacctgtcagacatatgtgtttattacgcaagtatgttaaattcaaagtaattaaactagacagaatagataag

SEQ ID NO: 107672 - DNA, 751 bp, Homo sapiens
ctcgctgtgaagatggcgctctccagggtgtgctgggctcggacggctgtgttgggctcggcagtcacccctggacattttgtcacccggaggctgcaacttggtcgctctggcctggcttggggggcccctcggtcttcaaagcttcacctttctccaaaggcagatgtgaagaacttgatgtcttatgtggtaaccaagacaaaagcgattaatgggaaataccatcgtttcttgggggtcgtcattttcccccgttttctatatcctgtacacaatcttcatgaaaggcaggattgcagatgttatgggctgatgccaaaaaaggttagaggaataaagcccaattatgtgaaggccaattataaggtttcatcaacttccaatcccgggagatggagcatttgagacagttccgccaagacgtccccaagtgtctcttcataggtattatttccattccaccttttgccaactacctggtcttcttgctaatgtacctgtttcccaggcaactactgatcaggcatttctggaccccaaaacaacaaactgatttcttagatatctatcatgctttccggaagcagtcccacccagaaattattagttatttagaaaaggtcatccctctcatttctgatgcaggactccggtggcgtctgacagatctgtgcaccaagatacagcgtggtacccacccagcatgtatgcggccgctcagatgacccaaacttcgtcgcggcacgtt

SEQ ID NO: 107673 - DNA, 283 bp, Homo sapiens
aagtctgtatactgctggtagaagtattcaattgataaaaccattttggaaagcagtttgtcattccctggtaaagttgaatatatttattttctgtaatttagtatttccattactagatatataatctaaactctgttcatgtgtaccaggagccagaataaaaattttcacagcactattattcatattaacactaataacagaaacaagaacctagaacacctctaacatccagcagaggtagaatgggtaaatcaattttggtatatatatatatata

SEQ ID NO: 107674 - DNA, 435 bp, Homo sapiens
  misc_feature (1)...(435): n = a,t,c or g
ggcatacccccccnaaacgcccgggtcgacccacgcgtccgatcgtcattcctgtctctgactatgcaggaagttcatcaaagaaatctctctaggcgtccacacacatgtcaacacctacaattggaaaaaaactttctttcttttccgttcgttccttctttctccttccttccttccnnnnnnnnnnnnngaggggcccattctggtcccccgggttnnnnnnnnnncaaaannnnnnnnnnggggggggccggaggcccggacctaagggaactccccggcccaaccccccggagggggggaaataaaagccgggcccccccgggccaattaaaaattaaaaggtttggaaaacgggggggtttggtaaaatggcccagccaaccaccttcttaaaaatccaaatttttaaaaaagggcccaatttgggac

SEQ ID NO: 107675 - DNA, 466 bp, Homo sapiens
  misc_feature (1)...(466): n = a,t,c or g
atgttcccccccaaaaaagggtttttctcaaagacccccgcggggtttttatcccccctctaaagggaaaaaaaatttttctcccccccccggaaaaattgggccccccaaaggatttttaaaaagggcccccccgagttaaaaaaaaatcccccgcggggcccccccctttttannnnnnnnnngttttctttattttttattttttnttctattggcgaggatttaatttttaaactgaaaaaatatggtaatcagatcttcagtgccaaaaattatttttaaaaacgtaggcatatacagaggctgggagtagataaaggtgaaattaaagtcataagagtatgaacaagaagcagcccatccctatgaaaaagcaattcagccccnnncaccctttaggaattattcaatgaaagccaatttctggggaccaacatcccagtgaactgttcctatttgttct

SEQ ID NO: 107676 - DNA, 366 bp, Homo sapiens
agaaaaaatatttgaagatataatggccaagaatttctggaatttggtgaaaggcacatgtgtgcaaatttcagaggctcagagtcccccaagcagaattaacacaaagaaaaccatccctaggcccctcatactcaaacagctgaaaaccaaaagtaataagaaaatctggaaagcacccagagaaaaaggacccattacataagagaaaaaacaattcaaatgacttcttcttgtaatctatggagacttgaagcccagaagtcggtgatttatatatacatatatgaaacaatatatatctctttatgagtatatatatgtgtgtgtattctttgtgtgtgtgcatatacacacacatatatt

SEQ ID NO: 107677 - DNA, 433 bp, Homo sapiens
  misc_feature (1)...(433): n = a,t,c or g
naagagctagtaccgaattncagggncgaaccacgcgtccgagcgactctgatgaggaacaagaagatgaggaagaaatcgatgttgtttctgtggaaaagaggcaggctcctggcaaaaggtcagagtctggatcaccttctgctggaggccacagcaaacctcctcacaaccttgtgtgagtcttgagactgaaagatttaaccataatgtaaactgactcaaattggactttgggcataaaagaacattcttatgcctaccatcnnnnnnnnnnctttaacagattcgtgttaaagaattgtttttaaaaaatatgacgatttacccagtgtttctctgccaagatagccattaaaggcaaacacccttagtaatgcggcgctagaagaggcacgaactttcacgcctagtttatggcccctaggaccaa

SEQ ID NO: 107678 - DNA, 390 bp, Homo sapiens
  misc_feature (1)...(390): n = a,t,c or g
agcgactctgaggaggaacaagaagatgaggattaaatcgatgttgtttctgtggaaaagaggcgggctcctggcaaaagggcagagtctggatcaccttctgctggaggccacagcaaacctcctcacaaccttgtgtgactcttgagactgaaagatttaaccctaatgtaaactgactcaaatcgtactttgagtataaaagaaatttcttatgcctacaatcnnnnnnnnnnctttaacagatttgtgataaagaatagttcttaaaaaatatgaacatttcccacgtgcttgtctgcgaatatagcctttaaaggcaaacacccttaatattgcggcgctagaagaggaacgaactttcacggctattttttggcccccgaggaa

SEQ ID NO: 107679 - DNA, 422 bp, Homo sapiens
  misc_feature (1)...(422): n = a,t,c or g
ttaagacctaaaattatagagctactagaagaaaacctatgcaaattattttagacataggtctaggcaaagaatttatgactgtgccaaaagcncaaggaagaaaaataaaaataaccaaataaaaattaagctaaaaagtttctgcacagcaacagaacagagtgaacagacaatcaggagaaaatatttataaactatgcatccaacaggggactgatatccagaattaaacaataaannnnnnnnnnnnnnnnnnnnnnnnnnnnnnnnnnnnnnnnnnnnnnnnnnnnnnnnnnnnnnnnnnnnnnnnnnnnnnnnnnnnnnnnnnnnnnnnnnnnnnnnnnnnnnnnnnnnnnnnnnnnnnnnnnnnnnnnnnnnnnnnnnnnnnnnnnnnnnnnggacgcgtgggtcgacccgga

SEQ ID NO: 107680 - DNA, 714 bp, Homo sapiens
  misc_feature (1)...(714): n = a,t,c or g
tcctataaggaaaaaacttttaccttgccagcccgcgtaaaatttggcccccccaaggatcctttaaaacgggccccccnnnnnnnnnnnnnnggtttcatttttcttttatttttttaaaaaagcccctaaattctatggcttcaagggagcatcagagaaacgtaaatgccatttctgtacacttggtaaagcaaaaactagactcacagcccccgccctgggcacggccccaagctgctccactctgcccggcagcctccagggcaccccactggggaaccgcccgccagtccagggccgcccccaggcccctgcaatatacctgcagggctgggccgggggctttaaggcgttttgtctccggctgcttgccgggtgtcggagcagagaggcaggaagctccgtgcccacgcgccccacgcggcagggctgagggccgagcagggtgacaccaaccggtcctcccacctcgggttccaggcgccggggcgcagcctccgggagcaagtgcgtcgagaagcacccgcctggcagcgcccacccgccccttgccagggccaggctgggaagagactgcagcagccgtgcccgcggcgcccgagctttggtgcagcattttggttggggagccggcttcagccacggccccacccctgccttcccctttggtttcggggaggcctggggcacggcctcacccctggcaacaat

SEQ ID NO: 107681 - DNA, 430 bp, Homo sapiens
  misc_feature (1)...(430): n = a,t,c or g
gccggatgaattaagatccaataatatgctgcctgtaagagattcattttaatcttaaagacacacatagtttgagagtgaaaggatgacaaaagatagttcagtnnnnnnnnnnnnnnnnnnnnnnnnnnnnnnnnnnnnnnnnnnnnnnnnnnnnnnnnnnnnnnnnnnnnnnnnnnnnnnnnnnnnnnnnnnnnnnnnnnnnnnnnnnnnnnnnnnnnnnnnnnnnnnnnnnnnnnnnnnnnnnnnnnnnnnnnnnnnnnnnnnnnnnnnnnnataaacatataaagcaatattaatagatctgaaggatgagatagactacgatataacaatactaggagagttaaatactccactttcgacagtgaacagatcatccagacagaaaatctatatggaaatagcggatttgaacaacactttaaaa

SEQ ID NO: 107682 - DNA, 408 bp, Homo sapiens
agttcacttccttgttcagctttaacgtgcttctcctggtgtctgtccagataatgccatgttctggggcatggcaggcccagcctttactcaagccttcaggcatgtattgcctccccagccaccctctccagtgtggcccccctcactgggccccagctggcttctgtgcagaaactaacaggatgacctaaaattcatatggaaacttaagagacccagaatagccaaaccaatctggaaaaagaagaacaaccttggaggactcaaacctctccatttcaaaacttacaacaaaggtaaagtcatcaagacactgtgatactggcctaaggacccccctctgatcaatggaagagaactgaaagttcagaaacagactcacatatttatggtcaattaattttt

SEQ ID NO: 107683 - DNA, 607 bp, Homo sapiens
cccccgtccggcggcggcgcaggcgcgtttaggcgcacagcgtttcacagcgaggcgccgggccagactccactgggcagctgtgaaaggtgatgggaacagtgaaaatcagacttggaacacggagcgcattgtgggcctgtcgtgggtggggccagcagcacatgcatgccgggctcacagagcagcctttgggtgttcttttcccagaggagctctacggtgactttgaagacttggaaacaggggacgtgcacaagggaaaatcgggccccgatactcagaatgaagatgtagagaaacaaggaagaaattgaccctgacgaagaagaaagtgccaagaaaaagcatttggataagaagagaaaattgaaggagatgtttgatgtggaatatgatgaaggagaaagcacatattttgatgatcttaaaggagaaatgcagaaacaagcacagctgaatcatgcagaatttgaagatcaagatgatgaagccagagttcagtatgagggttttcgacctgggatgtacgtctgcgttgagattgaaaatgttccctgtgaatttgtgtagaactttgacccccgttaccccattatcctgggtg

SEQ ID NO: 107684 - DNA, 432 bp, Homo sapiens
  misc_feature (1)...(432): n = a,t,c or g
gtggaatctcagaggcgcaccttaagacagagaaccctcaaaagttatatatgcctttattgaaaaaacaggaggtgttgaagctgttaaaaatgaactgcggaggcaagcaccaccacctccaccaccatcaaggggagggcgacctcctcctcctccccctccacacaaatcaggtcctcctcctcctcctgataggggaagaggcgctcctcccccaccaccttcaagagctcccacagttgcacctccaccaccgcctccttccaggccaagtgtagcagtccctccccccccgccaaataggatgtaccctcctccacctccagcccttccctcccccgcaccttcagggcctccaccaccacctccataagtgttgggggtggtgccactcccacgcgcggnnnacgcgggggtcgtccgaggaac

SEQ ID NO: 107685 - DNA, 608 bp, Homo sapiens
ggacacaagcacctctgacaggttggccttgacccaggagtactcgtggaggctgtagtggcccccaattcccaatggaagcccgtctttcagccactggactgaaggcagggagcagtggggcccagagactacccaagccgtgcagttcagagccactgagctgcccaaggcaggcctcagcacctggtcttcagacggggagaggaagtcaggggccctatcacagacacctggcatggctctgagccggggcctcctcggggcaggctgggctccagggtcacccctggctccaccgggctcctcggccagcagactgatccaagagctgggcaggactcctctctgtccttgcagtcagctggacagggcacctggacaggtcagaggctggttccagttctttcctccggggggcaaatgttggtcattggtgcgcctttgggagcaaactctccccttcgctgggccccagggagtgtccacagcaccaaggctgctatggatgcatcgccaagcgcggtggggacctggcttgtgtctttgtgtattttgatcagaactttccctgtagcttcctgacgaaagcgtcgacccagggattc

SEQ ID NO: 107686 - DNA, 711 bp, Homo sapiens
cttggctcactgcaacctcccacctccctgggttcaagcgagtctcctgcctcagcctcctgaatagctgggattacaggcatgtgctaccacacctggctgacttttgtatttttagtagagatggctttcaccatgttggttaggctggtctcgaactcctgatctcatgatccacccacatcggcctcccaaagcgctgggattacagacgtgagccacgtgcccggccgagaaatctaattttttaatagttcatcctatccccactgactgtaataccaaccccaacatttattaacttcccatatatgatgaatcattctgcattctgttctgtttccacacttgttacttggggaagaaaaaaaaagaagaaaagaaatttttatctgagaaatatgagcccctttacattatcaggcccagagaggcattgaaatagaacagcaatcatgtcacgcccccttgagctaaataattattatctcttgaagccagctgttatgtgggatgccaggtaaccataaaatgccatatatcctgtacttcataatatgtagccaatcactaactaatgttatttctgtagccagtgaacattccttcctttccttcctttctttccttccttcccttctttccttccttttctttccccttccccttccctcctttccctccctccctaaaaggatcttgctttgtacc

SEQ ID NO: 107687 - DNA, 383 bp, Homo sapiens
  misc_feature (1)...(383): n = a,t,c or g
cccacgcgtccgtcatttttcattagtcagttgggtaaagacaaattttttagtagattctgttgagaaaactggattactacctagaggaaaataaaactgtgtctgtatctaataccatgcacaaagatggaccctggagggattaaaaatttgtgaaaggtaaaactatgtaattaatagaagaaaatatagaatggtatctctaatctatgggggaaaaggccttttttattttgaaaaaatttcaaatctgtattaaagaatagtacnnnnnnnnnnnnnnnnnnnnnnnnnnnnnnnnnnnnnnnnnnnnnnnnnnnnnnnnnnnnnnnnnnnnnnnnnnnnnnnnnnnnnnnnnnnnnnnnnnnnnnnnnnnnnnt

SEQ ID NO: 107688 - DNA, 443 bp, Homo sapiens
  misc_feature (1)...(443): n = a,t,c or g
ntagtgtcatttttcacagtaatagaaaacacaattgtaaaatttaagtgtagccttaaacaactttaaataatttgagccatcgtgagaaagaacaaagctaggggcatcatacttcttaattttaaactttatgtaaaggttgtagtaagcaaaagagtatggcatgtgcgtaaacacacatacaaaaaccaatgaacagaatagagagcccagaaacaaatccatgcatacaaggtcaacgaattttggcaaggggatcatgaatatacaattcagaaattatagtcttgtcaatacatggtgctagaaaaactggagagccncaaacaaaagaataaaagtagaacnnnnnnnnnnnnnnnnnnnnnnnnnnnnnnnnnnnnnnnnnnnnnnnnnnnnnnnnnnnnnnnnggacgcgtggatcgacccggagtttctgc

SEQ ID NO: 107689 - DNA, 422 bp, Homo sapiens
  misc_feature (1)...(422): n = a,t,c or g
nnnnnnnnnnnnnnnnnnnnnnnnnnnnnnnnnnnnnnnnnnnnnnnnnnnnnnnnnnnnnnnnnnnnnnnnnnnnnnnnnnnnnnnnnnnnnnncccaataatcagattcttattttagaaagataaattcagtagtgatttggagaatggattanaatgagaagacagtgggcaaggagacgagttagacaatttcnnnnnnnnnnnnnnnaaaagggaatctttttctgtaccctaggtgggagggcaggggccaaattgggtcattgaaacctttgcctccaaggttaaggcaatctttgggtctcacccttccaagaacctggaattgggggcttgcccccccaccctcagttaattttggggttttaagaaaaaaaaggggttggccatggtccccaggcttgtttaaaactcctg

SEQ ID NO: 107690 - DNA, 416 bp, Homo sapiens
  misc_feature (1)...(416): n = a,t,c or g
ctcttgtcaaactagaccaaaatgatactagtaaagaaaactataggccatcattctttatgataatgggtacaaaaaactaaacaaaatttcagtggataaaatccagcaatatgtaaaaaagataatacatcatgatcaagtgaagtttatctcagtaatacagtgtcggattaacattcaaaattaaattagcnnnnnnnnnnnnnnnnnnnnnnnnnnnnnnnnnnnnnnnnnnnnnnnnnnnnnnnnnnnnnnnnnnnnnnnnnnnnnnnnnnnnnnnnnnnnnnnnnnnnnnnnnnnnnnnnnnnnnnnnnnnnnnnnnnnnnnnnnnnnnnnnnnnnnnnnnnnnnnnnnnnnnnnnnnnnnnnnnnnnnnnnnnnnnnnnnnnnnnnnnatgaaccttgaagacatat

SEQ ID NO: 107691 - DNA, 399 bp, Homo sapiens
  misc_feature (1)...(399): n = a,t,c or g
ggaggcaggagggtggtagggagtaaacannnnnnnnnnnnnnnnnnnnnnnnnnnnnnnnnnnnnnnnnnnnnnnnnnnnnnnnnnnnnnnnnnnnnnnnnnnnnnnnnnnnnnnnnnnnnnnnnnnnnnnnnnnnnnnnnnnnnnnnnnnnnnnnnnnnnnnnnnnnnnnnnnnnnnnnnnngacagcaaacattacatttagtagtgaataaaaagctttcaacttggcataagaaacaaggagaatccctagttaatcaccacctctattcagtattgtagtggaaattcttgctagtgcagtaagccaagaaacaaaatggaaagccttaataaaagaattgtaaatgaagaaataaaatggcactatttgcagatgatgagattgtataccag

SEQ ID NO: 107692 - DNA, 668 bp, Homo sapiens
  misc_feature (1)...(668): n = a,t,c or g
ggaggcgggaggtacggagcactttctaattgattttacgaagctcatactatcaccctgataccaaaatcagacagatacagcaccggaaagggaaactgggactatattccccatgaatatacacacagatcctcaaccaaacttcagcaaataggatttatcggtatataaagagaattctacaccaagatcaagtaagatttattccaggaatccaaggctgacatttcnnnnnnnnnnnnnnnnnnnnnnnnnnnnnnnnnnnnnnnnnnnnnnnnnnnnnnnnnnnnnnnnnnnnnnnnnnnnnnnnnnnnnnnnnnnntaatctgatatcatattaactggctgaagagtcatgtggtcacatcaacaaggcagaaaaggcatttaacaaaattcagaaagtcagcaccttttatggcagcactgtcagccagtcatgagcagaacgtcgtcagcttggtaacaagcatgtctagagacccacagccannnnnnnnnnnnnnnnnnnnnnnnnnnnnnnnnnnnnnnnnnnnnnnnnnnnnnnnnnnnnnnnnnnnnnnnnnnnnnnnnnnnnnnnnnnnnnnnnnnnnnnnnnnnnnngtaagaattaaccagctgtggtggtgagcagctgtggtgagcagctgtggtggtgagcaaac

SEQ ID NO: 107693 - DNA, 431 bp, Homo sapiens
  misc_feature (1)...(431): n = a,t,c or g
aggagaacaaaaaaatagtttgggcccgggcaaaggcccccagcccgtgaacccccgccccttgagaagggaaagggtgtaaacccccctagggcccaggattcaggcccaccgggccacaagggggaacccccccttttcttaaaaaaccaaaaataaccnnnnnnnnnnnnnnaagcccggtaaccccccctcctgggggggttaggccggagaaattccttgaccccggaggtggaaagttgttaggatacccccccggccttcaggctggggggccaagttagatttcgtcccccnnnnnnnnnnnnnnntctaaaaccagaaatgaattctggaggtgggatcttcctttgtaattcagaaggtgactcccaacccctcttcagaagctgggtgggctccaggcctggttcaaccctcctgcctcc

SEQ ID NO: 107694 - DNA, 408 bp, Homo sapiens
  misc_feature (1)...(408): n = a,t,c or g
tttataaaaaagggggtttcccccgttaaaccagaaaggttttatttccctgcccttttattcccccgcccccgcccccccaaaaggttgggatttaaggcttaggccccccggcccggcctannnnnnnnnnnaagggcaaaaaggaaaaagtgaagtaaaccgccctccccctttggtttggggaccctaaaaaaaaagggccccccttcccaaaaacccgggtttggcccgcccttttcaaccccttggaaaannnnnnnnnntttcccgggcccccgggnnnnnnnnnnnnnnnnnnnnnnnnnnnnnnnnnnnnnnnnnnnnnnnnnnnnnnnnnnnnnnnnnnnnnnnnnnnnnnnnnnnnnnnnnnnnnnnnnnnnnnnnnnnnnnnnnnnnnnnnnnnnn

SEQ ID NO: 107695 - DNA, 422 bp, Homo sapiens
  misc_feature (1)...(422): n = a,t,c or g
gctcaaattatataagcgtaaccaaaaagccaggtactgagaggagacgagggtctgtgtgtgtgtcatctgcatctagcgtgtatgtgtcttgtatgtgtgtgcatgtgtgctgcgtatatgtggtgtgcatgggtcatgtgtgcatagtgtgtgagtggtgtgtgtgtaggtgtagtgtcttgtgggggtgtagcatgtatgtgtatatataatgtgttctgtgtgtgatgtgtgtatgtgtggtgtgcacctgtcacatgcatatgtaacgtgttttatgtatgagtgtgtgtcacatgtgagaannnnnnnnnnnnnnnnnnnnnnnnnnnnnnnnnnnnnnnnnnnnnnnnnnnnnnnnnnnnnnnnnnnnnnnnnnnnnccctagttgtgcaggacagcgtacacctcctgcctcc

SEQ ID NO: 107696 - DNA, 468 bp, Homo sapiens
  misc_feature (1)...(468): n = a,t,c or g
nnnnnnnnnnnnnnnnnnnnnnnnnnnnnnnnnnnnnnnnnnnnnnnnnntagtgtgcaggtgtgtttccacgtgtgcatatgcataggtgcatgtatgcatgtgtttgtgtgcacacatgtagttgtgtgcacgtgtgtgtatgggtaggtgagtatagtgtgaaggtgtgttttgagtatgtacatacaggtaggtgtgtccacgtctgcttgtatgtctgtgtgtgtgtgtactcatggctgcgtgtgtgtttctgtgtgtgtcaacaataagtagaaagtagacaaaacgctcggaacagctctgtgggccccatgccggcaaccagagtggagtcgtttccacaacctcagagccctgaaatggctgtttccacaacaggacacttgccagacatcataaatgcaattacagcctcctgcctcccgtcgacccaaaaattccgggccggtaccgaaggcgtac

SEQ ID NO: 107697 - DNA, 1063 bp, Homo sapiens
ggtggaattcagacactgaagggagagggagaggaacaagccccagggaccctttatccgacttccttccacctgggggactccctccacgggcccttgctttaagggcaaatggcgagggcaccagaacacagggaggccatgccggaggtccctgctgcaaccatgcggccccccagctcactcccagcagccaagacgaaggggggcctgggctccccctagggcaggcgcctctgattctctccaccgagaggcacctcccatgccggcctcttcctggggtgactcccagaaccttcttggacccatgaacatttcaatctggggtggggccttccctgggcatccaagtggtgggaatctgtccctagcccctagaactcctggagggctgggcccacctctgtctgcatcccgtccccattccccgccccgggtggcaggggctggagaggaaggagcttcaggcttgaaaaccatcaaagcaggtttcttccgagatggccagtggtcacctgagatggagcagagagcacctgtggcgggcatcttctctagaagccgcctgtgagccctacggaggccctgggcttcgtgccgtaagacagacggtgtcctgcaggtacgtgggggaaccctgtaggcagggactttgcctgctttctcagaacaggacagaggagtttggctggggcagcccgaggtgaccgggatgctgtcgccccagctctgggccaggctgatgtgggaagggaggaaggagggacagttacgggccaggctgacgtgggaagggagggaggagggaggtaggagggacagaggcctggctgctctgcagggctgggctccgtggcatctcctggtggctgtcaggtcctgcctggccccacgctgaggccagtgtgatggaggggcctggaagcctcatccttcttgattgccacgcggtgagggccacaggcatgcgccaccgcactggactccccctttcatcatcaaagccaaattttcttcttgtttcatctaggcctcccatggagacaccatgtgtgattgt

SEQ ID NO: 107698 - DNA, 418 bp, Homo sapiens
  misc_feature (1)...(418): n = a,t,c or g
ttcttaagctccaggggatgaaaccaaaaaagggctctttccttaggtttggggggtagggttgggtcccagggttcccccccttaaccccacccctttggaaggccaagcccgggggttcccttaggccccgggttttggcccacctggggcaccagggggaacccccttttttcccaaaaatttaaattttccggggggtccccctgaagtcccagttctccggagggttaaattggaagattcccttaagcccggaaggggggccttccggggggccaaattgggcccccgcccccccacccgggggaaaaaaataacccccttttccnnnnnnnnnnnnngggnnnnnnnnnnnngaaatggaagcagtgtaggaccgaagacgtctgggacggaagctcacccccagacgaaa

SEQ ID NO: 107699 - DNA, 449 bp, Homo sapiens
  misc_feature (1)...(449): n = a,t,c or g
ctctccggaacttccgggtagacgattctcgaaaaaccnnnnnnnnnnnnnnnnnnnnnnnnnnnnnnnnnnnnnnnnnnnnnnnnnnnnnnnnnnnnnnnnnnnnnnnnnnnnnnnnnnnnnnnnnnnnnnnnnnnnnnnnnnnnnnnnnnnnnnnnnnnnnnnnnnnnnnnnnnnnnnnnnnnnnnnnnnnnnnnnnnnnnnnnnnnnnnnnnnnnnnnnnnnnnnnnnnnnnnnnnnnnnnnnnnnnnnnnnnnnnnnnnnnnnnnnnnnnnnnnnnnnnnnngaagnnnnnnnnnngtgatccaaattggaaaggaagaagtcaaataaccgttgttcacagatgacatgatcttttacctaggaaaacctgaaaactccacaaaaaaaactgttcaaactgataaatgaattcagtaaatttgccggatacaaagttaacatac

SEQ ID NO: 107700 - DNA, 430 bp, Homo sapiens
  misc_feature (1)...(430): n = a,t,c or g
tttcgtgaactggtctattgtcaaaatatatgaatgaatgaaataatgaataactgaattagataaaacattatggtcagatatttcacaggtgccatatactaatgcattaagagacaagtaactccaatctaatttaaattgatccatggcacaaagagaaatggaaagcttccactaaaaaatgagaacactgtgacagagatagtaaaaccagaaaaggatagtacagnnnnnnnnnngaaggacaaaccaatttactatttaactgattccaaaatcctgaacaaaaagattagcaaatacaatccagcaatacattaacagaacagtctatcataaccaagtgggatccattgctggaccaaaaggatgattcaatattaggaaatccaatctaatgtgatccagtaactcaagtcaccatatt

SEQ ID NO: 107701 - DNA, 347 bp, Homo sapiens
tgccaccactcccagctaatttgtgtatttttggtagagacagggtttcaccatgttgcccaggctggtcttgaactcctggactcgagcaatccacctgcctcagcctcccaaagtgctggcattacaagcatgggccaccatacccagcctcaaaatgttaataacgaccaaattctatttcagttttcaatctctactgcctccccgcagactcatacatttattattaccctcatttaaaaaattcattcttccaactttctctaccactctactttcttttttgaaatggagtttcgctcgttgctcaggctggagtgcaatggcgcaatcttggtcgacgc

SEQ ID NO: 107702 - DNA, 469 bp, Homo sapiens
  misc_feature (1)...(469): n = a,t,c or g
atctttttttttaacaaaaaaaaatcgcccgggggcggggggcccccccggttatcccccacctttgtgggggccannnnnnnnnnnccccccgggggcgagggttttgaccccccccgcccccaaaggtaaaaccccccccttttttaaaaaaaannnnnnnnnnnnnnnggggggtgggccccctttttcccccctccttgggggggaagggggaaaaaatttttttatctccaagggaaaaggtccccatgcccccaaaggggccctttttttcccccccggggggcccnnnnnnnnnnnnnnnnnnnnnnnngataagaaaaccaagactaacaagtcaggatacccaggaaagcagtcagtggcacagccagaatttgaaccaaagtgaactggctgtcaacactgattaagacactaaatgacatcacatacgaaattnnnnnnncagaaatgccggagcgga

SEQ ID NO: 107703 - DNA, 422 bp, Homo sapiens
  misc_feature (1)...(422): n = a,t,c or g
agtgctgggacaactgaataaccacatggaaaagaataaagttggacttctacctgaaccatatataaaaattaactcaaaatggatcagacttaaatgtaaaactctaaaattcttagaagaaaacataggagtaaacctttttgactttggattagacaatgatttcttagatatgacacttgaagcacagcaaccaaagacaaaatagataaactcgacttcatcaaaattaaaaacttttacacttcaaaagacactatcaagaaagtaaaaagacaatccaaaggaagggagagtttttacaaatcatctatctgataagaatccannnnnnnnnnnnnnnnnnnnnnnnnnnnnnnnnnnnnnnnnnnnnnnnnngggaaaaaatgagaacaagggtttgcaaggtaagtacgaaa

SEQ ID NO: 107704 - DNA, 500 bp, Homo sapiens
ttgagatggagtcttgctctgtggcccaggctggagtgcagtggcgcaatctcagttcactgcaacctctgcctcctgggttcaagtgattctcctgtctcagcttcctgagtagctgggactacaggtgcacgccaccacgcccagctaatttttgtatttttagtagagacagggtttcaccatgttggccaggctggtctcaaactcctgacctcgtgatatgcctgcctcggcctcaaaaagtgctgggattacaggtgtgagccactgtgcctggctagttcccccttcgttacctgagcacccctaaaagtaggttggtcccgtactcgcatttgggcatggtcaagcagtcacctatcccaggcgtgcatgtaccaggataggctaccatcggcagagcccaagggtccaagaattgaggctcagagagagcagaggatgcaaagccaatgggaaagacggcaggttcctcctactgggattaagagacgaaa

SEQ ID NO: 107705 - DNA, 415 bp, Homo sapiens
  misc_feature (1)...(415): n = a,t,c or g
tttcgtctcaaagtgggcagaaggcccctgcggggaaggtaaggtgtgagggagaggaggtgagtcacctgtggcacnnnnnnnnnnnnnnnnncccccccccaaaaaatcttttttggctccccccgggaaaaaggttttttcctttcaccccttggtttgacccgggggacccttgggtccctttttaaaaccccacccaggttttgggcccgtttgggggtcccccaaggggaaaaaacccccttggggggagggtattttttnnnnnnnnnnnnnnnnnccccccggggaagnnnnnnnnnnnnnncccccccggaaaaccggggcctgggcccccccagggcaaaaggggcttcccatcaacccctggggggggcctccgatcccatggaaggccggttccaaactgaga

SEQ ID NO: 107706 - DNA, 475 bp, Homo sapiens
  misc_feature (1)...(475): n = a,t,c or g
tttcgtgagttttatctataagcccctgactggggctgctgcctttctttcagagatgccctgcccagagaggaggaatctagagaggcagtccggctgcagtggctttgctgcactggctttgctgcannnnnnnnnnnnnnnnnnnnnnnnnnnnnnncccagggctttgtttacactgtgaggggaaaatcacctactcaagcctcagtaatggcagatgcacctcccctcaccaagcttgagcatctggggtccacttcagactgctgtgctggcagcaagaatttccagccagtgggtcttagcttgctgggctctgtggggattggacccactgagcaagaccacttggctccctggcttcagccccctttccagcagagtgaatgattctgtctcagtgggttccaggctccactgnggtatgaaaaaaactcctgcagttatcttggtgactgcccaaatcgccacn

SEQ ID NO: 107707 - DNA, 514 bp, Homo sapiens
gtaattgacttctgcagtgccttcttcattatccttgttgttcaaaccagtgagtaactatttgcttcactggggaaggacaatagttcatttagacttatgcctcaggactgtactgaaagtcctttctatttctctcaagttctgaagcctgatttaggagatggaagttttccccgggacttgtccttactatgatatgtagatgatctacttagttcctcttccctgtagctggcttgtaaggaagatggtgttgatttattaaaacatctagctgcgaaatgtcataagatttctaaagaaaagttataactagtaagacacaagttaaatatctgggccatctaatttcttgaaacaagactacatttggacgctgaatggattcaggacatcctgcacttccctaaacctgaaatgaaatggcagctttgagggtttctcagacacaccagctactactggacaccaaacttttctttgattgcttaacttctacatgccctactta

SEQ ID NO: 107708 - DNA, 445 bp, Homo sapiens
  misc_feature (1)...(445): n = a,t,c or g
cccggggttccccnnnnnnnnnnnnnnatcccttatttttcttaaaaacttttggaggccnnnnnnnnnnncctcccccgttttcccccccctttgggggccccgggacaccaatttccaaggtccggggtttggggcccttttggccccccgggcaaaaccccgtttttttttaaaatcccaaattccccccnnnnnnnnnnnnnnnccctttttttcccgttttcccgggggtttggcccgggaaccccccttacccccccttgggggggttccctttaccccaatttccccccttgccttccggcttgggggccaaaaccaaactcccttttcnnnnnnnnnnnnnggaactttgtacaacaaatatcttgtaaataataagactatcactaaaggttaaccatatgatccaagttttnnnnctccacaaatccccacgaaa

SEQ ID NO: 107709 - DNA, 420 bp, Homo sapiens
  misc_feature (1)...(420): n = a,t,c or g
gcaattcccgggtcgacgatttcgtcagaagttaaaaaatctcaaattaacaatctatctttggaaaggaagaaactaggtcaactaagggaaaggaactagggaggagaaaatccaaaactagcagaagaaaaaccactgaaattagagaagaacttaatgaaattgacatgtaaaaatccatacaaaagatcaataaaaccaagacttggtttttcaaaaaaataaaatcgataggccactagccagtttaacaaagaaaaagaaagagaagatccaagaaagcacaatcagaaatgaaaaaggtggnnnnnnnnnnnnatcagaatcataactgggcccacagaaatacaaaagacctttcaaaccttttatgaagtacttctaagcacccaatttataaaactctaaaggaaatgg

SEQ ID NO: 107710 - DNA, 367 bp, Homo sapiens
attgatctgttgatggacatttgggtcgttttcaccatttggttatttcaaatcacgctgccatgaacaattgcatacagatgtacgcaattgcacggatgtgtgttttccattgtcttgggtcgttacctaggaagggaattgctggagtacatgctaatctatgcttagctttttgaggaaccgctgttatgcagtctcttttttgagatggagcctcactctgttgcccaggctggagtgcagtggcgccatcttggctcactgcaacctccacctccgggatttgagtgattctcctgcctcagcctgttgagtagctgggattacacgtatgcaccaccacgcctggctgattttttttaat

SEQ ID NO: 107711 - DNA, 445 bp, Homo sapiens
  misc_feature (1)...(445): n = a,t,c or g
gctccgcaattcccgggtcgacgatttcgtgccctttgtgggtccgtgatgatcggaggtgttctgtgcctgtgtttctatgtcagtctgaacgttcggggttgtgagtacctgttgtactctacatgtctcttgagtatttgtgtcacttgactctaggtctgtgtctcttcctattcgtggcgggtatctgcctgagcatgtttgtaaatatgcttgtgtctgtgtaattctgtgtgtctgtgttactctatgcgtctgagtttcagtctctgtatttgtgaccaggtcctcctgggtgtgtccattaattcatgtgtctgttagtttgcggcggaacannnnnnnnnnnnnnnnnnnnnnnnnnnnntcctggatctgtatgccacctcctcactgggggtttctgagaacctgcatctctttgcttgtatgtctttttgtn

SEQ ID NO: 107712 - DNA, 427 bp, Homo sapiens
  misc_feature (1)...(427): n = a,t,c or g
ntttcctgggggccccggttgccccccttaaaaaacaaacccggcccggggccgggggttccccccgttatttccccccctttagggggtttnnnnnnnnnnttcccagggtccggggtttaggccccccctggttaccagggggaaccccctttttttaaaaaaccccaaaattacccnnnnnnnnnnnnnnnnccccccgttcccagttttttggagggttaagcccgaaaaatggggttaaccccgaggggccgccttccattaaccaaaatttgggcccctccccccccttttgggggcaaaaaaaaactttttttccnnnnnnnnnnnnnnnggaatacagaccattccaccaaagccaaatcctcatcatggtctgtaatgctgtatgcgatctggcccccacctacttctccatacgaaa

SEQ ID NO: 107713 - DNA, 424 bp, Homo sapiens
  misc_feature (1)...(424): n = a,t,c or g
ccttttgccaccaataaaaggccctttttaaaccaaaaaaaaattttttnnnnnnnnnnnnnnnnttcccccccttattccccccccttttaaaggttagggccggccattccctttgggtccgagttttaaaacccccccggcccccccggttaaaccccctttttttaaaaaaacaaaaacaaacccggggtgttgggccggccctccaattccccttttttggggggtttaggcaaaaaatttcctttaaccccgggggccaaggtttcaataaacccaaatttcccccctnnnnnnnnnnnttggcaaaaattaacctttttcnnnnnnnnnnnnnnngtactctgggctgcctgtcttccctccttctccactctcctaccccctgtaaatgactgctacatacaactacgacacgaaa

SEQ ID NO: 107714 - DNA, 440 bp, Homo sapiens
  misc_feature (1)...(440): n = a,t,c or g
ccgggtcgacnnnnnnnnnnnnnnnnnnnnnnnnnnnnnnnnnnnnnnnnnnnnnnnnnnnnnnnnnnnnnnnnnnnnnnnnnnnnnnnnnnnnnnnnnnnnnnnnnnnnnnnnnnnnnnnnnnnnnnnnnnnnnnnnnnnnnnnnnnnnnnnnnnnnnnnnnnnnnnnnnnnnnnnnnnnnnnnnnnnnnnnnnnnnnnnnnnnnnnnnnnnnnnnnnnnnnnnngnnnnnnnnnnnnnnnnnnnccccccgggtttttttaattaaaggcaaaaagggccttcacaaaattttagcacccttttttgctaaaaactttaaaaaaattgggtttggggggaccatttttcaaaaaaataagagttttttttgacgacctcccgcccatttttatcttgagggggcaaaaccgggaagctttccttttaaaacccaacca

SEQ ID NO: 107715 - DNA, 357 bp, Homo sapiens
acctggccattatggataaccccgataggctcaataataggaattggagagtcctagaaattaattccccacacattttataagcctcacctgattttccgacaaggtggcaggatgattccagagggaaagaatagcttttccagcaactggtgctgggataactggatatcccacacacagaagaattaagttggaccccttcatacctcatacaataattaacttaaaatggatcagtgacttaaatgtaagcactaaaaccataaacctattagaagaaaaggtaggagtaagactttatgatcttggattgggcagatgcttattagatatgacaccaaaagcaggggcaac

SEQ ID NO: 107716 - DNA, 440 bp, Homo sapiens
  misc_feature (1)...(440): n = a,t,c or g
ccaaccaacttgacttaatgagatttatagacattccacctgaccagagaaaaatacacattcttctcaaatgcacacaaaacatttaccaagacagagcatattctgggatatataacaattcttaataaatatgaaaggactcacagcatataaagtattattcagaatagccaagacacagcatcaatctaggtgtctatcaatggatgaataggaaaatatgggggggatatacatatacatttatttaaacagactacaattccnnnnnnnnnnnnnnnnnnnnnnnaattctgttatttgcaacatgacacaacannnnnnnnnnnnnnnnnnnnnnnnnnnnnnnnnnnnnnnnnnnnnnnnnnnnnnnnnnnnnnnnnnnnnnnnnnnnnnnnnnnnnnnnnnnnnnnnnnnnnngctcactgaagacgaaa

SEQ ID NO: 107717 - DNA, 373 bp, Homo sapiens
  misc_feature (1)...(373): n = a,t,c or g
ccccacccttacccctgtgccatctcctcccctccagatgcccccattttggtgaaccacgtcttcctccagtctcccatgcacaccccggcatcactttggatgacccgccccgctcctccagcatcgatcagtcctgtggattccacctctgcaaggtctcacgtgtcccctcctgtctttccaccacgacctgaacacaggtccttatgaaatccacctnnnnnnnnnnnnnnnnnnnnnnnnnnnnnnnnnnnnnnnnnnnnnnnnnnnnnnnnnnnnnnnnnnnnnnnnnnnnnnnnnnnnnnnnnnnnnnnnnnnnnnnnnnnnnnnnnnnnnnnnnnnnnnnnnnnnnnnnnnnnnnnnnnnnnaa

SEQ ID NO: 107718 - DNA, 389 bp, Homo sapiens
  misc_feature (1)...(389): n = a,t,c or g
gggggtcccaccctgaggggggaagcccccccggtagggatcccgggtttggtgtaccaggccggcccatttcaatgggccggccgggccccatagcccccatccaggccgggagggcccgttggtttacccctggaagccgcggtttcccaagaagacttgtttttctccccggagnnnnnnnnnnnnnnnnnngatttagaacataatccagacttctatcttcaccctggatttgcagggacccctcatcctccccacccccggcccatcccccagcccaaggagggcccttcccaccccactctccttgccgatcttaggactgaagacttgcccgtgtgccaagccgatgacaaattgtattgcggacgaaatcgtcgacccgg

SEQ ID NO: 107719 - DNA, 373 bp, Homo sapiens
  misc_feature (1)...(373): n = a,t,c or g
ccaaggccaggggttcagaccccccctgccccccatgggtaacccccggttttctttaaaatcccaaaatttccccggccgggggggccccccccttattnnnnnnnnnnnggggggttagctccgggaattccctttctccccgaggggggggcttcccttgggccccaatgggccccctgttttttccccgggggaccaaaggggaattttttttccnnnnnnnnnnnnnngnnnnnnnnnnnnnnnnnnnnnnnnnnnnnnnnnnnnnnnnnngcaagctccgaagactcgagcttagtggggaggagcgaggacagaagcaggacataagagccccatttcctcctcctcctccacttttcccacgaaa

SEQ ID NO: 107720 - DNA, 400 bp, Homo sapiens
  misc_feature (1)...(400): n = a,t,c or g
tttaatacctttttcattccccattttgtttatttttgggccggggnnnnnnnnnnccaggtttccctttttcccccccaccccaaacaaagggggggccccccccaaaacccagtttttaccccaccccnnnnnnnnnnctttttcccccgggggggggccccaattccccccaaattgggggaaaaattttttaccaaatccatccttaaagagtttggggaaaccgaaaaaagaggaggaggggggccctcccccccccggttgaaacccccaggattgcccttnnnnnnnnnnnnnngccacgacccttcaggggtccggggggcgttgcccgctccccaccccgcgccaaggagggaaaccaccaccggtcaccgctccctgcgccgccacgaaa

SEQ ID NO: 107721 - DNA, 403 bp, Homo sapiens
  misc_feature (1)...(403): n = a,t,c or g
cccgggtcgtcactttcgtnnnnnnnnnnnnnnnnnnnnnnnnnnnnnnnnnnnnnnnnnnnnnnnnnnnnnnnnnnnnnnnnnnnnnnnnnnnnnnnnnnnnnnnnnnnnnnnnnnnnnnnnnnnnnnnnnnnnnnnnnnnnnnnnnnnnnnnnnnnnnnnnnnnnnnnnnnnnnnnnnggcacatagctttttagagaataatgattcaaccaagagctgatttctcattacaaaccatggatggcaaaaggaattggaacaacattttcaaagttgtgaaagaagagaattatcaacccagaattttacatcaagcaaaaataatccttcagaaataatggcaatctcagatgaagtataaagagaattttttgccagcagaactacctctggaagaatg

SEQ ID NO: 107722 - DNA, 248 bp, Homo sapiens; identical to SEQ ID NO: 93971

SEQ ID NO: 107723 - DNA, 796 bp, Homo sapiens
  misc_feature (1)...(796): n = a,t,c or g
ggggtggggaactttgggagactccctcagagagaaggggttattatggccccacgggggtgcggaatgggcacctcgtgagaaagnacaccctcgccaagggggcaaggggcgtcctagagccatgcacagttccacgcntgcagtcntgagctttcatggtgagcctcacatgggtactgcctcctgggtgtgattctgaacccgaggacagccagatcacagccctgaccaccaagtgggaaccgcggggcccctacccacatcctaaagaataaaaaacatgcaaaggcctgaggccacactgccccgactgggggaagccctggccagagcaaagagacgctccgttgcctcgaagtgcagacgcgtccagtgtgccgcaggcacagcaccaaccacagcggcccttctggctgagcggccaccgccagcgtgggccatctgccaagccgggcagtcctgctcccaacaaggtggccggccgcagtggccacacaccggtaccagctaccagtgaacaggaaacgagtttggccctgcaggccctgagtgggtccatgaggcagccacccgggcatgaggaggggaacagcatggcaggaacacccccttctacgctgggacccctcagctctgagcatgtggcctgagaagagggaaccaggcagcttcaggtgctgcacgtgacgtcagactcaggatagtttcagatgcaccagggtgcagaagcttctcctctgttaccttctgactcgcttgggatccaaactttgtagcgccctcctggcgacga

SEQ ID NO: 107724 - DNA, 453 bp, Homo sapiens
ctcctcccaagtagatgggacttctggcgcgcgccaccacgcctagataatttttgtatttttagtagagccggggtttcaccttgttggccaggatggtcttgatctcctgacttcgtgatctgctcgcctcagcctcccaaagtgctgggaatacaggcgtgagccactgcgcccggtcagaacagttttaacctccagcaatgaccactgcttccttctgcctgcagttggaagtcagtttcagttttcttattccctataaggaacccacctctccggtcgcctaacacacagatgctgcccagaaaacgtgctggcgcacctgaggcggggtagaaagccgtgccgctcctcccggcaccgagcaccggagcccagggaggcggcctccgagtgtcatttggggacgtcccttctgccgggtagtctcagaggccaagcgctacgaaa

SEQ ID NO: 107725 - DNA, 452 bp, Homo sapiens
  misc_feature (1)...(452): n = a,t,c or g
cttcctttttaaaaataaaaaccacctgggcctgggggccccccccctttatccccccccctttgggggtttagcccggtggttccccaggcccggggacccaaatccccccgggtacccgggggaaagaacccccccttttccccaaaaataaaaaaatttgcccgggttgggggcgggcccccttattcccccttctcccgagggttaagcccgggaaccggcgttaaccccgggggcggggcctcccataaccaaaaatccgnnnnnnnnnnnnnnggttgggccccaaaccaaagtccccttcccnnnnnnnnnnnnnnnnngaatgagaagctcctgagtcagggataaaatactctctaagcacacaggattactactgtgctaaggggtaagtgttggttaccataaacagattgcaaataacagcaaatcctttggtgacgaaa

SEQ ID NO: 107726 - DNA, 451 bp, Homo sapiens
  misc_feature (1)...(451): n = a,t,c or g
ttnnnnnnnnnnnnnnnnnnnnnnnnnnnnnnnnnnnnnnnnnnnnnnnnnnnnnnnnnnnnnnnnnnnnnnnnnnnnnnnnnnnnnnnnnnnnnnnnnnnnnnnnnnnnnnnnnnnnnnnnnnnnnnnnnnnnnnnnnnnnnnnnnnnnnnnnnnnnnnnnnnnnnnnnnnnnnnnnnnnnnnnnnnnnnnnnnnnnnnnnnnnnnnnnnnnnnnnnnnnnnnnnnnnnnnnnnnnnnnnnnnnnnnnnnnnnnnnnnnnnnnnnnnnnnnnnnnnnnnnnnnnnnnnnnnnnnnnnnnnnnnnnnnnnnaaacgaggtgccttctcctgactccctgatccccgcgctctccagctctgccctcgcgatcgctggagccccctgaggaactcacgcagacgcggctgcaccgcctaatcaatcccaacttttttcggctatcaagacgc

SEQ ID NO: 107727 - DNA, 456 bp, Homo sapiens
  misc_feature (1)...(456): n = a,t,c or g
cgtaagacagacgtgaatgtttgttggggaatacacccaaacattcaggctaaccacctgaagtttataggggttcagttgtctggcgcttgtcaagatattccctctaaggtgaaaggagaattgctgcaatttgtactactaatcacaaacagcacaatgcttggtcggtttttttggtttctggaggcaccatattgacgcaatatgacaacacttggagaatttagaaaaataacacgttctnnnnnnnnnnnnnnnnnnnnnnnnnnnnnnnnnnnnnnnnnnnnnnnnnnnnnnnnnnnnnnnnnnnnnnnnnnnnnnnnnnnnnnnnnnnnnnnnnnnnnnnnnnnnnnnnnnnnnnnnnnnnnnnnnnnnnnnnnnnnnnnnnnnnnnnnnnnnnnnnnnnnnnnnnnnnnnnnnnnnnnnnnatcgtcgaacgggaattccggaccg

SEQ ID NO: 107728 - DNA, 420 bp, Homo sapiens
catccactggggatgtggagcattttaagtgccctgcagagggtgggcttgggtcacccccccccaccgcgacacccctccccaggcaacattcctggggagtctggacctcccttggtggaccgactcccgagggtctctagggtttttcaccccatatcggggtgaactgaaggcatgggaagaggcagccccacagcctgggtccccaaaaccccctccgggctgagagcaagagatgccgcctggaggccactcaccaagcagctccgctggctcagcaatgggggtcgtccgggtctgggtcattgccactggctcgtccctcctcccacccttgcttcctggactcaagagctgctgggctctctgcgcgccggcagtgggctccgcaggctgtctcctacacagagcacgaaa

SEQ ID NO: 107729 - DNA, 481 bp, Homo sapiens
aaatgagactaacgaccatgacacgccaagcttggcacgaggaaaggataaatataccatgttcatatattgggaggctcaatattacaaagatgacagttctcttccaattgatcaggtagatcaatgcaatctcaatcaaaatcccagcaggttttcttttagtgtgcatgaaagttggaaaagccagttctaaatgaagaagagcaagattatcaaatacaacttgaagaaaagaacaaggttagagtctttgactcctggatatcaagacttattttaatgttacaataagaccgttgggtattaggacaaagacagaaaaatagagcaggatagagttcataagtagatctgtacatttgtgtcttgatgcattagtaagtgacaatgcagtgctaatggggaaaagatttattttttaataaatggtcatttggataggtatacaagggtgggtgaggagacaactcttaactcc

SEQ ID NO: 107730 - DNA, 426 bp, Homo sapiens
  misc_feature (1)...(426): n = a,t,c or g
ctggaacagcaccttaccttctcctttctcccaggaagctcctcttcctgcatatgtgtaactgagaaacagcagggctcctggcccctcgtcctcaccctgatcaggggggctctcatgggggctggcttcctcctcacctatggcctcacctggatctactataccaggtgagccggactgcctgtctccaggaagctcctgagttccaggtggnnnnnnnnnnnnnnnnnnncnnnnnncnnnncncnnnnnnnnnccccncccccggngnncncccnncccgcccnnnnnnnnnnnnnnnnnnccnccccccttgnnnnnnnnnnnnccgggcgcccccgcgccgcccgcgcgcggccgtgccccggcgctgccgcgcncttctctcgcccctcctgtgttgggcacccaccgggcgaaacc

SEQ ID NO: 107731 - DNA, 429 bp, Homo sapiens
  misc_feature (1)...(429): n = a,t,c or g
ttcttctggattgcctccattcctttaactcctgccacgtgctcagcatggtgggaactggtgggccacgcccctcatggcagccctctcagcaaccttgttcatgccagtagacgccactgtcatgcccaacttgtccacaaggaaataannnnnnnnnnnnnnnnnnnnnnnnnnnnnnnnnnnnnnnnnnnnnnnnnnnnnnnnnnnnnnnntatctgtaggcttcgaggccatttcacttctgcctcctagagcaagttgggtctagggnnnnnnnnnnnnnnnnnnnnnnnnnnnnnnnnnnnnnnnnnnnnnnnnnnnnnnnnnnnnnnnnnnnnnnnnnnnnnnnnnnnnnnnnnnnnnnnnnnnnnnnnnnnnnnnnnnnnnnnnnnnnnnnnnnnnnnnnnnnnnnnnnnnnnnnnnnnn

SEQ ID NO: 107732 - DNA, 193 bp, Homo sapiens
gtaggggtaaacctataactagtaagaacattaaattactaattaaaatcctttcaacaaagaaatacccctgactggatggttttaccagtcagttctaccagacatttaacgaaaattaatgccaatcctttgcaaactctttcaaaaacttgaagaggaggaaatactttctaactcattctatgaggcg

SEQ ID NO: 107733 - DNA, 1079 bp, Homo sapiens
tctacctttttatcacatgaatgttgtaccaagttcgcgtattacatatttgaaaataaattgcgaaaataacaaaaacaaaatccatctactggctagctctttaaaatcctgcgggggagcccagtggcccaacggcgaagtttagcccatcttgccctttctggtcagtgtacctgttccatttatctctgactgcgccactcagtcaggtgagggaccactggagttttctaccggaaatgcacttcagcaaatgccacttgctctctccaacttcagtttcaaccagcgcctacctcaggaagccttccttcatcctccggcccccgccgccgctaaggttatccttttacattcaacctcataatgctgctttttgtggcagtcatcacagtgtcgaaatttgtttacatgtccatctttgctacttgatggagggcaaagatacacctcatacctagcatagaccccaggaggtccgaaattgttctgcgaaagaaaaaaaaatcaatgtgctggcctcaaaggggctcacaggaagggaaaagcctcgaagactaaggctctcttcgattccttcgtgactaactcgaggcaaacatgccaggaacgcggctctccccacccgctcctgcatctgcgcccggggatcgccggattccagaggggtcccctccacctagcgcgcgacgactccctctggggtcccggaagcccggccaccgaccccacaggcgggcgtggcctcagagccctcttctgagcacggcgtgggtatccgcaggcggccatggacggtgatcacagtgaccagagggacagcgcaccctccggtcgaagcggggtaggcgttggcaggggaggggcgacgaagactggcgaggttcaggcgccagccaaagaaccactctgctaacttcctggcacttacgtttcctacccggggcccagagtcgggcggcggtcttccagcaccacgagctccagtactggtctgcgttgtagggagctggaagcccgacccagcactcctcagccccctgtgcccctccctctgctctttccgccccacgaaa

SEQ ID NO: 107734 - DNA, 410 bp, Homo sapiens
  misc_feature (1)...(410): n = a,t,c or g
nnnnnnnnnnnnnnnnnnnnnnnnnnnnnnnnnnnnnnnnnnnnnnnnnnnnnnnnnnnnnnnnnnnnnnnnnnnnnnnnnnnnnnnnnnnnnnnnnnnnnnnnnnnnnnnnnnnnnnnnnnnnnnnnnnnnnnnnnnnnnccnnnnnnnnnncccggcctggttttccttggcccgggcccgggcccttaagacatttcttgtttccaaccaaaagtttttctttacccccacccaggcccggaagggcccccgccccaaagggggccaattggaggaaagggcccgaattcgggacccattgacagcccaccagttggaaacaacaacagaaagggggttggtcattgaccttgggccgggggttgtgcccacagtggctggccccaaaggaaaggcccttcttgccg

SEQ ID NO: 107735 - DNA, 435 bp, Homo sapiens
  misc_feature (1)...(435): n = a,t,c or g
nnnnnnnnnnnnnnnnnnnnnntgtcaaataacctaatggtgcacctcaaggaactagaaaagcaaggacaaaccaaatccaaaattagtaaaaggaaagaaaaaagatcagagcagaaatatataaagttgcaactgaaaagacaatacagaaaagcagcaagtgttgnnnnnnnnnnnnnnnnnnnnnnnnnnnnncaagcctttagctagacaagaaaagaagggagaagacccaaataaataagattagaaatgaaaaaggaggctgataccacaaaaatacaaaggtcattgtaggagactattataaataatgataggccagcnnnnnnnnnnnnnnnnnnnnnnnnnnnnnnnnnnnnnnnnnnaccaccaagattgaaccaagaagaaatagaanacctgagcagattaataataagtaacaacatt

SEQ ID NO: 107736 - DNA, 388 bp, Homo sapiens
  misc_feature (1)...(388): n = a,t,c or g
ctctgttacagatgatctgatcttttatatagagagccctaacgactccacaaaaaatctgataaacaaattcagtaaagtagcaggatacaaagtcaacatacaaaagtcagttgtgtttctgtacactaacaatgaactatatgaaaaagaaattaagnnnnnnnnnnnnnnnnnnnnnnnnnnnnntcaataaaatacctaagaagacatttaatcaaggaggtgaaaaatctggacacactgagaactataaaacagtaatgagagcagtaagatacttgcataaaaacagacatatagaccaatgaaacatagtagagaacccagaaataaacccatacatatatggacagttggtcttcaacaagggtgcccaaattacata

SEQ ID NO: 107737 - DNA, 388 bp, Homo sapiens
  misc_feature (1)...(388): n = a,t,c or g
agaacccagaagtaaataaatttatttacagacaactggtttttgacaaaggtgccaagaacacactcnnnnnnnnnnnnnnnnnnnnnnnnnnnnnnnnnnnnnnnnnnnnnnnnnnnnnnnnnnnnnnnnnnnnnnnnnnnnnnnnnnnnnnnnnnnnnnnnnnnnnnnnnnnnnnnnnnnnnnnnnnnnnnnnnnnnnngaagcaaacagtactagaagaaaacagaagggaaacccttcaggatatgggtctagtgaagattttatgggtaagactttataagcacaggcaacaaaaacaaaaatagacaaatgggactgtatcaaactaaaaacctacacataaaaggaaataataaactattaagagatatcctgtagaatg

SEQ ID NO: 107738 - DNA, 2167 bp, Homo sapiens
  misc_feature (1)...(2167): n = a,t,c or g
cccacgcgtccgggcggcgcacaagtcaggtccggcacatgtttccgcggagcggacccagcaatgacggatgatatcacctcttcttctctggtgagagtctgaggatagagacttttttctcaccatgaatgtcaccccagaggtcaagagtcgtgggatgaagtttgctgaggagcagctgctaaagcatggatggactcaaggcaaaggcctcggccggaaggagaatggtatcactcaggctctcagggtgacactgaagcaagacactcatggggtaggacatgaccctgccaaggagttcacaaaccactggtggaatgagctcttcaacaagactgcggccaacttggtagtggaaactgggcaggatggagtacagataaggagcctttctaaggagaccacccgttataatcatcccaagcccaacttgctgtatcagaagtttgtgaagatggctacattgacttcaggtggagagaagccaaacaaagacttggagagctgcagtgatgacgacaaccaggggtccaagtccccaaagattctgactgatgagatgctgctccaagcctgtgaggggcgaacagcacacaaggctgcccgtcttgggatcacaatgaaggccaagcttgctcgcctagaggcccaggagcaggccttcctggctcgtctcaaaggccaggaccctggggcccctcaactgcagtcagagagcaagccccccaaaaaaaagaaaaagaaaaggaggcagaaagaggaggaagaagctacagcatctgaaaggaatgatgcagatgagaagcacccagaacatgctgagcagaacatcagaaaaagcaagaagaagaaaaggcgacatcaagaaggaaaggtctcagatgaaagagagggtacaactaaagggaatgagaaggaggacgctgcaggaacaagtgggcttggggaattgaatagcagagagcaaaccaatcagtccctcaggaaagggaagaaaaagaagaggtggcaccatgaagaggagaagatgggggtcttggaggaaggaggaaaaggcaaggaggctgcaggcagtgtcaggacagaggaggtagagagcagggcatatgctgacccatgcagccgaagaaagaagaggcagcaacaggaggaggaggacttgaacctagaagatagaggtgaggaaactgttttaggtggtggaaccagggaagcagagagcagagcatgcagtgatggaagaagcaggaaaagcaagaagaaaagacagcagcatcaagaggaggaggacatcttggatgtaagggatgagaaggatagcggggctagggaagcagagagcagagcacacactggctcaagcagcagaggtaagaggaagaggcagcagcatcccaagaaggaaagagctggagtcagcactgtccagaaagccaaaaagaaacagaagaagagagactaaaggtctggtaaaggtagggctcaattgattgattttcaggagttgaagcctcaaagaccagggttgatgcaggtctgcaggtcttctgcacccccctcaatgaggagtccctcccagaaaggaaactgatctctgggatgtcagctgctgagaggagcaagcggtagtaccaccccttagttgagggagtcagcacagtcctttctgcagcttctaacccaggaccatgaactcaggtgcctagagaagccaggcagctaaaggacaaggaatgctgggggctgtgggaacaggaatgcagataccctttgaaggagcattcctgctaaaagaagctgaaaatgtagacctatgtgaagtgctctgatttctaaatattgtgaaggttaagaaaaacataaatttaggtctatgggctagatttagcccacagttgccagtttctagcgctaccaaatgaatgaataaacatgagcttgcgctcctagcctagagataaatcctgactggcatctctgttcccagcctgggaaggtcctgaatacaaattagaagatattccttggaggcctttgaagaaattccttcggttaacctctttgtaggcttgctacactgataagtagaagtagctccctgtctgtgtcccanatgaataagaattgtgtaaaggacagcacaactcacttggcatctaac

SEQ ID NO: 107739 - DNA, 465 bp, Homo sapiens
  misc_feature (1)...(465): n = a,t,c or g
acattttagagttgtgctgtctaatgcagttatcactagccacgtgtgacttttaaaatcaaaattgaaattacgtataggatctgtatgctgataactgcaaagcactgatgaaagatatcaatatctaaataaacagagacacctgccagtagtgttcatggattggaagactccacatagtaaatatgtcagttctttccaaattgatctatagatttaatgtacttccaaataaaagtcccaacagcagannnnnnnnnnnaaacagacaagctggctcaaatttatatggaaaggcaaaggacctttgttgccaaagcaactttgaaaaagtaaaagttggaggaatcacaaaattattgtgattgtaaatttaaaatttactannnnnnnnnnnnnnnnnnnnnnnnnnnnnnnnnnnnnnnnnnnnnnnnnnnnnnnnnnnnnnnnnnnnnnnnnnnn

SEQ ID NO: 107740 - DNA, 2107 bp, Homo sapiens
  misc_feature (1)...(2107): n = a,t,c or g
gtgttaccaagaagtgttttatttttcttgcagtagctttgttaattgcacaaaatcatgttttgtttttgccatttaaacattatcacacaatcctattctgaaagacaaatgttcattaaaaacaaagcaaaaataaaaattcacaaccttaattacctagatttgtcatttaaaggtttaaagaaaaaagggaggggctttcttacaagctttttcacaagtgtcacattttctccttaaaagggaaggatttcaaaagaaaggtgaaatagcttaaacagaaatattcataaaaaggacctttacagaattgtcaccaatattaagacaaaattgactaaccggtttcattaccgcatcttccccggcccccacccccagtgtgttccgccaggactagaacaggctttgtgttcagacagaaatgcttcaaaatcccagtgaaatgaactgtgctaaaaacccgacaggcatcttccctgccctccccccactcgtcttctgcaatcctctaacccagtttctaatctctgaaaggggccaaagctgtgaggggggaaggaccccgccctagtgtggccaccctatatataattacatattgcatcataaatgctggccttccttctgcaaattatgattttggaaaatccaacccatgcagagggataaaaaactgacatcccttgggtaactttttttttgcaacattccaagcccccccggttcccctatccaaggacaaatgtagggcctctaggatgtcccagacccacctcggagggccagtcagttcaggtaggtcaggcccagttctcttccctcccgacagaccccgggcccgggaagcaccgaagaccatgatgctggctggagtgaagacactcgtttccgtatcaagagctgagcctaagaaatgctcatcgttggtcaggctgggtctgggccaaagggacagacagaaagaaatactgtctccacgggagaaagaggcagagcagggaggatgaagagcggtgggcatgcaggggacttggcagggcagggtggagaaggtggcaccactgggaggggaccgaggtaagagtggctcttcagagccaggtgaagagtctgtggcctatcggaaacagaaaggagcgcccccaacccccattcctcttggctcatcactagtggccgtgaggactccctcccaagggatggaatgcaaatccgaatactacaacagcctagggaggagcgagcgcccgctgtgggagtggcatctggggcatggcttcgaggcggtgagggccgggcctccatgctcacctgcaggccgcctgcttgctgcactccctggacacgccagggccccatcttctcgggactctgccagtctcttttcagttcccaaaggcgtttatggagcgctgggtgcaccctggacgcttagacgtgaacatctttctcagctcatcacctgaggttggagggccccaagggcccctctgtctggagtctgtactggctcatctgggcccaaggcctctccttgtagggaatccagtgggggatggggacatgattacagcctcttcgctctgggggaagctgtgggaaggcttccaactctcgttgctgattctagttcctcgactggaaggggtttgagataagacaagctcggaagaaaaaaaagccaggcaccagtttttgggcagcttctatcctggggcgagagccnnnnnnnnnnnnnnnnnnnnnnnnnnnnnnnnnnnnnnnnaacacacagccacctcgggcggggggccagtgcccagctcaagagctttcccacacgccaatcctgctgacacttgtcccctccccaccggcctcaggggaagggtgctgctgtgtgctgtgctgatggcaagtctcaaagtctgtataaaaggaaatggagataggtgggctggtccagaatgaactcccaggcccccgaccccatgtgaggaagagggggtcagaggggggattggaggggtgagggcggcgtgtcgacagcttagtgtatgtaggctcggtacacggcggacatatcgttgtcagactgggccagcgcctttggctcttttgg

SEQ ID NO: 107741 - DNA, 516 bp, Homo sapiens
ttttttttttttgagacagagtctcactgtgtcacccaggctggagtgcagtggcgccatctcgactcactgcaagctccgcctcccgggttcacgccattctcctgcctcagcctcccgagtagctgggactacaggcgcccgcaccacgtccggctaatttttttgtacttttagtacagacggggtttcaccgtgttagccaggatggtctcgatctcctgacctcgtgatccactcgcctcggcctcccaaagtgctgggattacaggcttgagccaccgcgcccggcctgcacaggtgtcttgaatatgtatatacgcgactccagtatggttggaaatgatttgatttgttgtctatggaattgcacaacctggagccttcctaacatcagcggcttcatactggcatttccattgtggtgcagcaacaatctgagtgagcctccgtctctaagccacatcatttgacaaccggtcccagaaggtaactggaagtcatgatgacaactcc

SEQ ID NO: 107742 - DNA, 465 bp, Homo sapiens
  misc_feature (1)...(465): n = a,t,c or g
aatgtacaaggttatttattaggccatagtatgtaatagcaaaggcttggaaataattttaaaatgtccatcaaatgagggactgataaatgcatttctttctttctttcnnnnnnnnnnnnnnnnggggggaagggagtcaaattttccccccaggtggaagggaagggccccaaaatgggttaatggaannnnnnnnnnnnaaggtaaaacaaattccccgccttttgaagaacggggaataacggggnnnnnnnnnnacccccactaatttttgtgttttttaaaaaaaacgggggttcccccaggtggcccggaggggcctaaaaccccgaacctgggagaaaaccggccgggccccccaaaagggggggaataacgggggggacccatgggcccaacccaaaaagggcttttttccccatttaaccagggaattcctataagacaaaaaaaaatgggttn

SEQ ID NO: 107743 - DNA, 379 bp, Homo sapiens
tgacagtctccggttccagctggagacgtcactgatttggctgcagcgttcccgagtggacctcttctacctgcatatgccagaccacagcaccccgttggaagatacactgcgtgcctgctcaccagctgcaccaggagggcaagttcgaggagcttggcctctccaactatgcagcctgtgaagcggtcgagatctgcaccctctgcaggagctcggctggatcctgcccactgtgtaccagggtgcctgctgaccggcaagtacaagtatgaggacaaggatggtaaacagcccgtggtccgcttctttgggaatacctgggcagagatgtacaggaatcgctactgaagggagcaccactttgagggcattgacc

SEQ ID NO: 107744 - DNA, 473 bp, Homo sapiens
  misc_feature (1)...(473): n = a,t,c or g
aatcttggntaaantgccaacctccacctcctgggttcaaagcaaattcctttctgcctcaagcttcccgaantaagctgggaactaacagncggataacccacgcctggctaatttttngtattattatttttagtagagatggggtttcaccatcttagccaggctggtcttgaactcctgaccttgtgatccacccgcctcagcctctcaaagtgctgggattacagacgtgagccaccgcacctgcccctgaatggattctactgtcccactccaggcggaatccctgccaccccaccctggcatccccaggcccatgacgtcccctggtccagccctgacactatgggagtggggatttgtggtttctgtgtcctttggtttagggctaagtcctcgctggatctcctctaagtgaaaagaggagtcttcatttccttatttttttcagacggagtcttagtcacccc

SEQ ID NO: 107745 - DNA, 443 bp, Homo sapiens
  misc_feature (1)...(443): n = a,t,c or g
ctgttcaatgggggaaacagccttttcaacaaaaggtgctgggaaatatggatacccacacaaaaaataacaatggacgcttaccttataccatatacaaaaaattaactcagaatggatcagagatgtaaccatgagattaaactgaaattcttaaaagagaatataggggaaaaattttcatgatgttggatttggcaataatatcttggggtatgacatcaaaagcaaaggcaaaaagttgcactacatcaaaattgaaaactttcatgcatcaaagggacaccatgagaatgaaaaggcaaccgaaaaatagaaaataatcacaaattatatctgataagnnnnnnnnnnnnnnnnnnnnnnnnnnnnnnnnnnnnnnnntgactcaattaaaaaaatggacaaaggactgaaattccaccgcactggactaatgtatc

SEQ ID NO: 107746 - DNA, 491 bp, Homo sapiens
ttttttttttgagacggagtcttgctctgtcgcccaggctggagtgcagtggcgggatctcggctcactgcaagctccgcctcccaggttcatgccattctcctgcctcagcctcccaagtagctgggactacaggcgcccgccactacgcccggctaattttttgtatttttagtagagacggggtttcaccgttttagccgggatggtctcgatctcctgacctcgtgatccgcccgcctcggcctcccaaagtgctgggattacaggcgtgagccaccgcgcccggcctattatgcaaattttgatgctgatactttctttgtcttttcagaagatgtcattggaaagttttcagacagaaagcagtatttcttaccctaataatcttcaatggtttgtcgactgaactgtcaaagggctgcagttgtcagtcatatcacagagaatagcaatcaagttgacacatgcataggcaatgaattcgacgg

SEQ ID NO: 107747 - DNA, 444 bp, Homo sapiens
  misc_feature (1)...(444): n = a,t,c or g
cgcccccctctggtttcccccctctggtgggggggggcggggggtacctcttttttttgggggagggggttactgtaattgaggccccccccctcgggtcctggtggggggggaaaaaggagnnnnnnnnnngggggcaaaaaaaaacccccccctcccctaaacaaaacaggtnnnnnnnnnnggattccgcctcccttcaggaactgtcctggcaaaaacctataacctaggcctaatctttaatcatgaagaaatgaagaaacgctgggccaaccttaactgagaaagnnnnnnnnnnnncttgccctgtattcatcttgccaaaaactctcacccatcaaaatcaagggaagactaaggagctgttccagattgaagaagcttatgaaaatgtgatttatgagcccagattcaagttgtctgctatacagggctcgcgcc

SEQ ID NO: 107748 - DNA, 428 bp, Homo sapiens
  misc_feature (1)...(428): n = a,t,c or g
naactggacagttcaacaataatggctggagacttcagtgccttcactttccatcgtggatctaacaacaggaagaaaacaccccgggaaacagaagacctgaatagcactaactgctcctgagatgcctccagaccactccacctggtgacagaaaaacagactttcctcccagtgcacaggattcttctccaaaaagactctatgttaggccacagatcacacgttggagaattaaaacggacggcaataatacaaagcgtgctctccaaccacagcagaatgaagttaggaatcaataacaggagagaatttggaaaaatcaaaaacatgaaaattaagtaccacactcttaaataaccaatcagtcaagaaagagatcacgagggaggnnnnnnnnnnnnnnnnnnnnnnnnnnnnnnnnnnac

SEQ ID NO: 107749 - DNA, 414 bp, Homo sapiens
  misc_feature (1)...(414): n = a,t,c or g
ccctctagtccagcgtggtggaattccagggatagagacagtgagagagagaatggggcacgatggggaggcagaaacttagtcagagagagactgagagaagaaagatgagcaataacaagacaaagaagggcagagatcaagagatcctgagagacagagttgatgagaatgaatgtgaaagagagggagagagagaatgaatcaggctttgggcttgatctctgctcttctgctcctggatggcnttannnnnnnnnnnnnnnnngtggggaaagggannnnnnnnnnnnnaccannnnnnnnnnnnnnnnncccctttgtgtttatggaaacccccttttccggggtgaaagggattttccctcccccccctccccaaaaacctggaacgggaggttgtgcccccctttg

SEQ ID NO: 107750 - DNA, 454 bp, Homo sapiens
  misc_feature (1)...(454): n = a,t,c or g
aggaacccggccaaaaaaaaccctttaaaaaatttttcctgttcctttccccnnnnnnnnnnnnnngaaagtgttttttaaaacccccccaccttaaccttttaaaaaaaaggtttttgggttggggccggggctcccccccgttatttttacccctttggaagggggggcggcccatttcttttgattcagggttttaaaccccccctggcccccccaaaaaacccggttttaaaatccaaaaattaccccgggggattggggggcccccttattcccccctcttcaaaaggttagggcaggaaaatggggttacccccgaaggggagccttcccttaaaccaaaatttggcccttcccctccaccttggggaaccaaagagagttccttttnnnnnnnnnnnnnnnnnnnnnnnnnnnnnnnnnnnnnnnnnnnntgtgactagaaaaaaac

SEQ ID NO: 107751 - DNA, 1564 bp, Homo sapiens
aacaaagcccggtactttcagtcacctgatctttaacaaagcatataaaaacttccatctaagacctgaaagtctaaaaatgctacaagatagcatccaaaaagcttttctagacattggcttaggccaagtagtcatgactaatgccccaaaagcaaacgcaaaaatataaaaatagaataagatcaataggacctaatgaaaccgaaaatcttctgcaaggcagaagaaatatcagcagggtaaacacacaacccacagtataggaaacagtagtcacaaactaggcatctgacaaaggactaatgtccagactccaaaggaactgaaagaaatcagcaagaagaaaaggtgccatttaccaccttcctgactcattggccagaaccaatgttagtggaattaacatatgccccaccccaagtgacttctaaagggctaactcaccacaagggagtcagagcagatcttggactgagacctacaggacacaggtactgctttttctcttttatttgttttaaattttatttatgtttttagatcaaatagttcagattgcattggtttttaatctgctgttgttggattaacatatgctttaagcgactcttaaataggtggctcaccaggagaaaggcatagcagaacctggactgagacctacgggagacagcaggcagacacacaggaggttggacgtcgagaggagcacatcagtgcaagaacacatgggtggctgccacttctctccctttcctgagagggaaaaactctcgacgctgagaggaatccaccaacaggcaccagcactctggcaggccaccgaccaatggatcgacatagagtttggctggggcagtcagaggagagccagggttggtgaacggccccaatccagggagaaaccaatctcctttctggctcccccatctgctgagagctacttccactcaataaaaccttgcactcattctccacgtccacgtgtgacctgattcttctggaatgccaaggcaagaaccctaggatacagaaagccctctgtccttgtgataaggaatgtgtctaattgagctagttaccacaagttgccctataaatggcaaaactaaaagacccacacgacccactggggcttccaggaactgtaaacatccacccctacacactgcccagtatgagaaaaatttgcctgatatgttttctgctgacctgatgacaatgttcctatggtcacactaaccactgctgggtaattttcatacatgactctcgttttcatcctgctgaaaccagcctccccaagaaagacaactattttcaaactgaggaaataaagtgttactaaaccccagtgttctctcatggctgttcctggagttcttcaaaacacttgatattataaaatagaattattacagatccctgtatgttatggatttagtcaaaatgataatttaaaatatggtttaaaataaaaaactttattttccaaaaaagatagttttttaaacaagaatatccaataaagacagtatgaggtcagctgaaaaaaaaaaaa

SEQ ID NO: 107752 - DNA, 436 bp, Homo sapiens
  misc_feature (1)...(436): n = a,t,c or g
gtgcggttannnnnnnnnnnnnnnnnnnnnnnnnnnnnnnnnnnnnnnnnnnnnnnnnnnnnnnnnnnnnnnnnnnnnnnnnnnnnnnnnnnnnnnnnnnnnnnnnnnnnnnnnnnnnnnnnnnnnnnnnnnnnnnnnnnnnnnnnntatctgtttcataacaatgtgaatatatttaacactattgtagtaggctattcnnnnnnnnnnnnnnnnnnnaaaaagggaattttctttttggtgccccggctaaaattaaagggggggatttgggtttattggaacctttgccttccgggttaaagggaatttcctgccttaccctttttagggggtgaaaaaaaaggggcccgcccccctgcccccctaattttggttttttaaaaaaaacggggttttcttcatgggggccagggggggtttcaacctcggaaaa

SEQ ID NO: 107753 - DNA, 482 bp, Homo sapiens
  misc_feature (1)...(482): n = a,t,c or g
tactataaagacacatgcacatgtatgtttattgcaaacatctcattttctttactcagtaatgggattgctggattatatggggggtcttattttttaatcttttttgaggaacctccatagtgttttccataatggctataaatagttcatatttccactaacagtgtataagggttttcctttctccacatccttaccaacactgatcttctgtcttttgaaaacagccatactaccaggagtgggatactatcttactgtggttttaatttgcatttctctgatgatgagtgatgctgagcattttttcatagacctgttggccatttgcatgttttctttgaaaaatgtcaggtctttcacccatttttcaaccaagttacttgctttcttgccattgagttgttggagttcctgatgtttttgaggtattaactatntatcagatgtatagtttacaaatattttctcccattctg

SEQ ID NO: 107754 - DNA, 374 bp, Homo sapiens
tagttcccaccggcaacgctggggagggtcctggcgtctccactccctcgacagctcctgccgttgtctgtccttgtgattctggccgtcccagggggtgggagctggtgtccccttggctttgatctgcgtttccctggtggccagccatgtggggcctctctccctgtctcatccacccgtgcctgtctttttttcattcattcacttatttatttatttagagacagggtcttactctgtcacccaggctggagtgcggtggtgtgatcacagctcactgcggcttctacttcctgggttcaagagaacctcccatctcggcctcctaagtagctggaactacaggcgtgcaccaccatagctggttaatt

SEQ ID NO: 107755 - DNA, 381 bp, Homo sapiens
  misc_feature (1)...(381): n = a,t,c or g
tcacatcattctcctgcctcagccttctgagtagctgggactacaggtgcccaccacaagcaggcccagctaatttttgtatttttagtagagacggggtttcaccgcgttagccaggatggtctcggtctcctgacctcgtgatctgcncgcctcagcttcccaaagtgctgggattacccgcgtgagccaccgcacccggccacttgtctgatgttttaattaggctttatttaggtaaatgcaaataaaaacccataagctaccaatttgcagccattaggatatgaaaatagcaagtgttggtgaggatgtagagaaactggaaccttgtgcattgttgaggaaaatgtaaaatgatgtgggggtggggcgggggag

SEQ ID NO: 107756 - DNA, 426 bp, Homo sapiens
  misc_feature (1)...(426): n = a,t,c or g
agaccactggggggaaaacagggaaaaagaaagaggggataaggaaaggaacaaagtagaagagaggagaagaaattaaagagtgagggaggaaagaactgaaaggaagaaagagagagaacagagagggagtgaagaaaaagaaaaagaaagagaaagtgagaaagaagaagaggaaagagtaaaaaggaagataaagaagagaaaaggagaaaaggagaaggaagaaagaagaaggaaaggggaagngggannnggnnnnnnnnnnnnnnnnnnnnnnnnnnnnnnnnnnnnnnnnnnnnnnnnagaactctgtattttaaaaggtaagacttcagatgcagaaaaaagaaaaaaataaataaaaaggtacaacttcaaaacatgtcaagtacgaattccaccacgctggactagaggatcgat

SEQ ID NO: 107757 - DNA, 277 bp, Homo sapiens
tctggccatcctaggaggcaagaagattgtcccactttacagatgggtaagttgaggccaggagaggggcagtgacccacccagaacttcatagccagtaagagtgtgagccatgcagccatggcagaacctatgcctacccgaccccatctggacttccagctataggcactttctgcagcgtcccttccccctcaccaccatcagcccctggctcttaagagctgccttcagccttcgtttgggcaagtagatgagctaaatgtctggcttgcac

SEQ ID NO: 107758 - DNA, 430 bp, Homo sapiens
  misc_feature (1)...(430): n = a,t,c or g
ctattcttttacaaacaacaattctatccaaaaagttaatcaggaacctaatcacatttacactatttactaagtaacaaaccttatgaatgaatttaccaagtaggttaaagatctgtatagtgaaaacattgatgaaacgaattgaagattacaaaaatagaaatttttctttgtacatggattgggaaatttatattgttataattttcatactgccaaaagaaacatacagattctgtgtaatcaatatttcaatgtccnnnnnnnnnnnnnnnnnnnnacagaaatacaaaaaaaattctaaaacttgtatggaactacaaaagacattaaataatcaaagtaatcttgagcaacaaagacacagctgaaggcatcactcaacctgatttgtcaatccggtatcaaatcnctgatggtaccagca

SEQ ID NO: 107759 - DNA, 479 bp, Homo sapiens
  misc_feature (1)...(479): n = a,t,c or g
tccagtgtggtggaattccaggattttaatgggagtaaggtctgccatgggttaggacatcacctttggccccagtttcaaaggaaaggtgcagacttgaaaggacagaagctcattagctgagtctctggggaccacgtttgcaatggtcccacctgcaaaccagatgagggaataaaattcagtctaccggccaggtgcnggatgtcacgcctgtaatcccagcactttgggaggctgaggcagacagatcacaagatcaagagatcaagaccatcctggccaacatggtgaaaccccgtctctaataaatatacaaagattagctggcgtggtggtgcacgcctgtagtcccagctgcttgggaggctgaggcaggagaatcgcttgaacccaggaggcagaggttgcagtgagccaagactgngccattgcactccagcctggccacagagtgagactccatctnaaaaaaaaaa

SEQ ID NO: 107760 - DNA, 435 bp, Homo sapiens
  misc_feature (1)...(435): n = a,t,c or g
nagcaacagaaataaaaagcattataaaaggatacaatgatagctgtgcaccaccaaattttataatttagatgaaatggacaaattcctagtgagacacaaactaccaaaactaatttgagaataaatagataatctgaatagatggataacaagtcaagagactgattggtaaatataacaacaannnnnnnnnnnnnnnnnnnnnnnnnnnnnnnnnnnnnnnnnnnnnnnngcccaaatggcttcaccactgaatcctaccaatcttttgaagacaaattaataccaattatttgcaaactattaaaaaaaatagacaaagaggtgacattttccacttcagttatgaggcatcacccagataccaaaaccagacatatatcacaagaaaactacagaccaatatcacttatggaattccaccacactgga

SEQ ID NO: 107761 - DNA, 433 bp, Homo sapiens
  misc_feature (1)...(433): n = a,t,c or g
gggagcagcagaaataaaaagcattataaaaggatacaatgatagctgtgcaccaacaaattttataatttagatgaaatggacaaattcctagtgagacacaaactaccaaaactaatttgagaataaatagataatctgaatagatggataacaagtcaagagactgattggtaaatataacaacaannnnnnnnnnnnnnnnnnnnnnnnnnnnnnnnnnnnnnnnnnnnnnnngcccaaatggcttcaccactgaatcctaccaatcttttgaagacaaattaataccaattatttgcaaactattaaaaaaaatagacaaagaggtgacattttccacttcagttatgaggcatcacccagataccaaaaccagacatatatcacaagaaaactacagaccaatatcacttatggaattccaccacac

SEQ ID NO: 107762 - DNA, 802 bp, Homo sapiens
ggcacgagaactactcccaggagtgtggcagctttctcctggctgagagcatcaagccggctccccctttcaacgtgactgtgaccttctcaggacagtataatatctcctggcgctcagattacgaagaccctgccttctacatgctgaagggcaagcttcagtatgagctgcagtacaggaaccggggagacccctgggctgtgagtcccaggagaaatgctgatctcaatggactcaagaagtgtctccctcctccccctggagttccgaaaagactctagctatgagctgcaggtgcggtcagggcccatgcctggctgctcctaccaagggacctggagtgaatggagtgacccggtcatctttcatacccagtcagaggagttaaaggaacgctggaaccctcacctgctgcttctcctcctgcttgtcatagtcttcattcctgccttctggagcctgaagacccatgcattgtggaggctatggaagaagatatgggccgtccccagccctgagcggttcttcatgcccctgtacaagggctgcagcggagacttcaagaaatgggtgggtgcacccttcactggctccagcctggagctgggaccctggagcccagaggtgccctccaccctggaggtgtacagctgccacccaccacggagcccggccaagaggctgcagctcccggagctacaagaaccagcagagcaggaagaaaaagccggtgtgcccaagcccagcttctgtccgacagcccagagctcggtaattccaactcgctgcagtagatgtc

SEQ ID NO: 107763 - DNA, 446 bp, Homo sapiens
  misc_feature (1)...(446): n = a,t,c or g
nnnnnnnnnnnnnnnnnnnnnnnnnnnnnnnnnnnnnnnnnnnnnnnnnnnnnnnnnnnnnnnnnnnnnnnnnnnnnnagagcgagcctaatcttccttagtttaatgtagaggggaaaggattcaaagttcaaagcctttaggaaactggaatgttagagtagatttgtcatttaagatacttgctcacagtgggaaggtctagaagacatatttattatgaatattttgagaaataacattatgatagaagccctgcatccttgaagagcttcatgatcattattctctacaggccagacctttcagtgagaactgcagccactcaattgggaaacctgaatgcaacaggagtaattggacctcagggtggcagcagccaaaaggcagcattcaactgccgaaggcaatgcggaggtggttaccattatgtnnnnnncgcacga

SEQ ID NO: 107764 - DNA, 575 bp, Homo sapiens
tcgtaatgggtggttggtagtccccctgagggccctgatccatcacggatggtggacaacccctcccagagacaccccatccttgggcagagacctgcagccccagcccagagataaccatagagatctgccgggccaaatcagagaccacctgcggcccccgcccccgcccctcaaaaaaaaacacaaacaaaaaaactttcctgggatgtcactgggcagattcactccccctgagatgttctgggaaagagaacccagaggccacccaacacccagagaataggtcccagacactccttccctaggcagtggccccgttagaattcctgaagacctatcccattccaggtaagagaccccccgcaacagagacatctttataagagtcccccagatcaccccagaaacgggcagtgaaggacaccatccccgtctcagatagggaaggcccctcatccacctgacacaccctcttaccgcacacagactttcccacagacgtttccgggcagcacccccaatcctagagcttcctctccccacctcctcgtccagtgacagcacgggctctt

SEQ ID NO: 107765 - DNA, 449 bp, Homo sapiens
  misc_feature (1)...(449): n = a,t,c or g
aagatctggaacaagataaggatgatgcccattgtcatcactgtttttcagcagtaatagacatcctagctagagcaatcagataagagaaagatataaaaggcanccaaattggaaaggatgaagtcaaattagccttgtgtgcggatgatatgatcttatatttggaaaaacctaaagacgcgacaagaaaactattaaaactattaaactagaaaagcatgagcaaaccaagcccaaaattagtagaagannnnnnnnnnnnnnnnnnnnnnnnnnnnnnnnnnnnnnnnnnnnnnnnnnnnnnnnnngatcaatgaaacacaaggttggtttttttaaaagttaaacaaaattggcaaagctttagccagactaagaaaaaaagagggaagataaaagagagaagataaacatcttcagtaaagttgcaggagttccaccgacgt

SEQ ID NO: 107766 - DNA, 451 bp, Homo sapiens
  misc_feature (1)...(451): n = a,t,c or g
tttcttagttagtctagttagcagtttatcttttcagagaactgatttttcattccatagatcctttgcatttttttaagtctctgtattttgtttagttctgctgtgatctttattatttcttctgctagcatgaggtttagtttgtttttgctttttttagtaccctgaggtgtgtatccctatagtgtttatttaaaatatttatttgtgtttattgctataaacctcttttttagcattgcttttgctgtgtccccaggttttggtatgttgtgtttctaccttcttcttccnnnnnnnnnncnnnnnnnnnnnnnnnnnnnnnnnnnnnnnnnnnnnnnnnnnnnnnnnnnnnnnnnnnnnnnnnnnnnnnnnnnnnnnnnnnnnnnnnnnnnnnnnnnnnnnnnnnnnnnnnnnnnnnnnnnnnnnaattccaccagactgttct

SEQ ID NO: 107767 - DNA, 510 bp, Homo sapiens
  misc_feature (1)...(510): n = a,t,c or g
ngnnnnnnnnnnnnnnnnnnnnnnnnnnnnnnnnnnnnnnnnnnnnnnnnnnnnnnnnnnnnnnnnnnnnnnnnnnnnnnnnnnnnnnnnnnnnnnnnnnnnnnnnnnnnnnnnnnnnnnnnnnnnnnnnnnnnnnnnnnnnnnnnnnnnnnnnnnnnnnnnnnatcatctcaaaacatacagaaaacacatgtgccaaaattcaacacccttttatgctcaaaagataacaaacagaagaggacataatcaagttgattatggtgaaaaacttcatggtgaaaaacaggatacattcccagtaaggccaggaatatggggatgtccactcttgccacacatctatttaatattgtactagaggttctagtcagaagacgaggcaagaaaatgaaataaacggaatccagactggataagaagtaaaactatacccatttgcaagtgacataatcttagatacaggaaaacctaagaaacaaacaaaaacgaattccgccacactggact

SEQ ID NO: 107768 - DNA, 509 bp, Homo sapiens
  misc_feature (1)...(509): n = a,t,c or g
ctattccagtgtggcggaattccaatctcttccagaagacagaagcnnnnnnnnnnnnnnnnnnnnnnnnnnnnnnnnnnnnnnnnnnnnnnnnnnnnnnnnnnnnnnnnnnnnttatatgaaaactcagactaatatctctcatgaacacagatgcaaaaatccacaaaatattagcaaatcaagtccaataatgtataaaaagaattaggcaccatcnnnnnnnnnnnnnnnnnnnnnnnnnnnnnnnnnnnnnnnnnnnnnnnnnnnnnnnnnnnnnnnnnnnnnnnnnnnnnnnnnnnnnnnnnnnnnnnnnnnnnnnnnnnnnnnnnnnnnnagcatacaacaaaaccccacacccattcattaaactctcatcaactaggaatagaggtaaacttcctcaatttgattaaaaaacaggtacaaaaaccctatagctaacatatttaatgtcaaacttactaaatcagagtgttatcatcgcatggtggaaactcaggttgcta

SEQ ID NO: 107769 - DNA, 455 bp, Homo sapiens
  misc_feature (1)...(455): n = a,t,c or g
ctctttgaaaagatcaataaaattgcaaactcttatctataataagaaaaaaagaggatgttcaaataacaaaaatgagaaatgaaagaggagacattacagctgatgacacataagtaaaaagtatccaannnnnnnnnnnnnnnnnnnnnnnnnnnnnnnnnnnnnnnnnnnnnnnnnnnnnnnnnnnnnntcttgaaatacaaagtttatcaaaaatgtgtcataaataaacgaaaatatttaaacagactcacaattagtaagataattaaatccacaatcaaaaacttcccaataatgaaaacccaggatcaggtggtttcattggagaactctaccaaacatgaaaatgaattaatactgctttctcaaattgattcaagaaattgaagaagttaaaacactttcaaactcatttttgaggccaacattagaattccaccgcacggtat

SEQ ID NO: 107770 - DNA, 453 bp, Homo sapiens
  misc_feature (1)...(453): n = a,t,c or g
agtcgggcaatttcacaactatgccaacgtggagctgattgtggacattgccaagagaatccccgagctggctttgtgggctggctggggccatgcttcagaaaggcctaaacttccggagctgctgtgcaagaatggagttgctttcttaggtagagtgtgtccccatcatatacatgggaattggggtattgctgggacactctgctgggtctgaccctctttctcctcctgtcctgtaaagcggaggtccgtttgatttcccacctcacacttctgtcgtgaggagtgagtgagtcccagggtggaagggcacatagctaatctgccaactcatggaattaggagctgcccgnnnnnnnnnnnnnnnnnnnnnnnnnnnnnnnnnnnnnnnnnnnnnnnnnnnnnnnnnnnnnnnnnnnnnnnnnnnnnnnnnnnnnnnnnnnnnnnnnn

SEQ ID NO: 107771 - DNA, 456 bp, Homo sapiens
  misc_feature (1)...(456): n = a,t,c or g
aaaagaagattcgtcttgttctccccgcggggggggagggggcaaaaagtttaaccctttaaaccttgtccccccaaattcaaaaaaattttttgcccctccttacaaacaggtggggataaaagggggccccccaacccccggggtgttattaatttttagatgtttggcaaaacccaaaattttcccccgctgggcggggggggttcaaaaccccgccccccaggtaacccccccccttaccccccaaaaagcggggttaaaacccccaaaacccccggccccccccaatgnnnnnnnnnnnnnnnnnnnnnnnnnnnnnnnnnnnnnnnnnnnnnnnnnnnnnnnnnnnnnnnnnnnnnnnnnnnnnnnnnnnnnnnnnnnnnnnnnnnnnnnnnnnnnnnnnnnnnnnnnnnnnnnnnnnnnnnnnnnnnnnnnnnnnnnnngcaccgcact

SEQ ID NO: 107772 - DNA, 417 bp, Homo sapiens
  misc_feature (1)...(417): n = a,t,c or g
ccccacgcctccgtaaggtttttgagtgcnnnnnnnnnnnnnnnnnnnnnnnnnnnnnnnnnnnnnnnnnnnnnnnnnnnnnnnnnnctgtgactnnnnnnnnnnnnnnnnnnnnnnnnnnnnnnnnnagaacagcacctacctcactgggctgctgtaagagtttagatgagtgaaggtgttgtcagtgtccagctttagtaagcgctgaaaacctgttagttaaaaccacttcccacctgctaggatggctgcaattaaaagtcagataataacaggtgttggtgcaacgtggcacgactggaaccctcatacatggctggtgggaacgtgaaatggtgcagccactttggaagccagtctggcagcttaatcaaacagctaagcacagagttaccctgagactcagaaattcca

SEQ ID NO: 107773 - DNA, 549 bp, Homo sapiens
  misc_feature (1)...(549): n = a,t,c or g
aaaagagaatctatactaatcctacagataacattatacctaataatgaaagactgaatgcttttccaagactgaaaactaggccagaacatccactttcatcactctattcagtgtagttctggacgttctagtcagtgcaacaggcaagaaaggaaataaaaggcatacagattagaaaaaataaaataaaactgtccctatttgtgaatagcatgatcgtctaagtaaaaaaaaatctcaaagaatctacnnnnnnnnnnnnnnncctctctaaaaataaacctccctaaggacccaggttaaatataaaaaacccggtccctttcttattttggcccattacccccggggcccccaaatttaaaaatatgaggccttttataaaaaaggttcaatggcgggcgggggggcttggacctggaacccccccctttttgaagggcaaacccggggtataccctgaggcaaaatntaaaacaccccggcccacagggaaaaccccgtttttaaaaaacacaaataataaccaggggggggaaggccccn

SEQ ID NO: 107774 - DNA, 367 bp, Homo sapiens
tccacccgtcttggcctcccaaagtgctgggattacgagcgtgagccaccacgcccagcctaatttatttcttatatttcataaatttcataaagctctcttgttttattcaattaatgtatatattttctcattttagcatcttataaagcagagaggaaataaattactatctaccttttacaggagaggctatagacacaaaaactggaaggacagatgtggtcggcagcaaagccagtattaacattcaagtttcttttttctttttttttttgagacggagtctcgctttgtcgcccatgctggagtgcagtggtgcggtctcggctcactgcaacctctaccttctgggtgcaagcaattc

SEQ ID NO: 107775 - DNA, 421 bp, Homo sapiens
  misc_feature (1)...(421): n = a,t,c or g
gttttttaaaaagataaaattttaaaacttttagctagaattaaagagagaagtctcaaaaaataagaaatgaaagaggagacattacaactgatactacagaaatacaaaagaataagaggctactatgaataattatgtcaacaaattaataatgtagaagaaaatactaggcacatacaatctaccaaggtggaatcatgaaacagaaaatctaaacagaccaatagcaaccaataacaaataagagattgaatcagtaatgaaaagtctaccatcaaagaaaagcccaggacctgatgaccattctttctaaaactaccaaaaaattgaagaagggagaaagnnnnnnnnnnnnnnnnnngaaacaggattttggtttaataattannnnnnnnnnncgggggggcatttaaacctt

SEQ ID NO: 107776 - DNA, 494 bp, Homo sapiens
  misc_feature (1)...(494): n = a,t,c or g
cggactccctggcaggagtagtgtcaacacgttgggcggccaatcagtgttgtaattagtaaaggtattccctattatgaaagttctttggctaacaacgtcacatctgtggtgtaagtatatatgcaatttaaaaaatatatgctatatataattagcattctgggtagcattgggctaagaactagctagatctcagcagcatcactgttaatggtgttcatgaaagaacatttaggcagtaagcactcacattagtgtgctcagcggcnnnnnnnnnnnnnnnnnnnnnnnnnnnnnnnnnnnnnnnnnnnnnnnnnnnnnnnnnnnnnnnnnnnnnnnnnnnnnnnnnnnnnnnnnnnnnnnnnnnnnnnnnnnnnnnnnnnnnnnnnnnnnnnnnnnnnnnnnnnnnnnnnnnnnnnnnnnnnnnnnnnnnnnnnnnnnnnnnnnnnnnnnnnnnnnnnnnnnnnnnnnnnnnnnnnnnnnnnnnnncg

SEQ ID NO: 107777 - DNA, 404 bp, Homo sapiens
  misc_feature (1)...(404): n = a,t,c or g
nnnnnnnnnnnnnnnnnnnnnnnnnnnnnnnnnnnnnnnnnnnnnnnnnnnnnnnnnnnnnnnnnnnnnnnnnnnnnnnnnnnnnnnnnnnnnnnnnnnnnnnnnnnnnnnnnnnnnnnnnnnnnnnnnnnnnntactgagaggttaatgtggacccccttttcgcagagctgctcaatggcatgctagccatggaggacccaggagtcaatgacaccatcctgctggccctgacgattgtgattcatggagctggggcccaagtggatgccggcctgccgaaaaacatcgtctcactcactgtggctaaggagcccacccatgggaccgactccactctatccctgatcccttccaacgccaggcgaacagtgtctattctgtcgaggatcaatgcatcagcg

SEQ ID NO: 107778 - DNA, 423 bp, Homo sapiens
  misc_feature (1)...(423): n = a,t,c or g
gataagccaaaggacccatgaagaagaggaaggattgctttacttgatactaagactttttgtaacacactaataaattaagtcagtgctgtattaccacagaaacagacaaatagaccaatggatcagaatagggaacccagatacagatacatgattaatatggacaggttatttataacaaaggggcatcacaaattagtgaggaaggaagtctctttcaacaattgtgctagaacaattagacatactttnnnnnnnnnnnnnngggaaggccctattttattctggtctaccccggtaatttaataaacttacccggggaaaggcaatttattaaaaaaagttagggtagaggaattttttctttgttttggggtagggaaggatttttaaaaaacaatgggaaggccttaattatan

SEQ ID NO: 107779 - DNA, 410 bp, Homo sapiens
  misc_feature (1)...(410): n = a,t,c or g
nnnnnnnnnnnnnnnnnnnnnnnnnnnnnnnnnnnnnnnnnnnnnnntcacagataaaacatttagtagaatactggacatgcagtaagtcgttagaaaacatgaaaattccctggttcgtgttatctagcttggccccttgaatttcctgaggggtaggccttgaactagggaagggctggggactgggcttgttccacacccctcatttttaccccatcctgctttagaaataccagatcctattatataatggagatgtagacatggcctgcaatttcatgggggatgagtggtttgtggattccctcaaccagaaggtaaggtagagattcctggccctgggataggggctgctgtggaggattgggagcgggtatgcctgggagtggccagctggctgcctggct

SEQ ID NO: 107780 - DNA, 386 bp, Homo sapiens
  misc_feature (1)...(386): n = a,t,c or g
ttctcttcaggattcctattattcatatgttggatgttcttttttattttcaatatttctcatcttctgtattatttattcattttttatatttaaattaaatatttttattttcaatttgtctttctcataaggcattgtctgttttccttattcactcttacattctttgtagctgttttcatttctggaatgattttctttttcatttctagttgtatcctgagttctgtcatctcatttctgagcttttctaaatctgatttatactattttatgttatgtgtcacttaaaaatgtcttttaacttgttttgaaatattagatgatnnnnnnnnnnnnnnnnnnnnnnnnnnnnnnnnnnnnnnnnnnnnnnnnnnnnnnnn

SEQ ID NO: 107781 - DNA, 389 bp, Homo sapiens
  misc_feature (1)...(389): n = a,t,c or g
attctcctctggagccacccccaacacccccatttgcttctagacctgtaactagactaaagtactggtgggcccttagaggtgaggttgagagtgtgacccatgagaaggtgccctacacttgaaaataactacttgagttttctcatttgtataagtagaaatctggagaataggcatgggaatggatattaagggtatgggataatggtggaaggaacatagagttgggtcaggctgaatttattgcttcaggcccactaagtagggactctgcatttaatgttgcagctcagtgagttaaaataaggttttaatagtttatttccttggttagctgaaatacgccttaaaaaatggccccctgtgagggagctggnnnnnnnnnn

SEQ ID NO: 107782 - DNA, 411 bp, Homo sapiens
  misc_feature (1)...(411): n = a,t,c or g
nccaactggaggtccatggtgccatttcaggctcctgccacccttgccttcccgggtccaatgattccccccccttcaccccccgaggaagtggggcccccagggnnnnnnnnnnaaaccccggaaattttgggatttttgggatttaagggggcgaggggggtttttaaacccctgggtcaagccattcttctggcccgggccccccaaagttttccgttttgttgggttataagggggagcccctttggccccccccctttgccnnnnnnnnnnnnnnnnnnnnnnnnnnnnnnnnnnnnnnnnnnnnnnnnnnnnnnnnnnnnnnnnnnnnnnnnnnnnnnnnnnnnnnnnnnnnnnnnnnnnnnnnnnnnnnnnnnnnnnnnnnnnnnnnnnnnnnnnnnnnnnnnn

SEQ ID NO: 107783 - DNA, 404 bp, Homo sapiens
  misc_feature (1)...(404): n = a,t,c or g
gatttaaagcaaaatcactaataatcaaaatttanaatgtaaaaagccatgacatttccagtaacataaaaaatattaaatactaaaaagtaaatctgacaagagatatgcaagacatgtgcactggaaactataaaccattgctgaaagaaattaaagaannnnnnnnnnnnnnnnnnnnnnnnnnnnnnnnnnnnnnnnnnnnnnnnnnnnnnnnnnnnnnnnnnnnnnnnnnnnnnnnnnnnnnnnnnnnnnnnnnnnnnnnnnnnnnnnnnnnnnnnnnnnnnnnnnnnnnnnnnnnnnnnnnnnnnnnnnnnnnnnnnnnnnnnnnnnnnnnnnnnnnnnnnnnnnnnnnnnnnnnnnnnnnnnnnnnnnnnnnnnnnnnnnnnnnnnnnnnnnnnnnn

SEQ ID NO: 107784 - DNA, 407 bp, Homo sapiens
  misc_feature (1)...(407): n = a,t,c or g
nnnnnnnnnnnnnnnnnnnnnnnnnnnnnnnnnnnnnnnnnnnnnnnnnnnnnnnnnnnnnnnntgaattagtaattttaaatatttccataaagaaaatcccaggccaagatgatttcactggtgaattctataaaatgtttatagaagagataacatcaattcttcccatactctttcagaaaatagatgccaatattctatatgaacaagcagtattattctgataccaaagtcatacagagacataagaaagcgacagnnnnnnnnnnnnnnnnnnnnnnnnnnnnnnnnnnnnnnnnnnnnnnnnnnnnnnnnnnnnnnnnnnnnnnnnnnnnnnnnnnaaattccaattagaatttatcccagaaatggaaggttggcttaacatctgaaatcagtcaatg

SEQ ID NO: 107785 - DNA, 834 bp, Homo sapiens
gagacagaatctctctgtcatccaggctagagtgcagtggcacgactcttggcttactgcaacctccacctcccaggttcaagcaattctctgtctcagcctcccgagtagctgggattacaggcatgcaccaccacgcctgggctaatttttgtatatttaagtaggagacaaggtttcgctatgttgggccagggctggtctttggaactcctggacctcgtggatccacctggccttggccaccccaaagtgttgggattataggccatgagcccaccgtgccccggctgatgcctggagccttttatgtgaccatggtgacctccttaaaactgggggagggacgtagagatgagagtttcacacaccagccccatacggtgggatgtcaagaccccatcggaagtgtccgctggcctaagagaagagcacttatttctcacccatggctgatctagaattgttccctgattctgaaagaagtttacactacactggtaagcagtactattagactactgactgtggccttctgtgcatatggaataatgatttctcagatttgtaggcttgaatgtgaatgttattttatcagtaatcagaataaattgcttatattcaggagttattttaaatatttaaatgaaatttattttaggcaccaagcaccacataaactcataataactatttgcaatgcattagcatcactcacggggtaatgaaaacataccttagctgctgtaaaagcaaagtcttccgtgtccgggtgggctgaaagtttttaataaaattttagctaaacatttgtttaagtgaatactaaaaaaa

SEQ ID NO: 107786 - DNA, 396 bp, Homo sapiens
  misc_feature (1)...(396): n = a,t,c or g
cactgaaagagagggaacaaaagaagagaaagagtagctattcttacaacaaacaaaatagactttaagtcaaaaactgtaacnnnnnnnnnnnnnnnnnnnnnnnnnnnnnnnnnnnnnnnnnnnnnnnnnnnnnnnnnnnnnnnnnnnnnnnnnnnnnnnnnnnnnnnnnnnnnnnntaattatataaagcaaatattaacaaatctgaagagagaagtagacaacaataatacaataacagtaagggacttccatatcccactttcaacaatggattgatcattcagacagataatcaataaggaaacagctgacttgaactacactatagatcacatggaccagacatatacatgacattcctttccaaaacagcaaaatacacattcttct

SEQ ID NO: 107787 - DNA, 543 bp, Homo sapiens
tgagacggatccgctctgtcgcccaggctggagtgcagtggcgtgatctcagctcactgcaacctctgcctcccgggttcccgccattctcctgcctcagcctaccaagtagctgggactacaggcgcccgcgaccaggcccggctattttttttgtacttttagtagagacggggtttcaccgtgttagccaggatggtctccatctcctgacctcatgatccgcctgcctcgtcctcccaaagtgctgggattacaggcgtgacgaccgcgcctggccggctgtcaatcaagtgagacagggctccaaaaagatgtgcacaagtcctggcatggagtaaggaccaaggaatgaaactggggagattattaaatgccccattttcttgccaaaccctgacgaggcatgtccctgaatatgcacagggaaatgagggacagaggggacccaggctctagatacacgcatgtggcccagctgttagcagaggcccaaaccacgcatgagcagggatctgggctgcctccccctgctctgtgtcc

SEQ ID NO: 107788 - DNA, 456 bp, Homo sapiens
tttttttgagatggagtctcactctgtcactgaggctggagagcagtggcgcgatctcggtgcctggttcaagcaattcttctgcctcagcctcccgagtagctaggactacaggcacctgccaccatgcccggctaattttttgtaattttagtagagacggggtttcaccatgttacccaggatggtctcgatctcctgacctcgtgatccacctgccttggcctcccaaagtgctgggattacaggcgtgagccacggtgcctggccggagatgcccatatttaatagagaaccaagtgggtgtaagagggcccagggaaagcagacaaagaggaatgttcctggtttgtgctaactatcattctcacggcggagcccactcaggtttgttgacaatctggcccctgcctaccactctaacctctcctccctccggacgcgtgggtcgacccg

SEQ ID NO: 107789 - DNA, 440 bp, Homo sapiens
  misc_feature (1)...(440): n = a,t,c or g
ataaaaaagggcagactttctttaaaatataaaccggggtttgctttttcgcgcaaggtggaaaccggtagcccaattttgggtccaagcaacctttggcccctggggggaaacaaatatcctgccccaccccccccagtaagtgggggatcggggcccccctcccccgcccaaataattttttgccctttaataaagacgggggttccccgtgttcgcccggctgttttaaaactccttaaaccaggtaatatggagggctcggccccccccaagggtagggtttcaaaagggaagccccccgcgcggcccannnnnnnnnnnnnncnnnnnnnnnnnnnnnnnnnnnnnnnnnnnnnnnnnnnnnnnnnnnnnnnnnnnnnnnnnnnnnnnnnnnnnnnnnnnnnnnnnnnnnnnnnnnnnnnnnnnnnnnnnnnnnn

SEQ ID NO: 107790 - DNA, 420 bp, Homo sapiens
  misc_feature (1)...(420): n = a,t,c or g
ttcaagacttaactataaaggtgtagtattaagacagtggtgttggcatagggataggtatgttgaccagtggacacactagagactgcacatgtagttcattggtttacaacaaaggtaccgatgtagtttaacaggaaaagatgttcttttcaaaaatgttgctggaatagagggaaaagtgaacctcagctcttacttcataccataaacaaaaattaactcaaaatggatcatacacctaagtacaaacagtaaaaacagaagatgtctgcaagaaaatggtataattgnnnnnnnnnnnnnnnnnnnnnnnnnnnnnnnnnnnnnnnnnnnnnnnnnnnnnnnnnnnnnnnnnnnnnnnnnnnnnnnnnnnnnnnnnnnnnnnnnnnnnnnnnnnnnnnnnnnnnnnnnnnnnnn

SEQ ID NO: 107791 - DNA, 408 bp, Homo sapiens
  misc_feature (1)...(408): n = a,t,c or g
ccgagccctacaggcagggcagggaggtcattagggggattgaggggaaggaggctggtcacagaggggctgcgcctggtgtggctggtatggtgggggatggcaggcaaagatggggaagtggaacagagagcgagagagagcgagagacagcaagaaagcgagagagagaaacagtgagccagagagagacggagagagaaagccaaagggagagggaacgggagcgagaaagagaaaaagacaaaaaacgggaccgagaagaagatgaagaagatgcatacgaacgaagaaaacttgaaagataactccgagagaaagaagctgcttatcaagagcgccttaagaattgggaaatcagagaacgaaagaanaccccgggaatattgagaaagaagcttgaaagag

SEQ ID NO: 107792 - DNA, 364 bp, Homo sapiens
  misc_feature (1)...(364): n = a,t,c or g
ggaggtggacgcaaagcagctgatccaggaagcctgtcggagctgcctggagcaggctaaactgctcttttcagatggagaaaaagtaatacccagagtgacccatgagcttccaggaataaagcgtggccgtcaggcagaagaagaatgtgcccatcgaggaagcccccttcctaaaaagaggaaaggctggcctcctggacacatcctgtcaagcgaccgggcagccgccggcatggtatggaaaccaaaatcccgtacccagttcgccgggaaggccccaagtgagacacagctcgcctgaatgaatctaccccctatgtgttgggcgctctgttcncntaacccaanccggtcgttcaca

SEQ ID NO: 107793 - DNA, 1384 bp, Homo sapiens
tcctctagtccagcgtggtggaattccgggcccgtgttgtctcaggcagtagggacactggcgctgacggcggtggtattaaaccacagagactggcaacttcccaggttcctagagaggaggggcatggaaaacgcacttccggcggagggtctcaagctttccccggtgtcggcggcaggtggaatttccacgctttatctgcgcctgcgccgcgcgggattcgcggtccgagctgaagaggttcgcggtccggtttcacttctccgaaccctgaggcagtgtgtgaagctgggacgccagccatgttccagaccgcttggcgccaggggatgaggccagaactgagaaggaaggattaactccaaaggatcatgtgtccaaagaaacagagtccttcagactgatggtggggggcctgccagggaatgtttcccagcaccttgactttgggagcagcctagagcagccacaaggtcattggataattaagacaaagtcaaagaggagacatttcacagatacctcagccaggcaccatgaggcctatgaggtcaagaatggagagaagtttgagaaattaggaaaaaatattagcgtcagcacacaagtcacgtacgaatgagacaaatcctagtggtcagatatcttatgaatgtggacaatgtggcagatatttcattcaaatggcagacttccaccgacatgagaaatgtcacactggtgaaaagtcttttgaatgcaaagaatgtggaaaatacttcagatataactcattacttattcggcatcagataattcacactggaaagaaaccatttaaatgtaaagaatgtggaaaaggtgtaagttcagacacagccttgattcagcatcagagaatccacactggagaaaagccctatgaatgtaaggagtgcggcaaggccttcagtagcagctctgtcttcctccagcaccagaggttccacactggggagaagctctatgaatgtaacgaatgttggaaaactttcagttgcggctcaagtttcactgtccatcaccgaatgcgcacttgggagaaaccttatgaatgtaaagagtgtggaaaacgattaagctccaacacagccttgactcagcatcagcgaattcacactggggagaacccctttgaatgtaaagagtgagggaaggcattcaatcagaaaataaccctgattcagcaccagcgagttcacactggcgagaaaccttatgagtgctaagcgtgtggcaaaaccttccgctggggtggaagattcattctgcatcagaatctccccactcaaaagacacctgtccaagcgtagggctatccatagttaggcccactgtgcctctccttttttctctttatttt

SEQ ID NO: 107794 - DNA, 323 bp, Homo sapiens
  misc_feature (1)...(323): n = a,t,c or g
ggccccnnnnnnnnnnttttaccttgccaaccccgggtaattaaacttggttcctttaaaagggccccccnnnnnnnnnnnnnnaaaaagaagttcccccccgcccccaggccgaaagccaaggggccaaccccggccccccccaaccccctttttccagggccaaagaattttcttaaaaaatgggggcccaaggaagggcccccccggcccaaccaacccnnnnnnnnnnnnnnnnnnnnnnnnnnnnnnnnnnnnnnnnnnnnnnnnnnnnnnnnnnnnnnnnnnnnnnnnnnnnnnnnnnnnccgctcgcgatctagaa

SEQ ID NO: 107795 - DNA, 470 bp, Homo sapiens
  misc_feature (1)...(470): n = a,t,c or g
aaagggaattaatcctaaaatttagatgggatttcaaggggcctcgaatagcccnnnnnnnnnnnnnnnnntcgtgaaagataagaacaaagctgggggactcacatgtcctaatttcaaaacttactacaaagctgcagtcatcaacagtgtggcactggcataaagacagacatacagaccaacagaataaaacagagagtccagaaagaaacccttgcatatatgactttcaatcaagccgtcaagaccattcgataaagacagtcttttcaacaaacggtgcagagacaactagatatccacatgcaaaagaatgaagttagacccttacctaatnnnnnnnnnnnnnnnnnnnnnnnnnnnnnnctttacgttttaagacctaaaactttaaaacccttagaagaaaacataaggtaacaccttcgtgacatgggcggacgcgtgggtcgacccggcatattccn

SEQ ID NO: 107796 - DNA, 423 bp, Homo sapiens
  misc_feature (1)...(423): n = a,t,c or g
aaatttagatgggatttcaaggggccttgaatagccnnnnnnnnnnnnnnnnnntcgtgaaagataagaacaaagctgggggactcacatgtcctaatttcaaactttactcaaaagctgcagtcatcaacagtgtggcnctggcataaagacagacatacagcccaacagaataaaacagagagtccagaaagaaacccttgcatatatgactttcaatcaagccgtcaagaccattcgataaagacagtcttttcaacaaacggtgcagagacaactagatatccacatgcaaaagaatgaagttagacccttacctaatnnnnnnnnnnnnnnnnnnnnnnnnnnnnnnctttacgttttaagacctaaaactttaaaacccttagaagaaaacataaggtaacaccttcgtgacatggg

SEQ ID NO: 107797 - DNA, 434 bp, Homo sapiens
  misc_feature (1)...(434): n = a,t,c or g
ccggggtctttaatttggttccctttaaacgccccccccnnnnnnnnnnnnnnnnnnnnnnnnnnnnnnnnnnnnnnnnnnnnnnnnnnnnnnnnnnnnnnnnnnnnnnnnnnnnnnnnnnnnnnnnnnnnnnnnnnnnnnnnnnnnnnnnnnnnnnnnnnnnnnnnnnnnnnnnnnnnntgggaccaagtcttgtaagtgcgactgcagttctgcgtgttgtttacgcgtgtgcttgtgcatctgtgtttgtgtttctgagctggtatgtttgtgaccctgcgtgtatctgtggatggtgtgtacgtgcatgtgttgagtatctgtgtacgtgtctctcgtgtttgctccgtgcgtgtacgcctctgttccctccgcgttggcaagggaggctctccatccgcagacacaaagtttccttttctccgtcagcg

SEQ ID NO: 107798 - DNA, 421 bp, Homo sapiens
  misc_feature (1)...(421): n = a,t,c or g
agtcttacgggccctgttctgactctgggtagccctgaagaatagtgatgggtggaaatcctcccaatgggcacagcttctttcagtgcagccggctggtcattttgctcagcagaaatagctaggagtagatctacactgattcatggacactggccaatagctggactaaacgagaacagccagggactcaaagaacagaattagaaaactggtgacaaggaagttagggcaagaggtatgtggacagatctctacaaatgggcagactatgaatgaggatctaaaaatgggtgnnnnnnnnnnnnnnnnnnnnnnnnnnnnnnnnnnnnnnnnnnnnnnnnnnnnnnnnnnnnnnnnnnnnnnnnnnnnnnnnnnnnnnnnnnnnnnnnnnnnnnnnnnnnnnnnnnnnnnnnnnnnn

SEQ ID NO: 107799 - DNA, 433 bp, Homo sapiens
  misc_feature (1)...(433): n = a,t,c or g
tcattttccatgtagaatgcccatggattttacaaggaagttcctagaactgattagtgaatttagtgagattataggatatgaagtcattatacagaaagcagttgtaattctatatacttgaaatgaacaatggtagatcaaaattttaaaaaccatttacaataacaaaatgaaatacataggtgcaaatctaatatgattaatattcagcaatattcaatatattaaatattcaaattcaacatggtaaatattagggaaatgcaaattaaatcacagaaatactattcacctttcagaatatctttnnnnnnnnnnnnntcnnnnnnnnnnnnnnnnnnnnnnnnnnnnnnnnnnnnnnnnnnnnnnnnnnnnnnnnnnnnnnnnnnnnnnnnnnnnnnnnnnnnnnnnnnnnnnnnnnnnnnnnnng

SEQ ID NO: 107800 - DNA, 915 bp, Homo sapiens
  misc_feature (1)...(915): n = a,t,c or g
ggaggcgcaacacaagagggagngagaggggggcccgcgagcgagacgagcagacggacgaagggggccccgggggcaccgccccggcggggaacccggcccggggcagaaaggggccccaaaaagaagaaggcgaggccgcccgcggcaagaacagagnaccacacgcgccccaccccacaccacacaaccccaaccccnnaacccacaacccccccccacaacaaaaaacccacacaccccccaccaannnnnnnnnnaaccccccacccacacacccacccacaacaacaacaaacnnccaaaacncacannccnnncnnnnnnancnnnctttcccacgcgcgccatttaagtggggaacccccgggtttttcccctccccccgttgttaaaccccggccccgggaattaattttgggggccccataaaaaaacttttacgttgcaagcacgcggaagtaaacctggatcctctaaaacggccgccccnnnnnnnnnnnnnnaaagaataagaaatttgccactcacgaaaggcctgtattccatagctatcatctgtaaacatgaacaacatttactgctggatggggaatcaccagcgcatggaagaactcttggtggatgcgttgtctggagcctgctcactccgccacgttactcagcaatgctttccctgtttctggataccacgctcccttctgaacgatgaagcatgaagcaccacgctccataaaagaccctccctctccccgtgggagggctcaggaaggtgagggatttggcccccatttttgggaaggctactcattagctccttgttattcaaagtgtgaccctgaggagttgcatccacacgccctgggagtgggtgagacgcacaggcacccaggcccacccaggcctgctggagcc

SEQ ID NO: 107801 - DNA, 594 bp, Homo sapiens
ttttttgagacggagtctcactctgtcgcccaggctggagtgcagtggtgcaatcttggctcactgcaacctccacctcccgtgttcaagcaattctcctgcctcagcctcccgagtagctgggacaacaggcgtgcgccaccacaaccagctaatttttgtatttttagtagagacagggtttcactatgttggccaggatggtctcaatctcttgaccttgtgatcttccacctcagcctcccaaagtgctggattacagacgtgagccactgcacctggccaaatgtgaagctagtcaagcgtggttgtggggggagataatgttaaatcagcttaacaataacccacaacactcgttggccttcaaatgatcttctcctaactgctttctaaagaaggtgctaagaagtagccacaatgaaacaaagaaacaagacctatcatcactaagagcaactttagtgtggtctaaaaattaattacaaaatgaaaaattagacatatgcatgtgtacatatatgcatttgtatatgtatatatactatgcatattggcacacatacaagttaaccatgacccttcaatattttt

SEQ ID NO: 107802 - DNA, 414 bp, Homo sapiens
  misc_feature (1)...(414): n = a,t,c or g
nttttatcaaaaacaatggcatcatattgttgaataaccttttttctctttaacactatattttgaacaatttctcatgcccttatttactttagaacacttattttcagtcttttttcccatggaatcatgaataagttatttgttttctatttcctttttaaaatannnnnnnnnnnnnnnnnnnnnnnnnnnnncagatcttcattctgagaataagnnnnnnnnnnnnnnnnnnnnnnnnnnnnnnnnnnnnnnnnnnnnnnnnnnnnnnnnnnnnnnnnnnnnnnnnnnnnnnnnnnnnnnnnnnnnnnnnnnnnnnnnnnnnnnnnnnnnnnnnnnnnnnnnnnnnnnnnnnnnnnnnnnnnnnnnnnnnnnnnnnnnnnnnnnnnnnnnnnnnnnnnnnnnnnnnnn

SEQ ID NO: 107803 - DNA, 1319 bp, Homo sapiens
acactcttattctgccttacgaggatttctggaagcttctgtaactgtagggaagaaagctgtaggggagcatggtttttttgttttgtttttgtttttgagacgaggtctcactgtcacccaggctggagtgcagtggtgccatcatgactcactgcagccttgacctcccaggcgcacaaaatcctcctctcagcctgagtaactgggactacaggtgtgtaccactacatccagctaaaggagagcgttttttcctttttctttttgagacagagtctcactctggcgcctggtcactgtgcccttcaccttctgggttcaagtgattctcctgcctcagcctccctagtagctgggattacaggcatgcacccaccatacccaagctaatttctgtatttttagtagagatggagtttcaccatgttggccaggctggtctcgaactcctgacctcaggtgatccacctgcctcggcctcccaaagtgctaggattacaggcgtgagcacccatgcccagctgggagcgttctttcagcaaaaagtctaattcagagactcaccttccatcctgggacttaaacaatagtactagaggtaagatctggccaagaatttcttctcacttaagcaggatacttactttaaatataattaggcaagacttattttgaagtacttgccctaattgtatttaaattagaaactatgctggatgctgtagacagaagaaataaaatactcaaacttggtctcctatcttccaagcaggttagaggcctttagggaaagaaaaagcctgtgtgcagggaaagagaacctcaccagaaaagtattcaataaaatgcccaaagtgatcttacagaacagtgcctgtgaccacccggaggggatttgttctgtctttgtgagtgaacatacaatgatgggggataactgggtcctcatacccatgcaggtcccatttctgatcaccccacttggcaggacaattcacagttcttggagcaaacctgagttagggaagggtatgctaacgacagaacctatgcaaggttcgttagaaatattttttgtttgctgaaataaagctcaatcaacacactaccttaaaaaaaagtggagcagtggcatttccatgcctcatgctcaccatcatgaggttaacttcccgccgtcgcctcttgcctgccaggggtttttcgggagcccctctctgttccactctgattccttttgtttctttgctgaccattcactctctgtgtctgttgttggatccaaatacgagtgtttttctttcaaaaaaaaaaaa

SEQ ID NO: 107804 - DNA, 496 bp, Homo sapiens
tgagacagagcctcactctgttgctcaggctggagtgcagtggccaaactcagctcatgacaacgtatgcctcccgggttcaagcgattctcaacgcttcagccaactaaagtagctgggatttcaggcatgcgccactcctgggctgactttttcctaatttttagtagagacagagttttgccatgttgggccaagctagtctcgaactcttggccctcaagcgaaccgcccacctcagcctcccaaagtgctgggattacagacaggcgggagccacagtgcctggccttgcattaatttttaaaatgagaaataataccggtcttgctttcatttaaaactttttccaaagaaaccatgagcaaacctgtgtttaccatatatactgtactgaatatttgggacatcaccatttcaatgtaaaagtccagatgctaataattaacacagactgaccaacactctgaaatgacttggttattttctaaaataa

SEQ ID NO: 107805 - DNA, 398 bp, Homo sapiens
  misc_feature (1)...(398): n = a,t,c or g
ngcccagcctagaatgtgtaatgaactctcccaacttatagtaaaaaagccaaccatccagttcgagcgtggacacagaatatgaagagagatttccccaagaaaacccacagatggcaaataagcacaaagaaagatgctccacgtccctggccaacagggaaacgcgaatgagggccacagcaccctgccagcacatccctaccaggacgcgggtaaaatgaaaaacagccactcccccaaatgctggtgaggatgcggaaaatctgcatccccgtagggatgcaaaatggcccagcccctttgaaaaacaattaggcagtttctttnnnnnnnnnnngtnnnnnnnnnnnnnnnnnnnnnnnnnnnnnncacacatacatctatataggtgtata

SEQ ID NO: 107806 - DNA, 422 bp, Homo sapiens
  misc_feature (1)...(422): n = a,t,c or g
cgcggggggttcccagggtcggggatttagccccccctgggttaaccggggaaaccccccttttttttaaaaaaccaaaaaattgcccgggggggtggggggggcccttttttcccccctctccggggggtttggcccaaaaaatgcctttacccccggggggggcccttcaaaaaaaccggattgggccccttnnnnnnnnnntggggaaccaaagggaattccctttttnnnnnnnnnnnnngggggannnnnnnnnntcctacctataatccctagacctttggagggcccaggttggggggattgtttaattcccgattttcaaacccaccnnnnnnnnnnnnnnnnnnnnnnnnnnnnnnnnnnnnnnnnnnnnnnnnnnnnnnnnnnnnnnnnnnnnnnnnnnnnnnnnnnnnnnn

SEQ ID NO: 107807 - DNA, 384 bp, Homo sapiens
  misc_feature (1)...(384): n = a,t,c or g
cctgccaataaaatttcttagggccaaggtttccccccccctaacctcctaaagtaggggggcccccagggggggnnnnnnnnnnnnggttttttaaaccttttttttaaaaaaggggggtttacttttttgttttagggtggttttaaaccctggggtccaaccagtcctctggcccgggccccccaaattgttgggttataaaaggggggccccgcccccccctcccaaaatttttaagggcccaggnnnnnnnnnnnnnnnnnnnnnnnnnnnnnnnnnnnnnnnnnnnnnnnnnnnnnnnnnnnnnnnnnnnnnnnnnnnnnnnnnnnnnnnnnnnnnnnnnnnnnnnnnnnnnnnnnnnnnnnnnnnnnnnnnnnnnnn

SEQ ID NO: 107808 - DNA, 328 bp, Homo sapiens
ctcgtgccccttccctaaaatttcttggttaagggtgatttatctgaccctttcctttcctttcctttcctctcctttctcctttttcctttcctctcctttctcctttttcctttccattcctttcatttctcctttcctttcctttttcctttcctttctcccttcctttcctttttctttttctttgttgagacagggtctcgctctgtcgcccaggctggagtacagtcgccccgtcttggctcactgcaacctctaattgabcctcccacctcagcctcctgagtggctgggactacatgcgtgtgctgacacgccggctaat

SEQ ID NO: 107809 - DNA, 392 bp, Homo sapiens
  misc_feature (1)...(392): n = a,t,c or g
acagaatggataagaagtcaccaaccaagtttctgctatcttcaggagactcacctaacacataatgattcacataaacttatgataaaggtgtggaaaaagatattccgcaaatggacgctaaaagcaagcaggattagctgttcttatgtcagacgaaacaaactttaaagcaacagcagttannnnnnnnnnnnnnnnnnnnnnnnnnnnnnnnnnnnnnnnnnnnnnnnnnnnnnnnnnnnnnnnnnnnnnnnnnnnnnnnnnnnnnnnnnnnnnnnnnnnnnnnnnnnnnnnnnnnnnnnnnnnnnnnnnnnnnnnnnnnnnnnnnnnnnnnnnnnnnnnnnnnnnnnnnnnnnnnnnnnnnnnnnnnnnnnnnnnnnnnnnnnnnn

SEQ ID NO: 107810 - DNA, 669 bp, Homo sapiens
attgcgacggaacttttgggtttacccacgcgtccggacatcctgttgctcagtttctagatgaagtcatgagcaaggccatcagtggagctctggccccgcccccaatgtgcagaagggccgggagcaaggcctggagttttcatgtgttttcagacccaggtttaggtgctctcttctcactgaaataactaagtgctctccactggcatcgagccctttccacaaggttttaagggctcttaacccacactttcactcctctgctactagtcttcagtgttgttaacagcaagagaaaattgggtttgtttaaaaatctacttctctgaggtggcacagttgcgtagctgtagtcccagctactcaggaggctgaggtagtaggattgcttgagccctggagtgtagtggcatgatctcggcttcactgcaacctctgcctcccaggttcatgccattctcctgcctcagcctccccgagtagctgggactacaggtgtctgccgccacgcctggctaatttttttgtatttttagtagagacggggtttcaccatgttggtcaggatgggtctccgatttcctgacctcgtgatccgcctgtctcggcctcccaaagtgctgggattacaggcgtgagccaccacgcctggcctataagatacgg

SEQ ID NO: 107811 - DNA, 421 bp, Homo sapiens
  misc_feature (1)...(421): n = a,t,c or g
atccagaacagtcacaaaaatcttcaaaaagaataacaaagctggaggacttacacgtgggaattcctaaggggtctacaaagatacagtaatgcagacacacataaggatagacatatagatcaatggaacagaactgagagtccagaactcatacatttacagtctattgctgtttgacaacggaatcaaaatcatccaacggagagagaacagtcttttcgaaaaatggcactagggaannnnnnnnnnnnnnnnnnnnnnnnnnnnnnnnnnnnnnnnnnnnnnnnnnnnnnnnnnnnnnnnnnnnnnnnnnnnnnnnnnnnnnnnnnnnnnnnnnnnnnnnnnnnnnnnnnnnnnnnnnnnnnnnnnnnnnnnnnnnnnnnnnnnnnnnnnnnnnnnnnnnnnnnnnnnnnnnnnn

SEQ ID NO: 107812 - DNA, 412 bp, Homo sapiens
  misc_feature (1)...(412): n = a,t,c or g
cataatttaaagctctgttgtttggtatatacacatgtaggtttgcttagtattcttggtgtgttgacccttttataattaagtaatgtccctttttgttcctgttaatactcatcaatttttatctgatatttgtgtggccagtcttacgttttggttaatgcttgcatgatttacacttcatcatttttttaaaccttatctatatcactatattgggagtaagtttcttgtgaatggcgtatatttgggctgtggttttatatccagtttgcgtatcnnnnnnnnnnnnnnnnnnnnnnnaaagggannnnnnnnnnnngtcccccccccnnnnnnnnnnnnnnnnatactccgtttattgaaacccccgcctggggggtcaagggttttttcccccccagccccttgg

SEQ ID NO: 107813 - DNA, 385 bp, Homo sapiens
  misc_feature (1)...(385): n = a,t,c or g
cagtcttcagttataaccactccaccctcctcactttctctctctctctctcnnnnnnnnnnnnnnnnnngggcgggggaataaaggggaaaaaaagggaaaaacgggccctaagccggggggtttttttcctnnnnnnnnnnnnnnnncctttcccccaccgggggtccaaaaaagacccccgggccgggggttccccaaaaaacccaatttcccattaagggggggcccgggcctttcaaaaccctttccgggcgggggggaaaaccaaatttgggtgggccccaaaaacccccaatagtttaaaaannnnnnnnnnaagggccccgggccctttnnnnnnnnnnncaaaaaacgcccccaacctttgggggctttggtaaaa

SEQ ID NO: 107814 - DNA, 206 bp, Homo sapiens
gcgtgaacctttgcgtaaaaataataatattaatttataaaggaatagtgcagctgtgtgaactcgggggagcttaggagaattttagcggaagacgaaacatttttttaccagtacaatgctgaaaaaaccacaatcatagcaatgtttaccaagaggtggaaatagtccagtcaaagcaaaaggctgaccagtgaaccttggct

SEQ ID NO: 107815 - DNA, 480 bp, Homo sapiens
  misc_feature (1)...(480): n = a,t,c or g
gaattgcagtttcgacccacgcgtccgcaaaaggaactgtttatgtgaagcctctgaaagtgtaggtggcgtggcacagttaatgatataaagaaggctttccccttgtggctgttgcgcaaagggagaaagaggcatttgatgaggcagaggaataagtaggaaatagaacttgcaagattaattctaaatggatcataagaatttgggccttttaactcaagagagataggagacctacttaaggattttaagatttggttttttgatgttttgttttttaganacagggtcttgctctgttgcccaggctggagtgcagtgccanaatcatagctcactgaagactcaaactctcgggctcaactgatcttcctgcctcagcctcctgagtcactggaaccacaggcatgcaccaccatgcccngctatttttttgttttttgtanagatagagtctggcttcattgcccagactgg

SEQ ID NO: 107816 - DNA, 393 bp, Homo sapiens
  misc_feature (1)...(393): n = a,t,c or g
tttccaactcatgaacataatatatctctctacttatgtcgtgtttgatttcttttagcaatgtttgcagtgtacaggttttacaccttttgttagttttatttctaagtatttgataagtttttatgctattttaaatgatatttgaaaatcttcattttctaattatttgctattggtatataggaacataactaatttttgtatattgannnnnnnnnnnnnnnnnnnnnnnnnnnnnnnnnnnnnnnnnnnnnnnnnnnnnnnnnnnnnnnnnnnnnnnnnnnnnnnnnnnnnnnnnnnnnnnnnnnnnnnnnnnnnnnnnnnnnnnnnnnnnnnnnnnnnnnnnnnnnnnnnnnnnnnnnnnnnnnnnnnnnnnnnnnnnnnnnggtc

SEQ ID NO: 107817 - DNA, 396 bp, Homo sapiens
gaaaggactgtgctcagtttttgttgtctctgtttatcctgatccactaaccaggatgtgggtggtggcgggtgcttctcttcctttcttgatgaagattctgccggtggagacagataaaaagcctcaggggaagcagctacagacccgagcggattacttgttgaagctgctcaaaaagggtctggagaagaagggggctgtgacaggtggggaagaggtgagtacgctgccagctggttgtttttcaggggcctgaggctcctaccctgcagaattaggtaggaagagagaggccctctctgagcactgcacagaatgtcaccttctcatgggcatattttgtttttgaggttccagtaatgatggtttgcttggtaataatagaaatgttca

SEQ ID NO: 107818 - DNA, 490 bp, Homo sapiens
cagggagggaaagaatctcagcatctagaatactgcgtggcacaaagtaggtacttgctaaatgtttctaaatataaatgattgtccaagcttaagtaagtacaggagagattcatatatattcttaaatgatttgcatgtttaaagagaataatataatgctcaatagatggaaaataacaatgagactgatctatacctgcaaagaatgaaatgttctgaatgtgtatttaaaagagagaggaacaccaagacagttcactggagaaaagaataatcttttcaataaatggtgctggaaaagctggatatccacatgcaaaaagagtgaagttgaaccactacctcacatcatatgcaaaaattaactcaaaatggactataaacataaatctaggaactaaaactataaaacttgagatacaaaattttataaccttggattaggtaatggatttgtatatgtaacaccgaaagcatgagcaacaag

SEQ ID NO: 107819 - DNA, 400 bp, Homo sapiens
  misc_feature (1)...(400): n = a,t,c or g
aaatcatatgcacgcttctatttcgtccacaattgttgtccaggcgtttaatgggggaaggccggggttttccctctctgcgcctggtacacccagggccggagactgaccttgggtgcaccctagaaaaatttagcctctcccaacacgggtaggttaagcttgtcactttaaaacggctgccccnnnnnnnnnnnnncctaatgtttatagcagcttttattcataattaccaaaagttagaggcaaccaagatgttcttcaatgggtgaatgtataaacaaactatggtacatctatacaatagcatatttctcagtgatgaaaagaaatgagaccgtatgcagtgactcacgataagtaataacagannnnnnnnnnnnnnnnnnnnnnnnnnnnn

SEQ ID NO: 107820 - DNA, 451 bp, Homo sapiens
  misc_feature (1)...(451): n = a,t,c or g
ggaattctccgggctgttttagcaatgaagagattgatatgggctgattgggggttagggaaagtgaagcagcagaaccagaacagagtggacattgaaagggtgctaataagtaaataattatgtgaagtagcatactggtcgaaatgcataactcaaagataatcgggaagcgtattttcttttcttttcnnnnnnnnnnngaaaagggaccccccctttgccccccggccggaagggcagggccccaatttggttcaacggaagcccccccctccagggttcacccatttttccggcttaaccctccaaggaagttggacctacgggccctggccccctggcccagtaaattttttggaattttaagaaaaaccggggtttaccggggtaacccaggagggcttgaccctccgagcctaggaatcggcccgcctgggcctccaaaagg

SEQ ID NO: 107821 - DNA, 562 bp, Homo sapiens
  misc_feature (1)...(562): n = a,t,c or g
cgtgtcgatccacgcgtncgctctgtctanaacatacaaaccccaacaaaacacaaaaaacaaattctggagctgatataattcagttgacaaactagaaaatacatcagaatcnnnnnnnnnnnnnnnnnnnnnnnnnnnnnnnnnnnttagtaagcttaaggacagactgtatgtaaatacacagaggagaaaaaagaatgaagcaaacctacaagatctagaagtcacagggcaaatctgagagttattggtcttaaagaggaggtagagagagagagagagggtagaaacttcactcagatagtaacagaactttccaaacccagagaaaggtatcaatattcaggtacaagaaggtcctagaacaccaagaagatttaacacaaataagattacctcaaggcatttaatagtcaaactcccaaaggttgaggataaagaaagaatcctaanagcagcaagagaaaaggaacaaataacatatgaaggagctccaatacatctggcagcagacatctcagtggaaactttacaggccangagggagtggcatgtcaag

SEQ ID NO: 107822 - DNA, 411 bp, Homo sapiens
  misc_feature (1)...(411): n = a,t,c or g
cattcctccagtgaaagtgtctaggcttgggattttcttttttggaaaannnnnnnnnnactacgtattcagtggattttgatataggcctattcaagttaattatttcttcttaggtgatttttggtagcttgtggctttcatggaattggccctttttatctaggttgttgaattatgcgcacagtgtgtcttgtagtattctcttaccttttaatgcctcagggggctgcattaataacctctctttcattcccgatactggtaatttgcatcttttttctctttctctctcattggtcagactggcaagaggtttataagtcttattatctttttaaaaaagaaatagcatttaggtccatcagagtttctttttcttaattttactgatttctgcattatattctt

SEQ ID NO: 107823 - DNA, 316 bp, Homo sapiens
ttcgttaataaagttttattgagtgattattacatgcaaagcacaagtctgcaaaacagttcctttgaatgcttttcccctagggtggtaaattaataaacattaagtacttattttataccagttattgattcctgtccttcccttggcattttctcttggcagcctcccgagcacaacaaggagaggtgatgaggttggcatgtcgtttggatcccaaaactagcttccagatggctggggagtggctaaagtatcaactatcaacttttcttgatggctggttctgtgaattggaagtttttttcattactga

SEQ ID NO: 107824 - DNA, 414 bp, Homo sapiens
  misc_feature (1)...(414): n = a,t,c or g
nnnatttatttattttattattttgatggaattttatttttatttgtccatgatgaaacacaaagttccccccccgttttattgnnnnnnnnnnnnngcaggaaaaaacaatttttaaaacttatccccccaaaaaaccccccccacgggggtgctcccccatacccccctatttttgggggcccgggggaaaaaaatttttaccccccggggtataaaaacccctcactccnnnnnnnnnnncccccttttgtnnnnnnnnnntttttnnnnnnnnnnnnnnnnccccccccaatgtcccctttttttgggggggaaaagggggaaatttttttccccccaagaacaggggcgcgccagaaattggggtactccccttggtttttttttaccgaagaaaagaaggcaccccct

SEQ ID NO: 107825 - DNA, 506 bp, Homo sapiens
ttttttttttttagtagagaaggggtttctccatgttgctcaggctggtcttgaactcctgacctcaggtgatccacccacctcggcctcccaaagcgctgggattaccaggtgtgagccagcgcgcccagacaaaaatgtgtatgtgtgtcgttaaaggctgggtcaagcaaagcagtggaactggagaaagaatgaggaattctacctggctgtgatcaattcgtggtgaacaccactgtgcttggaccagccaagctgatgtcttttgttttgttttgtttgagacggagtctggctctgtcacccaggctggaggacaatggtgtgatcttggctcactggcaccctccacctcccgggttcaagcgattctcctgcctcagcctcctgagtagctgggattacaggcgcgcgccaccacgcccagctaatttttaaaaatatttttagtagagatggggtttcaccatgttggtcaggctggtcttgaactcttggcctta

SEQ ID NO: 107826 - DNA, 422 bp, Homo sapiens
  misc_feature (1)...(422): n = a,t,c or g
cccgcccgttatccccacccctttggaggccaaggccggcccatccccagggggggggatccaggccctcccggcccacctgggggaaccccgtttccccccaaaaatccaaaaatccctcgggggtnnnnnnnnnnnncccccaaccccacccccctggggggttaggcccgaaaaatgggttaaccccggagggggggccttccaggaggggcccttaacccccccccgggggaaaaggccaaaccccctttccnnnnnnnnnnnnnnnnnnnnttgctttctatattctaacgcatcctacagaactctagctgatactctttttcagagtttagttcatgggacataagaagttaatttttcttgtgtcaaccaaagctaatttcttctggttcttcctttatggagcaggattgagt

SEQ ID NO: 107827 - DNA, 418 bp, Homo sapiens
  misc_feature (1)...(418): n = a,t,c or g
aaaataatatcttagtgaccttggggtagacaaagtaaaaattaataaaattcaacttcctcaaaattaagcatttctgctcaccaagagacaccattaagaaaataaataaaccacagaataggaaaaaatatttgcagcatgtatataaggatatgtatgcagaatatacaaagaactcctatacaaatcaacagccgaacaatcctctaatacagaaatgagtaaaagacttgaacagatacttcacaggaagaaaatgaatagtcaatcaacacatgaaaaggtgattaacaatattagtcagtgnnnnnnnnnnnnnnnnnnnnnnnnnnnnnnnnnnnnnnnnnnnnnnnnnnnnnnnnngaaaaaatggccaatgccaaatcctgccatgtggaggaactgtaactttcat

SEQ ID NO: 107828 - DNA, 426 bp, Homo sapiens
  misc_feature (1)...(426): n = a,t,c or g
aaaagagtcctgttttgaaggaggagtggatcccagaaggtcccagtactgtgtctcactggtactagctatgggcctccctctccaggtgtcnnnnnnnnnnnnnnnnnnnncagggggaaagaaggcccccctggggcccccccccaaaagggagggggtgggtttgggccaaagggaannnnnnnnnnnnggggtaaagggaattcccggccccaaccccccggagaggggggaaaaagggggcccgcccaaaggccggggaaaatttgggattttaagaaaaaagggggggttccccagggggacccggccaagttggaacccaagaccccggggggaccccccgcctggggttcccaaggggggggaaataccgggagggacccccggcccggggatcccttttaaacaaagaaagggttt

SEQ ID NO: 107829 - DNA, 452 bp, Homo sapiens
ctgagtcttgctgtcgcctaggctggagtgcagtggtgcaacctcggctcactgcatgctccgccccccgggtttcactccattctcctgcctcagcctcccagcatggtatatctttctatccttttacttttaacctcttcatgtcttttttattcaaagtgcattttcttaaggcagcatatagttgagtcttgtcaggtttaaaaagcccagtctaacaatctctgccttttatttggggatgtttagaccatttgcatttaatacggattatccatgtaattaggtttaactcaatcatcctattatttgttttctcttggtcctatcagttatttgtttcccccttccctctcctcctgctttttttttggaataattgaatattttttcttattccattgtctagctttcttctttttgttggcttattagctgtaactttgttg

SEQ ID NO: 107830 - DNA, 379 bp, Homo sapiens
  misc_feature (1)...(379): n = a,t,c or g
ctggaataaatatagatatatagatcaatggaattgaataaagagtccagaaatagatcctgacatttacagtcaattgattttggacatgtgtgtgccaagggagaaagaatagttttttttaacaaatgatattgggacaactgcatgcaaaacaatgaaattagatcctttccttacactaggtgcaaaaattaacacaaaattaaccaaaacttaaatatgagttacagttagaaaacataagtgtaaatctttgtgaccttaggattaggaaatcgtatcttggatatgacattaaaagcatcagcaaccaaagaaaaaacataaattgnnnnnnnnnnnnnnnnnnnnnnnnnnnnnnnnnnnnnnnnnnnnn

SEQ ID NO: 107831 - DNA, 1245 bp, Homo sapiens
aaagatgaagaagaagggtgaaggacttttacccaagtaatactgcttgccaaacatttggttaacaaggcacatccctggcacagccctacatgccttaaaccttgaattcaatacaacacatgtttttaatgagctcccagattgggttcaaaagtggttgggggcaaaagtggctgggggccaaagctacagatttaacaacatctcaagcaaagcaattgtttaaagtacaggtctttttcccaaatggagtctcttatgtcttccctttcctatgtagacacagtaagagtctgtaagagtctgatctctctttcttttccctacatatcccccttttcggttttgacaaaaccaccaccatcatcatggccccttcttgctggtcgctgtctctctggagctgctggatacacctgtagactgattatcagggcaggtcccccgatagtgttgggtggtggtaatgcaatgatgaagatggcaggcaaaactctgccctccaggagtttcgcgaagggtccgcggcttctttcttgaagtcagtgagaccaagaacccaccagttccggacacactatgctccacttcggggctcccctgccctgcgtcaactgcactctggcctgggtggcagagagagagactctatcgttacatctcccttgtcaggcacatggtaggcgcttaaaaagtatttgatgaacgaatggcttgtttagtgacagtccaaaggctgggggacagagggaaagctccctcctttcgggccccagacgggtggcgctgatggagagaggaggctaggataaggcctccaggaccgaagcatgcacccgtaaggcccctgctgaaaagaccttcctgaaggcggaggaactgcgagagtgcctacgttagcccaaggcctgacccgacgatcccagggaccctcgccctaactggccccgcctcccgggccccaaacctggactcggccccgcacgaagctccggatcctggggcccgcccctggccccgcgtcggaagaccatgggctcgctcctgggcctgcctcaaaccctccgcaggtaacgcctcccgaacttgagccacattccgatcccctcctcaaacccctccccgtttcccacaccctggacccctcgctccgtctcggccccgccccaagcccagctaggtctcggcccctgagcccagccccgaccggcctcccagtcccggacgcgtgggtcgacccgg

SEQ ID NO: 107832 - DNA, 381 bp, Homo sapiens
  misc_feature (1)...(381): n = a,t,c or g
ctggtacagaaacattttataaaatctaacatccatccatttacgacaaaaactctcagcattctgggaatacaggttaaaacttcctcattcttttaaagacgacccatataaaacctacacttagcatcatatttaatgattaaaaacagaaagctttccccctaagattggggactaggtatggatgtttgnnnnnnnnnnnnnnnnnnnnnnnnaacactagaaattctagctggtgcaactgggcaagaaaaagaaatgtacacagatcagaaagaagacatataactgtccctatttgcagatcacataactatatagacctcccaggaaatctattaaaaactcttaggattaaaggggtcagcaaactggaca

SEQ ID NO: 107833 - DNA, 384 bp, Homo sapiens
ctatttttagtagagacggggtttcactgtgttggtcagctggtctcaaactcctgacctcatgatctgcctgcttcagcctcccaaagtgctgggattataggtgtgagccaccacgcccgactcccatgcttctttaaaagcatccaatcccttctcagagcctcaagatggcaccttctattcatggagaccctggaatctttggctctgcctctcctaggctggctcccgggtgtccttttccttctgctccaggctcccggtcctgcctttctctctgtcttcaccatctcttgggtcccttccttctgcctccgcccagactaggattcagacacctcatctcaatgtcttatctcacagtggcagagaggactcaga

SEQ ID NO: 107834 - DNA, 394 bp, Homo sapiens
  misc_feature (1)...(394): n = a,t,c or g
cgcggagaaatttggtttcccggggtgnnnnnnnnnnngatccctggcctctattcacccccttcacaaatattaacccaaagtggattccagatctaaatttaaaagctaaaactatcaaattcttacaaaaaataaaaaagggagtctatctcctccaatggagtagccggtggtttttttcaggcaagccccagaaagcaataaccataaaaagataaaatttataagttaggcttccttnnnnnnnnnnncttctgctcatcaaaagccaacaagaaaattaataggcatgccacaaactgggagaaattattttaaaaagatgtatctgacaaagatctggtatctaggatataaaaagacctccaattcaattaaaaaaataaaaccc

SEQ ID NO: 107835 - DNA, 337 bp, Homo sapiens
  misc_feature (1)...(337): n = a,t,c or g
gagaagcttgcnnnnnnnnnnnnnnnnnnnnnnnacaaatatcaaacaaagatggcaggggaaaaaaagaaagccaaccaatatcctttatgaatacagacacaaaaaatcctcnnnnnnnnnnnnnnnnnnnnnnaattcagaaatatattttttaaattatacactgcaagaaattaaggtttattccaaatatgcaaggctcattcaaatgtgtgaaaatcaatcagtgcaacccaccacattaacaagctattattttgtacaactgcatatgaatctacgattatcttaaaataaaagttttaagtaaacaaatgaaagaacctgccccaaa

SEQ ID NO: 107836 - DNA, 366 bp, Homo sapiens
ttgttttaatttaatctaacgaaattgtgagctttttgagcagcttggagagtacaaattccagaatgcgctattagttcgttacaccaagaaagtaccccaagtgtcaactccaactcttgtagaggtcttaagaaacctaggaaaagtgggcagcaaatgttggaaacatcctgaagcaaaaagaatgccctgtgcagaagactatctatccgcggtcctgaaccagatatgtgggttgcatgagaaaacgcccgtaagtgacagagtcaccaaatgctgcacagaatacttggtgaacaggcgaccatgcttttcaggtttggaagttttatgaaacatacctttctcaagaaggtaatgttg

SEQ ID NO: 107837 - DNA, 459 bp, Homo sapiens
ttttgagacggagtcttgctctgtcgcccaggctggagtgcagtggcgcgatctcagctcactgcaacttccgcctcccgggtttatgtcattctcctgcctcagcctcccaagtagctgggactacaggcgcctgccaccacgcctggctaattttttgtatttttagtagagacggggtttcaccatattagccaggatggtctcgatctcctgacctcgtgatccacctgcctcagcctcccaaagagctgggattacaggcgtgagccaccgcacccggccgaaaagatacttttctaatccacccactttaatcaactaaaagcaatggaataaacaaggcagaagttttgcaaacatggaaaggggagtgtttggaaaggatgcaatggtacagcagctcctagttttatatatatgtaatgtatgtatcttacacatatatccatatacata

SEQ ID NO: 107838 - DNA, 381 bp, Homo sapiens
  misc_feature (1)...(381): n = a,t,c or g
gcaagaattcaagtatcaaggcctatcagccaattaaaagccgtaagatagtaatgactttttttcnnnnnnnnnnnnccttttttaaaaagggggcccccctttggcccccagctgggattccagggccccaatttaaattaatggaacccggttcccgggtttaaggaagttttctggcttaaccccctgaataaatgggaaaaagggggggccccccccaaccccagcaatttttggttttttaagtaaaaagggggtttccccttgtgggccgggggggcccaaacccctggccctaagggaattggttggcccgggttcccaaactttcgggattaacaaacggggnnnnnnnnnnnnacccaccaccaatttttt

SEQ ID NO: 107839 - DNA, 441 bp, Homo sapiens
  misc_feature (1)...(441): n = a,t,c or g
tgccctcaattcggcacgagaaaaatgtcccaacctattaggaaacaaggaaaggcaaaataaaaccaccatgagacgccatttcacacacaacttgcacatgttaaattgtgacagcttcaaagattggtgagaatgtggagtaatgagcactctcatacttggtttgtgggagtaaattttggagcaacaatcttgagaacaaatttggcattatctaataagattaaagatgagcaagcctgtgacccaaccatcctactgctggatacttaccatgtatgctaggagacttggataagattgtttcaaactgcaatgttaagaacagcgatgttaggagcaccacanacactgatgatgaccaaaatatccataaatagtagaatgannnnnnnnnnnnnnnnnnnnnnnnnnnnnnnnnnnnnnnnnnnnnnnnnn

SEQ ID NO: 107840 - DNA, 357 bp, Homo sapiens
  misc_feature (1)...(357): n = a,t,c or g
ttgaacatttcaggatagaccatatgttatgccataaaacaagcctcaattaatttaacggatggaaatcatactatgttctctgaccataatggaatgaaattagatatcaataacagaaggaaatttggggaattcagaatatgtgaaaattaaactacacacactgaaatcaccaatgattcaaagagaaagccacaggaaaattggaaaatactctgagataaaggcaaaatatatcatatcnnnnnnnnnnnnnnnnnnnnnnnnnnnnnnnnnnnnnnnnnnnnnnnnnnnnnnnnnnnnnnnnnnnnnnnnnnnnnnnnnnnnnnnnnnnatgttttaccaaaattgaaa

SEQ ID NO: 107841 - DNA, 487 bp, Homo sapiens
tttagttaaatgcaattaaagccaggtgcagaggtacccatctgtagttcctgctaattggaaggctgtggcaggaggatcatttgaggccaggggtgtaaaaaaggatattcatacactgatgttcacagcagcattattaccatagcagcattattaccattattaccatgactctgcctgtgaacagccataggactactgcctgggtaaaagagtgagatcatgtctcttaaaaagagaaattaaaaaaaaattatataccataactgagatttattgctggaatgcgaggatggttcaacacacaaaagtcaataaatacaatacattcacataatgaagggaaaaaaaattttatgatcatctcaattgatgcagataaagcatgtgacaaagtcaacattttttccataaacactctaccaactaggaaaagaaggaaaatccagcataatgaaggccaggtatgaacattccacagcta

SEQ ID NO: 107842 - DNA, 392 bp, Homo sapiens
  misc_feature (1)...(392): n = a,t,c or g
ggcccttaaccccccaattaaaaggttttggggggccggcccagggggtttcagcccgttatccccccccctttgggggcccaaaccaggggggcccctggggcccctagtttaaacccccccgggcccccttgttaaannnnnnnnnntccaaaaagttttaaatttttgtccagcccgggggggcgggccctttattcccccctcccccgaggattaaaaaagaaaatttccctagtccccgagggttagggcccccttaacttaaatggccggcccccccgccttttccnnnnnnnnnnnnnnnnnnngcataatagatatgggtcaggaacttaatacaaatattacattatctcttctggattttgtgatgtctatgtaggcatttt

SEQ ID NO: 107843 - DNA, 391 bp, Homo sapiens
  misc_feature (1)...(391): n = a,t,c or g
gcgctaccaggaccgacgggaaggttttccagtttcttaatgcgaaatgcgagtcggctttcctttccaagaggaatcctcggcagataaactggactgtcctctacagaangaagcacaaaaagggacagtcggaagaaattcaaaagaaaagaacccgccgagcagtcaaattccagaagggccattactgggtgcatctcttgctgatataatggccaagaggaatnagaaacctngaagnttagaaaagggctcaacggggaacaaagcttatcaggggcttgctaaagggaaggcaaaaaaaggctaaggaaagccntcttaaaaagacttgcaattggcttgcttgctaaggcacctacaaaagggcagcaccttagccaaaaga

SEQ ID NO: 107844 - DNA, 366 bp, Homo sapiens
  misc_feature (1)...(366): n = a,t,c or g
gagcnnnnnnnnnnnnnnnnnnnnntgttcttcaaaacctaaaacctcttcaactcacacctgacctaaaacctaaatgccttattttcttctacaatgctacttgaccccaatacaaactcagcagtggttccaaatagccagagaatggcactttcaatttttccatcctacaagatctagatacttcttgtcataagatgggcaaatgatctgagatgcctgatgtccaggcattcttttacacattggtccctccctagtctctggtcccagtgcaactcatccgaaatcttgctcctttccctcccacctgtcccctcagtcccaaccccaaagtgcgctgaagtctttctaactttcttg

SEQ ID NO: 107845 - DNA, 368 bp, Homo sapiens
  misc_feature (1)...(368): n = a,t,c or g
nnnnnnnnnnnnnnnnnnnnnnnnnnnnnnnnnnnnnnnnnnnnnnnnnnnnnnnnnnnnnnnnnnnnnnnnnnnnnnnnnnnnnnnnnnnnnnnnnnnnattgcctctttaataatggtgctagaccaccaattgaaaaagaattaaattagacccatgccttgcccaatacacaagaataaacaccaaatggatcaggcacctaaatagataaaatgaacccacaaggaaagcatggacaaattcctctgtaatctggatatagggaaaggctttctagctatgacactaaagctagaaacaataaaagaaaaaattgatacaatctgaccgtacaaaaaattttaatgggcaatgcaataaacac

SEQ ID NO: 107846 - DNA, 324 bp, Homo sapiens
cgcgcacgagttcagaaggcacaacataatattgagaactcgaatccagcaatatatagtataaaaaggataatacattgtgatcaatgaggtttattctgggaatacaaggctggttcaaaatttgaaaatcagtcaggataatttagtctattagtacactaaggaaaaccatatgatcatctctttagatggagaataagtatttgacaaactccagtatactttcatgataatttttacaggccaagcgtggtggctcatgcctggtagtcccatcactttgggaggctgaggcaggagtatctcttgagcctaggagat

SEQ ID NO: 107847 - DNA, 241 bp, Homo sapiens
atataatcaatagtgaaaaggcatagaatgggagaaaatatttgcaaatcatgtatctgataagtggttcatatcccaaatatgtaaagaactcctacaattcaacaacaacaaaaaaaaacctgattttaaaatgggcaaaagagttgagtagacatttctccaaagaaaatatataaattgccaataagcacatgaaaagatgctcaacataattaataattagggaaatgcaaatacg

SEQ ID NO: 107848 - DNA, 400 bp, Homo sapiens
  misc_feature (1)...(400): n = a,t,c or g
ggtcaagaacctatattggggaaagacagtctcttcagtaaatggatctgggaaataggatatccatatgcagatgagtgaaactggacccctatctcttcctgtaatannnnnnnnnnnnnnnnnnnnnnnnnnnnnnnnnnnnnnnntatcgaactatgaaaatactaaaagaaaaaattggggaacctctccaggacagtggagtaggtaaacatttcttgagtaataccctacaagcacaggcagccaaagcaaaagtgaacaaatgggattaggtaaaaaaccttctgcaaagcaaagacaataattttaaaaataaagnnnnnnnnnnnnnnnnnnnnnnnnnnnnnnnnnnnnnnnnnnnnnnnnnngaaattcaaaccagaatgtatagaac

SEQ ID NO: 107849 - DNA, 330 bp, Homo sapiens
ggactgcttgagctagggaggttgaggctgcagctgcagtgagctatgatcgtgtcactgctctccagcctgggtgacagagcaagactttgactcaaaaaaaaaacccgcaattctagcaagttgtttaaaacatttgaatcccttgtcttctcattgatttctcagaatttggtttattcttaccaaaaagttattgttatcaatgcaaagtcacacttcagtgttccaaaagtctactttaaaagtaaatacatactctaagttgtctcctgaaaagtaatgtcatactttcatatcactttttggccccttaagacacactcaatg

SEQ ID NO: 107850 - DNA, 356 bp, Homo sapiens
  misc_feature (1)...(356): n = a,t,c or g
cgagataaacaaaatagagggtagaggaacaatagagaaaatgaacaaaatcaaaagttggttctttaaaaagatcaacaaattgacaagcctttagctagattgactaagaaaataagactcaaattactaatgtcagaaatgaaatttgggacatttctactgatcttatagaagcnnnnnnnnnnnnnnnnnnnnnnnnnnnnnnnnnnnnnnnnnnnnnnnnnnnnnnnnnnnnnnnnnnnnnnngcacacaattgacttaagaagaaatagaaaactgacccatcagaacagataacaaaaggttgaatcagtaatcaaaaacctcccaacaaagaaaatctcaagaccag

SEQ ID NO: 107851 - DNA, 353 bp, Homo sapiens
  misc_feature (1)...(353): n = a,t,c or g
ntagaagacactccccaaatgacccctcccatatatggtgaaacgattttcaacaagggtgccaatgcagtccaatggggagtcttttcaccaatggtgttaagaaaactggacctccacatgcaaaggaatgaagttagatgcttannnnnnnnnnnnnnnnnnnnnnnnnnnnnnnnnnnnnnnnnnnnnnnnnnnnnnnnnnnnnnnnnnnnnnnnnnnnntgaaagagaaggggaaaagcttcacaacattcgatttggcagtgatttcttggatgtgacaccaaatacacaggcaacaaaagaaaaaaacattaagcaggatttcaggaaaattttaaaactttgtcc

SEQ ID NO: 107852 - DNA, 341 bp, Homo sapiens
aaaggtcttatttgctttaattctcagaatcccgaatcccgtaaaaagtagaccaagaagaaggtagactgggaaagggatcaagtccctcggacccaaagaaacccctgacaactgaaagctccaacttctcccacccaggccccagaccccggcgtcaccccctcgtccctctccaaatggccccaggccgccgcggggtctattcggacgaactgacagactccaagtggggctcggagcgccgtaggccatgacagcccctccgagaagcgggccccgagccccgagcaccgcgcgccaacggctggcccacccctagcgcatgcgccccggtgccc

SEQ ID NO: 107853 - DNA, 400 bp, Homo sapiens
ttgaggtccaggagattgagcccccggctggcccaacacgatgaaaacccccgtcctcctacctaaaaaaaaaaaaaactagctgggtgtggtggcacatgccctgtaagtccccagcctagttgggagatgaggcaggagaatcacttgaacccgggaggcggaagctgcagtgagcccaagatcgcatcactgcactcaagcctgggtggcagagagagactcccatctcaaaaaaaaaggtaaggactcctgaagaaaaggcatttcttttccttggaaaggctgattcgtttgggaagtttttagagatcctcatatacaatgaatttcctttttccagcatcctcacaagttctgcctgagatttctcgcaaacaagtaatccaaactgaaagtc

SEQ ID NO: 107854 - DNA, 403 bp, Homo sapiens
  misc_feature (1)...(403): n = a,t,c or g
aactggtggttcatgaagatctaactgaagactttgtacaacatcagtaaaatcctcagcatgaaaacaaatcacatctttggctatgcgaggttggtcactcctaacattaacaaaattaagtttcagagaccaacatctcacaatgaaaaatgatgacaaatttcagctcttttgttcttggaaatgcttctaccagcagagaaatagatgcatagcttctaaggactagggatacaatttttttttaatttgaaaaaaactaaagcttaaaaagccataacactcacaatcgctggtgggaaactaaaaccaaaatggctaaaaagaatagttttattctaaactagttgcatttgcagccctctcggcactttgcatctgcatgtgctgagctttgtan

SEQ ID NO: 107855 - DNA, 497 bp, Homo sapiens
gaaggaacataactcaatgaaggtcatatatgacaaacccacagccacctggggaaaagctaaacaccttctctcttagaactagaacaagacaaggatgcccactttcactattcttattcagcagagtaagaaaagtcctcaccagaacaattaggcaagtaaaagaaaaagggtatccaaattggaaaagagaatgtcatattgtcctttgcagatggcataatcttatacatagaaaaacctaaagattccaccaaaatcttttagaactggtaaaggaattcaataaagttgcaggataaaaaaatcaacaaacaaaaattagtaggtgtggacatgatggctcatgcttgtaatttcagcactttgaaaggatgaggcgggtggattgcttgagcccaggagtttgagactgtcctgggcaacatggcaaaacctcatcagtacaaaaatgagctgggcgtggtggcctgcacctgaagttcagctactca

SEQ ID NO: 107856 - DNA, 359 bp, Homo sapiens
  misc_feature (1)...(359): n = a,t,c or g
nnnnnnnnnnnnnnnnnnnnnnatagttctctatctggtaaagaacttgaatttgtagctaaaagcccctgaaaaagacatctccaggtagtttcactcacaaattctaacaaacatttaaagaagaaataacaccaattctacacaatctcatccagaaaacaaaagaggagagaacacttcccagttcattttgtgaggccaacattactttgatatcacaatcagacaagacaataaaattaccaaccaaagatcnnnnnnnnnnnnnnnnnnnnnnnnnnnnnnnnnnnnnnnnnnnnnnnnnnnnnnnnnnnnnnnnnnnnnnnnnnnnnnnnnnnnnnnnnnnnnnnnnnncn

SEQ ID NO: 107857 - DNA, 302 bp, Homo sapiens
gaaaactacagaccaatatcttttatgaacacagatgcaaaaatcctcaacaaaatattagcaaatcaaatccaacaatgttcaaaaagaattacacatcgtgaccaagtaggatttctcccaggtatgcaaggtcaattctacatttgaaaatcaattaaatccatttatgcgggttcaccacatcagtaggctaaagaagagggaatcacatgatcccttctatatgaggccaaaaaagcatttaatacccattcatgatttatgaaaaaaaacaaaaaattggccttccaggaaactag

SEQ ID NO: 107858 - DNA, 387 bp, Homo sapiens
  misc_feature (1)...(387): n = a,t,c or g
gatcttttgcaaccaatttcccaggnnnnnnnnnnnnnnnnnnnnnnnnnnnnnnnnnnnnnnnnnnnnnnnnnnnnnnnnnnnnnnnnnnnnnnnnnnnnnnnnnnnnnnnnnnnnnnnnnnnnnnnnnnnnnnnnnnnnnnnnnnnagagagagtaggagggaggaaggaagaaaagataccaaatgtcaaaactcaaatgggaagaatagactactgagtaagtatgtatattttcaagaaactgaatcaataattaataaccttccaaaatagaaagcaccaggaccagatggttttactgttgaattttaccaaatgtttacagaataaattatatcagttatctgcaatctcttctagaagacagaagtagagggaatact

SEQ ID NO: 107859 - DNA, 361 bp, Homo sapiens
  misc_feature (1)...(361): n = a,t,c or g
cccaccggggccccgggggttctccccccccgcccgttatattttgggtccctaacccccaccgcctttttccctgttgggccagaaggtttttaacttcccacccccgggggtnnnnnnnnnnnggccttttaaaagggtggggtttccaaggggaacccccgggggcccttcccctttttttttccccaaaaagagccttcttttgtccggggcggggggtcccccctggggcaccaaaatggaactttgtttccagnnnnnnnnnnnnngtagcatactctctatttcacatttttattttccccaaagcaatatatactgaaaccccctccgtatcagttcataggtatcattcttc

SEQ ID NO: 107860 - DNA, 294 bp, Homo sapiens
tggtcagagaacagaatctatgtgatattaatatttggtatttactgaaacgtgctcttggaataatccttggtcagtttgtataaattttccatttatgcttggaaatattaagaattcttgaattatgactgcatggttttgttttgttttttttctccgagatggagtctcactctgttgccgaggctggagtgcagtggcgcaatcttgactcaccacaacctctgcctcctggggttcaagtgattctcctgcctcagcctcccgagtagataggactacaggcacacg

SEQ ID NO: 107861 - DNA, 399 bp, Homo sapiens
ccagccctacagagaccagagaatcaagttttacaccacgtgggctactgtactctatacaatatattgctaaaatttctttcagcatttaaaacaaaaaaagtatgggaaaatgcaaactctctcctggaacagaaataatatattcagagcatctaacactgtctggcagataggaaagctcaataaatgttactatcatagtggttatttagaaaactatccaatttttgattttattatttacttattgagatggagtcttactctatcacccagactggaatgcagtggcaccatcctggctcgctgcaacctctgcctcttaattcaagcaattctcctgcctcagcctccttaaaaactgggactacaggcgtgtaccacctgtgccgaagt

SEQ ID NO: 107862 - DNA, 355 bp, Homo sapiens
  misc_feature (1)...(355): n = a,t,c or g
cagacaaaacacacttcaagataaaagctacaaaaagagacaagggcattatatgatgacgaagagattaattcagcaagagaatataacaattgtaaacatatacacttaacactagggcacctagatatataaagcaaatattattagatctaaagggagagatagactacaatnnnnnnnnnnnnnnnnnnnnnnnnnnnnnnnnnnnnnnnnnnnnnnnnnnnnnnnnnnnnnnnnnnnnnnnagaaacatcagatttaaactgcactatagaccaaataatatgaacctaacgacatttacagaatatttcacccaatagctgcagaatatgcattttttttcattcacc

SEQ ID NO: 107863 - DNA, 343 bp, Homo sapiens
ctatgggttgctgtttcagtctgttgatactattctttgatacacaaaagttttaaattttcatgaagtccaacttattttttttttcttttattgcccactcttttttttttgacagggtcttgcactgtcacccaggctagagtgcagtggcaaattctagactcactgcagcccctgcctcccaggttcaagcaatttctcctgcctcaccctcccaagtagctgggattacagtcatgcaccagcacacctggctaatttttatgtttttaatagagagggggtttttcccatgtgggccaggctggtctcaaactcctggcctcaagtgatccgccca

SEQ ID NO: 107864 - DNA, 462 bp, Homo sapiens
gcgaaaccccgtctctactaaaaatataaaaattagctgggccatgatggtaggcacctgtaatccccagctactcgagagactaaggcaggaaaattgccttggaaccctgggaggcagaggttgccagtgagcagagatccacgccattgcactccagcctgggcccacagagtgagactatgtctcaaaaaaaaacaaacaaacataaataaataaataaacttccattgttggtaaataatatttgaagtgaatatacgaaaaaacctctgaagatttaagcaccaaaataacattgtttagatctgaatggcagaataacaaattattttatttatttttttcttggtgatttctatttcttgaatgttcacagaaaatacatatcattaaattgttacttttaagaaaaatgtaagttaatttttttttcattaaacaattttttttaaaaatgac

SEQ ID NO: 107865 - DNA, 441 bp, Homo sapiens
cattaacattaaactcatggccaaaaccaccataactcatgcctaaacaaagcttatatctaacactcgcatattttctctgtaagacataccacagcctgggcgacagagccagactccatctcaaaataataataataatagcaagtaacttcaatacatcattctctgtaatggataaatcatccagtcagaaatcaataagcaaacaacagaactgaacaacactatgaacccaatggacctaatacgcatatacaaaactttttgccaaataacagaagaatagaattcttcccaagtgtacacagaatattctttaggctatataatcacaaagaagtatcaacaaacttaagaagatgtaaatcgtcctaagtatcttttccccccataatggaatgaaactagaaatcaataacttaagaaaacaggaaaatt

SEQ ID NO: 107866 - DNA, 342 bp, Homo sapiens
  misc_feature (1)...(342): n = a,t,c or g
aaaaatacttaggaattaaccaaagaggtgaaatactgaaatttcagtgtacataggaaattgtaaaacactgatgaaggaaatttaaaaagctataaataagtggaaagatatcccatgttcatagacttaaagaattattattgttaaaatgtctttattgccacactacacaaagcaatctacagattcactgcaattcctatcaaaattcccatgacatatttttaagaaatagaaaacacagtttcaaaagtcatgcaaaaccacaaaagaccataaatagccaaagcaannnnnnnnnnnnnnnnnnnnnnnnnnnnnnnnnnnnnnnnnnnnnng

SEQ ID NO: 107867 - DNA, 349 bp, Homo sapiens
  misc_feature (1)...(349): n = a,t,c or g
ctcatttctcgccatgtataaaactcaaatcaaaatggattaaagtttatatataagccctgaaactatgaacctactagaagaaaacattggggaaatgctttaggacatctgtctgggcaaagatattttgggtaagatctcaaaggcacaggcaacaaaattagacaaatgggagtacctcaagtaaaattannnnnnnnnnnnnnnnnnnnnnnnnnnnnnnnnnnnnnnnnnnnnnnnnnnnnnnnnnnnnnnnnactgccaagggattaataagcagactgtataaagaaaattcaatagcaaaccagcaaaaccgaatcaattttgaaatgggcaaaagatc

SEQ ID NO: 107868 - DNA, 299 bp, Homo sapiens
aaccaacaacccaattgaaaaataaacaaaagatctgaataaatactaagatacacagatgggaaataagcataagaaaggatgcaaaacactttaagtcatgaaggaaatgtaaattaaaataagataccagtacatacatattagagtggtcaaaatccagaacactaacaccaccaaatgctggtggggtgtggagcaaaagggactctcattcattgctgatgggaatgcaaaatggtgcagtgactttagaattccgcttgaccgtttcttaagaaaatgaaacatacccttac

SEQ ID NO: 107869 - DNA, 340 bp, Homo sapiens
aagggggagagcatcacatcaagggaacatcccatgggaaaaagaatctgaatggcaggccttgagtcccagatctttccactagtgggacgtttcttatagcagagacacaattgcagtgctgggtgcagtaaagaaagtctacacctctaccccaacaatcaggcagcatctctgatcataaaggggcttggaaagggggtccttttcccactggtacaccacttgcacacacagctgggggctttttcccagagggaattgcagtgttaggatgcacatatagatggccttccaggaacaatttaaggtgattgcatccccacaggaggagcacttg

SEQ ID NO: 107870 - DNA, 650 bp, Homo sapiens
aaaaaaagaaatggccttttgttagatttaaaccgacatactgaaaaattacaaaacattgctgaaagaaattaaagacttaaataaatggaaagacatccatgttcatagattggaagacttaatattgttaagatggcaatactccaaatttatccacagattgaacacaatccctataaaaatcttacttgccattcttgcagaaattgacaagctgcttgtgaagttcatgtggaaattcaagggaatcacaataggcaaaaatgttggcaaaattgaataaccttacaccgcccgtggttttaaagcctattacaaagctgtagtaatcaaaactgcacagtaataaaaactggcataaggagagatataggtccatgggaataaaatgggagagttccagaaataaacaccatctatttatcatcaagtgattttcaaagagggtaccaggactattcagtggggaaaggagtagtctccattcaacgaatggtgctgggaaaaggatatctgcatgcaaaagaatgaggctgggcacctagggcacaccaggcacaagaagaggctgggcacctatttcacaccatgcacaaaagttaagtccaggtggttcaacaggcgtgttagtgcggaagaaaaaaaaa

SEQ ID NO: 107871 - DNA, 394 bp, Homo sapiens
  misc_feature (1)...(394): n = a,t,c or g
gggtttttccatttgccccaccaagttttgggggttctcccccccccggaaaacccagccggggttatagccctttttccgaaaaacccccccgcccccccgggggccatgggggggaaagaacccccaatttatttaaaggtgggcccggccaaagggggttcttggaaagggccaaaaggttaagggggcccctttgtttcaaaaagcccttttttaaccaataaggtttagccccccgggggggccaaataggccaaaaagggccccaagggggccnnnnnnnnnnnngaaagttggggggaggagggaataggatctgagaaatttactaacgttaggaaaaatgccatggtcttctcaatggagactttccccaagaaaacagtaccac

SEQ ID NO: 107872 - DNA, 392 bp, Homo sapiens
  misc_feature (1)...(392): n = a,t,c or g
ctggaagttctagtcagagcaattaagcaagaaaaagaaacgaaaggcacctaaattggaaaggaagaaatacaactaaatctatttacagataacataatcttatatgttaaaaaaaatactgaggaaaggaatccactaaaaatctacttgaatgaatgagtttagcaatgttgcaggatacatggtcaacatacagaaatcaattgtaattttatacatttgcaatacacaatcaaaaaataaaattaagaaaaacatttgattcataattgtatcaaaaagaataaaacccttnnnnnnnnnnnnnnnnnnnnnnnnnnnnnnnnnnnnnnnnnnnnnnnnnnnnnnnnnnnnnnnnnnnnnnnnnnnnnnnnnnnnnnnnnnnnnnn

SEQ ID NO: 107873 - DNA, 537 bp, Homo sapiens
tttatttttgaggagtcttactctattgagtgcagtggtgtgatctcggctcgctgcaacctctgcctcccgggttcaagcgattgtcctgcctcagcctcccgaataggtgggattacaggtgcccgccaccatgcccagctaatttttgtatttttagtagagacggggtttcatcatattggccaggctggtctcaaactcctgaccttgtgatccacccacctcagcctcccaaagtgcttgggattacaggacatgagcccccgcgcccggccaagtttaggaagatagtttggcagtgtccaccaaagctgagcaccagccattctggccctagctgtgtggcacagggagaagtggggggacacacacttcacctttaggaaagtgttccccttcaattcagcagcagggatttattttaggccccaattggaacaacccaagtatccactgtgagaggaacagtcagatccactgtggagtgttctcacagtgggacgccacacagcagttaggaatgagctacagcta

SEQ ID NO: 107874 - DNA, 409 bp, Homo sapiens
  misc_feature (1)...(409): n = a,t,c or g
aaattttttcnnnnnnnnnntaaagggttttatggtaaccaaagtagtattcccttatttgtaaacaaaagggccctagggtgtttttttaaaaccttctaatccccaactggttggaatttatcatcccctggttttaccaggggccctggccccttgccgggggggacgccaagcaaatttccttttggggcaaaggacaagggtggtgccccagggtttccgggtgctatcaagggtttaactggccccccaggttttttaacggggttaaaaaactgggatccggtaagggtaaagggcttttaattttggttttccccaaacaaannnnnnnnnnnnnnnnnnnnnnnnnnnnnnnnnnnnnnnnnnnnnnnnnnnnnnnggaaatgggggctatgaaattgtt

SEQ ID NO: 107875 - DNA, 397 bp, Homo sapiens
  misc_feature (1)...(397): n = a,t,c or g
cctaataccataataagacaaagacattacttggaaacttacagaataacatcctgctnnnnnnnnnnnnnnnnnnnnnnnnnngaattaaagcaaattaaatccatcaatataaaaaatgatatcatattgtgaccaagtgggatttaccctgggaatgcaaggttgagtcaatattcaaaaactaatccatgtaattcaccatctgaacaggcttatgaaaagccatgtgaacttctcactgtaagtataaaaagcaaagcaagnnnnnnnnnnnnnnnnnnnnnnnnnnnnnnnnnnnnnnnnnnnnnnnnnnnnnnnnnnnnnnnnnnnnnnnnnnnnnnnnnnnnnnnnnnnnnnnnnnnnnnnnnnnnnnnnnnnnnnnnnnnnnnnnnan

SEQ ID NO: 107876 - DNA, 403 bp, Homo sapiens
  misc_feature (1)...(403): n = a,t,c or g
gaaaatgaaactaagaaaattattccactgacaatcgcatcaaaaataatacaatacttaagaataaagttagctaaagaaatgtaaaatgtctactctgaaaactacaaaacattgttgaaaggtattaaaaaatatctaaagaaatggaaacacgtcctgtgttcatgggttgaaagacttaatattgttatgactgcagtaccctcaaattggtgcagattaaatgtaattactgtcaaaatcccagctgggtgttctgtagaaattgatatggggattctaaaatcatatagaaatgcaagtcacccagaatagtcaaaaaagtcttgnnnnnnnnnnnnnnnnnnnnnnnnnnnnnnnnnnnnnnnnnnnnnnnnnnnnnnnnnnnnnnnnnnnnnnn

SEQ ID NO: 107877 - DNA, 385 bp, Homo sapiens
  misc_feature (1)...(385): n = a,t,c or g
tttttggccaccctttgggaaccttaaaaaattcccccgcccggggggggtggtccttcccttttttcccccccctttggggggccaagggggggggttcccaaggtccggttttttgannnnnnnnnnnnaccccgggtaaaccccgtttttttttaacatccaaaaattttcccggggttggttttgggtcccctttttcccccttctcccgggggtttggcccgaaaaatggggaaaccccnnnnnnnnnnncttccatttaaccaaattttttcccctnnnnnnnnnnntgggggcnnnnnnnnnncccccttccnnnnnnnnnnnnnnnngaaagtgccttgcaaacatcagaaataggtcatcaaacgtgctcgtgccg

SEQ ID NO: 107878 - DNA, 385 bp, Homo sapiens
  misc_feature (1)...(385): n = a,t,c or g
caataccataagcatgattcaaaaaggaaaatttgatatattggctttattggcatttagaacttctcttcataagacaccattaacagaattaaagaaacaaggcacagattgggagaatatcattgccaagcatatatttgataaaggtcctatatccataatatagaaagaactctcaaaactaaacagtaagaaaacatatgaactacttgttttgttttttaaatggaccaaagctttgaacagatacttcaccaaaagatagatgacaaataaacacatgaaaaatgcatcattaatcactaaggaaaatgcacattaacaccacaatannnnnnnnnnnnnnnnnnnnnnnnnnnnnnnnnnnnnnnnnnnnnnnnnn

SEQ ID NO: 107879 - DNA, 617 bp, Homo sapiens
  misc_feature (1)...(617): n = a,t,c or g
cttgagaactggctttcactgtccgtcttgtgttttctctttcttgtacagtagttttgattgcctctagaccccaattctagaacaaagtttagagttcctgctccttagagatactgttgatattgtggatattgcagatccagtcacagaactagcaggtggcttggtctcttttcttgtttggtttggtttttttctagacagagtctcactctgttgccccaagctggagtacagtgacgcgatctcggctcactgcaacctctgcctccgaggttcaagcggattcttctgcctcagcctcctgagtagcagggattacaggcgtgtgcgaccatgcccggctaatttttgtatttttacaaaatttcaccatgttggccaggctgtctctgacctcaggtgatccgtctgcctctgcctcccaaagtgctgagattacaggcgtgagccaccgcaccaggcctctttcttgtttttgaagctgtgtctgggtcatgcaacttaagagttatttcctgtaagcaatagctccaggcagagttggccagttntttcagccttctttataaataagggaactctacccccacgccgagccctatgcagtctca

SEQ ID NO: 107880 - DNA, 431 bp, Homo sapiens
cagtgcatgtccctttcaatataggcttgatttaatgaaaatgggattttatttatatatttttaaattcatgctattttgacagggggattatattttcagcgttgttttccatactacttttttcccccattcagcagtgagtgaaaaattatagaaattgacaggctggaactaaaattcatatggaagtgcacagacttacgatacccagaatttgttttgaaaatgaagaataaggctggaacttttacactctctaatttcaagagttattataaaatcttcaagaatgaaaggattgtggtcttaccataataataaacatatagatcaatggagcagaatatagccctcaaatagacccacgttatacggtcaattgttttttagtcaacaaatgatgttaaaacaactggatattggtatgg

SEQ ID NO: 107881 - DNA, 390 bp, Homo sapiens
  misc_feature (1)...(390): n = a,t,c or g
aagcccccttttactttattcacggttgggggaattgggttttcaaaacccggttcctttccgggcccccggggagaagggctccaccccggcccatggttggggggcattattcccgccccaacaaaaggggggagggggcaaaaaacccgggccccccccctgggaaaaaccccccnnnnnnnnnnnggaccgacttcccccccacgtggaaaaaagtcccgccccagtccctggggccaaaggaagccccggataacccccccggaaaagaggnnnnnnnnnnnnnnnnnnnnngnnnnnnnnnnnnnnnnnnnnnnnnnnnnnnnnnnnnnnnnnnnnnnnnnnnnnnnnnnnnnnnnnnnnnnnnnnnnnnnnnnnnnnnnnnnn

SEQ ID NO: 107882 - DNA, 359 bp, Homo sapiens
tgagtttaaacacaaaccttacacccttcacaaaaattaaatcaaatagagtccagacctaaatatgaaacacaaaactataaaattttagaagataacttagaaggaaacttagatgatgagttgggcaagatatttttggacataacaccaaataaaacatccacaagggaaagaactgataagctagacctttcccaaattaaacatttctgacccatgaaagacactggcaagaggataaaaaaataattcaaagactaggaaaaaaatttgcaaaatgcatctctgataatggcctggttttcaaatattccaagaaacattaaccgtttattaataagggtaccaacgaccca

SEQ ID NO: 107883 - DNA, 586 bp, Homo sapiens
  misc_feature (1)...(586): n = a,t,c or g
agaagatcccttnatgaaatggcctaagtgcccatggtaattagtgaagtttttactgttagttcatgcaagagttggttgtttaaaagagtctgcatctcttttgctccctctctcaccatgtgatatgccggctccactttgccttccgctaggattattagcttcctgatgccctcactagaggcagatgccagcaccgtgcttcctacacagcctgcagaaccataagccaaaattagcctcttcttcacaaattacctggcctcaggtatttctttatagcaatgcaaataaacaaacacagcaattctccccaaattgatttacattagagtcaatgcagtcctaatcaaaatctcagcaagttttttgccgaatttcacaggctgattctaaagtgtatgtggaaaagtaaaggaacaaaaatcaccaaaataattttctaccaaaaagtagaaaaatgttgaaggagtcagaggtcacatgatgggatttcaagacttactataaagccataataatcaagcagtagtatttgtacaagtgtagacgtgcagaacaatggaatggaacagagtccaga

SEQ ID NO: 107884 - DNA, 386 bp, Homo sapiens
  misc_feature (1)...(386): n = a,t,c or g
nnnnnnnnnnnnnnnnnnnnnnnnnnnnnnnnnnnnnttgnnnnnnnnnnnntgtaaattagaaaatattttgaactggataaaaatgatgacacaacataccagaatttgtgcaatggacctaaagcaatacttacagggaaatgtttagcacttaatgccaatattcaaaaagaagaaacctctcaaatcaatgacctcagtttctatcttgcaaattagaaaggagaaaattaaatccaaattgaccagaagaaaagaaataataaaatcctgagtagaaatcaagaaaatagaaaagagaaaaccgagggaaaaatcaataaaatcaaaagctgattcttcatagagatccatataattaataaacctctagcagaatgatc

SEQ ID NO: 107885 - DNA, 439 bp, Homo sapiens
  misc_feature (1)...(439): n = a,t,c or g
tttnaaaatgggtccttaactctgtcaccccaggctgaaatgcggtgttgtgatctcaagctcaactgcagcctcgaatctccccaggctcaaatgatcctcctgccccagcctcccagtgtagctggaactacaggagcgcaccaccatgcccagctggtttttgtattttttgtagaaatggggtgtggctatgttgcccaggctggtcatgagctcctgagctcaagcaggtcgcctgcctcagcctcccaaagtgttgggattacaggcatgagccaccacacctggccatccttatttttatataattgataacatgttctgttcatagttagtcttccttggtctgtgtttttacattattatgtctatgtaagtactgtttattacagaactgtctaatatgcagatttatgtttccttctgtatattccag

SEQ ID NO: 107886 - DNA, 341 bp, Homo sapiens
  misc_feature (1)...(341): n = a,t,c or g
gtacaatgcccatcaaaatcccagcaggatattttgtagatctagataatgtctaaaatttataggaaaggcaaaggaattagactaatcaaaataattctgtaatagaagaataaaattagaggaacatattctctaattttaagattagctataaagctgcagtaatcaagatagtgtgatactggtgaaggaatagacacagacatcaatggaacagaatagagaatccagaaatagatccacacaaatatggccaattgatttttggcaaagatgcaatttggggaaatgtgaatgaaaaaaaggcttttttttnnnnnnnnnnnnaaggatcttan

SEQ ID NO: 107887 - DNA, 424 bp, Homo sapiens
  misc_feature (1)...(424): n = a,t,c or g
ccaaaggccaaacgtttaattcatatggcctataatcccacttactggtaaagtattggtccnttatagaagtgaggaaatggaagtaccaagaagctcaatagtttgcaaagtctgtggctaatnnnnnnnnnnntagtgttttcactacctttaattaccctgtaaagttttgattttaatatctaatatctcaaaatgtttttttttcagagattactgcaatgacctgaaaatatcggataataacactgaatttcttttaaatttcaacgagtttattgatagaaaaactccaaacaacccatcatgtaagtatgcattaattcaaaatgattgcttgagtgtggttctattggtttatagtatatcataggatacgatactcatattactttatattgtgctggttgtttataacttt

SEQ ID NO: 107888 - DNA, 446 bp, Homo sapiens
  misc_feature (1)...(446): n = a,t,c or g
tgggaagtcttaagttgggtggnatccccccggggttggnagttccnagaccnagacccgacccaacntggaaaaaatccccatctcccactaaaaatacacaaattaggtgggtgtgggtagcacatgccccgcaattccccggtacttgggaggctgaaggcaggagaactgccctgaacccctggaggcagaggctgcggtgagctgagatcacatcattgtactcccagcctaggcaacaagagcgaaaccgggccccaaaaaaaaaagaaagacaacaaatgataagcaacatagaatagatatttaaggaaaggctttaaaaagaaaaataagaccaaaataaactaagaaaaaaattattaaagaacaaggagatgcccagggagaagacaaagagtatcaaaatcacttcataaagacacttgtgaatatattacatg

SEQ ID NO: 107889 - DNA, 332 bp, Homo sapiens
  misc_feature (1)...(332): n = a,t,c or g
nnnnnnnnnnnnnnnnnnnnnnnnnnnnnnnnnnnnnnnnnnnnnnnnnnnnnnnnnnnnntgggcatgcatttttctacaaactgacaaactaatcctaaaattcagatggaaatgcaaagaactcgcaacaaataaaactaagaatgagaaaggttgggaagcttacaacacagactttaatacataatataaagttataatgagcaagactgtgtggtactcacatagagttcaatggaagagaaatagtgtcccagaaacagacttatacatctacagtcaattaattttagacaaactaattctatagataaaagagtcttttcaac

SEQ ID NO: 107890 - DNA, 394 bp, Homo sapiens
  misc_feature (1)...(394): n = a,t,c or g
aaaaaaggaagtttagaaaattctatttacaatagaatcaaaaagaataaaacacttaggtaaaagatgtttacactgaaaactacaaaacactgctgaaagaaattaaaggagacataaatagaaagacattctatgttcatagagtggaaaatgtaatattgttaaaatgttcatattatcaaagatgattcacagattcagtgcaatcccagtcaaaatcccagtggcannnnnnnnnnnnnnnnnngcgnnnnnnnnnnnnnnntcctaaatttcttagggaacccaaagggcccccaaaaggccaaacaggttttnnnnnnnnnnnnnnnncccaaagcccccatgcttcttgttttaaaaagggaaaacaagcggggcataggggatt

SEQ ID NO: 107891 - DNA, 371 bp, Homo sapiens
  misc_feature (1)...(371): n = a,t,c or g
cnnnnnnnnnnnnnnnnnnnnnnnnnnnnnnnnnnnnnnnnnnnnnnnnnnnnnnnnnnnnnnnnnnnnnnnnnnnnnnnnnnnnnnnnnnnnnnnnnnnnnnnnnnnnnnnnnnnnnnnnnnnnnnnnnnnnnnnnnnnntggtatattggtatttctgtatatgaacaatgaatgatctgaaaacaagaaaattccattcacgatggtattaaaaaaataaaatacaaataaatttagcaaaataattataaaacttgtacatcgaaaatttcaaagcattctgagggaaattaaagatgatctaaataattggagagacattctatgatccctgattggaaaactcattcaatattgttaagataaca

SEQ ID NO: 107892 - DNA, 345 bp, Homo sapiens
  misc_feature (1)...(345): n = a,t,c or g
gctaacataatcagtgataacagactgggaatttccccttctaagactaggaacaagacaaggatatctgctcttgctatttctgtttaacattgcactggagactctaggtaaggaaattaggcaagataaataaaaggcatctagtttggaaaggaagaggtaagactgttttcagatgacctgatcttatacacgttgagcatcccaagtccaaaaatgtaaaatttgnnnnnnnnnnnnnnnnnnnnnnnnnnnnnnnnnnnnnnnnnnnnnnnnnnnnnnnnnnnnnnnnnnnnnnnnnnnnnnnnnntttatagaaaatcgtaaggaattcatttaaaa

SEQ ID NO: 107893 - DNA, 352 bp, Homo sapiens
  misc_feature (1)...(352): n = a,t,c or g
ggtgatagacctccacaaggaaaactataaaatactgatgaaagaaactgaaggagacacaaacgaaaaagcatcccatgctcatggatcaggaaaatattaaaatgactatgctacccaaagcaatctatagactccatgaattcctatcaaaattccaatgacgtttttcacataaaaagaaaaaacaatcctaaaatatgtatggaacctnnnnnnnnnnnnnnnnnnnnnnnnnnnnnnnnnnnnnnnnnnnnnnnnnnnnnnnnnnnnnnnnnnnnnnnnnnnnnnnnnnnnnnnnnnnnnnnnnnnnnnnnnnnnnnnnnnnnnnnnnnnnnnnnnnnnnnnnnng

SEQ ID NO: 107894 - DNA, 377 bp, Homo sapiens
  misc_feature (1)...(377): n = a,t,c or g
ccctttttaaaaaatttttaaaaaaaaggtccccccccgggaatttttgggggaaaaggggggttttccccccccttttttcccaaagggggcaaaaaaaaaggggaaaaaaaaattttccctttcccccccttttaaaacnnnnnnnnnnnncccaatttttttacccccccctccaaaaaaaggggggcccccctttttccccccttttggttaaggattttcggggtgaatctttaaaacccccccgggggggggttttcccccccgggaaaacccaccccccttaaaccccnnnnnnnnnnccccccgggaaccccgggtaaaaaaatttttttgggggaatttttttaaaaaaactgtccccaatttaaaaa

SEQ ID NO: 107895 - DNA, 716 bp, Homo sapiens
agacagagtctcactttgtcacccaggctggagttcagtggcgtgatctcggctcacagcaacctccgcctcctgggttcaagcgattctcctgcctcggcctctggagtagctgggattgcaggcgcgcgccaccgcgcctggctaattgtattcttagttgagacgggtttcgccatgttgatcgggccggtcaggctggaatttctgacctcaggtgatccaaccacctcagcctccccaaaatgctgggattataggcgtgagccactgcacctggcaaaaaattttttttaaaaaaggagaaagcagtttaaccacaaacagtgaaacagagctggcagacgcctgaaactcccatggaaccatgcagctgtaccctagggctcctcccagggaaaagagagatgtcaacgtgggcccaaggtgtcctgaaggcactggggattgggattaactcgaggcgatggcctttcccaggccctccgtgctggcaggagcctctgctcgctaggctgccttcatctcactctgtgtgctgtgcctgtgcacctgtcttgtcaataactgcatatattgtgttgcgttgcctgtcttgctggataacctgcatatattgtgttcaagttgtgtatttgttttgctttcaagtctatatacaagttgggtttccaacctctgattctggaataaacagttgcagcgtgaaaaaaaaa

SEQ ID NO: 107896 - DNA, 426 bp, Homo sapiens
acctgttatgaaaactgaaaaaagtgcatggtttttaagttctcttaacactgcaacttttagtatcaactgaccaataaaagctttcaatttgagccttaaagtatttttgaactatgaaacaaaaactaaactggctttatccagtataagctgtccatgattaaacattcatggacctttacaattactccaacaaataacttttcatctttctttgttgagacagggtctcactctgttgcccaggctggagtgcagtggcacagtcacagctcactgcaatctcaacctcccgggctcaagcgatcatcccacctcagcatcccaagtagctgggaccacagcacatgccaccatatctggctaatttttaaatttttttgcagaggcggagtctcactatgttgcccagctgtgccgaat

SEQ ID NO: 107897 - DNA, 853 bp, Homo sapiens
ttttttttttttgagacagagtttcgcactgtcgcacaggctggagtgcagtggcccgatctcagttcactgcaagctctgcctcccaggttcacgccattttcctgcctcggcctcccaagtagctgggactacaggcgcccaccacaacacctggctaatttttttgtattttttttagtggagatggggtttcaccttgttggccaggatggtgtcgatctcctgacctcgtgatccgcccgcctcggcctcccaaagtagcctacattgcctctactttgaagggacaaagttgtcctggatttttttttcccttttattatttcattataactatcctaaaacttacatacattgcctatgtttggcattccataacataataattataataatcccccccaatgtcagaaatgtatgtgtgagttcccatgtttattggccaatttataagctttttaatattgtactattttaaactaaaatgtagaaagaatattatgtttatatacagtcagataaattattaactgttgtaatttaagctgaaaatgaaactattttagtatcagtgtagaagaaaagtatagtttctaatcatctataattttaaaatgcgaaagcctataaaactttcaagatgttttgcctgtttgtttttaagatttataataattttctatctttagcaagtagctatttttaagccaggtaacttctttatttgaactgtattatactctcagaccctcatcctgcctagaaatgaataagtaataaataattactctgtattatttacttcttttattttatagtaaaatattcatttggatggacattaatttga

SEQ ID NO: 107898 - DNA, 407 bp, Homo sapiens
  misc_feature (1)...(407): n = a,t,c or g
acattctttataaagaatgtagttggaggactcgcactcctcaatttcaaaacttagtacaaagctacagtaatcaagacagtatggtcctggcatgatggtagacatacagcagtcaatggtatggaatcgagagtgcagaaacaaattcatgcatttnnnnnnnnnnnnnnnnnnnnnnnnnnnnnnnnnnnnnnnnnnnnnnnnnnnnnnnnnnnnnnnnnnnnnnnnnnnnnnnnnnnnnnnnnnnnnnnnnnnnnnnnnnnaggagtccaatctagtgagagccctcttgctgcatcatccatgcagaagaatacgagggtatgcacacgcctgggtggggagtggtggaaggggctgagcttatctttttatcaggaacctgccgcaatgccgcaacaatn

SEQ ID NO: 107899 - DNA, 398 bp, Homo sapiens
  misc_feature (1)...(398): n = a,t,c or g
gctaacataatcagtgataacagactgggaatttccccttctaagactaggaacaagacaaggatatctgctcttgctatttctgtttaacattgcactggagactctaggtaaggaaattaggcaagataaataaaaggcatctagtttggaaaggaagaggtaagactgttttcagatgacctgatcttatacacgttgagcatcccaagtccaaaaatgtaaaatttgnnnnnnnnnnnnnnnnnnnnnnnnnnnnnnnnnnnnnnnnnnnnnnnnnnnnnnnnnnnnnnnnnnnnnnnnnnnnnnnnnntttatagaaaatcgtaaggaattcatttaaaaagtataggactaataaacaagttgagcaaggttgcagaatataaaaccagtan

SEQ ID NO: 107900 - DNA, 469 bp, Homo sapiens
  misc_feature (1)...(469): n = a,t,c or g
nnnnnnnnnnnnnnnnnnnnnnnnnnnatctatgtctagattcatttttttgcctgtggaaatctagatgttctggcaccatttgttgaaaagactgttctttctccattgaaatgtctttgttcctttgtcaaagatcaggcgactatatttatgagggtctgtgttcccttgatctatttgttcttttgctaccagtacaccatcttaattattgaaactttgnnnnnnnnnnaaaacagaccttgctcaacggggggagacaggtagaacctctttttcatacaataattttaccggcctgtcccccccttgatgccttatgctattggccaggggtgcccaattctgggaggccgaaatttgtttttctaggatcttaaagaatctgccctggccttgtttttttctgttaaggggctgcttttcaaccaggagccttgagaggcttgtcttattcttgaaaagc

SEQ ID NO: 107901 - DNA, 344 bp, Homo sapiens
gattacgccactgcactccagcctgggcaacagagtgagactccatctcaaaacaacaacaacaacaacaacaacaaaacagttgtatcccagtaaataaaatggtttagatgaagtgcacaaatttttggaaagacaaaaactaccaaaactgactcaataagaggaacagacaatctgaatagacctgtaacacgtgaagacactgaaatagtagtcacagaactgcccgcaaagaaacagcctaagcccatatggctttactgctgaattttaccaaacatttaaagaaataatataattcttgacaaaatctttctggagaatactttcccactcatttt

SEQ ID NO: 107902 - DNA, 691 bp, Homo sapiens
cagtcttattgttttagtgttcagaataatcttttattctccttccataaatcattttctatggggaaactgaacaaactactcttaacaccatgttctttttaaaagtgtttttgacttttggagtttttagttttttgttttactcgatactgttttacttgatgtttaagataccggtgagaacttatacttgtttttttttcttcttctgagacacagtctccctctgttacccaagctggagtacagtggcaggatcatagtccactgcagcctggaactcctgcgctcaagcaatcctcctgcctcagcttcccaagtatttggaactataggcatgcaccaacacaccagctaattttttaaattttttgtagagatggagtttccatatgttgcaaagggaactcctgctctcaaggggtcctcccaccttggcctcccaaagtagtaggactacaggcatgagccatgacatccagcctgcattgagagtttctgaaggtcagatgctacctagagctttggctcatgtccatcccaaggtggagctaatcagtttgtagttattacctcttcctgaaagtgtaactgaaatggatatgcatggcagctggcaggacactcacattattcgtgaactgtggagtaagggacattattatagcaggaccaaagggaagcctct

SEQ ID NO: 107903 - DNA, 244 bp, Homo sapiens
ctggagagactttaaaacaaaaactgttatcagagcaaaataaggatatttgataataacagggtgaaaccatcaagaagatacaacagttataaacatgtatgcatccaaaaacagcccccaaaaaatacatgaagcaaaaactaacagattggaagagagcagtagttcaaaaacaacagctggagaccttaacatactacttttaataatggataaaactaagcagaagatcaacagggta

SEQ ID NO: 107904 - DNA, 587 bp, Homo sapiens
gtaaaatcgttaagcttcttatgagatcatcaagggaaggtgagaacgtgaataattggttccaggaaggagaaaaggaatattgatatggatcatatagatattaggagattataagataacctggtcttgaactcctgacctcaaatgatccactcacccttggcctccccaaagtgatgggattataggcgtaaagccaccgtgccccaccttcttttctttctttctctttttttttttttaaagagagagcatctcactctgttgtccaaggctggagtgcagtggtgtgatcaatagctcactgtagccttgaaccattgggttcaagccatcccaccttaatctccctagtacttactgctgggaactattggcacacaccactgcactggggtggaattttaaagtttttggtagagataagattttgcattgttgtggagggttggtcttaaactcctggcttcaaagatcctcccacccagccagtgctaggattattgacatgagccaccatgcccagcttagtttgtttaacttttaaaaaacaagtcaaatcaactcctagatgcataccggaa

SEQ ID NO: 107905 - DNA, 390 bp, Homo sapiens
gagacaggggcctactctgtcacccaggctggagtacagtggcgcaatcttggctcactgcagcctcaacttcctgggctcaagtgatcctcccacctcagccactagggtaacttgggaccacaggtataagccacaatgccaagctattttttgtagagatgaggtttcaccatcatgcccaggctggtctcaaactctggcctcaagtgatccatccacctcggcctcccaaagtggttagattatagacatgagccaccgtgcctggccatcttttccctttcaacatattagtttattcattttatttgtttatttattaaaggccacaatttaaagaatgacttagtattgaagcgctgaaatgtattaatatgaaaattactg

SEQ ID NO: 107906 - DNA, 462 bp, Homo sapiens
ttttgtgaaacagtttcactctgttgctcaggctggagtgcagtggcacaatctcagctcactggaacctccgcctcctgggttcaagcaattcttgtgcctcaacctcctgagcagctgggactacaggcacacaccaccacgcctggctaatttttgtattcttagtagacacggggttttgctatgttggccaggctggtatcaaactccagacctcaagtgacccaccccccttcggcctcccaatgtgctgggattacaggcgcgagccaccacacccagaaagaaattaagatttaaaagatcatcctgtagcagaaatcacaacataatgaatgagattatttaacattgggatgctcatagggccagggtatctcccaaactctaaaaataaaattaaggcaactaaaagagcaaggatggaatataaagttatataagtaaattccaatctat

SEQ ID NO: 107907 - DNA, 383 bp, Homo sapiens
  misc_feature (1)...(383): n = a,t,c or g
tggaagttttaatagtgttaacttgtccgtactacccaaagtgttcaacagattcaatgcaatccccatcaaaattccagctgaattaattatatttctttactgaaggtnnnnnnnnnnnnnnnnnnnnnnnnnnnnnnnnnnnnnnnnnnnnnnnnaatcatgcatatacaaccaaccaatcttcaaaaagtgtgccaagaatacacaatggggtaaaaaatgtctcttccacaaatagtgttaggaaaaccagatactcacatgcagaagaataaattggactctcctctcacaccatatataaaaatcacctcaaaataaagacttaaatgtaagaccccaaactgtaaaactcttagtacacatagagggaaagcttg

SEQ ID NO: 107908 - DNA, 356 bp, Homo sapiens
  misc_feature (1)...(356): n = a,t,c or g
aactggatgtcagtatggggaaaactaaactctagtccttacgtcgtaccaaatacaagaattaccttaaatagatcagacctaaacataaaagataaaactataagacgtctcaatgaaaacataggcaaaaatatttatgactctggagataggctgagatttcttacagcagaagtactaatatataagaaaaaaataaattgaactttttaatctttaagaaaattagaagaaaatatctgcaatacacatttcatgacacagcacttgtaacaacacactgaataccaaaaacacatgaagnnnnnnnnnnnnnnnnnnnnnnnnnnnngtggttacagacatttcaggan

SEQ ID NO: 107909 - DNA, 362 bp, Homo sapiens
  misc_feature (1)...(362): n = a,t,c or g
gaaaacagtataatcagtgatnnnnnnnnnnnnnnnnnnnnnnnnnnnnnnnnnnnnnnnnnnnnnnnnnnnnnnnnnnnnnnnnnnnnnnnnnntaaatagaacttcagtataaataaatcaaaagctggtagaactgcaagcagaaatagacagatccacaattatagcaaaacatttcaatgtctttctctcaatctttgaaaaaatgtgtagacaaaattattaaaaatatagaagacttgactagcactcttagccaactggacctcagtttatagaataatgcactctgcaatagcaaaatacacattcttttcaagtacatatggaacattgatatggttaggctttgtgtcccc

SEQ ID NO: 107910 - DNA, 369 bp, Homo sapiens
attaagaaacatttatcaggccgggcgcagtggctcacgcctgtggtcccaaagcactgggattacaggtatgagccactgtgcctggttaatgtttttatttttattttaaaaatttttttgtgaagacagggtctcactatgttgcccaggctgatcttgaactcctgggctaagtgatcctcctgcgttggcctcccaagaaaaaataacaggttaaaatcagttaatatagtcatctcagttttgaaactcagtaaatgtggtttttaaaagttactttcatttctggataaatttagcctttttgaggccacaatttggccttttctctctagtgggggacaaatcctgacagctggttcttac

SEQ ID NO: 107911 - DNA, 351 bp, Homo sapiens
  misc_feature (1)...(351): n = a,t,c or g
nnnnnnnnnnnnnnnnnnnnnnnnnnnnnnnnnnnnnnnnnnnnnnnnnnnnnnnnnnnnnnnnnnnnnnnnnnnnnnnnnnnnnnnnnnnnnnnnnnnnnntcagctgaaagtaaaaggatagaaaaatattccatgcaaacaataaccaaaagaaagctggagtgcctatatgagtatcatacaatatagagtttaagttaaaaaccgttacaagagacaaggaaaggaggacattatatactcatgaaacagtcgattcatcaagatataacaattataaacaagccaaacaacagtgttccaaagcatatgaagcaaaaactgacagatttgaagggagaaatagac

SEQ ID NO: 107912 - DNA, 345 bp, Homo sapiens
  misc_feature (1)...(345): n = a,t,c or g
ctaaattgcagaaaaaccttaaaaacaacagatgagactagannnnnnnnnnnnnnnnggaaacaaaatctcgttttgttccccaggcgggggggcaatgggcttaatttcacttaacggcaccccccgcctccggggtaaaggggactttccggcctaaccctccggagaagcgggaatttagggggcccccccccagccccggcaaattttggaattttaagaaaagggggggtttcccctggtggcccaggcgggcctaaaactttggaaggggatctccccccctggccctcccaaagaacgggaataacaggggggagccatcgttcccagccggagatt

SEQ ID NO: 107913 - DNA, 403 bp, Homo sapiens
  misc_feature (1)...(403): n = a,t,c or g
nnnnnnnnnnnnnnnnnnnnnnnnnnnnnnnnnnnnnnnnnnnnnnnnnnnnnnnnnnnnnnnnnnnnnnnnnnnnnnnnnnnnnnnnnnnnnnnnnnnnnnnnnnnnngaccccccatcctcccggggaaatgggggcccggaagggaacaaaaaggaagggggaaacccattaggggggccttgggggcctccccgccaaaaaaaaagggtttttgaccgggggggnnnnnnnnnnnnnnccaaattttgaaaactggtaaaaaaatcttaaaaaattttttttcccnnnnnnnnnnnngtaaagggtccctctaatcccctttaaaaaagggttgggggtcttttccacccggggggtgccccccccggttcccccccaatagaacccctttgaaaaaaa

SEQ ID NO: 107914 - DNA, 363 bp, Homo sapiens
  misc_feature (1)...(363): n = a,t,c or g
gtaaacttaatctttttaaaatagaatattgctatttatgctatttgttgcaaaactttaacatcaaccaagactattcagtagggacagaatagtcttcaacaaattatgcttggacaattagatatccgcatgcaaaagagttaagttggacccctacggcataccacatacaaaaattaaaggggattagggacctacatctaagagctgaaattataaaactcttagaagaaaacataggggtaaatctccatagctttggcaacagtttcnnnnnnnnnnnncgaaacaaagtttaaccctttcccccaggctggattgcaggggcccaatttcgattaactgcaagctaagcctccg

SEQ ID NO: 107915 - DNA, 368 bp, Homo sapiens
  misc_feature (1)...(368): n = a,t,c or g
gggccagtgaagaaattaaggaaaatgaaaaatttcttgaaacacatgataatggaaacacaacatactaaaacctatgagatatagggaaagcagtactaatagggaggtttatagctctaaatgtctacatcaacaacaaaaaacccttcaaataaataacctaacaatgcatcttaaggaactagaaaggcaagagcaaaccaaatccaaaattaataatagaagaaaagaaataataaagttcaatnnnnnnnnnnnnnnnnnnnnnnnnnnnnnnnnnnnaacctttagtcagactgagaaaaatagaggacctaaataaataaaatcagagattaaaaggannnnnnnnnnnnnnnnnnnnn

SEQ ID NO: 107916 - DNA, 396 bp, Homo sapiens
  misc_feature (1)...(396): n = a,t,c or g
acttactatttatcaacaatattcaaatcagtgtgatattatcataagaatagatatagagaacaatggaatagaaaggagaatacagaaaattggcatctatgatcaacttatttttgacaaacatgccaagannnnnnnnnnnnnnnnnnnnnnnnnnnnnnnnnnnnnnnnnnnnnnnnnnnnnnnnnnnnnnnnnnnnnnnnnnnnnnnnnnnnnnnnnnnnnnnnnnnnnnnnnnnnnnnnnnnnnnnnnnnnnnnnnnnnnnnnnnnnnnnnnnnnnnnnnnnnnnnnnnnnnnnnnnnnnnnnnnnnnnnnnnnnnnnnnnnnnnnnnnnnnnnnnnnnnnnnnnnnnnnnnnnnnnnnnnnnnnnnnnnnnnnnnnnnnnnnnnaggg

SEQ ID NO: 107917 - DNA, 378 bp, Homo sapiens
tgagacaggacgtctccaagtggctgagaaattctctggaaattcacttaagcctcgccattttacggaacatcagctattgtggatacattcaaaaggaaaaaaatggcattcatcacaatggagtctagggaagaagtgctgagttgaaatcatacaacaaaaaagaaaatttaaagccaggagtggtggcttatgcctgtaattccagcactttgggaccataggtgcaccacctaattttcatgtttgtagagaccatgccacctaatttttatttttgtagggacagagttttgcgaggttacccatggtcttgaactcctgggctcaagcactcctcttgccttagcctcccaaagtgctgggattgcaggt

SEQ ID NO: 107918 - DNA, 368 bp, Homo sapiens
  misc_feature (1)...(368): n = a,t,c or g
ctctgataatatcgcttatgagtggatctgtgaaatttcctagtaaattttggcaaaccaaatacagtaacatataaacaggaatgtacaccagtacccagtacagtgtatccctggaatgcaacgttatttcatcagctggaaatgattagtgcaacagactgaaggaagaaaacaacatggtcatctcaatagattgtggacggctggaannnnnnnnnnnnnnnnnnnnnnnnnnnnnnnnnnnnnnnnnnnnnnnnnnnnnnnnnnnnnnnnnnnnnnnnnnnnnnnnnnngttttttgtttgcttgattggttggttggttttgactttggaatagccatgggctgggctcagtgactcacgn

SEQ ID NO: 107919 - DNA, 351 bp, Homo sapiens
  misc_feature (1)...(351): n = a,t,c or g
aagtcttggttcactgcaacttccacttccctggttcaagcgattcctgtgtctcagcctatcaggtagctgggactataggcatgtgcaccatgcctagctaatttttatatttttagtttaggtnaggttttaccatgttggccagcaggctgtngttgatctcctgacctcaagtgatccgcccaccttggcctcccaaagtgctgggattaggatcacanggtntgagccacccgntcctggcctaaaatttgattggaatctctaaaagcacattcgcccctactattttatatttttataaaaagtctgaaaaaaattattaatcaattagatttcacttttttg

SEQ ID NO: 107920 - DNA, 382 bp, Homo sapiens
  misc_feature (1)...(382): n = a,t,c or g
gaaaacagtataatcagtgatnnnnnnnnnnnnnnnnnnnnnnnnnnnnnnnnnnnnnnnnnnnnnnnnnnnnnnnnnnnnnnnnnnnnnnnnnntaaatagaacttcagtataaataaatcaaaagctggtagaactgcaagcagaaatagacagatccacaattatagcaaaacatttcaatgtctttctctcaatctttgaaaaaatgtgtagaccaaattattaaaaatatagaagacttgactagcactcttagccaactggacctcagtttatagaataatgcactctgcaatagcaaaatacacattcttttcaagtacatatggaacatnnnnnnnnnnnnnnnnnnnnnnnnnnnnnnnnnnnnnnnnnnnnn

SEQ ID NO: 107921 - DNA, 282 bp, Homo sapiens
ttttttttttttgagatggagtttcgctcttgttgcccaggctgggagtgcaatggcacgggtctcggctcactgcaatctctggcctcccaggttcaagcaattctcctacctcagcctcctgagtagctgggattacaggcgcccacaaccatgctgggctgattttttattttttagtggagacggggtttcactatgttagccgggctggactggaactcctgacctcaagtgatctgcccacctcagcctcccaaagtgctgggattataggcgtga

SEQ ID NO: 107922 - DNA, 383 bp, Homo sapiens
  misc_feature (1)...(383): n = a,t,c or g
atctgcagggactcaaattccccaatgatgggaggcagaattgttttaccgtttggaaaacagtatggcctttttagatacccatgccctaccccccagcaactcccttcctaggggtatagcctagaaactgatgccaatttcccccgaaggcctatatagggattgtcatagcaatgttgttcatagtagtcaaaagctggaaaccgttcccatgttcctccaactgtgcttttcaaactcagggccagttttccccctannnnnnnnnnnnactgaattttagtatgtctgtnnnnnnnnnnnnnnnttattatacctctgtattttttaagttgaatgccaaatggtccagctgctgtgaatgcaaaatggtctagctg

SEQ ID NO: 107923 - DNA, 383 bp, Homo sapiens
aaaggctgaagatggctctcaaaccccacaacaagacctccttaacctggctttcaaagtctttaataacagggacgagcaaaataaattagataaagcccaaagagatcgtgctaaataccagcttccagcagtggctatctgtcagtctagccatagtacccaagggcacaaaagacctgatagcagcaaacctcctgggccttgttttaagtgcggcaaagaaggccactggacgggggcatgtccccacccatgagtgccgaagagcccttgcctagtctgccagcagatgggcactggaagtctgactgtcctctcaacagatggggcagacaagcatgctcctcagagccaccatcccttcaacaagactccatttc

SEQ ID NO: 107924 - DNA, 355 bp, Homo sapiens
gagacagggtctcactctgtcacccaagctggagtgcagtggtgtgatcacagctgactgcagcctcaacttcctgggcgcaggaaatcctcccgccttagccccccaagtagctgggaccacaggtgcatgccaccatgcccagctaatttttattatctgtagagacggggtctcactatgttatgttgccaaggctggttctcttcccattttaaacctgtttctgattccagggaaaactctaaaataggataatgatttaagttatcatttattattaataagaattattagaaaaagcccttgatgaggaaccgaaaataaaattctgatcctggttcttccaaaaaat

SEQ ID NO: 107925 - DNA, 616 bp, Homo sapiens
  misc_feature (1)...(616): n = a,t,c or g
tatgctatctgggactttcttttttaaagttaattatattttttaagagacagtgggacgatcatagcacagtggaaccttatactctggctaaagcaatcctgctgcccccccgagtagctagaactgcagatgcacacccaccacacccggctaactttttttnaaaacaatttttgtagagaggggggtcttggtatgttgcccagggctggtcttgaattcctgggttcaagtgggtcctcccatcttgggcctcctgagtagttggggattacaagtacgtagtaggccacttatggcccagcctgccatctagggacttttcataggctaggagggggagtagttcaatgtctgggcttcaaaaggacagggctggacactctttgttagggggctaagggcagctgggtgactttaagttgaagcccgtgctccatttacccattcccaaaaacccctagggaccttaaggaattatgccaaaattatactttgcctgtgcttttataagtggaacaacaaagcttagatgacagccacatctgtttatggcatgattttattgaatattttgaggccactgttgagacctcttgctcacaaaaaaaaa

SEQ ID NO: 107926 - DNA, 343 bp, Homo sapiens
  misc_feature (1)...(343): n = a,t,c or g
gtctttgtgtcatggtgtttactatctataatgtgattagatgttctctaagatcttacagagcattgacattcatattctaattagtttcttgaagccatttttgttttttatggtaacctcttgaattacagtgtcaattcataatgcctccctatgtttactctttgtatacaagcacgcgcgcgcnaccacacacacacacacacacacacacaactacctcccgacacacacattgatacatcaggtaacagtagtcttagaaggttgtgcatttggcttagctgtgactagcttttagagattttcacacgtgaccgctaagctgatgcacaagttt

SEQ ID NO: 107927 - DNA, 471 bp, Homo sapiens
gacaagccctgcgtcaggaggttgagcacagaccatgtggacagcagtgtggttggcaagtcatttaacttttccaaacaaatctgcaaaatggagataacagcacctgcctcattgcgttgtgaagaagatgaaatgtttagcccggtgcccaacacccagttctcactctgtcatccaggctggtgtgcagtggtgcaatgtgggcttactgcagcccttgacctccaggacaagtgatctcccacctcagcctccggaatagctgggactacagctcaacaacgcccctctgaaagtaggactcttggaaatgaaccttgttgggagtaaagctgaaccttcacctctcctttccaggattctactccattcatacggcctcacactgaattaatgtttctagcagccacattactatagttacccaattgatctagtagtaaagtcttcccatctattcatgtaaaa

SEQ ID NO: 107928 - DNA, 384 bp, Homo sapiens
  misc_feature (1)...(384): n = a,t,c or g
tttcgagggatttaagtgtgattaactcgactgatgcgaaaaaggtgacaaaattcaatgcttttatgatacactcaacaaacaaggagtataaggaaactacctcagtataataaaggccatatttnnnnnnnnnnnnnctaccgggagcttcataagggtaaaaaactgaaagctttttttttaaaaaaaacaatatgcctgttttcaccacttcaacataatactggaagccctaggcagatcaatttggcaaataaaaaataaaaaacatccaaattggaagggaggaagtaaaattatttttttttgcaaataacataattttatatgcaaaaaacccttaagatnnnnnnnnnnnnnnnnnnnnnnnnnnnnnacatt

SEQ ID NO: 107929 - DNA, 406 bp, Homo sapiens
  misc_feature (1)...(406): n = a,t,c or g
cccacccacttttttttgggaaatttttggaaaaaaaattttggccggggccggggggcccccccgtttatcccccccctttggggggcccnnnnnnnnnnttcccccagggtccccctttttaaccccttttgggccccatggggaaacccccttttttttaaaaaaacaaaaattaattggggccaagggggggggcccttttttccccctctttggaaggggggggtaaaaaaatccctttggcccccggggcaaaggttcccttaaatttaaattccatttcccccttnnnnnnnnnnntgggggcnnnnnnnnnnttcctttttnnnnnnnnnnnnnnngagaaaaattttaaaaggcaatataattaaaaaaccagaaataatatggtacaattatttat

SEQ ID NO: 107930 - DNA, 386 bp, Homo sapiens
  misc_feature (1)...(386): n = a,t,c or g
ggatttactttaaaaaaaaggccaaaatgtggttggacccaaagattcccttttaccccctttccccccgtaaaggccccggggcctcctagttccccccccggggccataacccttgggccatgggctttgggcacaaggccccccgggcttaaacccttggggggtaattttacccccttttccactatgggcccccggttttccctttttccaaaaggggggccccttaaaggccctttggggtggttccacccccagcccaannnnnnnnnnnnnnnnnnnnnnnnnnnnnnnnnnnnnnnnnnnnnnnnnnnnnnnnnnnnnnnnnnnnnnnnnnnnnnnnnnnnnnnnnnnnnnnnngtgctagctctctcctcgtgccg

SEQ ID NO: 107931 - DNA, 547 bp, Homo sapiens
catttaaatgttaagtctccaccccaaagtgaccatgggttgtatgctgcatgcatgtttgttcaatatgcatgtgtcacaaccactttcatgaatattcatagctcctcatgtaacctgttgaatgtgtatgtttagtcaatccattgagcatgaagctcctaccctaacccctccttctttgaagtgcctgtctctggtcttggctggagacatgcttcccagcaggtctcactccctttctgaggctggagtgcagtggtgcgatcatagctcactacaacctcaaactcctgggcaaaagtgatcctcctgcctcagcctccgggggtggttgggacttacaggtgcatgccaaccacacctgggctaatttgtaaaattttttgtagagatgggttcttactatgttgtccaggctggttaaggcctcctgggttcaagtgatcctcctgccttggcctcccaaagtgctgggattataggtgtgagccacctagcccagcctaaaccctttataagaaataaagtctcctctcaaaattta

SEQ ID NO: 107932 - DNA, 557 bp, Homo sapiens
ttaacacatcatcctttacactgcctacaaaatgactcattaattacaaagttgatcatgtcactcctctggttaaaactgagacaaatgggacaaatgggattccatcaaactaaaaagctcctgcacagcaaaggaaacaatcaacagagtcaaacgacaacccacacaatgggagaaaatatttgcaaactatacacctgataagaggttaatatccaaaataaataaggagctcaaacaactcaacagcaagaaaacaaataacccaataaaaatgggcaacagacctgaacaaacatttctcaaaagaagacatacaaatggctaataggcatatgaaaaaatatgtcaacattgctaaccatcaaggaaatgctaatcaaaaccacaaataaaatattacctcataccttttagaatggctattattgaaaagatatagaataagtgttggagaggatgtagagaaaagagaattgttgtgcactgttggtggagatgccaattggtacacccattatgtaaaacagtatagaaggtcttcaaaaaaaaaa

SEQ ID NO: 107933 - DNA, 391 bp, Homo sapiens
  misc_feature (1)...(391): n = a,t,c or g
tttatggtagaagataggggtccaatttcatcttttttcatgtgaatacctagttcttccaacatcatttgttgcagaaaacattccttccttattgtgcattcttggcatccctgaagatcagttgaccatattatttgcatgtttttatttgtgggctctctattctgctcctttgggctgtatgtctctttaagctagtcccatactgttttggttattgtagctctgtaaaatattttgatatcaagaagtatcatnnnnnnnnnnnnnnnnnnnnnnnnnnnnnnnnnnnnnnnnnnnnnnnnnnnnnnnnnnnnnnnnnnnnnnnnnnnnnnnnnnnnnnnnnnnnnnnnnnnnnnnnnnnnnnnnnnnnnnnnnnnnnnnnnnn

SEQ ID NO: 107934 - DNA, 433 bp, Homo sapiens
  misc_feature (1)...(433): n = a,t,c or g
cccacgcgtacgaccatattgatctgcagattcctcacaatccctgtctaaatccctcctgcatttttggcaaaaactgacaagctgattctacaatttatatgacaatgcaaggggcccagaatagctaaaacaatcttgataaagaagaaagttgaaggactcacactacagtaatgaagactgtgtggtactggcaaatatacaaatatctatgcctataggatagaattgaaagtccagaaataaacttagacatttatgggcaattgattttgacaaagatgccaagaaaattcagtggaggaaagaataatcattttaacacatgatattgggacaaagggatagatactcacacaagaatgaagctgaatccctacctcatactannnnnnnnnnnnnnnnnnnnnnnnnnnnnnnnnctatatgt

SEQ ID NO: 107935 - DNA, 452 bp, Homo sapiens
  misc_feature (1)...(452): n = a,t,c or g
nncccgattcccgtttcgacccacgcgcccgtttaagaaattgagtcagtagctaaaaatccattcacccaaaaacacaaggcccagaatttttcctaggtgagttctacctaactttcaaggaatagatcactccaattttatacaaaccgtgaaagagaaaagacaaaagagaaatgcacctcaaatcatttcatgaggctaggataatactccagaaatgaagatcagtttatgtcagtaacacaaatgaaaaatatatgccaatctcgtaaacagagatataaaggttgtaaacaatcaacaagccaaattcatcaatgtaaaaaaatacatatgactaacctgcatttatcccaggaatataagaataatattagaaaattgtgagtacagtttactacattaacaaatgaagagaaaataatctctcagtagatacagaaaacaca

SEQ ID NO: 107936 - DNA, 424 bp, Homo sapiens
  misc_feature (1)...(424): n = a,t,c or g
caatttttttcgttcttcgccttgtgtatgaggagcttaagttgaatactctaatgggagaaggaatttgttcactcttgaacttctcgttcagttggcaaggtaaatttgtttgtaggttagaaactgccaggaagtcctgagatgactgtcttttccatgatatcatatagggaccttgtaaatacgtttctgaaatctgccttctctgaaaactatggcatctctgtaaaccacagagttgtttgaagatactggttttgtaagggcctgtgagccatgcagggatttttagtctttgtcctgagattagtggaaggtcacgaaaaaatggagatgacctgctcagattttcattntgacaggatgactgactgactatactgtggtgggagttctagaataacatctgctgttttggaat

SEQ ID NO: 107937 - DNA, 341 bp, Homo sapiens
aatggtgagtttgaagacagcctctttgaaaatacaaagtcagaggagacaaaagaatgaagcacatctacaagatctattaacagaaaatagcctcaaaagggcaaatctaagagttactggccttaaagaggaggtagagtgaaagagaggggcagaaagtttattcaaatgaataataacagagaatttcccaaacctagagaaagatatcaatattcaagtataagaaagttatagaacacaagccagtttaacccaaagagtactacttcaagacatttaatacccaaactcccaaaggtcaacgataaagaaaggatcctaaaagcagcaagaca

SEQ ID NO: 107938 - DNA, 409 bp, Homo sapiens
ccagaaaaattatgtcaggtaaacagtaacccataagaaagctggagtggctgtactaatatcagacaaagtagactttaaaacaaaaaatggtaccagagataaagtgggacattttataatgatcaaagggtaattccttaggaagatacaatgataaacaggtatgtgcctaacagagccctgaaatacataaagcaaaaattgacagaattggtaagagaaatgcacaattaaactaaactatcacaactatagttggagaccttagtgccccactttcaataatgttcaagtcttctgtttccatgttgatcttctgcctagctgttctatccattattgaaacagaagacttgaacattataagccaattagacctaaaaacggacgcgtgggtgaccgaacc

SEQ ID NO: 107939 - DNA, 343 bp, Homo sapiens
ggttgaggctgcagtgagctgagatcgtgccactacactccagcctggatgacggtgacactctgtctcagaaaaaaagggaaagaaataattctcatttatacaggagagaaatcctatgaatgtaaggaatatgggaatacattcagtttccaaagatatgaaaagactaactggaaaaaaatccaaagacctcagatattccagttctattcagagccataaaaggactcatactggagaaaaattgtagaaatgtacagaatatggggaaactctcattgctcttcatctccattcaaagacacgtgtcagtgcacactgggagatggatggtatgaat

SEQ ID NO: 107940 - DNA, 390 bp, Homo sapiens
  misc_feature (1)...(390): n = a,t,c or g
nnnnnnnnnnnnnnnnnnnnnnnnnnnnnnnnnnnggggnnnnnnnnnnnngggaaaaaaaaaggcgaaaaaggcccccaaaaaggggccaggggcccccttttttggggggggccttnnnnnnnnnngcccaaccccctaaaacccacccaacccggggaagggggccctttaaaggggccaaccccaccaaaaaattcaaaaccacgggaaaatttttccaaggattccacccctggnnnnnnnnnngggggcccccccnnnnnnnnnncccccccgggggccttaaagaggggccccccaggaaaggaaaaccaaaacccccccgtttttcccccaaaaaagggtgaaaggggcccccacagaaatttnnnnnnnnnnnaccccccg

SEQ ID NO: 107941 - DNA, 393 bp, Homo sapiens
  misc_feature (1)...(393): n = a,t,c or g
ttactgtaagcctaaattataactctttttaaaattctagcaagaattggttatctttcttcttccnnnnnnnnnnnnnggaaagggggccccactttgggcccaaggccggagggaaggggcttaaaccctggtaatggaaaccctgcccccccagggtaagggaattnnnnnnnnnnacccccccaaataactaggaataagggccccgccccccaggggggggannnnnnnnnnnnnnnnnnnnnnnnnnnnnnnnnnntggggggccggggggggttaaaaccccggacccaaagggaccccttcacctgggccccccaaagggggggggtaaaagggaaaaccaccggggctgggccagnnnnnnnnnnnnaaagggaagattttaaa

SEQ ID NO: 107942 - DNA, 916 bp, Homo sapiens
catcatactgttttccatagtagcttcaacatggtgtccccactgattggagcagtgagtagtcaccagagtttaagcacagtcagtgccctgctctttgtccccagttcatcccaggtggttctgcccatgtagcactcccagtggttcccatgagacaggactggagtgggcttcccagacttgtggagagctcggagttccacatctagttcctctcatctcagaaaccacgagtctagggaaattgtgtgcgagtggtgttctgacagtttaggagaccagggtggtgcactctgaaattgaactgtttctcttaccagtggtggcatcacttagttcttctccccctacttcaggtgcattaaagatggtattcttgtctacaaacaaaaaaagaaaaacaaaaacaaaaaacacgtgcctgtaatttccattatcttctaatgtttaccttcatcccaatacatagtaagttagtgttctgccactcaacaaagcccccctaaggctcagtgctacctgagacactggtggaaagttgagaatgtctaagattctgtccctgtcccctggaaactggagcttccactggccttgcagaaggaagacccatcactcgaattctgtcatgacagtctcttggaagctctatcttgggagtactagcgtttaggtggattctgcttgttaataaaatggactgtggtgttctagaagaggtgttttctttcttctcagatatttccatatgaaatgctcatggtgaccaacagagggcgaaacaaaatcctcagagaggtggacagaaccaggctggaggtaaaacaaaaccgaaaaatccagtcccaactgcagatccctatgcactcccccaactctcccctaagcaatgttttatttcttcagtgaaaac

SEQ ID NO: 107943 - DNA, 398 bp, Homo sapiens
  misc_feature (1)...(398): n = a,t,c or g
ctcccgggttccccaaaccccctttggagtggaggnnnnnnnnnntttggtttttttcccccaaagggccccaaccaacccgttgggccccccagggggtttgggccccccaaatccccccccctttggccccttttttcccccccccggggggggaaaaccccccccaaaaaaggattttttttgttaaaacccccccaaatcccaaacccccttttttttcaaaacaaaattttttaacccccttcccccccaaagggcgggggccccccaaccccccaaacccccggggggccccccnnnnnnnnnnnnnnnnnnnnnnnnnnnnnnnnnnnnnnnnnnnnnnnnnnnnnnnnnnnnnnnnnnnnnnnnnnnnnnnnnnnnnnnnnnnnnnnnng

SEQ ID NO: 107944 - DNA, 392 bp, Homo sapiens
  misc_feature (1)...(392): n = a,t,c or g
cccnnnnnnnnnnttgctttaggccccggaattcccgggttccaggggccccaaaggccccccgccccttcaggtttgggggccaaagcaagggcctgcccccaaaaatattaacccaaattttaaaattnnnnnnnnnntcctccccaaagggtaaaatcccccccccnnnnnnnnnnnnnggaggagttaaacccccggggtcaaaaaaagggataatttcccccctttcccccggttttgggggcccccgttttttaccaaatggccgatttcaaagagaaaaaaagggttttattttctcaaaaaaagnnnnnnnnnnnnnnnnnnnnnnnnnnnnnnnnnnnnnnnnnnnnnnnnnnnnnnnnnnnnnnnnnnnnnnnnnnnnnnnn

SEQ ID NO: 107945 - DNA, 514 bp, Homo sapiens
  misc_feature (1)...(514): n = a,t,c or g
aaataaacagcctagtgatacacctcaaggaactagaaaaccaatgacaaaccaaacccaaaattagtagaaggaaaagtatagtaaatatcagaacaaaaacaaaatagagactaaaaaacaatacaaaggatcaagagacaaaaagtgcgtgttttaaaannnnnnnnnnnnnnnnnnnnnnnnnnnnnnnnnnnnnnnnnnnnnnnnnnnnnnnnnnnnnnnnnnnnnnnnnnnnnnnnnnnnnnnnnnnnnnnnnnnnnnnnnnnnnnnnnnnnnnnnnnnnnnnnnnnnnnnnnnnnnnnnnnnnnnnnnnnnnnnnnnnnnnnnnnnnnnnnnnnnnnnnnnnnnnnnnnnnnnnnnnnnnnnnnnnnnnnnnnnnnnnnnnnnnnnnnnnnnnnnnnnnnnnnnnnnnntggtaatgagattgaatcagtaataagtctcccaacaaagagaagcccagtagtggatgactttattgctgaaccctaccaaacctatagagaaaaac

SEQ ID NO: 107946 - DNA, 514 bp, Homo sapiens; identical to SEQ ID NO: 107945
  misc_feature (1)...(514): n = a,t,c or g

SEQ ID NO: 107947 - DNA, 405 bp, Homo sapiens
cggacgcgtggggtctaaaataattttaactcctacttcaagaacccaaagcaaaataaaccataaagaagaaaaacccaaaataaatagaaaggagggaatattaaagataagagcagagattaattaagttgaaaacaaaaatcagtgaaacaaagagctggattttttaaaaacttcagtaaaattggcagacctctagcaaaactgacagaaaaggtgcaagttaccaattatcagtaacaaaacagaagctatcactacagattctccagacataaaagaggtaattagggaatgctgtgaatagctttacccacataaatgtgacaacttagatgactaatagaccagtttatccaaaaacacaaattgctacacccagccagtatgaaaaagttaatt

SEQ ID NO: 107948 - DNA, 308 bp, Homo sapiens
atcttatgttgcaaacctggcagtacagatcagtggagaaaaaatgaacaattcagtcagcatcactggagtaatttcttatctatatgcaaaaaatagaaagtgatacctacttcaagctatatacaaaaaattattccagattacatacttgaatggtaaaagcaaacatttgcaatttttagaaaacaacagaatacatcctttgaaagatgttgtaatgacataaaaagattaataagctttgacaccaataaaatgaacaactcctgttctttatgacacctgagaataaaaaatcaagaaaa

SEQ ID NO: 107949 - DNA, 418 bp, Homo sapiens
  misc_feature (1)...(418): n = a,t,c or g
cccacgcgtncggccgaacaatgtttcttgcactgataatacaagggtgtgnnnnnnnnnnnnnnnnnnnnnnnnnnnnnnnnnnnnnnnnaacagaggagcgatggacagatgataaaataggtacattcttccgtgggtgctgtagggaagcataaggaaaggagtgggtggagaatgaatggataagggagatcacagtttcatttttattttttctttgggcagagtctcgctctcactcagtctggagtgaagggccntagacacttctcgtggacaagaccttatactacactatcgccagtcgctatgatcactctaacgaggacgtggacgtatatctgtaggcattggctcggctaactatctgctcacagtgaacggaagcgagcatacagtgggttgctttttcatt

SEQ ID NO: 107950 - DNA, 327 bp, Homo sapiens
  misc_feature (1)...(327): n = a,t,c or g
aacagaggagcgatggacagatgataaaataggtacattcttccgtgggtgctgtagggaagcataaggaaaggagtgggtggagaatgaatggataagggagatcacagtttcatttttattttttctttgggcagagtctcgctctcactcagtctggagtgaagggccntagacacttctcgtggacaagaccttatactacactatcgccagtcgctatgatcactctaacgaggacgtggacgtatatctgtaggcattggctcggctaactatctgctcacagtgaacggaagcgagcatacagtgggttgctttttcatt

SEQ ID NO: 107951 - DNA, 439 bp, Homo sapiens
cagtggtgcaatcttggctcactgcaacctctgccccccgggttcaagcgattctttcctctcagtctctcaagtaactgggattacaggcacacaccaccacggccagctaattattttgtattttgagtcgagacgggaactcaccatattggccaggttggtctcgaactcaccatattggcctcaggtgatccgcccgcctcggcgatcccaaagtgttgggattatgggcgtgagccagccacggtgcccggcctgttttattgtttgaaaaacaagtacaggttgttattatccaagaattgttgatagagtatatactgtatttgaagtgtagaactgaggcagaggctgattaatataactagtttacatttgttagcctttcacatctgtgaaggaataaagtacagacaaaagtggaaaacaaaccagg

SEQ ID NO: 107952 - DNA, 422 bp, Homo sapiens
  misc_feature (1)...(422): n = a,t,c or g
acccctccatgccatcacttgaggaggggataaagaaaggtgagtacagaaatatagcctaagccanctaaaatcccttaaaagtcccttataacgttggatttggcaaggatttcttggatatgacaccaaaagcacagctcacaaaagtaaaaacagataaattagcctatttcaaaactaaaaacttctatacatcaaagaacacaatcaacaaagtgaaaaagtaaccttatggaataagagaagatatttgcaaatcatatatctgataggggannnnnnnnnnnnnnnnnnnnnnnnnnnnnnnnnnnnnnnnnnnnnnnnnnnnnnnnnnnnnnnnnnnnnnnnnnnnnnnnnnnnnnnnnnnnnnnnnnnnnnnnnnnnnnnnnnnnnnnnnnnnnnnnnnnnnnnnnnnnnnn

SEQ ID NO: 107953 - DNA, 580 bp, Homo sapiens
gcagtgagaccttggtttgccttgggtgtttagaaccaaaataaactggaagtacccaggggcaccaagagcactaagaagaagttaaaaagatgaatgttctcaagaacgtacgagaaaaattagtatttaaaaacttttttgtttgtttctttgagacaaggtctccctctggagactcccaggctggagtgcagtggcacgatcttggctcactgcaacctccgcctcctggactcaagtgatcctcctccctcagcctcccaagtagctgggactaccagcacgtgccaccaccacaccggactaatttttctattttttgtagggaaggggtctcaccattttgcacaggttggtctcgaactcctgagctcaagcaatccacccacctcagcctcgcaaagtgctggaattacaggcgtgagccaccatgtctgactaaaaacttaatttttatgactttttgttttgttttgttttgttttgagacagagtcttgctctgtcgcccaggctggagtgcagtggcgtgatctcggctcactgcaacttctgcctcctgggttcaagcaattctc

SEQ ID NO: 107954 - DNA, 273 bp, Homo sapiens
  misc_feature (1)...(273): n = a,t,c or g
aatgtcttatcagcaaacagtgctagggcaactagatatctatgtgaagaagaataaagtgagaactctaccttacatcatattaaaaanttaactcaagattgatcaaagacctagatgtaagagctaaaactataacaggcttagaagaaaacataggtgtaaattttcatgaccttgaattaggcaattatttctttaaaatatgacactaaaagcacgaaaaacaaaagaaacaataataatttggacatcatcaaactaaaaatgttg

SEQ ID NO: 107955 - DNA, 168 bp, Homo sapiens
agacttgacaccaaaagtatgatctagaaaaggaaaaattggtaagttggacttcataagaactaaaacattttggtctgctaaagaccatgttaaaaggctgaaaaggcaaactacagactgggagaaaatatttttgaaccacatatccaataaagactactgtct

SEQ ID NO: 107956 - DNA, 370 bp, Homo sapiens
  misc_feature (1)...(370): n = a,t,c or g
ccccccctttggagggccaggttggggtcccccccaggtcagggggtccagggccccccgggccaccctggtgaacccccgttccccccaaaattcaaaatttagccgggccggggtttccaggccgttattcccagttctccgggggctgggccaagggattccctttaccccggggaattaaggttccagtaatcctatcttgccccctggccttccggctggggcaccaaagcgtatctcccctcccnnnnnnnnnnnngtcaaaatgagaggcaagactgaggatgaatgggattttcagggctctctcaggtcagagttctttctgctttgggggtattcaggtaagcccaagtaatagggactc

SEQ ID NO: 107957 - DNA, 405 bp, Homo sapiens
  misc_feature (1)...(405): n = a,t,c or g
aaagaagtggtgatacctgtcacatccccatgtaacttaccagtttggcctgttcaggagttagatgagttttggagagaggctgtgggttatcattaagtaaatcaggtagagactctcattgcaattgcaggctcagatataacaactttactggagcaaatcatcatcacccttgaaacttggtatgcagctactgactcagctaaagctgtttttcatcataccaattttcaaggaccaccagaaagagtttgctgtgacctggtagtgctaacagtataccttcacagcattgccacagggtagctctattctgttctccaccatgacatggtctgtagaaatactgagcgttannnnnnnnnnnnnnnnnnnnnnnnnnnnnnnnnnnnnnnnnnnnnn

SEQ ID NO: 107958 - DNA, 420 bp, Homo sapiens
  misc_feature (1)...(420): n = a,t,c or g
nnnnnnnnnnnnnnnnnnnnnnnnnnnnnnnnnnnnnnnnnnnnnnnnnnnnnnnnnnnnnnnnnnnnnnnnnnnnccaaacccaaacccaaaatccctttttttttaggggcctattaaaaagaaatattaattgggcccccccaaaaatttggaataacccttgggaaaaatttttttttgtttaaaatttnnnnnnnnnncgggttttggcaagcctccccccttaaaacccggggtttaaggcatcccccccccagggccccccaaagggccgggaatggcaggtaaaaccccctcccccnnnnnnnnnnnnnnaaaaaggggtttcccctttttcccccggctggaaggccggggccaaacccgggaaaaaagaacccccaacttccgggcccaaggggggtttcccccccaaac

SEQ ID NO: 107959 - DNA, 417 bp, Homo sapiens
  misc_feature (1)...(417): n = a,t,c or g
ttcccggttcgacccacgcgtccgagactgctatacattaatagaggactttgtcatttcatttttagtaatggacagattatccaggcggctggattaacaaagagacatcagaattaatctacacagtagatacggaaatccttgaaaaaaatactagcaagctgaattcaacaacatattaaaatgatcagtcaccacgatcaagcagattactcctgaggaggcaaggatggttcgatatacacatataaagaaaagtgatacatcttattatcataaccaagaacaaaagccatatgggnnnnnnnnnnnnnnnnnnnnnnnnnnnnnnnnnnnnnnnnnnnnnnnnnnnnnnnnnnnnnnnnnnnnnnnnnnnnnnnnnnnnnnnnnnnnnnnnnnnnnnnnnnntcttcg

SEQ ID NO: 107960 - DNA, 701 bp, Homo sapiens
cacgtggttagcattcgtcgccaacgagaaattggggtcggcccgaaagctctagaatgcacccctcttcctccccggggccttccacctccgcgagttttatgacttaaaaaagcccacaggctggtctgaagaggaagacaaacataaagatgaagtgcttaattcaaggtcacacaatgtcggggatggacctccagatttccttactgacctgcattatcttgtggatacctgagtgaatttccacaccaacccatttttatagatgaaacccactgagacatggagcaaatttgactggagtagtcactgcccaaccccttgcctgggagcctcaacacatgacttcgccttcctctcaagtgaccacaggttggtttgaggggtttaacaaggctaagaaggtgagacgtggtcttgtaacacaggtggttaagaatgtgactttggagccagcctgctaggggctgaattctgactcagccatttactaactgtgtgaccttaggctggagtgcaatggcatgatctcggctcatcacaacctctgcttcctgggttcaagcgattctcctgcctcagcctcccgagtacctgggactacaggcactcgccaccatgcccggctgatttttgtatttttaatagagatggtttcactatgttggccaggctggtctcgaactcctgaccttgta

SEQ ID NO: 107961 - DNA, 915 bp, Homo sapiens
  misc_feature (1)...(915): n = a,t,c or g
ctgaattcggggggccaatttttcttgtggaccccccaaacaattgtggagggggccccccctcccggggggttttttgtaaaaaggggccccccccaattggccaatttggtccccacaacttttttaaaacctcttttttggcccacggggtcccccccttgtatttcccccccggggggccaaccacccggggtctcttttagtcggggaatttggggccccccgggccccaatggaaaaccnnnnnnnnnnnaaaaacacaaaaaaatgttgggggggttgcccccgcccctttttcccccacccttttgggagggggggacgaaaaattttttacccccnnnnnnnnnnnttgcggaagaccaattttggccccccccctcccacctggggggcccccgggataccccctnnnnnnnnnnnnnnggccaaatgttttttttccccccccctaaatttccctaggtccccccctttttttttaaaaaagtttttccccatgggtcctccggtaaatnnnnnnnnnnnnnaaaaaagggnnnnnnnnnnnntttttggcccctttttcggcttttcccccttttccccaggaagcccccccccgggggccccctcaaagccctctttttgggttggtcccggccttggttccccggttcccttttttttccggggtcaaaaatttcccccttaaaaattccttccccccagggtccccccctttttagccctttttcagttgaatccccttcccccttcccctttttttcatccccttcccnnnnnnnnnnnnnnnnnnnnnnnnnnnnnnnnnnnnnnnnnnnnnnnnnnnnnnnnnnnnnnnnnnnnnnnnnnnnnnnnnnnnnnnnnnnnnnnnnnnnnnnnnnnnnnnnnnnnnnnnnnnnnnnnnnn

SEQ ID NO: 107962 - DNA, 436 bp, Homo sapiens
  misc_feature (1)...(436): n = a,t,c or g
tctcgaattcccgggtcgacgatttcgtccaacaacaacctgccttatccccatttcccaaagatttaaatcattcaaaaagtaccctttcttctccaggttgctcctaagaattggatttaaaatctgtagtnnnnnnnnnnggnnnnnnnnnnnngggaaacaaagccctgctttgcccctcagccaaaagggcaggggcccgatctaacctaatggggcccttggccccccgggttaaaaggattccccggcctaaccctcccaagaactgggaatggaagccttccccccccaggcccagtaaatttttgaatttcgaggggcaaaagggaagccccaataggcccacgcgccccccccaagatcctggataaccaggcttgaccccccgccccgggctaaacccaaaggggtaaaggacttaatggaaccg

SEQ ID NO: 107963 - DNA, 398 bp, Homo sapiens
  misc_feature (1)...(398): n = a,t,c or g
tcccccctattttcgttccttgccaatattaaaaaagtttttgggaatgtgggccccccatgttttttccccccctttgggggccggggcaagttgtttccccttggtcccaagtttaaggccccccttgcccccctttaaaaaccctgccttttctaaaaacccaaaattattccggccttttggtgggcccccttaatccccccttttccgggggctttggcagcagtattcccttttcccccgggggggaaaattccctaagccaaaaattaccccttttctttttggcgggggcccnnnnnnnnnnttccctttttnnnnnnnnnnnnnnnnnngtaacaaacaaatcagtcatctacagaggaggatttgtgagagggagccaatccacgaaa

SEQ ID NO: 107964 - DNA, 542 bp, Homo sapiens
  misc_feature (1)...(542): n = a,t,c or g
tttagttttgagacagagttccagaatgtcgcccagactggagtgcagtggcagaatctcagcccactgcagccaccatctcccgggttcaagcgattcttgtgcctcagcctcctgagtaggtgggattacaggcatgcaccaccatgcccagctaatttttgcactttcagtagagacggggtttcaccatgttggccaggctgctctcgaactcccgacctcaagtgatccgcccgcctcggcctcctgaagtgctgggattacaggcgtgacacncacgcccggccgagatttttaacaaatgacagaagagtaaaagaggacccaggggtacagaagtagcaaatgaacaaagttgtctacttactttagagcccactatattactatgtgtctttaaaaagggcagggtagagtgaagaggggaggaactaagaacttaggagagcctcccccaaccccaaagctgagattcagactcttcagaaagggcacagctccacaggaacacacagcatgccggtggcaaacatacgaaa

SEQ ID NO: 107965 - DNA, 452 bp, Homo sapiens
  misc_feature (1)...(452): n = a,t,c or g
gcagtactaagagggaagtttatagctataagcgcctcatcaaaaaagcagaaaaacgtcaagtaaacaacctaacaatgcatcnnnnnnnnnnnnnnnnnnnnnnnnnnnnnnnnnnnnnnnnnnnnnnnnnnnnnnnnnnnnnnnnnnnnnnnnnnnnnnntaaaactgaaatggcaaaaatacaaaagatcaatgaaatgaaaaattggcacatgaaacaaaaaattgattttttaaaaaagataaaattgacaaacctttggccactaagaaaaaaagaaacaagactcaaataaaatcagaaatgaaagaggagacattaaaaaccgatacagcagaaattaaaagatcaacagagcggcnnnnnnnnnnnnnnnnnnnnnnnnnnnnnnnnnnnnnnnnnnnnnnnnnnnnnnnnnnnnnnnnnnnnaaatctattaagaacgaaa

SEQ ID NO: 107966 - DNA, 441 bp, Homo sapiens
  misc_feature (1)...(441): n = a,t,c or g
ccagccccgggtacttaaccttggttcttttaagcgggccccaatccctccaggccgttatttccgcccctttggggggcttannnnnnnnnntcccccgggggccgggggtccagacccccccgggccccctggtcttaaaaagccaaaaaattnnnnnnnnnnnnnnnnnnnnccccgttattccccaatctccagagggttaggccaggaacttcccttgaccccggggccgggaattccattagcttagaattcccccccggtctcccccccgggcggcaaaggtcggctccctttccnnnnnnnnnnngaaagaaaatgatgctttctttatcactggttttaagcaatttgactatgatttgccctggtgctatttgcttcannnnnnnnnnnnnnnnnnnnnnnnnnnnnnnnnnnnnnnnnnnnnnnncgaaa

SEQ ID NO: 107967 - DNA, 400 bp, Homo sapiens
  misc_feature (1)...(400): n = a,t,c or g
tccattttaaccggctttttggaggttttaatttttttccaaagggtggcccccccatttggccccgggcaaaccccccctaattgttaacccctgttcccccccccggtccttaaaggtttccaaaaaacccccctttgggggggggcccccgttttcccccttccccccaggggtagggccggaaaatttctttaacccgggggcccaaggttcccttaaaccggatttttgccccgnnnnnnnnnnntgggggccaaaccaaacccccctttccnnnnnnnnnnnnnnnnnnngtatcaaaatagctttatttatcgcttcatctcaatataattatgtctgtgccactgtggaggttgaggggatgtggaaggactgtccttaccgtcagacgaaa

SEQ ID NO: 107968 - DNA, 428 bp, Homo sapiens
  misc_feature (1)...(428): n = a,t,c or g
tttcgnnnnnnnnnnnnnnnnnnnnnnnnnnnnnnnnnnnnnnnnnnnnnnnnnnnnnncctccccaggaaaggagcacatgtgcagcagtggtgagtcccaccctgcctggaaagatatcaaaatccgagggcagaaaggaccaggagggaccattgctcacctccctcctcctaccccttaccccaaaccccgccccagcctggcagaagcctcctcaggacacaccctccaccggaggggcaggctgctgtgtgaggcactgacctcgcccgcagtggataccacctgcccctcctgaccccagtgactgttaacccagagtccatcaggggcttggtctctggcagacccacccctcagtgcgtacactctggtgtcccgggcagagtacagggcaggcgcccccaggtgcaccccccagatgc

SEQ ID NO: 107969 - DNA, 395 bp, Homo sapiens
  misc_feature (1)...(395): n = a,t,c or g
nccaatatatgcatatggaagtccaagaagaaagagagggaaaatggcagaaggcttatttaaagaaataatgaatacagttttttcaaatctgaggaggaaaatggacttccagatacacgaaacacaaaggatcctaaataggttgaatcttaagaagtttacactgagacacattaaattgtcaaaactcaaagaaaattttgaaaatggaaagaaaaaaatgacatcacatacaagataaacccataaaactatcaataagcttttcagcacaaaccctgcaggccagaagagaatgaaataatatattcaaagtactgaatgaaataaatgtcaaccaagaatgctacacccagaaaaattgtgctttaaaagttaagcatagaacgaaa

SEQ ID NO: 107970 - DNA, 415 bp, Homo sapiens
  misc_feature (1)...(415): n = a,t,c or g
ggcatcaattctacctagagcaatgtacagattcgatgcaatctctatcaaaattccaaaatcttttcttgcagaaacggaaatgctgaccctcaaattcacagagctgcaaggggccctgaaaagccaaaaccatcaagnnnnnnnnnngttggaacactcacactttnnnnnnnnnnnnnnnnnnnnnnnnnnnnnnnnnnnnnnnnnnnnnnnnnnnnaaaaagcatagacatatagaccaacagcataaaactgagcataccaaaataaactgatacatctatgaccaactgatttgtgccaagtccattcaatggagaaataagaccctgctcaacaaatggtgctgggacaactgaatttccacaagcaaaagaatgacgttggactcctacgaaatcgtcgacccggg

SEQ ID NO: 107971 - DNA, 432 bp, Homo sapiens
  misc_feature (1)...(432): n = a,t,c or g
agaatactccacccaacaatagcatttcaacagcagcattcttttcaagcacccatgaaacatatgccaagacagacaatatggtgggccattttttaaaaacccaacaaatttagcacaattcaaatcatatagggtgcattctccaaccacaatgaaatcaaactagaaagcaataataagaaaggtaacaagaaatctccaaacacttggaaactaaataacacccttctaaataatccaaaggccaaagacaaaatatcaaggggtatacaaagaatacaataatnnnnnnnnnnnnnnnnnnnnnnnnnnnnnnnnnnnnnnnnnnnnnnnnnnnnnnnnnnnnnnnnnnnnnnnnnnnnnnnnnnnnnnnnnnnnnnnnnnnnnnnnnnnnnnnnnnnnnnnnnnnnnnnnnnnnnnnngacgaaa

SEQ ID NO: 107972 - DNA, 453 bp, Homo sapiens
  misc_feature (1)...(453): n = a,t,c or g
cgggtcgacgatttcgtggattttctaggtagaccagaatggtactgtcaaccaacttgacctgattgacatttatagaacactcaacaactgtggaacacacctacacattcttttgaagttcacatggaagatctaccaaggtagaccatattttgggtcaaagaaaaaggtctcagtacattttaaaggataaagttatacaatggatgttccaagactgcaatagaattaaattagaaatgaataacagaaaaatccttagaaaatcccaaaatatttaggaactaaatatcgtacttctagataactcatggatcaaagaagatattagaaagtagnnnnnnnnnnnnnnnnnnnnnnnnnnnnnnnnnnnnnnnnnnnnnnnnnnnnnnnnnnnnnnnnnnnnnnnnnnnnnnnnnnnnnnnnnnnnnnnnnnnnnnnnnnnnnngg

SEQ ID NO: 107973 - DNA, 375 bp, Homo sapiens
tcgacgatttcgtacaatgcccatgttcagcactttagttcaccatgttactgggagttctagtcagagcaagtataaaagagaaacaaataagggcattcatattagaaagggagaattataaatatcccaacagatacaaataaaatatataggaagaaacttaaccaatcaagtaaaatgtatctacaaggaaaactatgagtcattgatagaaattgaagaggacactagtaaatgaaaagatactgcatgttcatttagcgggagaagttatattgttaaaaacccatattacatatagcaatctatagtttcaaaatgccagtgttattttttcacagaaataggaacaagacgaagaatagacacagt

SEQ ID NO: 107974 - DNA, 395 bp, Homo sapiens
  misc_feature (1)...(395): n = a,t,c or g
ttatatgaaaactcagactaatatctctcatgaacacagatgcaaaaatccacaaaatattagcaaatcaagtccaataatgtataaaaagaattaggcaccatctgggatttattccaaatnnnnnnnnnnnnnnnnnnnnnnnnnnnnnnnnnnnnnnnnnnnnnnnnnnnnnnnnnnnnnnnnnnnnnnnnnnnnnnnnnnnnnnnnnnnnnnnnnnnnnagcatacaacaaaaccccacacccattcattaaactctcatcaactaggaatagaggtaaacttcctcaatttgattaaaaaacaggtacaaaaaccctatagctaacatatttaatgtcaaacttactaaatcagagtgttatcatcgcatggtggaaactcaggttgcta

SEQ ID NO: 107975 - DNA, 228 bp, Homo sapiens
ttttttttttgagacagagtctcactctgtcacccaggctggagtgcagtggtgcaatcctgggtttaagcgattctcctgcttcggcctctcgagtagctgggattacaggtatgcccccccacgccccagctaatttttgtatttttagtagagacagggttttactatgttgcacaggctggtctcaaactcttgagcccaggtgatctgcccgccttggcctct

SEQ ID NO: 107976 - DNA, 434 bp, Homo sapiens
  misc_feature (1)...(434): n = a,t,c or g
ttagnnnnnnnnnnnnnnnnnnnnnnnnnnnnnnnnnnnnnnnnnnnnnnnnnnnnnnnnnnnnnnnnnnnnnnnnnnnnnnnnnnnnnnnnnnnnnnnnnnnnnnnnnnnnnnnnnnnnnnnnnnnnnnnnnnnnnnnnnnnnnnnnnnnnnnnnnnnnnnnnnnaagaggaagaaatccaaatccttaggttctggaaaggggtaaattttaatgaccgtggatttggcaatggtttgtaaagtatgacaccataaacaaaaggaaaaaagagaaagcaaatgatagagttcatcaaaatttacaacctgtgcatcaaaagacaccatcaagaaaataaagagaaaacccacaaaaagggagaagacacttgcaaatcatgtatctgataagggtcgagtgtcaggtattatgaatctcgcagcgcggtcat

SEQ ID NO: 107977 - DNA, 446 bp, Homo sapiens
  misc_feature (1)...(446): n = a,t,c or g
tatgagcctgagagaattctcacgagatggcaacaaaatgaacaggtggttttttgaaatgggaaacaaaagcaactttcctatctcctgagtaagaaaaaaaagcaaagagccaaatgaataaagtcacagatgaaaaaggagacaactaataacacagaaattcaaaggattattagagactattatgagtcaacacataaataaataaatnnnnnnnnnnnnnnnnnnnnnnnnnnnnnnnnnnnnnnnnnnnnnnnnnnnnnnnnnnnnnntttgaataatgaaaaaatccaaaacttgaacagaccaataacaagtaacaagattgaatcactagtagaaagttttccatcaaagaaaagcccgggacctgatagctccagtgcagaattctaccaaccatttaatgaagaattattaccaattctactcaaactattcta

SEQ ID NO: 107978 - DNA, 205 bp, Homo sapiens
aaaccttgaccgcggtctgaggaattcggcacgaggacgaaatggcatgctatagactgagtgaaaacatttgcaaactgtatatctgacaaaggacttgcatctaggatatatgaagaactcttaaaactgaacacattttaaaaaatcccctgagaaaatggacaaaagacacgagcagacatctcaccaaaaaagggatatg

SEQ ID NO: 107979 - DNA, 763 bp, Homo sapiens
acagcaagaacgggtctgtttaatgacacagctgggtctggttacaaacatcagaaactagaaaaggaggacgggcggttgcacagatgaggatgaggatgaagatgaggatgaggatgggccaggaggggacacagcaggagccacagcagcaaaacatccttgaagacgacacacgtgaccaaggggcacacacggggggcccccctggcaagcctgacgcagatgaatagacagggccgactgccggccaggaggagggtggggtggggaaagccctcggccctcggagctgagggtgagacccaggcatgtggtcccgccgacctgctgcccagcagcccggatcccccggggctgccctggtggccaaggcaggtggagctagcggtcgaggtttctggactgaggcccctcccccagtgcggtcatcccacccagaacttcgctctgcccctgcccattctaggacagccggtgagtcagttcctctgagggagtagggggagcccactcctttctgcctggaagtggaattcaggaatgtggggagctggtctgagaaggggctgggctttgccgccaagccgggttgccccagccctgcccctccaggcccaggtcctctgcgctgctgtgggatttcctctttgccagaacactctgttctctgcacaaccggaacccctccctgccccactcacaggtgggccaaaccgaggcttctgggcgccgcggatacacattctagatatgtatgtgt

SEQ ID NO: 107980 - DNA, 993 bp, Homo sapiens
gctctgtcaccaggctggagctcagtggtgcgatctcggctcactgcagtctccgcctcgcgggttcaggcaattctcctgcctcacccttctgagtagctgggactacaggcatgccccaccatgcccagctaatttttgtatttttagtagagacggggtttcaccatgttggccaggatggtctcgacctcttgaccttgtgacccgcctgcctcggcctcccaaagtgttgggtttacaggggtaagcaccaggccaagccaggaatttcaaattttttgtctctgtgtgtctgcgaataactgagaaagtgccacagtattgatttgggggttaaaaacattwtttkagtggrgtaggcaaattctcaaatacaaaatctatgaataaggctcaagtatacgttcatttggcattttaagtaccccaggttccctcattatctgagggagggcagcatatgaaacttatttagacttcttcttaaacatttaatgtaatttaatttatttgagacaggatgtctgttgcccaggctggagtatagtggcgcgatctcggctcagtgcaatctctgcctcccaggctcaagcaattcttatgcctcagccacctgagtagctggtattacaggcgtgtgccaacacaccctgtgaatttttgtatttttagtagagatggggaatttgccatgttggccaggctggtcttgaactcctggcctcaagtgatccgcctgccttagcatcccaaagtgctgggattacaagtgtgagccaccgctcctgggctagaactcttttttttttgagatggagtcttgctctgttgcccaagctggagtacagtggcgcaatcttggctcactgcaacctctgcctcccaggctcaaacaattcttatgcctcagcctcccaagtagctgggactacaggcacgcggcaccacacccagctgatttttccatttttagtagagatggggtttcac

SEQ ID NO: 107981 - DNA, 205 bp, Homo sapiens; identical to SEQ ID NO: 107978

SEQ ID NO: 107982 - DNA, 445 bp, Homo sapiens
  misc_feature (1)...(445): n = a,t,c or g
ggtggcaggaattcggcacgaggttgtggtcaagacggatgaaacagaagtgctaagcaactgcatactacccaaagcaggctacagattcttgcactctctattaaaatgctcgatggcatgttttacagaaatagaaaaacaaccctaaaattagtatggaacaacataagaccctgaatagccagagcagtcttgannnnnnnnnnnnnnnnnnnnnnnnnnnnnnnnnnnnnnnnnnnnnnnnnnnnnnnnnnnnnnnnnnnnnnnnnnnnnnnnnnnnnnnnnnnnnnnnnnnnnnnnnnnnnnnnnnnnnnnnnnnnnnnnnnnnnnnacccactcatttatgattaactgatctttggtaccaagaacataaaatggggaaaggatagtctcttcaacaaatggtgttgtgtaaactgaaaatccacaggcaaaagaa

SEQ ID NO: 107983 - DNA, 609 bp, Homo sapiens
acttcatgctctgaatactgaataaccatgaatgactgaatagtttagtccagatttttacagaggatacatctatttttatcattatttggggtttgaaaaatttttttttacaccttctaatttctttatttctcaaagcagataattcttctgtgtgaaaatgttttctttttttaatttaaggtttaaaattccttttccaaatcatgttgattttgctctttgctttttcgttgtctgagaaattgttggcgtagatttggcttctggtatgtgtttctgattgcttcctgttgagcacaaagtgagagctgccactgagcagccctgccaggggtgctgtttcaggctgggcatcgccaggcggcctccctgcaaaccaagggctgggggcaaaggggcatgatccagggtcccccagggtgggctcagctccagggagaggccacccacgtggcagccccacctcttgagagcccccagtgccggagcagaaaggaccctggacccagaggcagatactgcggggtggtagaaaaggtagagtaggctgtggcaatggaataaaacacgattaaaaacgttaagaactgcgttaaaaaaaaa

SEQ ID NO: 107984 - DNA, 314 bp, Homo sapiens
aaagcttagacaaagtacaatgttttatttgcagttcatggtggattttcccagtggtctgcatggagagcctgcagtgtcacctgtggaaaaggcatccaaaagaggattcgtctgtgcaaccagccccttccagccaatggtgggaagccctgatggtgtaatggttcacctttgtatagtggatggtagctggtcggaatggagtctttgggaagaatgcacaaggagctgtggacgcggcaaccaaaccaggaccaggacttgcaataatccatcagttcagcatggtgggcggccatgtgaagggaatg

SEQ ID NO: 107985 - DNA, 396 bp, Homo sapiens
tctgtattagaaactgcgtgtcgccatgttgcccaggctttcttaactcctgggttcaagcgatccacttgcctctgcctcccaaagtgctgggactataggcgtgcgacctcgcccggcccataaatgattttatgcttgtagtaacaattctaaaccaggggttagcaatctctggcataaaaaccaaagagagcaaaagtcaacagtgaagacttaatggccagtgcataacagtataatctcccttgattcaagttaacattttccagtaaacatttcttgagtacctgctaggtgccaaacagtcctacctggatcagcatttcctacacctacacctcctgacttgacacacagaaaggactctcaggcttcatatgaatgctgacgctg

SEQ ID NO: 107986 - DNA, 2494 bp, Homo sapiens
gggatctcaaagagatatttgtacacccatgttcatagcagcattattcacaatagccaagaggttctggaagcatcccaaatgtccatcaacagatgaatagataaaggaaatgtggtatatacagtcaatggaatattattcagcctttaaaaagaaggaaatcctgtcaaatgtacaatgtggatgaaccttgaaggcattatgccaagtgaaataagccagccaacaaaagaacaaatgctatatgattcctccatgtgaagtatgcaaagtagtcaaaatcatacaatagaaagtagaaaggtggttgccaagcaacggttgggggaaggggagagggtgaatttgtatttagtgggtacagagcttgtgttgcaagaattctagagatctgttgcaaaacaagtgtgattgtacttaacactactgaactgtatacgtataagtttgagaaatatctcttttaaaaagggggaaatgtgaaggcttttgcatgtatgccctaggcaatgcatagaattcttagaaaaataaacatggtaaaaaaagaagtctttgttaactttctgcagttcacctgtttcaaagtatagttacctttaaaagggtaaacacacaagatatgcattttccaaagcatacaggctttcctcctagctgtcttgttttttatttattttttattttttttatttttttgagacagagtctcgctctgtcacccaggctggagtgcagtggcgcgatctcggctcactgcaagctccgcctcccgggttcacgccattctcccgcctcagcctctctgagaagctgggactacaggcgcccgccaccacgcccggctaatttatttttgtattatttttagtagagacggggtttcacccgtgttagccaggatggtctccatctcctgacctcgtgatcaggcccgcctcggcctcccaaaagtgctgggattacaggcgtgagccactgcacctggccttcctagctgtcttgtgaaacgataagtcaaaaccctactgcagtgagttttccaaactgaagggagaagcaatgtacagaatgcctgacttgcccttacatcttatacctggtgcttctggcaggcagattatccttactctttttcactttgaaccatgtcctggttggcatggccagcttccctgcagaggtgatagaaactgacttgaggcagcttctttctccatgccttacttagaagaccctcaaaggggcacagcagatttccctggctactgatacaccttaacaagaagcttgtgttttttatgccctcaaaagtgttttacttatactttcctagacataaaggtgggaaaatgggcctaaggtctgtcaaaggtcttgggaaaagaagattgtattaaaattgctgtccgtcttcattgaaattaatactaggatccgatacaatgctttcttttacagtattagtggttggtgaaagacttccttcctattgttacagtatatggtatatatctggtaaaaattaatgaggatatcctttaacttgtagattagaaagcgactaaaaactcataggggatttactaaagaagcaacaatgggaagaagcagccgatcctcctcagtgcacctttttctgttgcacagtacagtgcacagtgtgctggcatcaccatatagggcaagctgtgaccgcctttctcctttcccagggctacatggtgccaagcaggttcagtgtacactggttaccaacctgtctgattccattgtgacagaacacactcacacccaatacattacatgaagcagatttattacttacagacaggaagcaagggacaaaagaggccctggctccatgtgtgagccagtcccccagggctcaagaaagctgcccagggcggggctgtatggagtcttgattgtacgtgccccacttgcaccacagcctgccttgggttatataccataggagccacataactcattgggcaaagctttaaagtacatcctccttccaggggaaagaggaacacaacctcgctgtctcaaacagttcccctaaatcaagatgttaacaattccccctaggagggaacaacaacaaggcccaaccctgtttccaggcagttccctcccatatccaggatattgccattccccagtgcattcctacagttattccttaagaactacaagcaagggaaaaaggaagaactgggtcagtcccaaggcccacctggagaactgtcttgtacatgggttagggtaaagttggctattcctaaaactaagcatccacccaaaagaagtcttgggaagatgtctttccctgttaaattcagatgatggtaattatagtttggaagtggaattggcttttagagttacttccttgtaatgaaattaacaagcaattcaggcctatttctgaaaatgaattcagtggttaattgttaaaaataaatgtctaactcctaaaaaa

SEQ ID NO: 107987 - DNA, 443 bp, Homo sapiens
  misc_feature (1)...(443): n = a,t,c or g
ccctcggacaagcggtggaatttnnnnnnnnnnnnnnnnnnnnnnnnnnnnnnnnnnnnnnnnnnnnnnnnntctctacnnnnnnnnnnnnnnnnnnnnnnnnnnnnnnnnnnnnnnnnnnnnnnnnnnnnnnnnnnnnnnnnnnnnnnnnnnnnnnnnnnnnnnnnnnnnnnnnnnnnnnnnnnnnnnnnnnnnnnnnnnnnnnnnnnnnnnnnnnnnnnnnnnnnnnnnnnnnnnnnnnnnnnncggctatactccccaaactgatccaaaaactcaatacaatccccatctaaattccagctggcgtttttacagaaattgacaacctgatcctaaaattcacagggaaatacaagggacccagaatagccaaaacaatgtttgaaaaagaataaccaagtgggaggattcatacttgctgaattcaaaacttcaaaact

SEQ ID NO: 107988 - DNA, 432 bp, Homo sapiens
  misc_feature (1)...(432): n = a,t,c or g
aggcatgagccaccaaagcacccagaccattaatatgaatttaatgttctccttttagagtcaaacacagccttgacacatgcataattcattcacattaaaaaccttaaatgannnnnnnnnnnnnnnnnnnnnnnnnnnnnnnnnnnnnnnnnnnnnnnnnnnnagaggggaaaatatttatgacattggatttggcaatgatttcttgaatgtgacaccaaaagcacagacaacaacaacaaaaaacatagataagttggacttcatgaaaatttaaaactttgtgcatcccaggacnnnnnnnnnnnnnnnnnnnnnnnnnnnnnnnnnnnnnnnnnnnnnnnnnnnnatcatatatctaataagagattggtatccagaatgtgtaaggaacttctacagttcaactctaacaatggaagtgcggcc

SEQ ID NO: 107989 - DNA, 332 bp, Homo sapiens
gcagaaaatctgtaaggctcctaagaacatcctggttgctggcagccatttctttaagactttatatagtgttaaaaactaagaaagccctaaccgaaataatactacccacttagatactgcagcagtcaaaatttttcagtccttgtggacttcttgtattctggtaaccttgtactcacaagccaaaataatgacagtggcctatcttcaaacaagtgaaatttcaaacttgctgaaattttattacagatgcctaaatttattaaagattaaatataagcattaaatcagaagttccatgggtctgcagttgtggactataataatag

SEQ ID NO: 107990 - DNA, 630 bp, Homo sapiens
  misc_feature (1)...(630): n = a,t,c or g
gtgttgcggaatacgaacctggctcaagaagaaatagacaatctaaatagatgaaaataggtaaagagattaattagaaaaagaaactttccacaaagaaaagcccaggcccagatgacttcactggtgaattctaccaaacacttaaagaagaattaataccaattcttcacaaaccttcaaaaaattagaagaggctggaacacttcccaactcattctatgaggccctgatgcaaaagcagtcaaagacatcacaagaaaactacagatcactatttcttataaatatgnnnnnnnnnnnnnnnnnnnnnnnnnnnnnnnnnnnnnnatactaatatgaaaatgattatatactatggccaagtggattttatcccaagaatgcaaggatggtttaacatctgaaaatcacttagtataatatactatattaataaagtaaaaaacgaaaactcacacaataatttcaatagacacaggnnnnnnnnnntgnnnnnnnnnnnnnnnnnnnnnnnnnnnnnnnnnnnnnnnnnnnnnnnnnnnnnnnnnnnactttttcagcctgataaacagtatcttcaaaaaaacctacagacagcatcaaacttaatcgttaaagactggatgc

SEQ ID NO: 107991 - DNA, 441 bp, Homo sapiens
  misc_feature (1)...(441): n = a,t,c or g
tgagaatcctttaggaaaaaagaccaaaaaagaaagaagaatgcctacagaatccataaaatagcctcttttggcatttctaaaagttattggccttaagggggagactgaaagagagatagggaaaaaagttttctgttaagggctaataacagagaacgtcccaaacatagagaaagatttcaatattcaagtacaaggttacagaacaccaagcagatttaaccaaaataagactaccttaggatatttaataatcaaactcctnnnnnnnnnnnnnnnnnnnnnnnnnnnnnnnnnnnnnnnnnnnnnnnnnnnnnnnnnnnnnnnnnnnnnnnnnnnnnnnnnnnnnnnnnnnnnnnnnnnnnnnnnnnnnnnnnnnnnnnnnnnnnnnnnnnnnncacaaaatttacccagatgtggggtcatgcgcctgaagcg

SEQ ID NO: 107992 - DNA, 560 bp, Homo sapiens
  misc_feature (1)...(560): n = a,t,c or g
atctgcttaccccaagcttggcacgaggatccatattgtagcatgtgtcagaatttcccttcctttaattcttttaaagctgaaaataacattctattttatgtgtatgctacattttgtttctccattcatcccccaatggtcactgggattatcttcacattttgttgctgtgaataacgctgctatgaatatgtgtgcaaatatttgatttttggggtatatacccagaagtggaactgctggatcttacaataattccgttgcaatggctggcggtaatattgttctggatattaccagcaaggccgatagtttgagttcttctactcaggcaagtgatgttattactaatcaaagaagtattgcgacaacggttaatttgcgtgatggacagactcttttactcggtggcctcactggattataaaaacacttcttcagggttctgggcgtaccgttcctgtcttaaantccctttaantcgggcctccngtttagctcccgctctggattctaacgagggaaagcacgttatacgcttccgttcaaaggcaacc

SEQ ID NO: 107993 - DNA, 292 bp, Homo sapiens
  misc_feature (1)...(292): n = a,t,c or g
gcaataacagaatactgcggatagttttatgctaacacattgaataacttagatgaaatggacaaattgctaaaaacacacaaactatcaaaactgacatgaagaaataccaaggctgaataaacctgcaatatgcaaggagattgaatcaataatcaggaaacttccaacacagaaaagcccaggaccagatggcttcactggtgaattcaacctaatattttaagaagaactaacaccaatcttgnnnnnnnnnnnnnnnnnnnnnnnnagagattgacgggtaatactt

SEQ ID NO: 107994 - DNA, 460 bp, Homo sapiens
  misc_feature (1)...(460): n = a,t,c or g
ctctgctctgcggaattcggcacgagtgactttataatattggaaaggaaggatttcatggcccagtggaacacaacagagaacccagaaataaatccatgcatttacagccagctcattttgcaccgaggcaccaaaaacataccatggggaaacagatggtgtcttcaataagtggtgctgggaaaatgagatatatctatgtgtgaagaataaaactagacccctgtgcttcaccatatataaaaatcaaattgaaattaattaaaaacttatatgtaagaaactacnnnnnnnnnnnnnnnnnnnnnnnnnnnnnnnnnnnnnnnnnnnnnnnnnnnnnnnnnnnnnnnnnnnnnnnnnnnnnnnnnnnnnnnnnnnnnnnnnnnnnnnnnnnnnnnnnnnnnnnnnnnnnnnnnnnnnnnnnnnnnnnnnnnnnnnnnnnnnnnnnnnnnnnnnn

SEQ ID NO: 107995 - DNA, 460 bp, Homo sapiens
  misc_feature (1)...(460): n = a,t,c or g
tttaaacccggccactgtttgtnnnnnnnnnnnnnnnnnnnnnnnnnnnnnnnnnnnnnnnnnnnnnnnnnnnnnnnnnnnnnnnnnnnnnnnnnnnnnnnnnnnnnnnnnnnnnnnnnnnnnnnnnnnnnnnnnnnnnnnnnnnnnnnnnnnnnnnnnnngcagaaatggacaaagtaatcctaaaattcatatggaattacaagggactccaaatagccaaaacaattttgagaaagaagcaagttgaaggattcatatttctcaatttcaaaacttactgcaaagctgcagtaaccgagacagggtggtgctgggataaggacaggtacataggtcagtggaatagaattgagagtcctcaaataaactttacacttaaagtcaatacacggaaaatcctcttttctctaagtgctgcagagacaactggatgtctacatgtaaactcggcgggatt

SEQ ID NO: 107996 - DNA, 434 bp, Homo sapiens
  misc_feature (1)...(434): n = a,t,c or g
aattccggacgagaannnnnnnnnnnnnnnnnnnnnnnnnnnnnnnnnnnnnnnnnnnnnnnnnnnnnnnnnnnnnnnnnnnnnnnnnnnnnnnnnnnnnnnnnnnnnnnnnnnnnnnnnnnnnnnnnnnnnnnnnnnnnnnnnnnnnnnnnnnnnnnnnnnnnnnnnnnnnnnnnnnnnnnnnnnnnnnnnnnnnnnnnnnnnnnnnnnnnnnnnnnnnnnnnnnnnnnnnnnnnnnnntaattcacatatccacagtgaactgatttgtgacaaagacaccaaggacactcattggggaaagatagtctcttcaattaattgtgctgggaaaactggatattctggaactagactgccacctctcaaaatggatcaaagacttaaatgtaagacctgaagcattgaaactactagtagaggacatagtggag

SEQ ID NO: 107997 - DNA, 402 bp, Homo sapiens
  misc_feature (1)...(402): n = a,t,c or g
acgctctgaggaattcggcacgnnnnnnnnnnnnnnnnnnnnnnnnnnnnnnnnnnnnnnnnnnnnnnnnnnnnnnnnnnnnnnnnnnnnnnnnnnnnnnnnnnnnnnnnnnnnnnnnnnnnnnnnnnnnnnnnnnnnnnnnnnnnnnnnnnnnnnnnnnnnnnnnnnnnnnnnnnnnnnnnnnnnnnnnnnnnnnnnnnnnctcgaaattacctcgggccaaattcggcccgaaattttttacaaaggaggggctgccaaaaacatacgggagggggccaaacccaaaggattcggaccctttttttttggaggaaccaaaaattatgggtggaccgggggcccaaataaatggaaaaaagggaaaaaaggccccttggaaaccttttaaaaaaaacgcga

SEQ ID NO: 107998 - DNA, 431 bp, Homo sapiens
  misc_feature (1)...(431): n = a,t,c or g
cccacgcgtccgcggacgcgtgggtctaaatgtaaaacataaaactattaaacttttagaaaaaaatctttatgagctagggttaggcaaagacttcttaaacataacacccaaatgacagtacataaaataaaaagttgataaattttatcaaaattaaaactctttgcttggcaaaagacattaatgaaaatacacacaagtcacagcctgggagaaaatatttgcaaatcccataaacaacacagannnnnnnnnnnnnnnnnnnnnnnnnnnnnnnnnnnnnnnnnnnnnnnnnnnnnnnnnnnnnnnnnnnnnnnnnnnnnnnnnnnnnnnnnnnnnnnnnnnnnnnnnnnnnnnnnnnnnnnnnnnnnnnnnnnnnnnnnnnnnnnnnnnnnnnnnnnnnnnnnnnnnnnnnnnnnnnnnnnnnn

SEQ ID NO: 107999 - DNA, 412 bp, Homo sapiens
  misc_feature (1)...(412): n = a,t,c or g
ttttccagcaaagaaaagcctgggacccagtggcattattgctgaattctaccaaacatttaaagcaaaaccagtagcaactctactcaaactaatcannnnnnnnnnnnnnnnnnnnnnnnnnnnnnnnnnnccccgggggaaaaaacccttttccccaaccctttttaaggggcccggggtccccttttccccaaagccaaaaaaaacccctttaaaaaaaaannnnnnnnnnaattttttggaaaaaattttggccaaaacccccccaaaaatccccaaaaattttttttccccccccctttaaaaaaaattttttttgggcccagggggttttaccccagggaaccgggggggacccacctttggaaaaaaaacggggggaaaaaccttgccnnnnnnnnnnnggaan

SEQ ID NO: 108000 - DNA, 396 bp, Homo sapiens
gtacggcaccgtaatggaagggtccacccacgcgtccgtacagtatcaactccgcagatccactttatccatgcccagcttcgcagacctctggggcccggcgggttcccagttcccccgcttcttccgaggagacagcggaggcgaggccaccgggctgtcaggctgaagctccgtggcggccgggtcctgcacgcagagaagaccccagcgccggcgcggatcagggctgggcccacgggactccggacgcgccgcgaaagcgttgcgctcccggaggcgtccgcagctgctggctgctcatttgccggtgaccggaggctcggggccagcatggcccccacgctgcgacaggcgtaccggaggcgctgggggatgggctgccggctgtggtgg

SEQ ID NO: 108001 - DNA, 402 bp, Homo sapiens
cagagcgtttctagcgaagactgcccaggcctggctcggatttcagtcgcggggccccaggctacttccccccgggccagcagcagggccgagccgctgccctgttggctgaggcattccctgcccccacccccctcctggccttgaggaccgcagtgtgtacccttgttggtagcggcagcagcccgggatccctgtctcccctgctcagagcatctctgtctcgctcttctccccgcttctgagcttggcccagtccctgaccccctcgctagctgagagagctgctttccttcctctcctgcccacagctcccagttcccaggctggggccaccgtgcggagccgctttgggatgctaaacatcaaaaaagcccagcctggggtttcagggcccgaagc

SEQ ID NO: 108002 - DNA, 402 bp, Homo sapiens
  misc_feature (1)...(402): n = a,t,c or g
aaaccgttataccctggaggggtaagatcccagaagataaaaattggccactgcacttcacgcctggaagcgagggagaatctcctttnnnnnnnnnnnngaggtatcataaaaaatgctcaaacttccaaacttctctccacaaatggtgctagaacaactggacatcaacatgccaaaaataaataaatcaaatcaaatctatacacagaccttagtctcttcacaaaaattaactcaaaatggatcatagagctgaatgttaaatgcaaatctataaaactcctagaagataacataggagaaaatctacatgactgggttttgtgaattttttcttttgagacaagagtctcaaaaaccaaaacagagcgaanccctctgctcttgaaaaacattttt

SEQ ID NO: 108003 - DNA, 387 bp, Homo sapiens
  misc_feature (1)...(387): n = a,t,c or g
nnnnnnnnnnnnnnnnnnnnnnnnnnnnnnnnnnnnnnnnnnnnnnnnnnnnnnnnnnnnnnnnnnnnnnnnnnnnnnnnnnnnnnnnnnnnnnnnnnnnnnnnnnnnnnnnnnnnnnnnnnnnnnnnnnnnnnnnnnnnnnnnnnnnnnnnnnnnnnnnnnnnnnnnnnnnnnnnnnnnnnnnnnnnnnnnnnttggtggaatctttaaggttttctattcatacatatgaaatcatatcattggcatacagagataattttacttcctccttttcaacttggatgccttaaatttcttttccttgcctaactgctctgactaaaactcccaacactatgctgaatacaatggcatgagcatgcatttgccttggccctaaccttg

SEQ ID NO: 108004 - DNA, 445 bp, Homo sapiens
  misc_feature (1)...(445): n = a,t,c or g
cgcggcggcagagcgcgataagaggagggcggagggcgcaaacgaggaatgccagaagctggcactaagtgagaggagaaggtggacggccgaggggggataggggcagcgcacgaaagtaagaaccaacagaagcaggagggacgagcgaagaagtgaagcggggcaagcaccgcaggcgcagaagggatcactggaaagagaggtaagaacagcgagggccgagacgggggagggaggaatacaccgcggnnnnnnnnnnnnnnnnnnnnnnnnnnnnnnnnnnnnnnnnnnnnnnnnnnnnnnnnnnnnnnnnnnnnnnnnnnnnnnnnnnnnnnnnnnnnnnnnnnnnnnnnnnnnnnnnnnnnnnnnnnnnnnnnnnnnnnnnnnnnnnnnnnnnnnnnnnnnnnnnnnnnnnnnnnnnnnnnnnnnnnnnnnnnnnnnn

SEQ ID NO: 108005 - DNA, 386 bp, Homo sapiens
  misc_feature (1)...(386): n = a,t,c or g
cgctaggttaatggaacagcatagagtccagaattatatttacactaatatggccagttgatttttttttcacaaaagtgcaaaagcaattcaatggcaaaagaatagtcttcaaaaaatggtgtgggacaattggacattcgtatgtaaaacnnnnnnnnnnnnnnnnnnnnnnnnnnnnnnnnnnnnnnnnnnnnnnnnnnnnnnnnnnnnnnnnnnnnnnnnnnnnnnnnnnnnnnnnnnnnnnnnnnnnnnnnnnnnnnnnnnnnnnnnnnnnnnnnnnnnnnnnnnnnnnnnnnnnnnnnnnnnnnnnnnnnnnnnnnnnnnnnnnnnnnnnnnnnnnnnnnnnnnnnnnnnnnnnnnnnnnnnnnnnnnnnnnnnnnnnn

SEQ ID NO: 108006 - DNA, 348 bp, Homo sapiens
ccaaattggtttactgggtagatctttacttggactatgtgggagtagtggactatcaaggaaaaaatagacacactgtcattcaaggcagacaattatgttttgccctctttataggtcagacatctttatggtataactgtgttgaagattatttgtatgcaaccaattctgataactacaatatcgtaaggataaaccgatgtgtgcaagtgatattcgttcggtaattacaagttattatcattggggactttgtatttctccggacagtgctctgccttcagtcagcacccttgcatgtgtagtcgatccatatggaatgtcagtaggattggatcgtgtaga

SEQ ID NO: 108007 - DNA, 403 bp, Homo sapiens
  misc_feature (1)...(403): n = a,t,c or g
aaatagttcacatagaaagtatcagaagtctgttcttctgctcaaggcgtgattcnnnnnnnnnnnnnnnngaaaacggaatttggcttggctttggccccccaacggggggggcgggggccaaataggggcacatggagccccaaaccccctgggttaagggaaccccccgcccccacccccccaagaggggggaccaccggggnnnnnnnnnnnnntggggaaaattttttggggaagggggcctggcggggtgccccagggggccccaaacccccggcccccagggaacccccggcccaaaccctccaaaggggcgggaattaagggggggccccccttccccaccccaagaatcttttttaatccaaggtccaaaccccaaaaaaaaactcttcccccg

SEQ ID NO: 108008 - DNA, 1119 bp, Homo sapiens
  misc_feature (1)...(1119): n = a,t,c or g
agagcaggatcttccgggactgtcgatctcgtgcggcagccaggctgtgtcccctgactgttggagcgtctgcgacccccgcatccccgcaccctcaaggcacctccaaagatgatgatgggttgtggggagtcagagctgaagtcggcggacggggaagaagccgcggcggtcccggggccacccccggagccccaagtcccgcaactccgagccccagtgcccgagcccggcctggacttgagcctgagcccgcggcccgacagccctcagtcgcggcacggcagtcccgggcggcggaaggggcgggcggagcggcggggcgcggctcggcagcggcggcaggtccgcttccgcctgacgccgccctccccggtgcggtccgagccgcagcctgcggtgccgcaggagctggagatgcccgtgctgaagagcagcctggccttgggcctggagctgcgggccgcagccgggagccactttgatgctgcgaaggccgtggaggaacagctgagaaagtcgttccagatccgctgcggcctggaggagagcgtgtccgagggtgaggggggcgggcggccggccgcgtgcgggagtcggggtgaggcgcgccactcacctccgtccccgctgcgctctcagggctgaacgtgccgcgctccaagcggctcttccgggacctggtgagcctgcaggtgccggaggaacaggttctgaatgccgcgctcagggagaaattggctctcctgccgccacaggctcgagccccgcacccaacaggagccacctgggcctgggccagacatgaccatcttgtgtgacccagaaacgctattttatgaatctccacacctgaccctggacggtctgccccctctccgacttcaactccggccccgcccttcagaggacaccttcctcatgcaccggacactgaggcgatgggaagcgtagaccccaaagatccctggagggctagttcgtatttttgtgttaaactatttgttagaataaagtaattttgctaatnnnnnnnnnnnnnngggggggccggtctaagggatccagggttactgcggcgggtggcgacgaaaaaacttttattatgggcccgaaaag

SEQ ID NO: 108009 - DNA, 387 bp, Homo sapiens
  misc_feature (1)...(387): n = a,t,c or g
acatataaatatttaataagaattaaaatctttaataaaaaatagaagccccaactggagtttatcctaggaatgcaaggttggtttacattgaaaagtgaatttatttcactatattaacaaaattaaggagaagtnnnnnnnnnnnnnnnnnnnnnnnnnnnnnnnnnnnnnnnnnnnnnnnnnnnnnnnnnnnnnnnnnnnnnnnnnnngcaaacaggaacagaggagaatttatttcctcaacctactgtacgaaaaacctacagctaatgtccagaaccaggcaatgatgtccactctaaccattcagcatcattctgaagatgctagtcagtgcagtgagacaagaaaaagagaggcagataaatatgaaaggaagaaaaa

SEQ ID NO: 108010 - DNA, 364 bp, Homo sapiens
  misc_feature (1)...(364): n = a,t,c or g
gaatgtacagggcccaaaatagccaaaatcatcttggaaaagaagaacaacgttggaggactcccaattcaaatttcaaaatatagtataaagctccagtaatctaattttggttgaaagtccccgtaatttnnnnnnnnnnngctatattaatgaagacagtgtagtactaactttaaggatagaaatcaagatgagtggtatagactgagagtctggaaaattaactctcacatttatggtcaactgatttctttcaaagggtaccaagacaattcaatggtgaaaaagtcttttcaacaaatagtgctgtaacaactggctattcacatgcaagagaatgaaactagacctcttcctaata

SEQ ID NO: 108011 - DNA, 588 bp, Homo sapiens
ttatgaacaatttcgtggcaataaatttcaaaatttcatgggcaaattactcaaagctatgttagcaaaaataattttaaaggaaaaatggaacaatcattaaagaaatttgatggatattttaaaatcttcccagaaaacaaacactaaacccagagaagttttcaggaacgttctactgaacatccaggaaaaaaataattccaattttatataaattattccaaaacatagaaaaagaggaagcactctacaattaatcatgaagacaaatttgaaaaatccaaaggaagatagtaaagcaaattcagcaatgactagaaatcattatcaagctgagtttgttccagaatatcagggcagtttaacaatggaggaaaaagatcatatctcaaaagatgcaggaaaaaaggtttggtaaaccttggcagccattgataatttttttaaaataaattttagaaagcttggagtagagaacttttttaacctaataagtggcatttacaaaaagcctacaacaaatatcttactttatgctgaattacgaaatgatttcctttaagattataaacaagaacaggataa

SEQ ID NO: 108012 - DNA, 378 bp, Homo sapiens
cccgaggctctgcatcggcgcagccggtgtcatctagcggccggcagttccgagcgacttggggtccttgtgcctcggagtggcgtctgggagcaaaggcggcggaggcaaccccgcagttgaggacagtagggatcggtggctttggaccctgcccacggatacctggggccccatgccccgaaggaatggtgccttctgcccttccccggcccccaacatacgacaccttaccgaagcgcccggcaccttagcctgctctccaggaaagcggacgccttttccgacctggcacaccgcggattcccggacccccaacaaaggcgccttggaccttcaggacacccctcttttcagaacttcatgagtcccaagggg

SEQ ID NO: 108013 - DNA, 357 bp, Homo sapiens
gaaatgggggacagccaagtctcctccaaccctacatccagcccccctggggaggctcctgcccccgtctctgtggatagtgagcccagctgcaagggcggcctgcccagggacaaacccaccaaaaggaaagatgttgtagcaccaaagagaggctccctgaaagaggcgtctcccggggcctccaagcccgggagcgcccggcggagccagggggcagtggccaagtctgtgcggaccctgaccgcctcagagaacgagagcatgcgcaaggtcatgcccatcaccaagtccagcataggcgccggctggaggcgaccagagctgtcatcccgggggccctcccaaaatcccccc

SEQ ID NO: 108014 - DNA, 389 bp, Homo sapiens
atccattctgtggttccagcaccagaaaatagcctaagccaagaggtaaaggaaaggaggcagggaagtaggcaggagggcaggaaagaatgaaggaaagggaaacgaagagaggcaggggaaggaaggggtgtggacagggaggtgggaaaggaagggaagtgaggaagggaggcaaggaggcaacgaaacagggaggcaggaaggacaggcaacctcggtgactgaaaagcttatacaatgtgtataccccacgtgactcccttgtttggcaagaaagacaacttatcagacggcccaagctctttagcaaactaggacccatctgcctcatattctatccatcctgctatacgtcataggtcccactcaacaattccctcgtgccg

SEQ ID NO: 108015 - DNA, 584 bp, Homo sapiens
caataagggcctgccagaagtacatcagtccaaagctaagcaccacagcttgccacggacgtctcacgggccccaagtggcagttcctgtgcctggcccccaggtcaaagtctttcatgccggcactcagcagcagaaaaacttcacgcccccatctccatttgccaataagctccaaggcccaaaggcttctcccacacagtgtcatcgttccctcctgcagttagtgaagacagcggccaaaggccagggcttccatccctctgcaccagccacctcaggaggcctgtcagcctccagcagcagctctcacaagaccccagcctcgtcctcttctgccctgagccatccagcaaagccacattcagtcagctctgcaggctcatcttacaagaataatccctttgccagctcaatctccaaacatggggtttcttctggcagctcttcctcgggaggaacaccagtccagagttctgtttctgggagcctggtccctggcatacagcctccctccgtgggacaggccaccagccgacccgtcccaagttcagcagggaaaaaaatgcctggtttcccgaaag

SEQ ID NO: 108016 - DNA, 250 bp, Homo sapiens
ttgacacatatgctacatacaaattttgccttcactgcctgcaaggactcagtcagcaccactacctgagatcatgatgtatctgatctaccaacataggatctctcctaatgtcacctcagaccaagagatccactttatgaaaactgtgatgcagcagtgaacacacaacaatgaaattcattggccctacaacattgtgcaccattcagaggctgctggtgtaatagagtgatagaagggcacttta

SEQ ID NO: 108017 - DNA, 298 bp, Homo sapiens
gcaagtaacttcaatacatcattctctgtaatggataaatcatccagtcagaaatcaataagcaaacaacagaactgaacaacactatgaacccaatggacctaatacgcatatacaaaactttttgccaaataacagaagaatagaattcttcccaagtgtacacagaatattctttaggctatataatcacaaagaagtatcaacaaacttaagaagatgtaaatcgtcctaagtatcttttcccaccataatggaatgaaactagaaatcaataacttaagaaaacaggaaaatt

SEQ ID NO: 108018 - DNA, 365 bp, Homo sapiens
  misc_feature (1)...(365): n = a,t,c or g
tactggtgtaaggatagacatatagatatatagatcaatggaatagaactgagagcccagaataaaccctcacattaacagttaattgattttcagtaagagcgcctagacaatttaatgggggaaagaatagtcttttcaacaagtggcgctaaaacaactgtatatctgcatgcacaggaatgnnnnnnnnnnnnnnnnnnnnnnnnnnnnnnnnnnnnnnnnnnnnnnnnnnnnnnnnnnnntgtaagaagagctataaggagaaaaataagtgtaattctttgtgaccttaggttaggcaatgattttttagatacgacgcccaagcacaagcaataaaagaaaatgaactgtacgtcatc

SEQ ID NO: 108019 - DNA, 370 bp, Homo sapiens
  misc_feature (1)...(370): n = a,t,c or g
gtgagcatgattgtaacacaaccttctaatttttctaatcgtacaggaaatcatactggtaagaaattattaaaatgtgaagaatgtgacaaagcctttaaacggctgacacacttgattgtaggaaagataattcatactggcagaaactcccacacgtgtgaataatatggcagaactttaattcctataccttattgcacaggaaagcatttatacttcacaagatggcgcactgatctaaacattgtaaaacagccattaatatgggcttacatcttattcaacattagagagttagtccttaataaattcaatataaatgcaatgactgcccaaaatcagcataaggttttgtcttagtgtgagn

SEQ ID NO: 108020 - DNA, 308 bp, Homo sapiens
ttattatcctacagccatagatgtccatcaaccctccactgccaaggaatgggtaaaggctcgcctatacaaaaaatggtcctgggatagctaggtacacatacccagaggtgggccgctaccttttcccatatataaacatcaactcaaggtggattaaatatttaaatgcaagaccacaaactgtaaaaatcccagaagaaaacctaaaaaacaccattccgacccttggctttaggaaataatttatgactaagtcctcaaaagcaactgcaacaaaaacaaaaattgacaactgggacctaatt

SEQ ID NO: 108021 - DNA, 452 bp, Homo sapiens
  misc_feature (1)...(452): n = a,t,c or g
ccccccaggaaaaatctcccggggtttaaaaattaacccaaagggggaaaaggcccgggaaagggcaaaagggaacccggtaaagtttcggtttttgaagtagggggtaggaaccccggggggttccccctgtggaaaagcccttaaccgtaaaccttggggacctttccggaaaaaagtcccaccggaattttttaaaacccggccaacccggtccggagggttgcccctgttatccccaagggtccggagggtgaaaagggagggtccccttggccccgggaatccaagcccgcctggggggcaaaaccaaacccccctttttcnnnnnnnnnnnnnnttcnnnnnnnnnnnnnnnnnnnnnnnnnnnnnnnnnnnnnnnnnnnnnnnnnnnnnnnnnnnnnnnnnnnnnnnnnnnnnnnnnnnnnnnnnnnnnnnnnnnnnnnnnnnnn

SEQ ID NO: 108022 - DNA, 392 bp, Homo sapiens
gttatagtcaaacacaaataggctgaaagtaaaatgggggataaaaatataccataaaaactataagcattagagagttggattctatattaatatcagacaaaatagacttttaagacaatgattattattagagaaaaagatggatattctataataataataagactcatcttaaagcttcaaaatacttgaggcaaaacctgacagaattgaaaggagaaatagactaatcatcaagtacagttggagattttaatattcgtctcagtaactgatagaacatatagacagaaaattagtaaggatataaaatatttgaacaacactcttagtcatcttggcctagctgatgtctataaaacacccaacaacagcaaatggtggttggg

SEQ ID NO: 108023 - DNA, 411 bp, Homo sapiens
  misc_feature (1)...(411): n = a,t,c or g
ctttttgttcttggtttcggaataaaaccggggtcccggccccccgcctttatccaggaggaatgggtttatttggaattggtaattgggggtttgaatttccgccatttttggttttaaaccctttgccaaaagnnnnnnnnnnngttaaattaccagttgggccggggttaacccagcctgggagcctgggcccattgtttccgcttcctggggaacttggggggaaaaattaaattagccccgggggtttggggctccgttagcttttattgggcccctgccccgttgcccgccaggccaagccgggccccccccgtttccnnnnnnnnnnnntgtaggtaggggttggatagatgcagaaattaccatttattgagcatctactatggatctgggagcaggttttca

SEQ ID NO: 108024 - DNA, 389 bp, Homo sapiens
  misc_feature (1)...(389): n = a,t,c or g
gaaattgaacaacttactcctgaataactcctaggtgaacacagaaattaaggcagaaatnnnnnnnnnnntgcttgaaatcaatgaatacgaggacacaacttaccaaaatctctgggatgcagccaaagcagtgttaaaaggaaagcatgtatccccaaaacactttcatcaaaaagttagaaaggtttaaaaaggtttcaaattaacaatctaactttgtacctaaaggaactaggaaagaacacatcaacctgaaagctagcggaagaaaataaatgactaaaattggagatttatttgtcctttactttgtcctaaatggttaggatgcctattacctgcctgagcccttcttagcaccaacagatgtctctggatacattcta

SEQ ID NO: 108025 - DNA, 276 bp, Homo sapiens
ttaagtaagatggtcctaatgtagttgtgtgctctatctctagttagagatgtttatgattacttccgagctgtcctgcagcgtgatgaaagaagtgaacgagcttttaagctaacccgggatgctattgagttaaatgcagccaattatacagtgtggtaagtaatacacatcatcagtattccctgcttaaatgttttacttcaagtggcttttctttttttaaactgtactttaatttttttaaactgtactttattttttttggaggggggt

SEQ ID NO: 108026 - DNA, 382 bp, Homo sapiens
  misc_feature (1)...(382): n = a,t,c or g
cagggacattatcccgggtccctgcagccctggccctcccgaggtcctggggcttccgggtcgccaggcaggggcccggttatttttgttttttttgtggaaaagtgggttccccccggtggcccgggtggtttttaacttcccgggtccaatgatttggcccccctggcccccccaaagggtggggtttccgggattagcccctgcccctgggcccccattttttttataaccactatggccnnnnnnnnnnnnnnnnnnnnnnnnnnnnnnnnnnnnnnnnnnnngaaactccgtttcnnnnnnnnnnnnnnnnnnnnnnnnnnnnnnnnnnnnnnnnnnnnnnnnnnnnnnnnnnnnnnnnnnnnnnnnnnnnnnnnnn

SEQ ID NO: 108027 - DNA, 653 bp, Homo sapiens
gctgggaacgccacactgtcgcagtccggccccctgtcggggagctgggattgatctgggagcggccttccagctgagctgcccgggttgcggagggccgggaagtgcatggaactcgacggctccgcatggattctccccttggcacccagcactgtttgcgtttgcgcctggccatggtggagcgggcagtgagagagcacggaggggctccgccctgtcgccgggagggcagcggccaggcaggctgggcaggggggtggggtctggctctgtcccacaggacggtgtgacccctgggtgggctcttgacgggctttcctcactggagttcctcaggccgctctcctgaagcggtgctcagaggccctgaccatcctgccaggcgcccgtgacccctgacctcttccctctgcctcctgctgtggcttctgtccacaagcccctccccttcccctttggacccctcaggcctccccagctgcctgcgctggaccctggcggggctgtttcactttttcctgggcagtgtcatgtatgcacctgtgggctgactgtgtggccacatccagtcaggacccagcctccagaactgacccagggaggctcccgctggccccaggaaggagaagtagaaactgatgatcaggcgg

SEQ ID NO: 108028 - DNA, 231 bp, Homo sapiens
tttaaaaaacaaagcagtaataaccaaaactgcatgacactagcaaaaaaacacagaccaatggaacagaataaagaacccagaaatcaatctacccattttatggtcaattgatttttgacaaagatgccaagaacacaatgtgaaaagaacagtaatttcaataagtagtgctgggagaactagatactgacatgcaaaaaaatgcaattacatcctatctcacaacaa

SEQ ID NO: 108029 - DNA, 371 bp, Homo sapiens
cgaaaacgaaaccaccaacatagtagttaagtttttactcaatgaaatcatctgtcaatataggctgcctgctgccataaagtctgataatagagcagccttcacctcgcctatagctcagtcagtcagtaaggcgttaaacattcaacagaagctccattgtgcctatcaaccccagagctccaggcaagtagaacgcatgaaccacaccctaaaaaacactcttataaaattaatcttaaaaaaacagtgtaaattaagtaagtctccttcctttagccctacttaaattaaggtgcacctcttaccaggctaatttctcaccttttgaaattatgtataataaggcaccgcctatcttgcctaagcta

SEQ ID NO: 108030 - DNA, 331 bp, Homo sapiens
gtacaatgcccatcaaaatcccagcaggatattttgtagatctagataatgtctaaaatttataggaaaggcaaaggaattagactaatcaaaataattctgtaatagaagaataaaattagaggaacatattctctaattttaagattagctataaagctgcagtaatcaagatagtgtgatactggtgaaggaatagacacagacatcaatggaacagaatagagaatccagaaatagatccacacaaatatggccaattgatttttggcaaagatgcaatttggggaaatgtgaatgaaaaaaaggcttttttttggggggtggggaa

SEQ ID NO: 108031 - DNA, 364 bp, Homo sapiens
gcaatattgccctggacttcgagcacaagatggccactggcgcatcctcctcctctctggagaagagctacgaggtgcctgatggccaggtcatcaccatcggcaacgagtggttctggtaccggaggcactgtttcagccttccagggcatggaatcttgtggcatccaagagaccaccttcaactccatcatgaagtgtgatgtggacatctgcaaagaactgtatgccaaaatggtgctgtccagtggcaccaccatgtatctgggaattgccgacaggatgcagaaggagatcaccgccctggcacccagctccatgaagatcaagatcatcatgcccccagagtgcaagtactcagtgg

SEQ ID NO: 108032 - DNA, 358 bp, Homo sapiens
  misc_feature (1)...(358): n = a,t,c or g
aaggctttgggaatcccccccccggtccgggggcaggatctcccccccgttgggggtggacccccattggctcccgtttgggctccgcccctggacgcggccccctttggcaaaaggaaaaagcgggcccgggctccgggttggggtgaagaaaggggaaagnnnnnnnnnnnnnnnngcatctagggattcatggaggcgcagcccctgctggaggcgcggcttattccgtccggttcatcgagagcggcggggagctagggcactcgtagcgggcttcctctcgccgccctcaccggactgttcgtctagtcgctccctatgggcgacgccaggagccgcctcaagcctctccata

SEQ ID NO: 108033 - DNA, 372 bp, Homo sapiens
tgataaagaacactgacaaaaaaacatacagctaacctcataattaatgtgaaagactgaatgctttccctccaacactaggaaaagacaaagatgcctacttctgctactgctattcaacatggttctggaagttctagccagtgcgacaaggtaggaaaatgaaataaaagatcacacagctcaggaaaagcaggggggaaaacaaatagattagacacacaaaaaaagaaaacacacaactaaacccatttgcagataaaaagatgatctatgttgaaaatcccaaagtaatctaccaaaaaaactcctaaacaaatgaatccagaatagttgcaggatataatgtcaacacacgaaattcaattgtct

SEQ ID NO: 108034 - DNA, 1331 bp, Homo sapiens
  misc_feature (1)...(1331): n = a,t,c or g
atgaccatgcttacgccaatcttggcacgagggtgaatgtgtgtgtgtgttggagggttgtctattgtgtgtggctgtatagggtgtctgtagatcaagatgtgtatacagctgcttctgctattgctggtttgggggaggggactggaaagctgagactgaaaatcaagagggaagaggtgaggaaggcccacccctggggctgggcagtgtagacctgccaccgtgtgaagaaaaatgaaagcacagatagcctaagactgcacaggcctgtgcccacataccttatagcacaggcccaggtggatcatctcatgctaacaccccacatgtgctggtggatccactcccatggatccactcacatgctgcaggcatgcagtagactcacccacagcccactctctggacaccaatcctgggaggtgggagctggaatggggagcaatgagaggagggagtgagactgttggcttaagaagggtggtacctctccctgcatcatacccaggaacttccagctccaaaatattggggtacagctcaccaccccccactccgccaacccattcctacctcctctagggcagggacccaagttagatgatgagaaaatgccaaacaaagggaggcaaggacagagaaggtacctgcaggacccacaaggcccatactggcccccatctgaacccacctctcccacccagatcaacatccccccaacccctgtgcccccatcatctggaccccagagnnnnnnnnnnnnnnnnnnnnnnnnnnnnnccggggctccttggctcacctttctagaacatgggtacctcctctttttgggggctcatttagactgctgcctttgctgctgacttgcagtgtgactcgggcccattgttcaatctctgtggccctgagacaccagggaaaatctccccccccacaggacatactagttccctggcaggcaagggcttccaactgaggcagtgcatgtgtggcagagagaggcaggaagctggcagtggcagcttctgtgtctagggaggggtgtggctccctccttccctgtctgggaggttggagggaagaatctaggccttagcttgccctcctgccacccttccccttgtagatactgccttaacactccctcctctctcagctgtggctgccacccagccaggtttctccgtgctcactaatttatttccaggaaggtgtgtggaagacatgagccgtgtataatattttttttaacattttcattgcagtattgaccatcatccttggttgtgtatcgtgtaacacaaataatgatattaaaagcatcaaac

SEQ ID NO: 108035 - DNA, 126 bp, Homo sapiens
ctccccacaaagaaaagcccagggccagattaatttaaagaagagttaataccaattcttcacaaactcttccaaaatagaagacaaggggacacttcacaactcattctatgtggtcactattac

SEQ ID NO: 108036 - DNA, 640 bp, Homo sapiens
gtgggcaagaagaacctgagggaaggaagaaggggccgggccacagcaagcccccaggcactggaaaagttatggactgaggtggcaggggatagcaggcaagctttcccttcttcactgtttcaaccaaggtctgctctcccacaggggccccagccagggctctgtgcccagaacaacctctgcgcaaaaggcaggaggaaaactggaatgaaaggctgggcagctacagcccaagggagaggccaaaatgcaacccacagagggggaaacccaggcagcccattcacagaagagtcttctccactcagagctgaagaaacacgctcaggcccacagttagcccagcaggcccctcccctaggactgcttggtgtttctccagctcagaaatacataacatggtgggcgaggcgtcctgctccaatgcaagctcctgcccagaggcaaggtccgagggtagctcttctccgtgaagccagcatggcaatgcaaagccacttccaggctacatgacctgggacaggtcagacaacctcctaagcctcaatgtcttcatccacaaaatggggatagtagtatatatttcagacgactaccgtgataattacagtaacacatgtgaagttcttaccatagg

SEQ ID NO: 108037 - DNA, 246 bp, Homo sapiens
gggggtgggggggaatactctaaaataatagccattaaaacagcattgaaaaacacaacttacttaggaatatatctgataaaagtatgttccagatctatatactaagaactacggaacaatgttgagagaaattaaatatctagagaaatgaagagccagaccatgttcatgaactgaaagatttaaaatcgttaaaatgtcaattttcccaatttgatctacagattcaatacaatcacaaat

SEQ ID NO: 108038 - DNA, 411 bp, Homo sapiens
ggacaccagaggaagggcttgtatgacctgtccaatctccaatctacagttatcttggccgtgccctgctgccagcccagcttctcataacccagtgcctcaggaccccaaggaatgctattgcaccccacccccaactcttcctttgtagatctggccagcctgaaggacatttaccagccaactgccaccagcaactcaccctgagagtgccaggtaacatctacagtgggtctgtgtctggcactgagtgtacatctagcccattagcctgagtgtgtgtgtatgtatgtgctgctgagctagggagggcctggatctgtttatatgtgcaggtaagggagtatatacatgtgtttgtatgtgggcatgtatatgcatatgtttatgtatgtctctgtgcctcgtgcc

SEQ ID NO: 108039 - DNA, 599 bp, Homo sapiens
ctctttcattctggggagaagaagttaaaattagggccagccctgcgggactgacatgccagatgcagggaagctgtccccagaaataagcgagttcccaccgcggctgggcggggcgggagcctcgggtcccaacccagcggagggactcctggaaggcctgccccttccaagtgtctgcaagggctctggtcccaagctttaaaatcctgagcgaaggcactgcgggccgacctctcctctcccagccagtcgtggctggcctttcaaagtgtgcagttgtctcctccctgtccagccccatcgtcgcccaggaccagctgggccgcggtctgacctgaggctgctgctcagcgccggggcgctggcgttctccattcgagcaccttccagcataccgctcggctccgggagccgctctgcaaagttgggcagctcagagcgcaagctttgcctctcgacttctccctccttgggtccccggcgcccccgcctcccacgatccctttcactaggagcagccagtcccagcgggctggcaacttgcaccccttcctagtcatcctccctgaaacgcgaccatgctgttaaggggcgtc

SEQ ID NO: 108040 - DNA, 482 bp, Homo sapiens
  misc_feature (1)...(482): n = a,t,c or g
cagactcttactttgctgcacaggctggagtgcagtggaacaatctcggctcactgcaacctctgcctcccaggttcaagtgattccggtaccactgcctctccagtagctgggagtacaggcaagcaccaccatgcccagctaattttttttattttcagtagagacggggtttccgccatgttggccagggttgtctcaaactcctgggnctcaagtgatccacctgcctcgggttcccaaagtgctggggatttcaggaatgagccattgcgcctgggccagttgttgcatttttatagtaaaatttcatttctatggggcctttccctctatggggggggggaaacccgttatttcttttgttctttttaaaaaatttatttttacaatttagtcctttctaaagttacttgtgtgtgagaataaaaaataagtaatgatgatttgcccatctgagtcagcatcaggttgcgttatga

SEQ ID NO: 108041 - DNA, 464 bp, Homo sapiens
gcctactactactaaattcgcggccgcgtcgaccccgagttcaagcgatgctcctgcctcagcctcccaagtagctgggattacaggcgtgcaccaccatgcctggctaatttttgtatttttagtagagacggggttttgccctgtgggccaggctggtctccctgacctcaagtgatccacctgcctctgcctcccaaagtgttgggatgacaggcgtgagccactgtgcccagcctcctttattgtcagctctttaccctgtcctccacactgctgctggaactacgctttggaaaaaggaggctgttactgttagtcccttgattgaagaactctaaatgttgtcttactatgtacttgaaaaatccaaaatccactgcctaactttccagcctcagggactattctttttcttctgtccataactttggctatatgaaaccattttcccaaacactccg

SEQ ID NO: 108042 - DNA, 602 bp, Homo sapiens
  misc_feature (1)...(602): n = a,t,c or g
tatttttgagacaaatctcactctgtcacccagtctggagggcagtggtgcaatctcagctcactgcagccctgagcacccaggctcaagcgatcctgtatccttagtctccctcggagctgggaccactggcacgtgccaccattcctggctaatttttaaattttttgtaaaggtggggtcttgccgtgttgcccagggctggcagatctacactttgcaacttcaaattccatgtctttctattactccaggggcctgtctaggatgaccaataaaaccgagaccccaatgtctaccatccctaaaggagtgggtgtggcttggcgttttgggaacagcgagtgcatcttccaggagctgcctctgactttgcatcacttactttccaccatgttggcctcattcatccacagccacgaagcctcggccaatgcccttgtggggagaagcctcacggtggggtggaggtcccgtggggtgggggttagtgtggatccagccgcctggctgtggagggacctcaagggttgctttaggccgggtatggtggcgtattccacgacactcaacagggaatcaacncctnttnttctacccct

SEQ ID NO: 108043 - DNA, 433 bp, Homo sapiens
  misc_feature (1)...(433): n = a,t,c or g
aagggnacccccatcctcaaaaaaataaaataaataaaaagaaaagaaatatatataggaatgggaatttagaactcctccaaatgtagagccaccccactatgccctaccccttaagcaaaattgtccccaccaattcaaaatacccagagacatgtccattttcatgatcttgtatggacatatacgagacttatgagatattcattgtagcattatttgcaatagccaagctgtgagaacaagttaaatgtccactaacagaaaaagggataaagtaaatgtggtatatgtagaaaatggaatattattcagacttaaaaaggaaaccttgccatatgcaaaaacatggatgaaccttgatgactttatgctacatgaaataaaccagtcacagaaagacaaataatgcatgattccacttgtgtcaggt

SEQ ID NO: 108044 - DNA, 371 bp, Homo sapiens
  misc_feature (1)...(371): n = a,t,c or g
ccacaataaataataaacccaaatgacattttttgcagaaacagaaaaattcatcctaaaattcatattggactctcaaaggacactcaaatagccaaaataatcttgannnnnnnnnnnnnnnnnnnnnnnnnnnnnnnnnnnnnnnnnnnnnnnnnnnnnnnnnnnnnnnnnnnnnnnnnnnnnnnnnnnnnnnnnnnnnnnnnnnnnnnnnnnnnnnnnnnnnnnnnagcctagcaataaatcctcacatgtactgtcaaataattttcaccaaagaagccaactctttgttgaaaggttattaacagtttttcaacaaatggtcttagaaaaatgtaacctccacaggcaaaagaataaagttgaac

SEQ ID NO: 108045 - DNA, 402 bp, Homo sapiens
cctggcacccaccttcatcagaaagagtagaaagaatgaaccaaaccctaaaaagccatctaaccaaattagttttaaaaactcgattatcatggaccaagtgccttcctattgccttattaaaggtccgaactgtccctcagaaagaagttggcttatctccttgtgaaatgctgtataggctgccttactcacacttcactgttgacattcctacgtttgaaactaaaagtcagtttctcaagagctatgtacttggtctctcttccactttctcttccctcaaagctaaaggctttttagtacagatgccgacccttggagttcccagcacatcagcatcagcctggggatgatgttctcatcagaagctggaaagaaggaaaactcagaccagcttgg

SEQ ID NO: 108046 - DNA, 426 bp, Homo sapiens
cttctaaactgatcaatatgggagtagcattcaatcacccacaggttaactcactctagagagaaatcttgtgagtgtaatctgtatggtaaaactttgagctcaaactttccccctaccaaaaaaaaagtatctactggggagctgcccaggtaatgcagtagctgtaggaaagccttcagtgatggcttcagggagtcacatgacaactcacaataaggggaaaccctgtgtgtggcatcaaaaatggaaaaccaggggacactcattccttaagtcacatttcggagatcatacaacagaggaatatgttgagtatacacagtgttgaaaagcctgtgacacaaacagtcatattaccaagcacaagacagtatagtttggtatgctataaaagccttgaatattctctccatttctcgtgcc

SEQ ID NO: 108047 - DNA, 353 bp, Homo sapiens
cgtctgtgtttttaaaaacaatgatggcaaagcttcagttttcaaaatagcttggtacgggcataaaggcggtcaggaaggtctggggaacaataaagagcccggaaatatcccctcacatagaaggttaaatgatgttcaacaaaggtgccaaacttacacaatgaggaaaggatagtttcttcaacgaatgtgttaggaaaacggaatatccacatgcaaaagaatgaaaaatgggtccttatttgccatgatatacaagaagtgactcaaaatagattaaaggcctagccagcaaggccggaaagtaaactcctagaaggaaatagagggaaaaaacttcatgacattgg

SEQ ID NO: 108048 - DNA, 333 bp, Homo sapiens
tttgtgttgggaatatttccaaatccttattgcctatttagaaatacacaaaaaatcctatttatcaggatacaaaatctatgtacacatatcagtagcggtgctatacaccaacatctacccaggctgagaatcaaatcaaacccttttatgatagctgtaaaaataaaatacttacgaatgtaactaaccaaggaggtgaaagacccctacaaggaaaactacaaaacactgttgaaagaaatcatagatgacaaaaacaaaaggaaacacattccatgctcatggatgggtagactcaatattgtgaaaatgaccatactgccaaaagca

SEQ ID NO: 108049 - DNA, 541 bp, Homo sapiens
ggaagcactcaagggtcatctttaccgtcccggagctggccttggcctgcgttcccactagctgttaaacccaacatgccaaacctggaagaacgctaatacatcatgcattggttgtacagcaggccttcgcttattataacctctaaagagcagtgagcccatttcaggccctctgtgagaggtcacaaggacctctgaatgaaaaaatatcaggattcaaaaaccattctgcagaaatccaacaggctgatccctaaaacgtacatggaaatgcaaaggcccctaggatagtcaaaaccccaacattattttgaaaaagaggaacaaaaatggagactgtacactaccccaatttcaaaacttattcttaaagttacaagtaaccacaatagcaacagacacataaatcaatggaacagaattgaaagccgagaaataaaccactacatttatgaccagttgattctgccaagggaattcaggaagaaaggatggtcttttcaacaaatgatgttgctacaactagaaatatgtgtgt

SEQ ID NO: 108050 - DNA, 624 bp, Homo sapiens
caagaaccaactgaattgtctcagaatggaaacactatattatttcagaggagttaatttcagaaggaaaatgggtcaaacttgaaaaaacaacatacatggctcctattggtaaaactggaacttgggactcagtgaaacatacaaccaggaaagaacagactggtgatgatgtagcggtcatccctgtgctgcagagaacgcttcactacgagtgtatcgttctggtgaaacagtcctgaccaccaatgggtggctactgcatagagttccctgcagggaactcatagaagatggtgaaaccccaggagcagctgctctttgggagcttgaggaagaaactggctacaaaggggacgctgctgaatgttctccagtggtctatatggacccaggtttgtcaaactgtaccacacacatcgtgacagtaatcattaacggagatgacgcagaaaatgtaaggcccaagccaaagccaggggatggagaatttgtggaagtcatttcgttacccaagaatgacctgctgcagggactcgatgctctcgtagctgaaaaacatcttacagtggatgccaaagtctattcccatgctctagcactgaaacatgcaaatgtgaagcc

SEQ ID NO: 108051 - DNA, 368 bp, Homo sapiens
ccatggaaaagcgacccattgaaaacaggatcctcattttacccaccgtcacgagaaatgaaacaggaccctatcaatgtgaaatacaggaccgatatggaggcattcgcagttacccaggcaccctgaatgggctctatggtccagacctccccagaatttacccttcattcacctattaccattcacgagaaaacctctacttgtcctgcttcgcggactgtaacccaccatgagaatattcttggacaattaatgggaagtttcagctatcatgacaaaagctctttatcccccctcaggcctaaaaagaattaaggcctataccctatgggcaaaacacctaatatgtttacaggccaaatgcc

SEQ ID NO: 108052 - DNA, 210 bp, Homo sapiens
aatcatgcatatacaaccaaccaatcttcaaaaagtgtgccaagaatacacaatggggtaaaaaatgtctcttccacaaatagtgttaggaaaaccagatactcacatgcagaagaataaattggactctcctctcacaccatatataaaaatcacctcaaaataaagacttaaatgtaagaccccagactgtaaaactcttagtacacc

SEQ ID NO: 108053 - DNA, 613 bp, Homo sapiens
atttaaagtagaaggagtcaagtcaataaggaaaatcgtgctttcggagttaagtttctaattctgagtggtggctaaggaccccccgggacttttgagggctgtgtcaagcacccgtagatgggtccctgaacccattggatgggtcaatttggttcctaatatcagaattactcgacccctggcatgggtggctcatgccctgtaatccccagcactttgggaggcccaaggtaggaggatcgctagagccccaggagtttgaaaccagccctggggaacgtagtgagacccccatctttaaaaaaaataaataaatggaattattcagactttttctccttcatcaattctagacattcatgctcttcgacctcaccgtgggcaaattgaagttgcttttcggtttcggtcactcttggactcagatcaccacccatcagaaatagcaggtctgaccatgtttatgggagtgacctatttggttacgtgttttgtgaaaagaattggtaacatgatccctgtctcatcccctccacctcttccacagagagtcacaggttctgtgatcgcgtccaggatgcatacaccttgcgctgctgtccacaggtaa

SEQ ID NO: 108054 - DNA, 370 bp, Homo sapiens
tcacccaggctggaataaccggatttggctgtattaggcacctggtcaccagggcttcttttaactctggcaaagcaggtattgttgtcatcagtgaccccttctttgacctcaactacatggtctacatgttccagtatgactccacccatggcaagttccatggcagcatcaaggctgagaatgggaagcttgtcatcaagggaaatcccatcaccatcttccaggagtgagatcccaccaaaatcaaatgggggtgacactggtgctgactatgttgttgggtccatcaacaacttcactaccatggagaaggctgggactcacttagaggggagagccaaaagggtcttcatctctgtcctttctg

SEQ ID NO: 108055 - DNA, 683 bp, Homo sapiens
gatttaaaaaatcgcaagagaggttcaacagcaaacttttatcaagcagaagacagaatttgaaaactcgaggatgggcaatttgaaattacagccagaacagcaaaatgaaaaaataatgaaaagaagtgaagaaatcttaaggaaatcatggtactccatcaaaccaatatatacattatggaaggcccagaggagaagagaaagagaaagcggtaaaaaccctaattaaaaaaatgactcaataattcccaaatctgggcatggaaatgaacatccagattcatgaagcccaaacagaataaatccaaaaaggtctagaacaagacattatagtcaaaatgtcaaaaatcaaagacaactacagaattttcaaaccagcaagagaaaagtgactcattacaggcaaaggagctccataagactactggcagattcctcatcagaaactatgcaggccaagagagtgagatgatatatacagtcagcccttcatatcgacatgttctgcatctggagattcaagcaactgtatagcaaaacaaaaaacaatctaacaattaaaaatttaaataaaaagtgtaatatagttagaacaaatatttatgttgcatttacattttattgggtataatgagtaatctacagctgatgtaaagtatacaggaagatgtacatggtct

SEQ ID NO: 108056 - DNA, 376 bp, Homo sapiens
gccaggaggcagttccctcctgtggggatgagtcatgaagcctgcccgccagctcctcctggagaaaggctggcccatctgggagccctggccctgacccaggcccctgccttcgcggggccagggaaaccttctcagggcagcccagccaccaagtggccacaaccgccccaggattcaggtggtcaggcaggtcgatggtggcagccccaggcaggggatcctagtgtggtgggaggggtggctgatggccaaacccgccaggctgtctgggcaaacagcccgggccttccccacaggccaggcagctctctcaggccagtgacagaggaggacactgagccccaggtagagtcagggcacctggctcccagcc

SEQ ID NO: 108057 - DNA, 206 bp, Homo sapiens
ttttttaaaaaaatcaaaaaacaggaaataaatgaaatgtcatccagagttcatggattggaggactgaatattgttaagaagccaatactacctaaagtgatctacagatccaatgcaatttctatcaaaatgcctgctttttttttgaaaaatacaaaaatacattcaataattcatatggaatcatcagggattccaattcgg

SEQ ID NO: 108058 - DNA, 382 bp, Homo sapiens
  misc_feature (1)...(382): n = a,t,c or g
ccacccgggctcctggagccaacgcgctggggccgccctggctgtgaggacccccacccctgccctggctgccttcttcctgtcctcgaaagccggagacccgcagggagccccggagccgtcagtcacggaggggaaatgagtccccactcgggatgggccacccctttccagccggacgagtcctccccaccagccctgatcacccccgaagcacccgtcggctccactgaggtctccccacatgctccaccggcgctcagcacacagcaggtgcctaataaatgtcaagtgcctgcaaaaaaacaaacataaatataagccgttttcacaaataaaatgcaaaaactcccaaaatannnnnnnnnnnnnggggcggggg

SEQ ID NO: 108059 - DNA, 375 bp, Homo sapiens
caaaggagagatggctataactacgaatccactctgttgtgtggtcagcagcagatggtttgactggaaactcagtaacttagaataaggttgggagcctggtggtaagatatagaaaagagttatgtcaataaactattctcaaacaggacaaagtgtgagggtatttgtgtcccatgtaaatgatgcccaatgtatactctcagcagaggaggctctcaataaccaagtggacaaaatgagtcattatttcatcagccactgtttcccttgctcagaacgctaatgaacaaagttcatatccttctgtgagagcagcaggaatgaaggtcatgcatgtgctcagtcacacaggcttccacctgtcaagattga

SEQ ID NO: 108060 - DNA, 370 bp, Homo sapiens
cacaaaaataataaagtcgaatagaaaccagtcaaattgaggatagaaaatcaacatagaaaacgaaaaactggttctttgagaggatcaataaaatagatcaataaacctctagccaggagaataggagagaaaagagaaaagacatcagagtcagaaagagagagaggacagcactatatgtcttacagatattaaaaagattaataagaaaatgtcatgagtaactttatgccaatgaatttaacagctttacattaaacgaacagattcctaggaaaatacaaactatcaatgctaattcaagaagaaataaactgagttaagtctttatctactaaagaaattgaatttgcagttaaaatcctcc

SEQ ID NO: 108061 - DNA, 238 bp, Homo sapiens
actagtgggacgtttcttatagcagagacacaattgcagtgctgggtgcagtaaagaaagtctacacctctaccccaacaatcaggcagcatctctgatcataaaggggcttggaaagggggtccttttcccactggtacaccactgcacacacagctggggcttctcccagaggaatgcagtgtagatgcacatatagatggccttccaggaacaatttagggtgactgcatccccg

SEQ ID NO: 108062 - DNA, 381 bp, Homo sapiens
tttagttggattaagtatccgctggaaccatctcgcagacccacagattttccgacagcgattcaggcagtttggataccaagattcacctgggccccgagaggctgtgagccagctccgataactttgccgtctgtggcttaggccagagacgcccacaaatgaacaaatcttggagctggtattgctggagcagtttgttgccatcctacccaaagagctacacacttgggttcgagatcatcatccagagaatggagaggaggcagtgacagtgctggaggatttggagagtgaacttgatgaccctggacaaccgggttctcttcgttgacgaaaacgggaagtactaattagaagacatgggattctctagaatag

SEQ ID NO: 108063 - DNA, 513 bp, Homo sapiens
gagacagggtttcactctgtcaacccaagctcccaagctggaatgcagtggcgtgatcatgcctcactgcagcctcgacctcctgggctcaagccatcctcccacctgagtctcccaggcagctagcacaggtgtacggcatcatgcccggccaattttattttttgtagagaggaggtctcaccatgctgccctggctggtcctgaactcctgagctcaagtgatcctcccgcctcagcctcccaaagtgttgggataacaggtgtgagccactacacccagccttacaatgtcttttaaaacaaaggtcctagcttctgccgggaaaggcccaccacagtggtcacttgcttgataagcctttcgtgattcctactgctggccacttctttccttgtgcatccatctcacgcaggctgaaatggggatcacacttttcatgctgcgaggtccttgaagaatctctccctcccatgctgagagggccttgaagaatctagttattaatcatc

SEQ ID NO: 108064 - DNA, 393 bp, Homo sapiens
  misc_feature (1)...(393): n = a,t,c or g
atgaatccttcatcagatgtatatactgtgaatattttctcctagtttgtggcatcttcattcactttcttaatggtatattttaataacaaattattttaataaagcctaatttatcaatctgatcttttatgattagtgttttttgtgttcagtctaagaaatctttgccttccccaagaatatgaaaatttctctctatgttttcttttagaaattattttacttttcacatgtagatctatgacctacctgaannnnnnnnnnnnnnnnnnnnnnnnnnnnnnnnnnnnnnnnnnnnnnnnnnnnnnnnnnnnnnnnnnnnnnnnnnnnnnnnnnnnnnnnnnnnnnnnnnnnnnnnnnnnnnnnnnnnnnnnnnnnnnnnnncctagg

SEQ ID NO: 108065 - DNA, 520 bp, Homo sapiens
catctgtcacccgagaaaaatgctgatgacatggtggtgcggtggttccggtctcagttctgccccgcagggtttgtgtataaaggcggctgagagagaacagaggagcacatggaggagtaccgatgaagaaccacctttgtgagcaaagacatcagcaggggcagcgtggccctggtcatacacaacatcacagcccaggaaaacggcacctaacgctgttacttccaagaaggcaggtcctacgatgaggccatcctgcacctcgtagtggcagagcttctggaagctgaggtctactgagaagtcgtcccagaagcagaaagtgaaatccaaaacctgcctgtttgaagttggagtcgacacacccatctcaaagactaggctctaagcccctcatttcaatgaggggccatgaagacgggggcatccggctggagtgcatatctagagggtggacccaaagcccctcacagtgtggagggacccctacggtggggttgcgcctgccctgaaagaa

SEQ ID NO: 108066 - DNA, 400 bp, Homo sapiens
gcaaagcactcagaatagccaaaacaattttgaagtcagaaaatagcacttacatgctctgattttaacattacctttaaagctgttgtaaacaagacaatgtggttttggcataaggacagagaaagagaacagagttcagaaatagacccagacttatgctcgttttcaacaaaggcatcaatggaatgaaatggagaaattaaagtcttttcaacaaatggtgctggaataacagattactcacatgggaaagatgaacctagatccctacctcacaccctatataaaagctaatttgagataaatcatggatttaaaaataaaagcaaaaaatgtaaagcttctagaagtatatataagagaatagcttttacagggtgcagtggcaggtgcctat

SEQ ID NO: 108067 - DNA, 417 bp, Homo sapiens
gaaatgctcagtggatcactggcatagttgtttacactggctttgaaaccaaattcctgcagaattctgtcaaatcacctcaagagatcagagattaagaaagtgacaatgggcgggtctccctttggttcctgctgctctggtcatgtctgtagtgagctgcgtgggagccgtgctatggaataaaaagtatggtgacatttggtacctgaaagaggattccagctcacagcattgtgtttgacatactggtgttcatcatcttataacagtacctcatccccattagtctgctggtcactatggaaattgtgaaatatattcaggcccagtttataaactgggatcaagatgtgcattataaagtaaatagtgtccacaccatggccagcacattcaatctcagtgaagaacttg

SEQ ID NO: 108068 - DNA, 395 bp, Homo sapiens
  misc_feature (1)...(395): n = a,t,c or g
cccttctgaaaagtcccaccccctttccaggggtttttgggggggttcaacaacccccgtttttttccccccnnnnnnnnnnnnccctttcaaaaaaatccccaaannnnnnnnnnnnnnnnntttttcccccccgggtagcccccaacccttaagaaagggaataannnnnnnnnnnncccccgggccctccctaaagggaagggcccccgggggaaaaatccaggaaaaaccccccctccacccccttgggcccccccagggggacccgggggaaaaannnnnnnnnnnnnnnnnngagacagagtctnnnnnnnnnnnnnnnnnnnnnnnnnnnnnnnnnnnnnnnnnnnnnnnnnnnnnnnnnnnnnnnnnnnnnnnnnnnnnnnnnnnnn

SEQ ID NO: 108069 - DNA, 405 bp, Homo sapiens; identical to SEQ ID NO: 95285
  misc_feature (1)...(405): n = a,t,c or g

SEQ ID NO: 108070 - DNA, 246 bp, Homo sapiens; identical to SEQ ID NO: 108037

SEQ ID NO: 108071 - DNA, 376 bp, Homo sapiens
cagttgttgcatcaaatacttcatatttggcttcaatgtcatattttgggtgctgttaacattttgggtccactgtatctagacatgtccttcaaaagttgcattttttgggaataacatttcttggaattggactgtgggcatggaatgaaaaaggagttctgtccaacatctcttccatcaccgatctcggcggctctgacccagcttggctcttccttgtggggggaggagtgacgttcattttgggaatggcacggtgcattgcatcgctacggcaaaacactttccttctcaagccttgttctgtggtcctggaaattattctcgtggtggagctcactgacggagccttagcatttgctttcaaagactg

SEQ ID NO: 108072 - DNA, 712 bp, Homo sapiens
ctgtttggagcctttggcaggcccccataggtgaatcacagcaaagacctctaggattttggggcaaggccctgccatcttccgcagataacaactctcctttggagagacagctcttggcccgttactgggctttggtggaaactgaatatttgactatgggtcatcaagtcaccatgtgacctaactgcccatcatgaactgggtgctttctgacccatctagccataaagtggtttatgcatggcagcattccatcatcaaatggaagtgatcgagcttgagcaggtcttgcaggcacaaataagttacatgaagaagtggctcaaatgcccatggtctccactcctgccaccctgcctcctctcccctagcctgcaccagtggcttcatggggagttccctatgattagttgacagaggaagagaagactaaggcctggttcacagatgattctgcatgatatgcaggcactacctgaaagtagacctctgcactacaacccttttctaggacatccctgaaggacagcagtgaagggaaatcttcccagtgggcagaatttcgagcagtgcacctggttgtgtactttgcctggaaggagaaatgtccagatgtgcgattatatactgattcattggctgtagccagtggtttggctgtatggtcagggacttggaagaagtatgatggaaaattggtacatgtatt

SEQ ID NO: 108073 - DNA, 362 bp, Homo sapiens
agaaaattataaagctacagatctgcaagcaaagacaaacatgaagaagacttaactgagacacatcaaaatcaaattgctagaaaccaggaacaaaggcgggaggtagagcaggggaaaccaggacgtgcccaacagcaggcttctccctggaaacctggtaggagacagtggagcaacgtcttgaacgtaccaacggaaaacaactagaaaccaacctagatttttaagccagtacaaacagctctgaaaagttaaggggaaataaagacatttccagatgcacaaataaaagcatttaccaccagcaggatggcactaaagaaatggaaaaggaaatccttgaggcacaagaaaatgac

SEQ ID NO: 108074 - DNA, 805 bp, Homo sapiens
ggcacgagcactcaagccattcgcaccggaactaaaacagggaagaagactttgcaagtggtagtctatgaagaagaggaagaggatggcaccctgaaacagcacaaagaagccaagcgcttcgaaatcgctaggtctcaacctgaagacacccctgaaaacacagtgaggaggcaagagcagcccagcatcgagagtacatctccgatttcaagaactgatgaaattagaaaaaacacctacagaacattggatagcctggagcagaccattaaacagctcgaaaatacaatcagtgaaatgagtcccaaagccctagttgatacctcatgttcttccaacagagattctgttgcaagttcatcccacatagcccaagaggcctctccccggacccttgctagttccggatgaaggtcccactgccctagagccccctacgtcgataccttcagcttcacgtaagggctccagcggggccccacagaacgagcaggatgcctgtccccatgagtgccaagaacagacccggaaccctggacaaacccggcaagcagtccaaactgcaggatccccgccaatatcgtcaggtagttttaccttaaacccacttttggatggacgctatttcagttaagcaagtcactgacttagtttataccaaatattgtgctttctttgtaagataacggtttacatagacatcctggatctgggggcatgaagaaagtctaaataaacctttgttacacttttttaccacgcttttgcatgcttgcaataaaacatcttttactttgtgaaa

SEQ ID NO: 108075 - DNA, 404 bp, Homo sapiens
cggcacgagtgctttcattctgcacctgagaaaaccattttaacattttctgttctagcctttatgtaattaccattaatttctatgagctaatttaatgtcctcttcagagtctatggctggaaagtaataatccttcagtttgagtaataataataatctttactactgttttggcccataacatcttaaacacccattcttggaacttgctacaaaagttactgaaattagtgagaaccaattgatatttccagcataaagctgctctgcatgacatctgtataactgctttgcatagaatccaagttcataaaagacgcagatgaagagaaagcttccttgcagaaatccatcagtataactagtgccttactcacagaaaaggatgccgagctggagaa

SEQ ID NO: 108076 - DNA, 629 bp, Homo sapiens
aaattaacagacaattatttaatggggaaataaaaaggagtaagaaactcaagatttgtaagacagaaatgcctattttatatagacctccctacagtcaatctacaggttaactattataatttacgactcaatttatcaaagtctctaaacacagtcaatatctgcaaatcaatgatatctctgtattccagccataaaaatttcaaaagtgaatcttaaaaatataatttaaagtagtatcagacccatcaaatacccaggaaaataatctcacaaaatatgtgtaagattgttacacagagaatcataaacattgctgagagaaattaaagaagacctaaatcaatagagggacataccatgtttatagattagagactaaatattgtaaagaggaagattcctcctaaattgatctatatatttaaatctaattctgataaaaatcctgcataaaattttgtggaaattaaaaagttgttttttaaaatgtatatgggagatgcaaaggagcaagaatagttcaaacaatcttgaagaaaaaaataaaattgggagacttatactctcagatatcaagatttattgtgaggacagaataattatgatagtaagccaggatgcag

SEQ ID NO: 108077 - DNA, 374 bp, Homo sapiens
  misc_feature (1)...(374): n = a,t,c or g
atgtcccgggtccctgcagccctggcccccccgaggtcctggggcttccgggtcgccataccggggcccggtaatttttggtttttttgggggaaagggggttccccccggtggcccgggtgggttttaacttcccgggtccaatgatttggcccccctggccccccaaaaaggtggggtttcaggcattagcccctgcccctgggcccccannnnnnnnnnaaccactatggccnnnnnnnnnnnnnnnnnnnnnnnnnnnnnnnnnnnnnnnnnnnggaaactccgtttcnnnnnnnnnnnnnnnnnnnnnnnnnnnnnnnnnnnnnnnnnnnnnnnnnnnnnnnnnnnnnnnnnnnnnnnnnnnnnnnnnn

SEQ ID NO: 108078 - DNA, 375 bp, Homo sapiens
tctccccatgggaaaccatcaaagcctacagcctccccataggaacctccaccaaaaaggctgagataatagcattagcctgagccttaatgttaggaaagtccgaggcattgacactttacagatacgtgagctatgtgttctctgttctccatgcctgtggagcaacctggaaggaaaagggactttttttaaatgccaaaaacaaggaaatccaatatggaacagaaatattggcactgctttgggccgtggaaatgcccagaatgattgctgtagtcctttgccaaggtgaccaggagggtctatgaaataatacaggagaacaccctggcagataccacggccaaaagggctgtgctggaggggagggga

SEQ ID NO: 108079 - DNA, 923 bp, Homo sapiens
cccacgcgtccgcacgtgcctctgcgggcaggcgcgggaggtgcgaccggggggcggttggggttcaccgcctcgtgccgtactggcttctgggtggcccttaatgtcttgtgctctaaggtgctgaggggaaagacgcgggaggtctctggcctgacactatgaaggaagagagaaactacaacttcgacggtgtgagcaccaaccgcctgaaacagcagttgctggaagaagtccgcaagaaggatgcagtgcaactctcaatatttgaactaagacacaagattacggaactggaagccaaactcaatactgacaatgaaggtagtgaatggaaaacccgttatgagacacaacttgaattaaatgatgaactagaaaagcaaattgtttatctcaaggagaaagtggaaaaaatccatggaaactcttcagatagactatcttctattcgtgtctatgaacgaatgccagtggaatccttaaacacattacttaaacagctataagaagaaaagaagactcttgaaagtcaagtgaaatactatgcacttaaactggaacaagaatcaaaggcttaccagaagatcaacaatgaacgccgtacatacctagctgaaatgtctcagggttctggtttacatcaagtttctaaaaggcaacaggtggatcaactgcctaggatgcaagagaatctagtgaaaactggaagatataatccagctaagcagaagacagtgagtgccaagagaggaccagtaaaaaagattacaagaccaaaccatcttccagaactccatccatgattccagaactggatggatttctatttcttcctttttttttccatttataatattcaagttataaagttaatggtcagcacatttcttcagggaataaaatagataagaactgccaaa

SEQ ID NO: 108080 - DNA, 387 bp, Homo sapiens
aagaaatataggactatatattgcaagttgcaaaacattgttgaaagaaatcaaagggtcctaaatagatattttgtgttcatggattgaaagaccttaaatactgttaaaaaggcaaatacttcctcaaattgatcctacggattcaacacaattgcctatcaaatccctatctggtttatttatagaaactgaaaggatgatcttaaaaatcacagggaaatgcaacagatcccaaacagccaatacaatcttgaaacccaacaaagttggaaggcttgcacttcccaatttcaagacttattacaaagctacagttattcagacagtgtggtcctggcataaagacaggtggtatggttttttctgtgtccccacccaaatctc

SEQ ID NO: 108081 - DNA, 388 bp, Homo sapiens
aaactctgggctcgggtatccacagcctcggcctccaaagtggtaggattctggcacgagcacaagtgcccagcttcaacgtgatttttttttgtaaactacagataatgttgtactggtgagaaactagaaactttcttactaagataagcaccaaggcaaggatgccctcaccttttcgacaatgtaatggaagtcttagctaatgcagtaagatatgaaaaggaaataaaaggcatacagaatgggaagaaaaaagtcaaaacagtctctgttcccaggagacgaaattgtcttgcagaaaatccacacaagagctgaccaaaaaactctttgaactaaaaagtgattgtagcaaagttaatatacaaaagccaatcgctttcct

SEQ ID NO: 108082 - DNA, 393 bp, Homo sapiens
  misc_feature (1)...(393): n = a,t,c or g
accggagggtcctccaagcagtgccaaccctggttctgcaagagggccctggtggctcccaggggataaaaagggggttcggcccccagcacctgggtcagggcggccccccccttttcccgggcaaaaaggtttttctgcccttttggccccagggcctggaaaatgctccaaagagggagccgggttcagaaaagcccggccccccctttaccccnnnnnnnnnnnnnnnnnaagacggagggcgataggagggaggagaccccaggaggagtcactcttgccacccagggctggctggctggcagctctgagggtcgcagagcccctcgtctcattgctggtggcagccaccttcctgcagggtgacccaatgctcttgggaggggaacc

SEQ ID NO: 108083 - DNA, 376 bp, Homo sapiens
  misc_feature (1)...(376): n = a,t,c or g
nnnnnnnnnnnnnnnnnnnnnnnnnnnnnnnnnnnnnnnnnnnnnnnnnnnnnnnnnnnnnnnnnnnnnnnnnnnnnncctcaaatcaaaaaannnnnnnnnnnnnnnnnnnnnnnnnnnnnnnnnnnnnnnnnnnnnnnnnnnnnnnnnnnnnnnnnnnnnnnnnnnnnnnnnnnnnggaaacagcactacacgttccgaatgtctagaggctgaccacatggtcttggcaaggatatgaaggactagaattctccttcactgctggtggtaaagtgacagggtagagccagtctggaagacagttgggcagcttctgaaaatgttcaacctatacctcccacatgatccagcagctagtccaacagtcttacag

SEQ ID NO: 108084 - DNA, 404 bp, Homo sapiens
agtagctgcaaaactggcgcctgaagctatcctggggctgcaggcagcccagccccctggagccccggggcctccccactgaggtcgcagtccagaactccaccttcgcctcagctcctccgcttcttccttggctctggctaaaaatgccctggccagagcctcgcccagcccagcagcacaagactgccctctccttcacccctgctctggcccctcacctcttccccagggaggcaggcaagcccaggggctccaccatctgccagcaatgggacctgatgggggacatgctaacctctttgcgcttcagtttccccatcttgaaaatgaggaccacaacagtgcctcctcacgggatggatccggagggtcctcaacggggttcatgcacagggggggcg

SEQ ID NO: 108085 - DNA, 373 bp, Homo sapiens
cacactgaggtccagtgccagttacactccttaactattctcaccagttgagccttgaaacataatcctaggtggatcatggaactgaatttctgcccaattcctgccttgggataagatgatattcctgcctcaatagactcttcatcaaaagacaatgtatgttcatgaaaagacaaaccatacaatgggagaagatatttgcaacacatataactacaaaggggtagtactccaaacaatacaaagaatttctacaaaacgacaagagaaagaccatcaatccaacagaaaagtgggcaaagagatgaccaggcaattcacagaagacacaggaatgatctgtaaacacaggaaaagatacctcgtgccg

SEQ ID NO: 108086 - DNA, 418 bp, Homo sapiens
cttaaggaaataattgacaaaatttccatagtttagcaagagatttagacgttcagatatccaaagcccccagtgattgtcaagaaaatcaattgcagaacagctttcataccatataatcagactgtgaaaaggccccatgaaagaaataattataaaatcagaaagagaaaagcatctagtcacctataaaggaatccccatcagactaatagacttatcagcagaaaccttaaaacccaaaagagaatgagatgctattttcaaagagctaaaagaaaatgtcagccaagaattttatatcctgtcagaataaactttataaatggagaagaaataaagccttttacaggcaagcaaacactgagggaatttgtcaccactagccagccaaacaagaattgctcaaaggagtcct

SEQ ID NO: 108087 - DNA, 795 bp, Homo sapiens
  misc_feature (1)...(795): n = a,t,c or g
aatgaggccctcctgggttacccaatgaaaccccgtctctaccaaaaatacaaagaaattagctaggcgtggtggcgggcgcctgtaatcccagccactcaggaggctgaaggacgagaaaggccatgaagccgggaggcggagcttgcagtgagccaagatggcgcccactccagcctgggcaccagagtgagctccgtctcaagaaaaaaaaaaaanaaatgctcagtggatcactggcatagttgtttacactggctttgaaaccaaattcctgcagaattctgtcaaatcacctcaagagatcagagattaagaaagtgacaatgggcgggtctccctttggttcctgctgctctggtcatgtctgtagtgagctgcgtgggacccgtgctatggaataaaaagtatggtgacatttggtacctgaaagaggattccagctcacagcattgtgtttgacatactggtgttcatcatcttataacagtacctcatccccattagtctgctggtcactatggaaattgtgaaatatattcaggcccagtttataaactgggatcaagatgtgcattataaagtaaatagtgtccacaccatggccagcacattcaatctcagtgaagaacttgggcaggtaaaatttctattttctgataaaatgggaaccctcacttgcaatgttaagacatttaacaagtaccactgcaggtgtcatttatggtgcaacaccttccatccgagccctgatattttaattaccccagtttattggagaacattgagaatggc

SEQ ID NO: 108088 - DNA, 932 bp, Homo sapiens
tttttttacagagaagttaaaccatctttattcgtggattgcaagattttgatcacagaaattccgaaagaatctacagagtattacaaataacaagggaacttagcaagatgcttgcatataaggtcagtatgttaaaatcaatattgtttattcttacgagtagaatataaaaaagtcaaaatgccatttaacattgtatacaaaacactaaatactcaagaataaatctaatgaaagatatatatgatctctatactgcaatctatccaagcacagctgcattaaaatatagatatatgtgcaatctacaaaatattgccaggagaaattaaagaccgcctttaaataaatggtgggggaagaatgatattcatggattgaaggacttgttgttaagatactagttttccccaaacagatctatagattcaatgcgagccccaataaaaaatccccccccctttttaacaagctaattccaaaattcccctagaaatacaaaggccgtagaataagccaaaccaatcttgggagaataagttacaggacttaaagatttattataaaactacattaaagtaacatagtttggtactggtatgaagttagacaaagactactccctcccgctcctcaatctgcccccatccctagaacgtgctggcagctttctccatccgatctgcaagggttaaagggcgctgaggaagggctgaccgactggggtgggaaacaaagcggcactgagataacttcaggccaccttcctcccctcagtaccttcggatgaaaggtttcccttcttggtctgggaagcccactaagaagaaagcctgggctgtggcgttctggggaagtgaatagtacggccgccgggcgcgtcgccccaggaaccagaaggctttttgccgctattagtgcagaatggc

SEQ ID NO: 108089 - DNA, 371 bp, Homo sapiens
  misc_feature (1)...(371): n = a,t,c or g
ctctgataatatcgcttatgagtggatctgtgaaatttcctagtaaattttggcaaaccaaatacagtaacatataaacaggaatgtacaccagtacccagtacagtgtatccctggaatgcaacgttatttcatcagctggaaatgattagtgcaacagactgaaggaagaaaacaacatggtcatctcaatagattgtggacggctggaannnnnnnnnnnnnnnnnnnnnnnnnnnnnnnnnnnnnnnnnnnnnnnnnnnnnnnnnnnnnnnnnnnnnnnnnnnnnnnnnnnnnnnnnnnnnnnnnnnnnnnnnnnnnnnnnnnnnactttgtagtagccataggctgagcttagagactgacgcctg

SEQ ID NO: 108090 - DNA, 538 bp, Homo sapiens
atagacaggcatggcggccctaaacggcacctcctcaaaaggctgagggaccccctgaacatcgccttggggctgacgttgagtcccgcaagaggagccaccccggccacagagagctgagcccgtgtgccacccctactcgctcatggtcccaccctggggggacagcaaccaggccaacctcaggcaccccattaggccttctgtcccacatgtgcccatgctgtgaggcgcggaggcccccaggaatcaggagctcccgcactctgctccccagcccccgacttggaaggctcttgtctcagaactgctgaaaccagagtcacagccgtgcacgccagtgtttctttccagtggacacaccgcggccgtccctagcacaggtatcaggaaactggcccggcatggccaccctcctcttcctggcacttcccaacacctggccacagctcctccctcacccagcactgcctgaaaggcgccatctgcaatgtggtcagagggcgcagtcgaggccacgaattacacggactggact

SEQ ID NO: 108091 - DNA, 498 bp, Homo sapiens
tctgttgttgtttgtttgtttttgagcccaggaataacttcccacacatatgtcccaatgatttttaaaataggtgccaagaaagttcattggtggaaaagcatacttttcaagaaatggtgttggagaaacttgatttccacatgcagaagaatgaaggtggactctatgtcacaccaggtgcaaaaatgaacacaaactggatcaaagacctaaccccgagtgctgaaagtataatatgcctcaaagaaaacattggccacactttcatgacatcagattgggcaatgctttctgggatatgacaccaaaagcataggcaacaaaagaaaattagattccttggatgacatctaaatgacagacacttttgtgcatcagcaaacactgtgaactgagtgaaaagataacccatggattaggaaaaatattcaaaaatcatatctctgaaaagaggctgatatgcgtcatatacaaagaacagctagaactgaacaa

SEQ ID NO: 108092 - DNA, 428 bp, Homo sapiens
cggtagccaaagttttcttaagcaaaaagaacaaaattgggaggaatccccattatcctgacttccaaatccgtattatagagcctatagtaaccaaaccaccaaggtactagcataacaagttacgtagaccgatggaacataataaagagcccaaaaacaacttcatacatctacagtgaattcaatttcaacaaaggtgccaagaacattcatacactggggaaataacagtcacttcaataaacaatgccaagaaaactggacatctatatgcagaagaatgaaactagacccctattttttgacatatgcaaaaatcaaatcaaaatggatcatagacttaaatctatgacctcaaacatgaaactactaaagaaaacactgagaaagctctccaggacattgcactgggtaaagatttctcg

SEQ ID NO: 108093 - DNA, 450 bp, Homo sapiens
  misc_feature (1)...(450): n = a,t,c or g
tccgagagtcatttctagtctcttggcctcagtttactcatctgtgaagtgaggggattgagtaggcaatatcatatcttttctagtacactttctatggatctcactacaaggtgggcatgggaagctctttaatagcggttctctcttcatctgtttttttgtttttgttttatttgtttgcttgtttttgagacagagttttgctgtcacccaggctggagcgcagggatacaatcctggctcaccgcagccttgacctcccagtttcaagcgattctcccatctcaacctcccaagtagctggaactactgggcatgtgccacccatgcccagctaaatttctntttattttnttaggagacagggtctctatgcagttnaagggttgggagaatttnttctggggaaggctttccgggaggaggttaaggganaagaagtccaaa

SEQ ID NO: 108094 - DNA, 444 bp, Homo sapiens
  misc_feature (1)...(444): n = a,t,c or g
agccatttctagtctcttggcctcaggttactcatctgtaaagtgaggggattgagtaggcaatagcagatcttttctagtacactttctatggttctcagtacaaggtgggcatgggaagctctttaatagtggttctctcttcatctgtttttttgtttttgttttatttgtttgcttgtttttgagacagagttttgctgtcacccaggctggagcgcagggatacaatcctggctcaccgcagccttgacctcccagtttcaagcgattctcccatctcaacctcccaagtagctggaactactgggcatgtgccacccatgcccagctaaatttctntttattttnttaggagacagggtctctatgcagttnaagggttgggagaatttnttctggggaaggctttccgggaggaggttaaggganaagaagtccaaa

SEQ ID NO: 108095 - DNA, 232 bp, Homo sapiens
aaaaaaggaagttaagaaaattctatttacaatagaatcaaaaagaataaaacacttaggtaaaagatgtttacactgaaaactacaaaacactgctgaaagaaattaaaggagacataaatagaaagacattctatgttcatagagtggaaaatgtaatattgttaaaatgttcatattatcaaagatgattcacagattcagtgcaatcccagtcaaaatcccagtggca

SEQ ID NO: 108096 - DNA, 374 bp, Homo sapiens
caaacgttgtggcggaaaagggcagtggctgtagctgccctttccgtttccagggttccgaccatgtctttgaggacttccacatggagattggcacaggaccagactcatgacacacatctcatagcaggtgatgaaaaattggatatcactactttaactggcgttccagaagagcatataaaaacttcaacagtcaggatctttgttcctgctcgcaataacatgctgtctggagtaaacaacacttagagatggaagatggagtttgataccatggagcgatgggaaaatctctttgatgggttgggcatcaacggctgatcccttatccaacatggttctaaccttcagtactaatgaagatgcagttt

SEQ ID NO: 108097 - DNA, 357 bp, Homo sapiens
  misc_feature (1)...(357): n = a,t,c or g
acattctttaaaaagaatgtagttggaggactcgcactcctcaatttcaaaacttagtacaaagctacagtaatcaagacagtatggtcctggcatgatggtagacatacagcagtcaatggtatggaatcgagagtgcagaaacaaattcatgcatttnnnnnnnnnnnnnnnnnnnnnnnnnnnnnnnnnnnnnnnnnnnnnnnnnnnnnnnnnnnnnnnnnnnnnnnnnnnnnnnnnnnnnnnnnnnnnnnnnnnnnnnnnnnaggagtccaatctagtgagagccctcttgctgcatcatccatgcagaagaatacgagggtatgcacacgcctgcgtgggggagtggnggaa

SEQ ID NO: 108098 - DNA, 360 bp, Homo sapiens
  misc_feature (1)...(360): n = a,t,c or g
cctaataccataataagacaaagacattacttggaaacttacagaataacatcctgctnnnnnnnnnnnnnnnnnnnnnnnnnngaattaaagcaaattaaatccatcaatataaaaaatgatatcatattgtgaccaagtgggatttaccctgggaatgcaaggttgagtcaatattcaaaaactaatccatgtaattcaccatctgaacaggcttatgaaaagccatgtgaacttctcactgtaagtataaaaagcaaagcaagnnnnnnnnnnnnnnnnnnnnnnnnnnnnnnnnnnnnnnnnnnnnnnnnnnnnnnnnnnnnnnnnnnnnnnnnnnnnnnnnnnnnnnnnnnnnna

SEQ ID NO: 108099 - DNA, 369 bp, Homo sapiens
agttttagaaattttataagggaaaagaggtgcattgcataacgataaagggatcaattctcaaaaaagacaacaatcttaaacatttattcacctaacaacagagcaaaaacacctaaaaatgatgcaaaagctgatggaactaaagggagaaatattcaaattcactattgcagttggagacttcaaacttcttttttagtaattcatagctcagcaggtagaaaatcagtgaatacagttgacttgaggaacactatcaatcaatatgatataattgacatttatataataaaatactacctacaaacagcataacatatgttcttcccaagcttctatagaacatacagcaagataggtcacatg

SEQ ID NO: 108100 - DNA, 359 bp, Homo sapiens
cgttttttttgtgcctcaaatgcccttacataattgggagggtgaaccaagctaactgtttgactcccaacctgcagcttcagcataacttcagaagggtgctttgtgccaaccacacggagcctgtgaagggtttccttggccgattcctgaggaggaatcttatggaaacagaaatcagtgggcgggtgcgcaatatggaactggtaaaaatcattgactggattcccaaggtctggcatcacctaccggttgctggaggctcacagtttctcggacgtaagcataggtccccgggtcttcctgtcatgccccatcgatgcggacgggtagagagtggggaccaccgacttgtggag

SEQ ID NO: 108101 - DNA, 393 bp, Homo sapiens
  misc_feature (1)...(393): n = a,t,c or g
actgtttgttctagtaagagtaatcaaagaagataaagaagannnnnnnnnnnnnnnnnnnnnnnnnnnnnnnnnnnnnnnnnnnnnnnnnnnnnnnnnnnccttatatttgggaaagaaaaaaaactaaagactccaccaaaaaactattcgaactgatcagcaatttcagtaaagtggcaagtaacaaaatcaatatacaaaaatcattggcatttctatatgccaacagtgaacaatttgaagaaatcaagaaagtaatcttatttacaatagctaccaataaaacaaaatattcaggaatttaagaagcnnnnnnnnnnnnnnnnnnnnnnnnnnnnnnnnnnnnnnnnnnnnnnnnnnnnnnnnnnnnnnnnnnnnnnnnnnnnnnnn

SEQ ID NO: 108102 - DNA, 376 bp, Homo sapiens
ctgtaagaatgtggtttagcctttaaccagtccccaaaccttactagagataagagaattcataccaaagagaaaccctacaaatgtgaataatgtgtcaaatcctttagtgcattttcaacttttattaaaacacaagataattcatactggagagaaatcctacaaatgtgataaatgtggcaaagcctttaactggctcttaatccttatgaaacaaaagataattcatactagagagaaaccctacaaatgtaaagaatgtggcaaagcatttaactggtccctaaatcttactaaacataaaaaaacttaaactggagagaaactacacagctggaagacatcacagtaattctgacaacacctcaaactg

SEQ ID NO: 108103 - DNA, 510 bp, Homo sapiens
aagctaaattctctagatcagcaagctgcctttgaattgagatgtgtctcttgcttttagcctcctcagggggcagaggctagggacggggacagggccggagcctgggccagggcaggggctggggctggagccgaggccggagtcggagccgagtccagagccgaatccggggccggagttgggaccccagccgagtcccggtccggggtcgggatctggacttgggccacctccccctcctccttatccaggggcagcagctcctcctccgccatattctccatagttaccgcctccgtgccaagcccgcccggggacccggagcggggctcacggcggggtcagagaactgacgtgaatgcccacagggctggatccaaggagtggggaagcaagtggggagggcgggatgcgtgcaacagccaaaagatgaagaaccagtgcccaaatcctgttagtagaaaacagaaagacagaggcagcgattccagatgcccgtccgcttct

SEQ ID NO: 108104 - DNA, 371 bp, Homo sapiens
cccatgggaaaccatcaaagactacagcctccccataggaacctccaccaaaaaggctgagataatagcattaacctgagccttaatgttaggaaagaccgaggcattgacacttgacagatacgtgagctatgtgttctctgttctccatgcctgtggagcatcctggaaggaaaagggacttcttctaaatgccaaaagcaaggaactccaatatggaacagaaatattggcactgctttgggccgtggaaatgcccagaatgattgctgtagtcctttgccaaggtgaccaggagggtctatgaaataatacaggagagcagcctggcagatcccccggccaaaagggctgtgctggtggggaaggga

SEQ ID NO: 108105 - DNA, 377 bp, Homo sapiens
tgtctccccatgggaaaccatcaaagactacagcctccccataggaacctccaccaaaaaggctgagataatagcattaacctgagccttaatgttaggaaagaccgaggcattgacactttacagatacgtgagctatgtgttctctgttctccatgcctgtggagcaacctggaaggaaaagggacttcttctaaatgccaaaaacaaggaaatccaatatggaacagaaatattggcactgctttgggccgtggaaatgcccagaatgattgctgtagtcctttgccaaggtgaccaggagggtctatgaaataatacaggagaacaacctggcagataccacggccaaaagggctgtgctggtggggagggga

SEQ ID NO: 108106 - DNA, 369 bp, Homo sapiens
  misc_feature (1)...(369): n = a,t,c or g
nnnnnnnnnnnnnnnnnnnnnnnnnnnnnnnnnnnnnnnnnnnnnnnnnnnnnnnnnnnnnnnnnnnnnnnnnnnnnnnngagggtaaaagtaacgggggctaccgaaatgggccttttggcaattttcctaaccttggccgttttctttgccttattttgagggcctcctggaaaatcctcacctggggggagaacgcttggggggggccattcaatttcaagccaagcttttgggtcttttttgccggggatggcccttggggcccaggcggggtcgtaaaaggccaccctggttgagggggttttcccgccccttggggacgcgtccacgcctttcgacatccggggcacttcaagcgtagttggg

SEQ ID NO: 108107 - DNA, 581 bp, Homo sapiens
  misc_feature (1)...(581): n = a,t,c or g
catgattggccaggctggtctcgaactcctgacctcaagtgatctacctgcctcaactttccatagtgttgggattataggcgtacncgcaatgcctggcccagccactcttattcttgtaccacctcttcctcacatccttgaggagataaagaatgtgtcatggctctcctttctgctcttgatcatgataacgttctaaagggtgtggaataaattacagtacagaactggtgtgtgctatgtgacatgagaggtactgagattagtttatggaagtaacagtgttatagttcctttataaattatttttctctaacttcatatatggacatagttgcctaagtccattttgggaagtgtttcgattgtggtatggcatcaccttgttatttggggcaaatacaatatatacaaaaaaatattacacatacataacttttttttttagacggtgtcttgctgtgttatccaagttggagtgcaatgtcgtgatcacagttcactgtaaccttaaactcttgggcttaaactatcttcccgcctcaacctccactacaagcagtaattaaaaaaaaaaa

SEQ ID NO: 108108 - DNA, 553 bp, Homo sapiens
catctgtcacccgagaaaaatgctgatgacatggtggtgcggtggttccggtctcagttctgccccgcagggtttgtgtataaaggcggctgagagagaacagaggagcacatggaggagtaccgatgaagaaccacctttgtgagcaaagacatcagcaggggcagcgtggccctggtcatacgcaacatcacagcccaggaaaacggcacctaccgctgatacttccaagaaggcaggtcctacgatgaggccatcctgcacctcgtagtggcagagcttctggaagctgaggtttactgagaagtcgtcccagaagcataaagtgaaatccaaaacctgcctgtttgaagttggagtcgacacacccatctcaaagactaggctctaagcccctcatttcaatgaggggccatgaagacgggggcatccggctggagtgcatatctagagggtggtacccaaagcccctcacagtgtggagggacccctacggtggggttgcgcctgccctgaaagaggtctccatgcctgatgcacacgggctctttat

SEQ ID NO: 108109 - DNA, 355 bp, Homo sapiens
gctgtgccccgagcactcacgggaccccaaagtaaggttttccctcagctcctcccattttgcccctcctccctgcctcgctgtcccacattcatcccttccttcctcacctcacttttccttcactttttcctctcagcttccctgctgcttcaccctccattcctccttttccatgcctcctcaccgttccctgaaccctccattcttttccttctccctccttgagcccccattcctattctcccttatcaccgctattcatccccccaacctggcctccttgcaggtgccagctgacgaggtatgcgggtgcccccttgtacgtgatgtctttgagctcacgggtgacttc

SEQ ID NO: 108110 - DNA, 377 bp, Homo sapiens
ctctctctctcttttgtgagttatagcaaccggtgccttgtgaatcaagcgccatagtcaccgtagtcctggcgactgttacccatcaacaacaactactcctctcctcctcctcctcttcctcctcctcctccccaccaccaccatctccatcacccaccaacaacaccacaataatccacagccaaggccagtgtccacatcctgctcacatttgggacatctgtgaggcagggtgcctcctttttgtccctccaagaggacagttgggggacttggcctctggccgcctcaagttgggtcagcacctgctgggcctcatcctggttcatcgtgcatcaatgggagcgcacctgggttctgctgacatgtgagag

SEQ ID NO: 108111 - DNA, 500 bp, Homo sapiens
  misc_feature (1)...(500): n = a,t,c or g
ttttttttttttgtagcgaaagggttttgccatgttgaccagactggtctcctgggctcaagcaatcccccctcctcagcttgccaaagtgctgggattacaggtgtgagtcactgcaactagttacttacaatgtttacctgacgaagtccctatccaatttaaacacttcaaaggctatggataattttttttaaaatccccactacaacctcaggaaaaaaactgacaaaagaaatactcaggagtttcacaattaaggaagcctcaaaacatgtgaaaagatatgcaacctcatagggtgatcaggaaantggcaaacttaaaactggcaaccaaataccatttcataactaccaaaatgacagaaattcaaaattcagataacatgtattcatactaatgtaaggcaatgacaactttcgtccactcctagtgggaacaaaactgacactagcactttggaaaaaagttagcattacttacacacaccctacact

SEQ ID NO: 108112 - DNA, 371 bp, Homo sapiens
  misc_feature (1)...(371): n = a,t,c or g
gggccagtgaagaaattaaggaaaatgaaaaatttcttgaaacacatgataatggaaacacaacatactaaaacctatgagatatagggaaagcagtactaatagggaggtttatagctctaaatgtctacatcaacaacaaaaaacccttcaaataaataacctaacaatgcatcttaaggaactagaaaggcaagagcaaaccaaatccaaaattaataatagaagaaaagaaataataaagttcaatnnnnnnnnnnnnnnnnnnnnnnnnnnnnnnnnnnnaacctttagtcagactgagaaaaatagaggacctaaataaataaaatcagagattaaaaggannnnnnnnnnnnnnnnnnnnngta

SEQ ID NO: 108113 - DNA, 373 bp, Homo sapiens
  misc_feature (1)...(373): n = a,t,c or g
gggccagtgaagaaattaaggaaaatgaaaaatttcttgaaacacatgataatggaaacacaacatactaaaacctatgagatatagggaaagcagtactaatagggaggtttatagctctaaatgtctacatcaacaacaaaaaacccttcaaataaataacctaacaatgcatcttaaggaactagaaaggcaagagcaaaccaaatccaaaattaataatagaagaaaagaaataataaagttcaatnnnnnnnnnnnnnnnnnnnnnnnnnnnnnnnnnnnaacctttagtcagactgagaaaaatagaggacctaaataaataaaatcagagattaaaaggannnnnnnnnnnnnnnnnnnnngtact

SEQ ID NO: 108114 - DNA, 751 bp, Homo sapiens
ttagaactttttggagcacagaaaaacttctgaagcaggttatgaagaggctggaagacttatcaggctcatgtgtccatgcagataggagcagatggacacaactccggagtacggcaggctggtggaatccaaaaagcgagctggaactatgaccagtctgctgttgtggctactctgcatttatcagaggtaagatcctgagctgccatctggggggtttatttttatggcactaggtacttcacagagaaactgttgctcctctctgttgcaggccacagaaaacaacgtagccgtggcagagatttcttccctctggggcctattgctctgctcccggtaagaggtcctttttgaccagtccgcccacatgcatgcaagcctttcctttcacttttctctcagcctttttgtggtttcaagggaatctgcccaggctgtttgtaagttccctttttgtctttttatgcttgagagtttccaagtgcagcagagtcttacccgttggtattggtgttcttttgacacagctctcagacaccttgagttccttggtttggtccgcggtcccatgaacatgcagcagagctagttagcatggatgaggaaaaatttgtggatgccgttaactctgcctttgtgagtttaatcaatttacccagctgatgatgtgctgcagggggagatacagaaaggtggtgcttttttttgtggaaaacgtacccttatggttggccctcaactaaaa

SEQ ID NO: 108115 - DNA, 379 bp, Homo sapiens
cccactgggcagcagacaaatcctgacttgtaccgcatatggtatccctcaacctacaatcaagtggttctggcacccctgtaaccataatcattccgaagcaaggtagggacagtcagtttttttactaactttcaaatactttttgacacctggaattaagattttttaatggacgcagatgggaatctgcatgtgggatgtactgtatatttgaggcaaaggctctccctgccttggaaaaaggtgggcaacagctactcttctttcttactgaatataccctatcactggctaacaatttcataatttttctctctagtttacagttttagaagcacaagcacaaaactaaggtcctcccatgagctgtgacatg

SEQ ID NO: 108116 - DNA, 387 bp, Homo sapiens
  misc_feature (1)...(387): n = a,t,c or g
nnnnnnnnnnnnnnnnnnnnnnnnnnnnnnnnnnnnnnnnnnnngnnnnnnnnnnggaggggggcagaatatttttcaactcattctctgaggtcatccttaccctgataccaaaccagaaaaagttgttgaaagaaaataaagctaccagccaatatccatcatgaatggagatgtaaaaattcttgcccaaactttagtaaatcaaatccaacaatatttaaaaaggataatacattatgactctgnnnnnnnnnnnnnnnnnnnnnnnnnnnnnnnnnnnnnnnnnnnnnnnnnnnnnnnnnnnnnnnnnnnnnnnnnnnnnnnnnnnnnnnnnnnnnnnnnnnnnnnnnnnnnnnnnnnnnntctggtgagggcctcaagaan

SEQ ID NO: 108117 - DNA, 370 bp, Homo sapiens
agagcattaaaaattataagggaaaagaggagcattacataacgattaagggatcaattctcaaaaaagacaacaatcttaaacatttattcacctagcaacagagcaaaaacacctaaaaatgatgcaaaagctgatggaactaaagggagaaatatacaaattcactattgcagttggagacttcaaacttcttttttagtaattcatagctcagcaggtagaaaatcagtgaatacagttgacttgaggaacactatcaatcaatatgatataattgacatttatataataaaatactacctacaaacagcataacatatgttcttcccaagcttctatagaacatacagcaagataggtcacattt

SEQ ID NO: 108118 - DNA, 385 bp, Homo sapiens
  misc_feature (1)...(385): n = a,t,c or g
cccactcctgggcattgccctagagaaatgaacacttaggtccacacaaacatctgtacgtggatatttatagcatctttatacataatcaccccaaactggaaacaactcagatgacgtttaactgataggaaaccctgccccatccacatgatggaacactacttggcagaagagaggaatgaactactaatacacaaaacaaaatgggtggctttcaaaaacattnnnnnnnnnnnnnnnnnnnnnnnnnnnnnnnnnnnnnnnnnnnnnnnnnnnnnnnnnnnnnnnnnnnnnnnnnnnnnnnnnnnnnnnnnnnnnnnctgtggtggccagtgactgctggagggggaaacaaggaattttggggagtgatagaatgtcc

SEQ ID NO: 108119 - DNA, 562 bp, Homo sapiens
gcaaagcactcagaatagccaaaacaattttgaagtcagaaaatagcacttacatgctctgattttaacattacctataaaagctgttgtaaacaagacaatgtggttttggcataaggacagagaaaagagaacagagttcagaaatagacccagacttatgcctcgttttccaacaaaggcatcaatggaatgaaatggagaaattaaagtcttttcaacaaatgggtgctgggaataacagattactcacatgggaaagatgaacctagatccctacctcacaccctatataaaagctaatttgagataaatcatggatttaaaaataaaagcaaaaaatgtaaagcttcctagaagtatatataagagaatagcttttacagggtgcagtggcaggtgcctatagtccccagctactagggaggctgtggtgggaggaatcacttgaggccagccagtttgaggttgtatagtatactatggttgattttgcctgttagtagctgctgcactcaggccctggtcaacatagtgagacatcatccaaccaaaaaaaaaa

SEQ ID NO: 108120 - DNA, 351 bp, Homo sapiens
  misc_feature (1)...(351): n = a,t,c or g
ggtgaaagacctccacaaggaaaactataaaatactgatgaaagaaactgaaggagacacaaacgaaaaagcatcccatgctcatggatcaggaaaatattaaaatgactatgctacccaaagcaatctatagactccatgaattcctatcaaaattccaatgacgtttttcacataaaaagaaaaaacaatcctaaaatatgtatggaacctnnnnnnnnnnnnnnnnnnnnnnnnnnnnnnnnnnnnnnnnnnnnnnnnnnnnnnnnnnnnnnnnnnnnnnnnnnnnnnnnnnnnnnnnnnnnnnnnnnnnnnnnnnnnnnnnnnnnnnnnnnnnnnnnnnnnnnnnnn

SEQ ID NO: 108121 - DNA, 354 bp, Homo sapiens
  misc_feature (1)...(354): n = a,t,c or g
ggtgaaagacctccacaaggaaaactataaaatactgatgaaagaaactgaaggagacacaaacgaaaaagcatcccatgctcatggatcaggaaaatattaaaatgactatgctacccaaagcaatctatagactccatgaattcctatcaaaattccaatgacgtttttcacataaaaagaaaaaacaatcctaaaatatgtatggaacctnnnnnnnnnnnnnnnnnnnnnnnnnnnnnnnnnnnnnnnnnnnnnnnnnnnnnnnnnnnnnnnnnnnnnnnnnnnnnnnnnnnnnnnnnnnnnnnnnnnnnnnnnnnnnnnnnnnnnnnnnnnnnnnnnnnnnnnnnnnnn

SEQ ID NO: 108122 - DNA, 357 bp, Homo sapiens
  misc_feature (1)...(357): n = a,t,c or g
gacaaatcaagaaaccaatgacaaccaaagcacatgatatcaaagcttaggggacatatgatactcctggcctgtggcgaagatcatagctgtacctgcttacattatacaagaagatcttataccaacaacctaactttacaacttaagtaattagaaaaataagaacaaatgaaatccaaaagtagcagaatgaaggaaatagtacagattagagcagagatcaatgacataaagaatagaaaattgcggagaaaatcaataaagtgaaaaattggttannnnnnnnnnnnnnnnnnnnnnncacacatttagctaactggactaagaaaaaagaaagaagattcatattactta

SEQ ID NO: 108123 - DNA, 349 bp, Homo sapiens
  misc_feature (1)...(349): n = a,t,c or g
gggccagtgaagaaattaaggaaaatgaaaaatttcttgaaacacatgataatggaaacacaacatactaaaacctatgagatatagggaaagcagtactaatagggaggtttatagctctaaatgtctacatcaacaacaaaaaacccttcaaataaataacctaacaatgcatcttaaggaactagaaaggcaagagcaaaccaaatcccaaattaataatagaagaaaagaaataataaagttcaatnnnnnnnnnnnnnnnnnnnnnnnnnnnnnnnnnnnaacctttagtcagactgagaaaaatagaggacctaaataaataaaatcagagattataaggagg

SEQ ID NO: 108124 - DNA, 341 bp, Homo sapiens
  misc_feature (1)...(341): n = a,t,c or g
acattctttaaaaagaatgtagttggaggactcgcactcctcaatttcaaaacttagtacaaagctacagtaatcaagacagtatggtcctggcatgatggtagacatacagcagtcaatggtatggaatcgagagtgcagaaacaaattcatgcatttnnnnnnnnnnnnnnnnnnnnnnnnnnnnnnnnnnnnnnnnnnnnnnnnnnnnnnnnnnnnnnnnnnnnnnnnnnnnnnnnnnnnnnnnnnnnnnnnnnnnnnnnnnnaggagtccaatctagtgagagccctcttgctgcatcatccatgcagaagaatacgagggtatgcacacgcctggn

SEQ ID NO: 108125 - DNA, 362 bp, Homo sapiens
  misc_feature (1)...(362): n = a,t,c or g
tcctcgccttaaaaccaaccggatttgaagtttttttaggcaggggaaggggggccccccccgttattcccccccctttagggggttaagggtttttttgggccatccccttccgcccaaaagtttaaagccaccttagccaccagggcaaaccccggttttttttaaaaaaccaaaaatttacccggggttaatggggcccccccttattccccgctcctgaaaggggtagggcaccaaaacttttttaccctggagggggggggttcaatttcccccaacttttttttcnnnnnnnnnnnnnngttatctatgtgatggcctttcacaatttgatctttatataaccttttttctctacc

SEQ ID NO: 108126 - DNA, 1629 bp, Homo sapiens
  misc_feature (1)...(1629): n = a,t,c or g
aggcgggannccaggcgnncnnnnttggaaactngtaaatctccgaaccacgatacgccagcttggacgaggatcctgatttggggacacaaaattaggtaatgtctgacctttgggcttagcctggaccatatccttttcagcccagtacctgaggcctcaaggaagaactcaactcccagcaccaggtcacaaccaccacctggtgttggaaggggatcaccacactccttggctgtggtgtctgccccaggcagggaaagtaggcagtgggattcaataaatgtatcaagcaacagcgagcaccttcctgctccgtgactgttcttggcccctctagcagtcctcagatctttagatcggccctcgcagggtcagcagaacaggcagccgtgaaggtgaggggcatggaggaatctgttgcctggctgaagggccctcagattaactacttgtgcccccaatgatctcctaaggagctttgcctgacaagggggatctgatgcacgacccagcaatggaatgaagagctggaacggctgtaagtgtcaagtgggaggatactgcccccttgtgggggccagacgggtcggacacggctgtgccccatctggggccaacaccacttgtctgtaacatcccacatctgccagggaagggtctgggggccagtggaggcctgaggtgtccctccctctgagtcctttgggggctgcagcccaggggtttaccctagtgttaagagtgggcatggaggccctgctctctgtacaggaggcctctcgctgccctccaggcttcttcccttcttcaggctggcccaggtcccaggcctggtcaactcggtcacagccagtccagaggccagttgcctgccttcccggacccctccccgggttggctctccctggagacctctccatcattcccgaaaagtggatggagagagtgatggctccactgaagagacagacgagtcggagacttgcaggagtccaaagggtcctgcccacagcgccctgtacctgctcccacccagccccttggtgtgcccacccagcctcctctccagcaccttgctgtgctgccctctgctgctgacaaggtgaataacagccccaagaccagccagaggggctctgatgatcagcccagccagtggccccggaaggtgaatggccctgctctccctggcccctatcagcctgtgaacttacttagggcccccaagctgacagactgtgcttgaggccaccttgtcacgccgtagcctgttagtccttcctaaccttcttaagagcagtctcttctgagccagcctctgcgggtcccccaataaggttcatctcctcacagcaactccatttaagggggagaaccccgaataccccccgcagggccttgcacccatcaagggtgacacctgcgacgcaagtaccaggaggacataaccgctgtggcctgttggagaacagccagtagccttggtaatatgaagggtgggccagaagatgatttgttgtgcacttgcaaaaactgcttcaagtcttgacccctttgtgtctaatagcctaaacaaacatgtaaagcaaaataaaaagtcccaacatgtctggtaaaaaaaaaaaa

SEQ ID NO: 108127 - DNA, 1583 bp, Homo sapiens
ttttttttttgagacagagtcttgctttgttgcccaggctggagtgtggtggggcaatctcggctcactgcaacctccacctcccgggttcaagcgattctcctgcttcagcctcccatgttgctaggattacaggcacctgccaccacgcccagttaaattttttgtagttttggtagagacggggttccactatcttggccaggctggtctcgaactcctgacctcaggtgatctacccacctcaggcttccagagtgctagggattacgggtgttgagcaaccctgcccggccagtaaattgtatttttttaatgacatcattggatttgaagatctagatgggcataaattacgacgtctgccatcgcatattagaaaggggacagtcatatttgtaacgtggagagaacacggagcaccagtcaccacgtgcacttaggatgcagagcttaccgcacaccgctgatggggacctccggaaagagcggtgccttgtggttggcctggaagttctctcccaaggtgaaattcctttaaaacctcaggctctgacctatgtctttgaagcagctgctttgtagagtccctctctttactgtcctcgttaggactgttttgtggttccatgaaaatgtttagcatccttgcagaattacttgagaaggggctggtaccagtgtaaagaatctatttctgtaaaactacgaacttttgcatagggaattttattctaaagcaggtcatagccgtgatccaggagctgctgctgctcactgccaggtcctttggcggctggcggcgattgccggacagactctctgtggcctggctctcatccttggcgtgtcagcctgcggcaggctgccagccatccatgacaatcatgtgagctcagccacagacctcagctggcggtttgatccctggcaggtccctcgagcagtactggtaagaggcttcacacattttcccactcttagagttcatttttcatagtaggaagggcccttggcctccccacgtgcctcttccagagcctccaccagcactaagctcagaggaaagaagaaaagggccaggagtcagacgtcacacccgggggctcccctttcccattttagaagtgttggcatgcgtcagtctccttttaacagaggggtggatgtatccgtggaggaggggccttcttctctttctaattgcactatacttgttctagcttcagtctggagatacttaagacctccatggggtcggtgatccatagacttagcaagtcttgccttatctatggagctcgatggtgagaattgtgacccattggtctgatgtccataagttccttccccctagattgtttctttccacggattgtgttcatctgaaccattttattttttatttaccaaagtactgtacttggctattttgcaagtgttttcaaaaccaaatggtttctttttttgtgtttttaatcttcgatacttggtgcaatagaagctgcaaagatgtgcccctttatctatgaaatggagttttgtataccaataaattctagtttaaaaacaaaaaaaaaaaa

SEQ ID NO: 108128 - DNA, 463 bp, Homo sapiens
cacacactttttcagagggtcaaagggggttggcgaagaagcgggactgagagcagatcccaggcctcagaaacccatgccacctgggccccctccctgtggccttcctggatgctgtagggatagcagatctgtctgggtcagcaggtcagggcgactggcaggagggggtggctgggaggcctcttcctccaagagcaggggcagcacatcatccaacaggcagagaagaccctcatccgaggtaggggcaggtcagggtggagtgcctgcctccttcccccagtgccccacacaaagctccaagagctccaacaggctcctgtctgtttccacttcccaggctttctgtggtcatgtccctgcccactccaaagggccatccccctcagccttgcctccctctcagacccagctgaatccctgcctcggtaccgccccctcctggggcactcctgccccc

SEQ ID NO: 108129 - DNA, 515 bp, Homo sapiens
ttttttaatatacttgcatgctttattcaaaatacactgtgagtacatgtctatgctaatattctgtagtatcatttgaagtggctatattatcttatagaggtgccctgattttgtttttaaaaataaatatcctctgcagaacacactgtcaagagaatgagaagacaagcaacagactgggagaaaatatttgcaagagacatacctaacaaaagattgttattccaaatattcaaagcactcttaaaacttaataagaaaacaaaacaacaacaaaaggaagatttttaaaatgggccaatggtataaacaggcaccttatcagagaagacatacagatagcaaacaagcataatgttcaacattttatgtcatcaggtaattggaaatcaaaatgagataccacttcataatagtataatccaaaatactgacaccaccaaatgctggccaggatgtggagtaataggagctctcattcactgcttggtgcaaatgcaaagcagtatagc

SEQ ID NO: 108130 - DNA, 1184 bp, Homo sapiens
cagcctgggccattagctcctgatgtcatcgatttgggtgaggggacagggaagtcagaggaagctggccagtggctctcacgaagacttacagcagcggagtggtgcctgattcctagtacagctgctcccactgagtctccagggatctgtggttcaggaccccctgcaaccccctcccagacccctgtactggtgggaggagaggacctagaggaaaggtgctgggcagataagcagccgagggaggccctgggtttagcttatcagtcttctgggcccctcctgccccaggaaagggcagccgaaggaccatggtgttgcccctgtcatcgttatcgtcctggccatgaacttgcaggacttgggagggccggagttcagccaggcagacgggcagcacagcatttgcctgttggcaggctggccttggtggcttcccaaaggcaatcgctccacgcagaacaaaactcacttttttggggggtgaagcaccttggttcatttgtttagttcgttaaattccagcagtctgtttttaaagggaaacatggctgcagcccgtcctgcccctccacccacccaccaggtgcccagtgttcccaagggccccgaatcccaaccttattcaggcgtcagcatctctgcaccccaaatgcctgttagggaggatagtgaaggctgagccctcctgggctcatcaaaagccagcagtgagagaacacccccatctcctctgaggtgaaccttgtaagggcaagtcccgtgcctgtcctggctggccctgggtgaaggtgggccagggacccaaaggccctggcgccctgggcctcgcctggcccttgctctgacgtgctgaacttcatccctgatagtacccttgattttccctactgtgacttccccttctgtcgacttcctcacccaactttaaaattccgtattgagagcagtttcctaagttacctcaaatcctattcagaagaaggttcttccctggaagttgggagggcggaaaacaagtttagtcacagaagactactccatgtttgagcttctgtttcaagggaagtgagtaactgccggaggagccctgcccctctgcagtgtgtggtgttgccctgatacttttcagattgaggtgttacttacatgtaataaaatgcacagacttaagtgtaaaa

SEQ ID NO: 108131 - DNA, 652 bp, Homo sapiens
cagaccaggctgcaggatgggacctcctggggaagggcagtgtggagctcgtcatagtaacagaagcagaagcccggagaagcagggaggcctgcgtggtggggagcccatgctggctctgacgtggccgagactgtcctgtggtctgacgggggcagaagggcagggaggagaggaacccacgctgggtgaacgtggtgttcaagggggacagaggggtcccgcagggctgcgaggagggctcaggccccagagggcccacgccagggcctgcaacatcgttgccgatgccaagtctggtcctaactagtaatcagcagcttctcttttctgtaggtctggggacagtcctaataaactgaaaacactgactgcttgccactgtttttgttaattcccaaaaatagacaccaatttctggagggtttttccatgaggctctcagccgcaggggcaaaggtgtgggaaggcaggcctgggttgagaaggcgctgtgcccgagctgggcagtgcaggggcatcagcgaacaggtctggagctgggtagagtgaggctcagcctgcaagcagctgcccaggagagtggcatggcacacactgcccgggcaaaacaggtgggcgggagggcggccgaggctgcacctaagggctg

SEQ ID NO: 108132 - DNA, 495 bp, Homo sapiens
aaatattcaaaccatagcaagcaccattctgggtctagtgaacagcaagttacacacacacagaattgtacaatatcaacacaaaaggctgaagaagcaggggctggggagctgctcactggtgctccttcccagcaggaaagggcattttcccaagagcactttcccccagcccaggccccacgcctaggtgctcccacctacctccctgctcccccaggtggtgggttttaaagggctcccaggtgtcctttaagatcctatttatgtcaacaaatggtgctgggacacctgcatacccacaggagaaaaatgtagttggccccctacctcacaccatacacaaaaaggaactcaaaatgaatcatgaacctaaatgtaagagttaaaactataaacctcttagaagacaagataggtgtaactctttgtgaccttgggtttggcaattatgccttagatatgacaccaaaaacacaataaaagaaaaattag

SEQ ID NO: 108133 - DNA, 710 bp, Homo sapiens
ttttttttttacacagggtctggttctgaggccgaggctttagtggcagcgacacaatcataattcactgaagccttgaactgctgggctcaagctatcctcccacctctgcctcccaaagtgctaggattataggcgtgagccaacacgcccagccccatactaactttttagaaattaaaacctcagaaggttttaatgaaccaattgccaattcagttccttcttaaaagtcttgttgctatgataaaatacattcctcctaaccactctttcaagattattaaatgatctcaattgggtaacaaaagaagcaaaacacttttcacagtctcagaaacttgcaaggcaggaaggcaatggactgagaatagcaaaccaattctaactgatagagaaaccattaaagatgtacattatctgacttttaagcttattattaatataaaactagtaactagtaatcaagacgtggtagtggcaacaagatagtggtactttcatcaagatagatcaacagaacagaactgagggtacagaaatagacccacatatatatggccaactgatgcttatttaaagtgtcaaggcagtttaataggaaaaggataatcttttcaacaaaaggtgctggaccaactgaatatgcaaacaggaaaaataacccttgcccctaatttcataccatatacaaaaatcaacctcgtgcc

SEQ ID NO: 108134 - DNA, 372 bp, Homo sapiens
  misc_feature (1)...(372): n = a,t,c or g
gaatttatgaaaagatatataagaacagtacactgcaaactacatagcactgttaagagaaattaagaagacctacataaatggagcgacatatgtggttcatgagttgaaaaactcaatattataaagaggtaaattgtgcccaaactgacctatagagttaatgcaaatccaattaaaaaaactcagcaagacgttttggtagaaattaataagctgatgttataatttatatggaaatacaaagggcttgggattaactaaaacaactgaaatagaaaaatgtgtaagactgacatgacagattcaaagaattgttaaaggtacagcaatcaaacaaataggtcaaagaatagaagagagtccaaaaan

SEQ ID NO: 108135 - DNA, 495 bp, Homo sapiens
  misc_feature (1)...(495): n = a,t,c or g
actggagattttagtatcaaagggaagtcctggaaccagtcttgagatgagaagggacaaatctagttcttcctggggactgtagccgggagtagagcagaaaacaatttctttcgtttaatccacattagatttttatttatatttattttgaggacaagagtctcactctgtcacccgggctaggagtgcagtgggagcgatctggggctcaaaggggattctcccactttcagcctctggcactaggctgggaccaggtacgcaccaccatgcccggctaatttttgtatttttttagtaaagatgggggtttcaccatgttggtcaggctggtcttgggactcctggacctcaagtcatccacctgcctcggcctncccaaagtgctgggcagattcactttaaggcccagggatttcgaganccagccttggggaacccntgggcgaaatcttcntttttacttaaaattcaaaaaattttggnccgggt

SEQ ID NO: 108136 - DNA, 352 bp, Homo sapiens
gatgaagttctcagtgaagcatttcgcctgaccattacacgccaagatattcaaactctaaaccatctgaattggctcaatgatgagatcatcaatttctacatgaatatgctgatggagcgaagtaacgagaagggcttgccacttgtgcctgcatttaatacctttttcttcactaaattaaaaacggcctggctatcaagcagtgaaacgttggacacagaaagtagatgcattttctgttgacattcttttggtgcgcattcacctgggagtacactggtgtctagctgttgtggactttacaaagaagaatattacctattacgactccatgggtgggataaacaat

SEQ ID NO: 108137 - DNA, 378 bp, Homo sapiens
aatttagacaaccttggtcaggcccagataagaccggtcaggactgggcaagactggaccaaaccagacaagacctgtcaggaccagacaagaccagaacaaaccgcagcaaaccgggtaagactggtcagcatcagataagacaggaccagaccaggccaaaccggataagactggtcaggactggcccaaaccagataggacaagacctatccggactagattagaccagacaggactggacaagaccaggctgaaccagataagactggtcaggaccggaccagactgggccgaaccggataagaccggtcaggactggagaagactggaccaaccaataccggacaaggtttcactgtgaatagtacacagacc

SEQ ID NO: 108138 - DNA, 408 bp, Homo sapiens
atcgaatgtatcctcatcacctccagtccacatccagaatagaggattgtgctcaggtccgttcgaaaataatctctatctagtcggcggacaaactacaatcacagaatgctatgaccctgaacaaaatgaatggagagagatagctcccatgatggaaaggaggatggagtgcggtgccgccatcattaatggacgtatttatgtcactgggaggatactcctactcaaagggaacgtatcttcagagcattgagaaatatggatccagatcttaataagtgggaaatagtgggtaatcttcccagtgccatgcggtctcatgggtgtgtttgtgtgtataatgtctaattgaatctgcagaaatgaccaagcaatcacttttttgggagatatgtttataaaaat

SEQ ID NO: 108139 - DNA, 636 bp, Homo sapiens
ttttttttttctgagatagagtcttgctctgtctcccaggctggagtgcaatggcatgatctcggctcactgcaacctccgcctcctgggttcaagcgattctcctgcctcagcctcctgagtagctgggactacaggcatgcaccaccacgcctggctaatttttgtatttttagtagagatgtgattttgccatgttggccaggctgatctcgaacccctgacctcaggtgatctgcctgcctctgcctcccaaagtgccaggattacttgcgtgagccaccatgcctgggcccaaaattgtacactattaaattcattaatgttatacaggggcatagcacttaatatgggaaactggggacattcaatacaggaaggaatcaggaaatgtattatagggtcacattggaataaaaatctataccaataggcttttactattgttaaggtacccgggcacaacttaaaagctcactattttggactaaatggggagtaacattcataatgacaataaaatctctacctctggatgaaaaaaggatcatttaggtaaaaattaaatgttcctaactaaatgcagcttaactaacctcatatatacataatatgaccgatagtctgtaagtgccg

SEQ ID NO: 108140 - DNA, 365 bp, Homo sapiens
  misc_feature (1)...(365): n = a,t,c or g
ttccccttttttgggggtggggcccctggttttcccaaggcccccttaattggggaacgggggcccaaaattatttggggggannnnnnnnnngaccaaatttttttttcccctcccttttttaagagagaagtctcccccccgggtttgccaagggaacaatttcccccccgttcctgcaaaaagggacccccccccgttacccccttttttttagcccccccggggccggtttttccccccccaaaatttaagaaaaaccctgggggggggcccaaaattttggtttgcccnnnnnnnnnnnnngaaagaaagaaagcagagtccgagccccttttatgtggaaaattgcaggtaaatagaat

SEQ ID NO: 108141 - DNA, 374 bp, Homo sapiens
tgcttgagaaagaagaataaagtgttaggaattaggctacccaatactgtattaaggcatactatacagctgtagtaatcaaggcaatgtgatattggaagaaaaatagtcacatatatcaatggaatatactagagaatccacagataaaaccatagaaatatgctcaactgattttgacatagatgaaaagtatttgttattttacatttattgatcttgcctcacaagatgattttaattttcttgaggacacataccatatctttagtctatcttcacaatgcctgttatggatcttagcatataatatacattaacctaaaatactggtgatttattataaaagttttcagagagataaataatattat

SEQ ID NO: 108142 - DNA, 344 bp, Homo sapiens
ttgtcaaagtggatcaggaaacagaccctattatgtgttttgtacaggacaccctctttaaatataaagccacatatagattaaaagtaaatgcatagagaaagatatactacattaacactaatttaaagaaagcaggagtagctacgttaatttcagacagtagacttcaaaccaaggaaagttatcagagataaagagagctttacctaataataaaagggttaattctccaagaagacataacaatgcaatagagcatcaaaataagtgaggcaaaaactattagaactaaatggagaaatagatgcatccactatcagaaatggacagatccaggctgg

SEQ ID NO: 108143 - DNA, 362 bp, Homo sapiens
  misc_feature (1)...(362): n = a,t,c or g
ctctgataatatcgcttatgagtggatctgtgaaatttcctagtaaattttggcaaaccaaatacagtaacatataaacaggaatgtacaccagtacccagtacagtgtatccctggaatgcaacgttatttcatcagctggaaatgattagtgcaacagactgaaggaagaaaacaacatggtcatctcaatagattgtggacggctggaannnnnnnnnnnnnnnnnnnnnnnnnnnnnnnnnnnnnnnnnnnnnnnnnnnnnnnnnnnnnnnnnnnnnnnnnnnnnnnnnnnnnnnnnnnnnnnnnnnnnnnnnnnnnnnnnnnnnactttgtaatagccatgggctgggctcagtgag

SEQ ID NO: 108144 - DNA, 367 bp, Homo sapiens
  misc_feature (1)...(367): n = a,t,c or g
nnnnnnnnnnnnnnnnnnnnnnnnnnnnnnnnnnnnnnnnnnnnnnnnnnnnnnnnnnnnnnnnnnnnnnnnnnnnnnnnnnnnnnnnnnnnntgcccagcttcaatgagggcttcttataaatcactggtggaagtgtaaattggtaaaccactttggctttatcttgcgaagctgatcatctccatattctacaatcctnnnnnnnnnnnnnnnnnnnnnnnnnnnnnnnnnnctcccaagcaaggataacaggagacatgtacaagaaggttcgtagcaacactttggctagcaaaacactggaaacaaccccaaggcttatcaacctaaaaatggattaatcagttggggtatattcatacaa

SEQ ID NO: 108145 - DNA, 468 bp, Homo sapiens
ggcacgaggggaaatactttgctatgtgttgtgaacactacaaccctttcccacatcctcctatgcttcgtaattttgataatttcacatttgtcatttgagccaagtttatttttctctaaaacagcttaaaatttctgttaaaaaacagatccccatctattctagcttatagaggttggaaaaatgtttaaaatctaaacgtgattaaaggtttgtagaaatcacaaaataaagattttggctgggcacagtggctcacacccaaagtaatcccagcactttagaaggctgaggcaggtgggtggcttgagcccaggagttccagaccagcctggagaagggaggctggggcgggacagtcacctgggcctgggaggccgaggctgcagtgagctgtgattgtgccattgcgctccagcctggacaacagagtgagatcttgcatcaaaaaaaaaaaaacaaaaa

SEQ ID NO: 108146 - DNA, 596 bp, Homo sapiens
gagacagagtcttgctctgttgtccaggctggagtgcagtggcattatcttggcttactgcatccctctcctcccgagttcaagcaattgattctccttactcagcctaccaaacagctgggattacaggaacgccccaccacacgtggctaatatttgcgtttttagtagaggcggagtttcgccatgttgaccaggcgaatcaagtgatccgcctgcctcagcttcccaaagtggtgggatcacaagtgtgagccactgcacccagcctgattatttgattactttgaatttcttctttaccttatattcttatttcaaaggtaaactgtagtcataggtattttcatggtaattaatactgtgatattctactgtaatatgtctctatagttagaatcctgcaacgggatgttcttttttttggcgatggagtcttgctctggcacccactggagtgcagcagcgcagtcttggctcactgcaacctctgcctcccaggttcaagtgattctcctgcctcagcctccctagtagctgggattacagacgcgtgccaccacgtccgactaatttttgtatttttaatatagatg

SEQ ID NO: 108147 - DNA, 383 bp, Homo sapiens
  misc_feature (1)...(383): n = a,t,c or g
cttagccccggttttaactgccaggccggggtaaatatggtgacccccttttagggggggtttcccccccatttttttttccttgggcggggggggcccaggccccctttgggtcccacttctttaaaaagtaaaggtggaggctctttttaaccccgggcctcaaaggcgtaatttacccttaatggggccccacccccccacctgggccaaaaaacaaaatcccctttccaaattttnnnnnnnnnnnnnnnnnnnnnnnnnnnnnnnnnnnnnnnnnnnnnnnnnnnnnnnnnnnnnnnnnnnnnnnnnnnnnnnnnnnnnnnnnnnnnnnnnnnnnnnnnnnnnnnnnnnnnnnnnnnnnnnnnnnnnnnnnnnnnnnn

SEQ ID NO: 108148 - DNA, 371 bp, Homo sapiens
  misc_feature (1)...(371): n = a,t,c or g
aagtcacagagatacagacattttctttaaagaatataaagactagaactgttgaataacttgatttgtcacattcatcacaaaaacatggtaaaatgcaaaacaaaaacgtatttttaaaaaatgcttatcggatcatgtcaacnnnnnnnnnnnnnggaaaaggaattccacttttcccccggctggaagggaggggtaaaattttaatttcttggaacccccgccttttagggtaaaggaaattttcttgcccaatccccccaaagaagtgggactaacggaacccgcccccctgcccaattaatttttggttttttgggaaaggggggatttccccattttggcccgggttgattttaacccccaac

SEQ ID NO: 108149 - DNA, 371 bp, Homo sapiens; identical to SEQ ID NO: 108044
  misc_feature (1)...(371): n = a,t,c or g

SEQ ID NO: 108150 - DNA, 367 bp, Homo sapiens
  misc_feature (1)...(367): n = a,t,c or g
aaatttacttatgtattaaccaaagaggtgaaatactgaaatttctgtgtacataggaaattgtaaaacactgatgaaggaaatttaaaaagctataaataagtggaaagatatcccatgttcatagacttaaagaattattattgttaaaatgtctttattgccacactacacaaagcaatctacagattcactgcaattcctatcaaaattcccatgacatatttttaagaaatagaaaacacagtttcaaaagtcatgcaaaaccacaaaagaccataaatagccaaagcaannnnnnnnnnnnnnnnnnnnnnnnnnnnnnnnnnnnnnnnnnnnnnnnnnnnnnnnnnnnnnnnnnnnnnnn

SEQ ID NO: 108151 - DNA, 356 bp, Homo sapiens
  misc_feature (1)...(356): n = a,t,c or g
gtcatagtatgttacccagactggtcttcaactcctggattagggacaaagaaattgactaattctaaagcttatatggaagttcattttatactgggctagccaaaacaactttgaaaaaaatacgaacaaagttggaggattaacactgcctgattttaagacttataaagcctcagtaaccaagacatcgaggtattgatgtgaaatctttgnnnnnnnnnnnnnnnnnnnnnnnnnnnnnnnnnnnnnnnnnnnnnnnnnnnnnnnnnnnnnnnnnnnnnnnnnnnnnnnnnnnnnnnnnnnnnnnnnnnnnnnnnnnnnnnnnnnnnnnnnnnnnnnnntgatgtggaatc

SEQ ID NO: 108152 - DNA, 364 bp, Homo sapiens
  misc_feature (1)...(364): n = a,t,c or g
cggtggggccttgggacaacccccccgagccccccgggattttccaaccccggtccataccttttagacccgccggcccttttaaattctggcaagggggggccggccccccccaagggtttggtttaactgtttccccgggctaaaaccccctttggtttttggccgggggggttccccctggccatccaggttttggcttaaagttcagtttttaaaggagcctttccctcccccccatttggaaaacccaactaggccccnnnnnnnnnnnnnnnnnnnnnnnnnnnnnnnnnnnnnnnnnnnnnnnnnnnnnnnnnnnnnnnnnnnnnnnnnnnnnnnnnnnnnnnnnnnnnnnnnnnnc

SEQ ID NO: 108153 - DNA, 466 bp, Homo sapiens
  misc_feature (1)...(466): n = a,t,c or g
gctgtatttaaagtgcatgttgtagcaagttcttagctcagaatgcttggcacagtacaaagaatactagctcaagcatgaagagagttgacttctactgccaatctaagattaactcgctattttcttttttttgagacagggtgtcactttgttgcccaggctggagttcagtgatgcccgtctctgctcactgcaacttccacctcctgggttcaagcgattttcctgcctgaccctcctgagtaactgagactacaggtgcatgccacctgcccaagctattttttgtatgtttaagtagangacaggactttgccatgttggccaaggctggtctcaaacttctgacctcaagtgatctaccctcctcggcctccgaaagtgctggggttacaggtgtgagccactgtgcctggccaactcagtattttcatttcagcaaattatatcaccttttatgtct

SEQ ID NO: 108154 - DNA, 356 bp, Homo sapiens
cccagttatcaagcacaatatggtattagtgaaagaacaaatagatcagtggaacaaaatagcccagaatacatctgtacatagaaaactgatctctgacaaagtaacaaagacaatacaatggagcaaagacagtctattcaacaaagagtgctggaacaactaaacatccatatgcaaaaaaccagtctagactcagccctcacactcttcacaaaaactaactcaaaatagatcacagagccaggttcagtggctcacacctgtaatcccaccactttgggaggctgagtaagatgatcacttgaggccaggagttcaagaccagcctaggcaacatggcaaaagcgttatct

SEQ ID NO: 108155 - DNA, 373 bp, Homo sapiens
  misc_feature (1)...(373): n = a,t,c or g
nnnnnnnnnnnnnnnnnnnnnnnnnnnnnnnnnnnnnnnntttctttcnnnnnnnnnnnnnnggggggaaaaccccccgggggcccccaaaaggggggggaggggtttggttttggttaaacaaaccctcgcctcccagggtaaaagaaattttttgccctacccccccaaggagggggaataaagggaggggcccccctccccaagaaatttttggttttttnnnnnnnnnngggtttccccaatttggccannnnnnnnnnnaaccccggacccaaaaaaaaccccctgccctaaccccccaaaggggggggataaaggggtttaacccccgggcccacccaaaaaccccttttggaaaaaaaatttttaa

SEQ ID NO: 108156 - DNA, 363 bp, Homo sapiens
  misc_feature (1)...(363): n = a,t,c or g
tggaaaccagaaaagagcaggcgtagctatacttacatgagataaaacagactaccaaacctaagattgtannnnnnnnnnnnnnnnnnnnnnnnnnnnnnnnnnnnnnnnnnnnnnnnnnnnnnnnnnnnnnnnnnnnnnnnnnnnnnnnnnnnnncaccaaagctcccaagtatataaagcaaacactaatagatccaaaaggagaggtagactacaatatgataatagtaggagagctaataccccactctcaaaaacagacagatcatccatacagtaaatcaacaaagaaacagtggagttaaactacatactagatctaataggcctaactgcaatttacagaacatttcacccaac

SEQ ID NO: 108157 - DNA, 599 bp, Homo sapiens
caaatacttacttctaccagaaactcttctaggcactggagatacggcagggaacgcagagctcccatcctagtgcaccctcaggtaaacacggtgtctcactgcaggctctgtctcaaagctttgcacgaggccatgctcatctttttcttcaattatttgatatcgcaagctgactatccacaacaactccccaatcccttaggctgattgtgcaacatctcaccttgcttacttatttatttcttttcttttgaaatgaaatttcactctatcaccctggatagagtgaagtgcagtggcgtgatctcgctcactgcaacatccacctcccaggtctaagcaattttcctgcctcagcctcccaagcagctgggattataggcacccaccaccacacctggctaatttttgtatttttaggagagacagggctcactacaacctccacctcccaggtctaagcaattttcctgcctcaagctccggagcagctgggattatgggcgcccaccaccacgcccggctaatttttgtatttttaggagtgagctgagatcacaccactgcactacagcctgggcagcagagcgagaccc

SEQ ID NO: 108158 - DNA, 389 bp, Homo sapiens
  misc_feature (1)...(389): n = a,t,c or g
ggtttccttttttgccccggggttttaaacccccctttcaccccccccaaagccccttttttaaaaaaaatttgggggggcnnnnnnnnnncccccttttttcccccctccccgggggccgggggtaaggggggggtttcccctgggtttggccccccccttttaaaaaccctttttnnnnnnnnnnnnnnnnnnnggggagacaaaaaaaaaccccttttcccnnnnnnnnnnnnngaaagaaaagaaacctcccagcaaagataatggtagatttctcatcataaacaatacaaatcagaagtcagtagagctgtatctttattgctctgaaaggnnnnnnnnnnccttataatgctgaaagaaaaaaactgtcaaataagaatttt

SEQ ID NO: 108159 - DNA, 380 bp, Homo sapiens
  misc_feature (1)...(380): n = a,t,c or g
tggtaaagtattggtcccttatagaagtgaggaaatggaagtaacaagaagctcaatagtttgcaaagtctgtggctaatnnnnnnnnnnntagtgttttcactacctttaattaccctgtaaagttttgattttaatatctaatatctcaaaatgtttttttttcagagattactgcaatgacctgaaaatatcggataataacactgaatttcttttaaatttcaacgagtttattgatagaaaaactccaaacaacccatcatgtaagtatgcattaattcaaaatgattgcttgagtgtggttctattggtttatagtatatcataggatacgataatcatattactttatattgtgctggttgtttatttacttt

SEQ ID NO: 108160 - DNA, 372 bp, Homo sapiens
  misc_feature (1)...(372): n = a,t,c or g
accaaatcctgtggctcctctatttgcaggttgtttggacagcagaacactttctatcctggaagcttttcttttaggttcctcctccacttcctgatcactcctgtttcccacctccccacctccccttcctgtttctattcccnnnnnnnnnnngaaaaggaaatctcgtttggccccccaacctggggggcagaaccggaatctaaccccctggaaccctccccctccagggtccggaatcctgcgccccaaccctttggagaaccgggaacaaagggacccggccccctgccccagttatttttggatttttaacaaaaaagaaggttcccccatgtggcccgggctggctttgacctccgaacctag

SEQ ID NO: 108161 - DNA, 391 bp, Homo sapiens
  misc_feature (1)...(391): n = a,t,c or g
gggtgggccccatttgggttttaaggaaaattttggcccggccccggggccccccccggtaattcccggcctttggggggccaagggggggggtttcccttgggcccggggtttaaaaccccccgggcccccccgggttaaccccctttttttttnnnnnnnnnnttttcccnnnnnnnnnnnnnnnncccccaatccccgggttttggggggttaagcccggaggtgggggttcccattaactggggnnnnnnnnnnggnnnnnnnnnngggggtttattggaaccccttttcnnnnnnnnnnnnngaaagaaaacgtattagagtagattcttcctctttcttcagaggacatggagaagcaagggagtagaattccttgctaagtcat

SEQ ID NO: 108162 - DNA, 378 bp, Homo sapiens
  misc_feature (1)...(378): n = a,t,c or g
acattctttaaaaagaatgtagttggaggactcgcactcctcaatttcaaaacttagtacaaagctacagtaatcaagacagtatggtcctggcatgatggtagacatacagcagtcaatggtatggaatcgagagtgcagaaacaaattcatgcatttnnnnnnnnnnnnnnnnnnnnnnnnnnnnnnnnnnnnnnnnnnnnnnnnnnnnnnnnnnnnnnnnnnnnnnnnnnnnnnnnnnnnnnnnnnnnnnnnnnnnnnnnnnnaggagtccaatctagtgagagccctcttgctgcatcatccatgcagaagaatacgagggtatgcacacgcctgggtggggagtggtggaangggctgancttaactttttat

SEQ ID NO: 108163 - DNA, 361 bp, Homo sapiens
  misc_feature (1)...(361): n = a,t,c or g
tggaagaattaatagtgttaacttgtccgtactacccaaagtgttcaacagattcaatgcaatccccatcaaaattccagctgaattaattatatttctttactgaagttnnnnnnnnnnnnnnnnnnnnnnnnnnnnnnnnnnnnnnnnnnnnnnnnaatcatgcatatacaaccaaccaatcttcaaaaagtgtgccaagaatacacaatggggtaaaaaatgtctcttccacaaatagtgttaggaaaaccagatactcacatgcagaagaataaattggactctcctctcacaccatatataaaaatcacctcaaaataaagacttatatgtaagaccccagactgtaaaactctta

SEQ ID NO: 108164 - DNA, 377 bp, Homo sapiens
cagaatataattttatccaattaaaatagaagatccattaagaaatgcttaggccgattcttcccagtgttattatatagactaaagggaccagtatcaccctggcattctgcagaacctaacactggctcgctatattgttgacatgatatttggacctgacaaataagtggaaattactctggctgccttaataaaacacatgcacctcagaggatggaagacaagcatacaaagttttaggagcctgccaccttttaagctttcaggggtctggacatcttgagcacactgggacatcccgttcatagcaaagtgtaagttgtacattgcaactcctactgctaagaggtagcacagtgctaggaaatatttct

SEQ ID NO: 108165 - DNA, 372 bp, Homo sapiens
gatggattctgggtgtttgacagcaacgccattgcctactatgggagcaatgaggagctgcggggaacctcttcaaaggcagcatcccacgcggtgcaaggggcgagctttgctgattccaatatagggcccccagccaggacctgggtgttcctcaccttgggcatcatgcaccctgtgggggctctatgagcaggatctatagccttctttccgccaggcctttcccaataccaaccgctgggacctcacctggattaaccaaccccaggtccgggctgtcttgggcgaagtgaaactgtgtgacaagatggcccagttagatgctaaaaagcttgcacagacccaacctaaaaaggacacaccgcggaa

SEQ ID NO: 108166 - DNA, 591 bp, Homo sapiens
ctgtgtacgaggagccagtgtatgaggaaagtaggggccttccctgagttgatccaggaaacttctacctccttctccaccacacgggagtggacagtgaagccagagaaccccctcaccagccagaagtcattggatcaaccctttctctccaagtcaagcacccttggccaggaggagaggccacctgagccccctccaggccccccttcaaagagcagtccccaggcacgggggtccctagaggaacagctgctccaggagctcagcagcctcatcctgaggaaaggagagaccactgcaggcctgggaagtccttcccagccatccagcccccaatcccccagccccactggccttccaacacagacacctgggcttccccacccaacccccatgcacttccagtccaccctccagccagcccctcacatgaccctagggaccagcagtctgagagggtaggtaccagaagacccagaaactcttatcgtggcactgttgcagcttcctctgccctggctggaaagactccagaatccagtgtggtgctgtggaaggagcactggactaaaggcttcagtggctgcg

SEQ ID NO: 108167 - DNA, 379 bp, Homo sapiens
cctctgggtcatcaagtcaccatatgacctgaactgcctatcatgaactgggtgctttctgacccatctagccataaagttggtcatgaacagcagcattccgtcatcaaatggaagtggtatatacgtgatcgggcttgagcaggtcctgaaggcacaagttaagttacatgaggaagtggctcaaatgcctgtggtctccactcctgccaacttgccttctcttctccagcctgcaccgatggcctcatgcagagttccctacgatcatgtggctgcggagcggcggtagttctcagggcactcgaaggccaggcagcggaagccgccctggatgttgaagcaggtctcgttgatggagcagttgtggatgccagtc

SEQ ID NO: 108168 - DNA, 387 bp, Homo sapiens
gtggcgtacactggagccttctccgtcctggctccctgcagggcctgtgctctgggcctctctcctgcccgggatgaaggacaccagtgagcagccctccccagagtaccccccaacacccatcccagtacacacccctgggggccatgctatgtatatgtggagggctcactgtcctccctgcctacaagcactgccactgcagcctccggccccccgacactggcatttggctcctccccaggcctgttccccgtctcctgtgggaatgagccagggtctctccaaaatccttgacacagtgccctgcattgtcaggggaaggagtggagacagctccccacatcaaggtaaagtctgggttggggtcaagagtcctgcaagggc

SEQ ID NO: 108169 - DNA, 831 bp, Homo sapiens
taaatatttatttattttttcagcttgagtctcgccctgggacaagagtaagactccgtctcgggggaataaaaaagctctatatttgatacttattgaaaacgaagtataaggatattctttctctttacagattggatttacatttagtgtgcctgttgcaaaaacagcagaactttctggttctagtagtattttagaaccaattataagtagttcaggtaagtaaaaatttcttacattttaacatacaaacaattgcatacagtaggattagtatttcagcttctttcacctttgggtaattcttataaatgccttcatttggatgaaattagctctgaaaagcaagcaggccactattatttaacctttttggacggtgctttttaattaaattatctttaaggaggatacttaggctccttaaaatgggaagtgtcaagtttgggttttggaggagagatagggcatgggtagcaaatttatccactatctttggtttagtcaaaacaaggtgacaagttagttataaagcaagtcctcattataagaaatttaataggttgtcctacattatagttgtagtagattttatttcctagtttttacctttcagttcacaagcatttttatgtataaaggttatgcaggcccatgtagattgtgatacataatttctgaaccgaagaaatcagcatcattgaaggaaggaggccatgggtcattcctgtaaacccagcagtttgggaggctgtggtgggaggattgcttgaggccagaagctcaagacgatcctaggcagcacagtgagactcatccctaccgaaa

SEQ ID NO: 108170 - DNA, 354 bp, Homo sapiens
ctggaggatagggtggcagcttttttatcagctgtccccaaaagaggcccttctcccagtcgccacggaccaaagctcctcctgggagctccagcctgtctgttcaatgtttgccttgcgccttttcctggtgaggccacccccggcaccatctcatgcctcagaaggacgacctcactgaaacagcccttaggttgggaaagaagcaagccctccgcgccccgtccaagtctctcaactgggcacgagcacacacagacgcccaggccctgtccctgcgccagaatggccgctcgcgtttccaggcacgatgcccctttccatgagtgcacagagccctgggctgagctgggg

SEQ ID NO: 108171 - DNA, 402 bp, Homo sapiens
ggtgggtccaagtcgcagagccgctcccggagcaggagtgactccccaccgagacaggccccccgcagcgctccctacaaaggctctgagattcggggctcccggaagtccaaggactgcaagtacccccagaagccacacaagtctcggagccggagttcttcccgttctcgaagcaggtcacgggagcgggcggataatccgggaaaatacaagaagaaaagtcattactacagagatcagcgacgagagcgctcgaggtcgtatgaacgcacaggccgtcgctatgagcgggaccaccctgggcacagcaggcatcggaggtgaggcggggttgcagtgactggtggccgcaagcccttccctggggagtacctgatggctggcctttgacccccgggg

SEQ ID NO: 108172 - DNA, 697 bp, Homo sapiens
gaggcatttctattcaataaatactggaagtcctagccagagcaatgaactagcaaaagaaatgaaatgcctcaaaatcagaaaaagtaaaattatattttttgtagatgacatgatcttctgtgtagaaaatcacaaagagtcaaccaaaatactactgtgactaataaacacatcagtagatttgcacaatacaatatcagcaccaaaaattcgttgaattttcatacattaacaataaacaattttaaatgaaaatttaaaaacacttccatttgctagagaacttaaagtaagaaataggaataaatgggaaagaagtgagaaattcatacattggaaatctacaaacattggatcaaaatggtttaaaaacatatataaagatataacccatattgatgttttggaaaaattaatactgttaaatgattacataacccaatgtgattttgattcaatacaatacccataaaaatctctatcacgtttttgttgaagaaacaaaaaacagactgggaaaggtgctcaccttctgttggccaggctgctctcaaaactcctgatctcaagtgaatctacctgtcttggcctcccaaagtgctgggattacaggtgtgagccaccgcacctgggcctaatcctcttaacataaacactttaatctcaactaatacttgaactcaatggttaagtc

SEQ ID NO: 108173 - DNA, 375 bp, Homo sapiens
  misc_feature (1)...(375): n = a,t,c or g
naatataattttatccaattaaaatagaagatccattaagaaatgcttaggccgattcttcccagtgttattatatagactaaagggaccagtatcaccctggcattctgcagaacctaacactggctcactatattgttgacatgatatttggacctgacaaataagtggaaattactctggctgccttaataaaacacatgcacctcagaggatggaagacaagcatacaaagttttaggagcctgccaccttttaagctttcaggggtctggacatcttgagcacactgggacatcccgttcatagcaaagtgtaagttgtacattgcaactcctactgctaagaggtagcacagtgctaggaaatatttct

SEQ ID NO: 108174 - DNA, 346 bp, Homo sapiens
cccaagaaaatctcacaaaatccacagaatgatattgaaatttaaacaacttgctcctgaatgaattttggataaacaaaaaaattaaggcagaaaattaaaaagattttgaaatagaagagacacaatataacaaaatgtctgggttgtaggaagagctctgttaagaggaaagttaagagtgctaaatacctgcatcaagaagttagaatgatctcaaactaacaatttaacatcacacttagagaaactagaaaaataaaaactaacttaccccaaagctagcagaatggcaaaaatattcataacctatgaacctgacaaaatctaatactcagaatctata

SEQ ID NO: 108175 - DNA, 437 bp, Homo sapiens
agagatttaaatgtaagatcggaaactatgaaaatagtaggaaaaaaacataggagaaaagctctgtgacattggtctagacaaggcttaaaccttgaaagcacagagaacaaaagcaactatagacacatggcattaaattaaactaaaaagcttctgcacagcaaaggaaacaatcaagagagcccaacaacctacagaatgggagaatatatttgcaacctatacatctgataaggggttaatatataaagaactcaaacaactcagcagcaacaaaccaaataacccaattaaaaactgggcaggccgggcatggtggctcacacctgtaatcccagcatttcgggaggccgaggtgggtggatcacttgaggtcaggagtttgagaccagcctggccaacatggtgaaaccccatctctaccaaaaaaaaaa

SEQ ID NO: 108176 - DNA, 587 bp, Homo sapiens
  misc_feature (1)...(587): n = a,t,c or g
caatattttgtttatacactggaagaatactgttgatatagctacccaaagtgatctacagacttaatgtgatttttatcaaaataccaatgacattttttcacagaaataaaaaaatttaaatttatatggatccacaaaaaactctgaatagacaaagcaactttgagnnnnnnnnnnnnnnnnnnnnnnnnnnnnnnnnnnnnnnnnnnnnnnnnnnnnnnnnnnnnnnnnnnnnnnnnnnnnnnnnnnnnnnnnnnnnnnnnnnnnnnnnnnnnnnntgcccaataagccccagaagttagtttatgcacctaaagccaactgattgtcaacacaattgccaagaacacactttagggaaaagctaatctcttcaataaatggtgcagggccatttaaatatttaaattcagaaaaattatgctagacccctgtgccttgccatatatgaaaatcaattcaaactaaagacttaaatgtaatgctatcaattatgaagctattagagaaaaactaaaaaatgctttataacattggacggggaaaggatcattaaaataacatgtcgaaacacaggaaaccta

SEQ ID NO: 108177 - DNA, 369 bp, Homo sapiens
  misc_feature (1)...(369): n = a,t,c or g
ttggaagccnnnnnnnnnnnnaaaaattagtaagggccggcctccttcttcggggggtggtttttcattacccaatcaggggctggcttcccccccccatggccacaagaaggattggttatggcccaaacccagttcctttttgttttaaccaaaattggggcccaaccggaaaggaaaaggggatttttttcgggttccagttggggggcccattcaatccaggcccaggttttcctggccgggggcaaatgccgccggcccttccgccccaaaagccttttgggctggttttttgtccttttaaaacccctttttaggcccggttttttttgcccaaaaaaaacccaaaaaaaacccaaaaaaaac

SEQ ID NO: 108178 - DNA, 382 bp, Homo sapiens
  misc_feature (1)...(382): n = a,t,c or g
tatgattaatagtttaggcactgcagaagacgaggagagcatctatatgagaatatacccaagggaagtacagagaggaaaaatatgtggattggggggtgcctcagtgacatatggaacaatattatacaagtctgcccccaaaatacttgaaggaataaggttcaagttttttccaggtttaatgaaaactataagcctacagattctagcattttaacaaaccttcagcaaaataaacaaaaccacagtannnnnnnnnnnnnnnnnnnnnnnnnnnnnnnnnnnnnnnnnnnnnnnnnnnnnnnnnnnnnnnnnnnnnnnnnnnnnnnnnnnnnnnnnnnnnnnnnnnnnnnnnnnnnnnnnnnnnnnnnnnnnttac

SEQ ID NO: 108179 - DNA, 373 bp, Homo sapiens
cagattattgcttgggttacaatatgccctactggtttgcgtggactactaaagaataacatttgggcggagaccctatatataactatatcgaaagcctgctgagttatgctttacatcatattacagaggacagcaggtatgatactataaaggctttcaatgcaaagggtagagatccacttattggaggaacatacatgacccttttaaataccgcgtgcaaactgggaggaaaccggccttctacagtagctctttggcttgtatattccctcacagtagaagagtgcgcatgagcatcaaaccataattgtcgaacacctgatgctgctgagctttgcaaaaaactgtttggctcatgtgagacagc

SEQ ID NO: 108180 - DNA, 382 bp, Homo sapiens
ctctcttgaattctgttctttctggattttggcccaagattgaaaaattttcttctcaggtcagcaaaatgaaagaagcttaaagtaaacagaataaagtataaaaaaaataaaaacaattaatttaaactggatacaggaaaacaatggagaaaattaatgaaagcaaaagctagttctcaaaaaaagtttaataacattaataaacctctacaaagactgacaaagatgggaaaacagaggacctacattgctaaaatcagcaataaaataagaaatataaccacagattctacaaccagtgaaagcataagaagaaaagtctgtaaactttatgctagtaaatttgaacaattagaaggaatggccatttccttaaaaa

SEQ ID NO: 108181 - DNA, 407 bp, Homo sapiens
cttaaatagggaaccaggatgagaaagcctgtgtgccctcccaaagtcacagagcagccaaggggcagagctagcactcacgtcagctctcctgagaagtgtggaggccaggccctgcgagggcttgcccggcgagccggcagagcagtggtggggaccccaggggctgcagccccagctcccaaccacccctttccagacctttggagcaaaccaagtcacaggttccacctcctcgacctcaaaccccatcgccctctggacactccttcctggtcctcagggtggagccaatggtcccttctcctgtcccctccccaatcagcccccagctggggcagcatcagccagtgctgctgggaaccggccggaccccacctgtctgttgaagtacaggcctcgtgccg

SEQ ID NO: 108182 - DNA, 797 bp, Homo sapiens
  misc_feature (1)...(797): n = a,t,c or g
atagccactgtggaggaattcctatgccttcttcagctatgctgaggtgctgaagcgggagccgtgggccctgggagcacgctgctggtcactctatggccgctgctacctgccgccacttcaacgagctggagcacgagctgcagtccacgcctcaactcgtggcatacanagacccgcgctccaaagtaccatgaattggctgtcttgtcacactcttttgacactgctggccaagaaatggagcccttcttcgctggctccatcctgggctgtgcttattgccctcaccatttatgacgaagatgtgttgggctgtgggaacatgtgctggaccaccgtcacactcctgggggtcaccgtgaccgtgtgcaggtcctttatcccggaccagcacatggtgttctgccctgagcagctgctccgcgtgatcctcgctcacatccactacatgcttgaccactggcagggtaatgcccaccgctcgcagacccgggacgagtttgcccagctcttccagtacaagccagtgttcattttggaagagttgttgagccccattgtcacacccctcatcctcatcttctgcatgcgcccacgggccctggagattatacacttcttcccaaacttctccgtggaggtcgttggtaagggagatacctgcttcttttgctcaaaaggagggtcggccagatggtcttttccaagggaccggccaccgactcgaaccttctgtggctgggaacgaagcctgtcacctaacagcggctttccgggacaaccccgtttaaccc

SEQ ID NO: 108183 - DNA, 377 bp, Homo sapiens
  misc_feature (1)...(377): n = a,t,c or g
aggagtagaaaagagtttccttgacctgagaaagggcattgataaaaagcccacagctaatatcatacttcatccttctttctccctaatgtcagaaataagacaatagcaatcaagccatttctactcaatattgtacggaaggttctagccagtgcaattaggtaagnnnnnnnnnnnnnnnnnnnnnnnnnnnnnnnnnnnnnnnnnnnnnnnnnnnnnnnnnnnnnnnnnnnnnnnnnnnnnnnnnnnnnnnnnnnnnnnnnnnnnnnnnnnnnnnnnnnnnnnnnnnnnnnnnnnnnnnnnnnnnnnnnnnnnnnnnnnnnnnnnnnnnnnnnnnnnnnnnnnnnnnnnnnnnnnnnnnnnnnnnnnnnnnn

SEQ ID NO: 108184 - DNA, 365 bp, Homo sapiens
  misc_feature (1)...(365): n = a,t,c or g
ctgcagctaattaacaaattcagcaaagttatagggaacaagatcaacacccaaaaatcagttgtttccatataccagcaaagaaatttttaaaaaaagnnnnnnnnnntagttcagtttgcaacatttaaaaaaggaaaacacctaggaatatatttaaccaaaaaattgaaagatttatccactgaaaactaaaaaacattgctgagagaaattaaagaaaatctaataaatggaaagacatcccatattcatggattggaaaactttaagatagcaatattccccaaaacaatctacagattcaaggggtctgtttgcaaaaataaaaagccaaccttcaaattgatacggaactgtaaggg

SEQ ID NO: 108185 - DNA, 134 bp, Homo sapiens
acttactataaatcaacaataatcaaatcagtgtgatattatcataagaatagatatagagaacaatggaatagaaaggagaatacagaaaattggcatctatgatcaacttatttttgacaaacatgccaaga

SEQ ID NO: 108186 - DNA, 400 bp, Homo sapiens
  misc_feature (1)...(400): n = a,t,c or g
gaaataaccattttcagttgtgatgccttaactaagaagccatcgaactataccgtgaaataaattggctcagaaccatagctcatcgnnnnnnnnnnnnnnngcccaaatttccctttgggaaccccgggcagcccccccggggggggccgggacctaaggttgttgggaaggcggtttttgttgggggcaaaaagcgcccggcctgcagggccccgggcaatgggcccaacctnnnnnnnnnntaaaccccctctgcaggagccctttccagcccccataacccttatgggcccagggggaaagggagagggaggaattncctgaacccctggggggcccggggtcctccccgggggaagggtcctaccggcctcttagggcctggattttaacgggg

SEQ ID NO: 108187 - DNA, 398 bp, Homo sapiens
  misc_feature (1)...(398): n = a,t,c or g
ctgttaaaatcaaggccttaggaggcccgttaggcccttccccccgggagtacccaggaccccccaggggataagtaattctccccctttccctatccccccgtggcccttaggcttattgggggtggaaaggactccttcaaaggggggtaacccccccgcccggttgggccccttgcccgggcccctgcaggccgggcccttttttcccccagcaaaaaccgccttcccaacaacctttggttccggacccccccgggggggctttcaggggttcccaaaggaaaatttggccnnnnnnnnnnnnnnncgatgagctatggttctgagccaatttatttcacggtatagttcgatggcttcttagttaaggcatcacaactgaaaatggttatttc

SEQ ID NO: 108188 - DNA, 403 bp, Homo sapiens
  misc_feature (1)...(403): n = a,t,c or g
gccttatctgagtactagttgtatttttagttactcaatcatttggnnnnnnnnnnnnnnnncgaaaagggggtttggtctttatggcccgggcaaaagggcaggggcccagccccggctaatgggaccctcccccccccaggtcaaaaaaatcccccggcctaacccccctggaagccccggcacctgggagggctagggcagaaaaaccgctgaaccccggaaaagggaggttcaaggggcccaaaaagggcccctggcactccacccggaccnnnnnnnnnngacagggttccnnnnnnnnnnnnnnttgtttaactcccctcccccaccgggaaaaattactgaggcggggggtcggccctatagaaaactgaatgacccgggggttgaaggcggagtt

SEQ ID NO: 108189 - DNA, 261 bp, Homo sapiens
tgtatcccagtaaataaaatggtttagatgaagtgcacaaatttttggaaagacaaaaactaccaaaactgactcaataagaggaacagacaatctgaatagacctgtaacacgtgaagacactgaaatagtagtcacagaactgcccgcaaagaaacagcctaggcccatatggctttactgctgaattttaccaaacatttaaagaaataatataattcttgacaaaatcttcctggagaatactttcccactcatttt

SEQ ID NO: 108190 - DNA, 418 bp, Homo sapiens
tcgggacaagacaactttctcctcaccatggtggctgagttctggaggctgtaatttcgtggatttctgtggagctggcagagctcatgtctgcagggctctgagaggaggaagcctggggcaggacctgcaccagtggccgctgggcacagcatggagcaccccagcaagatggaattcttccagaagctgggctatgaccgggaggatgtgctccgggtgttgggcaagctgggcgagggcgccctggtcaacgacgtgctgcaggagcttatccgcacgggcagtcgcccgggtgccctggagcacccggctgcacccaggctagtgcctcggggctcctgtggggtcccggactctgcccagcgtggcccggggacagccctggaagaggacttcagaaccctggccagttctt

SEQ ID NO: 108191 - DNA, 678 bp, Homo sapiens
gggcctccagtctctgggccaggtttggaaccccggccccacatctgggcacgcagatgctcctctgagccctggtgatgtcttcgggggcctcacaggcaggggaggtgcagaaggtaccacctcctcctccgtcaacatctctgccaggactcgggtctgagtccagtcactgtgactcctctctcttgggcacttggcagagccagggctgcatgggggtgcccagggtgggggccgggcagatgggggcctgccacctgaggcctcagggtccaacacctggggcaggtggtgctcccctggcaggcaggcccagtgggccaggggcactcgacacagtgggcagatgtggcagcaggggcaggagtagaggggtggcagtgcatggcaagggggagctggggccatcaagcagggacacggtggggtcaggccaggaccctgctggtgatggtagcaggcagagaggagacgcctctctagtgcatggacctgctgggccaggatgcgctgctcattctgggccaggtctcggctattctgcagctggctcttttctttcctgagcctctcattctctagcatgaactcctgtagcatcccgtacaggttccgctgggcccaggccacccgggctccactgagccctgaggccttgcagtccattctcgtgcc

SEQ ID NO: 108192 - DNA, 376 bp, Homo sapiens
  misc_feature (1)...(376): n = a,t,c or g
tgagaatccagaaataaacccatatatctatagtcagttgattttcaaaatgggtgccaaaacaaggatgcagaagaatgaatttgggcaccctacctcacaccatattcaaaaattaactaaaaatggattacagacgatgttagccaaaactataaaactcttaaaatgtaggcataaatcactgtgacctggtggtcacaatgttggtttctgagatatgataccaaaagcacaagcaacagaagaaaaaccgaattggactttatctaattaaaaactcctttgcttcaagataatccatcaagaaaatgaaaagacaacctacagagtgggaggaaagatttacgtttgataagggatttgtatttttaan

SEQ ID NO: 108193 - DNA, 366 bp, Homo sapiens
  misc_feature (1)...(366): n = a,t,c or g
ggaaacttaatctttttaaaatagaatattgctatttatgctatttgttgcaaaactttaacatcaaccaagactattcagtagggacagaatagtcttcaacaaattatgcttggacaattagatatccgcatgcaaaagagttaagttggacccctacggcataccacatacaaaaattaaagcggattagggacctacatctaagagctgaaattataaaactcttagaagaaaacataggggtaaatctccatagctttggcaacagtttcnnnnnnnnnnnncaagacaaagtctctcgcttttgcccagtttggagggcatgggcgcaatggggcctaattgtgggctcatcctcccggg

SEQ ID NO: 108194 - DNA, 353 bp, Homo sapiens
agtatcggcataaagctccaaatacctggcaagcaccctctggtctccgctggatctgtgggccatgggcctaccaacagttgccagccaaatggacaggggcttgtgtacttggaacaattaggccatctttcttcttactcccactgcaacaaggaaaaactttagggtgtcctgtctataataaaattttaaacaaacaccaaagaaatagagacataaaaaaagacacacaaatagaaaattaaaaagacacagattggctccctgaaagaataattcagtactatgggccagctaggcacaagatgggtcgttgggataccgtaccccaatttacatgcttaaccaca

SEQ ID NO: 108195 - DNA, 417 bp, Homo sapiens
taggtggtgaagcctggattcgattcctgattctaggctcataaccccctcaataaatagtacctaactgatattgctcatttttagatttctagcaacttataagcttttccccacttcccctgctgccccctagaacctccaggtctcctgcctcaatgctgagcagaaccagcacctccgggcctccctcagccgcctgcatcgggtggcacaggtaaccccttctgctggaaccagcacctccgggcctccctatgccggctgcattgggtggcacaggtaacccctcctgctggaaccagcacctacgggcctaccttagccgactgcatcgggaggcacaggtgacccctcctgctgggatatggctccactgcccctgctggacacccggggccctgaccgacgtctgtg

SEQ ID NO: 108196 - DNA, 1118 bp, Homo sapiens
cacaggcagcgaggggcctccgtgctggcagagatcagggctgagcggtgttggctgaaataaataccaccccggagaagatgggcaaatgcagacataagcaggtgccaggggtcacaaaggggaatcaaagtctgctggtactggtggcaggcagctggtagggccccccaaggcaggcaggttctgggcctgggggccctgggagtgggctggtcctctgggcacgaggacatcaggaactcacggtgaggaagcaccggggtcacccagccccggcagccggaagctgaaagtgcatttgctgagagccatctgcttccccgcagggccttgtgatgtgagcccgaggtccccggggggcgaaggcagagggtgcgagagctgggacagtcttagggcaatttggggtcctgggtgccccaaagggaggccggggctttgtgtttcagagaaacgcagcctgttccgttttgaagttgcccaccggctggatgttttgctaatttagtccacatcgtgtttgctcagaaagaggcttttggccacacgagtgctttctgggaatgtttcttctcccgggaacagaatgtcaggctgtgggagctgccgtggccccaggaaaatgatgcccagctccaaggctggggggttggggtgcttggagctccagctgtagctaggaaggtgggggatctcccaagggacctccagctgtcccccctgcaccacaccggtgactgctgagcccacacctgggtcccaagagtctcatcctagggacgggcagatctctgtcattctgttccttgggttcatttagaggcaggtgtcacctgggctgaggtctgcccacccgccatacagagtcacaggctgatagggacaggatgcagccagatggtgtcgtcctgctctcagcagggcagccgttaggaagagaagccgctctgactgtcctccgcctccccttcaggctcagggtctgagtcctccacctcaaggccggctccattcagcttcacgtcctgctgtaaaggccccggggccacaaaagacaggtcatccccgtaggtggaggacgacgaggccggcggccggtgctcgttaccggaatg

SEQ ID NO: 108197 - DNA, 355 bp, Homo sapiens
tgcccggccaataaaaaattattaatccaaaagaaagcaggaagaagaaaaaaggagcaaagaactgacaggtcaccctggaagggttagaggacgcacccttcaccaccactgtgagaaatcaatttgtgaggtgaggcccagcatctttgctctgtggttgcttctctttgtaggtcagaaattacagtgggaactgctaccatcaactgggatccctaaatgcaatggggataaaggaatcccggggtggcagggcccaagtagcagcaccatgccaaatcaaggtgggcatagttaccataataaatagtggagccaaagcagtaatcagaatagtctgacttgctgagac

SEQ ID NO: 108198 - DNA, 403 bp, Homo sapiens
  misc_feature (1)...(403): n = a,t,c or g
aatccctcccccgtgagaaaggaaatttttctcccggaacccaaaaggaaaaaggtggcccccgctcccccatttttttaaccaggtccaaaggagggtaaacccttagggcgttaagaggcctaagaggtatttagggggnnnnnnnnnnccaacccccaaagtccccttcccccccaaagtaaaaacaagggccaaaaaggccccgttttaaaccaaaaaattttcaaggggggtaaaaaagccaaggtttgtnnnnnnnnnnnnnnnnttttttcaaacccccaaacaaaaccaggaannnnnnnnnnnnnnnnnnnnnnnnnnnnnnnnnnnnnnnnnnnnnnnnnnnnnnnnnnnnnnnnnnnnnnnnnnnnnnnnnnnnnnnnnnnnnnnnnnnnnn

SEQ ID NO: 108199 - DNA, 433 bp, Homo sapiens
gggatatcgaaatattaaagtacaaaggcttttcttttgtggcaaagctgtaggcaactttgagaagtactggatttagaataaaatttctatcctctgtttgtaacagagttagggctaaagtttgtgggtttctatcatctgtcagaggaatgttgttttaattgggaaagtgttttatttgagatgtcattcccctgacagagcagaatgactcatggctctctaaagggtaccattttctagcactatagctggatttaggcccccattctgtaacttaacctatagaatacaaaactattcagacctctccagcaccaccaaaaaccctttactttgtttcctgatgcaggtttgagtatctttttaatttttgaccacacctttgaaattcatgatgacatagaagtactaaagcggatgggaatgc

SEQ ID NO: 108200 - DNA, 392 bp, Homo sapiens
gtttaattttcaaaaggtattggcagggttacaagagaagattccacatttaaagtatactgtgacactgaaaacaaatagactgttatatctggaaagggagaattacacctggaaatctatgctcacaggctggaaagagagtatggctgcccttgtatcacaagaaagccaaaagttgcctttcgagagaccattactgcccctgacccggttgactttacacatatgaaacattcacgtggtgcaagccagcatggaaaagtaataggtgtcctgcagcccttggtccctgaagacaacactaaattgggaatttcagaagaaacatttccatcaaatattccaaaatcatttgtgcctgctgtagaaaaagggttcttagatgccgg

SEQ ID NO: 108201 - DNA, 371 bp, Homo sapiens
caaagaatccgctaagaaatattagaactaataaacaaattcaatgagtttgtaggaaacaagatcactatataaaagtcaactggttttctatatcctagtgatgaacgatctaaaaatgaaattaagaaaacatttctacgtacagtgccgctaaaaagaataaaatatgtgaggataaattcaacaaaggaaatgcaagactcatacagtaaaaactacaaaacattgttgaaagaaattaaggaagccaaaatgaaaagatatctcatggttatggatcggaagacttagtattgttaaatggcaatactctccaaattgatctacaggttcaacatatccctaacaaaatctcaactggcttcttt

SEQ ID NO: 108202 - DNA, 1804 bp, Homo sapiens
  misc_feature (1)...(1804): n = a,t,c or g
cccacgcgtccggttccctttgacgccatcccagccccaatgaacaattatttattaaatgcccagccccttctgacccatgctgccctgtgagtactacagtcctcccatctcacacatgagcatcaggccaggccctctgcccactccctgcaacctgattgggactcttggtcctgctgcagttgccagtcaccccggccacctgcggtgctatctcccccagccccatcctctgtacagagcccacgcccccactggtgacatgtcttttcttgcatgaggctagtgtggtgtttcctggcactgcttccagtgaggctctgcccttggttaggcattgtgggaaggggagataagggtatctggtgactttcctctttggtctacactgtgctgagtctgaaggctgggttctgatcctagttccaccatcaagccaccaacatactcccatctgtgaaaggaaagagggaggtaaggaatacctgtccccctgacaacactcattgacctgaggcccttctctccagcccctggatgcagcctcacagtccttaccagcagagcaccttagacagtccctgccaatggactaacttgtctttggaccctgaggcccagagggcctgcaagggagtgagttgatagcacagaccctgccctgtgggcccccaaatggaaatgggcagagcagagaccatccctgaaggccccgcccaggcttagtcactgagacagcccgggctctgcctcccatcacccgctaagagggagggagggctccagacacatgtccaagaagcccaggaaaggctccaggagcagccacattcctgatgcttcttcagagactcctgcaggcagccaggccacaagacccttgtggtcccaccccacacacgccagattctttcctgaggctgggctcccttcccacctctctcactccttgaaaacactgttctctgccctccaagaccttctccttcacctttgtccccaccgcagacaggaccagggatttccatgatgttttccatgagtcccctgtttgtttctgaaagggacgctacccgggaagggggctgggacatgggaaaggggaagttgtaggcataaagtcaggggttcccttttttggctgctgaaggctcgagcatgcctggatggggctgcaccggctggcctggcccctcagggtccctggtggcagctcacctctcccttggattgtccccgacccttgccgtctacctgaggggcctcttatgggctgggttctacccaggtgctaggaacactccttcacagatgggtgcttggaggaaggaaacccagctctggtccatagagagcaagacgctgtgctgccctgcccacctggcctctgcactcccctgctgggtgtggcgcagcatattcaggaagctcagggcctggctcaggtggggtcactctggcagctcagagagggtgggagtgggtccaatgcactttgttctggctcttccaggctgggagagcctttcaggggtgggacaccctgtgatggggccctgcctcctttgtgaggaagccgctggggccagttggtcccccttccatggactttgttagtttctccaagcaggacatggacaaggatgatctaggaagactttggaaagagtaggaagactttggaaagacttttccaaccctcatcaccaacgtctgtgccattttgtattttactaataaaatttaaaagtcttgtgaatcnnnnnnnnnnnnnngggggcgcccctctaaaaaaacccac

SEQ ID NO: 108203 - DNA, 410 bp, Homo sapiens
  misc_feature (1)...(410): n = a,t,c or g
cgcccagaaactaaaaagtatccccaaaatccccccccctgtgggggaaaaaaattccaaagaaattttgtgccaccctttctcctttcccggtgggggtctttacccaaagggggggggccccctttggtaaagggatttttagggcccccnnnnnnnnnnnnnnaaggttcccttccaacaggggggggaaaacttttcccagcccccgggacattaatagcccccaaaatagcccttgcccccttctgaaaatttcccggatgtttagggcccccccccaagggtgggggttttcttttggtttttccccaccattttaaaaaggaaaatttcccaannnnnnnnnnnnnnnnnnnnnnnnnnnnnnnnnnnnnnnnnnnnnnnnnnnnnnnnnnnnnnnnnnnnnn

SEQ ID NO: 108204 - DNA, 228 bp, Homo sapiens
caaggaaagtcgtttatcatttcaaaaatcaatcagcgtcattcaccacatcaacagagtaaatcagaaaggtcatctcatttcagtagatacagaaagagcatttaataaaagccagcatctattcatgaggaaaaggtcttagaaaactagcagtagaaggaaactttgttaatctgccaatagtatctgttaaaaacctgcagcaaccataatactggagaaagg

SEQ ID NO: 108205 - DNA, 416 bp, Homo sapiens
  misc_feature (1)...(416): n = a,t,c or g
gtaaacttaatctttttaaaatagaatattgctatttatgctatttgttgcaaaactttaacatcaaccaagactattcagtagggacagaatagtcttcaacaaattatgcttggacaattagatatccgcatgcaaaagagttaagttggacccctacggcataccacatacaaaaattaaagtggattagggacctacatctaagagctgaaattataaaactcttagaagaaaacataggggtaaatctccatagctttggcaacagtttcnnnnnnnnnnnncgagacaaagcttaccccttnnnnnnnnnnnnnnnnnnnnnnnnnnnnnnnnnnnnnnnnnnnnnnnnnnnnnnnnnnnnnnnnnnnnnnnnnnnnnnnnnnnnnnnnnnnnnnnnnacatacgggggc

SEQ ID NO: 108206 - DNA, 790 bp, Homo sapiens
tggaaacattgatgtacgagaaccagagcttgaagatttgactagatacgatgttggtgctattcgagcacataatggtagtcttcagcacttgacttggctaggcttacagtggaattcattgcctgctttacctggaatccgaaaatggctaagacagcttgtccatcatttgccccatgaggcttcaaggcttgagacaggtgcaccggaatcaataggtattttagatcttgaagtaagcaaaggttttaacgaattaaatattgggaattgtgtttaatgttttttctagcttaacttttcggtaaatgaaacaggtatttctccttggagtagtatataccagccacttacaattaaaggagaaatgtaattctcaccacagctcctatcagccgttatgcctgccccttcctgtgtgtaaacagctttgtacagaaagacaaaaatcttggtgggatgcggtttgtactctgattcacagaaaagcagtgtaagtagtaaaacaaaaatattgctttcacttagtgcgtaggttttaccggggatttaatcctcatgtgaagatttaatttgtcatgtgacccattaacatatatgtatgtaagccctgaactgtgtatttagaaagcaattttagtaaattgaactattttttagacctggaaacgtagcaaaattgagacttctagttcagcatgaaataaacactctaagagcccaggaaaaacatggccttcaacctgctctgcttgtacattgggcagaatgccttcagaaaacggtg

SEQ ID NO: 108207 - DNA, 289 bp, Homo sapiens
tcctttgtgaatttatattctttgatatttaagcttataaacctaaattttaacttactactgattgtgggattatttctcattgtggtaagctctcccttaatttctagaaaaaggttatatctaattcaataaaaatggtctaagaattcttatatgggtttatatgccatacatatagtttactattaaatgccttttgagaaactaattaaatatgtaacttttcatttttatagggcccaagctcgttgccacagaattggtcagaacaaagcagttaaagtcg

SEQ ID NO: 108208 - DNA, 376 bp, Homo sapiens
gaaaaggcagaattataaaaaagaaaagcagactacttgagggaaggcttcactacaaaggagctgcaccaggaaaattttggggagattaacggaacttttctacatagttcattttgttttttttagagacagggactcactgatgcctaggctggaatgcagtggtgccatcatagctcactgcagccttgaacttacttataggctcaagtgatcctcctgcctcagcctcccaagtcactgggactacaggcattcaccaccactcctggctaattaaaaaaaaaaaactgtaaagacaggagctctcgctatgtttcctaggctgaccttgatcttttggtttccaatgatcctcctgccttggcctcct

SEQ ID NO: 108209 - DNA, 384 bp, Homo sapiens
gcgattctcatgtctcagcctcatgagtaactgggattacaggtgcatgccaccatgcccaactaatttttgtatttttagtagagatggggtttcacctcgctggccaggctggtctcaaacccttgacttcaagtgatccacccacctcaacctcccaaagtgctgggatgacgggcatgagcaccatgcccagccgcatttgtttttataatacaggattcccaaaggaccactttaaagtctcttgcatgtaaaacagtaagcatcttgagaatacaaatgatgcaacctgattttatttaagtgctttttataattgttttaaatccacctagagtatacaggatgtgaatatccaggaaacccttaaccgtggacttt

SEQ ID NO: 108210 - DNA, 834 bp, Homo sapiens
cccacgcgtccgtggacatttgtaaacaagaagagaagctgggcttcttggtggcaaaacaggatcttgtcatcagcttgttgccttatgtattgcaccctcttgtggccaaggcctgcatcacaaacaaagttaacatggtcactgcaagctacatcacaccagcactaaaagaattggaaaagagtgtggaagatgctggcatcacaatcattggtgaattgggattggaccctggtctggatcacatgttagcaatggaaacaatagataaagccaaggaagtgggagccacgattgaatcatatatttcctactgtggtgggcttccagcccctgaacattcaaacaatccattgagatataaatttagctggagtccagtgggagttttgatgaatgtaatgcagtctgccacctatctgctcgatggaaaggttgtgaatgttgcaggaggcatctcctttcttgatgccgttacgtccatggatttttttccaggattaaatttggaaggctatcctaacagagacagtacgaaatatgctgagatttatggcatttcttctgctcacactttgttgcgggggacactgagatataagggattggaatgctgaataatggattggaatgttgaataatgttgaataccttcctatggtatcctccctaactccttccccttgaaccacccagccccatctatggatatatgaaagctttgaatggatttgtaaaattaggtcttataaacagagaagcgcttcctgcctttagacctgaggccaaccctctcacctggaaacaactcctctgtgacctagttgggat

SEQ ID NO: 108211 - DNA, 819 bp, Homo sapiens
gaatatctggatcgacccgagggaggtggaacggagagaaattgagaggcgagaggctgcaaagaggcagctatgaaaggcactgacctggagagtgggaacggaatcgaaggcaagaactactaaatcaaagaaacaaagaacaagaggacatagttgtactgaaagcaaagaaaaagactttggaatttgaattagaagctctaaatgataaaaagcatcaactagaagggaaacttcaagatatcagatgtcgattgaccacccaaaggcaagaaattgagagcacaaacaaatctagagagttgagaattgccgaaatcacccatctacagcaacaattacaggaatctcagcaaatgcttggaagacttattccagaaaaacagatactcaatgaccaattaaaacaagttcagcagaacagtttgcacagagattcacttgttacacttaaaagagccttagaagcaaaagaactagctcggcagcacctacgagaccaactggatgaagtggagaaagaaactagatcaaaactacaggagattgatattttcaataatcagctgaaggaactaagagaaatacacaataagcaacaactccagaagcaaaagtccatggaggctgaacgactgaaacagaaagaacaagaacgaaagatcatagaattagaaaaacaaaaagaagaagcccaaagattcctaattctagccgatgacctgtgtgcgttagccatgtcacaggatggcagttcagggtggagactctgggaccaggcttgctgggattgaagcccatgcatgtatggctgtg

SEQ ID NO: 108212 - DNA, 367 bp, Homo sapiens
  misc_feature (1)...(367): n = a,t,c or g
cactcctttcattttcaaagtatgctatgtaatttggtgtggtatgatacnnnnnnnnnnnnnnaaccaaataattaattttaaaaaacagagcctgggccggtcccccagccgggagaaaagggaggaaaccagggctcattaaaaccccaaacttccggggctaaacccatcctcccccccacccctttaatgagggggggctccgggcaggcccccattaaaagctagttttttaattttaagaaaaaaaagagcccacctatgtgcccggggggggccttgaactttgggccccaagcagcccccccctataacccccccaagagccggggataccaaaaaaaaacacccgggctcccggaac

SEQ ID NO: 108213 - DNA, 621 bp, Homo sapiens
agtagagatggggtttcactgtattggccagactggctacaaactcctgacctcatgatccctccaccttggcctcccaaagtgctgggattacaggtgtgagtcaccgtgcctttttttttttcttttttttgagacagcgtctggctctgtcgcccaggccccggagtgcaatggcatgatctcagctcactgcaacctccgcctcccgggttcgagcgattctcctgcctcagcctcccaaagtgctgggattacaggcctgagccacagcgcccgacccggagagctgtttcttaatctgcctgggaggaaaatcccccagcccccaactttcccacatacttccacatagataacactgtaacaactttgaaactaagaggggagagaattaagtttttcaaattttgaaattgaggaagccttttgaggagtgggcagcgtttctagggaaagttccatgattgaacaagtgaagcaaacaaactagggatagactcaactgaccatctgaactccagggggattaatagccagtgctttggggcatctggctgggagccatgggtacgcaccagttgtacaagttatttcattttaattttgtaaaaaaaaaaa

SEQ ID NO: 108214 - DNA, 363 bp, Homo sapiens
ggcacgaggtcctggcttctgccgtccctggaggctccgttcccgtttcgccagctattttgctgcctcggccatctgttccctccctgtcatctcctctcgacatccttcacgacgcctggccctccttctcatctccagcaagtgaaccgctctgtcctttttaaagcctcatcccaaagacacggccagagcttggagttggattcgccccacacaactccccctctttgatgccatctgctttcaactccaccactggccaggggcaaacacctaccccttcccctgccttttcctcctgagacttcttctcaaactcggccaagaagctctcctggcatggacagcgtgtctgctccg

SEQ ID NO: 108215 - DNA, 361 bp, Homo sapiens
ctttggtggtgcacatttcacagaaaccttatgggagtatctagcttctgagttccaaagatccttcaaacatgaagggagaagaaatgcgcgagccatgatgaaattaacgaacagtgctgaagttgcgaaacattttttgtcaaccttgggaagcgccagctgagttcttgactcattatatgaaggttgagaatttggttgcgatgtgtccagcgtataaaagcatttagaggactcttagatcgatatggatttacagccgatgatgtctcccaggttgtcctttgtggagggtcttatcgaatatcaaagctacaacagctgaagtaagattttttcccaggttgtgagcttctaa

SEQ ID NO: 108216 - DNA, 388 bp, Homo sapiens
ccctagttgagagtcattttgtaataataaaacaattaactcattaggaagatacaccaatttgcacttaataacagagcactaaaatacatgacacaaagactgacagaaattaagggagaaatagataattcaccaatcatagttgaagactttaataactcactctcaacatagatagcagatcaactaggaaatagaaaacacctcaataaactaactagaatcaagagacatctatggaacactccacccaacaacacaatatacattgtcctcaaatgcacatggaacattctctaggatagatcatatgctaggccataaaataatccattttaaaccataaaatccatacggaatagattatttgaccaaaactcgaaaa

SEQ ID NO: 108217 - DNA, 379 bp, Homo sapiens
gcagctccacccctcacctgggggacgccagcgcacccgggccctgcccaccccctgggtccagctggggagtctgcgtcccccagtgccctgcggaccaaaacccaggagtttcagcccctcctccctctgatccagatgtctcaaccccctactttctcttccctttggacttttcttgccagccaccttcctattctacaggcagtgagaggaaaactccttttccctgagggccaagagtaagagggccttctgcgtctccccctccattacctcctaattagcgcttaatttactctcccctgcgggcctttagttagcgcgctggtgaagccaaaccgctctaccctttccaggagcccctggcgacagcgaa

SEQ ID NO: 108218 - DNA, 438 bp, Homo sapiens
agagattattgaacatgtgtgtacatatagcggaaggaattaacagagaaaaaagctgaagaagtaagagggataagacaatggtgactgatcgctggagccaggtcctttaggagagagaagataagaatccagagcactcacaaggaaattggcccccgtcaagaggaaaaatagcataaatctaggagagtgtgtaataaatctgcgccttatcaaccaaattgttttgcctgtgcaccctgtggtgccaaacccatataactctcctatcctcaatacctgcctctacaacccattattctgttctggatctcaaacatgctttctttactattactttgcacccttaatcccagcctctcttcagtttgacgtggactgacccctgaccccatcaagctcagcaaattacctaggctgtactggagcaaagct

SEQ ID NO: 108219 - DNA, 346 bp, Homo sapiens
  misc_feature (1)...(346): n = a,t,c or g
ggggaagggggtccccccattattccccacccttttagggggtggggccggagggtccccttagggccgggggtttgggcccacctggggcaccccgccaggccccctttcccaaaaaatttaccccatgtnnnnnnnnnnccccgttgttcccccctcccgggggggttaggccagaagatccccttaacccagggggtttagggctccaataacccttattgggcccctgccccccccgttggggggccaaaaccaagccaggttctgttttcnnnnnnnnnnnnnnnngaatcacgccttgagcagaagaacagacttctgatactttctatgtgaactattt

SEQ ID NO: 108220 - DNA, 440 bp, Homo sapiens
  misc_feature (1)...(440): n = a,t,c or g
cgttgggcacaagtgctatgcacgcgccccagtctgtgtagagccggatccttcctgtgccgccccctcccccaattggccctgcgtgggcggcttttccgacaggacagtggtcagacgcntcctcngtttgctccaaggccatttaattggggtaccccccggtttttcccctccccccctttttaaaacccggcccatgcccaagttgcatgccccccggttggcttttaaggattccaaattccccccccgcccccccgcgtggggggccaaaataaaccccctttccnnnnnnnnnnnnnnntgtgagaaatcattctgctcgtggcgtcatggcggaatgggaagcggagcaggcatcacatgccaagaggaaaaaagccataaagagggacagagagagaggaaaggagctgccaggctctttttaacaatca

SEQ ID NO: 108221 - DNA, 445 bp, Homo sapiens
aggaacagggcaggaacatccctctcaccactactgttcatcatcacactgaagatcccagctaacacaataaagcaaggaaaggaaagacgaggcacacgcattgggaagagattaaaaatctgtctttgtttacagatgacaattgtctgtagaaaataccaaagaaacaacaacaacaaaaaaacactcatggaaccaaaagcaattacagctaggttgcaggataaaaagttaatatgaaaaatcaattgctttcttacatagaagccattaacaattggaatctgaaatttcaaaacatctttaatgcaactgcaataaaaatcccagcaagttaccttgtgactgttgacaaacggattctaaagtttatatggagaggcaaagacccagaacagccaacaaaatagggagggaggaaaacaaagtcagaggagtgact

SEQ ID NO: 108222 - DNA, 658 bp, Homo sapiens
attgtctgacaagacaggctggccgctgactgttaaatactcccccacaaaagggacacgcccggagccaggttaccgttccacaccgcacgacaggctttcttttaggaaatggacaaagctctatgaccagaacaagcactttggggaatttaaatttgctttccctgacacgactccactttcatcactacccctgaacttaaggggcatccaaacctcagtctcagcaggtttgttttgtgtctgtgtgtgtctgtatgtgtgttcgtgtgtgtctgtatgggtatctgtgagtgtgtgtctgagtgagtctctgtgtgtctgtgtgtgagactgtgtgtgactgtgtatgtctctgtgtgtctgtgcgtgtgtctgcgtgtgtgagtctgcgtatgtctctgtgagactgtgtctgcgtccgtgagggtctctgtgtgagtgcgtgttttgacacacgagcttgctctgtcgccccacactgagggccatggtgcaaacaccggttactgtaagggtgattttctaggtcaagcgagtctccattttaacctccggaaagacgggccccaaggggggaccccacttatgaaaattggttttttggaaataaaacttttttattgcccaggaggttgaccctcgggcgcgccct

SEQ ID NO: 108223 - DNA, 673 bp, Homo sapiens
  misc_feature (1)...(673): n = a,t,c or g
accccccacacccccacatcataaatataaagaaatgtgaaaggtctccccctgtcntcccaataaaggggaaagggtgttcctaaggcgccttatttgggttacccccccggttatnnnnnnnnnnnnnntttaaaaccgaggaaaagtaacacttgccacccgcatggaaaaatataaaaattctgtctttttcaaaacacgccaattgtgggtaaaaaattctaacggcctccgccccatagaaccgctcatgcagccaagagcaatcacggctgggtagcaggatataaagttaatataaagaatcaattgctttcatacatagaagccattaacatttggaatctgaaatttcaaaacatcggtaatgcaactgcaataaaaatcccagcgagttaccttgtgcctgttgacaaacggattataaagtttatatggagaggcaaagtcccggaacagccatcaaaatagggagggaggaaaacaaagtcagaggagtgacacttcccaccttcgagtctgactctaacaccacagcaatcaggatggtgtgtgatttgctaaataacagaccagatcaatgaaacagaattgagaacccagaaacagacccacatgaatgtagtcagctgatctttgacaaaggaacaaatgcaagtcagtgcgaaaa

SEQ ID NO: 108224 - DNA, 644 bp, Homo sapiens
  misc_feature (1)...(644): n = a,t,c or g
cgnntgtgcaaaacgcttattgggaacccaggtttttcaatccaggttttaaagcgggcaatccaggttcaatcccccggttctttaaggattgtgtacccaaaaccgcctccctttttataaaacctcagccgcggcgcttaaaaagttctgggggtcactgagcacgtcttccctccatgtgtgggcaaacagggaactgggcatcagacaagcttgtcacttgatttatctggtccgtgaggagctggcctgagcatcatcccgtagctctcctcacagtgggctctgcccaggaaaccaggtgccgactctccaggctgccttggtttctaccaggctgcagaggcagtgcagacacagctggatctcagggaggctctgcccaggaaaccaggtcccgactctccaggctgccttggtttctaccaggctgcagaggcagtgcagacacagctggatctcagggaggctctgcccaggaaaccaggtgccgactctccaggctgccttggtttatacctggctgcagaggcagtgcagacacagctggatctcagggaggctctgcccaggaaaccaggtgccgactctccaggccacgttggtttatacgtgtcaccacaggcagtgtacactcagct

SEQ ID NO: 108225 - DNA, 437 bp, Homo sapiens
agacgtccatgattaccgattcaatgtccgtcgctgtacaacgaagcgacggggataaccctggaggctccccacttagtgcccttgcagacgattcaatcaccactgtgacccgagcacactgtggtctcagcacaccgacctcgccgggccagcgcagtcctggctcacccaccacattctgacccctcatgatggcggcccctcagcagcgccactcttggcctcggctgccctggccggctcagtctccggctcagagcagcacagcagaaggggaagagaaagggccctggggtgtgtggccgggtaacacgggacagtaaacgtcctcggctgcctctccttgtcctggaagtggagacaatgcttcccccacagctgccgggcatctgagccagccctggcacgctggcactggctgtctggtgtcgctt

SEQ ID NO: 108226 - DNA, 351 bp, Homo sapiens
  misc_feature (1)...(351): n = a,t,c or g
acaaaatttgacaagcacatcctgaaattcttctggaaatgcgggggatccaaaatacccaaaacattttnnnnnnnnnncaaattggggggcccacacttcctaatttcaaattttaccacttacccccagtaaccaaaacagcttggggctggcccggaacaaacccatacttcagggacataaaccggaaaccacgtgggtctatgttcacataattttcaacacggggccaaaactattccttttgaaggttgaagggccttttcaacaggggctgttggcacaacaggggctgctggcacaacttcttttttccatgggcaaaaaaatgaagtgggaccccggcct

SEQ ID NO: 108227 - DNA, 376 bp, Homo sapiens
  misc_feature (1)...(376): n = a,t,c or g
aanangntaatatgaaaagcgggtgctttcttacatagaagccattaacaattggaatctgaaatttcaaaacatctttaatgcaactgcaataaaaatcccagcaagttaccttgtgactgttgacaaacggattctaaagtttatatggagaggcaaagacccagaacagccaacaaaatagggagggaggaaaacaaagtcagaggagtgacacttcccaccttcgagtctgactctaacaccacagcaatcaggatggtgtgtgatttgctaaataacagaccagatcaatgaaacagaattgagaacccagaaacagacccacatgaatgtagtcaactgaacttgtgccgggcatggcctgactcaacgg

SEQ ID NO: 108228 - DNA, 307 bp, Homo sapiens
ccatgattacggattcaatgtccgtacccgtacaacgcggcgaatagagaaatacctggcgcttcccgagttaatcccctggcatgacaggaagcagagatggggacggcgtgcccagcactccaggggcagagagagctctcaggggagaaggcccctccttcacatgcagccaacagcgatggcccacacctcctgctcctgcgaagcagctgggagctcctcctcctcctgcagactggaaaccgaggctcccagggcaggtgtgggaggatagacccaaacccagccacgcccctttggtcta

SEQ ID NO: 108229 - DNA, 368 bp, Homo sapiens
gtaaggaaattgaatcagtaatcacaaacttctgaacaacaacaaaaagcccaggaccagatggcttcattggtgaattctaaccaaacatctttaaaaagaattaacagtactctttcccaaactctccaaaaatattgatgaggacggaacaacacttcctactcattctgcagtcagcatgaccccgataccaaagacatgacaagaaaaccacagaccggtatccactgtgagcacggatgcaaaaatcctcaacggaagacttgcaaattgaaatcaacagcgtactgaaaggattgtgtaccctggaaaaatgagatggattcctgaaatgcaaagatggttcaggacgtgaaaatctgtca

SEQ ID NO: 108230 - DNA, 208 bp, Homo sapiens
tcaccccctccagcagctaccttttctctttatagagaaaccacctagaaggacttcctacacacaccagccccacctcctctttcctgttgtctattaggcccaaggcccaccacagtgccctttgccccccacagtcacccctgccagggcaccggcggccagcacttgctccaccaacccttcctccagaagagcttttttggag

SEQ ID NO: 108231 - DNA, 350 bp, Homo sapiens
cctggtcataggccattggtcccctcattggtcccctccggctgttatgagatcgtctgcgcgatgaaccgttgatttttgccattgtcggtcaggacggcggcaaagcgcggctggaaaaaatggcgcagcagcgtggatctgcgcaacatgcaatttttgccgttgcaatcgtatggcgctttaccagcactgctgaagatgggagattgccatctggtggagcaaaaacgcggcgcggcatatccggtattgccgtagaagctggcctaatattgtgtcagtaggcggtaacgcggttattgctgatcaagcctacacagaggtgggtcagctctgcgaaacctttc

SEQ ID NO: 108232 - DNA, 354 bp, Homo sapiens
  misc_feature (1)...(354): n = a,t,c or g
antaatttagatgttaccacatagccacagtaagcaagacatcatggtgcttgcacgggacaaacacatacatgagtgacatataccggagaccacgtgtgtctatgttcacataattttcaacacggtgccaaaactattccatttgaatgtggaatgggctcttcaacaggtgctgctggcacaacaggtgctgctggcacaacttcattcttccatgtgcagaataatgaagttggacccctgcctcacaccacatacaaaattatctcaaatgaattaaaacataaatgtaaaagctataactataaacaccttttacgaaattattggggtgaattcctcttaatttgg

SEQ ID NO: 108233 - DNA, 333 bp, Homo sapiens
  misc_feature (1)...(333): n = a,t,c or g
ggcccacacttcctaatttcagattttcccacatagccacagtaagcaagacagcatggtgctggcacgggacagacacatacatcagtgacatagaccggagaccacgtgtgtctatgttcacataattttcaacacggtgccaaaactattccatttgaatgttgaatggcctcttcaacaggtgctgctggcacaacaggtgctgctggcacaacttcattcttccatgtgcagaagaatgaagttggacccctgcctcacaccacatacaaaattatctcaaatgaattaaaacataaatgtaaaagctaaacctatacccnccttnnt

SEQ ID NO: 108234 - DNA, 422 bp, Homo sapiens
  misc_feature (1)...(422): n = a,t,c or g
acggattcaatggccgtacccggagatcatggcgaacgggaaaaccctggcgctggccataagacatgcctcgaactaaacctcccaagtaactgggattataggcatgttccatgggggcatggctgcttcagacatttttcnnnnnnnnnnnnggaaaaagttaaaagtgggcccccgggcaaaaggggaaggggagaaatcaaattaatgggaaccttgggccccggggtaaaagaaattttccggcccaacccccccggagaggggggaccaaaggacaaacccgcccaccccgggaaaaatttgggtttttaaaaaaaagggaagggccctggggtgcccagggggggttaaaaccccggggctagaggaatcccccgggataagcccccaaaaggggtgggaaaacggggggggcg

SEQ ID NO: 108235 - DNA, 406 bp, Homo sapiens
actgtccgtacccggacatcaaagccacgggcctacccgtggaggcttcccacttagtgcccatgcaaacgattcaatcaccactgtgacccgagcacactgtggtctcagcacaccgacctcgccgggccagcgcagtcctggctcacccaccacattctgacccctcatgatggcggcccctcagcagcgccactcttggcctcggctgccctggccggctcagtctccggctcagagcagcacagcagaaggggaagagaaagggccctggggtgtgtggccgggtaacacgggacagtaaacgtcctcggctgcctctccttgtcctggaagtggagacaatgcttcccccacagctgccgggcatctgagccagccctggcacgctggcactggctgtctg

SEQ ID NO: 108236 - DNA, 644 bp, Homo sapiens
cggtccatctcattacgcattcgaggtcggtacccggagatccttccctacctcaacaccacccctggacccataaaccgccttaatccttccccacctcagcatcgcctctggcctcatcaaatccgaggtacctgttccgcctccatcacatgtcccctcctggcttccctccgcctctgttgccggctcctcttccctccccacatcgaaaactgaggtccccagcagccccttttcagccaatcacgaagcctaatgctgcgtccgcatcagcaaatccatttatgtacagaagctccctccacagtaacgactcccacatcttcgtgaggccacaacattctcccaacgtccggatatcccattaggtagctggcccacattcgctgcgatcatcagtaatgtacccaaaccatcctgttccctccaccagagctcacgggctcccacacacacggcccaggccccacaccctgctctattccgtgttatctgtccaccgctcccatatgtgactcttaaaacgacaacaaaatcctagttaacagaaccggaattgcggggcaaggcgaataagccatctagcgccacgctctatcccagtcatcccgatgtacagcgacggacagtgaatctcgtaa

SEQ ID NO: 108237 - DNA, 662 bp, Homo sapiens
gagcggcaaccaccattacgaattcaaggtccgtacccggagatccacaagactgggaacaccctggacgaagaacaacttatggaggcttgcagcttcctaatttcagattttaccacatagccacagtaagcaagacagcatggtgctggcacgggacagacacatacatcagtgacatagaccggagaccacgtgtgtctatgttcacataattttcaacacggtgccaaaacctattccatttgaatgttgaatggcctcttcaacaggtgctgctggcacaacaggtgctgctggcacaaccttcattcttccatgtgcagaagaatgaagttggacccctgcctcacaccacatacaaaattatctcaaatgaattaaaacataaatgtaaaagctaaaactataaacaccttaaacgaaattataggggtaaatcctcatgattttggactagacagtggtttcttagatctgacacctcaagcacaagcaaccaatgtggaaaaataagatacactgggcttcattaaagttaaaacctttttgcttcaaaggacactatcagcagggtgaaaagccagcccacagagtgggataaagtccgtgcagttcaatgtcagaaggatctcaggggacggacagtgaatctcgtaatc

SEQ ID NO: 108238 - DNA, 337 bp, Homo sapiens
cgcccgtgttgagaactgtgttctaccgtcttcttttacggtgagaacccagacccagaaacggcctcctgtcactcggcccctctgagaacagctcccgatgccgccctctcctcggctctgacccagcccggccgcctccccctcctggcccgtggccctgggaaggccgcaagcctccctcctcctccctgcagagcctccatccctgcccagctcccgcgggcccgaggcccctgctgcttcctcccctgcagcccaggcccgctccgccctatggccccgtcgcttctcaaagcccccagagcctcctctccccgggccgcgtcccatccag

SEQ ID NO: 108239 - DNA, 200 bp, Homo sapiens
  misc_feature (1)...(200): n = a,t,c or g
agccatcgctaacaaaacccaaaactttgaagttgttgctcagtatcagttcgactttggcctgcgcccgtccatcgcttacctgcaatctaaaggtaaggatgtaggcggttgggattaagactggcgaacggcgaggctcgtcccagcaataacgatgtccgggtacggacatgnaatccgtactcatggtcataact

SEQ ID NO: 108240 - DNA, 376 bp, Homo sapiens
  misc_feature (1)...(376): n = a,t,c or g
gaccacttatgctgtgctctgcagcttactaatttcagattttaccacatagccacagtaagcaagacagcatggtgctggcacgggacagacacatacatcagtgacatagaccggagaccacgtgtgtctatgttcacataattttcaacacggtgccaaaactattccatttgaatgttgaatggcctcttcaacaggtgctgctggcacaacaggtgctgctggcacaacttcattcttccatgtgcagaaaaatgaagttggacccctgcctcacaccacatacaaaattatctcanatgaattaaaacataaatgtaaaagctaaaactataaacaccttaaacgaaattataggggtaaatcctcatgg

SEQ ID NO: 108241 - DNA, 374 bp, Homo sapiens
  misc_feature (1)...(374): n = a,t,c or g
caaagggtgttctaaaggaaggtttttcgttaagccccggtgcccccgatgggtccgtttagttccccatttttgggccttgagagccaacctggggccctttaccccaagtgggcataaagtattattttccaaaaagaaacctttttgggaggcccaagttgggggatccccaggtccgggtatccaggccctcctgggttacccggttaaacccccttttttcttaaaattccccaaattagcccgggcccctgggttctactgggtaacccgggggaaccccgtttttttttaaaattccnnnnnnnnnnnnnnnnnnnnnnnnnnnnnnnnnnnnnnnnnnnnnnnnnnnnnnnnnnnnnnnnnnnctc

SEQ ID NO: 108242 - DNA, 178 bp, Homo sapiens
ttggacctgcatggaataatatattataaagacattcgacatgactaacggggatttatcccaaggatgcaaggatggtttgtgataggcaaatcaatcaatgtgatatatcattcaacagaatgaagggcaacaagcatctgatcatttcaattgatgcttgaaaagcatttgataa

SEQ ID NO: 108243 - DNA, 354 bp, Homo sapiens
  misc_feature (1)...(354): n = a,t,c or g
cggcccctttgctatcccccctcttttttcaaaggaaaaaccccgaggggaggccccccccctaggggggccccagccccttcaaattcccaaaaattcccccccccggggaaataggtgtttatatacccccaggtcccctctagagcccccccttgggccacgcccccccgtttaaaaccaaggacacccctannnnnnnnnnnnnnnnnnnnnnnnnnnnnnnnnnnnnnnnnnnnnnnnnnnnnnnnnnnnnnnnnnnnnnnnnnnnnnnnnnnnnnnnnnnnnnnnnnnnnnnnnnnnnnnnnnnnnnnnnnnnnnnnnnnnnnnnnnnnnnnnnnnnnnnnnnnnnnn

SEQ ID NO: 108244 - DNA, 376 bp, Homo sapiens
  misc_feature (1)...(376): n = a,t,c or g
tacttacataacataaatctgcgtcttgatcccatgaaggcagaagagtgtttggaaaaggctttctttgacattnnnnnnnnnnnnnnnnnnnnnnnnnnaaacaaacgggggggagccttttggaaaacccccccccgggttttaaaaaagggcggggggccccggtgggggtgtttcccctcccccccaggggggggaccccacaagggcccctttaagggctcaggaacctcaacttgctgaacccacccagaatnnnnnnnnnnnaaaggggccctttctttaccagggaaaaggctgaggcctgggaaggttttcttccccaaccccccttcaaatggaaaacctgctcagggccaatttggatgctggg

SEQ ID NO: 108245 - DNA, 601 bp, Homo sapiens
  misc_feature (1)...(601): n = a,t,c or g
ctaaaatttcccctcccggttgggccggggggttcacccctataccccaccctttgagaagtaagggggcaaaacccccggattcgggggtttaagcccaacggggccaaacggggagaaaccccttttttttaaaatccacaaatttacccggcccggggggccggcccctatattccccccatcccggagggttaagcacgaaaaaaggctttaaccccgaggggggagggtcccttaaaccaaattcccccctttggcccccccccggggggccaaagaggaaattgttcnnnnnnnnnnnnnnnngaaagannnnnnnnnnnnnnnnnnnnnnnnnnnnnnnnnnnnnnnnnnnnnnnnnnnnnnnnnnnnnnnnnnnnnnnnnnnnnnnnnnnnnnnnnnnnnnnnnnnnnnnnnnnnnnnnnnnnnnnnnnnnnnnnnnnnnnnnnnnnnnnnnnnnnnnnnnnnnnnnnnnnnnnnnnnnnnnnnnnnnnnnnnnnnnnnnnnnnnnnnnnnnnnnnnnnnnnnnnnnnnnnnnnnnnnnnnncattagctacgatgtacgggtacggacattgaatccgtaatcaggtacgtg

SEQ ID NO: 108246 - DNA, 631 bp, Homo sapiens
  misc_feature (1)...(631): n = a,t,c or g
ngattgcgggcgcgcgcctcttcctacagggacaccgccgcgcccgccgttgcctcccccccgcctagacccttccccccgcttttccgcccggctagataccccgccccgggcccgtgtggctccgcccaagaacattccatgttaaaggcctggcccttggctcaaaagccaggacgccccctccccctttgggagcctggggtgtctgcccggggcgcgcttcttccccctccggcctccctcctgtgcccccccggggtctttctcccattatccccccctttccctttcccctaagcgcgccgggttctccctcttcccctggggctcaaaccgccaacccctcgggtttttccaaacggtggttttttaaagctcggccacggcccaattggctcccctcccggtctctttttaaggttggccctcgtgcctcccctctggggcacaaagggaaaccccccttctnnnnnnnnnnnnnnnnggccaggcccaaagtgaggagagaagatgaagtacatttccaccaatgcaaaagtaaatatttaaacagaatcaacatgggagtccaaagatttaatacttaatctgctcaggaaatcaactacgattagctatgtattgatgt

SEQ ID NO: 108247 - DNA, 750 bp, Homo sapiens
ctacatgactacggattttatggccgtagctgcacatcatgaagactgggagaacattggtgttaccaatattgttcatcatgacactgaagatcccagctaacacaataaagcaaggaaaggaaagacgaggcacacgcattggggaagaagattaaaaaatccggtctttggttcacagatgccaattgttctgtagaaaatcccaaagaatcagcaacaacaaaaaaccactcatggaaccaaaagcaattacaggctaggttgcaggataaaaagttaatatgaaaaatcaattgctttcttacatagaagccattaacaatgtggaatttgaattttcaaaacatctttaatgcaagtgcaataaaaatcccagcaagttccgttgtgactgtggacaaacggattttaaagtttatatgtagaggcaaagacccagatcagccagcaaaatagggagggaggaaaacaaagtcagaggagtgccacttcccacctttgaggcttgactcttacacccacggaatcaggatggtgtgtgatgtgttataatagcagaccagatcaatgaaacagaattgggagcccagagacaggcccacatgaatgtagtcaactgttctttgacaaaggaacaaatgcaagtcagtgctgaaaagatcgttttttaaacaaatagtgttagaacagctggacagccccaggcaaaaaaagatttaaattaactttgactttacaaggttataa

SEQ ID NO: 108248 - DNA, 292 bp, Homo sapiens
tccgaattcgatctcggtacccggccatcatagacctaaatgtaaaatgcaaagctataaaacttcctgaagataacataggagaacatctaggtgacctctagattggtgggggaattttttaaaccacatttcaagggcgtgatccttaacccaagggatggataagttcgaattcattaaaattttaaaacccatctattcatttgaaagactgtgttcagaaaatgaattgacaaaccacagactgggagaaaatatttgcaaaacatttatctaataaaagactggc

SEQ ID NO: 108249 - DNA, 745 bp, Homo sapiens
gattacgaattcaatgtccgtacgctgtacatcatgaacagtggaaaaaccctggtgttaccaatattgatcgtcatgacactgaagatcccagctaagacaataaagcaaggaaaggaaagacgaggcacacgcattggggaagaagattaaaaaatccggtctttggttcacagatgccaattgttctgtagaaaatcccaaagaatcagcaacaacaaaaaaccactcatggaaccaaaagcaattacagctaggttgcaggataaaaagttaatatgaaaaatcaattgctttcttacatagaagccattaacaatgtggaatttgaattttcaaaacatctttaatgcaagtgcaataaaaatcccagcaagttccgttgtgactgtggacaaacggattttaaagtttatatgtagaggcaaagacccagatcagccagcaaaatagggagggaggaaaacaaagtcagaggagtgacactttccaacctttagagtctggctctatccccgcagcaatcaggatggtgtgtgatgtgttataatagcagaccagatcaatgaaacagaattgggagcccagagacaggcccacatgaatgtagtcaactgttctttgacaaaggaacaaatgcaagtcagtgctgaaaagatcgttttttaaacaaatagtgttagaacagctggacagccccagacaaaaaaagatttaaattaactttgactttacaaggttataa

SEQ ID NO: 108250 - DNA, 432 bp, Homo sapiens
  misc_feature (1)...(432): n = a,t,c or g
ctcccacctcttcctcccggggttccaagtgattcttggtccctcagccttcttaggtacctgggatcccaggcccctgtccccccgcctggcttatttctgtntttttancanattttttctccaaaccgttttaattggggttcccccaggtttttcccctccccccccttttaaaacgcggcccatgcccaagttgcaagccccccggttgccttttaaaggtcccccccccgcccccccgcctgggggccaaaactaaaccccctttccnnnnnnnnnnnnnnntgtgagaaatcattctgctcgtggcgtcatggcggaatgggaagcggagcaggcatcccctgcccagaggaaaaaagccataaagagggacaaagaaagaggaaaggagctgccaggctctttttaacaatcccagccccgggt

SEQ ID NO: 108251 - DNA, 358 bp, Homo sapiens
  misc_feature (1)...(358): n = a,t,c or g
ccccgggggtggccccttttaaatgttcccccaatatctttgccagggccccccccagggattttttaaacccccgttttcagaaggggcagggcccccttttcaggcccgaagcctttctgtgggggaaaatttgccccccttttggaagggggggtttccccccnnnnnnnnnnccacttcccnnnnnnnnnnnnnnnnnnngaaacaaaatttccctttgttgcctaagccgcaaagcaatggccccattttgggtccctacaaagtttgccctccggggtcccccccttttcctgccccaaccccctgagtaagtggggccacagggggnnnnnnnnnngcccgggtaattttt

SEQ ID NO: 108252 - DNA, 466 bp, Homo sapiens
  misc_feature (1)...(466): n = a,t,c or g
nnnnnnnnnnnnnnnnnnnnnnnnnnnnnnnnnnnnnnnnnnnnnnnnnnnnnnnnnnnnnnnnnnnnnnnnnnnnnnnnnnnnnnnnnnnnnnnnnnnnnnnnnnnnnnnnnnnnnnnnnnnnnnnnnnnnnnnnnnnnnnnnnnnnccttcccccccgggggaaaaaaaaccccctaccaaaccccaagggtgcccccatttggggggaaccttaaaaaaaaaccctgaaggtaagcattttgggctgggcccgtttttaaaaagcnnnnnnnnnnaaaaacccggggggaccccaaataaaagccgtttggagaaaannnnnnnngngnnnatnancaacaccccctgaatgctgctggctcttctttcccacataattcttggtgccacccggctgcgctggtggcagattcgttaagggaccacctgggccgcacccacgcagtacaggcatacaagactt

SEQ ID NO: 108253 - DNA, 666 bp, Homo sapiens
gtatctattgtccgtcgctgtacaacgtgcgagactggcaaaaacctggcgataggcatcatatgcggattgaactgtagactcacctggggactcacctggggactcacctggtgactcacatggggacccacctggggactcacctggggactcacctggggactcacctgggaactcacctggtgactcacatggggacccacctggggactcacctggggacccacctggggactcacctggggaccctcctggaaactcacctgtgggtgcaggggcttcactggctccagcacctcctgtctcaggggcggatggggcctgtctgtccgcttctgggatttcatctccactgtcaaaatcgaactgttctccctcttcctcttcattattattggtatcatatttcatttcattttctaaaaagaaaaaccataaccacatcaaggagagatatatagataaatacatatatagatagatacacaaatagatagatcgatcgatctatgttagccacgagacactgactaagttcctctgtgctgtactgcgcttgtagtctcaacctttttaaggggcaaaataagtatcattagaattctgagtcactggtttttattttcttttaataggatctacaactcacagagaacaaaccaa

SEQ ID NO: 108254 - DNA, 270 bp, Homo sapiens
ttccgctccgcaccccaggggacagcatgacagatccttccgctccgcaccccaggggacagaatgacagatccttccgcctcacaccccaggggacagcatgacagatcctctcgccgcacaccccaggggacagcatgacagatcctctcgccgcacaccccagggcacaccatgacagatcctctcgccgcacaccccagaaaaaaacatgacagatcctctcgccccgcaccccaggggacagcatgagaggtcctcgtgaaccgg

SEQ ID NO: 108255 - DNA, 354 bp, Homo sapiens
aagagttgtggcagtcgaatgacagatccttccgctccgcaccacaggggacagcatgacagatccttccgctccgcaccccaggggacagaatgacagatccttccgcctcacaccccaggggacagcatgacagatcctctcgccgcacaccccaggggacagcatgacagatcctctagccgcacaccccaggggacagcatgacagatcctctcgccccacacctcaggggacagcatgacagatcctctccccccgcaccccaggggacagcatgacagatccttccgccccgcaccccaggggacagcatgacagatccgcgggtgccgagaacgaaatatgaatctc

SEQ ID NO: 108256 - DNA, 482 bp, Homo sapiens
cagctaacacaataaagcaaggaaaggaaagacgaggcacacgcattgggaagagattaaaaatctgtctttgtttacagatgacaattgtctgtagaaaataccaaagaaacaacaacaacaaaaaaacactcatggaaccaaaagcaattacagctaggttgcaggataaaaagttaatatgaaaaatcaattgctttcttacatagaagccattaacaattggaatctgaaatttcaaaacatctttaatgcaactgcaataaaaatcccagcaagttaccttgtgactgttgacaaacggattctaaagtttatatggagaggcaaagacccagaacagccaacaaaatagggagggaggaaaacaaagtcagaggagtgacacttcccaccttcgagtctgactctaacaccacagcaatcaggatggtggtgatttgctaataacaaccagatcaatgaacagatttggaacccga

SEQ ID NO: 108257 - DNA, 1693 bp, Homo sapiens
agtacccgctcactcgttctgtccgggttgcagtcttggggatagctcttggaatggtgtgttcccctggggtataagccccggtcggaaaatcccaggtgaggtcctccccaaaactggggtgggaaggaaaaagttctgggttaaaccctccattaagttcagcccctcccgcaagccccgggggcaaggaagttccctcccaacttcttaaaaaaccaaataaccaaaaaagtcaagtgaggttaagcatcccctgaggactggacgagcaagccctgctttctttccaaaaagccggggaggggaaggagaaccagggccatctcctgcccagccccgagcctccctgatagtcctcccacccacccagctccggatgatgctcccactcacaagattgctgctttttccatagaccggtaggaactccaggccttttctccagctgtccctgaattctccttgtttccttccttcctaactttctccattcaagggtggagggcccaatttggaaaatcaggacccacgtccccctccacaccttcctatgtgtgtagttctgtttcgaggtctggactcagtaaatctctcgtccttcttgaccagggtgttggcgcactggggctgccgtggaaactgccctggatgtttcccagtcattacagatcccaagacactcctaggccctaggagccccagatctggaggaaaggggccccttctggccaggcttcctccctgggtcacaaactcacatctgcctggactcccactgctgtctctctctttctctctctctcccctctttttaactgtccactaggttttatggataactcctgagagaatgtcccagtctgcttaccatcacattgatcccgcccaccagcattgaggctttgcactgtctccccctcccttgcctgtccaaagccccttccacccgggaccgtcgcccctttacactcaggggtactggtcaatctataacatggtgagacctcagtgccattaaaagtcccctggatctcacccactgcaacaaccacgtcttctctttatattagaaaccacctaaaaggacttgctacacacaccaagcccacacctcttttttcttgtggccttataggcccaagggccaccacaagggccttttgccccccacagtcacccctgccaggggccccggcgggcaagaattgtgttcaccaaccctttcttcagaaagagcttttttgggagggatccggggagcccaaccttggtccccctcccatcatcctaacctcctcctgtctttcttctccatctgtaggatcttcccaggcaaagagcacctgtaaatcacatccatacccaagaagctcccaaaatctcacttccagcccagacctgaatactgggtcagctgacaccttatctggagcatcacacactttctacaggccttaggcaacccacaccagggctttggtttcccccacaaagtgcgcttttttctggtaaactccaattcgggacagggggggggtcttctcttccggggtgtagaggcaaaaacttggggagattttcgtggatccttgtttttttaaaaccaatttccaatcccgaggccccgtcctgttgacctaaccttgttaataataaagccctgcgcccttttcctcctcttaaagggggg

SEQ ID NO: 108258 - DNA, 385 bp, Homo sapiens
gctggggagtggggcccgagcccagggctggcgttagcagtggccatggcaatctattcgccgacatgcttttggatcccggaacgggtcagaggagtgacgtgcccccgtttgcttgtgagtcgagccccacagccatcaggatggtgtggggtgtggtaaattacagccccgctcaatgactcagaattgaggacccagaaacagacccccatgaatgtagtcaactgatctttgacaaaggaacaaatgcaagtcagtgctgaaaagatcgttttttaaacaaatagtgctagaacagctggacagccacagacaaaaaaaaagaatctagatttagactttagacctttcacaaagtcttattaacaatggatcatggcct

SEQ ID NO: 108259 - DNA, 430 bp, Homo sapiens
gaggcagcaatgggaagcaggaggagtgaaagaacagtggcctttgcctacttggatccaagagttgtggcagtcgaatgacagatccttccgctccgcaccccaggggacagcatgacagatccttccgctccgcaccccaggggacagaatgacagatccttccgcctcacaccccaggggacagcatgacagatcctctcgccgcacaccccaggggacagcatgacagattctctcgccgcacaccccaggggacagcatgacagattctctcgccgcacaccccaggggacagcatgacagatcctctcgccccgcaccccaggggacagcatgacagatcctttcgccccgcaccccatgggacaggatgacagattctttcgccccgcaccccaggtgacagcgtgacagattctctagactc

SEQ ID NO: 108260 - DNA, 423 bp, Homo sapiens
  misc_feature (1)...(423): n = a,t,c or g
ccaaccccacccatccccacaccataacccgaccccgcccatccccaatctcgcccctgcccgcctcccaagacgcccctgccccccggccccccaccaccttcccccccactcagcgactctcccccacaaacccctcccaccaacccgtccccgcacaccgggccacaatccctcaccacaagagcttccagccgacggcaccgcagccacccacaaagacctctggtaacgccacaaccgccgttccaaatgcacgcctgccagaatcaccnnnnnnnnnnnnnnnnnnnnnnnnnnnnnnnnnnnnnnnnnnnnnnnnnnnnnnnnnnnnnnnnnnnnnnnnnnnnnnnnnnnnnnnnnnnnnnnnnnnnnnnnnnnnnnnnnnnnnnnnnnnnnnnnnnnnnnnnnnnnnnnnnnnnn

SEQ ID NO: 108261 - DNA, 135 bp, Homo sapiens
atttattgtatgggggcggatggccttcagctctacagttccggtaagactgcaaagcctgtccgtgaatgtgggtggtcgggattaagtgcatgcaggtacgatggaaaactcggtaatacaaggtgggacagt

SEQ ID NO: 108262 - DNA, 390 bp, Homo sapiens
cagctaacacaataaagcaaggaaaggaaagacgaggcacacgcattgggaagagattaaaaatgtgtctttgtttacagatgacaattgtctgtagaaaataccaaagaaacaacaacaacaaaaaaacactcatggaaccaaaagcaattacagctaggttgcaggataaaaagttaatatgaaaaatcaattgctttcttacatagaagccattaacaattggaatctgaaatttcaaaacatctttaatgcaactgcaataaaaatcccagcaagttaccttgtgactgttgacaaacggattctaaagtttatatggagaggcaaagacccagaacagccaacaaaatagggagggaggaaaacaaagtcagaggagtgacactt

SEQ ID NO: 108263 - DNA, 407 bp, Homo sapiens
taagcatcatcatcaaaaaaacactcatggagccaaaagcaattacagctaggttgcaggataaaaagttaatatgaaaaatcaattgctttcttacatagaagccattaacaattggaatctgaaatttcaaaacatctttaatgcaactgcaataaaaatcccagcaagttaccttgtgactgttgacaaacggattctaaagtttatatggagaggcaaagacccagaacagccaacaaaatagggagggaggaaaacaaagtcagaggagtgacacttcccaccttcgagtctgactctaacaccacagcaatcaggatggtgtgtgatttgctcaataacagaccagatcaatgaaacagaattgagaacccagaaacagacccacatgaatgtagtcaact

SEQ ID NO: 108264 - DNA, 416 bp, Homo sapiens
cagctaacacaataaagcaaggaaaggaaagacgaggcacacgcattgggaagagattaaaaatctggctttgtttacagatgacaattgtctgtataaaataccaaagaaacaacaacaacaaaaaaacactcatggaaccaaaagcaattacagctaggttgcaggataaaaagttaatatgaaaaatcaattgctttcttacatagaagccattaacaattggaatctgaaatttcaaaacatctttaatgcaactgcaataaaaatcccagcaagttaccttgtgactgttgacaaacggattctaaagtttatatggagaggcaaagacccagaacagtcaacaaaatatggagggaggaaaacaaagtcagaggagtgacacttcccaccttcgagtctgactctaacac

SEQ ID NO: 108265 - DNA, 577 bp, Homo sapiens
  misc_feature (1)...(577): n = a,t,c or g
caaaacaaaccctcttggtaggcggaaaaaaaaggggcacattacggcccagaaacgttttctaaagcggtttttacccccctgggggaaataatcggtccagtgccccacccactttatacgcggcaaataaagggtctttaagcctttatatttaggccggcccccccgaccaaaaaacccaaaaaggattttcaccgttttcaaaaacagagggaacatttccccctttttttccaaaaaattttcttcccttttataaaaggaaggccaacagggttccgtctattcacaacagaaatcatgttttccccaaaaaattttgattgtggctgtatttcccaaaaagtccccccaaaccccacaagccctgcaaatatcatcagctatgtgaagttttcccccaagggaattttaggaccggtcgttttttnnnnnnnnnnnnncaaacccaaaccaagtaggaaaactgtgaaaccaaaggttagttaagccattgatatgattccaggcactcagtcattcctctttccagaaaagtattacctattgtatcaaaaggacttttgagccctct

SEQ ID NO: 108266 - DNA, 580 bp, Homo sapiens
  misc_feature (1)...(580): n = a,t,c or g
gggagaaataaacccactcccttttcttatatttcccagggccaacccccccccaaaataaggttttaaattgggcgcccctaaggaccccccaccaaaaaaaacccgcttttgaaacccccccacccccgatttagaaaccccccccctctttttggcaaatgagcgccccccacaaaaaaattacaccttccccttataacacggggccccatttatnnnnnnnnnnnnncctgccaagttttcttttttcccacccccccttttggtgggggggggttaaatcccaagggttttttgtggttcaagaagtcctaccccccaaagnnnnnnnnnnngcccctagcccccccagaaggggaacgccaggcactttcggtttaaaaannnnnnnnnnnnnnnnnnnnnnnnnnnnnnnnnnnnnnnnnnnnnnnnnnnnnnnnnnnnnnnnnnnnnnnnnnnnnnnnnnnnnnnnnnnnnnnnnnnnnnnnnnnnnnnnnnnnnnnnnnnnnnnnnnnnnnnnnnnnnnnnnnnnnnnnnnnnnnnnnnnnnnnnnnnnnnnnnnnnnnnnnnnnnnnnn

SEQ ID NO: 108267 - DNA, 234 bp, Homo sapiens
  misc_feature (1)...(234): n = a,t,c or g
ttcagaaatggcggaagtcaggtaatcgactattccgttgttttgtcaatgcgacgaaagagaatcctgcgagattatctttctagatgtcccctggggtgcgggaaaaaaatatctgaaatattgtcaccgagggcggattatgtaaggcgtttacgtcgttgccactcaattcgcggcgctgaagcgttgttatcgacaaaaataaataagaattatcagataatnacctgt

SEQ ID NO: 108268 - DNA, 695 bp, Homo sapiens
cgccaggcttcccgcaatcatgccgtcgcaaaaccacgaccagtgcaagcgacccacgaaggcagttccctccccgacgccccagaaaaaggccactcctcaatgcaatggtcggcttaaccgcggcggagattaggtggatcgaaagcggttacgttgtcaagtggatgaaccagaaaatccagttcccggatttcctgttagcgttcaaaaccacatttttgctcgcgattctttccgccatttttgtcatgctggcgatgtaatacgtcatcaccccctttggtggatggatcaacggcggtatccgtactgtgctgactgccgcaggtgagaagggcgcgctgatgtacgcaatggggatcgccgcggcgacagcaatcgaccttggtggcccgatcaacaaagccgcaggttttgttgccttcagctttaccactgaccacgtattaccggtcaccgctcgttctatcgctatcgttattccgccgattggtctggggctggcagaccattatcgaccgtcgtttaaccggcatacgcctgttcatcgctcaactttatccgcagggtaagaccgccatgttcctggcgtttatggggatcagtgagggtgcgattccgtttgcgctggaaagccccatcaccgccattccgtcgtatatggtcggcgctattgtcggctcaaccgccgc

SEQ ID NO: 108269 - DNA, 540 bp, Homo sapiens
  misc_feature (1)...(540): n = a,t,c or g
ctttgagctgcaaagaaaacaagcgtttcgcgcgccaaaaccacgcggcttttgagccgatacaaccccatgatccgtgtgccagggcatctgaattaaaggctatgcccctctggaactgacggcaaagtgactgcccggtttttaatggtaaaacggtataacccacaaatcaagcccagaaaactggggtcgtgttgaacaaacccccttctatgcgaaatccggcggtcaggtggccgataaaggcgaactaaaaggcgctaacttctcctttgcggtggaagatacgcagaaatacggccaggcgattggtcacatcggtaaacttgctgcgggttctctgaaagtgggccacgcggtgcaggctgatgttgatgaggctcgtcgcgcccgtattcgtatgaatcactccgcaacgcacctgatgcacgctgcgctgcgccaggttctgggtactcatgtatcgcagaaaggttcactggttaacgacaaggtgctgcgcttcgacttctcacacaangaagcgatgaccccaga

SEQ ID NO: 108270 - DNA, 550 bp, Homo sapiens
cggcagcaacagggccaggaagatgcccaaagcgccctcaagagtgggtttcaatgctatggatcgcacggcccaagccgcgtgttgttccgtacccgcgtaacggtgtaaaggattcccaaacccggagctggcccccctttaacttcccgttaccgccccagtatcagccggctattaaagtctccggcattatgggcgcacgtaaaagtgcggaagatcgtgctcgcgatatgctctacccggagcgtatttatcaggaatttgaaggtgataccgccacctggtggaacttcgatccgcgcgttgagtggctgatgggctacctgaccagccatcgctctcagaaagtgctggtgatctgcgccaaagctgccgctgcgctgcaactggagcaggtactgcgcgaacgtgaaggtattcgcgctgcggtgttccacgaaggtatgtcgattatccaacgtgaccgcgctcccgcctggtttgccgaagaagtcaccggcgcacaggtactgctgtgctcagaaatcggttatgaaggacgtgtctt

SEQ ID NO: 108271 - DNA, 776 bp, Homo sapiens
ctacatgactacggattttatggccgtagctgcacatcatgaagactgggagaacattggtgttaccaatattgttcatcatgacactgaagatcccagctaacacaataaagcaaggaaaggaaagacgaggcacacgcattggggaagaagattaaaaaatccggtctttggttcacagatgccaattgttctgtagaaaatcccaaagaatcagcaacaacaaaaaaccactcatggaaccaaaagcaattacaggctaggttgcaggataaaaagttaatatgaaaaatcaattgctttcttacatagaagccattaacaatgtggaatttgaattttcaaaacatctttaatgcaagtgcaataaaaatcccagcaagttccgttgtgactgtggacaaacggattttaaagtttatatgtagaggcaaagacccagatcagccagcaaaatagggagggaggaaaacaaagtcagaggagtgccacttcccaccttcgagtctgactctaacaccacagcaatcaggaagggggggtgatttgctaaataaccgaccagatcaatgaaacagaattgagaacccagaaacagacccacatgaatgtagtcaagtgatctaagacaaagaaccaaatgcaagtcagtgctgaaaagatcgttttttaaacaaatagtgctagaacagctggacagccacagacaaaaaaaaagaatctacatttagactttatacctttcacaaagacgtattaacaatggatcatggcct

SEQ ID NO: 108272 - DNA, 623 bp, Homo sapiens
  misc_feature (1)...(623): n = a,t,c or g
cccgccccccgcgaaacacgcgccccacaataataccgtccttaccccctttggggggcccacgctcccccgggtttggttttcaaaaaaaaggggggggcgtggtctcccccaaacgcgccccccaaaggacccgttccacaacccctccccggtgggccccccccaaattttaaaattcccccgggccaatggcaccagcccgttatccatcccctttgggaagttttgggggggcggtccccctaggccccgggtttgggtccccccctcccccccttggtgaaacccccccccttttaaaaattccaaaaatatctgggggctaaggccggcccctgttatccccccttcttgggagggtaaagccggaaaattccctttacccccaaagccgagggttccgttgtccaaaatcccccccccgcccccccgagtggggggcaaaactaaaccccctttccnnnnnnnnnnnnnnntgtgagaaatcattctgctcgtggcgtcatggcggaatgggaagcggagcaggcatcccctgcccagaggaaaaaagccataaagagggacaaagaaagaggaaaggagctgccaggctctttttaacaatcccagccccgggt

SEQ ID NO: 108273 - DNA, 640 bp, Homo sapiens
  misc_feature (1)...(640): n = a,t,c or g
ccgtagttgctctgtaaatgtgcggcaccacccttctctttttttcgaaaaatgacgccagggtcgcccccggttccccggtgtgccctccaaagactcagggccacaaaagagggcccctcaatgtaaaacccaaccgggggatcccccttccccccccggggtgaaaaaaggaggcccccccgccgggcgaagggggccctcccccctttttccccaccctttgggggccccagtggggggggcccccaggcccaaaaattgggccccccccgggttccacgggggaaacctgtttttttttctaagccnnnnnnnnnnttccccggctcaaagtgaacccccataattccccccttcttggggggttaagccagaaaaaaggcgggaccccgaaaaaaagaccccccaattaattaaaaaaccccccctnnnnnnnnnnnggggggcaaaaagaaggcccctttccnnnnnnnnnnnnnnncaaaaaactggaggccgaacctaatggactcatctggttctttcattctggaaggcttccaagcccttccacaccagcccctttcctctctgcagtagaggaagtggagccggagaataaacaactcctggaaggccaccatctcttgacgctgca

SEQ ID NO: 108274 - DNA, 418 bp, Homo sapiens
cccttttccttccccaagaagggtccccccgcccacccctaaaaatgtccggaaaaaaccatccaccccaaggtttgggaaccccttaggaaaacccttcccctgggaaaggccccggggctttctttccccaaactttggggttttgaggagaaataagggatttaggcccacccccgggtgtggccttaaagcaagtaacaccgggcgcagtcagtcccagacaggatccgcgggtacacagcccacagcctctctcttgtgataagaagacagaaccctccacttcagcctctgattgaccacggccttctccacttcagcatctgattggtcacaggtccatccttcatagggaataaccaactggaggccgctaaagggcacctaggggtattgccaagttcttttggcttta

SEQ ID NO: 108275 - DNA, 630 bp, Homo sapiens
  misc_feature (1)...(630): n = a,t,c or g
cttttgggcccgcgaggggcccccagagtaaagatttagccccggagcccctggaacccccgttttctnnnnnnnnnnnnnnccccggccgggggggccccccgtaaaccccccttttgggccccgggccggggaaaatttccttaccccaaagggggggttccacagagtttaaattttccccccctcccccccgcgggggggacaaaaacaatttttctttttttaaaccccccccaaaattttttaccccggtttttttggggaaaatttttggtnnnnnnnnnnnnnttggttttccccccaacccccccctggggggaaannnnnnnnnnaaaccggtcccccgtttgggaaaaaacaccctggggggggcccaaaaaccccttttgcccgatcccaaaccccttattccccccaacggggggggtttggccccaaaaattcccttaccccgggggggcggggttcaaaaaaacccaatttttnnnnnnnnnnnnnnnnggggggcnnnnnnnnnnctccctttttcnnnnnnnnnnnnnnnnnnnnngatggctatagtcatgcttagatgtagttacgcactgaaatgccaaggataacgttatttacatccaccaagtacta

SEQ ID NO: 108276 - DNA, 635 bp, Homo sapiens
aggaacagggcaggaacatccctctcaccactactgttcatcatcacactgaagatcccagctaacacaataaagcaaggaaaggaaagacgaggcacacgcattgggaagagattaaaaatctgtctttgtttacagatgacaattgtctgtagaaaataccaaagaaacaacaacaacaaaaaaacactcatggaaccaaaagcaattacagctaggttgcaggataaaaagttaatatgaaaaatcaattgctttcttacatagaagccattaacaattggaatctgaaatttcaaaacatctttaatgcaactgcaataaaaatcccagcaagttaccttgtgactgttgacaaacggattctaaagtttatatggagaggcaaagacccagaacagccaacaaaatagggagggaggaaaacaaagtcagaggagtgacacttcccaccttcgagtctgactctaacaccacagcaatcaggatggtgtgtgatttgctaaataacagaccagatcaatgaaacagaattgagaaccagaaacagaccccatgatgtagtcaactgatctttgacaaagaacaatgcaagcatggtgaaagatcgtttttaacaatagggtagacaagtg

SEQ ID NO: 108277 - DNA, 775 bp, Homo sapiens
ctacatgactacggattttatggccgtagctgcacatcatgaagactgggagaacattggtgttaccaatattgttcatcatgacactgaagatcccagctaacacaataaagcaaggaaaggaaagacgaggcacacgcattggggaagaagattaaaaaatccggtctttggttcacagatgccaattgttctgtagaaaatcccaaagaatcagcaacaacaaaaaaccactcatggaaccaaaagcaattacagctaggttgcaggataaaaagttaatatgaaaaatcaattgctttcttacatagaagccattaacaatgtggaatttgaattttcaaaacatctttaatgcaagtgcaataaaaatcccagcaagttccgttgtgactgtggacaaacggattttaaagtttatatgtagaggcaaagacccagatcagccagcaaaatagggagggaggaaaacaaagtcagaggagtgccacttcccaccttcgagtctgactctaacaccacagcaatcaggaagggggggtgatttgctaaataaccgaccagatcaatgaaacagaattgagaacccagaaacagacccacatgaatgtagtcaagtgatctaagacaaagaaccaaatgcaagtcagtgctgaaaagatcgttttttaaacaaatagtgctagaacagctggacagccacagacaaaaaaaaagaatctacatttagactttatacctttcacaaagacgtattaacaatggatcatggcct

SEQ ID NO: 108278 - DNA, 749 bp, Homo sapiens
ctacatgactacggattttatggccgtagctgcacatcatgaagactgggagaacattggtgttaccaatattgttcatcatgacactgaagatcccagctaacacaataaagcaaggaaaggaaagacgaggcacacgcattggggaagaagattaaaaaatccggtctttggttcacagatgccaattgttctgtagaaaatcccaaagaatcagcaacaacaaaaaaccactcatggaaccaaaagcaattacagctaggttgcaggataaaaagttaatatgaaaaatcaattgctttcttacatagaagccattaacaatgtggaatttgaattttcaaaacatctttaatgcaagtgcaataaaaatcccagcaagttccgttgtgactgtggacaaacggattttaaagtttatatgtagaggcaaagacccagatcagccagcaaaatagggagggaggaaaacaaagtcagaggagggacactttccaacctttagagttgactttaacaccacagcaatcaggaagggggggtgatttgctaaataaccgaccagatcaatgaaacagaattgagaacccagaaacagacccacatgaatgtagtcaagtgatctaagacaaagaaccaaatgcaagtcagtgctgaaaagatcgttttttaaacaaatagtgctagaacagctggacagccccagccaaaaaaagatttaaattaactttgactttacaaggttataa

SEQ ID NO: 108279 - DNA, 632 bp, Homo sapiens
  misc_feature (1)...(632): n = a,t,c or g
caagttccccggatggtttttgggccagaannnnnnnnnnnnnnnnttttttcccaaaagggcccaggggtttccccttcccccgtgggccccaaaggcccgcgccccaaaagagccccttagttattgccccccgaaaaccccctttcccccccgggtgaaaaccgggggcccccccgcccgggaggggtggcccccccccgtattccccccccttttggggcccaaagtggggagttccnagggttcgggaattaaaccccccctgggtaacaggggtaaccccnnnnnnnnnnnaaatcccaaaaaaaatatccccggggtattggcagggcccctttttccccctttttcgggaggttaatccagaaaaaatccggaaccccgaaaaaaagacccgccattaaatttaaaaagcccccctcccctcccaccgggggaaaaaaagagggtccctttccnnnnnnnnnnnnnnncaaaaaactggaggccgaacctaatggactcatctggttctttcattctggaaggcttccaagcccttccacaccagcccctttcctctctgcagtagaggaagtggagccggagaataaacaactcctggaaggccaccatctcttgacgctgca

SEQ ID NO: 108280 - DNA, 641 bp, Homo sapiens
  misc_feature (1)...(641): n = a,t,c or g
tgtaagcatcgctacccgagtccaggatggaatttcacaggaaagtgaagggatactgcaggcctgtgtttgcagcgcctgtggtaactgtggaatgagctctgttagggacagttgtctggtttgtgccaaaccttctaggggcgagtagggagtgggggaggtgggtccaagtctccctcaggaaggccttttctatcggcagcaattccatcaagccaagcctcctgtggtcctgagcatgaaggggccaggggacctcctgggagatgcagcttttgtttccgctgcgtttcatcagtcagccttgcttggaattctggcaggttccccggggtgtttcagtggacaggaggcccccgtgccgtggctgagtcagcctgggtaccccagtcaccagcagggccacccttgatgacagggccccccacgaacctgggaaaagcagcgggaaatgggtgaaaaggtggtgccctggtaccggactaaaagctttttccaaaaaggctttgttggggagagcccctgatactgctttggcgcccctgacactgaattgcccctctggggcccgggaggcgctctccacacggcccaatactaactcccatggtcctgctgctatttccaaccctttcttn

SEQ ID NO: 108281 - DNA, 650 bp, Homo sapiens
  misc_feature (1)...(650): n = a,t,c or g
ctttttctccgccttcgggggcccgagcccgttttttttgccctacagatcagccccgaggcctctggggaaacctctctttttttaaaaacataaaattccccccgcgggggggccccccctttattcccccccctcggggcccccctcccccgaaattttcttttaccctgaannnnnnnnnntcccagtccataaaatnnnnnnnnnnnnnnnnnngggggcccaaaaccaagtcccctttttaaannnnnnnnnnaaacttttgccccccaatttttggggggattttttttggtnnnnnnnnnnncttgttttnnnnnnnnnnnnnnnttgggggggannnnnnnnnnnnaaccccctcccccctttgggaaaaaccccctttggttggcccccaaaacccgtttggccggttccaaaccccttttttcccccttccttgggggtttaggcccaaaaatttcccttcccccnnnnnnnnnnnnttccattaacccaaatttttnnnnnnnnnnnnnnnnggggggccaagaccaaattccctttttcnnnnnnnnnnnnnnnnnnnnngatggctatagtcatgcttagatgtagttacgcactgaaatgccaaggataacgttatttacatccaccaagtacta

SEQ ID NO: 108282 - DNA, 640 bp, Homo sapiens
  misc_feature (1)...(640): n = a,t,c or g
caaaaacccccggggccctcccaaattccccaaggcaaaggagggcccccggtttcccccggccccccctaaaaagtttccccacggggaaagaacaccccgccccctaattttctttttgggccccccccaaattttttagggggttgaaaaaaaaattnnnnnnnnnnnnntcccaaaaaccccccttttttttggggcccccttttctnnnnnnnnnnttttaaaaaannnnnnnnnnnnnnnnnnnngggcccctcttttggggggggaaacccgggggaaaaaaacccccttttttttaatttttcactccaaaaaaggggggctggggttttggaaaaannnnnnnnnnnnnnnnnnnnnnnnnnnngnnnnnnnnnnnnnnnnnnnnnnnnnnnnnnnnnnnnnnnnnnnnnnnnnnnnnnnnnnnnnnnnnnnnnnnnnnnnnnnnnnnnnnnnnnnnnnnnnnnnnnnnnnnnnnnnnnnnnnnnnnnnnnnnnnnnnnnnnnnnnnnnnnnnnnnnnnnnnnnnnnnnnnnnnnnnnnnnnnnnnnnnnnnnnnnnnnnnnnnnnnnnnnnnnnnnnnnnnnnnnnnnnnnnnnncgggtccgagactcgaaatggtaatcagtatgtca

SEQ ID NO: 108283 - DNA, 458 bp, Homo sapiens
  misc_feature (1)...(458): n = a,t,c or g
agctaccccaataaagcaaggaaaggaaagcgaggcaccacgcattgggaagagattaaaaatctgtctttgtttacagatgacaattgtctgtagaaaataccaaagaancaccaacaacaaaaaaacactcatggaaccaaaagcaattacagctaggttgcaggataaaaagttaatatgaaaaatcaattgctttcttacatagaagccattaacaattggaatctgaaatttcaaaacatctttaatgcaactgcaataaaaatcccagcaagttaccttgtgactgttgacaaacggattctaaagtttatatggagaggcaaagacccagaacagccaacaaaatagggagggaggaaaacaaagtcagaggagtgacacttcccaccttcgagtctgactctaacaccacagcaatcaggatggtgtgtgatttgctaaataacagacca

SEQ ID NO: 108284 - DNA, 776 bp, Homo sapiens; identical to SEQ ID NO: 108271

SEQ ID NO: 108285 - DNA, 646 bp, Homo sapiens
  misc_feature (1)...(646): n = a,t,c or g
cgaannnnnngngcgttgtgtctcacaaggcatttaggtggtgacccccgggttttccccgtcccgncgttttaaaaccccgggccaggcccaaggttcgatgcttgcaggttgtctttaaaggtctcggaacagggccagaaccttccttctcccaattctgtttaatctcctcttgaaagttccagcctaccccaataaaccaaggaaagaaaggccgagccccncggcattgggaagagattaaaattctgtcttggttaccagatgacaattgtctgtagaaaatcccaaagaaccaccaccaacaaaaaacctctcatggaaccaaaagcaattacagctaggttgcaggataaaaagttaatatgaaaaatcaattgctttcttacatagaagccattaacaattggaatctgaaatttcaaaacatctttaatgcaactgcaataaaaatcccagcaagttaccttgtgactgttgacaaacggattctaaagtttatatggagaggcaaagacccagaacagccaccaaaatagggagggaggaaaacaaagtcagaggagtgacacttcccaccttcgagtctgactctaacaccacagcaatcaggatggtgtgtgatttgctaaataacagacca

SEQ ID NO: 108286 - DNA, 361 bp, Homo sapiens
cgccgcacaccccaggggacagcatgacagatcctctcgccgcacaccccaggggacagcatgacagattctctcgccccgcaccccaggggacaggatgacagattcttccgccccgcaccccaggggacaggtgacagattcttccgccccgcaccccaggggacagagtgacagatcctctcgccgcacaccccaggggacagcatgacagatcctctcgccccgcaccccaggggacagcatgacagatccttccgccccgcaccccaggggacagcatgacagatcctctcgccgcacaccccaggggacagcatgacagatcctctcgccgcacaccccaggggacagcatgaca

SEQ ID NO: 108287 - DNA, 646 bp, Homo sapiens
  misc_feature (1)...(646): n = a,t,c or g
ctctcctttgtttttttttgttccctgggnnnnnnnnnnnntttctcttttttacccaaaatgggccacaggggttccccggttccccctctggggccccaaaagggccgggccccaaaagaggggccttaagggtaatcgcccccgggaaaccccctcccctccccagggaaaaaaagggggccgaccccgcccggcaagggggtcccccccccgaataccccccccttttggggcccaaagggggggggttcccagggtcggggattttggcccccccggggtaaaagggggaaaccnnnnnnnnnnnaaaaaacnnnnnnnnnnnnccccgggttaaaggcagccccctttattcccccttctttggggggttaagccaaaaaaaaggggggaccccgaaaaaagaacccgccaataacttaaaaaannnnnnnnnnnnnnnacccggggggcaaaaaaagggtccctttccnnnnnnnnnnnnnnncaaaaaactggaggccgaacctaatggactcatctggttctttcattctggaaggcttccaagcccttccacaccagcccctttcctctctccagtagaggaagtggagccggagaataaacaactcctggaaggccaccatctcttgacgctgca

SEQ ID NO: 108288 - DNA, 431 bp, Homo sapiens
  misc_feature (1)...(431): n = a,t,c or g
cccaggccctagggaatcgtggggtcgtatcccgtgggtggaggccggggtggcgccggccggggcgggggagcccaaaagaccggctgccgcctgctccccggaaaagggcactcgtctccgtgggtgtggcggagcgcgcggtgcatgaaactcccacgttaacccacgaaaccttcaaagcactgaagccaggtctttctgcctatgctgatgatgttgaaaagagcgctcagggaatccgggaactactggatgttgctaaacaggacattccattcgacttctgaaaggccacccctctggtnctcaaggcacagctggcttacgcctgttacctgaaaaaaaggcccaaaggtaacttgccgaaggggaaggaagtatttaaggcatggcttttctttgaagggaatgactggngtttcaataag

SEQ ID NO: 108289 - DNA, 408 bp, Homo sapiens
gtgggctcctcctaagggtgtgactcctccccttaggtgtggctcctccccttaggtctggcccctcccctgaggtgtggctcctccctgaggtgtggctcctccccttaggtctggctcctccctgaggtgtggctcctccccttaggtgtggctcttccctgaggtgtggctcctccctgaggtgtggctccttccctgaggtctggctcctccctgaggtgtggctcctccccttacgtctggctcctcccctgaggtgtggctcctctttcaaagctctgtatgcctctgtcccagtcatctcatagcagatcatgccactatttgccacagcgttgcagtaatcctgactctgggatagcatgtcttaaaacatgccttttctagtcttgagcctctacgaaa

SEQ ID NO: 108290 - DNA, 448 bp, Homo sapiens
  misc_feature (1)...(448): n = a,t,c or g
ccctatgcgaaagcagatctgtccagcagatgagcttcaagccatctgttaccatcagggactatgacagtcatgtcagtctaggtgttaagtgctccaaggaggtagccactgccaccgtgagaccattatcctggccaacctctctaatgtcccatgaggaggaactccagagggggtcacaacattagcagccccacactgttccttgaaaagtcacaggatgctgaggttctgtgcaaggggacttcatcccacaccccgacctacttgatactgtctcagcccctgtgcccatgaagctggggcggatgggatacaactgctaccacttagccagggaccgcacctcccatcttgggcaactttgcaaaggccataaactaagccacctctaagacctgcagctctctcacacgaacctccgggggcnntttttcttaagggc

SEQ ID NO: 108291 - DNA, 400 bp, Homo sapiens
  misc_feature (1)...(400): n = a,t,c or g
tttcnnnnnnnnnnnnnnnnnnnnnnnnnnnnnnnnnnnnnnnnnnnnnnnnnnnnnnnnnnnnnnnnnnnnnnnnnnnnnnnnnnnnnnnnnnnnnnnnnnnnnnnnnnnnnngggtttannnnnnnnnnntgtgggggccctggaaacccctcttttnnnnnnnnnnnnaaaaaaaannnnnnnnnnaaaaagatgggcgcgaaaggggcgaggccccaatctgaaatgttgttgatcaaaaaaagggaaggggggaacccccttggggcccgggggttgccggggaccctnnnnnnnnnncccggccccggggggcacccatgggccccttgaaaatttcnnnnnnnnnnnnnncccttgaggtgaactggggggcccggcaattaacccggggggg

SEQ ID NO: 108292 - DNA, 581 bp, Homo sapiens
ccccatagtcttcaaactgctcctcattgctgatgagcgaggtggtggagtgtgtagaaaggtctgaggtcgtcatggatggagtgtggaccagggacttgtcttctggcagaaacaggcccccaagtcccccgtccttctcggcaggactcccgacagacccctccaggctctgagtgctctccatggggctgtctgtgtacaactcctgggggccctcaggtggcgccagcgtcatagcctcctcctcgtcctcgggaaaaaagccgggttccctggggatgagctcgccatcagcaaaggtggggcctgtgacctcgctgccctggctccacgcagtctgggatctctggcgcgcacggcagcgtccccgcgctctccaccgacagcacatccttcagcagctcctcgcaccctttcatggcgaacaccccccggcaaaagtccttgaagttgattactccccaggtcgttgggatccaaatatttcacaagtttttccacctcctcgccctggccgaagcgcagtccgagcgccgcgacgcgctccacgcgcaggaagccgtcggggtcgcggccgc

SEQ ID NO: 108293 - DNA, 434 bp, Homo sapiens
  misc_feature (1)...(434): n = a,t,c or g
gtacactacccggntcggaattaccgggtcgacgatttcgttctgtgaccaacctctgccacgaagcctgggtcccagcagtttcaagtttctgttttggaagggtggctttcgcggggtaccccatcttccccgggactgccttgataatcccctgctcgggtgaaaggggcaggcgtgggctgcccatttgttccttgggggatgctgctgctgcctcccaaaaccctaatgcctgtgcccattctctggactcaggctgggctgccagggccccctggactggtcctacctgcagctggcagcttcgggggccgccacagcgtatttcagctccttcagtgcctattgcgtcttccggatcctgatgggcatgaccttctctggcatcatcctcaactccgtctccctggggagtccagtcgaggagaggc

SEQ ID NO: 108294 - DNA, 438 bp, Homo sapiens
  misc_feature (1)...(438): n = a,t,c or g
cgatgacgaccaccggnatggagttaccgggtcgacgatttcgtnnnnnnnnnnnnnnnnnnnnnnnnnnnnnnnnnnnnnnnnnnnnnnnnnnnnnnnnnnnnnnnnnnnnnnnnnnnnnnnnnnnnnnnnnnnnnnnnnnnnnnnnnnnnnnnnnnnnnnnnnnnnnncgcccaaaacccgggtcaaccgcggggaaacccggggaaaaatttctgtcgggaaaaaaagttttttcaaagggcccaccggataacttagcccttttcggggaaaaaaaggggcaaaaaggggaaaccccttacccccaaaaggaaaaggggggggtccctgccccccgggaaaggagggggctggcacaaaagggggtattgccccccccggaacaagaggttctcttggggggggaaaaaaatttctaaaaggggaacgcggggg

SEQ ID NO: 108295 - DNA, 433 bp, Homo sapiens
  misc_feature (1)...(433): n = a,t,c or g
aatgaacgaccacctgnttggaanaacccggccgacgatttcgttgctgccactgctcagcgcggagaggtttgttccggtgactcggagacggtgactcagaggcagagcggcgcaagggccaaggagtactggcgtccatggaccctggggaccccgtcaggagcaggtgacatccttccccttccaccctgctccctgctctacatccccagcagggagtggcctctcccttctccatggacttccaagagagggacccgcccttcctgcctgagagcgctcagtcctcaaagcccagcagtgctcagcaggcctctgagctgtgggaggtggtggaggagcctcgggtcaggctggggacagagggtgtcatgcctgagaggcaggaaggtcacctgctcaagaagaggaagtggcctctgaagggctg

SEQ ID NO: 108296 - DNA, 441 bp, Homo sapiens
cccacattggaatctgtctttttaaatgtttctcctcctaagactcggagcagagaagaggtggggaggacgaagagaaggctaggcaggatcgattcattctcccgaagagaataaacggagccatttccaggctggcagcaggctgggggcgcagcgcacgccggagagctggaggaggggacccgatcccacctccctcagccccttcccgccccccgccgccgagcacaatggagcccggctggtgcccggcccttcattcgcggctgccccctcttccctcctctcttcagagcacagcgggtctgaggctcccgtcggcggagaatgaatgaatcacagagccaagccccacgcttccactgacaaactgcccccagctccagggcgggcgaaaggggccgaagggtcgacccgggaataccagacctgtaggtc

SEQ ID NO: 108297 - DNA, 2029 bp, Homo sapiens
cttgaaagaacacactgctggttgttgatggaatattgcttagctcagcctctgatttattagaagttcataaaaaaccacttcaggaagtggagatcgctgccattactcatggagccttgcatggactagcctacctacattctcatgcattgattcatagggatattaaagcaggaaatattcttctaacagagccaggtcaggtaaaactagctgattttggatctggctttcaatggcttctcctggccaactccttcgtgggcacactttaattgattggctccagaggtgatctaggctatggatgaaggacagtatgatgggaaagttgatatttggtcacttggcatcacttgtattgaattggcggaacggaagccgccccttttcaacatgaatgcaatgagtgccttatatcacattgcccagaatgactccccaacgttacagtctaatgaatggacagactcctttaggagatttgttgattactgcttgcagaaaatacctcaggaaaggccaacatcagcagaactattaaggcatgactttgttcgacgagaccggccactacgtgtcctcattgacctcatacagaggacaaaagatgcagttcgtgagctagataacctacagtaccgaaaaatgaaaaaaatacttttccaagagacacggaatggacccttgaatgagtcacaggaggatgaggaagacagtgaacatggaaccagcctgaacagggaaatggacagcctgggcagcaaccattccattccaagcatgtccgtgagcacaggcagccagagcagcagcgtgaacagcatgcagccagtcatggacgagagcagttccgaacttgtcatgatgcacgatgacgaaagcacaatcaattccagctcctccgtcgtgcataagaaagatcatgtattcataagggatgaggcgggccacggcgatcccaggcctgagccgcggcctacccagtcagttcagagccaggccctccactaccggaacagagagcgctttgccacgatcaaatcagcatctttggttacacgacagatccatgagcatgagcaggagaacgagttgcgggaacagatgtcaggttataagcggatgcggcgccagcaccagaagcagctgatcgccctggagaacaagctgaaggctgagatggacgagccccgcctcaagctacagaaggaggtggagacgcatgccaacaactcgtccatcgaggtggagaaggctggccaaaaagcaagtggctatcatagaaaaggaggcaaaggtagctgcagcagatgagaagaagttccagcaacagatcttggcccagcagaagaaagatttgacagctttcttagaaagtcagaagaagcagtataagctttgtaaggaaaaaataaaagaggaaatgaatgagggccatagcacacccaagaaagagaagcaagagcggatctccaaacataaagagaacttgcagcacacacaggctgaagaggaagcccaccttctcactcaacagagactgtactacgacaaaaattgtcgttccatacaagcagaaaataatgatcaagcggcacgaggtaggagcagcagaacattcgggaggaactaaataaaaagaggaccccagaaggagatggacgcatgccatgctaatccggcacggcgagtccacccgagagctagagtacaggcagctgcacacgttacagaagctacgcatggatctgatccgtttacagcaccagacggaactggaaaaccagctggagtacaataagaggcgagaaagagaactgcacagaaagcatgtcatggaacttcggcaacagccaaaaaacttaaaggccatggaaatgcaaattaaaaaacagtttcaggacacttgcaaagtacagaccaaacagtataaagcactcaagaatcaccagttggaagttactccaaagaatgagcacaaaacatcttaaagacacttgaaagatgtcagatccgtttccgt

SEQ ID NO: 108298 - DNA, 416 bp, Homo sapiens
tttcgtgctgtgaggtctcttgcagtttacgcgcacgattcagagcccgagtctgatggcgaggctggcatcgaggccgtgggctgcgctgttgacgagaaacgcggattggtatctgatgcctatggggacgatgacttttctcgtctagggggagacgaagagggctatgacgaagaagaagatgataacagcgaacagtctgaagatgaccattcatagactgacaaacctgaggctgatgacccactggagaagctcggcacagtgacagaggcacccagggctcatgaagctcatggcccagcttgttggactcagagggcagaacaatcacattctaatcatgatgagagacgtgactcaacaacctcagctgagcctggcagcacacacactccacactactttccatc

SEQ ID NO: 108299 - DNA, 399 bp, Homo sapiens
ctgtgaccacgatgccctctgctgggccgcctccctccgccggagacaaagtctcccaaccccggaggtcccctccgaccccaccagggcagcgagggcaccgtggggtccgcgccgcgtgccgccggctgttacccaactaaccgttatatgcgcggatcgcagcgccgagcgtgtgcgtgacgtggtggcgcaggctggagttccacggggcccagggtccggctcccgtccttcgctcgctgcctcgtttgcttgttccagtacccacgcagctagccagtcacgtcgcagctcaccactttgtctggccgggccagcgaggctgccttataacccgccggggccggagcatgcgcgcagggggcggagtcgtctctcccggccgccgccacgaaa

SEQ ID NO: 108300 - DNA, 401 bp, Homo sapiens
ttatgcacatcctgtctcccgatatccctcacgtggcccctgcctcgccagactcccgttactgccctttcccatatgctcgcggggtctcccattcattcattctcctacttctcttctccctattcattacctgtccttctgcagacccccagctctgcttccggcctccctggttttgccccctccggcctccaccccgacccctctcgtccgggggcgggggcaggtccctcggccacggctgatcctcccaaccctctgcttgcggagtacgggctctagcctccccacgctcagagctctctgcccgcaagcccagccagccccgcctggctcggcccagcccagggcccaccgtcccctcgccacctcgtccccttgcccactccaccacgaaa

SEQ ID NO: 108301 - DNA, 658 bp, Homo sapiens
gccctggccgcgcactgcttcctaaggccacgggatcctgcggcgacagcgagcccgcagagccaggatatagggccccttccggcgcccagcagaagtactggcccgccgttcctctgaagcagctccctcgtcatcgtcctcatccgaatcactgagaaatggattcacgccgccaccactgccactacctccaggcgccatcgccgccatcttatcctgtcaggagtgtgggcgcctccctgactggttccgacgggccgcagcccgaatcctctaggcctcaggggacacagcgcacctccacagccccggcctgaccacgtcctgcctcccgacttagagacaaggagtacgctccaaggcaggagatccggatgcagctgcacctgatgcctcagcctctgctgcaccagcagcccggctctgcaggcgtcttcacgaaatcgtcgacccgggaacagatctccctgcggcaactgccaacggagtgtcgtaggcgcggccctggcaggcagggaggcgcgtcccttaccgctggcccagaggttgcactcagtgccctgtcgccggactaggacgaggatgtggcacgaaatcgcgacccgatcacgaattctggatccgatacgtaacgcgtgtgcagcacgcgtggttc

SEQ ID NO: 108302 - DNA, 532 bp, Homo sapiens
cgcaattcccgggtcgacgatttcgtggaagggtgagaagaaaagtggcaagaaaatgtagaggaacagtgttccaggcagaggcatagcctgtgcaaaggccctgaggcaggactgcacttggggtgctggaggaacagcgaggaggcccatgtagctggagcagagtgagggggagagagggaggaatggagggcagggaggagatggagcaggtcatgcagggccttgtgggccaccaggaggacttgggctttgaccctgagggaggtgggagccatggagggctgtgggcagaggagggacgggacctgactcatgtgcacaccggcaccatgtagtgggtgctgtggggaggacagactggagggcgagggtgggaggctggggaccatggcagaggtgactgtgctggtccgagcaggcaatgatcaggctggatggggttggaaagggaatattggtgaaagatggtcaaattgagtttaattttaggagacaaacgggagagtttttccgaccaacacctttg

SEQ ID NO: 108303 - DNA, 525 bp, Homo sapiens
  misc_feature (1)...(525): n = a,t,c or g
tcccgaattcccgggtcgacgatttcnnnnnnnnnnnnnnnnnnnnnnnnnnnnnnnnnnnnnnnnnnnnnnnnnnnnnnnnnnnnnnnnnnnnnnnnnnnnntgtacagcatttcttataacaatgagttacttttatgttaaggannnnnnnnnnnnnnnnngaaaggggcccctccctccctcccnnnnnnnnnnnnnnnnnnnnnnnnnnnnnnnnnnnnnnnnnnnccccaagggcctggttttgtgccccagcctgggggccaggggtataacccccgctcttggctgccctgattccccgggctaagggggcccccccttctaaccccccccaagtagcgggacccccgggcttggccccccttccccagctttttttaaattttttggaaaaaagggggccccccactttacgggggcgggcctgaacctttaagcgcaagggaannnnnnnnnnntcccccccccaagtgccggtattggagggtggccccacctgcgccgcggtgttcttttttn

SEQ ID NO: 108304 - DNA, 416 bp, Homo sapiens
tttcgtgcggagacctgggctcctgagtcgtgggactgaaggtgaaggggcctagtcccgaagcatgtgggtggtgcctgcaccttcccttctgctcgtcgcagctccggtactggtctctcgctcgcctttgtgtgagaatctatggagcacttactgcatacagctatgagggagctggcctcgcacatgtgcctgtatcatctcctcctccgccctgcacatactgtctcgtatatacccccaggcgtgcaagcgcacgcacaatcctgtgcacatgcgtgggcggacaggccctacccagccctcaccacactccccttccccctaaggagtgagcccagccctgacttcccggcgctgctggtggagaagctgcttcaggaacacttggaagagcaggaggttgcgccccc

SEQ ID NO: 108305 - DNA, 413 bp, Homo sapiens
  misc_feature (1)...(413): n = a,t,c or g
acagacagcancgctggcagagcacaggcaaggacggtttctgtggcaggaacctcggcgggtggcaggaggagctagcgggcacccacctctctcccaagggccacggcgtccgaggctgggggctgcttcctgcctgaaggctccgctcccccgtgctgggctatcctgagatgcttccccagctcagccacctgcttccgcagctccaaaacctccaggtgtacctggtccacctcacggggaagctcacgctggagagcggccggctccaggggttcccgcagcaccttctgtctgagtcgtgtcaccagcaggtttaggagctgcactctgtccccgagcttcctgagtgccagtccagaggatactgggccagcttggacagatcctcctgcttgaccagcacgaaa

SEQ ID NO: 108306 - DNA, 594 bp, Homo sapiens
  misc_feature (1)...(594): n = a,t,c or g
ggacgagggcgcagcattacctcagtgccatcctgcggctctttgtggagcagctgtcccacaagacacccgactggctcgggtacatgcgcttcctggtcatcccactgggctcccaccccgtggccaggtacctaggctccgtggactaccgctacaacaactttttccaggacctggcctggagagacctgttcaacaagctggaggcccagagtgcggtacaggacacgccagacattgtgtcacgcatcacgcagtacatcgcaggggccaactgtgcccaccagctccccatcgcagaggccatgctgacctacaagcagaagagccctgacgaagagtcctcccaaaagttcattccctttgtcggggttgtgaaggctgtaatttgcggagccatccttggtcacaacaggcgacatggacgacgcggtcccttctggctctggcacgctctcctccaccccgccgtccgcatctcaagcggccaaggaggcctcacccacgccgccctcctcccagacggtaaaaagaggcctgtcctcccccagccagtgtattgcgagcgctaagagcatnnnnnaagtccat

SEQ ID NO: 108307 - DNA, 491 bp, Homo sapiens
cagggtgcaggcgggtcctgggagtccccggcgagcgcgggggcggcagcaagtgcagccgctggggaagcagcgcccagccccgtggcccgggcttcgcagcaaagagaagaagaaagtgaactgcaagcccaagaaccaggacgaacaggagattcctttccggctccgggagattatgaggagccgccaagagatgaaaaacccgatcagtaacaagaagaggaagaaagcagcccaggtgaccttcagaaagacattggagaaggaagcaaagggagaggagcccgacatcgcagtccccaagttcaaacagaggaagggggagtccgacggggcctatatccaccgcatgcagcaagaggcccagcatgtgctgttcctcagcaagaaccaggccatccggcagccagaggtgcaggcagctcccaaggagaagtctgagcagaaaaaagcaaaaaaagcgtgagtggaggcgggagggggagggg

SEQ ID NO: 108308 - DNA, 956 bp, Homo sapiens
ttttttttttaaagttagcagtagtgctagcacctcagggcttgaaaaaacaaaaatacaaaaatattgagtgtctcctgcaacccaggcacagggttaaggactttaggcaagattattctccccatttcacagacgatgacatggagatttgcttataacagtctctggccagggacctcgctaagaaatattggcaatatgaggggaaattcctgtgaaactgtgatcctttcctctgaggggcctccttaacagctgtccagacggcgtcgccagctgcccaggcagttcctatccctttcggagctccagcctgcccctcctgacgctctcagagtctggccttctgctgggccccgggtctctcactggcagaatggagttctcggagctgatccatacgggctgagcccaagcagagcttctacggggcccggaggcgcccccgcttcgcggcacggtgtgagtcaccgtccaccacctgctcctgtcgccagggcccgcgtcctctccggacctgtggctgctgctgttgcgtaacgtcgactccttcgagaagcagtgagacgtggcggggtgggggagggtccccggggttggggagcgcgcggcttggcggagtaaggggcacggccagcgcagtcagagctggcgccctcctgcgtaagcccaatccgggaaactcgttgcccctctcctgggaaaggaacgtccctccccagggttgcgagtgagctcgggcaccatcaccctgtgctgtaaagacctgcgagtgctgaagctggaaatagagggcgcggaagcgacgctgggcatcgcccgctccatcgaggtgtgccgagggagctcccgagccctttaagctctccctgtctcgcgtagaggggaataaaaaggtgcttctgttcaaagaggctccgcagccgcagctaaatggcagggggatgcagggg

SEQ ID NO: 108309 - DNA, 417 bp, Homo sapiens
tgacgctgctccggacctgaattcccgggtcgacgatttcgttttatttcaagatgaggtcacccgaagattaaatgttaccaacaggtcagacgcatttaacatgcaaatgacacaacggaaaggcactctctctgttaactttgtaagtgttttggggtctgtcaggagggaaaggatttatttttattatagttttgcactttctatcctggtatatcatggtatgagtttagatagctcgcttggttagaagacttgatggcacatctgtgaagttacagcttttgtttatgttgctaacctggctctgtcctacatacgtaggctgcttcctgtaagtcatacaccttatggtgaacctagtgagagcatgaaaatgaatctgtgtaagtcgttgagttctattatagacag

SEQ ID NO: 108310 - DNA, 390 bp, Homo sapiens
tttcgtggtagggccaccctcatggaaactgccttggcccacagaaagcagaccaagaaggggaacagtggaataaagaagccgctgcccaagaggcatgcgctgataccccggacaaaggggagcccccaacacccaagactgaccctgccccaagagcctggcatgggaaaggattctttctgctcatgccagctgcccttgctgtgggggaccaggcagatattccagggttttggtgatggggaggcatcctgaagctgatactataaagtccccctagtcatcgccacaggcccgggggccacagatggacctcatgtctgagctgacacggaggcatgagaaggagccactcatttatgagagcgaccgcgatggggccattga

SEQ ID NO: 108311 - DNA, 431 bp, Homo sapiens
  misc_feature (1)...(431): n = a,t,c or g
tttcgtccaccacacccatccaactccaggggattctaggaagccaaggaaccttcctgccctgcctgctgaaataaactcaaactggccaaacagacaagtctgacatcttttctttatgcnnnnnnnnnnnnncccggcaagggagcccaactttgtgccccagcctaaagggaaggggggaattccgggttattggaaaccccaacccccgggttccaaggaattttctggctaaccccccaaggaagtgggattaacggcccccccccggtttgggggccgcttaaaagaaccaaggttaactaccccggcctggcaaggtaaaagttttttaatggggcccccaaaatcaattcccgggccgggggtttaaaacggcgggaaggggaaaaccccgggggtacccaacttaaaccccctgtggaaaa

SEQ ID NO: 108312 - DNA, 401 bp, Homo sapiens
  misc_feature (1)...(401): n = a,t,c or g
tttcgtccagttgccattttctcactggggaatttcagataatttcggagtaactggaaattaaagaacataatagataacagtatttaaagctaagttgttataattaaaaaatagttttaaagaataaggctgattcacagaattggtatgcatttttttttagagcnnnnnnnnnnnnnnnnnnnngaaaaaaaagcccactggggccccttagggggggggccaaagggggattttggtttattggaacctttgcccccgggtttaaagggatttttttccccgacccccctgaataatggggattaaggggggttgcccccctccccaagaaattttttggatttttaaaaaaaaggggggttcccctttttggccggggtgttttcaaatcccag

SEQ ID NO: 108313 - DNA, 404 bp, Homo sapiens
  misc_feature (1)...(404): n = a,t,c or g
tttcgtccagttgccattttctcactggggaatttcagagaatttcggagtaactggaaattaaagaacataatagataacagtatttaaagctaagttgttataattaaaaaatagttttaaagaataaggctgattcacagaattggtatgcatttttttttagtgnnnnnnnnnnnnnnnnnnnnngaaaaaaaagccccctggggcccccagggtgggggggaaaagggggattttggtttattggaaccttggcctccgggtttaaagggatttttatgcctgacccccctggaaaatggggattaaggggggttgcccccttgcccaattaattttttgtttttttaagaaaaagggggtttccccatttgggccggggttggtttaaaaccctgaag

SEQ ID NO: 108314 - DNA, 421 bp, Homo sapiens
  misc_feature (1)...(421): n = a,t,c or g
nnnnnnnnnnnnntttttgtttatacccattaatttttttccccccccggggtttaaggttccccccccctgccccgttaaaaaacccccttaaattttttctccccccaaaaaggggtaaaaacccccagttggtgggaacccttttttttaaacccccccccattgggtttggnnnnnnnnnnnnccgggnnnnnnnnnnnnngccccagggnnnnnnnnnnnnnnncagggtggaagccaaggggtttaaacaaatttctttaagcctcaccctcccggggccaaaccatcttcccccccaagcctttaaaagaagggggaaaaaagggggaagcccccaagccggggnnnnnnnnnnnnnnnnnnnnnnnnnnnnnnnnnnnnnnnnnnnnnnnnnnnnnnnnnnnnntccacgaaa

SEQ ID NO: 108315 - DNA, 439 bp, Homo sapiens
tttcgtgccatcttggtcccacgctctccacgtctccaaccccggtctcggcggcggcagccaggtccctgctgaatcacacgccgccttccggtaggctcaaggaaggtgccctggatgagcttcatattctggatccaacaaggcaccagttattggaagctacatttactggagtcgccacgcgggagcactggaagtacgggcatgttgcactgttggagctacagcctcaacaaataacgaaagctctaatcacaggtttggaggctcgggatctttaacggacaaagaatcagagaaacaactggcactcagctgaaaggactgtgcatgtgacggtactctatctgcagtaggatcccttgagacaccggagaagagacactcggaatcatccaggggaagaccgagacatgcatatgacccgaatgatagg

SEQ ID NO: 108316 - DNA, 413 bp, Homo sapiens
  misc_feature (1)...(413): n = a,t,c or g
tttcgtnnnnnnnnnnnnnnnnnnnnnnnnnnnnnnnnnnnnnnnnnnnnnnnnnnnnnnnnnnnnnnnnnnnnngnnnnnnnnnnnnnnnnnnnnttttttttgggctgggggggggccccctttacccccacttttttggaaggttgagggggaaaaaacttttggcctcgggaggaaaaagttggggggagataaccccatggccccccccctgggggaaaaaaaaggaaaatcccctttcccnnnnnnnnnnnnnnnnntgggccctttccccggggggggnnnnnnnnnnncccccccccaattaaaaaaaagggggcccnnnnnnnnnnncccccccgggggggggccccttttaaaaaaatttttggggttnnnnnnnnnncacttggtccccccctcccttatat

SEQ ID NO: 108317 - DNA, 550 bp, Homo sapiens
aaaatttaaaaacctagttcctactcttctttattttaaccactacccgaaagacctttccattctcttgagttctcccttaatacactgtccttatgcacacttgtaaacagggcctccacagctgcacatctagaaacggcagcagataagttagcccgcaccccccttcgcaacgatctccggactgcctgcacgccctgtggaacctcgcagtcggcttcaccagggcagggaataaggccttcaaaagccagcatccgtctccactaacctggggtcgccccgctcagcggacccagcagcgtcgtctcccttctcagaggtggccgggcctccggaacgcgctacgaactttcctttgtcgccgtctctcgaagcggagccctcgtgtggggatcccccgcccttcggccacaagggaggttgttatcctcggcagatctcccgttctcactcatggaggatcgctttttctttctagcctcacggtcagccgctcgacacaaccaggcctaacgccagcagcccttcccctccggtggcaagg

SEQ ID NO: 108318 - DNA, 420 bp, Homo sapiens
  misc_feature (1)...(420): n = a,t,c or g
gggggtcaaaggattttccccccccacccccccaaagggggggggccccaaaggccggcccccaagggggggaaaaccctggggnnnnnnnnnnnnnnnnnnnnngggttttccccattgggccaggggggggccaaaaccctgcccccaggggttnnnnnnnnnngggccttccaaaaagggggggttccaggggtaaaccccccggccgggcccccaaatttttaatggccgggaaaaaaatttttcccccagggttttttttgggnnnnnnnnnnnnccggggccagtttttttttaaaaaggcccaaacccccagaaattcccgggttgccaagctttttttattgccaaaaagnnnnnnnnnnnnnnnnnnnnnnnnnnnnnnnnnnnnnnnnnnnnnnnnnnnnnnnnncgaaa

SEQ ID NO: 108319 - DNA, 424 bp, Homo sapiens
atatacaattgtagttacgacgacttcgcgcacaggaaagggaccccccagtcacctgtgtttgatggcgtctacaacaattccagaatgctgcatttccttacagctggtgggggctccacttgtgatgtaaaggtgaaaaatggtaccacttatgagggtatcttcaagacgctaagctcaaaggttgaactacccgtggatgctgtgcgccggagagcggctgagccaacatgtggccctcgtcgggaggacattgtggacaccatggtgtttaagccaagcgatgtcatgcttgttcacttccgaaatggtgacttcaactatgctactaaagacaagttcaccgattcagccattgccatgaactcgtaagtgaatggggaacacaaagagaaggtgcttcatcgctgggaggggggtg

SEQ ID NO: 108320 - DNA, 516 bp, Homo sapiens
ggggctgcacgtgcgcaggggtgtggaaacttaccggctgagccatggatacaccgttaaggcgcagccgacggctgggaggcctaaggcccgaatcccccgagagcctcacctcagtttcgcggacgagacgggcccttgtggagttcgagtcgaacccagaagaaacgagggagcccgggtctcctccgagtgtgcagcgggctggcctggggtcccccgaaaggccgccgaagacaagcccaggatcaccccgtctgcagcagggtgcaggcttggagtcaccccaagggcagccagagccaggcgcagcgtccccccaagcgtcagcaacgacctacacctgggagtcgccttcaaagtacaagccagagttacagtcctgaatccccacgatgtcagccgaagccaagttgaggaggcaccaaagtgttctcagggaccagggagttacttggcctcggagttggcccataatatggaggagctgacccccgggggccccccagcatttgg

SEQ ID NO: 108321 - DNA, 422 bp, Homo sapiens
  misc_feature (1)...(422): n = a,t,c or g
cccacccttttcagcaaacggcttcgtggcatggccttgttacccatctcggccagttctcctagccccaagcccacagccagtcccccaaagttggccaagcggctgatgcgggaggcaggcaccttgcgttctcgagagcggccactcagctggggccggggtgtcttcctgggacgggcctcccatgccctgcgaatgtcctcctcacccaggcctctcccaggcccatcctggtaaaacttttgggcccaagaacctccacatggtccccagcggtggggcccaggccccagggccccacaaggccaaccaacagtctggcccagctgtccaccggtcccaaaagtaggccccccaccttcagaaacattgcctctccacttggctaaatcccccatnntanggttttcaggtgaaaa

SEQ ID NO: 108322 - DNA, 427 bp, Homo sapiens
agcagctctggaatgagaataggtatttgtaacacacataactgataaaggattcatatctagaatatacaaagaactccaaatcaatgaggaaaagtcagaaaaccaaaaaaggaggacagctaaagctgaaaaagcacttcaaaaacagactgtacccagctgtctgataaatatgaaaaagtatgcagtctcaaagtaggtccaaattaagaccttcatgagaattggtatacacccatcggtttggcagaaatccccttctcaagccctggaattctgggctctacccccattgctcaaagatctgaccattttccatttccatcccttccatctttctgcagtacctggcattcctgaccatgctatttctaccaatcaacaaaaactactagatactcagaggggatttaatacagagagc

SEQ ID NO: 108323 - DNA, 462 bp, Homo sapiens
  misc_feature (1)...(462): n = a,t,c or g
ccgttcgcctgcaggcaccggnnnggnnaggccgggtcgacgatttcgtgaaccaggttggtcagggagttgaggagctgggctcacgcagggaggagaagggtgctttgcctggaggcagggggacaggcggggccgtgtcctgagggctttgggaagccttgggtgcgttgggtcctgacggtgctgaggtctaatttggttttaagggctcctcctagaggtcaagaggcgaacaggctgtgggagatgccagggaccccaggaggaggagggaagctccacactgaagccccactctctcnnnnnnnnnnnnnnnnnnnnnnnnnnnnnnnnnnnnnnnnnnnnnnnnnnnnnnnnnnnnnnnnnnnnnnnnnnnnnnnnnnnnnnnnnnnnnnnnnnnnnnnnnnnnnnnnnnnnnnnnnnnnnnnnnnnnnnnnnnnnnnnnnnnnnnnnnnnnnn

SEQ ID NO: 108324 - DNA, 392 bp, Homo sapiens
tttcgttgcatcggcggtcggggccgggagcggtccttggtcggcccaagagaagcagttcccgccggcgctgatgagtttcttcatctacaacccgcgcttcgggccgcgcgaaggacaggaggaaaataagattttattttatcatccaaatgagggagaaaagaatgagaagattacaaatgtcggattgtgtgatgctattgtacagcttacaaggtaatacctctaagcgtgcctttaacgttcagtgaattcttataactgctgctggagaattgtcccaaacatatttttttaacctttgtaggacatttagcccatcaaaacctgcgtaatctttacatacacagaagaacagacagttcttctatgacccagaagaaaatttg

SEQ ID NO: 108325 - DNA, 548 bp, Homo sapiens
agtcgcaattcacaccttgtagaacattggagaattcatactggacagaagccttacaaatgtagtgaatgtgacaaggtgtttaatcgcaattcaaaccttgcacgacatcaaaaaattcatactggagagaagcctcacaaatgtaacgaatgtggcagagcttctagagagtgttcaggacttactacccatgttgtaatccatactggagagaagccttacaaatgtaatgagtgtggcaagaacttcaggcacaaattttctctaccctatcatcagagaagtcacacggcggaaaatccttacaaatgtaatgaatgtggcaaggtctttagtgtgctttcataccttgcacggcatcatataattcatagtacagagaagccctacaaatgtaacgaatgtggaagagcatttcacaagcgtccgggccttatggcccatcttgtaatccatactggagagaaaccttacaaatgtaatgaatgaaacaaagtctttgggcgcaaatttatacctaaccaaccacgaagtcgtcttccctg

SEQ ID NO: 108326 - DNA, 465 bp, Homo sapiens
  misc_feature (1)...(465): n = a,t,c or g
ngacctgggcacttggttgatggcctctggccggcgcacagaaggctcagtgcaagtcttcctccaggctcaccatctatgctggtcaacgccagggggcccacctgggcagaagaagtctctcaaagacacaagggagaaaggggactcagggaggagccgccaacctgccccgcccctggggaatgggactctgacaccaagcccacacagggagcctgggctgcctcacggaggagtgcagagacagggctgggggctgccaagatgcccttcagggccttgaggtctccagcccaaaatacggtggccctgccacggacctcaggatcccagcgtcctcttccaaaattctcccctaggttgggcctcagcgtaatcctattgagcataatttttaagtcatcacctctcttcagaaaatataaggttcacgaagtcgtcgacacgggaattcgggcgtgc

SEQ ID NO: 108327 - DNA, 470 bp, Homo sapiens
cgacacacgaattccagtgtcgacgacttcgcggcaatggtcagaatttgccatgcccctccttgtggtctcctacaagctgcaacacctgccccgcagctcctgcaggttcacctggaggaaggggtgttagctgccatgccggtgccagcacgcacgttcacacccacccccaccctcccccaccgagatgttgcacaccctaccttcatctcctcctggtcctgggccagcctgacgatgtcctcctctcccagagctgcgtctctgacactgccccctggctgatgtactttcctgcaggaggacatggctcagatgctggggcccctcggacggcctggcagctccccccagcggtgccctagcctctcactccctatggtgtctagctgtcctgagaggtggatgaattgaagctctagattctctacccgctccttcaggtacaccatcgtcttccataaagg

SEQ ID NO: 108328 - DNA, 459 bp, Homo sapiens
  misc_feature (1)...(459): n = a,t,c or g
ccagcccgagaaacgtccaagggcnccgttaccttccgcttgagcacattcatcgggagggaacaggagggcggccttggggcgtcagcccccaccttttccctcttcccttgctctgaccgacgtctggagaggaagtgaggaagtggagaaatcttccccgcttcatgatccggcttgtgcccgtcacttcccaatttccgctgggtgccaggcccaggagaccaggagaaggcgcgcccccggaacactcgcaaggctctcaggcgcgtccccggccccgtagcttggctcgcagtggccgccgcacccacccagagccgcttcctcctacttggtggacggttcctggaccgcaggggaggagggtggctctacccaacgcgcccccaacacctccgacctgctcccgcgcacttcccacgaagtcgtcgatnnnnnanaacgggggtgtatctg

SEQ ID NO: 108329 - DNA, 438 bp, Homo sapiens
agcaccacccccgtaattcccgggacgacgtctcgtggagctgcttgtgggcagtgaggaggcggacagcatcaccttgggccggtatctccggcagctggcacgccatcggaacttcctgtggttcgtgagcatggacctggtgcaggtcttccactgccacttcaacagcaacttcttccctctcttcctggagcatctgttgtccgaccatatctccctttccacgggctccatcctgttgggcctctcctatgtcgctccccatctcaacaacctctacttcctgtccctgtgccggcgctggggcgtctacgcggtggtgcgggggctcttcctgctcaagctgggacttagcctgctcatgttgttggccggcccggaccacctcagcctgctgtgcctcttcattgccagcaaccgcgtcttcactgaggg

SEQ ID NO: 108330 - DNA, 437 bp, Homo sapiens
  misc_feature (1)...(437): n = a,t,c or g
ngagggtggggcttcaccagggacccacccctttccgcccagaagccagcctgcctcctgccgccatcaaccagctgtaacctggcgcccagcctggagtgccaaagggcacctgcaggcctgcaccaagacaccctcatcccccactttggccagcctcccttccgtgcttgtcagtgtccaaagtccagaggaggccgaggtggcagggggctggggtgtcagcaatgccccaagagcgggcacacctgcaacagtgcccaggcttggcctcaactttgctctgaaatcagagtgggtgctgggagtagggagaggtcaggcagcgggaacaggcatttctgaacccgtgggggaagagggctccctaggccgaagatagtgagggaatgcctgggacgaagatcgtcgtcccgggaataacgggggtggttcgg

SEQ ID NO: 108331 - DNA, 405 bp, Homo sapiens
  misc_feature (1)...(405): n = a,t,c or g
tttcgtgcagagcgcaagactgaggcccagggccgcgcagtcaggcaggaaacggcgctcctggcggatggaacagcacgggcaaaggctgggtatgggggtatgtggggatggaagtgcccagaggggcagcgcgatggggttgggggcgggaccccgcagggcctccagtaaggggctagttgggggatctggtcagccagtggccaaggccggtggtcagtgagaagttgatgcggagcgggggggcggtttcagatcagtctgagggtggagaataggaaaagtgannnnnnnnnnnnnnnnnnnnnnnnnnnnnnnnnnnnnnnnnnnnnnnnnnnnnnnnnnnnnnnnnnnnnnnnnnnnnnnnnnnnnnnnnnnnnnnnnnnnnnnnnnnnnnnnnng

SEQ ID NO: 108332 - DNA, 425 bp, Homo sapiens
tttcgtgccggagaggtcagtgggagcagcagggctgtgaggcccggccacacatcctcttcccccaccctgctgcctcccagatgcttctgggtagttcccggcccatatccccctcaaacctgagatgcccaatggctgcttctgtctggcccctcctggagctgggggcagagatgccagcctgagggccggtggtggggaagaggattgtccctggtgcccagggtgggcttggcctagggccctctgccccagcctcctgctccaggggctccgggtcagccggcagccccaaccctgggtcctggctctggctgctacctctcttccccctcatccctttcagggaagaggttgtgggtagggggactcccctgcctggtagcctcaaagcttcttagttcatccatttgcgacaattg

SEQ ID NO: 108333 - DNA, 427 bp, Homo sapiens
tttcgtgccggagaggtcagtgggagcagcagggctgtgaggcccggccacacatcctcttcccccaccctgctgcctcccagatgcttctgggtagttcccggcccatatccccctcaaacctgagatgcccaatggctgcttctgtctggcccctcctggagctgggggcagagatgccagcctgagggccggtggtggggaagaggattgtccctggtgcccagggtgggcttggcctatggccctctgccccagcctcctgctccaggggctccgggtcagccggcagccccaaccctgggtcctggctctggctgctacctctcttccccctcatccctttcagggaagaggatgtgggtagggggactcccctgcctggtagcctcaaagcttcttagttcatccatttccgacaattcca

SEQ ID NO: 108334 - DNA, 368 bp, Homo sapiens
  misc_feature (1)...(368): n = a,t,c or g
aatacaccgtgtgtacttgagggattaatgttgtctgggggtagtcagggcggcccagaggaaggagtttgaggacagctgtcagaggctccctggacagccagctctttgaagtcaggggctgtctctagctttctgtctgcacggggcctgatgcctggtaggtccttggtaaggatttgttgaagggaggagagaaggaaggagggaaagagggaggcgaggattgttaaaaaggagaggnnnnnnnnnnnnnnnnnnnnnnnnnnnnnnnnnnnnnnnnnnnnnnnnnnnnnnnnnnnnnnnnnnnnnnnnnnnnnnnnnnnnnnnnnnnnnnnnnnnnnnnnnnnnnnnnnnnnnnnnnnnnn

SEQ ID NO: 108335 - DNA, 467 bp, Homo sapiens
cctcttggaaaaggatctgggagcaggctcggtgccccactgccgctctctggacacccaggatttaagcccgcttcatttccgttcctgctttaacctccctcttgccctggaagacctctggggctcctccccatctcccaccagtccctctccagcccccaaatctcccccacccacctcggtatcccttggctggagtggcctacagctgtgttcaccaggagtgggtctgccactgactctgccatcccggccaccatggcatccgccctgggtgctcttcaaggtcggtgcccctgcacagtgccagccccgcggggcatgggtcaccttcccctgcctccacacagctttgcccactcctgtaagtgtcttaattaaggagctgtacagtttaattatgtatggacccagccatgtattcggccgctctagagcatccaagattcgtccgaggtgcattc

SEQ ID NO: 108336 - DNA, 427 bp, Homo sapiens
  misc_feature (1)...(427): n = a,t,c or g
aatacactgcctctttgacaaatggcaatgggactgagaaccacatgcaaaagaatgttgaccacctgaccacaccatatatgcagaaattaattcaaattggatgaaagnnnnnnnnnnnnggaaacttggccccnnnnnnnnnnnnnnnnnccctaaggcccttgcccccgccagggggcccttgggnnnnnnnnnnnaacccctaggggaacccccccaaaaagggggaaatattnnnnnnnnnnnnnaaaacccgggccctagggggcccccggcctttttttcccaatgccccaaaggggggnnnnnnnnnnngggggggcccccccacccgggggggttttccccccccnnnnnnnnnnnaggaactctgggggccgcacgaccccccggggcacaaaaaggaaccccctcccccctaaat

SEQ ID NO: 108337 - DNA, 456 bp, Homo sapiens
  misc_feature (1)...(456): n = a,t,c or g
cagagtattgagctagaagaagggagtattgtgttgaaaacccaggattttctacccacaaatcaggctcttctaacgaaaaaccaggatgttttactcaaagaccactgtgttctccctaaagaccagagtattctactcaaatatcaggaccaggacttcctacccagagaccagcatgttctccacaaagaccaagatattctgccaaaatatcaggaccagaattttctacttaaggaccagaattttttatctagaggccagcatgttctccccaaagaccaagatattctgccaaaatatcaggcccagaattttctacttaaggaccagaacttttcgtctagagcccagcatgttctccccaaaggccaaaatcttctacataaatatcaaggccggtngtnnnncgnccgctgtagagnttccnanaatncgtncggtcatactcct

SEQ ID NO: 108338 - DNA, 811 bp, Homo sapiens
gccggacctcccgtgtcgacgatttcgacaaggtgagcgagctgcaccaggaggtgaagaacaatctgctgaatgaggacctggagaaggtgaagaactggcagaaggacgcctatcacaagcagatcatgggtggcttcaaggagacgaaggaggctgaagatgtcttccgcaaggcccagaagccttgggccaagaagatgaaggagctggaggcagccaagaaggcctaccatttggcttgcaaagaggaaaagctggccatgacacgggagatgaacagcaagacggagcaatcggtcaccattgagctatctaaagaagcccaggacattagtgactgaggccacgcgagtatgtgcagaacacacaggagaagtatgagaaagggctgggggatgtgggcaaaaccacgccccagtacatggagaacatggagcaggtgtttgagcaatgccagcaatttgaggaaaagcgactggtcttcctcaaggaggtgttgttggacatcaaacggcacctcaacctggctgagaacagcagctacatccatgtgtaccgtgagctggagcaggccatccggggggctgatgcccagggaagacctcagatggttacgcagcaccagtggccccggcatgcccatgacctggccccagtttgaaaagtggaaaacagaccttcctcacaccaccaccaagaaggagaaacagcctaagaaggcagagggagtggcgctgaccaatgccactggggcggtagagtccacatcccaggctggggaccgcggcagtgttagcagctacgacag

SEQ ID NO: 108339 - DNA, 388 bp, Homo sapiens
ccctggagccggccggtgggggagcccccggaggcgggctgggactatgcccagtggaagcaggagcgggagcagatcgacctagcccgcctcgcccggcacagagacgcacagggtgactggcgccgcccgtgggacctggacaaggccaagtccacgctacaggactgcagccagctgaggggagaaggcccggccagggcaggcagcagaaggggtcccaggagccaccagaaactacagcccccaccattgctccctgatggaaaaggtcggggcgggcaagccagcagaccctcggtggcaccagccacaggcagcaaagcccggggcaaggagaggctgactggcagggcccgaaggtgggatatgaaggaagacatgtatt

SEQ ID NO: 108340 - DNA, 386 bp, Homo sapiens
aaaacaagaaaagctctaatcccggatttcacaggagccacgcttgctggcgaccacagctggtagggaaccctgtttctctgaggctgacgtacctctccttggtcagaaccccgccctcgtcctacccacccccactcagccccttccggctgctccggaggctgggagaccaaagcagcgagagctgggacccctcaccgccttccccacacccttgtcagggccgggcagcagtcagggcggtggtggcaggcgccagccgatgtctggtccaggagtccctggccaaccccagagatgaggctgtggccctgccaagcttcctgggctgcacctcctgaagggggacaccatcccattgtctatgtctgagccactgtatt

SEQ ID NO: 108341 - DNA, 378 bp, Homo sapiens
catgctgcttacaagaaactcacttcacctataaagatatacacagactgaaagggctggaaaaaccagaactcctctttttccatacaaacagaagccaaaaaaagagagcagagtagctatacttaatgtcaggtaaaataggtattaagataaaaattattaaaaagagacaaggtcattatataatgataaaaaggtcagacaatataaaaattatgtatgtgtgtatctatctatctatctgtctccacacatacctaacactggagcacccagatatataaagcaaatattatctgagctaaagagagatcccatcacaaagaaggcaagaaaccaaacaaaaacagaaaagagccagagagagagtgtatt

SEQ ID NO: 108342 - DNA, 439 bp, Homo sapiens
acatcccctctgcttctacgctgataccctaaaggatcctccctggaaaattcaactcccagcttcgcaacactgtcttagtttgggtagccccatgtctattcttggacttgctgtgggtggctgggagcagtggaacagcagatgtcactttgtccagggggtgacaagttgtcatctttctgtccccatcctgccttagcagcctccagaggacatcaaggcactgtcttggaaccggcaagcccaacacattctgtcttctgctcaccccactcgccaaggcagttgtgtgggatctcaggaagaatgaacctatcatcaaagtcagtgatcacagcaacaggatgcactgctcaggcctggcctggcatcctgacatagacaaccatgtattgcggccgctctagaggatgaagttacgtcgaggcagtgaatt

SEQ ID NO: 108343 - DNA, 406 bp, Homo sapiens
  misc_feature (1)...(406): n = a,t,c or g
aatacagtcctggttttgttttatagatatactatcttttcttgagtatacaaattataatttctttctttcnnnnnnnnnnnnnnngaaaaaaaatcttcctttggtgcccagggttaaagggaaggggccaaccttgggccaatggaannnnnnnnnnnngggctaaagaaaatcccctggcttaaccctccgaagaggcgggaaccaagggcccccccaacccccccgggcaaattttggatttttggaaaaaaaggggtttaacatggcggccagggcgggcccaaaattccgaacctatgggaaccccccaccttgggcctccaaaagggggggaataacggaatggacccccctggcgggcccaaaaaaaataatatttttttaaaaattttgggcaggg

SEQ ID NO: 108344 - DNA, 384 bp, Homo sapiens
  misc_feature (1)...(384): n = a,t,c or g
aatacatgcacctctggatgtgctaatctgagaagaacatatcacgtatgtagtattccagtcaggaatatctaacttgaannnnnnnnnnnnnnnnnggaaacggagtttggcggccccccaaacgggagggcaggggccccatctgggttaacggaaagcttggcccccggggtccaccccaggccccggcctaacccccccgggaagggggaacaacgggggccccccccctcccccagtaaatttttggttttctaaaaaaaaacggggttcccccgggtaaccaaggagggtctggatccccggacctggggacccgccggcctaacccccccaaagggcgggaataacgggggggaccccccgcccccggcctaataa

SEQ ID NO: 108345 - DNA, 453 bp, Homo sapiens
gggtgcgatctgacatgaactcgaatcctctagagcggccgatacagagcgccacccgcgcctcgggcgcccgcagaagccggagccagttctcagccctgatcgccgccagccgcccaggcttcggggaaggagggaggggagaataatgcgcccctctttcaataaacgccactgccaaccactccaacagacacactttcggtcccccgccagagctccggtgcccccgagtgaccgctttctgcgatcgcgtccgccgggaccccgtccctctttccccttcagacttcagggagggggaggcgctccgcattagcggggcagttcagcaaccccgaccccacccgcgtggctccaggcccaggggtccgatcacttccccgtccgaggtggtggacgccaattcgcctaaaaaaaccctggcaaaagagcgcggacccttcactacag

SEQ ID NO: 108346 - DNA, 407 bp, Homo sapiens
  misc_feature (1)...(407): n = a,t,c or g
ngttttttcctaagacaaagaacaaaacaaggatgtccgctcttgctgcttgtctagccaaggcagttaggcaagaaaaagaattaaaagcatccagatggaaaggaaggcgtaaactctcttttgcaaggtgattttatatgtcattataaggagtttacacacacacaagaaattttagagataataaatgagttcagcatggttacgggacagaagactaacatacactaaccagttgttcaagacaattgaataggggagaatagtcatttcaacaaatgctgctggcagaagtggatatgaacatgcaaaagaatgaagcatatggatatccatatttaaaaatgaactcaataaaagccctacatgaagagtaaaaactgtaaaactctgagaagtgtatt

SEQ ID NO: 108347 - DNA, 441 bp, Homo sapiens
  misc_feature (1)...(441): n = a,t,c or g
acccgccccaccccctcgggggctgtaggcagcggctcccgcgaaccctctgttgtacaccttcctcgctggggccctgtggcctggcgcccctcacacctgccttgccccagcacccccagccctccctctggggctctcctggagctgccgcccacgaccaggtgtctgtctgctctgatcccagctcctgaccgggcacagggctgcttctgtaactagaaccgggggcggcgttaccagggcccttaatgtgggtgctgtgcgggtgtctccagagctgcctgagccgccgggcaggctcctgggccctgtgttcctgctgagcagtggcgttggccccgtcccagtggtccaggtgagcccagcaggagaaaggcncncccccagaatcccccgcctgtattgcggccgctgtggagtttccccacaagaacgctc

SEQ ID NO: 108348 - DNA, 800 bp, Homo sapiens
cattgttggcctcacatgagtagtttccagaatgttctgcagtcagagagaggttgaaagaagcttctcctccagagggggctgagctgctccccagggtgacatcctcatgataaaaccagtacaggattgggggagagcctctcggggcctcacagtgaagctccagcaggtcccccaccacagcctgggccctgggaaccctgagggtgaggatggggcgagacactggaactgagagagaaaatgagttagggacacatgtatttttaaaattagaaacagctctttgtcctagccagaacaatcagacaagagaaagaaataaaggacatccaaattggtaaagaggaagaagtcaaattgttgctgttcactgatgacatgattgtacacctagaaaaccctaaagactcatccaaaaagctcctaggtctgatgaatgaattcagtagagtttcaggatacaaaatcaatgtacacaaattagtagcactgctatacaccaacagtgaccaagctgataattaaatcaagaactcaactccttttacaacagttgtaaaaaataacaaaataaaaatacttaagaatatacctaaccaaggaggtggtagatctctacaaggaaaactacaaaacactgctgaaataaatccgtaacacaaacaaatggaaacacatcccatgctcatggataggtagaatcaatattgtgaaaatgaccatactaccaaaagcaatctataaattcaatgcaattcccatgaaaataccatcatcattcttcacagaattaa

SEQ ID NO: 108349 - DNA, 388 bp, Homo sapiens
  misc_feature (1)...(388): n = a,t,c or g
aatacaggcttggtgatctgggaggcgtcatctgttgaggaaactgggagaagcccaccaggggtgaagggaccgcatcaaggggtggcgaggggcccatggggcctggcatggcgagctggttgggtgaagtctccaacgggcactggctgctcaactggctgctgtccacggtcatggcactctgcctctcaacaagcatctcgctgcttctctcgtatggggatgcgcccaaaacgcacacatgcttcttgacatgcccacagagagacacttcttgaagctacgttgctgactgcggttagcgattgaagcggactatacagcaattctcattcttcaaacaccctttgaactggaagctttgctagatgctccgacggaaaan

SEQ ID NO: 108350 - DNA, 554 bp, Homo sapiens
actttcatccatttgcctgtaggagaatcttccagggccccagagcagtgcttgaggacttattacagatcctttgacatctctactaggctgcactttcacaaaaggcaagagtattataaagtgttttgtaactttatgtcaaaaatatgaacctgtcagagccagatgtggtggtacctatcattcaaactacaacagggctggtgaggcgtgaggatcgcttaagcccagcttgttatgattatgcatgtgaatagccaccgtagtccatcttgagcagcgtagcgaaacacagtctcttaaaaaaaattgcgacctatacatttcatataagttaaatacacatcttccctatgagccagcaatcccacatctaggtatttatccagagaaataaaagcatatatcgataaaaagacatgtacaaaaatgtccgtaacaactttattcatggtcaccaaaaactataaactgcccagatgtccatcagtgggagaacggattaataaactgatatattcatctaattaaatactactcagcaacacaag

SEQ ID NO: 108351 - DNA, 381 bp, Homo sapiens
atccaccactaaattgggctcctgtccccacgccttccttgcgtcccagaccagcatgggggccgtgctccacctcccctcccgaactggactcctgtccccacgccttccctccgtcccaggccagcctgggggccgtgctccacctcccctcccgaactggactcctgtccccacgccttccctccgtcccaggccagcctgggggccgtgctccacctcccctcccgaactgggctcctgtccccacgccttccctccgtcccaggccagcctgggggccgtgctccacctcccctcccgaactggactcctgtccccacgccttccctccgtcccaggccagcctgaggaccgtgctccacctcccctccctgtatt

SEQ ID NO: 108352 - DNA, 865 bp, Homo sapiens
tctaagaactgccgggttgacccagcgcgtccgcttatttggtttattgaagaagctatttcaggagaagtcttctaataggaaggagcatttaaaaggggggggaatgtcagcaactatggaattagccacgctctctgcattctttggaaattgaccaatatttgatatacctggaaggctttatccagtcagagagaaattctgcaatttgattggtccacgagacagagaaaatactgcgtatattcaagcgattgtgaaagtcaccatggatatccatttgaatgaaatggctggagacatcttggtttttctgactggccagcttgaaatagaaaaaagttgtgagttactttttcagatggcagagtctgttgattatgattatgatgttcaagataccccccttgatggcttgttaatattgccgtgttatggatcaatgacaacagatcaacagaggaggatatttttgccaccaccacctggaattagaaaatgtgtcatatccaccaatatttctgcaacgtctttgacaatagatggaatcagatatgtggtagatggtggcttcgtgaagcagttaaatcacacccccagattagggttggacatcctggaggtggttccaatttcaaagagcgaggcattacagcgaagtggccgagctggcaggacttcttcaggaaaatgctttcggatctatagtaaagatttttggaaccagtgtatgcctgaccatgtgatccctgaaattaagagaactaagtttgacatctgtagttctgaccttaaagtgccttgccatacacgatgtcataaggtttccccatttggatccacctaattgagagacttattt

SEQ ID NO: 108353 - DNA, 388 bp, Homo sapiens
  misc_feature (1)...(388): n = a,t,c or g
ntatttcagcattatgtggtaaggcaatggaattgatctggcaaatgtcttttttttcataccagtccataaaggcagtttgctttcagatggcagggccagcaacacaccttcattgtcgtatctccggtgtgtatcagctctccaactctatgtcataattcagttcatggggatcttgattacctttcccttccacaaaatattacactgattggttatatcgatgacattatgctgatttgacctagtgagcaagaagtaggaactacattagacttagtggaaagacatttgcatcagagggtaggaaataaatatgcctacaattcaagggccttctaccttagtgaaattggtagggacccagtgacatggggcctgtatt

SEQ ID NO: 108354 - DNA, 429 bp, Homo sapiens
  misc_feature (1)...(429): n = a,t,c or g
tcgcccgggatattggcagggatggctccttctcatctctcagctcaagctttctcaggctgcccagaggaccaagtctccctctgtccctgtccttcggatcgcctccctattcacctcctgcgtcctcgcacaagaactcaagtccttaggaggcagggccaaccctgttccctcccaggacccgagaatgtagcggggtccctgaggtgctgatgtccacatggacaccgaggtcagttccgggccaaagcggccagcgcaggggctgaccactcagacctcactcctcgcaggggtgagcgggcgacgctgcctcacgtcattgtcctgccctccaaggcccgcgctcgtccactgacaggatgccctgacaccgcagtgcgggggcggccgctcggagggtgcccctaacgtaagcgtcacttn

SEQ ID NO: 108355 - DNA, 1059 bp, Homo sapiens
  misc_feature (1)...(1059): n = a,t,c or g
ctctgggccaatatggcagcgcccagcaacaagacagagctggcctggagtccgcggctggccgcgtgagtaggtgattgtctgacaagcagaggcatgagctgggtccaggccaccctactggcccgaggcctctgtagggcctggggaggcacctgcggggccgccctcacaggaacctccatctctcaggttcctttgcccaaagactcaacaggtgcaagcaagatcccccccaagccccacatcgtaggaatccaagaagtcccgatcaagcaaggccgcccttggcccgccacaatccaagcccggcctgtcttttgttgagggccccttctccctgtggctccgcaacgaagtgtgtgtattaccaacatcctcagaagctgacttgctgcccccggaagaagaagggaagtggaagagaacgccggaggagtgggaacctctactacccgatggcagctggacctggagtatgtgaggagtggcttgggacaactacgagtttgacatcaatgaagtggaggaaggccctgtcttnggccatgtgcatggcgggtgctcatgaccaggcgacgatggcttaagtggattccagggcctgcaggagaccaaccccaaaccttggcccaaaatcccccgtggtcttcccgcttcgccgggtccaacccggggagcttccagacatccttctgcagggctggaggagcccgcccctgcccgaggaccacccaggaaagaagacgacaaacctgcaagcgacagcagcagggcccagagctaggctgagccggcgcgagggcacgggctgtggcccgaggaggcggtggactgaaggcatgagatgccctttgagtgtacagcaaaacaatggttttcctgcttggggctctcttccctcatctctagcagtatggcatcccctccccaggatctcgggcttccagcggttggccgggggggccccccccggaatttccaggcccctttggttctccgaattcaaataaaaacggggcgggagcgctgttggttgtgcgcaacaaaaaaaaaaaa

SEQ ID NO: 108356 - DNA, 370 bp, Homo sapiens
gggcgcgacgcactcaaaagcagcgtggacgcggtcaagtactttgggaagggcacctacaccgactgcgctataagaagggctgacagctctcggggggctcccacctgaaggagaataagtacctgattgtgggaccgacggccccctgagggctacaggaaccctgggggggctggaggatgctggaacgagccaacacctggcgtaaagtcttctcggggcatcacacccgaccacctggaccggtctgacatatcgcacggaccaccgaccgggcacttccggcggtgatgggccgagccgcgaccaaggagccataccagaccatcacccatcgggcatgtcaaataacgggagcaggtctgtc

SEQ ID NO: 108357 - DNA, 431 bp, Homo sapiens
ccccaccctggggaagtccccgcaccacccagagctcccctgtgtccatcagcagcgggctcaccagcgactcgtacatggtggacagcccggtggtcacaggtgtgtccggtatggcggtggcctctgtgatggggagcttgtctcagagcgccacggtgttcatgtcagaggtccccaatgaggctgtgtgcaccatgtccagcaccgctggccccaaccagcacctcctttcacgtgacgcctctcagggcctcgtcctgtccgtgagctctgatggccacaagttcgcctttccctccacgggcagctcagagagcctgtccatgctgcccaccaacgtgtccgaatagctggtcctctccaccacccttgtcggtggccggaagattacaaaaaccgccatgaactttgaccccgtgtatggcggg

SEQ ID NO: 108358 - DNA, 382 bp, Homo sapiens
aatacaacctccccttattccgtgccagtcggtgtaacgagggggatcagggggcctaaccccccctgcctggaccctgctcccttccccccttttccgagtgcgcgcgcagctttgctcttcacgcctagtctcgcgcccaagcgcctacccgccaagagcgccctactagcccgcgagaccaaaacaagaggcccgcgagacccgaactactcgaggactcaaccgcgcgtgcgccgacccctttctcctccgccactaccacccggccgcgagcgcgcacggtgagcgcgcgttcccttcgcccgagaaccacgcatgcgcactccgtcaccaccctggttgcgcgcgcatcagactacgaaccaacttaacggctctg

SEQ ID NO: 108359 - DNA, 397 bp, Homo sapiens
  misc_feature (1)...(397): n = a,t,c or g
ntgtccacccagtccccggctccaagaaggggttgcaataagtccttcttctctggggagccccctggaccttatccttcatcttaccccggacaccccaaccttntggtcccccctgttccaagaaccatctcgtccccatggtcctcattctgtcctttccttcccttcacccctgggcacccagtttatatctccaccccagtcacttctccgcagaagctataatgaaccccctcttcccactccagtttccccccaactgaagtcccctaagtccccagagttaagacagtcacgtactccccacaaatgtctctccctagtcaacactccccagcacaccccttctggccagcccaagcccgctaaggcccacacctgtcccccatgtatt

SEQ ID NO: 108360 - DNA, 395 bp, Homo sapiens
accagagcccagcatcccaacccctcccactaggcgcagccccttctgagtcccccccatctgagctacccatatctcctaccactgctcccaggacaggcacatttttcagcatctatcatgtgccagaaacggtgctgcatactgggaataaaaagatgaataagacattgtcttttccctcagggactccatagtccaggagaggagactggcagtgaaagaacttacggtatcggctggagataacctaattataactttacccgacaatgaagttgaactgaaggcctttgttgcgccagcgccacctgtagaaacaacctacaactctgaatggaatttaataagccaccccacagacaaccaaggtgaaataaaacaaggactgtatt

SEQ ID NO: 108361 - DNA, 439 bp, Homo sapiens
  misc_feature (1)...(439): n = a,t,c or g
acagggctacttaggtaggaaanctagagcgggcgcaaacagggtgtgnntntntatatatgtatttgttatttatatcaaagacaccactgcaaggggcggaggaaaggatagccttttgaattgatggagtttaactaactggatataccacatgagaaaaacctgaagcttgacccataagtcatagcatatacaaaaataattcaaaatagatgataggcctaaatgtaaaaagtaaacattatacatctagaagaaaatatataagcatatatatatgactttgggggaggccacgatttcttatatggatacaaaaggcactactcataaaagagaagactgagatattagacttcactaaaattaagaatttctgttcatcaaaagacagaagtaagagaataaaaataaggtcataggctgggagcagata

SEQ ID NO: 108362 - DNA, 468 bp, Homo sapiens
gaccatgagaaactttttgaattaatattaatggaagacattaaatttcctcgaacactctcttcagatgcaaaatcattgctttcagggctcttgataaaggatccaaataaacgcttcgactttaacataaacaaaaacgtcaaccagtattcatgttggaactaatcgtaagtttcatccattagtggctttggagtacagcagaaattaacaagttttctgtgagaatcagccttggtggaggaccagatgatgcaaaagaaattatgagacacagtttcttctctggagtaaactggcaagatgtatatgataaaaagcttgtacctccttttaaacctcaagtaacatctgagacagatactagatattttgatgaagaatttacagctcagactattacaataacaccacttgaaaaatatgatgaggatggaatggcctgcatggaatggcgaagcgaaa

SEQ ID NO: 108363 - DNA, 233 bp, Homo sapiens
agtgtggctcctaagccaccccggggccggaagaagaagcggatgctggaatcagggctgcccgagatgaatgacccttatgtcctctcccctgaggatgatgatgaccatcagaaagacggcaagacctacaggtgccggatgtgctcactgacattctactccaagtcggagatgcagatccactccaagtcacacaccgagaccaagccccacaagtgcccacatgtatt

SEQ ID NO: 108364 - DNA, 478 bp, Homo sapiens
ccaggtggagcattacgagttccagacgcgccagctggagctgaaggccaagaactatgccgatcagatttcccggttggaggagcgggagtcggagatgaagaaggagtacaatgccctgcaccagcggcacacagagatgatacagacctacgtggagcacattgagaggtccaagatgcagcaggtcggaggaaacagccagaccgagagcagcctgccggggcggagcaggaaggagcgccccacctccctgaacgtgttccccctggctgacggcacggtacgtgcacagatcgggggcaagctcgtgcctgcgggggaccactggcacctgagtgacctcggccagctgcagtccagctccagctaccaggttttgtagccgtgccgtggagtgagaggctcctccctgttgctggtgttccccgttcactggggcgggagcctcgtctgcaggcagcccttcacggctctg

SEQ ID NO: 108365 - DNA, 408 bp, Homo sapiens
cgaaaaaggcagtgaattcaatagaaaataactttgcagaataaaatctcaggtgtgtttttttagtgccacagtcttggatgatgggcttctagatgttgagtcctagaagctctcaacatctcttcttaattggagaaagtgttaagccccaaagtagctggagcagtacatcttcaatttttgacaagaaagcaggaacttggttactttgagtgttattcattagtttctgctttcattgagaatgcagcaaaagccaacgaggctgctgctaactccttgctggacatcttctgccactatcacaggaactgtgatctcactggacaattaactagggagcctttcatcttgaatgactgctgcacaaatgatcttcaaagcattttagccaccagatgtatt

SEQ ID NO: 108366 - DNA, 406 bp, Homo sapiens
aatacagtgggtgagcaggtccgtcgtcaccacagtctctccagtggcgctgtctgtagtcaaaaccgctggggtggcactgatcacagctgtcgtcagtggtgtgtgtatggtgttggagagctgggcgaactctggatgcttctttcgaatgtgctggaccatcttggtcttgctgctgtactgcttggagcagtggggacagcagacaggaggggtggcgatggtgcccgtcagctgggtgtgtgtgctcagcatggggtctggctctccaggaccagcgggtcggagcttccgaatgctcggtgggagctctgcttctgggtggttctttacaatgggggctttgcgcttggtggccttttataaccctatcgcaaactgacaaaagtatcactattggggg

SEQ ID NO: 108367 - DNA, 398 bp, Homo sapiens
ggcaggcacttccactcccacccagaaccctcatccccaacatcagctccctggcctaactcctgcagcaggaggaaaagtgcctgagctgagtgcttgactaccattaccactgcacacaacttagtgaaagagtggatggacatcccccagcccctgtccttctttccttgttccccagctaattcctttccccagcccctgttctcaacgatgtccatgtctatagctcctgctccctctcctaatgacgttctagttcctcttccttccctcaactccacttaccaccccagcccctgcacccggcagccccgctgatccccagtgattcagccccttatctcagcatctcccactgattccccagatcctggattctgtgaccacccatgtat

SEQ ID NO: 108368 - DNA, 849 bp, Homo sapiens
cacggttcttatagtgggacgcattgccataggggtctccatctccctctcttccattgccacttgtgtttacatcgcagagattgctcctcaacacagaagaggccttcttgtgtcactgaatgagctgatgattgtcatcggcattctttctgcctatatttcaaattacgcatttgccaatgttttccatggctggaagtacatgtttggtcttgtgattcccttgggagttttgcaagcaattgcaatgtattttcttcctccaagccctcggtttctggtgatgaaaggacaagagggagctgctagcaaggttcttggaaggttaagagcactctcagatacaactgaggaactcactgtgatcaaatcctccctgaaagatgaatatcagtacagtttttgggatctgtttccgttcaaaagacaacatgcgggacccgaataattgataggacttaacacttagtatttttttgtacaaatcacttgggccaaccaaacatattgttctatggcatcaactgtttttgaagtcatttggatttcaaagcaatgaggcagctagcctccgcctccactggggttggagtcgtcaaggtcattaacaccatccctgccactcttcttgtagaccatgtcggcagcaaaacattcctctgcattggctcctctgtgatggcagcttcgttggtgaccatgggcatcgtaaatctcaacatccacatgaacttcacccatatctgcagaagccacaattctatcaaccagtccttggatgagtctgtgatttatgggaccaggggaacctgtcaaccaacaacaatacttttcagggaccacttc

SEQ ID NO: 108369 - DNA, 400 bp, Homo sapiens
aaattctttcatgaaaaagcatgccttactcaacatcagagaacccacacaacaggaaaacccagcaagtgtaatgatagtgaaagagtcttgaaggaatcttgcctcactcccaatcagagaattaaaacaagattaaaacaagagagaaaaactgtaaaggtaataaatgtgagaaacctttctttgagaagttgaaacacactcaacatcagagaaggcacttggggaaaaaaaataatgggcgtaatgaaagtggggtgcctcaagtaggaagtcacaacttacacaaagccagagagctcacaaaaaaagagaaaacctatgactgcaataaatgtggagaaagcttctgtaagaaaacagatctcagatagcatcagagcacacacactgtatt

SEQ ID NO: 108370 - DNA, 853 bp, Homo sapiens
cctttctctttccatctctggggtgtcaccaagcaaggctaccgctgtcggggtgagtggggtgtcagtgagtgggagggaagccttggcccgcaggctggaagaatggatgacacagatcggacccctgccgctgccttcccccagagtgcgggctgtgttgccacaaacactgcagagaccaggtgaaggtagaatgtaagaagaggccaggggccaagggcgatgcaggaccccccggagctcctgtcccatccacaccagctccccatgccagctgtggctccgaggaaaatcactcctacacgctatccctggagcctgagactgggtgccagcttcaccatgcctggacccagactgaatccccacacccttcctgggaaacagatacggtcccctgcccggtgatggacccaccatcaactgcatcctccaagctggattcctagacatctcttggtctcctctcttcctcactcccttcccccagtcagtcctgagtcctgccgtcagactctggcaggcgtcccagaggagcatcaactccaggagaacagggatttctatcaatgtcattcactgctgcatccccagtgcctagaacagggctggcaggtggtaggcgcctgacagatgcttgtctgatgcctgaatgtctccttacccatgcccacggcacaggatagatgtgctatagggcaaagaactttgagggtcgagcagcaggggcccattcagtcccagggagcagagacccccccaaccccttcacaaaccccaacacccctgacttggcccccacagagagaggtcctacagctgtcataaattaaatttattctctggaaaa

SEQ ID NO: 108371 - DNA, 381 bp, Homo sapiens
aatacaaacgtgggtgaaggcgtggcccggggagccgtgtagccgcgtgtggtgtccctgcaggacaaggtcacgcagctcccggccatgcagggccttggagtgggctgtatccaggccagtcaccaagcagccagcgcctatgtgaatggggccctgcaggtggcagtgctgcaggacgctcccaggacccagctggacagggccctccagcaggcagctgaccacagagctcccggccgccagaagctgctgctcctccacctgggagtgcacaatctgggccccaggagccccggggagtgtgaggctgagcaggaactcactggctgaggaggtcatgtagctgtagctgccgctggagacataggccatggtaag

SEQ ID NO: 108372 - DNA, 383 bp, Homo sapiens
aatacatggggtcatttccgctgagaccataggccacagaggaaaggaggcctggtggcaaggacagcgcagcacaggcggcagtgagtgcaaaggccctgggggaggggctgcatcgggggatgagggcaatgcgggctgaggcgcagaggccaagggggtgatgcacgcatgagctaaaacaagcccaggccacacagtgccttaaggcatgggtcaggggttggattatcccctgcagggacaacaggagcctcagggtctcaacatgtaggggctgtgcaaggcaggagggtcaggcagaggagaccaggaaggggcagccagagaggacagacttccagacctccagcaggggtgggcgtcctctgtatgcacatgaa

SEQ ID NO: 108373 - DNA, 601 bp, Homo sapiens
gtcaatggaaatgctggagaccagtggagtggcttcggcagagatacgacagcggagaagaggtggatttggttaaggaagcagatgttccctcagctattagccttcttagattttttcttcaagaacttcctgaacctgttatccctggccagtttacatattcacttgatgcagctttctcaagattataataatgaagatgaatttggaagaaagttgaggttcctcttgcaacagcttccacctgttaattatagtttgttaaagtttctgtgtagatttttagccaatgtagcatcacatcatgaagaaatttggtctgcaaattctttggctgctgtctttggtccagatgtcttccacatttacacagatgtggaagacatgaaagagcaagaaatagtgagcaggataatggctggacttctggaaaactactatgagttttttgagaatgaagaggaagatttttcatctaatgatttgagttcaattactgaacaggttaatgaactttctgaggaagaagaggaagatgaaaagctggaacatattgaagaacttccagaagagggtgcagaaaaatcaaatgacatgc

SEQ ID NO: 108374 - DNA, 884 bp, Homo sapiens
aaaagtgttctttccgtgttcgtcgggaatcaggattattgagaggtgaaggagccaggtggcttcattctggcggtgagaggcccatgaccacgggagtgagagctggtgtggcgaggcccggctctcctgcggtgtggctggtggcctgccgtggccaagagcatcttctgggtggatggaaccctgcctggtcacatttggccagagacacacctgggcccttcagggggcttgagctggagactgagctggggctggccgggacgttgacaaggcaggacagaggcggcccctccgctgctcctttttggaatgcgagctcccaccagaagaaggttccggcacgaatcccatccccacgtctgggccgagaaagcagcccgggtccggaaggtgtagagagtcccggccttcactcagctcacagggcgtgccagggcggcaaacaccagaatcttcccagaaaccccagctccacccggcccacgcagcttccccatcccagtcccttcaactcaaattcttaccccaacacgcgtttcctgtttgttttgagacaaaaatcacccaccttgtcaaaaggcaaggtggctccaagaggggtcaaggaccccccccccccgcccccgctccacccctggagcccacccccatgggcaaccgcgtgccgacctgcacgtgggctgtcttcacaggtctgatgtgaaaattcaatcacgacgttaaccggctcgagagagcgtccggcctagaggctcattatctatttattttaccaaacgcgaattgagacggactttgacaaaacacgaaatggtaatgtgaagctaagagcagagagtgaccaacagtaaacaacacgcgcagacaaaaaaaaaaaa

SEQ ID NO: 108375 - DNA, 430 bp, Homo sapiens
gcgtcgtgaggtaggaccctctagagcggccgcatacatggctgggacgggaagctttttatttggtggtgtccaaggtcctgaggaacctgtgtcccaagtccatccaggtaagtcaggccgcctctctgggaggaaggctgggccaagagggcacgtggtgtggcccagttccggggacgggggtctgagctcagggactggcactccagcaggaggagagaagccagaggaccaagcacagttggggcacagaggccgggcagggacaagcggccccgggcactgaagctggctgggcagggatgagtggtcccagggctcgctgcagagctcggggacccagagggcagagagtccagactggggccttcagcggcagatgaaaggcttaagcagagtggacatcacaggcaggcagcagcgggaa

SEQ ID NO: 108376 - DNA, 396 bp, Homo sapiens
aatacattggtgggagaatgggaaggtttttggcatgaaatgtgcagggaacagcatggggaacagtgcagggaaccctgcagggaacagcatggggaacggtgcaggaaacagcatggggaacagtgcagggaaccctgcagggaacagcatggggaacggtgcaggaaacagcatggggaacagtgcagggaacagcatggggaacagtgcagggaacagtgcagggaatgcatggggaacggcacatagaaaagtgcatggaacagcatggggaatagtgcagggagcagtgtggcgaacagtgcagggagcattgcttggaacagcatggggaacagtgtttggaacagtgtcaggaattgttggggaacgggaccgagaaaactgcctgcg

SEQ ID NO: 108377 - DNA, 566 bp, Homo sapiens
gcgctgcaggcagggcaggcgctcaggctcctcgctggccaggtccaaggggctactctcgtggatccggtccctccgattaacgtcggccccgtgatgcaccagcagctccaccatgtccggctgggttccgcaggacggcgatgtgcaaggccgtgtagtaggtgactgggtcttcaaagttgagatttgcccccatgccgcaagagaacgtcggccgcccgcgtcagccccagctcagccaatcttgagcagggcgttgctgacgccttcctggtaaaagggagagtgggctttcctctccagcagctcagtgagaacaatggattcggctctcctcgctggcgacataactgggccggtccagagactcctgccgctcggggtcctggatccccagggagcccagattcgcatccaccagcggctggtactccgaagatgatcctccggaagccgtgcaggaacggcatcgccgcgggccccgcgcagcagggcggtcgcgaattctgccgaggcagagatgcccagacgccgaccggaacgggccggctgccgaaatgagg

SEQ ID NO: 108378 - DNA, 429 bp, Homo sapiens
  misc_feature (1)...(429): n = a,t,c or g
naagtgctgcgtcgttaggttgagccacagagcggccgcaatacatggaggtgtcaatgggcttgtgattcagttatagctgagctttaggaagattgataatgtgtttggcgtggatggatgtattcatcacgttttttattttctgtatttcctgatactttgacatcttggggccttaactgacccttgaagaggctgccctcccaggtccagccaattcctgaagatagtaaaccctggcctgcaagtgcacctttcatgtgcaagccgacacacctcaagcctacaccccaacaatctctatggagccctcatgcttcaggccaccatcccctgcccccaaccaccccaaggccaggtcccagacaaccaaggacataccccatgccccacaggcaccaaatcactcaagctgattccaagccg

SEQ ID NO: 108379 - DNA, 425 bp, Homo sapiens
cagcctgcagtttgacccctgaccctcctctgaacccgttcccccaacgggatctggcagtgaccaccagaacctggagcccacctgagtccagacttccctcaccccttaggactcaccccaccacggcccccaaccttagctgtactgctgtctacaccctgagcagtgtggagtctcccagcgcccccagctcctcgtcttcgggcaggtctgctgtgcgcgtgctgcagatctccataggcaccctcactttgtgctcgggggcctgtcccaaggcctcgagcgtaagaggccacaagggtgcaccagtgcatgagcccaccactctcctggttggcctggtgctccgccttttccagtacatatccaaaacaacacattgaccgggcacgtactctgtacgctatacaggatacaagcga

SEQ ID NO: 108380 - DNA, 383 bp, Homo sapiens
cgcctgttgctcaagtttctgccccccgaaagcgtgaccatgttgactgtttcgcgagctctgtggggccccataatcttccaggaatgcgtggaagaccagcatcgtgtcggtgctctcctttccagttttcaaacaggctatattggggactccccattttgcaggaaacaggaatccatcatcaggccgtgatgcacgggatgtttcttttctctgtggtttcgctctcgttgtctacgtgaaaacgaacgagatgaacacaactgcgtgtgtgagtctatcacggcaaccgtgacacccaggcgttggcaatagagttggcagcctgatcctgggacaaaggtactgaaaaaaatccagacacaccccaccactgtatt

SEQ ID NO: 108381 - DNA, 566 bp, Homo sapiens
agagggtgcccgaattatgtagcaatttctgcctccggtatattagctgttgaacagggaaaatgcctatcgatttggtgataccggatagagaaggaggatcaaactcagtcagtcaagatatatcaagatcagcgactctagctgaccagccctcttggaacagagatcatgatgacacggcatctactcgttcaggaggaaccccaggcccttccagcggtggccacttgtcacacagtggggtcaacaccagtgagcaaggtgatggtttggacaacagtgtagcttcccccagcacaggtggcgatgatgaccctgataaggacaaaaagcgtcacaaaaagcgtggcatctttcccaaagtagccacaaatataatgagggcgtggctgttccagcatctaacacacccttacccttctgaagaacagaaaaagcagttggcacaagacacgggactcaccatccttcaagttgaacaattggtttattaatgcccggagaagaatagtgcagcccatgatagaccagtccaaccgagcagtaagtcaaggaacacctta

SEQ ID NO: 108382 - DNA, 402 bp, Homo sapiens
ctccttgagctgagcaaacatctgtctgtagtccactgacctctccatgtatccgtctgttgtgcactgacctctccgtctatccatctatatagggtcaaaggacctctccatcaatccatgtattgtccactgacctctccatgtatacatccatctattgtccactgacctatccatctatccatccactgtccactgacctgtccatctgtccatccactgtccactgacctctccatcgatccacctattgtccagtgacctctccgtctatgcatccatctaatgtgcagtaacctctccatctatccatccatatattgtccactgacctctccatctatccatccagtgtgcactgacctctccatctatccgtcttctatccaggcctgtatt

SEQ ID NO: 108383 - DNA, 368 bp, Homo sapiens
cctgggtgggggtaaatcaggggtgctgctattcccccagctacatggaccagccctgccttgagaccgtcaaccgcatcaagttgtacagtgagtccctggtccggtatggcaacagcccatatttatacccgctctacggataggacgagctgccccaggttttcgcaagattgagtgccatctatggggggacatatatgctgaacaaacctgtggatgacatcatcatggacaacggcatggtggtgggcgtcaagtcagagggagagatacataccggacccgtgtgcggaaggctgtccagtttatccgcatcatctgtatccttagccaccccataatgaacaccaactacgccctgtatt

SEQ ID NO: 108384 - DNA, 354 bp, Homo sapiens
atctccaccattcctctccgtcctcgtcccaggatcccgacactcctacctgtcagagttcagagctgcattccttcccgtcctcagcctaaatccccccatttctcctcgtcagtattccgacgccgccattcctcccccttatcggcctgagggcccttcattcctccccgccagcgttctgagccacaattccttcccatcctccgcctgagcgctctccacgtccagccccaaggctgtctcaccagtttggcaccaggccggtatcttccgccactctaggcccgtggacccatggcgagggtccctcctgcacctcccgcctcgccctcctccccttcctcctcctcc

SEQ ID NO: 108385 - DNA, 570 bp, Homo sapiens
ccctcactctcatgtaaatgcaacttggggcgatgcaggatagtgtccagcattcaggaaacagggccttggtggaaagagcggccagccaggagaatcaagtctctaggccttttcagagccgaaatgcagccaagcaggaaggcggacaggcgcccagggctcctggggcaaggagctgccccttccctcctcctgcgaagagcggtcgccaaccgctcccgtgcctcctcttctagcccaaggagttcgcccgggccatccctaaggccaacagcagcccccagggctcttcacaggtcataagcccctctgagcggcgacagtcctcgcatccagcccgggtcagggagcgggggtgactgtccccagcacggcggccagaagaccccaaatgcggagcctgcccaagatggcggccacgactacgccgcgacaagacggccccgagctcggtgtgcccgagcttggagcccgccggaccgcaccaacacggggacctcccctctgccagtcccaagacggcgccaccgcctccaaaggccatgcccgccgtcgggatggcggccg

SEQ ID NO: 108386 - DNA, 374 bp, Homo sapiens
aaggatgggaagaggtgtgtggctgtggattactgtgcctcagacaaccacggatgtgaacatgagtgtgtaaatgctgatggctcctacctttgccagtgccatgaaggatttgctcttaacccagataaaaaaacgtgcacaagtaagttacacacacatgcacacacagagaaatatttgctgttactgctgtggtgactgtgaccatggaactctctcaagtatagattagcaatataattatgtcatgggggtctaataccttttgccccattcctcctctgtcaggactttcatgacttggcttaagaccatagaccactgtatctcaacatcactaatcaagaaatatgatgaaggcaccatgtatt

SEQ ID NO: 108387 - DNA, 401 bp, Homo sapiens
aatacagtgcagctgcatgtgtacctctgtgtgtctgtgtatacctgtggatacctgtgtgcacctgtggatacctgtgtgtgcctgtgtgctgccgtgtgtctgcatgcgcacctatgtgtgcttgtgtgtccctgtctgaatgagcacctatgtgtgtctgggagtgcctgtgtgagcacctgtgtgtaaatgtgtatgccacggcacatctgcacatgcctgtgcctataactacattgggcagcgagctgtctggggtgtgctggtcaacaagcttccctgaagcaggtggccatgtggagggacagcatgtctgtggtttcacatttgtccccgtcatggccttgtctgtccacttgtttctgtgggaagcaccgggccccagaggccggggtgag

SEQ ID NO: 108388 - DNA, 443 bp, Homo sapiens
gaattccggtgcatttcccctgacacctcccagcagtgctcagcagccccactgaccaggtccctgctgaccagatcccgcacatcaggtcctccctgaccacactctcactgattaggcccccatcaccaggccccactaactarattcccgctgccaggcccacagtgtccaggaccccactgacaaggacctcactgacaaggcctcactgaccagggcctcactgacaagacctccctgaccacattccaccaatcatgaccccattgcctggccccacagatgaagccccactgaccaggtctccagggaacaggctgccagtgaccaggtccctactaaccaggcctgcggtgaccagatgccccgaccaggtaacctattgactaggcaccactgaacakgcttttaccgctcaaaaccccgttgaacaggtccca

SEQ ID NO: 108389 - DNA, 399 bp, Homo sapiens
ccccctccagaactgcaaagctcccaaaggcggggataagaggagctagagcttgcctcacccgctgtagccgccgagagcccagaatgtactggcggatggggcctgcctgcaccccggggaggcgcccaccccggacccccacccctccgcactgtgaaagactaactcctgcaactggaaagcgggggcgcccgccgacgaggaggccaccgtgccaagccggcagaggtcatgccaggcgccaagggccatgtgcccagctgctgctggctgggtgggccagggagcccgccagcagaccccacacagcatgtccgccccagggcaaagcctcccactttcgctctgcgcccgtcccagctcgcctcagccctgttatctcagaaccaatgtatt

SEQ ID NO: 108390 - DNA, 857 bp, Homo sapiens
cggccgcgtgggtcgcgtccgggggcctggcgttccctgggtcctcgcctcgctgtctgcccgagggctcgggggcgctccgaggccagcgagactccagccccagccggcgcccgggttctcgacaccgtccggagaaagaactcggggtcgggtcagaaggaagcgagaggctggaagcgaagcgaaggcacagacccgccgcgctcggcggagcttgggtttcctcctcgcacgggtgtttggccgttttctcgctctcgttttgggttttctgttaaactgcggtccctttgcctcggtcctggtgcagctgctgcttgggttttccatcctcctgagaccaccggtgcaattcccaattcccatctcaacgccaccgcccacccggacgccgctgggctcagccctgggcccgctcgtcccggtatctcacgctccctgacccggcctcaatgtcctgaccactcggtgcagccggagacgccggggtccagcacgtgctcggaagcctgctgcttccacaagggtccccagcacaggtgaggacgactccgcccgtcccgctgcccaggccgtgagccccggtttctctctgtcacccacacagcatccaacctatggacaggtcctgtggctccacctccaacacgccgtgggcccacacctcctcctggagtggctcagtcgctcccaacttacgcctttgttgagaacagaccccccacaacatttaaggcaggccctgcactctgcccagaaggcagccatggcgcccaactcacggaggacgatccaaaagcgctcctcacgcaagctccacccggcgcaaaccccctcctgcaactgcctgggtt

SEQ ID NO: 108391 - DNA, 446 bp, Homo sapiens
aggacgacacatgcggggatcctccagagcggccgccagacgagggcgggaccgggacgcttcgccctgcctggggctcctggtgagttccgggtgactggagtggggacaagaggcaccagggaaggacgtgagttctttagattttccaaacgcctctgacacatgtcctcactcaaagctgcccaagaaaacaaaacaagctccgctaactagggaggcgggaaaaagtgggggaggcaatgaaggtttggcctcagaatcccagaactacagtgggatgaggggtgggcagggaggaggtggagaggcaggcagggctggccgccctggcacagccttggaagccaagctttggggtttagaggagagcaggggtcaaatgtctgagagcctgcctatgcaggtaaggggaaaggggaaagtggccccggtaccagaagggg

SEQ ID NO: 108392 - DNA, 597 bp, Homo sapiens
tcctttcattggaacgagcccatttcccgaagcatcctagaggctttcagcagaactcggaggaatcaggatttaaagtggcggttgcacccgctccactttggttttcagctgggaggagagcgccctctccccgctccgcacctccgccaccccgcttctctcgtcaaactggtggattatatcacttgaatactggggaaaaaacccgaagaatcacttttaagtcggatgcaagggcccacgtgataaagcaagatgttttaacggtgggtatgtttcttcttgccttccaactcctccgtcccccacccccaatcccattccttcatcctaggggagcgatctctgaaatcgcccattcagtccgacttggatgcgttccactcggggatttcaaacatgcgcccaaagaagtcttgcaatacctctcccggtttgagagctggacacccagggagccgcggtgtgtccagctgatcaaccacttgcacgccgtggccacccagttcttgcccaccccgtcagtctgttgactacaacaggtccctctgagcaaaggcaccggcgctccctcggccgccgggtccgcggccg

SEQ ID NO: 108393 - DNA, 402 bp, Homo sapiens
aatacaccctccttctagagactccttttcctaattaggctacttctggggcatggctctggctttccactgcccggctggtcttgcatatttgtctagacacacagagcacacgtgtacacaaagatacacacacactacacagacgcacagagatgcagagatgtggaccacagatgcatacagacataattacacagagacgcatacagagccctgcatggacacgtgcacacggagacacaggcactcttacacacagacatgcacacccacttgtaaacggaaacacatccatgtggagacacacacactcatacacagacatgcacacccacctgtaaacagaaacacatgcacgtgggcatgcgcacgcacacacacacaccatgctcagcgaca

SEQ ID NO: 108394 - DNA, 442 bp, Homo sapiens
  misc_feature (1)...(442): n = a,t,c or g
agtagtcaggagaaatgaatgagttctgatagaaacatgcttagaacaatgtccacaacgtaataactgatgtggagggagaggggtgtctgtatgcatgtgtatgtgtgcacggggagggagtatctgtgtgtgtgtgtgtagctagggtatatctgtgtgcttacgtggtatgtgtgtgtatgtattcacgtgtatatgcatgtatgtgtggcgcccccgtggtgggggggcatgtgtatgcatgtgtggtgtgtgtgtttgttctgtggtatgtctgtggaggggtatccacgtgtgcgtatgtggggtatatctgtgtgtttgcatgtgtatgcatgcccgcgcgtctgcatgtatctctgcatgcatgtatagtgtgtgtgtgtgtatgagagcctgtacgcgcccgctggggggntttccctatgggggagtgacg

SEQ ID NO: 108395 - DNA, 460 bp, Homo sapiens
  misc_feature (1)...(460): n = a,t,c or g
aagcgantatgcttgatcctcttagcggncgcttacacgtgtgcatgtgtgtgatcatgggtgattgcatgtgtataagtgtgcatgagcaagcatgtgtgtgagtgggcatgagcatgtgtgtgcatgtgtgttancatgggtaagtacgtgtgtgagcaagtgtgcaagtgtgagtgtgttagcaagcatgtgtgtgggcgtgagcacgtgtgtgcacacctttgaccatgggtggatatgtgtgagcatgggtgagtgcctgtgtgtgtttgggtgtgagaatgtgtgtgcatgtctgtgagtatggttgaatgcatgtgtgtgagcaagggcatatttatgtggtcgtgtgtgcacagggagcatgtgtgagtgtggacgcatgtgtttatgaatgtgtgagcatttttagcacatgcctgaacacatgtgtgtggatgtgtataagcaagtgcct

SEQ ID NO: 108396 - DNA, 423 bp, Homo sapiens
aatacagggggactaggtattattttatatataattaaaattgattatataaaatgttttatatagaagtaaaactaatttcccttataaagaataactgtaaaaaagaaggaataagtttaaaattgttaactgtgaataataagaaaaagacaaataacctaacaggatcatgggcaacagacagttcctagaaatataaatgggtcttaaaacatacaaaaagacacgtcacttggttcataatttaaaaaaacctgcaaattcgaattatgctgaaacaccatttctcacttatcagatttctcatcagaatatcacttatcaatgatccttcagtctgataacgactttgcaggtgaaaagtgtggaaataaagtactctcatacattgctggtgggactgctaaatgccgcaactct

SEQ ID NO: 108397 - DNA, 416 bp, Homo sapiens
aatacactgctgctataagtgagtgtgatctttgtgtgaaaacaaaaagagacctagaacttgctttgcagagagcacaagacgtttctttacaagaaagaaaatgagttctgatatttctgaactaaaagataataatgagtttttaactgagcaactttccgaagctcgaattcaataccctaaaaagtaaactccatgacacaagaaattctctcagagaaaaggttttggttttataaagtgtacaaaaggacctaagccaagtaaatcctttggaaagtgggactacgtagaggagagaatatctcaactacaacatgaaaatctgttgcttcaacaactagatggtgctcataagaaaggggataatgaacaagaggtaattaatattcaaggatgctggcttgagaatg

SEQ ID NO: 108398 - DNA, 775 bp, Homo sapiens
aatctgaagtgcgggagagtgctggaccctgagtgatggggccggcgccagctggagagcagcttcgcggagcgactggagagccagaggtgatggaaccagccctggaaggcacaggcaaagaggggaagaaagcatcctccaggaagcgtacattggctgaacctccagcgaagggcctcctgcagccagtgaagctcagcagggcagaactgtacaaggagcctaccaatgaggagcttaatcgccttcgggagactgagatcttgttccactccaggcttgcttcgtttacaggtagaggagctactaaaggaagtaaggctgtcagagaagaagaaggatcggattgatgccttcctacgggaggtcaaccagcgggttgtgagggtgccctcagtccctgagacagagctcactgaccaggcatggctcccagctggggttcgagtgcccctccaccaagtgccctatgccgtgaagggcgtgtttccgacttcctagcccccaagcccaggattactgtatgtgaggcaagctacctttctgggcaacctagcatccgaccagacatcaatgtggatgtggcactgaccatgcccagggaaatcctacaggacaaggacgggctgaaccagcgctacttccgcaagcgtgccctctacctggcccacttggctcaccacctggcccaggaccccctctttggcagtgtttgcttctcctacacaaatggctgccacctgaaaccctcactgttgctgcggccgcaagc

SEQ ID NO: 108399 - DNA, 397 bp, Homo sapiens
ccgccatccagcagcggacgctgctgcaggacttctcctacgatgagtccaaagtggagtttgacgtggacgcgcccagtggggtggtgatggagggctacctcttcaagagggccagcaacgctttcaagacatggaacctggcgctggttctccattcagaacagctagctggtctaccagaagaagctcaaggattgccctcaccgtggtggtggatgacctccgcctgtgctctgtgaagccgtgtgaggacatcgagcggaggttctgcttcgaggtgctgtcacccaccaagagctgcatgctgcaggctgactccgagaagctgcggcaagcctgggtccaggctgtgcaggccagcatcgcctccgcctaccgcgagagcccatgtatt

SEQ ID NO: 108400 - DNA, 1132 bp, Homo sapiens
gtactccagcctgaggacccagtgaaactgtgtctcaaaaaaaatagaaaaatctgccggtcatgatggtgcacgcctgtaatcccagctcctagggaggctgaggtacaagaatcgcttgaacccgagaggcggaggttgcagtgaaccaagattatgccactgccctccagcctggcaagggggagattctgtctccaaaaaaaaggaggtatatatacatgtgcttgtgcctgcaggtatgtgtttgtgtgttctaggttttgaccacgaaaaaagaactgatttacttgtggcattttaatacatgccaaaacagtacaagatacctgagaaactctgcaacctgtgctcttcttcttcataaataactgagtccacataatggtgatactgggatctgagagaattggtcttaggccttatgctgcaagtactgctcatcactactaagagacccccttttaatgggggaggtgccatttttataatgcattccagaaaggtaatcaattgatgcgtgactaggaaaatttagaggagtttttaaatcacatgacttcacctgacgagatttcacaactataaaacctcccttttttcaaaaaattattaagaaaataaaccagggccccagtccagggaagtagcttctctagagcaggctttcttataattacgtggactaattgcctatttccctgtctagtggggactggataatgcacattttgtagagatattggaaagccagaagttgaatatgattgtgataggtttgcgacataataagaaggggaaaactgcgcaggggttaagccccgtggaccaaaggaaatgtgaacgacttttgctttacctctattgccatgaattatgcattgcattcccggagcctggtcctgcttcgataccttactactataaagttatgcagaaacctatggatgtatccaccgtgaaacagaagcttcacaaaaaacattccctacactaccaaatcccggatgactttgtggccgatgtccgtttgatctttcaaggaactgtggaaaggttttaatggaattgatggaaagttgttccaagttttatggcaggacacacaagagattaatttggaggctgattg

SEQ ID NO: 108401 - DNA, 403 bp, Homo sapiens
cggccccctggcctgggctctgcctccctgcatggtgggggcccagcccgtcggagaagcagtgacaagttctgctcccccatctcctcagagctggcccagaatcatgagttctacaagaacgccgacgtccggccccccttcacctacgcctccctcatccgccaggccatcctggaaacccctgacaggcagctgaccctgaatgagatctataactggttcaccaggatgttcgcctatttccgcagaaacactgccacctggaagaacgccgtgcgccacaacctcagcctgcacaagtgcttcgcccgcgtggagaacgtcaagggtgccgtgtggactgtggacgagcgggagtatcagaagcggagaccgccaaagatgacagggagcatgtatt

SEQ ID NO: 108402 - DNA, 434 bp, Homo sapiens
  misc_feature (1)...(434): n = a,t,c or g
ntgatattcttctctggctgcagaaattggtatccgtgctacaaagagttggctgtcctggagatcacctcttccttctaaaccatattcttcgatgccccgctggtgttagtaaatgggctgttccttttatccagatcaaagtgttgcataacccatcaggggtctttcattttatgcaatcccttgccctggtgatgtctcgtgtcaaaaatcagagctgagtttatgtgccgcatgagagcccagcgaacggaagccatcctcctcagggcgtgggtgtggaacttggacgctagtaggcaaagaaggagaagaggatgaagtccctgaggccagtgggattctccttaatgaagatgatttggttaccattttagcacagtgtaggcggccgctatagaggatcaagcgtcgtcgcggcatcgacgtgt

SEQ ID NO: 108403 - DNA, 412 bp, Homo sapiens
aacacagcaccagtaacctgtgccaggggctgtggacgggggcaacacaggagcaggtcacggggaagggggatgtaagctttctgagcaaactcccagagcacccagggcagaaacaggcggctagaagccgggcaacgcgggtgcagagcacagacccacgtccatggttttcctaccagacgggcctggcagcggacgcactggcctcccccgggcggcgctggctcagccaccgcggcacccttcatgaggccggtattccgctcttgcacctcccccaaagcccagagaagacgagacagacactcacgcaggctaggtgtcgggaccggagtggccgagtagacggcagtggagaatgcacgcagagtccttgccctcgactgcagagacagccatgctgggagcg

SEQ ID NO: 108404 - DNA, 411 bp, Homo sapiens
aatacatgtctgggcatgcacctatgcacctgaacaggtatgtaaatacgggtatgcacatgtgcctttgcattttatgtatgaatgtatacttgtgtccatgcttatatgtgacttttaatgtgtgtccacatgtatggctgtatgagtgtgagtgtacagctgtgcatctgtatgcacttgagttacaactgtaaaatacgtgtctagaatgtgacacttgatcattaatcctcttttgtgtgtacaagtattagttatccaattgtgcaatgtggccaaatgcactgctcatctccagcacaggatcgaatcaggcactgtcagtgaaagctctgggagtgataagaactttaagggcaggggttggggagcttccatctgcctggagtggactcatccatgtgtatg

SEQ ID NO: 108405 - DNA, 489 bp, Homo sapiens
gacgatttcggcacgagctcctccagagcagaaccccgcagcctcaggggttgcctggttgtgtgtgtttcaatgcctctgctgtatgaccctttgtttgtgtgtgtgtgtgtctcccattctcccttctctctctgtctctcagtctctgtgtgtttctttcccactctctgtgggtttgtgtgtgtgtgcccgtgtgcttgtgtgtctttggctgaatatgccctgtgaaccacagagctgtctcttgcatggcggcctgtctttgttgaacctctttctgtgtctctgcctgggtcatgaggccggttgtcaatcgttttcgcccccgcggatctgctttggctgcgtgaaagcctggcccacgtgagaagatgcgtcggtcttggagcaattgatgtctcgtccccatcctgagcgtcctcttttctagcatcaagaggaacacactgcagatgaggacaagagccccacaggagctctttgtcc

SEQ ID NO: 108406 - DNA, 381 bp, Homo sapiens
cccccgtatgaggagctgccatagctttcgaatccacctgttttgaacaacaggattagtgcctgtgccacgtcccacgcctccgagaaacccgcaggctcccggaggcttcgccccttcaaacactgcccgagtctccctaaccttcctcgccgccttcctgcgggtgacccccaaacgccccagctccgctcccgcccttcctctcccgctaccacacgcctctcggaccctaggctcgccctcttgctaaaacctcctgcgattctcttcctcctccatcccgcacccccatcattactgttccacatcttggtcacgattctccgcaaagaggccgagaaggtgaagaaatgggggaatagcggaaaaccacagaac

SEQ ID NO: 108407 - DNA, 385 bp, Homo sapiens
aatacatggggtgtgtagcagataccttaaacatttttgtaaaattaacaagtataacgagagtggttggttgctcctaattgtactagacaaagtgggggaaaaaagaagaatgaattcagggattcaaattcccagctcaagcaccacatgaatgaatcaaaagtttctatgtctgcccttatgtcccatagatgcagagctgagatggctgaaaaccagaagtaggatctcatcctggcagtggctgaattacaatgcaaattgaattcccaaccttgcagaccatctgccgttaaaagtgagggcatagattgggaaggaattctgcctttggactccgatgccaacatcagctcttccttggttctccagtctgtggcct

SEQ ID NO: 108408 - DNA, 390 bp, Homo sapiens
  misc_feature (1)...(390): n = a,t,c or g
aatacagggattctttatttaaaacgtattattgaagttatacataaatttgacaacttagacaaaatgaaccacttcttgaaaacacgaactacaacatgcccagcatgaaacagataattcaacagccctatgccaaggaagggaattgaacttgcaatttaaacgctccccagaaagacatttcagggccagatggtttcacaggagggtctacaaaacgtttaaagaaaaattaacaccaattctacacatcctcttccagaaaatagaagaggagggaatatttaccaattcattttataaagttgattattacnnnnnnnnnnnnnnnnnnnnnnnnnnnnnnnnnnncactatagaccaataaccctcatgaatatagatgag

SEQ ID NO: 108409 - DNA, 380 bp, Homo sapiens
aatacagcgggggccgggcccgggcactgctctggcacatcgtgtcgtgggggccatctgaccggaggtgctgggcaggtacctcgtcagccccagggggagatgggagagcccaggggtggggagaggagagagagaggagtaaagaggaaaggagaatgaagtcccaaagtaagaggaaggggaggggccccagctttgaaaaccactaagtccagagacaaaccctagtctggatccaccagacacccccgtggcctcccacagctacaggctgaccctggcactgggccctcaggctggaccccatcaaccagtgggtgcactgagtgccatggaagtcttgttccttcccgccccaacccagggcagggctcacc

SEQ ID NO: 108410 - DNA, 1190 bp, Homo sapiens
  misc_feature (1)...(1190): n = a,t,c or g
ttccttttttagcaacacgtttattgagaggcagttgtgctccagccttccaggaggtcacagtcttaggggaagcagtgcaatggaggttggaagcaggggaaccctttactgaaggctgagcgctggctggcacactaggcctgggaaaacattganagggcaggcagggaaagtaggggtgggggtaacccagcctggcaaatgcacggcagctaggaaaacctcttcaggttctggggtggctgggccatgtagaggggaggccaggcagggctgtcaaggtaaccggggtcagatcatggagttgcctgccaggctccacaggagtcggggacagaagcagagcaacccagctaccagccgggccctgagtttccctcagggttgaccagggaggagctgtgactggctggggaggcagggctggggcccgaggttccccaggacgacaggagggagccaaggcactctaagaggtggaagaagaggaccagaagctggtgagtgcatcactggagccccataggagggctcctgactgtcctcaaaagcctcagacctcagtgtccactttctccatccaagaaatggggctgtgatctctgcttatgacagcacaagcttgcacagaagtggaggcgggaaataagcacaagtgtgccttcccagcccggcctgggtccaggcagaacagctgatactggccccagtctgcccacccacccctgctggccaggaggctggcagaaccccagccccacctgcctggagcgcgtttgatttggactcgactgttgtaaagatggagaaaggctggatctgtagctaaaaatacactcggagccaagccagctgctcagagcttcctcgtaggctgggccgcgctgggcccactgaggaactgggcatgcccacccaggaggtagcgcccttacctgctagaggttgagggcctgagtcactcccccttccagtcgccaggaattccttagtgggaggactgtcagagtcaaactaggcctgcccctgccgttgacagaaggaaagattgtccttccagggggtgaaggtgggtcgccccatgtttgtcccagtccctggattatagaaaggcggacggcggatcagggcgttgtggcagaataatgtaactggccgattgcacaccagcgtgcgtcagctggcgt

SEQ ID NO: 108411 - DNA, 372 bp, Homo sapiens
ggaacccagcatggcagaggggagcaaggatcgggggtcccgcatcacaggagcgatgacagcgcgcacagcggggacggagcatccgttttcatcgaccaagatcattcgtggagcggctgcggcccaggatggccgcctcagggtcaacgacagcatcctgtttgtaaatgaagtgggcgtgcgcgaggtgacccactcagcggcggtggaagccctcaaagaggcaggctccatcgttcgcctctaagtcatgcgccggaagcccccggctgagaaggtcatggagatcgagctcatcaaggggcctaaaggtcttggcttcagcatcgcagggggagaaggaaaccggcacatcccaggagttgtatt

SEQ ID NO: 108412 - DNA, 408 bp, Homo sapiens
aatacagggtgcagtttacagaataaacagaggtgggattgagggccatccctggggccctgcacccccctctcccgggcatataaccatgtccacagacctggcaggggtccagccctttgccccaccaagagctccctgcaccaaagctcctggtcacctcccctaagggacccggctcagctgcctaggagctggggaatagggaccagagtgccctggagggtccaggagatgagaaggatcccctgcaccctcaggagaacccctacccctgagctctggagccgggggcactgtgagagaaggcagagggagaggcacgtatactattccttgactgaccctgtgggcccatggaggtttcaggacaggtcccccctaacgcctaagaccgggaaaaactcg

SEQ ID NO: 108413 - DNA, 429 bp, Homo sapiens
  misc_feature (1)...(429): n = a,t,c or g
ggcgccaagcgcggcggaagagggctttctgggccgagacctgcgctagaggaaagcgggcaaagagaagagctgcaagnaaaggagaggtaccctggctcagcaggctgctggaccgcaaggagaggaagccctagagaagcatgtagtgacggagcatggcagcgagaagcatcctgctgccgcaggagggaaaagctaaaccagcgcagccttggggaagtccacagcaggccccactgatgcaggagaggctgcgaagatcttggctgaaaagagaagactaggcccggctgcagaaggatcaggaggagcaagaacggctggacaaggaagagcaagataggctggagagagaggaattgcaaagaaaggcagaggaggaaaggcttcgcgtagaagagaaagagcgtaagctcgaatggcgaa

SEQ ID NO: 108414 - DNA, 1012 bp, Homo sapiens
ggacagtcactataaccgcagttgtagagtccggggaccgaggtaggtctgtccccaagcccgtgctgtggttgcctctacgtggcgcgctgtgcgcttcacctcctggagtaagcagcgaggaagaacatcattggttccaagcagaggccttgccctgctgggaccccgggagtgagagcagcccaaggatcccagggtgcagggaactccagagctgcccacctcccactgccccctcagcacacacacagttcccaggcggcctaggggcaaaggctggggcgggctttggtcccttttcctgggcccttccttccccacttctaagccaaagaaaggagaggcaggtgcttcctgttaccccaggccccactcagcactgacagtccccagctcctagtagtgagctgggatggcgcgttcctaagacccttatcctcagggctgccctgggagctcattcctggccaacacgcccatggcagcaccagcagctcttgccacctccagctgccaaacagcagcctgccgggcagggagcagccccaggccagagaggcctcccggtccagctcagggatgctccctgccagcacaggggcccagggactccctggagcaggcacatagtgaagcccggggcaagccctgccccagcttcaggccccctttcccttcccccatttgaggtttggggtaggtgggggcggttgaagggctcccacgttgtcagccgctcaaggaatgtgctccggcagagtggttgaagccaataatcccccaaccatttccccttgttcttgacgcccaggtacttcagctgggcccattccacagccaggccctgggcccttgccctttcaccgtggatgtttttcagaaagtggccatcgagaggtcctggatggttttatagcaactttgctgtgattccgtttgtatctgtaaatatttgttctatagataagatacaaataaatattatccacatactggcaaaaaaaaaaaa

SEQ ID NO: 108415 - DNA, 418 bp, Homo sapiens
cctccagtcctcttgctgtgccggccttgtcagcatcctcattgagttccagagctcctccacctgcagaagtcagggtgcagccacagctcagcaggacccctcaagcggcccagcagactgaggccctggccaggtaacctgatggctgagacagaaagggcaggggcgtcctgggatgtggccctccctcgaggccctctgctccctctttgctgcccgtagcactgggagtcaggcccagtctgctccaaccccggcctgggatgaggacactgcacaaattggccccaagagaattaggaaagctgccaaaagagagctgatgccttgtgacttccctggctgtggaaggatcttctccaaccggcagtatttgaatcaccacaaaaagtaccagcacatccaccagtatatt

SEQ ID NO: 108416 - DNA, 402 bp, Homo sapiens
  misc_feature (1)...(402): n = a,t,c or g
cacatgaccagcggactctggcagcagctgctgctgcccaacagggattcctcttcccccctggaataacatacaaaccaggtgatagctaccccgtacagttcattccatcaacaatggcagctgctgctgcttctggactcagccctttacagctccagaagggtcatgtctcccacccacaaattaaccaaaggctaaagggcctaagtgaccgttttggcaggaatttggacacctttgaacatggtggtggccactcttacaaccacaaacagattgagcagctctaaaccgctcaccctggccaagacaaaaaancaaggtgtcacctgaaaaaaaaatgccatcaactccacagcccccatgtattcgnccgctcggtggttcgcccatgctaac

SEQ ID NO: 108417 - DNA, 399 bp, Homo sapiens
gcagaaaggtggcatttggacagcttgtgaatgtggaggtcagatggatggggctcccggcctcacacatggagaccggctgtggggaactgttcactgacctcctcctgacttacaggtgtgcatgtgtcaggtgtgtgtcctttgggggggtctgctgctgctgattccatcagtggtgccctcagcgtcttccgtggcctatatattttcttctgttcgttcttgcgtccagggttctggaaggccagctgtcctccttcttgcacaagcccactgttggtcttcgtcaattcaaaaactggggacgacccaagggggtgtgaagttcctcagaaaaatcaaacagctactaaaccccgccttgtattgcggccgctcggagtttccccatcgacc

SEQ ID NO: 108418 - DNA, 631 bp, Homo sapiens
  misc_feature (1)...(631): n = a,t,c or g
tctacattgggagtggtttttgaccctgacagaggccaatntgattggacaaaatttagagctatggctaggctacataagaaaactgatgatagcttggaaaaatatttgtacgcattcatgtccatgtgtcggagggtttgtcgtcttccttccaaagaaggtatgtataaaatttctttttcctggtttcggtcaaagaagcaaaaatcactaaaattcggaaatttccaatttgtctcttttatgtgaaatttcaatacgtagctaattcaacttgtcagtaattttttagaattataaataaactagcttaaagatcgcgtatttgttaatcctgctattaaaacgagatctaaagagaataaaggtatacactgagtcttaagaaaacaggtagagtttagtgatagatttatgattaggaggtggtggaagataaaggattgcttttgttatacagaactaacctatattttcagctcatcttatacgaattgcgctggcggctttagatccctgcttggtggtgcatggaatgaaccacccactcataagacacttcacagagttttctataaaaaacttctcacggccaacttcgcaggagactactaagcacaagcattga

SEQ ID NO: 108419 - DNA, 478 bp, Homo sapiens
ttttttgagatggagtcttgatcttgttgcccgggctggcaattggtacgatctccctgcaacctctgcctcccgggttcaatcgattgtcctgcctcagcctgccgattagctgggactacaggcccgcgccaccacactcggctaatttttctgtttttagtagaaggggtttcaccatgttggccaggatggtctccatctcctgacctcgtgagccgctgtgcccggccactttttcttttttgagctataatccatgtaccacaggtggtgacttccatttgtttgtttttgctattttgtttttgagacagggcgcaatgccaggatctccctgcaacatccaccgtcaggctcaagtggtctttccacctcagcttcctgggactgcaggcacgtgctaccaccacgcctggctaatttttagtttttttacagaagcgggcttttgccatgttgtccaggctggtctcta

SEQ ID NO: 108420 - DNA, 361 bp, Homo sapiens
tgagaccccaagaggctggcgtgaggtgtcctggaagtcagctcccaggtcccccgcccaagcaggctgaccttcctgacgctaaggattcaccaggaccccagcccacggatccacccgcctcagaggctcctgatgggccgtctaagccagagagagcagcaatgaatggagcagaccccatctccccccagcgggtgagaggagctgtggaggccccaggcacccccaagtctctcatccctggtccctcagaccctggcccagctgtaaaccgaacagagagccccatgggggccctgcagccagatgaagccgaggagtggccggggcgcccccaaagccatcccccagctgtatt

SEQ ID NO: 108421 - DNA, 426 bp, Homo sapiens
  misc_feature (1)...(426): n = a,t,c or g
agacgactaccaaatgcctcgacgtagctcgatcctctagagcggccgcatacatgggggcacttgacaatgcacattcaatagagttttatcaaaattaattgtcccacttcctgagtgggacaatttattgaaatgatgtagtaggagaatgccnnnnnnnnnnnnnnnnggaaagggggcccgggggggcccccttttgccccccnnnnnnnnnnnaagggggggaatttgggttcatggcaccccccgcgggaacaaaaggagcaaacccccgttctaaaaaaaccaaaccccccccaaaaaaacccggggggggcggccccaagaaggcttaaggccggggcccccccttaaccgaacccggggaggggggaaaaaaccacggtaaaagacccctttttaggccagggggggcccctggcg

SEQ ID NO: 108422 - DNA, 394 bp, Homo sapiens
  misc_feature (1)...(394): n = a,t,c or g
aatacacctgtgtggaagggagaagtacagtccagctctcacttgcaggtaccccacctcaaccctagccgcgcttcccctcaactcccagaggctggcctccctggaaaggcacccccagcccattgttctctgctgccccaagccccaagcggcctttagagcttccaagattctcagatataaaccacttgcctggggagggaaggagaggggagaaggcagaaaccttgagtctgcagtacagacgcaggagaaggttccgcaagggtggagccaaggacccaatccgagggccctcctgggcctccacacgggccccatccctgagccacctgtgggcatcatacctgtgcggccgagaccgtgcatatctatttgctccagcaggtan

SEQ ID NO: 108423 - DNA, 365 bp, Homo sapiens
  misc_feature (1)...(365): n = a,t,c or g
aatacagtgtgtgttgcttcttaacnnnnnnnnnnnnnnnnnnnnnnnnnnnnnnnnnnnnnnnnnnnnnnnnnnnnnnnnnnnnnnnnnnnnnnnnnnnnnnnnnnnnnnnnnnnnnnnnnnnnnnnnnnnnnactatgcctttaaaaataattatttttttctgtagaaacgcgtttctatcataaacatatatttaaaaactgtaaagaaaatgttaggaaactaagtctaatgatataaagaaggattatacatcataagcaacctgagtttattccaagaatgcaagattggtttatcattagcaaatcaaccaatataatgcatgctattaataaaaggataaaaatccatattatcca

SEQ ID NO: 108424 - DNA, 367 bp, Homo sapiens
  misc_feature (1)...(367): n = a,t,c or g
atacagtgtgtgttgcttcttaacnnnnnnnnnnnnnnnnnnnnnnnnnnnnnnnnnnnnnnnnnnnnnnnnnnnnnnnnnnnnnnnnnnnnnnnnnnnnnnnnnnnnnnnnnnnnnnnnnnnnnnnnnnnnnactatgcctttaaaaataattatttttttctgtagaaacgcgcttctatcataaacatatatttaaaaactgtaaagaaaatgttaggaaactaagtctaatgatataaagaaggattatacatcataagcaacctgagtttattccaagaatgcaagattggtttatcattagcaaatcaaccaatataatgcatgctattaataaaaggataaaaatccatattatccattc

SEQ ID NO: 108425 - DNA, 375 bp, Homo sapiens
atacatggccggtattactgtgaacagcttacgttttctttcacccctcatctgtctccaccttagttcagctccagcatcaccctcctggataaggtcaattccctctgtcctggtcccctggctcctacccttatcacccagtctgtcctctccacagtacccacgagaggacacctgagagcaagtaagtcaggtcccgtccctcctctgcctacagccctccatggctcccacccaccttggggtcaaagcccaaatcctccctgcaggccacaaggccctgccggacctgccccatcccctccctcactctgcttcagccgcagctgatactccagctttccaggtgaggtcctgccctggggcctttgg

SEQ ID NO: 108426 - DNA, 443 bp, Homo sapiens
cttccctggggctctggctcttccctgaagtcatcaggcacctgccctgcattgtggttcttccccagagcatcctttcccgtcccccaactacctacccaaaagcctccagaatcaaccgcaggaccacccaggctcctcccccaggaccacccaggctcctcccctgctctggctccaccccaggaccacccagactcctcccccaggctctggctccaccccagggtcacccaggcttctcctccaggttctggttccaccccaggaccacccaggctcctcccccaggaccacccaggcccctcccccaggctctggttccaccccaggaccacccaggctcctcccccaggaccacccaggctcctcaatgctctggctccaccccaggaccagtgtattgcggccgctcgagaggatcccagcatacgagcggatac

SEQ ID NO: 108427 - DNA, 989 bp, Homo sapiens
ggaattcccgggtcgacgatttcgtcgggaagatggcggcctccaggaatgggtttgaagccgtggaggcagagggcagcgcagggtgccggggaagctcgggaatggaggtggtgcttcctttggatcctgccgtccccgccccgctgtgccctcacggacccactcttctgtttgtaaaggtgacccaagggaaagaagaaactcggaggttttatgcctgttcagcctgtagagatagaaaagactgtaatttttttcagtgggaagaatgaaaagttgtcaggagctagacttgctgcccgagaagctcataaccgaaagatgtcagcctcccctgtcccgaacgcagtgtgtggaaaggtacttgaagtttattgagttgcccttgtcatcagagaaagttttgtcaaacatgtcagcagttgttgttaccagatgactgggggcaacatagtgagcatcaggttctgggtaatgtgtccattacccagttaagaaggcccagtcaactcctttatccactggaaaacaagaagacaaatgcccagtatctgtttgctgatcggagctgtcagttcttggtagacttactttctgccctcggattcagaagagtactgtgtgttggaacaccaaggttgcatgagctgatcaagttgacagcatcaggtgacaagaagtctaacattaaaagccttttattggatattgattttcggtattcacagtttttatatggaagatagcttttgccattataatatgtttaaccatcatttctttgatggaaagactgcccttgaagtatgcagagcatttttacaggaagataaaggcgaaggaatcattatggtgacggatcctccgtttggtggcttggttgaacctctggctattacattcaagaagttaattgctatgtggaaagaaggtcaaagccaaggtgtataatttattactgcaaaataaatacatatctatatatc

SEQ ID NO: 108428 - DNA, 407 bp, Homo sapiens
  misc_feature (1)...(407): n = a,t,c or g
aattcactgtgtctnnnnnnnnnnnnnnnnnnnnnnnnnnnnnnnnnnnnnnnnnnnnnnnnnnnnnnnnnnnnnnnnnnnnnnnnnnnnnnnnnnnnnnnnnnnnnnnnnnnnnnnnnnnnnnnnnnnnnnnnnnnnnnnngaatttgtaagagtttgagcaggacatccagtttgttgacatatcattgctcatagtagttgcttatgatcctttgtatttcttcggtatccactgtaatgtctcctctcaaatttctaattttatttgaaccttctcccatttttcttaatctagtcaaaggtttgtcaattttatcttttcaaaaaccaactcttagttttattgatcttttctatttcnnnnnnnnnnnnnnnnnnnnaagaaaaaagatgccttttcgccg

SEQ ID NO: 108429 - DNA, 455 bp, Homo sapiens
aaaaccgtctttgccgaaatctaggaaagaaaagagcactgagaaaggagaggaactgaagaaggctgaggggaaagtgaggaaagagagagagtatgtgataccaaaaagaaatgagatcaaggagaacaaaacctctgtttcagccaaattttcagctcaagaaataaaaacagggctcaaagaagtggtaactgctgtggaggaaatgacaagtaaaggaaaaccaggacaagaagtcttggaagacgaccaggaaaatactttaaaatatgagtatgaagaagactttgaagtagatgaggagaaacaaggtgaaaaatctaatgaagaaggacaggatgatgttcaaatgaatggaataccgcagtcacctttggatgataaaaaagataatttagaccccatgtattgcggccgctctggaggattcacgcaacgtacgcagacagtca

SEQ ID NO: 108430 - DNA, 526 bp, Homo sapiens
tcatgctgctcaagcttggccccccagctaaactgtaagctcctaggggaagggaccccatgttagctttctcctgggctcctggtcagttccacgctcctgcagcctgtgtgtgtggacgctggggcatcccgtcccgtatgaccccacagtggctgcctgtccattgatttgttgtcctggtacctgggttcacagggtagtagatggcattgaagacggctgtggctcggaccagcccaagttctctttccgcgtggggccagtctggccgggaaatgtaggcagcagcccctcccctgggaccaggtaccagggccccgggatggtctaggttggtggggcagcccctttgccttgtgaacctcaagcactgttgacctctgagccttcaatgttagagaaactggcagactgcctggagaccgtctccccccactaccccttggtgtcgtgcgggcaaaagaaattggtggtaagtccagcccagctattgcgtccgctctggagggtccaatcaaacgag

SEQ ID NO: 108431 - DNA, 460 bp, Homo sapiens
  misc_feature (1)...(460): n = a,t,c or g
ntatgcttccaagagtccagtggtgacggactgttcctgggggagccatgaagaacaaatcctgaaagactgaacgggggaagctgggggcagggaggcaggtggtcccccaaatcctctccttgtgccctgccaggaggcgggaccccactcactctccccctgggttccaactcccagcacagtcataacagctcaaacaaatgcccccttcccatgggcatcccccacctgcctcagccaccccctttcctggagccctaaaggcatccccagcccctggtttcaacagggaggattatccccagtcccaaaaccctcttgttgaagctgatgctggctgaggcctgccatcaggggcttctgggggggctcacaaccaccccctgcacagatggggcccctctgaaaaggccggcccgcttggncgnccggtctgtaggctccaagcgaagttaca

SEQ ID NO: 108432 - DNA, 402 bp, Homo sapiens
  misc_feature (1)...(402): n = a,t,c or g
aatnnnnnnnnnnnnnnnnnnnnnnnnnnnnnnnnnnnnnnnnnnnnnnnnnnnnnnnnnnnnnnnnnnnnnnnnnnnnnnnnnnnnnnnnnnnnnnnnnnnnnnnnnnnnnnnnnnnnnnnnnnnnnnnnnnnnnnnnnnnnnnnnnnnnnnnnnnnnnnnnnnnnnnnnnnnnnnnatcnnnnnnnnnnnnnnnnnccctttttctgggagggccccaccgggaggtaggggcccaatttcgggatccccggtaggggaaaaaaggaccagaaattccgcccggggttttaaaaaccttccttggccccccaatgggtggggtccccatgctgccccaggaggccagttggccctccccccccaaaaaaaaatagggccccccccctgccccttaggtag

SEQ ID NO: 108433 - DNA, 457 bp, Homo sapiens
tgtccatgtttctgtggaagacggatgctgagattgcccacattgccctggagacgttagagggccaccagagggccatcatggcccacatgactgtggaggagatctataaggacaggcagaaattctcataacaggttttcaaagtggcctcctcagacctggtcaacatgggcatcagtgtggttagctacactctgaaggacattcacgatgaccaggactatttgcactctttgaggaaggctcgaacagctcaaggccaaaaagatgcactggattggagaagcacaggccaatagagatgctgtgatccggtaagctaaagccaagcaggaaaaggggtctgctcagtacctgagtgagatcgagatggcccaggcacagagagattacgaactgaagaaggccgcctatgacatctagggcaacaccccgccgaccacaggctgacccg

SEQ ID NO: 108434 - DNA, 504 bp, Homo sapiens
tcatgcagccgtacgtaatcttggatactctacagcggacgcaatacagtgggtgtgtgagagtgtgtatgtctgtatatatacctacatgtatcagtaggtttatgaatgtgtatatgaacatacaggtgtgtgtatgtgcaagtttgtgtgaaggtgtgtgcatgtgtttctacaagtatgtgtatgtgcttgttaagtgcatatgtatgtgtacatgtgagggtatgtgcatgtgtatatgtgtgtgcatcagtgaatgtgtatacaggtgcatgcacatgtgtatcattttttaggtgtcctgccttttgccccctcatacatgtgctttgccccctgctggtatactccttcagaagctctctcttcatattatttcctttgcacaaagtaaccccaagccgtagtttaataacgcacgctgagagtgtatgtagatcaatttgtaccagccttaaaagcaatttgtttaagcataagaattctcgctttttaagtctg

SEQ ID NO: 108435 - DNA, 412 bp, Homo sapiens
ttatttaccatatatcttcctgcaaaaggaagaaacacattggtgtgactgtgcgtatatgtttagggggagaaatctgcgcttttcattttatagtcttgtgtatttttttatgactgtgttcgttgtttccactaaaatcaaggaaaaagaaaaaagctgtattctgtcacttttttctgtcatgcttcctcagaatctctcatataatagtaagccttgattgttataattttgagcctttcttttttttctaatgtacaacatttttgcaaaaagttggagtggaaatgtaatgaactcagacactggacggttgccttttgtttcagcttcccacatcacaaactttgaggttgatcaatctgtgtttgaaattcccgaatcttactatgttcaagacaatggcgaa

SEQ ID NO: 108436 - DNA, 439 bp, Homo sapiens
  misc_feature (1)...(439): n = a,t,c or g
cggcggtccgttgagagtgatagagtaaggaggtatgcactggcgaccgggatgctgtacaggggagaggaacagagccacctttctagtttccgccagggagagggctgtcaccgcccgcgctcctgcagggagagcctcgcagcccgccacccgcgttcttgcagggagagcctcacagccaccacccncactcctgcagggagagcctcccagccaccacccacactcttgcagggagagcctcccagccaccacccacactcctgcagggagagcctcccagctaccgcccgcactcctgcagggagagccccccagctaccacccacactcctgcagggagagccccccagctaccacccacactcctgcagggagagcctcccagccaccacccacactcctgcagggagagccccgtcaccacccatgtatt

SEQ ID NO: 108437 - DNA, 439 bp, Homo sapiens
  misc_feature (1)...(439): n = a,t,c or g
aatacattgtcccattgtctctctctctttctctctctcactttgtcactgttcctgtcnnnnnnnnnnnnnnnnnnnnnnnnnnnnnnncccccttccccccagggtggggggcaggggggggaattcggctaaatggaaaccttgcccccggggttaaacccatttttcgggcttaaccccccaaaaaaggggaaaaaaagggnnnnnnnnnnacccccgggaaattttttggttttttaaaaaaaaagggggttccccctggtccccaggaggggccccattcccggacccaaagaacccccccccttggccccccaaaagccggggaataacgggttgaacccctgggcccggcccccnnnnnnnnnngggcccccttttnnnnnnnnnnncccccggcgaaccaaaaaaaaccaaaaaaaacccggggcccccc

SEQ ID NO: 108438 - DNA, 439 bp, Homo sapiens
  misc_feature (1)...(439): n = a,t,c or g
gtgtcgttgtgtgatcctccgagcggccgcatacaatgcccgttctacacaagctcttctataaacccgaagaggtggagcactccccagctcctcctggacagccatgctcctgcaccagaaaaaggcatgacaagaagacagctgcctgacagtcctctcagacagatgcaaaatcctactgaagttcagcaaatcaaagccaacagtaaattcaaaggctaatacctcatgaccatgtacagtttgccccaggactgcaaggctggccgaacatctgaacatcaatcattgtgacttattacattaacaggctaaacaggagaaccatgtgattacgtcaaagaatgcagaaaaagcatttgagaaaatccaacatctgttcttgattnnnnnnnnnnnnnncctcttagcaaattaggaataggaaagaactctt

SEQ ID NO: 108439 - DNA, 398 bp, Homo sapiens
aatacattccctctggaaactgggatgcagagatgggcgggaaggactggtaggcaggacacaaagaggaagctgtgggggcaggaaggaggttcctagagcccaggacttcctggtgcctatggaggttctccagggttggagggttggccagagcagctgcagggacaaagtccccagctcagctgcagcccccatgggtccaccttgaggcaaggatagatgagggcttggctgtgaaatgaaaccaggggagagacggaagctgcaccacgggatggacttctcagtgcctctgcaacagcacaagtccccagggagaagtgggaagggatcccaggaaataaggcagacccgaagggtgggccgggacgcagcagttacgggaagacctatag

SEQ ID NO: 108440 - DNA, 510 bp, Homo sapiens
accatttcgtctctggcccagaagcccacaagcctgctgtgcccgaggcgcccatcgcatagaaagatcctgtgccacggggcaaaagcttacggagccgtcgggtgcaccgggggctgcccgaggccgaggactccccatgcagggcaccagtgctgcccaaagacctcttgctccctgaatcctgcacagggcccccccaggaacagatgaaaggggctggagccccagcccggggggcctcgtaagggctccccagcatgtgtagtcgttctctcacggccctgagtgagcaccgcacgcccggaccaccaggcctgaccaccacccctgcacccccagacaaactggggggcaaccagcgagccgccttcaagtcgggcaagcgggtggggaagccctcacccaaggctgcctccagccccagcaacacggccgccctgcctgtggcctccgacagcagcacgatgggctccaagaccaaggagacagactcacccagcgtgtatt

SEQ ID NO: 108441 - DNA, 439 bp, Homo sapiens; identical to SEQ ID NO: 108342

SEQ ID NO: 108442 - DNA, 489 bp, Homo sapiens
gagaaaacttttgaatgtagtcatggcaagaaatctttttgccaggagtcccacttcattgagcatcacaggacatgcacaagagagaaaccatgtgaaagtaataaatatgggagatccttccagaaatgtacaacttaccaactctcagataatgcatcgagaagagaaaccccatgaatttggtaaaacccttgtgaagtcagccctcactgatcaccagataagtcaatcagaaaagaagctttatgtatgtagtgactgtaagaaacgtttttgtcatagctcagtcctaagagtccatcagagtattcacacagggagaaaccctatcagtgtaatgggaaatcgtaagcaaaatcaaacttcagtcatcatcagagaactcacacaggggagaaaccatatgaatgtaaggaatgtaggaaatccttccgtgtgaaaccaaacctcactaaacatcagaaaacacatataggggagctgtat

SEQ ID NO: 108443 - DNA, 445 bp, Homo sapiens
  misc_feature (1)...(445): n = a,t,c or g
gagaaaacttttgaatgtagtcatggcaagaaatctttttgccaggagtcccacttcactgagcatcgcaggacatgcacaggagagaaaccatgtgaaagtaataaatatgggaaagccttccagaaatgacaacttaccaactctcagataatgcatcgagaagagaaaccccatgaatctggtaaaacccttgtgaagtcagccctcactgatcaccagataagtcaatcagaaaagaagctttatgtatgtagtgactgtaagaaacgtttttgtcatagctcagtcctaagagtccatcagagtattcgcacagggagaaaccctatcagtgtaatgggaaatcctaagcataatcaaacttcagtcatcatcagaaaactgagtatnnnngtgcattgcgnccgctctgaggtttcganctatttncgcaggcaatgcn

SEQ ID NO: 108444 - DNA, 470 bp, Homo sapiens
  misc_feature (1)...(470): n = a,t,c or g
taagggaagaattaggagcgcccacatggtccccccaacgaaccaaggcgtccctgtgaactgtgcggctggctcttggggccaaccccagggctgacctgaggaaagggcacccagtactcccagcgatgacttcgggtcggcggaaggaaaagacctgagcgctaagagcttgggatacgggtcaggcccatctttaggggaaaccggctgggaagcgagggggggcgcaggccgagccggaacgagacacagaccgggtaggtcaagggagggggggtgtccggctggggcagttacaagcacgggaatcggcgaggctcagcagcccgcttcccgtcttgggtcatccttctgctagcggctcctccccctgttccaggcccagccgccccgtacaatgaaacctgcaacgccgccgccatcttacactggccagcgggcaatattnnaaaaccncataggcagcc

SEQ ID NO: 108445 - DNA, 431 bp, Homo sapiens
  misc_feature (1)...(431): n = a,t,c or g
cancctgctggtctgttggtgggtctgaatgtcatttttgcctttttctgtatgaaaggagaagacttggactctcaggttggagttatagatttttcaatgtatctcaaggacgggaacagcagtaaaggtactgaaggagacggnacattactgcaattctggaccagaagaactatgtagaaaactgaacagacatttgaatgctactgtaaacaaccttcaggcaaaagtagatgcattagaaaaaaccaacactaaactgacagaggagcttgctgttgcaaacaacaggatcattaccttacaagaagaaatggaacgagttaaagaggaaagtttctacatactggaatccaatcggaagggtcccaagcaagacagaacttgagaagggcaagcactatttgacgcaagaaagcttttaaaat

SEQ ID NO: 108446 - DNA, 391 bp, Homo sapiens
  misc_feature (1)...(391): n = a,t,c or g
ttcgtgnggcgaccanccgcccgaccaggagggcaaccggttgtaccgcgagggtttttttaaggaggctgctgccaaaaactacgatgcgcattgcctgcctcaagaacctgcagatgaaggaacagcctgggtcccctgaatggatccagctggacaagcagatcacgccgctgctgctcaactactgccagtgcaagctggtggtcgaggagtactactaggtgctggaccactgctcttccatcctcaacaagtacgacgacaacgtcgaggcctacttcaagcggggcaaggcccacgcggccgtgtggaatgcccaggaggcccaggctgactttgccaaaaggctggagctggacccaaccctggtgcctgtggtgagccgaag

SEQ ID NO: 108447 - DNA, 449 bp, Homo sapiens
gtgctgtatctcaccttcctggagccccctgtacgccccagctctgccgtcctgcaaggaggacgagtacccagtgggctccgagtgctggcttccgtctcctccagtggagggagaggtggggcccctgctggggtagagctggggacgccacgtgccattcccatgggccagtgatggcctggggcctctgttctgctgtggcctgagctccccagagtcctgaggaggagcgccagttgcccctcgctcacagaccacacatcccagccctgcctgggccacgccagagggcccttcagaccccagctgtctgcgcgtctgactcttgtggcctcagcaggacaggccccgggcactgccttcacagccaaggctggactgggttggctgcagtgtggtgtttagtggataccacatcggaagtgattttctaaattggatttgaa

SEQ ID NO: 108448 - DNA, 412 bp, Homo sapiens
cccaggttccagcccccaatcccaaccccccctccaggccaatacatgcccctgggacgggctcagtcccagcaccaccctgcaggctccaacaaggtgggttttgtcccctctcactccttccagctcatcctcaggcctctagcggcctcatcctcaacgggcccgggacactgaacaggtagggtggcagagcccagctgggcccaagctgggcagaggggccctcaggcagggcaggtttccaagggagggcccgggaggacggcctggtgtggggtaggggctcagcccagcgggcgctggtagggccggggaggggactccctggagatgaagggagccccaggatacacgagctcggctgccaagcttgggtggggtcttccaatgcacgaaacaaatctgtgct

SEQ ID NO: 108449 - DNA, 451 bp, Homo sapiens
  misc_feature (1)...(451): n = a,t,c or g
cggacgcgtgggctcgctcagggatccccctttgaggggttagggtcccagttcccagtggaagaaacaggccaggagaagtgcgtgccgagctgaggcagatgttcccacagtgaccccagagccctgggctatagtctctgacccctccaaggaaagaccaccttctggggacatgggctggagggcaggacctagaggcaccaagggaaggccccattccngggctgttccccgaggaggaagggaaggggctctgtgtgccccccaggaggaagaggccctgagtcctgggatcagacaccccttcacgtgtatccccacacaaatgcaagctcaccaaggtcccctctcagtccccttccctacaccctgaccggccactgccgcacacccacccagagcacgccacccgccatgggagtgggctcaggagtcgcgggcagccgtc

SEQ ID NO: 108450 - DNA, 384 bp, Homo sapiens
ctgtgtccgagtgtgccgcctgtgctcgtgtgagtacccctggctgtgtgtctgtgcctgtctttgtctttatatgtttctgggcctttgtctcagtgtgtgtggctggtgatctatgcctgtctgcatggcagtgtctggttttgtgggtgtgtatgtgtgtcctagactccatgcatgtctaagtacagagtgccagcatcatgctggactactgtttgcatttgtgggtccatgcggccttggtgtgagtgagggcacattgtgcttgtgagactgtgggtctaggattcggggtatctaagcgtgtgcttgtgtttccccctgggagactatgccatgtgttgtagtaaataaaccgtcaccaccaccatcaccaccaac

SEQ ID NO: 108451 - DNA, 389 bp, Homo sapiens
tgtgtccgggtgtgcacgcctgtgctcgtgtgagtaccactggctgtgtgtctgtgcctgtctttgtctctatatgtttctgggcctttgtctcagtgtgtgtggctggtgatctatgcctgtctgcatggcagtgtctggttttgtgggtgtctatgtgtgtcctagactccatgcatgtctaagtacagagtgccagcatcctgctggactactgtttgcatttgtgggtccatgcggccttggtgtgagtgagggcacattgtgcttttgagactgtgggtctaggcttcggtgtatctaagcgtgtgcttgtgtttctgtatgggagactatgccatgtgttgtagtatggagatgcttatctaggtctgtgtgatgtttgtgag

SEQ ID NO: 108452 - DNA, 396 bp, Homo sapiens
ataatccaacccaattcccccctgctctccagcacagctcactgtccctctccatcctctctgccccatccataccaacagctccaggtctcccattccttaaatttcccctgtgccacctcaccatcagcaaccacctccccaggcctaccagctcatctccgaaagtccttctccaaaactccctctgccaccttggccaagggatattttcttcaagataccatcccccaactttgctcacccctgccgctatcctttcaatgaaagcagcccagtgatgttttatgtgccctctgccttgactctgcaaccaaggagcccccatgccctttccagtgattgtaagatcaccataaatccaacccactgtgccccacactccatttcacgaaa

SEQ ID NO: 108453 - DNA, 397 bp, Homo sapiens
gaagaatgtgctgcaaaatgtgaagaggacttagaattcacctgcagggcattccaatatcacagtaaagagcaacaatgtgtgaaatggctgaaaacaggaagacctccataatcattaggatgagagatgcagctttatttgaaaagtaaatgtatctttcacagtgcaagactgggaatggaaagaactacagagggacgatgtccacaacaaaaaatggcatcacctgtcaaaaatggagttccacttctccccgcagacctatattctcacctgctactcacccctcacagggactggaggaatccagacaacgatgcgcaggggccctggtgctatactactgatccagaagagagatatgactactgcgacattcctgagtgtgaagggg

SEQ ID NO: 108454 - DNA, 445 bp, Homo sapiens
ctagtccagtgcggtggaattcggatggattaatccctggggtagaaccacgtgaaatggcagctatgtgtcttggattgtctcacagcctgtctcgatatagattgaagtttagcgctgataaagtagacacaatgattgttcaggcaatttccttgttagatgacttggataaagaactaaacaactacattatgcgatgtagagaatggtatggctggcatttccctgaattacgaaaaattatttcagataatttaacatactgcaagtgtttacagaaagttggcgataggaagaactatgcctctgccaagctttctgaggtgctgccagaagaagacgaagcagaagtgaatagcagctgcagagatatcaatgggaacagaggtttcataagaagatatttgcaatattctgcatctttgcacccaggggattgaag

SEQ ID NO: 108455 - DNA, 393 bp, Homo sapiens
ttagacctctgaaagtccggtggaattcctgcttttggcttctggatgccctcctccagtacacattttatggggtgacaccgtctatcctcagtacactctgtgaaccgccagcgccctcccagtggagcaggctcagtcactccagagaggatggaatgaaaccatcttcatcggtactccaaggttctggaggcccatttgggagacccaaaactctaggcctctaccagactgtacacgcttgtcttgggccaagccacagcctttaaacgagacggcgcccagtaacctttggaaacatcataagctactctccattgacctggacaaggtggtgttacccaactttcgatcgaatcgccctcaagtgaggcccttgtcccctggaaa

SEQ ID NO: 108456 - DNA, 445 bp, Homo sapiens
agtcagtgcggtggaattccccaggtcggagagatcttctcggcggccggcgccgccttcacgaagctcggggagctgacgatgcagctgcatcccgtggccgactcttctcctgcgggcgcgaagtggacggagacggaaatagagatgctgagggctgctgtgaagcgatttggggacgatcttaatcacatcagctgtgtcatcaaggaacggacagtggcccagataaaggccactgtgaaacgcaaggtatatgaagattctggcatcccccttccagctgagtcacccaagaaagggcccaagaaggtggcatctggtgtcttgtcacctcctccagctgcccctcctcccagcagctccagtgtccctgaggccgggggtccccccataaagaaacagaaggctgatgtgacactcagtgctctgaacgactccgatg

SEQ ID NO: 108457 - DNA, 443 bp, Homo sapiens
ccacgaggcccagcacctccagaccgtggtcgcgcgagtgcaccgcgatgatctccgcggcgtgcagatgctccagcgtcagctgccgcgcgtacaggtgcgccacgacgcggtgtgggccctcggtcaggtgcgagctcaggtagtcggcctcggtgaggcgcaggcagcccaggcccaggcccagcacccggttcaggccgtcctccagcgaccagaagcgccggtccacgaagcccccggggaagcccagcagcccgtcgaaacgcatctgcatcagcaccgagaagcgcatggggatgcggccgaagagctgcccagggttggcggcgtacagcatggcgtggcacgagtggctccagcacggccctaggcgcatcgcctccacccggctgatctgcttcagctccggaaccgcaggaatccgacgctctgtaaagtga

SEQ ID NO: 108458 - DNA, 451 bp, Homo sapiens
ctctaaaaaaagaagaattaagtgaccaagtaatagatccgcttgtgcgccaatgaaacacatggaggtgaaacttcagaccaagcggagcttaagctcaatgacagtatgttttatatgacaggccagctgagaatgtatctgtcaatcctgactaagcccaatacatgggtggtgaccctgaggtagcccagatgatatgctgtgaattttagataggtctaaatcacaatggtacagtctgatgtgaaactttagtctacctaccataaactcgttttgtgaatcagtccttattcataattagacccaaaacccagctatttctcccctcttagatgacatgcccaataaaaacagcatccatgattggtttcattatctcccaattaagtagtggtgacaccaccactaactctagtatccaaagaattccggcgctctctgattt

SEQ ID NO: 108459 - DNA, 1505 bp, Homo sapiens
tagctgtgtagtggcagcaatgcacaggcactgagaacttcaagagagacaatctctctcattatttctatctttaaatgctctcaactgttggagtgtttgacgttcttggttgatccattcttttttcttttgctcctttttatcttgtctcttttcatctgaatactgtgatgctgacgagaatatcttatgctttcttcagcctgttgcaatctgagccaatgattttcttcgcactgatcctttctactctggagaaaagctcttttgacacagatcctgccccgtttaacagactccagctgctggcactgccttctgagttcattcacttctgaattcttatcgtcctgcagccccaccacagtcaatgactaagttcctctggactttcacatggatcgtaatagacaacttcatcctgtttttcttttataagtcttttaagagagtccaactgtgtagtaagcagtatttcttcgttttttaatatctcaaatttaacttcatatagttctaactgaatttcataaaattgcatttctaattcatctacaacatttatatttttttcttgttctggaagatcttccatctttccctgaatttcagctcttttgtgatttaaacataactctttcgctctcatgagctgcagagtctcttgagctagcattagcttaagtttttccaacctgggaattgctgtggcccaggcagcctggccaaatctcttcacatcctgttccatttcgtttctgcattcctgctaatgcttttactgtctaattaaaataattcactgtgatatcttgaatagagacaacagcttcttcagcccgtctggtccattcttcagcttctttctccagggcaactatcctggagacgtaggacctacgtcatcctcatccaaggaattataaagttgcaacttctcgcatagccctaaatggctgcagtaagtactggaaaaacatggttgccatggtaactaattcctggtaggcttcatcttcctcttggtaaactttcattaatgctaccatggtgttggcttttccatgtccttggataacctgggtccagttgtgtcctgtgactcctgctttcctgggacaggcaggctgctccgtgcctcctggccatcatactgggtgctggacgctgtaggctgctccatgcctgttggccattccctttggtgctggacagcactcacattgtgaaatccactggccctgtgaaaaacaccttagaatttcaaagtctgtgctgttgtcttctaaccagtcgtggtggcgaagcctcatgccatcctgagtttcacttgtttatgcatgactttctccctggaagcttttaggagtttgtcttttccttggtgagctggggctagctggacagtttttctgctggtatcatttggcagctctcactgtgtggttaaacagtgtcagggactggtcatctggatgctcgaattccaccgcactggacga

SEQ ID NO: 108460 - DNA, 397 bp, Homo sapiens; identical to SEQ ID NO: 95154
  misc_feature (1)...(397): n = a,t,c or g

SEQ ID NO: 108461 - DNA, 495 bp, Homo sapiens
tctgcctagcttgacacgagggaggtgttagtgcccccaactcctgccagagccccagtccagccacagagtggctcagaaaggccattcctagagggctgcggccctcccttctcccttgcccatgcccccagagctgcctgccgggcagggtggcaccattgcaggagaggagcttggcctccgggggtcaggcaggaggcgcctggctagccagtgctggctccactgggcaggaagccctggacccccaggtatgaggagggtggggtcttaggttctgttccaggtctgccccgcccccctcccagccatgccccaggcagaacttggaattcaggtgtgcacctgcaggctgaggggctctgtgagcaggtgctgctcacacagggagttcaggcgccagccaagcccctgtgctgctgggataggcctgcttcacttagggagcactgcctcaagacaggtaaagccccctcgtttgcccccaccccg

SEQ ID NO: 108462 - DNA, 447 bp, Homo sapiens
tcctcgccactgtttccccaggctgggagtgcagtggtgcgatcctcggctgaactgcagcctcctacccccctgggttcaagtgattctcctgcctcagcctctttgagtagctgggactaccagcgcatggccgccacgcgcagccaatttttatatttttagtagagatagggtttcgccacgttggccaggctggtctggaactcttgacctcaagtgagccgcagcctcctaaagtgctgggattacaggtgtgagccaacacacccggcctaaagatttaataggactttacatactttgagtatatgcagaaaggcttaattattttgctacggtttttaatttaatcatttttattaactatatcaaaagctgggtagtaaaaatgtgataaaaggaagtaagatgtcaacatctaaattaagatgggcctcgtgcaag

SEQ ID NO: 108463 - DNA, 519 bp, Homo sapiens
ggacccagtttcacagtaagccccacctcctcccgctccacctccctcggcctctccttcaccctggaaaatggagcaggcccttgcagaacaccccagcccttctcacccctcccactgcaggaaaaaggagccaaactgtcccttagtcctgggagtggggaccttgactccccgtcctgggccctccagcccctcaccttcattggtgcccagggcttcctcctggaggcagtcatcagacctgtcagagcagttccctgcctggagaggcagttccccactgccagagagttggaggaaagaatgtggatggaatttggcatctgaagctaagtgattctagggtacctcccaactcctaagcaaaatgggacatgtcctcctggctaaggaggttgaatgggactcacgcgctctatcccctgccctctcctgactgcaagcatggctaggttttcctgggcctgggatcccgggagaggccagcggatccctcgcccaagctggagtatctcc

SEQ ID NO: 108464 - DNA, 1125 bp, Homo sapiens
aaacaccagacccttgctcatgctctctgtccctctccacagagaaaaggccatgtgaggacatagtgagaaggtgccacctgcaagccaaggagagaggcctcaccagaaaccaagtcttaacaccttgaatctggactttcccaccctcccagaactggcaagaaaataaattccctgatgtttaagccatccagtctggcatggtgctgtggcagcccaagctgatgaatagtacacaccactccgcattctgggaaaaaggacatctggcttttaaacttgcctaagggaggccacaagctgctctcttgcaaacgctgggactgtcccctctggagggagctggaattgcagattgtggggcctgtcctgccaccttctgttccccaagaacagaatccaggagcagtgcaactagaagcagcgatctgattggagaagagtgtcctgagactgggctaaggtggccccttaagcctttgggtaagactggttccctttggatggcaggaaaaaaaacccagggccacctgtctctttctagtgaatttccctagcctaaatcttatctcttaaagaccctctcttttcaggatggtgcactctcagcccctctggctgcccctcccagagttcaacagcacagggggaaggctccagctcctcccagatcctgactgtctcctctttgtaaccatcagggagaggaaaagcatggaaaagccccaccaaggaagtcccccacaaaatgacaattacgccctgagcaaaatggaaaacaaaaggactcccaaccagcggcaacccgaggagctgcatctgccctctgcctgacagcccctccccgactcccatccttgttcctgtccccatcctgtagggtcctttgagacccagccttggggaaagtgtggtcagtggggacttggcccaggccaggctctgtctggtctccgacagaaacgcgaggaggaatcaagttcacatggggcaggaaagggcccccagacccagacaatagggcccagcaggcagggcccgagcaggaaaggagggagtagtgggctgccaggcctccctcatacccctggagcctcgtgccaagcgaggcttcgattggca

SEQ ID NO: 108465 - DNA, 565 bp, Homo sapiens
gtattactattcttctgtgagagtttttctttttccatcctcataactgatcctacaggggacagatttaatgacctgaagcatccaatatgttttaaatagaatgttttatttacacatatcccatgtcatagttaaaatattctctaaacctgaatgctgttatcctaaattgtgatttgcttgcaaatcaaaaccacaatgagataccatttcaccctagttagaatggctattatcaaaaagacaaaaaacttactggtgaggatgtgggaaaaagaaaactcacacattgttggtgggaatgtaaattagtacaaccattatggaaaacagtatagaggttccttaaaaaagctacaaatagaaccacccatatgacccagccatcccactattgggtatatatcccaaagaaagcaagtcagtatgtggaagagatatctgcactctcatatttattgcagcactattcacaataattgccaagatacggaatcaaactaagtgtccatcaacagatgaatggatcaaggaaacatggtatatatatacacaatggaat

SEQ ID NO: 108466 - DNA, 468 bp, Homo sapiens
cctgactacgccaagcttggcacgagggtggagcctgccttttaacaggccaacaaagctatttgagcccacggaatgtggaaatggatacgtggaagctgtggaggagtgtgattgaggttttcatgcggaaagctatggattatgctgtaagaaatgttccctctccaacggggctcactgcagcgacgggccctgctgtaacaatacctcatgtctttttcagccacgagggtatgaacgccgggatgctgtgaacgagtgcgatattactgaatattgtactggagactctgggcagtgcccacctcatcttcataaacacgacggatatgcatgcattcaacatcaggaccggtgctacaatggcgagtgcaagaccatagacaaccagtgtcaggacatctgcagaacataggctgcatggactgaccagatctgctatgaaaagctgaatacagagagccg

SEQ ID NO: 108467 - DNA, 297 bp, Homo sapiens
gcctcaattaaaaaaaaatagcttccataaatttaaaagaattgaaatcgtacaaagtacgttctctgatcacactagagtaaaagttaataactaatctgggaaagtcacaaatatgtgaaaaacaaacactcctaaataaccaatgggtcaaagatgaaatcagaggggaaatcagaatatttttagatgaacgaaaatgaagatataacatatgaaaacttacggtatgcaagtaaaacaatgcttagagggaaatttaaagttgtaaatgtctacatttacaaagaagaatga

SEQ ID NO: 108468 - DNA, 884 bp, Homo sapiens
cccacgcgtccgctggactgtgggttgttggcagccttatcctctccaacctggcacccactgcccgtgggccttatgcacctgcttggggtcctggagccccttaaggccaccagcaaatcctaggagaccgagtcttggcacgtgaacagagccagacttcacactgagcagctgcagtcggagaaatcagagaaagcgtcacccagccccagattccgaggggcctgccagggactctctcctcctgctccttggaaaggaagaccccgaaagacccccaagccaccggctcagacctgcttctgggctgccatgggacttgcggccaccgccccccgggtgtcctccacgctgccgggcagataagggcagctgctgcccttggggcacctgctcactcccgcaggccagccactcctccagggccagcccttccctgactcaatgaccacctctgctgccccgaggccatgtaggccgcgcttaggcctctgtggacacactgctggggacggcgcctgagctctcatggggacgaggaacaccacgatgccccggggcttcacctggctgcgctatcttgggatcttccttggcgtggccttggggaatgagcctttggagatgtggcccttgacgcagaatgaggagtgcactgtcacgggtttttctgcgggacaagctgcagtaccagagccgactttagtacatgaaacactacttccccatcaactacaagatcagtgtgccttacgagggggtgttcagaatcgccaacgtcaccaggctgcagagggcccacgtgagcgagcgggagctgcggtatctgggggtcttggtgagcctcagtgccactgagtcggtgcatgacgagctgctcg

SEQ ID NO: 108469 - DNA, 395 bp, Homo sapiens
ggcggatgtgggcatcgggcacctggccggcatgacgcgcagcgcggcggagggctgcctgggcctggagcagctcacgctacaggactgccagaagctcacagatctttctctaaagcacatctcccgagggctgacgggcctgaggctcctcaacctcagcttctgtgggggaatctcggacgctggcctcctgcacctgtcgcacatgggcagcctgcgcagcctcaacctgcgctcctgtgacaacatcagtgacacgggcatcatgcatctggccatgggcagcctgcgcctctcggggctggatgtttcgttctgtgacaaggggggagaccagagtctggcttacatagcccaggggctggatggcctcaagtctctctccctctggg

SEQ ID NO: 108470 - DNA, 491 bp, Homo sapiens
gtctttcccaaagaaattccccatgtctcagtcagtgcctcatatttacattcaagttaaagaatttatttatgccagccttaaattttcagagtcactacaccggagctcaacagaaatagacgatatgcttagaaaatcaacaaatctgctgctgaccagaactttgagtagctgtttactgaaccttattagaaaacctcatataggtttgacagagctggtacaaatcatcataaacacaacacacctggagcaagctttgtaaatatcttgagggactttataactaacattacaaatatttcccaagaaactgttcatactacaagactttatggactttctactttcaaggatgctcgacatgcagcagaaggagaaatatataccaaactgaatcaaaaaattgatgaatttgttcagcttgctgattatgactggacaatgtctgagcccgaaggaaaaacttaggggttatttaatggacc

SEQ ID NO: 108471 - DNA, 395 bp, Homo sapiens
  misc_feature (1)...(395): n = a,t,c or g
gggcagccagcncggnccgcgcacggagagagagagggggttctggtgagggggctctgcccaaccctgccttgccctaagccctcacctggcctccccggtcttgactcggcagccggctgccgctgggatgccggatggaccggctccaactgcagtgaaggtaggagctgccacgccactagcggatggggagacggaggcccccggcagcccccactgctcctctgctgcttctgtctccaccttctggtctgggaaaagcttgcctcttgtcttctgccccggcctcacctgcacatcactgagtgactcccctgtggctgctgcggcccgttccacaaagggctcggctaaaacaagggtccccgggctctggctccagggcccacctt

SEQ ID NO: 108472 - DNA, 438 bp, Homo sapiens
gaagcagtttcaccatgctctcggatatactggcacgtagcggcgtgggaaaacaaggacgcgctgcccggccagaaaacttagttttaggtggactccgacgaccagtggggagagtactgctgcgttttcctccccgagcccatgggcacggccaacatccagctccacgggcctcccagagtgaaggctgggaagtcgtcagaacacatcaacgagggggagacggccatgctggtctgcaagtcaaagtccgtgccacctgtcactgactgggcctggtacaagatcactgactctgaggaccaggccctcatgaacggctccgagagcaggttcttcgtgagttcctcgcagggccggtcagagctaccctttggaaccttgacatggaggccgaccccggccagtacccgtggaacgggaccatcttcaagc

SEQ ID NO: 108473 - DNA, 1295 bp, Homo sapiens
aggaggaggaggaactgcgtgtgcccctgggcctgcaggcccccacacccctccccagtcttcttcaagacctgggcatggtgggaggagggagggggaagtggagaggggagcatagggctcctggggcaccaagggagagaggggcccaggggtagggaatctaggaatgtcgctttccttggagcagtacggaaagtcacagggaagatcaggaggacggacagctgagatgggagacaggagagatgatctctcaggacccctggggagccaagctgtcccccacatcctagcctccccaccccacctggagcttcaccatgggcttttcagcagtgaagtggcacaaacctcccagtttggtgggcaagtggggctgatggtggtgtcatggctcctggagacacgacataaccaggaggggtgaagggataaacctggggtgggctggggctgagacccatggcatgaccccaattctctctcctcaagctcgacccccccgccatccccaggatcacacaggagaatctcatcctcacggcttggattggtcctgggggcccccggttgtgctgctaactggtgtacaatgctcaagagcagcccagaggggagccaggaagggaccctcgccctcacctgctatccccatttccgcatctcttgcactggtaccctgagggccacattctcagttcctgggattgaaaactgcagcagtctggccagctccagggacagagtgatccaaccacctaccacgtaccctcctcagcaggccactggacccaggtcctgaatgaagctgtccgcctgcctcaccccagaagaggctggacagtggctgcctcgtgccccctgcagtctcccacagccagggcccgatggggtgcctccttgtcccaagtctcctgagaacccctgaccttgctggcctctctcatccgccccaaccctgtccacccttgaccacctctgggggcctgtcagcctgctggtccccccaacagatctctgggggcagcctctgtgggacaagagtgatacagagctggaggagaagaggagtgaggggcctcctttgtgtctgatgcacagatgtggccctttcaaaccctggtgtcaccctctgggtgactggatccctagctccagcctcttcctgggccagccaggaagggtggaggaaagttctttgctgattgcatgtgtgatacagtggggggtgcctgagccctccccatgcaaggggctcatcctgggactctggaagctgcttccctactggg

SEQ ID NO: 108474 - DNA, 1389 bp, Homo sapiens
ttttttttttttggttaagtttgttttttctaagagatttgcaatgcaaggtctccttgaccccttgccacaactggaaacacttgaaaggggaccccagggccagctgtttcaggggtttcctggaccacccactgcttctccccaaccctgatgcgctgacattcccttagcaccagctgtcccacctccaggagtcctgaccaggtcagagatgtcccctgccatgcagagcaggaaagcctcagctgggcctggagtgtccctgctccagccctgccagggacaggtttctccctggatactcttggcccaccgcagatctgtagccagtcagaggaggaggagaaggagcccctcagcagagtggtgcagtttcgctcagagcttgtctccttggcttccaaccccagaaatgacctgctgggccttaagctttccaggggccggggcagtggggagcccccattcccttcacaccgccaccaactaaaccaaagcttggcctctgactcccgtctctgtgcttgcccccatctcagggaccatgatgtctcagtcactccacgctccccacaggccaaccctggcacaggtcatgtctgcagcccccagaatcttctggacatgcaccaccagccggtggtcccaatgtccacccctgcctccccttcactggggactggggttttcgccccatgctgcatcgtcgttgtattgggatggggctgaggaacatgctccctccctccctcccataaaatgcctgctcttcacctcccacctttgtggggggcttttgaggacccagctgcgtcaggagttttgcttcaagatgtcagaaagtcaagttcagctaagagacacccaggtccccagcttgccctgagcagcccttcagggcttctggttccttctgccgcccttcctgagaccttagaaaccagaagagccatacagtcagtggaaggcgggggggcccctggcctcctgcaccgggatcccaagtgggaacctttcatgccttatttatttcttaatgggtaaaggggttttcttaccaagcatccctgacctccctggagacaccacctgctttccgggcggccacctgtgaatgggagcctggtggccgacctgagtcccttctgtacgtgcaactgggaaacttttgtccctttgaggctaggcagctccctgccctccgtgtgtgtctgttatctgggggagaaggagtgtggaagggttgggggaagagctccagcctgtctgctccccagctctgtagtggcagaccatgcgtcacctttgaagtatacgtgagagaaatatatttacaaatgctttattttttttctttaataaaaaatgccccagtattctaaaagc

SEQ ID NO: 108475 - DNA, 1730 bp, Homo sapiens
  misc_feature (1)...(1730): n = a,t,c or g
catcgaacgcctagaggtaccgttgcagaattcccgggttaatgctcactttaaccagctatttcttagaccaaataaagagaaaatagactttcttcttgaggtatgttcaagatcagtaaatttagaaaaagcttcagagtctttgaaaggaaacatggctgcttttctaaagaatgtgtgtctggggttggaagatctgcagtatgttttcatgatttcttcacatgagcttttcattacattgttgaaagatgaagaacgaaagctacttgttgatcagatgaggaagagatcccctagagtaaatctgtgcattaaacctgtaacttcattttatgatatcccagcttcagcaagtgtcaacattggtcagttagagcatcaacttatattgtcagtggatccttggaggattagacaaattttaattgaattacatggtatgacttcagagcgccagttctggacagtgtctaataagtgggaagtaccttctgtctatagtggtgttatcctgggaattaaagacaatttaacaaagagatttggtttatattcttatggccaaaggtttgcactgcagtactgttaaggacttttcccatgctaaacagctctttgctgcttgtttggagttggtaacagagttctcaccgaagcttcgtcaggtcatgctgaatgagatgttgcttttggatattcatacacacgaagctgggacagggcaggcaggagagagaccgccatccgaccttataagtagagtacgaggctatctggaaatgaggccttcctgatatttctcttcggcaaggtataactgaggaatgtgtcgcctttatgttaaactggagagaaaatgaataccttacactccaagttcctgcatttttgcttcagagtaatccatatgtaaagcttggacagcttttagcagctacatgcaaagaacttccaggccctaaagaaagcagacggactgccaaagacctttgggaagttgttgttcaaatctgtagtgtgtccagtcagcacaaacgaggaaatgatggcagagttagtttaataaaacagagggaatctacgttaggtatcatgtatcggagtgaactgctttcttttatcaaaaaattacgagaaccactcgttttgactattattttatcactctttgtgaaacttcacaatgttcgggaggacattgtgaatgatattacagctgaacacatttctatttggccatcttccattcccaacctccagtctgtggactttgaagctgtggcaatcacagtgaaagagctagttcgatatacactcagtataaatccaaataaccattcttggttaattatccaggcagatatttactttgcaacgaatcagtattcagcagctcttcactattacctccaggcaggagctgtgttgttctgacttctttaacaaggctgtgccccctgatgtttatacagaccaggtaataaaacgaatgataaaaatgttgttctttgctgaattgccacacacaggtggctaattttatgtcagttcctcagaggaaattgacctacaaaacagcggtttaaaatctctggcaaggaccaaaacagtccatgatggctatgggactcctactacgacttacatatngggatggttancattttgggaatacctgggcttatcttccatcntaaaaggggggggaacngggtaaaggccaa

SEQ ID NO: 108476 - DNA, 445 bp, Homo sapiens
ggcatacagtaggtgctcaataaatgtgatggactgaagccatggatgggacccttcccatggcctcgagcccggcccttgggaaagcccaggtgggcacatttggacacaaatggatcccagctctgatgcgtcaggacgggactagggggagggggccgggcttggagaccccagaaggggttcagagaagccggcatgggggagggggttttagcaggggccagcatgccctccacctgtgtctccccgtgtcccccaccccgatgtctcacctcgccgtcccactccatggagtcagggtctggcccaccttctcctggacccgaggcctctttaggcgtgaaggggcagggtggccggcactgggtcaccagccgctggccccaccttccggaagatcctgcccagaggcgggggtatggcgaagatggggggactgtgg

SEQ ID NO: 108477 - DNA, 1983 bp, Homo sapiens
ttcaccgttcatctcggacacgtttattgctagaatcaggtcttaagttctaaagcgggtcagaaatatcccgcagtgaggaaatgttgtaatcattgtaaaaataattagcaggtgactaagatcatgaccacaactgacaaagacgtgtgcagatcccacgaaaataggaacatttgctcgactgtcaactttacaaataaaatcgggctccaacccagggagtgggccgaggggcactggcgagggaagggctgtcggcgcttgctgcccgatgcctagcacggactgaggaccccttctgccacatggcggggacgcgggggttcccaccgcgtggccgaggcaggaaattccttggaactttcttcccccatccaagggaattgtggcatctcggagggctggaccggaacaagcgggttcaaggggggtcccagggtctgggaatgttctcttcacaacagaacaggaatgtacagtcagcttctgtaaagtgctccgatactcagtacaaaaataccaaaacaatgatgataaacatggcacacatgggatctgacggggggcggacagcgtcgctgatggccagggaccgggctgggcagagttgaggtcgtcggaggggccaaggagccctggggacaccctggccactgtgttctcaggaccttgtcaccaatgggctgtatggctgtggggctctggttcccggttggcaccagctcctgccccgccccctcctgagcccacagcacccagtgggcgcctctgcccaggggagcacttcctgatggagtttcccctcccttgtgcccatctgtccccgagtggcgggaatgtccctgttcactgtattcagcgtcacaggagtgcctctgccagcacagtgggagaagggctgaatccccccgggatctgcagttcccaggaccctgggttcgggagtaggacttggccctggcaggggctcacatgttaccccacttgggaacaaggacgatcagccaggacccagtcctaccaccaatgcttggggtgcagaacaaggcttgacatgggccctttctccaccggagctggatcgtggatggatctcaccaccctgggatgtcccagcacctttgatgctgcccaacacctccttcctccacccctccagggaacggaccgtaagctgcaacagctcactacaagcgaggggcccgcacagcggccacttgtccacttgctgcaacgtcttctaggtgcaacctctgcatgccctgggacatggcgctctcgacagtctgtgatgtgccaagcccccacctggaaaggtgggacgccagccctgggagcttcatttcccgggggctgaggaccctgtgcccagggtgtgtacccgccctggctgaagctagaggcccgctcccccagacaggctgagcgtgtgaacagcaacggttgcccttgggaagcagagtttgggaaacagctggtttcaaaaccaatgccaagtaaaaaggggcaaaggtcagcccctttcacgatgggcttccgaaacccccagaccctgactggagggccactgatgttccctcagtgggccctgccccgtggccctctctgcccatgcccccgtgcctggctcattccctgaccctgaggttcatggtgaacctgcgtggggctctgtttgggaaagtggattctgcctgattctggggacagatgctgccgacgccacctggcccctcctggtgccctaacccttggctccactgtcgcgcggcggctgtggagcgtggccccggccggcagctccttctcaaagcaaggtctgtcctgtcctcagctccgtgcagagccggcaccgttcctcactgcctcggaaaaacagctcggagttgatctccccgccacccggatggggtgctatgatttcagacagctccctggtttagttctggctcaactttccattaaaaactttcctttttg

SEQ ID NO: 108478 - DNA, 507 bp, Homo sapiens
attgacacattttgaacctgattacgcccagcttggcacgaggcatgaattgaatgaagtaaataatatgctgctgtaagcaaattatctgcagataaatgtcttatgaatcggatatcttactgtttattaaattctgaagtattgagcagtttccaatgtgaaatcccacctggcttctttgcaatgatggacaagctagttataattcatatggaaattcaaggaacccagaatagccaaaacaatcccgaagagcaaagttggaggactcacatgccccaatttcaaaacttactacaaagctacaataatgaagaaagtgaggtaatagaatttggagtccagaaataaaccctctcacatttatggtcaattgttttttgacaagggtgccaagatcattcaatgggggaaagaatagtcttttcagcaaatagtggtgggacaactgggatatcccccatgcaaaagaatgacgttggactcctatttcacaccatatac

SEQ ID NO: 108479 - DNA, 2674 bp, Homo sapiens
  misc_feature (1)...(2674): n = a,t,c or g
tttaaaatagctaaataaatctttaatatttctaattgcaaatgtacagaaattgcacagccacacagagtcttagaacaccaacagcttcctctgtacattattacatagttaaaagtcgcagctggaaggaggagctccagcccaaactccaacgtttgcattttttccttttcacatacttacaaaagaggggagctgggacgcggtgtgggagctggggggctttgtggctgagtgtgtagaaaagagagaggctgtttccctggacagtctggctcccgcagtcgtgcggggcgcagggactgtccttccctccccagggcctctggcaaccccnagcccctggctgccaggcagggcccagctcccgggaactcaggttctctgtggcctgggcaggagccccccgttgactggcccagtgaaggcacaccagtggacactactcagacagaagttgaaaagccaacccaaaaatgcaacaggcagggaaagacaccccccgcagacaccaagccttttccctcctgccccaatactgttctctagattccagaaataaaataaaacccttggggagagcagcagtcccggccagccctcggcagcacccaggaccaaaggatatgtaacaaccattaggtgagatagtttacatttacagtcaaacacccaagaacattttacaaaatcggcgaaacttgcaattaagataaaaatctgtgaagagtctgtaagacttttaacagtttttgcaactaggtaaataaggctctcggccttgaaaactcacccaccctgcaaagggcaagctggcaaccggccacaacgggtagcctccgagccccgcctgtccaggccgccgggagcctccctgtaattgcctaggggggctctgtccgaggtccactctacgaggcagcggtgggagggggctggggaaaagaagagcagggctcactgggcaatgggaggatgagactggaggccaggccctgcctgtgtggccaccctggtctcaggcacgaaggacgcatgggtggggacaagacagaagcagtgagacaggaaggggtgggggcagggcctctgctttcaacctccccatcttcctgtggtctgtgaatcccctggtggcccagcccttcctccaccagcatctgtctctagcctaactgaattgtaaggttacatctaaaagccccttcccagaccagccactgtcacctgtccccgagctccgggtggacgcagtatggctctgggccacccctccagcacatccacccttcaggcggggcctctgtggcacattccagctgccggggcccaggggtgattcctgcagctcgccctgccctggctctgctggcaaaggccccactcccacccttcttaccccaggcctttgctcaaaatctgcaggggctgggaaacagacaggggccgaaaaaacacccaagctcctgctcatctgtcttgaaagtggggaaggggcagataagttacagaccagcctagagctgaggaaacccggccccagctgtggggtgcgcccctcccctgtatgcagcgcctgggtcccttggccgggggccgggaagggtgaggaggaggccggccacacacacggggcaggtgcaggctgctgctgtcttggagagggagcaagtctaacatcctccagggccgctatttcccatgcagtgcgcacgctcaacttaaaaggcccctgtgttccagcaagcgagcaagcgggcttttgtttctaatgcatactgtgaaaggaaaaaaaatcacagttatccacgttctcagggcctgcaggcgttagaatctttttttaaaccatcactcagaggaaggatcaccttttctttcagggtgagcaccaggtggcactccctacaggaccactgtgccctgggtgtgctgggccccaggagaaggcagatacagtgctcagagccatctggccagatccgcccagatctctggcttctgggagccctagagcatcagcctgggcctgtgtgggaggtgtgggaagctgtgggtcctccccacagggagcaagagctcacaagaaaaagccatggccctcactgggtctatctggcaatacaactaaggcagggaagaaggtagcaggtggtgctctggggacaggttcagagggggtgggtgggtaggaatcctcagttcctcacagccaggaaggtcccaacaggctgcatgcagtggcaggtgcttcggatggagacaggcaggggacactgacctcctgctctgtgtcctcctatcttcctgcctgccaactgatctgccaagtgccaggtcccacatgacagggcctggctgccagggagtcccgggccccccaaggaggcgaggggaagccacaggtgtaggcccctagcccttgaatcccccctccaggaagccccctccctggcacaggtgtggggggacacatgcactcggccagatccaggaggacaaggacacaccacattcaggaaccaacagacatatttttggcaggccccctgccccatcaggctgtccccactccccagcgtgcagtctcttctgcccgcaccccacagggagcggctggtgacctcgcctcacgctgcttcagtctctggtggctccctctgcggccgca

SEQ ID NO: 108480 - DNA, 396 bp, Homo sapiens
ggcgctggtgcccctttcccctatctaagccccacggtcctcctgctggtcagctgtgacctgggcttcgtgcgagcagaccggcctccctctcctgtgaatgtgacggtcactcacctcagagccaactcggccactgtgtcctgggacgtcccagaaggcaacatcgtcattggctactccatttcccagcaacggcaatggccccgggcagcgtgtgattcgggaggtgaacaccaccacccgggcctgtgccctctggggcctggctgaagacagtgactacacagtgcaggtcaggagcatcggccttcggggagagagtcccccagggccccgggtgcacttccgaactctcaagggttctgaccggctaccttcaaacagttcaagccc

SEQ ID NO: 108481 - DNA, 446 bp, Homo sapiens
gatagcgatacgttatgaccatgcctacgccttgcttggcgcgagggccatcaacccaacaggtcagactagacttcggtggccacaaacccctatcctgggttatgaaaaactttgcttttgctcacccttcctgttgatctccctgctttgtgttttcttctggtaacatcacatagctgtcagctgttcctcttgtttgactgccagcccctgtggggaaatcagggttttcaggcccaagcgctgtgcagccagggtaaggtgcagctctctctccctgcagactgagtatcgtaataagagtgagtttctggttggcgtccgggtggatggggaggataacaccgtgggctgtcggctcgccatgttcaagggcgggacgtgagcttgttgccatcccgtttgtaactgtgcatatcccccaaatcacccagcacgcggcg

SEQ ID NO: 108482 - DNA, 392 bp, Homo sapiens
  misc_feature (1)...(392): n = a,t,c or g
tatacctgatacgccagcttggcacgaggaaacaaattcaattagggagctcaaatggagaaaattgacagataatatttttgaaactttgaaaaggaggatttgtctagattcaccttttattaccttttcctttttttcttttccnnnnnnnnnnnnnngggaaagggggtttctttttggacccccggcggggggggaagggcccccaaccccaagtaattggaaccccggccaaagggaaccttacccctccggggccaaaaggattcccggcccaaaccctcccaagaagggggaaaaagggcccccccccaaaggcccggggaaatttttggtttttaaagggaaagggggggccccccaggcggccaccggggtctggaaccccg

SEQ ID NO: 108483 - DNA, 457 bp, Homo sapiens
  misc_feature (1)...(457): n = a,t,c or g
gttgacctgcatacgccatgcttggcacgagggccccagccagtgagacttgaaccccacctgtgactccagagccttcagatttaaccccctccccatgaactgccttccctcgccaggtggagaaagcctgtcaccaggccatttttggggaagtggtggggcttgcagatgagagggctccctgggctggagaggaccagctggcccctctaagctggcttcctcagctgcttcatggggcgaagggatgccaaggtcagcacagctacctccctctcccgcctgccctggggacctggcagtccccagtccctctctcctgctggaactgtgacctcccacaggcttcagatggcacgaaacccgggcatggtcagcacacgagctgggcagncacacgcctccccagccacctcctgggaagacccagcccaggggaacagctgccgtgaaa

SEQ ID NO: 108484 - DNA, 457 bp, Homo sapiens
ctccccaggacagggctgctcaaacagatgcatcttccatcgggcagggccctgcaccagggtgaccagcacactgtccagcaaggtgaacgcgcacagcgcagcatcgggaaggatgcaggcatcggggtccacagggatcacgggggaaggctggtcaccgtccacgctgtccctgtcatcctggctcgtagacctgctcctgcccgggtggtccagcgacaggcagtagaggcccctccgggcgcacagcgcgtacagcaacctgcgcggcgccagcagctccaggtgccacacctggtcggggaaccggaacgccgcggtcagcagcccgccctcctggtcgtacacgtagacgagctcgctcccggtggacagaaagacctctgcctcatggcacagcacgcggggcttgtccccgtccctccggccaaacaagccgtaatcatggtcatag

SEQ ID NO: 108485 - DNA, 1576 bp, Homo sapiens
ggaagcagtggagctccagcccccaccaccagcccctctgtctcccccacccccagccccaactgccccccaacctcctggggatcccctcatgagccgcctgttctatggggtgaaggcagggccaggggtgggggccccccgccgcagtggacacaccttcaccgtcaacccccggcggtctgtgccccctgcgaccccagccaccccaacctctccagccacagttgatgctgcagtcccgggggctgggaagaagcggtacccaactgccgaggagatcttggttctggggggctacctccgtctcagccgcagctgccttgccaaggggtcccccgaaagacaccacaaacagcttaagatctccttcaggcgagacagccctggagaccacgtaccaatacccctccgagagttcggtactggaggagctgggcccggagcctgaggtccccagtgcccccaaccctccagcagcccaacccgacgacgaagaggatgaggaaagagctgctgctgctgcagtcattagctccagggccgggcctgtgcaaccaaaggccctgattgtggaatgagtcctgccggcggtgaccatcttcctacctaagggctatacctccctccttcttataactgaagatcctgggagcccggaagattcagggcagacagaccctgataatgagcctgggaagggaagggcaaccaacctccttggaacttgctttccccaccctgtttctgggggcagagccaattgcccaatttctaaccctaatccaaagttccctgggtgtggggtgggggtttaaacgtggctggtgcatcctaggtcatccaagagtgaggcgccaagtccttgaggaagggggcacagaactccctgggagggtgggagatgggagcacctgccccccatgggcaggggtacacttttccccacagcctttccttccccaccatcccgtgggggacttttcggggattttaaggcattcgtctctctgggggagggcccagaaccccactccattttattagggcacatcttcctttcatttcctaggtcactgcccctttgtttacagctcctggcctccttcccttgaccacagcctggtttacaaattcccatcagctccccagcccccacctgcccaaagtcccaaggtttaacaaagccacgccttaacttgcctgtgtctgccgtggaaaatcctctccctctggccccctccaagtctccctcattgggagtgaccctgaaggtgtggcttccctcccactttttcctcagtattactttgccttagttttcccccaagagggaaggctggaactcttaactctgtaccccttgataggtaatttaattctgtttctcctagtggttcacaattgaactgaattgagatggtgtcgggtggctaaggagacacctcacctctccttttcccattgtgccgcctttatcaattgcctgttttgttttgtttgttttttaactttccataataagaaaggagttctcttcaaaaaaaaaaaaaacaaaaaaaaaaaaaagtcgacc

SEQ ID NO: 108486 - DNA, 437 bp, Homo sapiens
ggactgtgatcatcattcacgccagcttggcgcgaggacggacaatgcaagtaggctgtggctggggcatccattccttgtagtgatggaactcaccccttggccctgatcttgctgcttcccccctaggaatgcgcagctttgtgggcacctggctgaccatgacagcatccacaggcgcatccagagaggctttagcttcttggagcatgtggacaaagccattgctctccaaccagaaaaccccatggctcactttcttcttggcaggaggcgctatcaggtctctcacctgagctggctataaaaaaaaactgctacagccttgcttgaaagccctctcagagccactgtggaagatgccctccagagcttcctaaaggctgaagaactacagccaggattttccaaagcaggaaggggatatatttccaagg

SEQ ID NO: 108487 - DNA, 665 bp, Homo sapiens
gcgcaaaatggaacctgatactgaaaaaatggataggacccctgaaaaggacaaaatttctttaagtgcgccagccaaaaaaatcaaactcaacagagaaactgggaagaaaattggaagtacagaaaagctcactctaaatcagcaaaagaacaccaagaaacaaaaccagtcaaagaggaaaaagtgaagaaggactattccaaagatgtcaaatcagaaaagctaacaactaaggaagaaaaggccaagaagcctaatgagaaaaacaaaccacttgataataagcggagaattttgaacaagaacaactgaagaaaaaggcgtagataaagattttgagtcttcttcaatgaaaatctcgaaactagaagtgactgaaatagtgaaaccattaccaaagcgcaaaatggaacctgatactgaaaaaatgcataggacccctgaaaaggacaaaatttctttaagtgcgccagccaaaaaaatcaaactcaacagagaaactgggaagaaaattggaagtacagaaaatatatcaaacacaacagaaccctctgaaaaattggagtcaacatctagcaaagttaaacaacaaatagtcacaggaaaggtcagacgaaaagtgactggaactgaaggatccagctcaactctggtggattacg

SEQ ID NO: 108488 - DNA, 446 bp, Homo sapiens
agctgtgaggagccgcatgctaacggacctgacctttgagagaatcggaccttcgacatgcaatggccaattgtttcgaagcgttaataggagctgtttacttggagggaagcctggaggaagccaagcagttatttggacgctagctctttaatgatccggacctgcgcgaaaactggctcaattattctctccacccactccaactacgagagccaaatactgatcgacaacttattgaaacttctccggttctacaaaaacttactgagtttgaagaagcaattggagtaattattactcatgttcgacttctggcaagggcattcacattgagaactgtgggatttaaccatctgaccctaggccacaatcaaagaatggaattcctaggtgactccataatgcatactggtagccacagagcacttattcattcattttcg

SEQ ID NO: 108489 - DNA, 471 bp, Homo sapiens
gcttacccattttggacgagggcacctaccacgatgaaaatacaagggaagggactccctcttccttccctgctttgacagctggacaaacacatgtaagaggggctcagttaacctacctacgatggatgcagagtgagggacatataatggaagggacaacaattgacctggctccatggggtgacattgggcagtagtggctccatgcagcaccagcagaagaatattagtcggagaagaactttgctcaaagcacgccagccatcagcccctgaatccacctcacccactcgccagacctttttgtcgaagttcatgtccttccttaaccttccaatgaagcctctacctgcctgagatgtccaaggtaatccatcagctgaggctctcaaagaatgaaagtgtggccctgcaggaacttttgtgactggaggagaaagctttttgaagaaagacaagactggcact

SEQ ID NO: 108490 - DNA, 279 bp, Homo sapiens
tatgtagactaaaaccaaaggaatggaaaaagatattccatcccaatggaaaccaaaaaagtaggagtagttatagttctaatagacaaaatagatttcaagacaaaactataagaagagacaaagaaggtcgctatataatgataaaagggtcagttctgcaaaaggatataacaattttaagtatctatggacccaacactggaaaactcagatatataaagcaaatattattagagctaaagagtagctctaataaaccccaatagagtaacagct

SEQ ID NO: 108491 - DNA, 171 bp, Homo sapiens
ggggggtggggcccctttttgcccccccccaaaaaaggggtttttcccaaaaatcccccggggggtttttttaggccccccttaaagggaaaaaatttttttttcccccccccgggtaaatttgggcccccccgggggtttttttaaggggcccccccccttaatatttta

SEQ ID NO: 108492 - DNA, 367 bp, Homo sapiens
  misc_feature (1)...(367): n = a,t,c or g
ccacctttggggggcgcccgggggggggaccctcagaggaaggagaggggggcccccccctaaaaagggggggaccccgggttttcgtaaaaggtccaataaacgggcccgggagggggaaccccttttacccccatcccccggggataagcggaaagaaacccccttgccccggaggcaaaggagggagtattgttacatcaggaccaaccccccccggcgggggggccggagggaatccctcccccccnnnnnnnnnngnnnnnnnnnnnngagcctgacctaataaaaaataattatgaccccaacagctatgctgaaaaaatattatcagataggtttccccatcttgtatttctccttttac

SEQ ID NO: 108493 - DNA, 435 bp, Homo sapiens
  misc_feature (1)...(435): n = a,t,c or g
ggcgctttaaaggccaaggnnnnnnnnnnnnnnagggttaaaccagctggggcacttaaagttaaaccggggtttcccatccctttccaaaattctagggttttaaaaaaatttggtaaatttccctcgccgggggtttttaaaagggaccccaaagcctgggggcccgcccctttttttccaggttgggttttttaaaccccccttttgggccccttgtttnnnnnnnnnnncccccttcaaaaaatccctggtcaaaagccaaacccctgggttccctatgggaaaaaacaaaaaaagggggggggtttttatgtttggggaaaaaannnnnnnnnnnnnnnnnnnnnnnnnnnnnnngagacggagnnnnnnnnnnnnnnnnnnnnnnnnnnnnnnnnnnnnnnnnnnnnnnnnnnnnnnnnnnnnncctcc

SEQ ID NO: 108494 - DNA, 450 bp, Homo sapiens
  misc_feature (1)...(450): n = a,t,c or g
tcaaaagttttttcggccccagccccccggagaaagggggggtcaagggcccccccctcagggccccnnnnnnnnnnnnnnnnnnaaaaaggagtctccctctgtcccccaaggtggaaggccttggggccattttgggtcccttcaacccccgccttctggggtccaaagaattccccgtttcagccccccccaggagtggggaattcaaggccccccccttatggcccccttaannnnnnnnnnnnnngannnnnnnnnnnnnnnnnnnnnnnnnnnnnnnnnnnnnnnnnnnnnnnnnnnnnnnnnnnnnnnnnnnnnnnnnnnnnnnnnnnnnnnnnnnnnnnnnnnnnnnnnnnnnnnnnnnnnnnnnnnnnnnnnnnnnnnnnnnnnnnnnnnnnnnnnnnnnnncgaaatcgtcgaccgggaatgnnnngnctatgcacgctg

SEQ ID NO: 108495 - DNA, 505 bp, Homo sapiens
  misc_feature (1)...(505): n = a,t,c or g
cgtaattcccggctcgacgatttcnnnnnnnnnnnnnnnnnnnnnnnnnnnnnnnnnnnnnnnnnnnnnnnnnnnnnnnnnnnnnnnnnnnnnnnnnnnnnnngagacaagaaataaagattaaggactaatagctgcagtgtcagtacaggaggggagagatttgtaggaaattaggggaagacttcatagaggcaaccacagccaaatggggatttgaaggaaaggttgcattcaggcaggcacagaagggctgaaggttggacttgccaggcaaaggggtggaggtaggaaagtatttaatagtgggtagtggtgagggagatacatgtgctccaagaagtgtggttctatgttatctcccaataaggatttagcggaagtgagcgcaaaagggttttcgcctcctatgagcgatctgcatatcctgtaaaggatggccaacgatttgatgttgggcagctacctatacccgagaatagcctgtctcttgggctttgtcggn

SEQ ID NO: 108496 - DNA, 451 bp, Homo sapiens
  misc_feature (1)...(451): n = a,t,c or g
aggttccacgaaattctttcagcatcatggattgggggttctttgagacagcaagtttaacaactccacggggctgcccctaagagacccagtttcctcccaaggcactcaaagcatttcccagccttaataaagagtgccataaaactcctcaccccggtcaaaagagcgaaatcagagcaacttcatcaagggatgtgttcaaatgaaaggaacaagcgatgngaatcttcccccctgggccacaaaaggagagccctctnnnnnnnnnnnnnnnnnnnnggtgagaccttgtttctacannnnnnnnnnnnnnnnnnnnnnnnnnnnncccatccgtgnnnnnnnnnnnnnnnnnnnnnnnnnnnnnnnnnnnnnnnnnnnnnnnnnnnnnnnnnnnnnnnnnnnnnnnnnnnnnnnnnnnnnnnnnnnnnnnnnnnnnaacacgaaa

SEQ ID NO: 108497 - DNA, 473 bp, Homo sapiens
  misc_feature (1)...(473): n = a,t,c or g
ccaattcccgggtcgacgatttcgtcatactcttaccacagaacaagtaacaaaagtgtgtatgagagcttggtttaaactacactccccagcccaagctcctgtttcttttactactcttcaacaagctcaattgcttttactacctaatatccttttaaacaaaggagataagacaagtggccctgggattcagcaggggccgctttctaaagaaaaactggaggctttaaatcaattggtttctgagcagttacaacttggaaatgtggaaccttctctttccccttggaattctcctgtttctagtaaaaaagaaatcaggcaaatggcggatagtaaccgatttaagggccattaatgctgtaattaaacctatgggggccgtccaacccggcatgcctgcccctgctttaatacctaaagattggcctctcatagttattgatcttaaagagnnnnnnnnnncatat

SEQ ID NO: 108498 - DNA, 313 bp, Homo sapiens
tttcgttggggacgtggcttagttgcctggacaagcggaaatacatcctgcctgccgtggggtcctgtgccttctccttgggcctcagtaggctccaggtggggtggaaggcccagctccatggccatggcagcaggaagtggctgttcagtggtaaaaagactgtgccgcctgaccccatcaggctctctcacggtgatcagcaaatggagaaacggccagtaccacgccctccccctgtcctacagctggggaggtgcgctgtgcctccaccctcacctcctctcccctgatgacaagcatggggttttgc

SEQ ID NO: 108499 - DNA, 439 bp, Homo sapiens
  misc_feature (1)...(439): n = a,t,c or g
cacatcctttttttcaaagggggaacaaaaaaaaatggccaaaaaaaagggggaaaccccctttaaaacccccctattttcatgggactttttttttaataaaaaaacaagaagggggggaccaatttccagaattcaattcccccccccgggggccccccccaaaacaataggggtattgggaactccaattcaaaacaagatttgggggggggaaaaccccaaaaaaaccnnnnnnnnnnnnnnnnnnnnnnnnnnnnnnnnnnnnnnnnnnnnnnnnnnnnnnnnnnnnnnnnnnnnnnnnnnnnnnnnnnnnnnnnnnnnnnnnnnnnnnnnnnnnnnnnnnnnnnnnnnnnnnnnnnnnnnnnnnnnnnnnnnnnnnnnnnnnnngcatatcacttagttacaactggaagctttacctacaaaattcacgaaa

SEQ ID NO: 108500 - DNA, 405 bp, Homo sapiens
  misc_feature (1)...(405): n = a,t,c or g
ncaaggaaaactacaaaacagtgatgaaaaaaattgaaggggacacacaaaaaatggaaagatagcatatgcacatgtattggaagaactaatattgctaaaatgtctatactacccaaaaacgatcnnnnnnnnnnnnnnnnnnnnnnnnnnnnnnnnnnnnnnnnnnnnnnnnnnnnnnnnnnnnnnnnnnnnnnnnnnnnnnnnnnnnnnnnnnnnnnnnnnnnnnnnnnnnnnnnnnnnnnnnnnnnnnnnnnnnnnnnnnnnnnnnnnnnnnnnnnnnnnnnnnnnnnnnnnnnnnnnnnnnnnnnnnnnnnnnnnnnnnnnnnnnnnnnnnnnnnnntacatgggccaacagaaaagcatagagaatccagaaataaatccacccacttatagacgaaa

SEQ ID NO: 108501 - DNA, 231 bp, Homo sapiens
caggattcagggcttcctaagctgcaattcagcagggctcccttgcttgttctcactctgtgcccccggcaacgaccccgcgcgcctacactcccgtgccgcctcagctactagtccgcaacttctagccccaaaacgctggagctcagaagccagctcaggtgcgctcgtcggtttcccagggagactggggctgattgtaggcacgcgggggcgggaagacagacgaaa

SEQ ID NO: 108502 - DNA, 414 bp, Homo sapiens
  misc_feature (1)...(414): n = a,t,c or g
tttcgtgccggtggctgtggctgcggcgccggggtcccggccgcgacggcgttcagaacgggctgcagaggctgctccccggcaggcttaacctccacggtctgcccagcgtccggggacccctcaaacgactgtagcggcggctgtgtccctggcacaggggcagagcccggagacggagccgccggaccttccccaactccaaagtcggtgccattgaatttcagagtttccagctgagcggnnnnnnnnnnnnnnnnnnnnatcgcaccgcgccagaaaccgggtcggcctcaggattggggcccctggacaagctcacggctctctccagaaatagtaaaacaacttaggcaaccgcagcaacactgcctgggcccaacttcccgcgtttctcaggtaactacacgcgga

SEQ ID NO: 108503 - DNA, 201 bp, Homo sapiens
gccgaccattcccattcgttctattctaagataggagaaaaccgctctgtggctagaggcaagatatgctggcagcaatactgctctgttactctttgctacactgagatgtttgtgtaacgtgaaacaaatctggcctacgtgcacatctgggcatagtacctttccttgaacttattcatgataaagattcctttgctc

SEQ ID NO: 108504 - DNA, 257 bp, Homo sapiens
aggcttcaacatgtgaatttggggtgagcaggacacatttcattccatggcaaaatggatcatacatctaaatgtaaaccacaaaactgtgaaacttctagatgataatataggaaaaaaagaggtgaccttggtttgacaatgagtttttaggtacaacaccaaaggcacaatccatggaagaaacaattgacaagctggacttcattaaaatgaaaaacttctgctctgtaaaagacggcttcccagagtgctgg

SEQ ID NO: 108505 - DNA, 402 bp, Homo sapiens
  misc_feature (1)...(402): n = a,t,c or g
cgcttttttcacccccccgcaattgggggtgttttccccccctccccccttaaaagnnnnnnnnnnccccaggggccgaaattttctnnnnnnnnnnnnnnccatttgcgcccccccccaaaaaaggggttttccccaaaatcccccccgggggttttttttgccccccctttnnnnnnnnnnnttttttttcccccccccggggtttttggggcccccccggggtttttttttaaggcgccccccccnnnnnnnnnnnnnnnnnnnnnnnnnnnnnnnnnnnnnnnnnnnnnnnnnnnnnnnnnnnnnnnnnnnnnnnnnnnnnnnnnnnnnnnnnnnnnnnnnnnnnnnnnnnnnnnnnnnnnnnnnnnnnnnnnnnnnnnnnnnnnnnnnnnnnnnnng

SEQ ID NO: 108506 - DNA, 401 bp, Homo sapiens
  misc_feature (1)...(401): n = a,t,c or g
annnnnnnnnnaaaaaaaatccccttttttgccgggtagggggggcccccccctttttcccccccctttggggggctannnnnnnnnnttccccttgggtcaggggttcaaaacccttttttccccacgggggaaaccccgtttttcttaaaaaaccaaaatatccccnnnnnnnnnnccctcccctttattnnnnnnnnnnngggggggtgggggggggaaatcccctttattannnnnnnnnnnntttttttaaacccaaatttgcccctttcaccctgggggccaccaaaaggtaaccccctttcccnnnnnnnnnnnnnnngaaaatacatttttcttattatataattagatataggtcaaannnnnnnnnnnnnnnnnnnnnnnnnnnnnnnnnn

SEQ ID NO: 108507 - DNA, 410 bp, Homo sapiens
cacctgattctggctaaaccaccctacaaccacgccttccaccaccctatcacactatccttccaccaccctaccactctactccaccctataccatcttaccaccacctgaccaccactgtacaccaccctacaaccaccttaccaccaccctacaccatcctaccaccaccctaccaccaccctacaaccatagtggtcagcagtattcaaggctcctgagatattggacaagaagagtggacatgtccatgagactcaggtttgggaagccattagacagaactccatgggaaggagcccctgtgaacaactgatgtgggagaagatgtaaggtcctgtcatgttgaccgtaaagaagaatggagatggatgaaggcaaatgcagagggcacaggtaggagcagacc

SEQ ID NO: 108508 - DNA, 984 bp, Homo sapiens
  misc_feature (1)...(984): n = a,t,c or g
ttttttttttttaagacagagagtcgctcgtcgcccaggccgcagtgcagtagcatggatctcagctcactgcaacctccacctcccgggttcaagcgattctcctgtctcagcctcctaagtagctgggactacaggcacctgccaccacgcccatctaagttttgcatttttagtagcgacggtttcaccttgttggccaggctggttttgttggccaattgtctctaaactgctgtcaaaaaaaaggaatggttcaaattgtcttgaatagggcagagctaacctgtaatcacctgtgtgatgagaaacagctttgactggcattttacccctggacctgggcctaagctttcctggtttacataaganttttttcaagaattcaacttcaagtagcagccgagagagctgcctcaggattctctcaaaaactggggaataatatggggaacatttgtttcttctaaaaataaggcaaatgttacattgaatgatttgggggggtgaggtttaattgggaaatggtctctgggggacttgaaaactggatgttttttgccaggatttacctccaggggaaacgggaggttttgtttgagttttacaggacacatttaaaccaaaggccgtggggaaaacccctctcccagctccagagggtttggtccaggaccacccacttaaccagtgccttccttcttaacattcacttttatgcagcttgtgtttattttacaatgggcaggttttgactgggaaattgccatgaccacaggggtttggagttctgctttttttttttcttcttctttttcgggggactgggggactcctcccaagatcacattttagcatctttctctcctactccatttagaaaaataagtaacaggtgaaatgtggtctcagtgttaacgggataattctgctaccggctcctccctgatgattctgaaatacactactgaacgagcaaaaaaa

SEQ ID NO: 108509 - DNA, 428 bp, Homo sapiens
  misc_feature (1)...(428): n = a,t,c or g
gctggcgaaccaggcactgaaccgccgcccccgctaccgcagcagccgccgatgacgctgcctcctctgcagccgccgctgccaaccccggggcccctgcagcccgggctccaccagggccaccagtgatcgaggataagggtcctcccagcctcagccgtgcccccacgctgaggcagcggcagactagagctcctggtccgagttcgtctgcagaccccagggcatgttgggccccacacttcagggccgaccagaagcctctgcatcccctggcctttcgcctcttgcatgcacctgctaaatggttttgtgtattatattctatataggcactaacaattatgaaaaatttggagggntttgcttggtttnnnnnnnnnnnnnnnnnnnnnnnnaatttggaaagacttttcatcttgggtgga

SEQ ID NO: 108510 - DNA, 427 bp, Homo sapiens
cggaaatgtattgggaatgagatagagaaatccacattcaacaagaaacaggaatcattaaacatgcattaactcaaattatatacttattgactgcactgagtgcttattcactatcaccaccaacaggggcattatgctccttgctgaatggccacaaactgcctgtgttcaataagcccacaatctgccacagcctccggagtacctgggactacaggcgcacatcaccacactaatttttttttatttttatttttgagacggaggcttgctctgtcgcccaggctggagtgcagtggcacgatctcggctcactgctacctctgcctcccgggttcaagcgattctcctgcttcagcctcctgagtagctgggattacaggcacaggctaccacacccggctaatttttgtatttttagtag

SEQ ID NO: 108511 - DNA, 505 bp, Homo sapiens
  misc_feature (1)...(505): n = a,t,c or g
ctgtaggataccctctggtttcataggggataatccttaagagtagaaaagttcacaaatttgtgtggtgctaattttataaaagagagatttattttaggtacaaatatttatctagtttttattctaaaatccttggcttttctggcccgttggattgcttttatgagtgctaatttcttctttaatatctttttggctgggtatgtggtggctcatgcctgtaatcccagcactttgggaggccgaggcaggtggatcacttgaggctcaggagttcaagaccagcctggccaacatggcaaaaccccgtctctactaaaaatagaaaaattaggccgggcatggtggtggaccacctgtagtcccagctacttgggaggctgaggcaggagacctggggtgaactcaggaggcgggaggtngggcggtgagccacaaagatcgcaccactatactccacctttgggtgacaggggcaaggactccctctccaaaaaaaaaa

SEQ ID NO: 108512 - DNA, 136 bp, Homo sapiens
aagaggttctgctgccagatgtgggttctgtgggtcgggtgtgggttctgtgggtcgggtgtgggttctgcagaccaggtgcggattctgtgtaggttctgccggcccagtgtagaggctcacacctgtaaacccg

SEQ ID NO: 108513 - DNA, 457 bp, Homo sapiens
  misc_feature (1)...(457): n = a,t,c or g
aaggggtttggggaattccaaaaggcccggaaggccccggttccaaaccgaagaattccccgggggccattaagaatggcctccagcccttgaacctcccaaaacccttccacccccccgggcaaggccggttcgggcccttccaaaaaggagccctccccccctgcgtttttttccctcccttttttcccttcccnnnnnnnnnnnnnnnnnnnnnnnnnnnnnnnnnnnnnnnnnnnnnnnnnnnnnnnnnnnnnnnnnnnnnnnnnnnnnnnnnnnnnnnnnnnnnnnnnnnnnnnnnnnnnnnnnnnnnnnnntgtcctcnnnnnnnnnnnnnnnnnnnnnnnnnnnnnnnnnnnnnnnnnnnnnnnnnnnnnnnnnnnnnnnnnnnnnnnnnnnnnnnnnnnnnnnnnnnnnnnnnnnnnnnnnnnnnnnnnnnnnnaattccaccgcactg

SEQ ID NO: 108514 - DNA, 358 bp, Homo sapiens
  misc_feature (1)...(358): n = a,t,c or g
gtgcggtggaattccgtgagtgctgcaagagcaacctggagcctctgtttgagggctacatctctgcgacgggaggccgagtgcatggaagccaacagtgggaggctggcctcagagctcaaccacgtgcaggaggtgctggagggttacaagaagaagtatgaagaagaggtggcactaaaggccactgctgaaaatgaatttgtgggccttgaaaaggatgggaagggggtaantgtggctatggaaattnnnnnnnnnngggggggggtgaccccnnnnnnnnnntaatttgggggggttttnnnnnnnnnnnnnnnnnnntttgtnnnnnnnnnnaaaaccacttagtcgcacg

SEQ ID NO: 108515 - DNA, 422 bp, Homo sapiens
  misc_feature (1)...(422): n = a,t,c or g
gaggagcaattcgcactgcctgtgagattctgtcacactcgctccagattcaaggggtccaaatagtgtattcaagtcaagtgcccatccagggatgaacgaacacagcccggcccggccacaccatggagcaggactcggccatgaacaggaaccaggctctgacaccggccacggcgcagatgcccctggaggagtccaccctcagcaagagacacacagacaccgacacggcgtgcaatcccatttgtgtgaatgtccaggacaggccgattcaaagacaggaaggggacacgtgggtgccagtgactggggattatggggactgggggaaatggctaaagggcacccacaaaagttaatgataatgctccacannnnnnnnnnnnnnnnnnnnnnnnnnnnnnnnnnnnnnnnnnnnn

SEQ ID NO: 108516 - DNA, 447 bp, Homo sapiens
  misc_feature (1)...(447): n = a,t,c or g
tccagcgaggcggaattcttctgtggcactctggtgtgtactcatgaggaacaagatattttacaagcgtgactcatacaagagccagaaactgctaaagaaactcatgtcaggtagacagcagtcttgtaattggatcactgggatgatgggtaccttgttgcgtctgtggttgtttctcttttctgtatcctggagtgcaagatgcagtttattcactcattctcagtttttttgggnnnnnnnnnnnnnnnnnnnnnnnnnnnnnnnnnnnnnnnnnnnnnnnnnnnnnnnnnnnnnnnnnnnnnnnnnnnnnnnnnnnnnnnnnnnnnnnnnnnnnnnnnnnnnnnnnnnnnnnnnnnnnnnnnnnnnnnnnnnnnnnnnnnnnnnnnnnnnnnnnnnnnnnnnnnnnnnnnnnnnnnnnnnncnnnnnnnnnnnnnnnggag

SEQ ID NO: 108517 - DNA, 422 bp, Homo sapiens
ccggagtgcagtggtgcaatctcagctcactgcaacctccacctcctgggttcaagcaattctcctgcttcagcctcccgagtagctgggattacaggtgtgtaccaccacgcctgggcaatttttttgtatttttagtagagatggggtttcgccgtgttggtcaggctggtcttcgaactcctgacctcaggtgatccgcctgccttcggccttcccaaagtgctggggattacaggagtgagccactgtgcctggcccgaggttaataatttctaagggcccaaggggcaggctgagatggagggccaaaaggaaggccaggtcaaggtcttggtaggggtaagttggcggggggtggcgcaaaggagttttgtgtgtacacgtggtaggaggggagggtggcagccaagtaaacatgg

SEQ ID NO: 108518 - DNA, 923 bp, Homo sapiens
  misc_feature (1)...(923): n = a,t,c or g
cgacagcccccgcccaaagcccaacacgcaaggggacaaaccgcgaaacaggaccaggacagagccaccagcgacgcagacaaacggaaacaggggcgcgcnnggccccgggcggcnnnnnnnnnnnagggagaggggcgggcgcgncgccgccccgaccgccggccggccccnccccggcggcngccgngcggcgcccggcggggcgccggcgcgcggcggcncgcagccgcccggccncgggngcnccgccggcgccgccccgccccgccccgggccccgcgcnccgcgcgncggccccggccgcngccgncncnnnnccnncncnnnnnacccnncnnnnncnnnngnnnnnnnnnnnnnnnnnnnnnnnnnntttttctccccaagcctttaaattgggtaccccccgggtttttnnnnnnnnnnngttttaaaaacccccccccgaaattaaattttggggccccnnnnnnnnnnnnnnnctttnnnnnnnnnngggaataaaaattggttccttaaaaaggcccccccccnnnnnnnnnnnnnnnnnnnnnnnnnnnnnnnnnnagaggtnnnnnnnnnnnnnnnnnnnnnnnnnnnnnnnnnnnnnnnnnnnnnnnnnnnnnnnnnnnnnnnnnnnnnnnnnnnnnnnnnnnnnnnnnnnnnnnnnnnnnnnnnnnnnnnnnnnnnnnnnnnnnnnnnnnnnnnnnnnnnnnnnnnnnnnnnnnnnnnnnnnnnnnnnnnnnnnnnnnnnnnnnnnnnnnnnnattagaagcatggtatcttccattctctctctgactctcccttcctgcctccttnnnnnnnnnnnnnnnnnnnnnnnnnnnnnnnnnnnnnnnnnnnnnnnnnnnnnnnnnnnnnnnnnnnnnnnnnnnnnnnnnnnnnnnnnnnnnnnnnnt

SEQ ID NO: 108519 - DNA, 533 bp, Homo sapiens
  misc_feature (1)...(533): n = a,t,c or g
accctgacatgagcgtctgctgccttatcaacatccaagggcagaaatgaatggctttgagtctggcgtgaggccccggaatgctggtttctcccatctggggtgggcaggctgggattcctgccccctcctttcccacctgcactgtacccaggaccctttcagcttcctccgaggccgccatgggccatgctgtctgtggcgtgtgctcagtgtttcccagaactccctgtgggctcatgccccatcacccccagcgagcagccctcttcctggcacagcctcccctcctgcctcagtgccctcctgtgcttctggggacccctcccaaaggagccgtcgcctgcaaaccctttcagggtccacttccccagaacccaaaccagacatcctcaggcccctggttggtttgtttttcctctttaaaaagatcagcnnnnnnnnnnnnnnnnnnnnnnnnnnnnnnnnnnnnnnnnnnnnnnnnnnnnnnnnnnnnnnnnnnnnnnnnnnnnnnnnnnnnnnnnnnnnnnnnn

SEQ ID NO: 108520 - DNA, 421 bp, Homo sapiens
  misc_feature (1)...(421): n = a,t,c or g
nnnnnnnnnnnnnnnnnnnnnnnnnnnnnnnnnnnnnnnnnnnnncaaaatgcctgtctttgcaaaaaggtgcgnnnnnnnnnnnnnnnnnnttnnnnnnnnnnnnnnnnnnnnnnnnnnnnnnnnnnnnnnnnnnnnnnnnnnnnnnnnnnnnnnnnnnnnnnnnnnnnnnnnnnnnnnnnnnnnnnnnnnnnnnnnnnnnnnnnnnnnnnnnnnnnnnnnnnnnnnnnnnnnnnnnnnnnnnnnnnnnnnnnnnnnnnnnntgcctacactgaaaaccgcaaaacactaagaaaaattaaagaactcgcaataaatggaaggatagatcatgctcgtggattggaaagcttaacattataaagatatcgattcttcccaaagttatctataggttcagtgtaacccccaacaaactctt

SEQ ID NO: 108521 - DNA, 395 bp, Homo sapiens
  misc_feature (1)...(395): n = a,t,c or g
ttccacaggggttttatttggggaacccccgggtttttccccccccgccgtttttaaaacccggccccggaatttaattttggggcccctataaaaaaattttttcttgccaagcccggggtattaaacttggttcctttaaaggggccccccccnnnnnnnnnnnnaattttttcccaaagggcaaagttttcctgttttcccccccggttttgattttccgggccccaaaaatttttccgccccctttcccccaggtggttggggttcaaggcttgaaccccggggcctccccgggccnnnnnnnnnnnnnnnnnnnnnnnnnnnnnnnnnnnnnnnnnnnnnnnnnnnnnnnnnnnnnnnnnnnnnnnnnnnnnnnnnnnnnnnnnnnnnnn

SEQ ID NO: 108522 - DNA, 409 bp, Homo sapiens
  misc_feature (1)...(409): n = a,t,c or g
ttgacatcttaacaatattaagcatttccatccttgaacatgaaatgnctttcatttatttgagtcttccttagtttctttcagcaatgtttcataatttccagtgtacaagtcttttgcctcttggttaagnttattcttaggtattttattatattcaatgctattgtaaatagaattgttttcttaatttccttttcaggttgttcattgttagtgtatagaaatgcaactgannnnnnnnnnnnnnnnnnnnnnnnnnnnnnnnnnnnnnnnnnnnnnnnnnnnnnnnnnnnnnnnnnnnnnnnnnnnnnnnnnnnnnnnnnnnnnnnnnnnnnnnnnnnnnnnnnnnnnnnnnnnnnnnnnnnnnnnnnnnnnnnnnnnnnnnnnnnnnnnnnnnnnnnnnnnn

SEQ ID NO: 108523 - DNA, 361 bp, Homo sapiens
ttttttttttttcagattccaaacattctctttattacgtgtttgatccagaggagaaactaagtgcagggttggggaggagggggctagacggggaggggccaccttgcctgggtgccccgggcccctaccccctttgggagccaagccatgccctcccagccccctcagagcacccgggctgttccatagggcaggaggggggaagggagggagggggagcccttggtctgagccgcagtaggagtgtggggcaggagggctgaggttggcaagccccttcctaggacgcaagggctcggcttaatcgctgagcctggcctgggagcgggggtgatgaagaggggtggagtcatcataa

SEQ ID NO: 108524 - DNA, 567 bp, Homo sapiens
  misc_feature (1)...(567): n = a,t,c or g
agacggancnacatctgtcacctaggctggagtgtgcaatggcacgaatctcggctcactgcaacctccgccacccaggttcgggcgattctcccgcctcagcctccggagtagctgggattacaggtgcatgccaccacgcccacctaatttttgtatttttagtagagacgaggtttcaccatgttggtcaggctggtctcaaaactcctgacctcatgatctgcctgcctcggcctcccaaagtgctgggattacaagcgtgaaccactgcgcccggccagagtcctgtcccttctaaggtgccaagtgcccctgcctctggacagaacagggcagggtgtgaagaagcaaagggaggaagacaaccctcaccaaccacccccaccttgggacacagcatcctgtgctgacccctccgggtccagggcttcgcggtaagtccatggtcaggcatcaaggtccagggcaggggggctgagcttactgacactgagagtgatgatgggctggagacatcagcactcaatccaagctggaaccccatcacccctgtctggtcccatc

SEQ ID NO: 108525 - DNA, 376 bp, Homo sapiens
  misc_feature (1)...(376): n = a,t,c or g
ccttgggatgaaaagggctgaggctggttggcaggtaattcattctcactattctgactcaaagataccaggttttgggttcagtggtttgagtgagttcacccagagcttcctctacaagctgtcctccattaagctgtgcctcctctctgctgtcagagtctattattccatgctccccataaggtagggcttccattttcagtcttccaaagtgttgctccagagggagctttccaatgtcttggatgaaagaagtctnnnnnnnnnnnnnnnnnnnnnnnnnnnnnnnnnnnnnnnnnnnnnnnnnnnnnnnnnnnnnnnnnnnnnnnnnnnnnnnnnnnnnnnnnnnnnnnnnnnnnnnnnnnnnnnnnnn

SEQ ID NO: 108526 - DNA, 364 bp, Homo sapiens
  misc_feature (1)...(364): n = a,t,c or g
cacatcattcatcattcatcttcatcatcatcatcatcaccaccaccatcaccatcatccaatggctatgcagactgagaaatgagggggagggctctaagggagtgtatgagttggtagtgggcctgtgtcaaaagaacattctgaatcccttaagagtgatacaaagaatgatggcattgtgaannnnnnnnnnnnnnnnnnnnnnnnnnnnnnnnnnnnnnnnnnnnnnnnnnnnnnnnnnnnnnnnnnnnnnnnnnnnnnnnnnnnnnnnnnnnnnnnnnnnnnnnnnnnnnnnnnnnnnnnnnnnnnnnnnnnnnnnnnnnnnnnnnnnnnnnnnnnnnnnnnnnnnnnnnnnnnnnnn

SEQ ID NO: 108527 - DNA, 367 bp, Homo sapiens
aacttttgtagaggtctcaagaaacctaggaaaagagggcaggatatgttgtaaacatcctgaagcacaaagaatgccctgtgcagaagactatctatccgtggtcctgaaccagttatgtgtgttgcatgagaaaacgccagttagtgacagagtcagccaaatgctgcacagaatccttggtgaacaggcgaccatgcttttcagctctggaagtagaagaaacatacgttcccaaagagtttaatgctgaaacattcacctttcatgctgatatatgcacactttctgagaaggagagacatatcaagaaacaaactgcacttagtgagctcgtgaaaaacaagcccaaggcaacaaaagatca

SEQ ID NO: 108528 - DNA, 338 bp, Homo sapiens
  misc_feature (1)...(338): n = a,t,c or g
cggggggcagtcccttgtttaccccccctttggggggccaatgggggggaatcccaagggcgggaatttcgaannnnnnnnnnaaccccgggggaatcccgtttttttttaacacaccaaaaattaacccggggggggtttggggcccctggtcccccccctcccccgaggtttggcccaggaaaaagcgcaaaccctgggggttggggttcccaaaaacccaaattttttccccgggcccccccctgggggcaaaaaagagtgcccttttccnnnnnnnnnnnnnnngaaagtgacttgcaaacatcagaaataggtcatcaaacgtgctcgtgccg

SEQ ID NO: 108529 - DNA, 354 bp, Homo sapiens
  misc_feature (1)...(354): n = a,t,c or g
atcnnnnnnnnnnnnnnnnnnnnnnntttggtaattttctatttgtactaccaattattgtgagaggggcactgaaatttcccactgtaactgaatttctgtttcttcttgctgttcagtcagttttggcttcgtgtatttcgaagctctgctgttaggtacagaaacgctcaggagattgttatgtcctcttgatgatttgatgcctttatcattaggaaatgatctttttttatccttcagaatattctctgctctgaaatctttcttgtctgatattaatatagccacnnnnnnnnnnnnnnnnnnnnnnnnnnnnnnnnnnnnnnnnnnnnnnnnnnnnnnnnnnnnnnn

SEQ ID NO: 108530 - DNA, 342 bp, Homo sapiens
ggcctaaaaactgccatttagaaaaacaatttgtcagattgggccatggttcctaacacattgtgtaaattttatattccttaggaaggtttttgtctttctctttcccagctgtatcctatggaaaaggaacctattttgctgtggatgcccagttattctgcccaaggatacctactccaagccagacagcaatgggagaaagcacatgtacgttgtgcgagtacttactggagtcttcacaaagggacgtgcaggattagtcacccctccacccaagaatcctcacaatcccacagatctctttgactcagtgacaaacaatacacgatctccaaagct

SEQ ID NO: 108531 - DNA, 389 bp, Homo sapiens
  misc_feature (1)...(389): n = a,t,c or g
gaggaggcgtatccagtatccagacccctaccnnnnnnnnnnnnnnnnnnnnnnnnnnnnnnnnnnnnnnnnnnnnnnnnnnnnnnnnnnnnnnnnnnnnnnnnnnnnnnnnnnnnnnnnnnnnnnnnnnnnnnnnnnnnnnnnnnnnnnnnnnnnnnnnnnnnnnnnnnnnnnnnnnnntgggtacccaaacccctccccggaaaaactgccttggggttccggcctttggggcaaagggatgttgacccctttaaccaacccgcctttggaagggggggaagttaacccgggggttttgtccccaccccctaagaaagaaaacggcacccaaagttcctttgaaaaggcctcccccattaaaggggaaaaaaacactacctccgccc

SEQ ID NO: 108532 - DNA, 438 bp, Homo sapiens
  misc_feature (1)...(438): n = a,t,c or g
tgtactctcgccagaactcccgggactaggaggacctgggcacggcccgccgggacctcatcaagtcggaggagctgagcatcaagcatcagcgggacctccgggaggctgtgggccagaaggaggacatggaagagcggattactacactggagaagcgctacctggctggtcagcgtgaggcaacatccatccatgacctcaatgacaagctggagaatgagctggccaacaaggagtccctgcaccgccagtgaggagaaggcccgacacctgcaggagctgctggaggtggcagagcagaagctgcagcagacgatgcgcaaggcagagacgctgccagaggtggaggctgagctggcccagagaattgcagccctcaccaaggctgaagaacggcatggcaacattgaggagcacctgcggcagctggagggn

SEQ ID NO: 108533 - DNA, 386 bp, Homo sapiens
ggaccccagcaaccccacaaggcccaccccaaagagccaggccttctgccctttggagcccagaatcccccacctcctgctcggggcagcttgtccctgtagcggatatgcacactcggaccagaggcccccagagcgaacccagccttgctagaggcaccccaggcccaggcaccatggtggggaggggctgcccagagaggcagcggagacctcagccccgtggccaccctgcagtccagggaccagtctggcccacaggaagcccccagcccataagcagcatcaccagagagaagcttacgcccgggggaggaagtgcgatttgcagccacctgcccctcagtgcactggaagcggggcagacctccagggcacagacagga

SEQ ID NO: 108534 - DNA, 394 bp, Homo sapiens
gaccttggtaccgccttcccaggtatagctagggacatgggacatggctgttaggggtgtgggctgaggggcgacggagacggccaagtcttaagagccgtgcccagcacggaggaggcgggacttctgccctcggggccaccgcagcctggacaggtgggcagcagagcatccatccccccggcgcctggcccggccgcccagttggactcggggatgttggcttgctatggcgcccccgtgtggcggcggtgacaggcagccgcaggcccacagggtaactcaggctggccctgctggggtgaggtgtggaacggagccaccaggtcccctgtgggctgtgaaagctccggggcttgagggcaatttggagggaggatgaggctgcaagaag

SEQ ID NO: 108535 - DNA, 529 bp, Homo sapiens
tgcactatgcggcctggcagggccggaatgagcccatgaaagctggtgctgaaggcgggctcggccgtgaacatcccgtctgatgagggccacatccccctgcacctggcggcccagcatggtcactatgatgtgtctgagatgctgctacagcaccagtctaacccgtgcatggtggacaactcggggaagacgcccctgggacctggcctgcgagttcggccgcgttggggtggtccagctgctcctcagcagcaatatgtgtgcggcgctgctgggagccccggccgggagacgccaccgaccccaacggcaccagccctttgcacctcgcagctaaaaacggccacatcgacatcatcaggctcctcctccaagccggcatcgacattaaccgccagaccaagtccggcacggccctgcacgaggctgcgctctgcggaaagacagaggtggtgcggctgctgctggatagcgggatcaatgcccacgtgaggaacacttacagccagacagccctggacatcgt

SEQ ID NO: 108536 - DNA, 693 bp, Homo sapiens
ccgctatgccggtcgcttccagtcaagtccggtcgcttccagtcaaccccgctccagttggcccagctgggaaatgcggccaccgtgaggattaagttagtaaaatggtacacagtgccttaaacagtgaccggctggccgtgtcaaattaccaggccgagaccagcctggagccgcggcctccactcccgcctagtgcagtcccgggccctcccacaaggaggtccggcccccggggttgccttccagccagttggggcttttgcccattttcctatcgcctgccaccaagctgctgctacgtatcccggctggaatctgactacccctccagcaaagtggtggggggcgggcccgggtcagggaggccacatcaccagcttcctgcaggaacttatagaaggcgagcagcccggaaaatggcatgggcggccgcccaggggagacctcggagggcaaggcatccccgttcccaggtgccccagccacccccaccgctgcaggtgcacgcccgcagggaggcgccatgtggtggggccccacatgtgtgtggggagactgcgaggtcccagcctacccaccgcaggccactgccccagaccgctgccacctcccagcgcacctcgcatccgcatctgcccaggctcccagggcaaagataactgaattaggacaccagtattccaatcttag

SEQ ID NO: 108537 - DNA, 339 bp, Homo sapiens
  misc_feature (1)...(339): n = a,t,c or g
nnnnnnnnnnnnnnnnnnnnnnnnnnnnnnnnnnnnnnnnnnnnnnnnnnnnnnnttaaaatccccggggggggtttttccccccaaatggaatccccttaaaaaagggtttaggcctttaaaaaaagggccattaaaaaatccttaggggggttggcagggggggctaccccctgtaaccccaccctttggggaggccagggcgggggatccattgggctttagaagttaaaaaccacccgggccaaatgggaaaaattcttttttnnnnnnnnnnnnnnnnnnnnnnnnnnncctgggggcccttccttggggccgcccccactttttgggagggtg

SEQ ID NO: 108538 - DNA, 350 bp, Homo sapiens
  misc_feature (1)...(350): n = a,t,c or g
nnnnnnnnnnnnnnnnnnnnnnnnnnnnnnnnnnnnnnnnnnnnnnnnnnnnnnnnnnnnnnnnnnnnnnnnnnnnnnnnnnnnnnnnntaccccctaccccccagtaagacctaaaactataaaactcttagaagaaatcataggacaaaaacttcacagcattgtatttgtcaatgatttgttggatatgacatcaaaagcacaagtacaaagaaaaataaattagacattatcaaaattaaatacttttgtacatcacaggaccccattaacagtgaagagggaannaaagagtcagaagaaaatatttgcacatcatatctgataaaggattaatatccagaaagg

SEQ ID NO: 108539 - DNA, 774 bp, Homo sapiens
agcacaagaagaagaagctaaggtaaatgaaattgcctttataaatacccttgaagcccagaataaacgtcatgatgttttatcaaaattgaaggaatatgaacagaggcttaatgagctacaggaagagcgtcagagaagacaggaagaaaagcaagcacgtgatgaagctgtgcaggaacgcaagagagctctagaggcagagcggcaggcccgtgtagaagaattgttaatgaagaggaaagaacaagaagcccgaattgaacaacagaggcaagaaaaggaaaaagcccgtgagggtgcagcccgggaaagagctagagacagggaagaacgattggcagcactcacagctgctcaaccaagaagctatggaagagttacagaaaaaaattcagctcaagcatgatgaaagtattcgaaggcacatggaacagattgaacaaagaaaagaaaaagctgctgagctaagcagtgggcgacatgcaaatactgattatgcccccaaactgacccctttatgaaagaaagaagcagtgttctctctgcaatgtcctgatctcttcagaggtatatctttttagccatgttaaagggagaaaacaccagcaagccgtgagagagaataccagcatccaggggcgtgaactgtcagatgaagaagtggagcatctttccttgaagaagtacattattgacattgtggttgaaagtacagctccagcagaagctttgaaagatggagaagagcggcaaaaaaaaaaaaagtcgacc

SEQ ID NO: 108540 - DNA, 376 bp, Homo sapiens
  misc_feature (1)...(376): n = a,t,c or g
ccaggggccccccccggaatcccctccccttgggaaggttaagcaagccaatccccctaagtccagccgtttaagcccaccctgcccaccttatttaaccccctcttttcttaaaaatccaaaaattaacccggccttcccgttgggccccgttattcccacttccttggaaggttaagccagaacccccattttaccctaaaaaccgaaggttccacccacccaaatggccccccccatctcccaccttggcaaccccaccaggccccccccaaaaaacccaaaaaaccnnnnnnnnnnngaagttatgttctggagaagtagaaatatgggaggggctgggggatatgcatgggcaagggaagtttctgtcttc

SEQ ID NO: 108541 - DNA, 153 bp, Homo sapiens
cataaaaatatcacctttcactccctctatgctctcaggcatgatgaaaggaaatataccaaacgtcatccctatgattcttacttgtgaatggatcaacattgacatactcaggcattgttgcaaccaaggtcctatttccactgaccctct

SEQ ID NO: 108542 - DNA, 1241 bp, Homo sapiens
cgcccagcttggcacgaggtgacaaacttgacttttggagatgtagccaacaaggctacgctatgctctatgaaaggctgcatgagagcacttgtggcccaactaaaatcctgaaagtgaagacttacagcaggttattgcaagtgttttgaggaatttgtcttggcgagcagatgtaaatagtaaaaagacgttgcgagaagttggaagtgtgaaagcattgatggaatgtgctttagaagttaaaaaggtacctttgaaaacatttagtactataatatgaatttcatgtttggcttttttttgctgccttcttttagccatgagatttcctaatttcttacctgtgtattattcagtactataatatggaatttcatgtttagctttttttgctgccttcttttagccatgagattccctaatttcttttttgagatgggatctctttctctcgcccaggctggagtgcagtggtctgatcttggctcactgcaacctccgtctcccatgttcaagtgattctcctgcctcagcctcctgagtagctggggattacagtgcacgccaccactcccggctatttgtatttttagtagagatggggtttcaccatgttggtaaggctggtctcgaactactcctgactttgtgatctgcccaactcggcctcccaaagtgctgggattataggcgcaagccatcacgcccagcctagattccctaatttcttacctgtttatctcaccagtccatagttttagagtaccgcaaactcctaaagtactaaggtagaaaagattatataagggggatttaaatgtatatcagggtttcctcctgccctcagcacctatagacattttttgaccagataattccttccgttttgctggggcctgaccctgtgccacctgtagattgtttagcagcatccccctggcctttgcccaactgggctgcccagtatacccctcccccctagttatgccgatcaaaattgtctccagatactgtcagatgtctgtgggagggaggaaggacaacgtcacccaccaattaagaatcactggtataagtgtacctttgtgctctccaaacctcaatcccctcaaattttgatggtcaacttatcaagaggtgatcagagccaagggtgaggaatcatcaaataataatttgtttacagaaggaaatatcccccaggcagtccatctgcttcagaaacttaggctaaattt

SEQ ID NO: 108543 - DNA, 498 bp, Homo sapiens
agtttacgagtagaagttcctaaaggaatcttacatgggtatttttatgtggacaccagcaagtgtgtgtgtacatgcacatgcatgtgtgtgtgtgtgcttttttgttttttgacttctcaatcattgtctcatcgacatcccttttgtctcatctgaaaaaatatcttggagatcattccacatcagtacacagagcttcctcagtctttgtttttttaaaacactaactgctacttgattcttttttttttttaaaatttatttatttattttgaggatgggagttttgctcttgttgtccgggactgggagtggcaatgggtgtggatctaggaggtcactggcaaccttctgccttctgggtttgagcaattctcctgcctcagcctaagctgggcttacaggcatctgccactatgcctggctaattttgtatttttagtagagacggggtttcatcatgttggtcagggcttgtcttgaactcctgaccta

SEQ ID NO: 108544 - DNA, 302 bp, Homo sapiens
tgcagtgagctgaaatcatgccactgcactccagcctgggtgacagagcaaaactgccttaaaaaaaaaaattaagagacagcccgtgtcccagtccctcgtcttgcactgcagaatttacatctaagaagaaaatgtatttttgaaagggtgatggctggcctcatccctcactaattgacaacccatctgtcgatgccattttttcccttcctgttctcactccacagaaagaggagatacggttcttgtttggtaattgctaaaatctctttgaggaaagaaataaaaatgtcaactcc

SEQ ID NO: 108545 - DNA, 371 bp, Homo sapiens
  misc_feature (1)...(371): n = a,t,c or g
cccattttgttttgttgtgagagaccatgaacagcctagaaagatagaaatctcaataatgagaagtttctgtaatgtgtggctcctgcccaccttctctctgcttatttgctgtcttttttttttgtttgtttttttagagataggggccttctctgtcacccagggctgggagtgcagtgggtgacatcatgggctcactggaagcctcaaactccggggagtcaaggcaatggcttctacctccacctcccgagtagctgtgactacaggcaggtgccaccacagaaggacagaccatctaaggaaaacttaaaaagacagcacaaggacaggctggacagccaccangacctggctaattttttatt

SEQ ID NO: 108546 - DNA, 378 bp, Homo sapiens
  misc_feature (1)...(378): n = a,t,c or g
cagcgtgggaaacacagtgagattgtgtccctatttttaaaaaaaatgattacaaagctccagtattcaaaatagtttggtcctggcataaagcccgacaggaagcccaacggaccaatagagagcccggaaatataccctcacatagaaggtcaaatgatcttcaacaaaggtgccaaacctacannnnnnnnnnnnnnnnnnnnnnnnnnnnnnnnnnnnnnnnnnnnnnnnnnnnnnnnnnnnnnnnnnnnnnnnnnnnnnnnnnnnnnnnnnnnnnnnnnnnnnnnnnnnnnnnnnnnnnnnnnnnnnnnnnccagcaaggccggaaactaaactcctagaaggaaatagagggaaaaaagttcatgacattgg

SEQ ID NO: 108547 - DNA, 357 bp, Homo sapiens
  misc_feature (1)...(357): n = a,t,c or g
ccccaattaaaaggcacagtggtgacttggataaaaaagcaagatccaatggtatgctgtcttcaagagacccatctcacatgcaatggcacccttaggctcaaagtaaagggatggagaaaaatctactccacaaccaaaacagaaaaaagcaaaaggacnnnnnnnnnnnnnnnnnnnnnnnnnnnnnnnnnnnnnnnnnnnnnnnnnnnnnnnnnnnnnnnnnnnnnnnnnnnnnnnnnnnnnnnnnnnnnnnnnnnnnnnnnnnnnnnnnnnnnnnnnnnnnnnnnnnnnnnnnnnnnnnnnnnnnnnnnnnnnnnnnnnnnnnnnnnnnnnnnnnnnnnnnntgccctgctc

SEQ ID NO: 108548 - DNA, 296 bp, Homo sapiens
tacaagcatgtaccaccacacccagctaagtttttgtttttttagtagagagggggtttcaccatgttgtccaggctggtcttgaactcctgatctcaagtgatccacccccttcagcctcccgaagtgttgggattacaggcatgagccaccacactcagcccggattttaattctttgtttgattttgctaactagagcagcaaggacagtctacagtctttggttctaacttcaaaactgattttttctgatgcagttttattaagccatatctacttgaaacaaaaagtatt

SEQ ID NO: 108549 - DNA, 413 bp, Homo sapiens
  misc_feature (1)...(413): n = a,t,c or g
gagagagctagcnnnnnnnnnnnnnnnnnnnnnnnntacaaagaaatattattaaatctatagaacgagatagacagtaatacaataatagtggagaaattcaacattctactcacagcattagagagaccattgagataggaaatctggcaaatcaacaaagtatccccccaaatcaaaattatacgaactacctacttagaccacagcagaataaaactacaaatcagtatcaagagaaatttcagaaactataaatttacaaagaatttaaataacatactcctcaacagtgactatgtaaatgaagtaattatgatggnnnnnnnnnnnnnnnnnnnnnnnnnnnnnnnnnnnnnnnnnnnnnnnnnnnnnnnnnnnnnnnnnnnnnnnnnnnnnnnnnnncactagcn

SEQ ID NO: 108550 - DNA, 372 bp, Homo sapiens
  misc_feature (1)...(372): n = a,t,c or g
ctgatgggttcactggtgaattctatcaatatttaaagaaaaattacaccaatactttaagctcttccaaaaaatagaacgggagggtacgcttctcaattcattctatgaggtcagtattaccctgataaccataatcaaagacatcacaaagaaagaaaactacaaaccaatagcctttatgaatatgnnnnnnnnnnnnnnnnnnnnnnnnnnnnnnnnnnnnnnnnnnnnnnnnnnnnnnnnnnnnnnnnnnnnnnnnnnnnnnnnnnnnnnnnnnnnnnnnnnnnnnnnnnnnnnnnnnnnnnnnnnnnnnnnnnnnnnnnnnnnnnnnnnnnnnnnnnnnnnnnnnnnnnnnnnnnnnnnnnnnat

SEQ ID NO: 108551 - DNA, 454 bp, Homo sapiens
ccatccatggagcattatgaagcacagatcattactttggggatgtggatgtactcagttaacaagcagcagcatgcaggagctgaattttatgctttaggtaaaggtgataaagtaaaatgcttttgctgtggaagaaggctaactgatggaaacccattgaacacccccgggaacaacatgctaagtggtatccaaggtgtaaatatctattacaggagaagaacaagaatatataagtaatatccatttaacccattcacttgaggagtcactggtgagaagtgctgaaaaaaatgtcatcactaactataagaatggattataccatctttcaaaatcctatgttacaagaagctacacaaatgggattcagtttaaagaatattgcccacgcgtccgcggacgcgtgggcggacgcggaggtcgtcccgggatttccggaagggtctcg

SEQ ID NO: 108552 - DNA, 413 bp, Homo sapiens
cagcccttgaacctttgacgggaagaaagttgaattccaggaggcatctttgtgggagagccccaggtagggttcagaggagctttggctcaaggaccctgggtcacaggcaccctcagaggaagggaagagaggggtggcagcatccggtgccagggcggagccgtctgcccctttcgcccctggttccccccacggcagcccctgatgtgtctctgctccaccaggtgaccatggccgaccgggcggcagctgagagggcttgcaaagacccgaaccccatcatcgacggccgcaaggccaacgtgaacctggcatatctgcgcgccccaagccgcggagcctccagacgggtgagagattgtgttttcctgcctggctcttctcggtcggacgcgtgggtgacacaaact

SEQ ID NO: 108553 - DNA, 400 bp, Homo sapiens
  misc_feature (1)...(400): n = a,t,c or g
agcaaaccaaagatgagaattcttcaaagtccacatttagttttagtatgacaaaaccatctgagaaggaggtctgaacagccagcaaaagccacttttgcctttggagctcaaactaatacttaccagctgtagtactagtttgagctggtaagtattaactttttattattattattattannnnnnnnnnnnacaagttgtcgttttacaagttgccttgacagatgcagcatgccaattaagggtttacactgaacatagttgagaaatacaaaactctttgggaaggaacctaggattttcagtttgaactgctctttaaaaccctcatgattctggggaaggcatctgtggatctaattttgagaaatacagcagtaatgcaaagctcaatatg

SEQ ID NO: 108554 - DNA, 437 bp, Homo sapiens
  misc_feature (1)...(437): n = a,t,c or g
cggtgtgtccggggatttacccggggttttgggataaggaaaagttttttttggccggggcccttggtcccccccgtttttcctacccccttgaggggcccannnnnnnnnnccccccgatccccggggtttgggccccccccgggccccttttttaaccccccccctttcccaagtgcccaaaaaattttcccnnnnnnnnnnnnnnnncccccccgtcccccccccttggggggtttgggaagggaattccctttgccccccagggggaaggtttcccccaccccggttttgccccctnnnnnnnnnnttggggtccaaagggggccgttttccnnnnnnnnnnnnnngtgctatctttgtgaagtcggagttgtggaaactcttggaggaaatgatatctctgcagagccctgaagaacaaggcaaggtgtgga

SEQ ID NO: 108555 - DNA, 418 bp, Homo sapiens
  misc_feature (1)...(418): n = a,t,c or g
cacnnnnnnnnnnnnnnnnnnnnnnngtactttttactacagcaaatgcccattcagtggtgatgtagtaaaaagtactgaatgggcatttgctgtagacggagttcactccctgtcgaggtggtgcatttccttatacttgtctctaccacagacagaagtcttctttcctttagtttttctttccnnnnnnnnnnnnnnnnnggaaggggggtttctttttttcccccgggtgggggggaaagaccccaatttgggttggtggaaaattttccccccagggttaggcctttttccccccttaaaaccccaagaatttgggattggaaaagccccccaacaaccccgggtaatttttgtggttttatttggaaaggggtttcccctgggggggcctgctggcacctaaacttcatac

SEQ ID NO: 108556 - DNA, 530 bp, Homo sapiens
  misc_feature (1)...(530): n = a,t,c or g
ntctattctggtaaagaggataatatagtgattagtgattcttcactgagtttgactatgtaacacacaggttccagtatgactcccatttacgacaaaagcacggccaccctccaaaatggtaatggaaagcttgtgatcaatggcagcataattctggaactgagatcttgtcaacctcaaatgtggtgatgctggtgcagaatcaactgtggggatcactggtgagacttcattaaaggccaaaggtcatatgaaagtagagccaaaaggagtccatgtttgcaacaggaataaaccacaggaaacatctttcaaaactggtagaccttatgcaagatgcatcatcaaccacttggtgcctcttatcatcaaagttcacccatcacatnnnnnnnnnnnnnnnnnnnnnnnnnnnnnnnnnnnnnnnnnnnnnnnnnnnnnnnnnnnnnnnnnnnnnnnnnnnnnnnnnnnnnnnnnnnnnnnnnnnnnnnnnnnnnnnnnncacgcgtccgcggacgcgtgggtcg

SEQ ID NO: 108557 - DNA, 425 bp, Homo sapiens
gcggaatccccgggtcaatccacgcgtacgaaggaaatattgtgaaaactatatgccaatacttttgacatcttatatgggacaaagtttcttgaaaagcacagttactaagcctgacagatactttatttataaccaaaaacttttccataaggaaaactccaaaggggatttaatcccaagaatgcaaggttggtttaacattcaaaaatcaatcactgtaattcatcatattaaacgatcatatggcttttctcctttattatttcagtagatgcattcaatattctcagcatctaaaatgataaagattttcaaagattttctatcaatctcatacacattttattttaaaataacctatagctagcatcatacttaatggggaaagtttgaatgcctttcccttgagatcagaactaacg

SEQ ID NO: 108558 - DNA, 448 bp, Homo sapiens
  misc_feature (1)...(448): n = a,t,c or g
ccgccacagctgtcctggacctggctggctaggcgtctgcggttctgcagtgctgcctctgaacgcccctcgcaagttctcggtggcccctgtgtgaccactcacaggtgccgtcatggctctttgcagcttcgagctcctgggctcaagccatcctcctgtctcggcctcctgagtagctgggaccataggcggtgcangtgtgtccagcctagtgcacctcagacctttcccttcccaggcaggctgtggatgtggaggccgatttgtggtccttactccatggaccgctgaaaggacaggggtctggcatataagaaggagagtagaggaggccgcatgccatttcccagcccccaggaagacatgcttggcgagaagctctttggaggggagggtgctgcctcaaggctttttccttgctcattttcaaggtgactgcccttcg

SEQ ID NO: 108559 - DNA, 473 bp, Homo sapiens
  misc_feature (1)...(473): n = a,t,c or g
cgggggtccccgcccataaatcccccccctctgtagggcccaggcggccgaattccttgagggctaaaattccaaaccagcccggcccaaaatatgaaaccccctttttctttaaaaatttaaagttatcccggggggtggggggcccccgttttttcccccgacccgggagtttttgcccggaaaatccctttaacccgggaggggaggggtcccttaaccccgatcccccccccttaatccccccccgggggtaaagaggctccctcccnnnnnnnnnnnnnngtannnnnnnnnnnnnnnnnnnnnnnnnnnnnnnnnnnnnnnnnnnnnnnnnnnnnnnnnnnnnnnnnnnnnnnnnnnnnnnnnnnnnnnnnnnnnnnnnnnnnnnnnnnnnnnnnnnnnnnnnnnnnaggtaaggtttttaagatggctggctgacgaaatcgtcgacccgggaattccaacggggt

SEQ ID NO: 108560 - DNA, 473 bp, Homo sapiens
acggtgagctatgatcgggccactgggtgccaaagtgagtccccctcttgaaaaaaccaagaaaaaaacagaaaagtcaaattatggctttttaagcttgatagaggctttctgcaattcttcatgatctgatgggtgcagcatctactaaaccatctgttaggtgaacaggggctgaggtatgtcaaaattagtatttcagaatctggctaactccaggatgtgttgcttaggatgcctggtgtgcaggagtatatacaacagcctattctcaatggtctgcgggataaggcttcatatgtcaggagagtggcagtccttggatgtgccaagatgcataatcttcatggagactctgaaatggtgccctggtaaatgaattatacagtttgctgcgtgaccaggatccaattgtagttgtgaactgcttgaggtctctagaggaaattctgaaacaggaaggaggctgtatt

SEQ ID NO: 108561 - DNA, 416 bp, Homo sapiens
  misc_feature (1)...(416): n = a,t,c or g
tcaggctgggtacccagctagcctctcctctagctgcctccctggccctctgggtgcctttgctgggtttccaagtctccactattctctgacttggcctcctgctccccatcagcggaaggcgcagatcacgtgcacagtcatcttcatcgtgtggggcgtcctagtccacctggtgatcccacccttcgtattcatggtgactgaggggtggaactacatcgagggcctctactactccttcatcaccatctccaccatcggcttcggtgactttgtggccggtgagtccctgcctctgcctcccacctctttttctgcttctttggtttcagtgcaacagacctatgttgggggtgccctaggtagggttccatgttctggacgaaatcgtcgacccgggaaatnggaccaga

SEQ ID NO: 108562 - DNA, 451 bp, Homo sapiens
  misc_feature (1)...(451): n = a,t,c or g
cacctcgcctggccannnnnnnnnnnnnnnnnnnnnnnnnnnnnnnnnnnnnnnnnnnnnnnnnnnnnnnnnnnnnnnnnntttttaaaaattatttgaataaagttgggccttgaaaacaaacgagggcatcttcgtgctaaggagtgcagcgcctcaggttcattcccgccaaaccaggcagtgttaggaaaatcaagaccgaggccagaaaagccgctgcagtcatgcccaagacagctgtcctggcagccgagaggcccaagaaagcttggggcgtccttattccgaaaaagagtactaagcggaccccaaaagcttttgctggtggaggctgctggagaaggttggttggtcaaaggtggccaagaaagttcccaagccggaggcatccaagcctaagaaagcggcccccaaaacaaggagatataagagtaccttaaagacgaaa

SEQ ID NO: 108563 - DNA, 471 bp, Homo sapiens
  misc_feature (1)...(471): n = a,t,c or g
cacgctccgaattcccgtgtcgacgatttcgtatacaccacggaacaccccatactacacacataccccaccatgtatacacacaccatacacgtaccttgggaccacacacacataacacacaacacatccatacaccacatcacataccacacacacagccannnnnnnnnnnnnnnnnnnnnnnnnnnnnnnnnnntacatatatactgcatacatacaccgcacatcacaccacggaacaccccatactacacacataccccaccatgtatacacacaccatacacgtacctccccaccccacacacccagtccatacacaccacacacactacacaaacccaccacgtggtacatacacataccatgnnnnnnnnnnnnnnnnnnnnnnnnnnnnnnnnnnnnnnnnnnnnnnnnnnnnnnnnnnnnnnnnncaaaccccacacataactccacacagtcatatgg

SEQ ID NO: 108564 - DNA, 461 bp, Homo sapiens
  misc_feature (1)...(461): n = a,t,c or g
nagacatcaaactatgaaactactacaaaaaccattggtgaaactctccaggaaattaaactgaacaaagatgtcttgagtaataccccacaagcacaggcagccaacgcaaaaatgaacaaatggaatcacatcagtnnnnnnnnnnnnnnnnnnnnnnnnnnnnnnnnnnnnnnnnnnnnnnnnnnnnnnnnnnnnnnnnnnnnnnatctggaaactgcctataaggaattaataacaagaatacataaggcacacaaacagctctataggataaaatctgatgataaataannnnnnnnnnnnnnnnnnnnnnnnnnnnnnnnnnnnnnnnnnnnnnnnnnnnnnnnnnnnnnnnnnnnnnnnnnnnnnnnnnnnnnnnnnnnnnnnnnnnnnnnnnnnnnnnnnnnnnnnnnnnnnnnnnnnnnatctatgacctcgtctcgaactgcaattagtgt

SEQ ID NO: 108565 - DNA, 455 bp, Homo sapiens
  misc_feature (1)...(455): n = a,t,c or g
ngattggaagatttactattgtcaaaatagccataatatcaaaagcaatctatagattcaatgcaccccctgtcaaaatcacattggtattgtttaaaaaaatagaaaaggaaatcgtaaaatttatagggaatgagaaaacaccacaaatatcaaaatcaatcttgagaaagnnnnnnnnnnnnnnnnnnnnnnnnnnnnnnnnnnnnnnnnnnnnnnnnnnnnnnnnnnnnnnnnnnnnnnnnnnnnnnnnncataaagacagataaacatcaatgacagaatagagatctcaggaataaatgcacccataaaaggtcaactggtctttgacaagggtaccaagaatacactagggggaatggatagtcccttcaacaaatggtgtggagaaaactgtatatccataagcaaaacaataaaatttgatgtttactcgtgccgaattcctgcag

SEQ ID NO: 108566 - DNA, 439 bp, Homo sapiens
gaaggagttttgctcttgtcccccccaggctggtatgcaatctcggctcactgcaacctcctacctcccgggttcaagcgattctcctgcctcaccctcctgagtacctgggaattacaggcgcctgccaccatgcccagctaatttttttgtacttttagtagagatggggtttcaccatgttggccaggctggtattgaactcctgacctcaggtgatccactcaccttgggcctcccaaagcactgggattacaggcgtgagccacttgcggcccggccaccttccaacaattccactcctctttgtcccaccaattctacttttgcttaggttatcttaagggaaatcattgtgaaaatatttggcaactgttaagggatgttttaggcattaattattgctttttcatattttaaaatctgttaagttaggccc

SEQ ID NO: 108567 - DNA, 435 bp, Homo sapiens
  misc_feature (1)...(435): n = a,t,c or g
acgattcggacgagataccacatcctccaccactgtcctccaccacatcctatgccaccatcctccaccacgtcctatgccaccatcctctaccaccgtcctccaccatgtgctccaccaccatcctccactgcatcctccaccaccgtcctccaccaccatcttccaccacgtactatgccactatcctctaccaccatcctccaccatgtactgcaccaccatcctccatcttctttgttatacattggcttccttgctgtgttcannnnnnnnnnnnnnnnnnnnnnnnnnnnnnnnnnnnnnnnnnnnnnnnnnnnnnnnnnnnnnnnnnnnnnnnnnnnnnnnnnnnnnnnnntgaagtcaggcaacagcagagccatgctctaggggagactccttccagcttcttgaggcccagccattctttggctt

SEQ ID NO: 108568 - DNA, 422 bp, Homo sapiens
  misc_feature (1)...(422): n = a,t,c or g
cacgcatgtgtgtgtgcgcgcgtgtgtatgcatgcgtgtgcgcatatacgcgtgtgtatgcgtgagtgcatgcacatgtatgtgcgtgtgtgtgcacacgtgtgcacccatgtgtgtgtgcacgtgcgtgtgtgtgttctcacatgtgtagatttaggtccagaacagatgagtggcgcccatgacatcaccctcagcccagagaaatgggagaggtggagggtgaggtttatatggtgtcggatcctaaagttcagatcttgtgacatggacagcgggagccacggaaggtcttagaggagaggagtgatcccatcagaactccatgatnnnnnnnnnnnnnnnnnnnnnnnnnnnnnnnnnnnnnnnnnnnnnnnnnnnnnnnnnnnnnnnnnnnnnnnnnnntcgtccgaattcctcag

SEQ ID NO: 108569 - DNA, 272 bp, Homo sapiens
  misc_feature (1)...(272): n = a,t,c or g
tggagatgagggtgcctgtcctggacagacctcggcatgccttctgtttctccttcaatgctccttaaggcctatgtgctgggaaaagggtcttcccnnnnnnnnnnnnnnnnnnnnnnnnnnnnnnnnnnnagacggcgcctctgttgcttgggctgcgactcagtgccctgagctacatggccatcgcactcactctttcaggaatagttccttcaccaccactgtgagttcgtgaccttctgggctgcccgtcggtggctgttgctgcg

SEQ ID NO: 108570 - DNA, 420 bp, Homo sapiens
  misc_feature (1)...(420): n = a,t,c or g
gggccctcccgggtgggtcccttgggggcaagaacatttgggtgggtccagggggttcccaaacccgggaaattcccccccaaaaacaaggggtggaaataaaggggccannnnnnnnnnnaaaacccccccccaaggtttttccaaaattttttttccataaccaacaagggccccctgggtcctttttgggaattttggaaaaaaaggagggttttgtttttaaagggccaccccccccnnnnnnnnnntccccccttcccgcctaaaaaattcccctttcccaaaccggaaaaatccggggggtccaaaannnnnnnnnnnnnnnnnnnnnnnnnnnnnnnnnnnnnnnnnnnnnnnnnnnnnnnnnnnnnnnnnnnnnnnnnnnnnnnnnnnnnnnnnnnnntattcaagcgattc

SEQ ID NO: 108571 - DNA, 602 bp, Homo sapiens
gggggaggagaagaagagaagaagaaaagagaagaaggaggagaaagcaaaaagagagggatagagagaggggtagtataaaagggaaaagggaggaggagaaaagagatgaggaaaggaaagaaagagcagggaagaggaaagagaggaagaaagaagaggtaaaagggaagggaggggaagagaaagtgggtgtgaaaaaaagagggagaggaaacagagagaaagggatgggaagcagagcagggcgagaggaacagaaggagaggaatcaagtgtgaaagcaaacagcaaaaaacctccacgtatggccataaaccacccttaaacctggggataagggttggagacagcatgctgtaccgctgctagggttttggacatggtttcctgagagacctttatgctctgggtccttcaaaccagtcacatggggtttgtgggcactatctgcagacccactgttttcagacccagacaggatggaaagtggaggcagcatctctaggtgagtctggagcagcagtgacaactcagcagaacctgtgtcaagtcctcatagaaaagggaaaataagctaggattccctccccgctccactt

SEQ ID NO: 108572 - DNA, 403 bp, Homo sapiens
  misc_feature (1)...(403): n = a,t,c or g
nnnnnnnnnnnnnnnnnnnnnnnnnnnnnnnnnnnnnnnnnnnnnnnnnnnnnnnnnnnnnnnnnnnnnnnnnnnnnnnnnnnnnnnnnnnnnnnnnnnnnnnnnnnnnnnngaaaggnnnnnnnnnnggaagggttaaattttaagggggagcaaacctttggggcccccaggccttaaaaaagaaatgggggccctagggaccctggaaaaaagggaaacannnnnnnnnnaaaaaaaaacacccccgggaggcggggggggcccctggttnnnnnnnnnnncccccaaaccccaaatttcaccccggggaaaataaaccagggcggaaaaacccaccgggccccaaaaacttttnnnnnnnnnntttncccggggggaggggctccacccgggaatcccg

SEQ ID NO: 108573 - DNA, 385 bp, Homo sapiens
  misc_feature (1)...(385): n = a,t,c or g
aaannnnnnnnnnnnnnnnnnnnnnnnnnnnnnnnnnnnnnnnnnnnnnnnnnnnnccagggaccaaagagagaaaacccaaataaataaatccagaaacaaaagaggagacattacactgatagcacagaaataccaaggatcatttgagaccattatgaacaaaaatacgctaacaaaattggaaagcctagacaaaatnnnnnnnnnnnnnnnnnnnnnnnnnnnnnnnnnnnnnnnnnnnnnnnnnnnnnnnnnnnnnnnnnnnnnnnnnnnnnagtaacaagactgaatcagtaataaaaagtctcccaaaaaagaagagcccaggactgcatggctttagtactgaattttaccaaacttataaagatgatctaatatc

SEQ ID NO: 108574 - DNA, 436 bp, Homo sapiens
  misc_feature (1)...(436): n = a,t,c or g
tacagcccccganttnnnnntcgacccacgcgcccgacattttgtactagaggaaaaccctcaagcaattgctctttcttttttcagcatcagggaatttatattggagaagagtcctgcaaatgtaatgaatttggaaacacnnnnnnnnnncaaaaattactgcttagaaaacaccagagtttatatgaaaatatatttttgccgatgcagtaaatatgaaaaaatatttaattcaaaattgattctatgtaaatatcaaagaatttacagtagaataaggtactgacacttcagacattacacgaaatcagagtgttgagtataaaaactaatctacaactaaagttgttaaattatttgtatataactttaaagggagtagattttttgaagtattgtaattacattgaaaatgtacttgtttccttgaaat

SEQ ID NO: 108575 - DNA, 186 bp, Homo sapiens
cctttaattgactttgggatgtagatgtggaactcacagcatatgcattgttggcccagcttaccaagcccagcctgaatcaaaggagatagcgaaggccactagcatagtggcttggttggccaagcaacgcaatgcatatgggggcttctcttctactcaggatactgtagttgctctccaagc

SEQ ID NO: 108576 - DNA, 424 bp, Homo sapiens
tcaaaatctgcttttatttaggtcttggcattcaggccagtgcccttcagaaggacacgaggatggcccatcttccagggctggactcagcccacctaactggctcagcaagatccctgctggtgtgaaaacttgtccacaggatgtggcaaggaaggcttctccctagaactggactggggcccccttcgtcatgattgtagattagagtcaggggctctttgtgtgaccttcgtccctggcctccttatgatttgaatcacattttcctcagtggcttgatcaatgtgttcattcacgaaagtgctgactttcccatacaaaatggtcagcctggccgggcgcagtggctgcactttgggaggccgaggcaggcagatcacaaggtcaggagttcaagaccagcctgaccaacatggtgaga

SEQ ID NO: 108577 - DNA, 184 bp, Homo sapiens
cttgaatgtaagcaggctaaatgccccaattaaaaggcacagtggtgacttggataaaaaagcaagatccaatggtatgctgtcttcaagagacccatctcacatgcaatggcacccttaggctcaaagtaaagggatggagaaaaatctactccccaaacaaaacagaaaaaagcaaaaggac

SEQ ID NO: 108578 - DNA, 374 bp, Homo sapiens
gccgattattcgattattcattctattctaagataggagaaaaccaccctgtggctagaggcgaaatatgctagcgatgatactgctctgttactctttgctatactaaaatgtttgggtaaagagaaacctaaatctagcctacgtgcacatccgggcacagtaccttcccttgaacttatttatgacacagattcctttactcacgttttccttctgaccttctccccaccatcaccgttctccctgttctcctgctgcactccccttgccaagatagtgaaaataatcatcaataaatactgacggaacccggagaccggcaccagtgcgggtcctcccacgcttagtgtgccggtcccatgggcccactg

SEQ ID NO: 108579 - DNA, 367 bp, Homo sapiens
  misc_feature (1)...(367): n = a,t,c or g
ccccccatagccccccgaataagttgggccccaagccagccccccccaggctgggtaaatttaaaaatttttgtaaaaaaccggtttcccctttaaacccagcccgggtgggattccacccccgggctcaaaggagccctccccccccctttggcctgcaaaagggtgggaattccggggaaaaccccccaaacccggttcccnnnnnnnnnnnnnnnnnnnnnnnnnnnnnnnnnnnnnnnnnnnnnnnnnnnnnnnnnnnnnnnnnnnnnnnnnnnnnnnnnnnnnnnnnnnnnnnnnnnnnnnnnnnnnnnnnnnnnnnnnnnnnnnnnnnnnnnnnnnnnnnnnnnnnnnnnnnnnnncttat

SEQ ID NO: 108580 - DNA, 386 bp, Homo sapiens
  misc_feature (1)...(386): n = a,t,c or g
tttgcttgtggtctaggtgtagggtaccttttaccagtatcgggccccagggnnnnnnnnnnnagccagcttaggcagtttggatgaaaccaattccctgtggtagaagaatcattgaggaatatttcacttgtagcattatacatgtattgcttttttaaattataggaccatgatattctaagctctttaatattccagaagggtcagtttttctgagaaattatataatgatcacattttcttcttcgtattctggcttatagaaagtttgaaaatttctccataggctggggtcataagtatagtccagccaattatacacccccagttcctgccaccagtttatcacgaataccccagtgttccagaaatggcagaaatgg

SEQ ID NO: 108581 - DNA, 431 bp, Homo sapiens
agagaatatggaacaccacaggagcaactgaatctggcattattaactttaaattttttgagcctgcccaaaggccagatgttatcagcagctgaacagcatctacagaaaccagctgcaaagacagaagcagaagaatgatttggcagagagatccaataacaaaaatttgggaaataggtaaaataataacttggggtagaggttatgcttgtgtttctccaggccaaaatcatcagtcagtttggataccatcaagacacctgaaatcttgtcatgggccagatgccaaggaagagattccgggaggatcctgaggacccccccggttgcagccatgtcaaggctggtgccgaggaggaccccaactgtcacgagcaacacccatcgaatacagccaccgacctggagacagatcaagaagctgtcat

SEQ ID NO: 108582 - DNA, 190 bp, Homo sapiens
ctgatgggttcactggtgaattctatcaatatttaaagaaaaattacaccaatactttaagctcttccaaaaaatagaacgggagggtacgcttctcaattcattctatgaggtcagtattaccctgataaccataatcaaagacatcacaaagaaagaaaactacaaaccaatagcctttatgaatatg

SEQ ID NO: 108583 - DNA, 365 bp, Homo sapiens
  misc_feature (1)...(365): n = a,t,c or g
naggtcttgcagggtgcaggaccctcctctccagccccgtgtggtgacccaccccgggcccgaggtgcatgttggggaagctctctggccggcccttgggcttcggctcttgaggaggcatggcgccgcaccgtgcccggccataaatatatgcggattcgtgggcatccagggccccaggaccgacgcagaggtggggtcctgtccgtaagcctgtggcgcagcgactctttacatgggagccagggagctggggccgccgcacccctcccccgcctccctcgtggggtcaccaccctcaggcggctgccagctggcataggacgcggcggaattgttgggtgctgtggcccagatccttgacc

SEQ ID NO: 108584 - DNA, 1055 bp, Homo sapiens
agtatgcttcacttggattgctgaagaataagcacggctgtgacatctgtcgctgtaagaaatgtccagagctctcatgcagtaagatctgccccttgggttccagcaggacagtcacggctgtcttatctgcaagtgcagagaggcctctgcttcagctgggccacccatcctgtcgggcacttgtctcaccgtggatggtcatcatcataaaaatgaggagagctggcacgatgggtgccgggaatgctactgtctcaatggacgggaaatgtgtgccctgatcacctgcccggtgcctgcctgtggcaaccccaccattcaccctggacagtgctgcccatcatgtgcagatgactttgtggtgcagaagccagagctcagtactccctccatttgccacgcccctggaggagaatactttgtggaaggagaaacgtggaacattgactcctgtactcagtgcacctgccacagcggacgggtgctgtgtgagacagaggtgtgcccaccgctgctctgccagaacccctcacgcacccaggattcctgctgcccacagtgtacagatcaaccttttcggccttccttgtcccgcaataacagcgtacctaattactgcaaaaatgatgaaggggatatattcctggcagctgagtcctggaagcctgacgtttgtaccagctgcatctgcattgatagcgtaattagctgtttctctgagtcctgcccttctgtatcctgtgaaagacctgtcttgagaaaaggccagtgttgtccctactgcatagaagacacaattccaaagaaggtggtgtgccacttcagtgggaaggcctatgccgacgaggagcggtgggaccttgacagctgcacccactgctactgcctgcagggccagaccctctgctcgaccgtcagctgcccccctctgccctgtgttgagcccatcaacgtggaaggaagttgctgcccaatgtgtccagaaatgtatgtcccagaaccaaccaatatacccattgagaagacaaaccatcgaggagaggttgacctgg

SEQ ID NO: 108585 - DNA, 721 bp, Homo sapiens
tttcgtctgggcccgcgcgcaggccttacataggaagtccttctaaagagctgcctgccagctgcccttccccagatcccgaatatcctcctggccaggtggagcagagaacagttcctcagctggtcatgctgagctcataccctgatggctgctccatgaggtcaagactgggtctcctccctcctcccccttcaccaatgcctggtctcacggggctagttttgacccccacgctatggcatcatcgacctccctcccagctcctggctctcggcctaagaagcctctaggcaagatggctgactggttcaggcagaccctgctgaagaagcccaagaagaggcccaactccccagaaagcacctccagcgatgcttcacagcctacctcacaggacagcccactacccccaagcctcagctcagtcacgtctcccagcctgccacccacacatgcgagtgacagtggcagtagtcgctggagcaaagactatgacgtctgcgtgtgccacagtgaggaagacctggtggccgcccaggacctggtctcctacttggaaggcagcactgccagcctgcgctgcttcctgcaactccgggatgcaaccccaggcggcgctatagtgtccgagctgtgccaggcactgagcagtagtcactgccgggtgctgctcatcacgccgggcttccttcatgacccctggtggaagaacagatgg

SEQ ID NO: 108586 - DNA, 343 bp, Homo sapiens
acccacgcgtccgattctggacaaaagccttataagtgcagtgaatgtggaaaatccttttctgaatgttccagtctcattaaacacaggagaattcacactggagaaaggccttatgaatgcaccaaatgtggaaaaacatttcagcgaagctctaccctccttcatcatcagagttcacacaggagaaaggccttatgagtgcagtgaatatgggaaatcgtttgctgaagcatcccgtctcgttaaacacaggagagttcatactggagaaaggccttatgagtgctgtcaatgtggaaaacatcagaatgtctgctgtcctcggtcttaagcgacttcg

SEQ ID NO: 108587 - DNA, 906 bp, Homo sapiens
tggaaaggtatgaagttttcttttttcccctttacaaaacaggtaaaagaaatccaggaagaattggataaattgagtccacataaaattaaacacactaagaaggtatgctgcaattaaattatgatcaatacttgcttataaatgacatttcccagtgttttgttagtattgggtagggccctctgcactaatgttattttcagtacttgcagaaacctgttagtgagggagtgagcaccttacatattctgaatatggttgccttctaaggaacaggttctaaaaaataaatttttgttgttgttgctgctggtataaaaaattggaagtagtaaggaaaagactgccactagaaaattttaaactttacaactccctttactatgaaaaagttttcacaatagaaagcactttatacagaaagaagacaggctataaatattcttagaagttgggtgaatgttagcaagttctgagtatggaaataacttctctcatcttgtttattaccagtcatgggcaatgtctaagctggcggctgcccatcgaggagccattcgggccttacagatgtttgtcactcagtttactgaccgaggggagcatccacttcctgctcggtgtaaggaactgggcagccttattcgccagctttttactttgttctgtcaagctggatgcagacccttctgttcctgatgtggttatagatattctgcaacaaattgaggctttggaatctctcctggataagaaactgtcaccaaaaaaggtgaaaaaatgtttcagtgaaattcggagcagatttcctatcggtagccaaaaggccttggagagatggccaagtacatcaccaaagggtgagaggaggcccctcacagcaaaggacacacacaatgtatt

SEQ ID NO: 108588 - DNA, 367 bp, Homo sapiens
tgaggccaccagtcagagttacagccgctgcctggaactgatgctgacgcacgtggcccgccatggccccatgtgccacctcatggtggcttcccacaatgaggaatctgttcgccaggcaaccaagcgcatgtggagctgggcattcctctggatgggactgtctgtttcggacaacttctgggcatgtgtgaccacgtctctctagcactgggtatgtgaatggctcccccacccccatcaagccccaggccttactccctcccagccagagcccttctcctattcccaaccaaggcccagcctccagatccttccagagagatctgtcattccagtgtctgtgggccttccaaggctgtgtctt

SEQ ID NO: 108589 - DNA, 633 bp, Homo sapiens
ggaacaggttaacaaggtttaccaaacagacccaggaaacaacagacccaggaaatgtcccgatgtcccaatatattaggaacaaaagcatttttagtttaagaagaagtttccctttaaagataataatagagatttttgtggcagacagtagttacacgacggttagtcccttgccgtgatggccgcttgcgggtggtccggagcagccgctgtcgtcacgctggctgcagcaagaaggcgtgggtggtggcggcacgagctgctgcgggagcggcagtggcggtggtgggtcccctatgtcctgtgtccccaaggcggctgactgtgccacccctatccttccgcagccggcagaacccgctcccaggcacggagcctccattgctctggaccctggtcccatcgccgctctcatctgcagcaactgctgggagggtgcagggaggaggtggagctgggcctgaggcagtgccatcctccacggagccgctgggagccagggacaaggacaagaaggagcaccctctccccaggcccccaaagcccaccaccctgagggccaccgcaatggggctgggccaagctaccctccagcacaatccggcactgaggggcaggcagagcatccgg

SEQ ID NO: 108590 - DNA, 626 bp, Homo sapiens
ggcagcagggcttgctcatgcaactgctcaagctcactcataactgcctcaactttgacttcatcggcacttccactgatgagtgccggagacgacctgtgtacagtgcagattcccaccagctggagatcagccttcttagattcttcaaccttgcagctggtttttgacctgtatcattccatccctccttcattttcacctctggtattatcctgcttggtacagatcgcttcagtcagaagatccctgtttaacaatgcagagagggccaagtttttctctcatcctgtgggagatgtgaaaccgatactggaaaacccacagagtttatcagacccaaacaattaccatgagttttgcagactactggcccgattgaagagtaactatcaactgggagaattggtaaaggtggaaaactaccctgaggtcatccgattgatagccaacttcacagtgaccagcctacagcactgggaatttgctccaaatagtgtgcactatcttcctgagcctgtggatgcggctgggcagcatctgtgccgtatgtcaaagccacagagccccacatgctggaaacttacactccctgaggtcaccaaaagccctaacatcacatcccg

SEQ ID NO: 108591 - DNA, 206 bp, Homo sapiens
tctgttgttgtttgtttgtttttgagcccaggaataacttcccacacatatgtcccaatgatttttaaaataggtgccaagaaagttcattggtggaaaagcatacttttcaacaaatcgtgttggagaaacttgatttccacatgcataagaatgaaggtggaccctatgtcacaccaggtacaaaaattaacacaaactggatc

SEQ ID NO: 108592 - DNA, 260 bp, Homo sapiens
gggagaaataggcagcaatacaataatagcaggagatttcaataccccattttcaataatggacagaacatctggacaggagattaataaggaaacaggacttgaactacaatttagatcaaatggccatcacagacatatgcagaatagtccacctaatagcagcaaaacacacgttcttctcaggcatatataggtctttcttcaggatagatcatgttaagtcactaaactaattttagcattattaagaagattca

SEQ ID NO: 108593 - DNA, 184 bp, Homo sapiens; identical to SEQ ID NO: 108577

SEQ ID NO: 108594 - DNA, 375 bp, Homo sapiens
tttatgcctcttgccctgcgcggacgggccctgctgctcgcatcccaacgcggtgctcggcgcacagcatacgctggaggagatggacttctacagggtaatctggtcggcagccctgaatggagacctgggccgagtgaagcatttaatccagaaggccgaggacccaagtcagcccgactcggccggctacactgcgctgtactatgccagccgcaatgggcactacgctgtgtgccagttcctgctggaaagcggaagctaattgtgatgcccatacccacggtggtgccactggtctgtaccgagccagctactgcgggcacactgaaattgcgcggctcctgctatcacatgggccccaacacccagggg

SEQ ID NO: 108595 - DNA, 379 bp, Homo sapiens
  misc_feature (1)...(379): n = a,t,c or g
cattctccattctcggttaaccaggggcacagtgcnnnnnnnnnnnnnnnnnnnnnnnnnnnnnnnnnnnnnnnnnnnnnnnnnnnnnnnnnnnnnnnnnnnnnnnnnnnnnnnnnnnnnnnnnnnnnnnnnnnnnnnnnnnnnnnnnnnnnnnnnnnnnnnnnnnnnnnnnnnnnnnnnnnnnnnnnnnnnnnnnnnnnnnnnnnnnnnnnnnnnnnnnnnnnnnnnnnnnnnnnnnnnnnnnnnnnnnnnnnnnnnnnnnnnnnnnnnnnnnnnnnnngccgaccattcattctattctgaaataggagaaaaccgccctgtgggaggcaagatatgctggcagcaatactgctctgttactctttgctacactgag

SEQ ID NO: 108596 - DNA, 397 bp, Homo sapiens
ctagacccagagccatccctgcgcgtgggtcggggacgccatcccagtctgagctccacctttctccagaaacgcgggtagcgcctgcccgccacctgggaggtcacaggacaagcacccactgcccaccttcgacacagggagcccaggagagggaagcgaggggacaccagccggtaccagggcgacacagccggttgggggacaggggcaggagtccacagggagtgccagccctgcctgcagaccaggagccccacacgcccccaccaacagcagctcggcgccctcaagtaggagcgcggcagcaggactggctcagaggctggcgcgcacaaggactgcagtcagacccctcacagtcctcagtcctttatcgacaatgtccctcttttcc

SEQ ID NO: 108597 - DNA, 377 bp, Homo sapiens
ctatctggctttctctttcattcttttccatttggccctgttctgtcccaacatgaaggcaataatttgttacctcattaatggatctctccttttactttttcaaccacttccttatgctacccatgaaacctagttggggctctgttgtgtctgatttcccctggcttattctttactttttcctccttttccaggctcaacagggagctgctggaggcagtaaagcctgaagtcttgcaggactcactggatagatgttattcaactccttccagttgtcttgaacagcctgactcctgcctgccctatggaagttccttttatgcattggaggaaaaacatgttggcttttctcttgacgtgggagaaattga

SEQ ID NO: 108598 - DNA, 369 bp, Homo sapiens
gatttatctgctgaggctggaggaaactttgaaaccactaagccaggagaactctacattcataacggaattactcacatacgctacacagacctgcccagccgaatggacactcaggccagcaccctatattccaacaacatcaccaaactcctgaaggccatcagcccggacaaagataattgttattttgatgtgaaagatgactttgactttggtacgatgggtcatgtcattagaggaactgtagcgatgaaagatggtaaagtagattttcccagctcccacaccgaaaaatattcctcaaggtgccccagtaaaacagaagacagtggctgagctggaagctgaaaaagcagctaccattac

SEQ ID NO: 108599 - DNA, 371 bp, Homo sapiens
gctgcatcgggacctgaccacccagtgcgagaagatggacatccccttcctgagctacctgcccactgaggtcagctcattaacgaagcctatgggctggtggtggatgccgtactgggccccggcgtggagccgggcgaggtcgggggcccctgcacccgcgcgctggccacgctcaagctgctgtccatccccctcgtgagcctggacatcccctcaggctgggacgcagagaccgccagcgattcggaggacaggctgcggcctgacgtgctggtgtctctcgcggcgcccaagcgctgcgctggccgcttctccgggcgccaccacttcttggccggcaggttcgtgcccgatgacgtgcgccgcaa

SEQ ID NO: 108600 - DNA, 385 bp, Homo sapiens
cactttaaatctgtatcagtggcgcagcaatctccctaaaaaataataataataaatctggctcctgattcctctgctttatagccctcagaatctggctccaaactgccctccagaagcctcatctccaccacaacccactcacccctcctccctctcagcctccgcgacactcagcttctctcttcctctcccgccaagccctttcgcaagccgctcctcctgccagcgctgctacccccactctcctcctggcaaactcctactcactcctcagaatgcagctcacgcgtcaccccctctgagaactgctgtcctcctcccgcaggctggcgtgtgtgcctgcatccccctctgttggcccccaaagccctgaacatccctt

SEQ ID NO: 108601 - DNA, 362 bp, Homo sapiens
agcctgagtagctgggattacaggcacacgccatcacgcccggctaattttgtatttttagtagagatggggtttctccatgttggtcaggctggtctcgaactcctgactttaggtgatccacccgcctgggcttcccaaagtgctgggattacaggcgtgacatctgtcacccagcccagaacactttcttgatacgttttggaagtaaagcccaattgttgctattctacaacaaatgacttatccatcataattatttgacttttctgatgaggtcaataccactagtgcaatatattaacgtttttaaaaaatcaagtcagtgttttatttttcattaccctctacttttaagtgtg

SEQ ID NO: 108602 - DNA, 596 bp, Homo sapiens
  misc_feature (1)...(596): n = a,t,c or g
ttttttaatttttactcttatttattgcaaagtgaaaaaacagctgcagacacaaatgacttccaccatacaatgttctgaattctgttactcatgatttcaatgctgcttggtttctttcttgaaaatcaatagtggataaacgctcttcttgaaaattccccccaaatgagaataataagcagaatagcaaatacatgattaaccataggagacaaaacagcaatttgaatagggaaacagaaaacatttctgagcagactgtttagaagtgcctccaagggctggtctgcactacctatcaatgcggggtgggggtggggaggataccgtcatggtatcatttaagtaccaacattttttttcttttttttttgaggcagttctccagtcttgcccaggctgaagtgagatttgcctggatggtcaggcgattgtccatggtcagtgctgccaagaggcacctgccattagcatcgcaacccatgggagaccagctggtgtacttgaatcctctcattggtggtaaagccttcccctcaggttgaacaccctatccaacatgaaagtctgactgaccgtgngtccttggaggc

SEQ ID NO: 108603 - DNA, 362 bp, Homo sapiens
  misc_feature (1)...(362): n = a,t,c or g
tgtttagttccgtagttcaaagcccgcctgggccacaaggggaaatgcccttttggcaataaaatacaaaaatttggtnnnnnnnnnnncccaaggctgtagtttcagctcctcgggagggtggggggggaaaattttttagccccacaggcggagggtgcaatgaacttagatcttgcccctgccttccagtttgggccacaaaaggagactttgcccccaattnnnnnnnnnnnnngtatttgtcaaacatcattgaacaaaagttacaacaaaagagttattaatcagcaaactcctttaaaatttacacttccaatgcattcttcatattatagttacctataccttcttcattttat

SEQ ID NO: 108604 - DNA, 1064 bp, Homo sapiens
ttcatatagaaaaacaggctgggatagaaagatgtcaggaatgtgtgtcagtgagagattgagattagctacaaatagtgatggctcaagtaagattaggcttcccctgttatgaaatgagaagtgtggagggggcagtctgatgccattagggattcaggttcctcctctccccacatttttttttgtccccacattttttttttctgccatgtgcctctggcctcatcatcacaatgtggctgcaggagttccagccctcatggccatgcctgctccacgcaccagggaagagcaaagggggttggaccctgagtcagcctcagccagtgaacaccttctgctcaagttctgttgctcatcactttgctccatggctcacccctagctgcaaggaattctgggaaatgtaaagtgatttactttttttcaagttataagtttttcttaaagctgtgcacattttggactagattttcttacgtatttcctatattcccctctccaacaaatttgggtcttttgccacagaaacagaacaaaatatcacctagaatcgtaccacccagagacacgcagtagtgacatttgagggaatgttttatttacatttttgcaaagttgtgatccttctctatgagtaattttcttttctgcctttttaccctggaagtactttgttttcagtgttgtatatgcccttaagcaatatggcaacaggacctgaatgcccgcacaagagttttcaagtgctgtgccccatagcacatagtgctgtgtcctgaaccagctccccgtggctgtgtggggaagttgttgccggctttgttctgatggcttggaactggcttcagtgatgaggagctggaggagcatcaccagagcctcaaggcgctggtgctgcccagcccacgcccttacgtgcggatagatggcgctgtgattcccgaccactggtttggaccccagcgctgtgtgggagaggaagggcggctgacctttccgtgtgtggcatgtaaccctgttgggcgagggcctgggggaaagggacaggggcgttttct

SEQ ID NO: 108605 - DNA, 396 bp, Homo sapiens
  misc_feature (1)...(396): n = a,t,c or g
gcnnnnnnnnnnnnnnnnnnnnnnnnnnnnnnnnnnnnnnnnnnnnnnnnnnnnnnnnnnnnnnnnnnnnnnnnnnnnnnnnngaaaagaaaagaaaaagaaccctgccaaagggctcccggaactgggggaaaaaattggtttggaaaaaaaaggcccatggaaccttgcccttcgggggggcccccccccattttaagccccctggggggaacggttttccttttgggttcccttctgggggaaccggaaaaactggttttccggcccggcccagggggttacccctggaaccccaaccctttgggaagccctgggaggaatatttgggggccgggttttgaaaacaacatgggcaacaaaacaaaaacctggtttttaaaaaaatttaaaaag

SEQ ID NO: 108606 - DNA, 1160 bp, Homo sapiens
cccgggtcgacccacgcgtccggtcaccattacccccatcttcacattttgcttccatatttgaagagtctcacgtgccagtaattgaagaatctttgagagttcagatatgtgaaaaggcagaagaattaaaggacattgtgcctgaaaagaaaagcactttaaatgaaaatcagcctgagataaagcatcagtctcttctccagaaaaatgtgagtaagagggatccacccagcagtcatgggcacagtaacaagaaaaatctattaaaagtagaaaatggtgttacacgaagaggtagatcggttagtcccaaaaagccagccagtcaacattcagaggaacatttggataagattcctagtcctctaaaaaataaccccaaaagaagacccagagatcaatccctcagccccagcaaaggggaaaataaaagttgtcaggtcagcaccagggcaggctctggacaagatcagtgcagaaaaagcagaggtcggtcggccagcccaaaaaaagcagcaaaaaattgaaggaagcaaagctccatcaaatgctgaggccaaattattagagggtaagagtcgaagaatagcaggctatacgggcagtaatgctgagcagatcccagatgggaaggaaaaatcagacgtcatcaggaaagatgcaaagcagaatcagttggaaaaaaagcagaacaaggtctccagagaaaaaaatcaaaagaatggttgagaaatctcttccatccaaaatgactaataagactacaagtaaagaagtatctgaaaatgaaaaaggaaagaaagtaaccacaggagaaacaagttctagtaacgataaaataggagaaaatgtccagctatcagaaaagaggctgaagcaagaacctgaagagaaggtagtttcaaacaaaacagaagatcacaaagggaaagaactagaggcagctgacaaaaacaaagagactggaaggttcaaaccggaaagcagttctccagttaagaaaacactgataactccagggccctggaaggttccaagtggaaataaagtcacaggcactattggtatggctgagaaacggcagtaccttttatataaaaccaagaaaaacacaggtgtgatcttttctttacagaaacatttttccagaaaaagcc

SEQ ID NO: 108607 - DNA, 370 bp, Homo sapiens
  misc_feature (1)...(370): n = a,t,c or g
gcggttgactgtagagccgctctctctcactggcacagcgaggttttgctcagcccttgtctcgggaccgcaggtacgtgcctggcgacttcttcgggtggtccccgtccgccctcctcgtccctacccagtttcttgcttccctgccccatctccgccgctccccgcagcctccgccgagcgccatggctcctaggaagggcagtagtcgggtggccaagaccaactccttacggaggcggaagctcgcctcctttctgaaagacttcgaccgtgaagtggaaatacgaatcaagcaaattgagtcagacaggcagaacctcctcaaggaggtggataacctctacaacatcgagatcctgcggctccn

SEQ ID NO: 108608 - DNA, 704 bp, Homo sapiens
ttttttttttatgaatgtggagaatgtgggaaatcctttagtcaaaagagcagcctcattcaacatcagcgatttcacactgggagaaaaaccttaatgggtgtgaagaatgtgggaaatcttttagttcagaaggacatcttaggagccatcaacgagttcacgccggagaaagacctttcaagtgtggagaatgtgtgaaatctttcagtcataagcgcagccttgttcaccatcagcgagttcacagtggagaaagaccttatcagtgtggagaatgtgggaaatctttcagtcaaaagggcaacctcgttctacaccagcgagttcacactggagcaagaccttatgaagtgtggagaatgtgggaaatcatttagttcaaaaggacatcttaggaaccatcagcaaattcacactggggacagactttatgagtgtggagagtgtgggaaatcctttagtcataaaggcaccctcattctacatcagcgagttcaccctagagaaagatcttatgggtgtggagaatgtgggaaatcttttagttcaatcgggcaccttaggagccatcagcgcgttcatactggagagaggccttatgagtgtggagaatgtgggaaatcttttagtcataagcgcagccttgttcaccatcagcgcatgcacactgggaattccaccacatggactatggtctcgat

SEQ ID NO: 108609 - DNA, 359 bp, Homo sapiens
atctatccagacgctgctttttcttctggggattgaagttcgcagatgcttggagaggttgatcctccaccaagtggaggcgagtgtcacaacgcctgtgtctgcccgcttgtgagcgagatggaagtgaacgggcaggtcgagtccgtgtgcgagtccgtgttcagctgagctggagtcgcaggccgtggaagcgctggacctgcccatgcccggctgcttccgcatgcggagccacagctatgtgcgggccattgtgaaaggctgctcccaagacgacgagtgcgtgtccctgaggtcgtactcgccgccgggcaccatcaccaccgttaggaccattcagagcagcacgtgtgagg

SEQ ID NO: 108610 - DNA, 488 bp, Homo sapiens
tgtcgtggacaattccagtttgtggcccttcccttagggaagcactgcttttgttcccgctgcatgtgctaacttccattcattcatggttctatccctttgtagccttcccttcacacttctcacttgcgtttcttccatctctgggcagactgttccaccaacaacccctcccagggctaagctgcggcgggagctcgacgaatccctccaggtcgctgagaggttgaccagggaaatacaacgagctgctaaagtcctaccagtggaagatgctcaacacctcctccttgctgggagcagctgaaacgaggcagtttaactggggtgtcccggctgggcaaacctcacgcaaggcgaagaccagtactatctgcgggtcaccacggtgagctgtgtcccggccacatgctgtggctcgggagcccgagctgtgatcgggagcaggggcatgtgtgcttttgactgagcatttatcacacggcaaa

SEQ ID NO: 108611 - DNA, 389 bp, Homo sapiens
  misc_feature (1)...(389): n = a,t,c or g
nnnnnnnnnnnnnnnnnnnnnnnnnnnnnnnnnnnnnnnnnnnnnnnnnnnnnnnnnnnnnnnnnntcccccctttttaattttgccctttcccaaaaggggagggaattaaccctttccggcccggnnnnnnnnnngaaaaaaccccacccgtttgttgggccaaaaccctttggaaaaaaaatacccttatcatggcccccggggggctttgggccttttggaaaacccccccctttacccaactgggggataacccaacctttaattaccaggcccaaaacttgttggctcccccccctctttagcccggaggttaataaaaccaaaaaaccttggaaaagttggggggaannnnnnnnnngccaaactaccagcagggggtgggg

SEQ ID NO: 108612 - DNA, 822 bp, Homo sapiens
aaaaacacagaacaaagaataatgggacctgaaagggtggaggtgaaggcagtcgactctgcagggacatccaggagcatgagtctgccgttagagtggcaggctgcttcagccccctccccttttggtcctggatgtaagtgggtgcccttagagatgtagctcctagtgttgaccctccctccgggggcccatccctgcagtgcctttcttcctgacgtggagtgtggtgaactcagtgcattgggccaaaggttcgacacaggctctgccagccacaaccatcctgctgcttctgacggattggctgctggtgggctttcccctcacttgtcattggaggcatctttggcaagaacaaccgccagcccctttgatgcaccctgtcgcaccaagaacatcgcccgggagattccaccccagcccctggtacaagtctactgtcatccacatgactgttggaggcttcctgcctttcaggtatcctccctttattccatggctattactgtcaggttcctgacctcaatttttcctgtccctactcatccagtaccctaacccaaccccgttgatccctggttcagtggtaccattcagagatcattaaatggttcctcctatccccaagcaggactgagcttgaatgatatgagagtgtctcacttataaagctctccggagacatttcccccttcaccttcctggtttctgactttaatgcctatggacatcatgtggggtttaaagcccatttgatgacccatttactttgttgaatacctctttgtgccaaacaaagaataaagtggaataaaatgg

SEQ ID NO: 108613 - DNA, 936 bp, Homo sapiens
gaaagtttggatatttgtacacttcatgtgaagtagttgcattttttatctgattttatcatgggaatgaacattgtatctgtgtgggggactgttttccctacctggtactgtaaaagagaaggcatgtaaatcgtcccttgaagcgatattatttggacatgctaagctggaaccagggagactgcccaggcccacacagtgcagagtagaagctacggtgctggtagggacaaattctccacttgataaccctctatggagcatttcctggagcttatggcaaaagcctgtgggcacctcccagcaacaaccactgggactttggactagagaatttccacttgaagggcatttactgactcgcaatgaaacatttactgaagccaccccactgatacctgaaataggcatgctgtctcagatgatgtcagaggaacatatctaatggggatgggcagtgcccagaagagttccatgacacaatggaaatggtttatagaggatcatgctactcaaggcatgcagagaatttcttttcccctaggactgactctggaactgtgtgagaaactgctggattctacagtgccaaataaacaactttcaactgaccaaacaagagcttcttggtttatggatggcaattccaaggcacaaaatgctaggaagaactgttctgtttctcagtaagagagacagaaactggctatgggaaagatttcctggtgggaaggccctgaacatagctggcaagtgagactgatgctggcagccctgggggactacaaatggaataggaattcttgataggaatagacactgactctagtgcaggctttgcttatccaatggaagatgaaagtgttcagagtgccataaaaaaaaaattaaaaaaaataaacaacagaagatatttcaaggaaaaaaaaaaaa

SEQ ID NO: 108614 - DNA, 366 bp, Homo sapiens
  misc_feature (1)...(366): n = a,t,c or g
aaaattccacnnnnnnnnnnnntcccccttttattcccccccctttgggatccaaaaggggggggccccccccaattcaagggtttggccccccctcccttgacccaggtttccccccctnnnnnnnnnnntgggggcaaaggtgggctcccctttcaaaaaaaaattttccccnnnnnnnnnnccgcccccgttgttcccccctcccgggggggcttccagggaaggtttcctttggcccaaaggtcaaggctcccttggcccttttttgccccacttccttccccctgggggaggcccccttttcnnnnnnnnnnnnnccccacaaaaacaaaaaacaaaacagaacagaacagcatcacttcc

SEQ ID NO: 108615 - DNA, 349 bp, Homo sapiens
gggattttgagaggctggcccatctgtatgacacgctgcaccgggcctacagcaaagtgaccgaggtcatgcactcgggccgcaggcttctggggacctacttccgggtagccttcttcgggcagggattctttgaagatgaagatggaaaggagtatatttacaaggaacccaaactcacaccgctgtcggaaatttctcagagactccttaaactgtactcggataaatttggttctgaaaatgtcaaaatgatacaggattctggcaagccatacactgcttcccttatgtgaagaagcgcatccctgtcatgtaccagcaccacactgacctgaaccccatcgag

SEQ ID NO: 108616 - DNA, 352 bp, Homo sapiens
  misc_feature (1)...(352): n = a,t,c or g
tgctgctcagatgatgctgaataatcccctatttgctggaaatcctcagcttcaagaacaaatgagacaacagctcccaactttcctccaacaaatgcagaatcctgatacactatcagcaatgtgcaaaccctaaagcaatgcaggccttgttacagattcagcagggtttacagacattagcaacggaagccccgggcctcatcccagggtttactcctggcttgggggcattangaagcactggaggctcttcgggaactaatggatctaacgccacacctagtgaaaacacaagtcccacagcaggaaccactgaacctggacatcagcagtttattcagcagatgct

SEQ ID NO: 108617 - DNA, 347 bp, Homo sapiens
  misc_feature (1)...(347): n = a,t,c or g
tatttttaaaaaaaatgattacaaagctccagtattcaaaatagtttggtactggcataaagaccgacaggaagaccaacggaacaatagagagcccggaaatataccctcacatagaaggtcaaatgatcttcaacaaaggtgccaaaactacannnnnnnnnnnnnnnnnnnnnnnnnnnnnnnnnnnnnnnnnnnnnnnnnnnnnnnnnnnnnnnnnnnnnnnnnnnnnnnnnnnnnnnnnnnnnnnnnnnnnnnnnnnnnnnnnnnnnnnnnnnnnnnnnnccagcaaggccggaaactaaactcctagaaggaaatagagggaaaaaacttcatgacattgg

SEQ ID NO: 108618 - DNA, 744 bp, Homo sapiens
gccgtggagagtaaagtgagcaagctggtgaccgacaaggctgcaggtaagcagggagcacaagtgacccctgctccagctgttgtcctgacttctctcaacacgcagcatgctaggagggacagaatgaattggagaaggtggactgattccttcctattaatgtcattactattattactactacttctgctagtaagagcagtttccacatagtaaacacttaccatgtgctgagccctttagtttctcatttaatctcacaaagactgtgagataaattttctcatcctcattttatgatgaaactgaggcttagagaattaagtgatttgtccaaggtcccttagttagtaagttaggtcggtttaactcccaaagcacataccaataaactcgggttaccctgtggattgcatttagtagagagctggtaccccgtaggagggggaagactgtgggtggggagaagggtggggagtatatcttgattagttccagggaattatagttgaacagcttccgagagtttttggatgtgattggtgctgtcgtgtcctgaatggtgttatctgtggcagtgtcatgaatccatagaccttaggtgaaacctgacacagatttcttccccaggaaagattactgatgccctcagtttctctggccaagaggagcaattttcgtgccatcagcaaaaagctgaatttggtatgtggaacagggatggttaggggagacagtggg

SEQ ID NO: 108619 - DNA, 355 bp, Homo sapiens
ctaagcacagagtgctaaaggaagtagaagcggtgattccagatcactgtgtctttgccagtaacacatctgctttcccaatcagtgaaatcgctgctgtcagcaaaagacctgagaaggtgattggcatgcactacttctctcccatggacaagatgcagctgctggagatgatcacaaccgagaaaacttccaaagacactcagtgcttcagctgtggcagtcagtctcaagcaggggaaggtcatcattgtggttatggatggacctggcttctataccaccaggtgtcttgcacccatgatgtctgaagtcatccgaatcctccaggaaggagttgacctggagaagctgg

SEQ ID NO: 108620 - DNA, 529 bp, Homo sapiens
gattccgttttaatggactgactcttactaagttgggactggaagccccgtgttgggaccgagcttaattcctttgtaactcagtatatacccgttgacattaaccaggcatccttagggaagattctgatggcctgaatggacatttcaattacatatatgttgatcatgtgtatttttctagtaagcactattaccttacttgccctcccctgattaaacaaaaactgaaggtataaaacctgcccaaatggaaacctattttttcatagataactgctgacaattatattttcatgttattctatctctggtttctaatgcatttttctcatattcataacaggggagatagagttattcttcttaaaagagttgatcaaaactgggtatggaagggtaaaatcccaggaaccaacagacaaggcatcttcccttgttcctatgtggaggtcgtcaagaagaacacaaaaggtgctgaggactaccctgaccctccatacccccagctattctagtgataggatcg

SEQ ID NO: 108621 - DNA, 366 bp, Homo sapiens
  misc_feature (1)...(366): n = a,t,c or g
ntacagcaccacttgggagacaacttttgggtgctgcccccaaggttctgctttgcatgtgttgtctctcctataaccaggattcacgggtccaggaatcaagggatagaagtaggagtggttcctctcacctgtcccctcaactggagttctactggtttggagggcttggtttttacaggaggaatgcttccggggaacacaagacaacagctcactgaattgtacattgaggctcacctgctgttttgggcccttctgggcactgaaccaacaagcaaataaggggtttactgactcgggtgtattaccaaggggaaacaaatgctgctgcatactaggggcagggagaactgtctagaatcc

SEQ ID NO: 108622 - DNA, 377 bp, Homo sapiens
  misc_feature (1)...(377): n = a,t,c or g
actaatccacggttggggaccttggtttttcaaacccagtttcctttccaggtcccggggaaaaagggctccacccgggacaatggtgggggggcaatattccgccccaaaaaaaaggggaaaagggcaaaaaaacgggggccccccccctagaaaaacccccccnnnnnnnnnnnggaccaacttccccccccctggaaaaaaggtcccacccaatttctttgggcaaaaggaacccccggaataccccccggaaaaaacggnnnnnnnnnnnnnnnnnnnnngnnnnnnnnnnnnnnnnnnnnnnnnnnnnnnnnnnnnnnnnnnnnnnnnnnnnnnnnnnnnnnnnnnnnnnnnnnnnnnnnnnnnnnnnnnnn

SEQ ID NO: 108623 - DNA, 357 bp, Homo sapiens
  misc_feature (1)...(357): n = a,t,c or g
cggttcgagagaagaatgaaactagatctttaccttttatcatatacaaaaagcaactcaacatacattaaaaacataagtgtgaaacctgaaactgtaaaactactagacaaaacatagggaaaattcttcttgacgttggtctggacaaaatttaaaaataagacctcnnnnnnnnnnnnnnnnnnnnnnnnnnnnnnnnnnnnnnnnnnnnnnnnnnnnnnnnnnnnnnnnnnnnnnnnnnnnnnnnnnnnnnnnnnnnnnnnnnnnnnnnnnnnnnnnnnnnnnnnnnnnnnnnnnnnnnnnnnnnnnnnnnnnnnnnnnnngctatataaggaactaatagcaaaaaaaacg

SEQ ID NO: 108624 - DNA, 353 bp, Homo sapiens
  misc_feature (1)...(353): n = a,t,c or g
gggctaaagaaaaaaatatcctatcatagaagcttccccatcttaccctttagnnnnnnnnnnnnnggtttaagttttgacaacccccccggggtttgaggagggccaaaggggaggggggccatgctcatgggaaaaactttttttccgggggttttcccctaccggggaactatcctcctggttttcccaagccagggccccaacggggaggacccccatttcagcctgaccatcggggacctttaaaaaaggtttttttttnnnnnnnnnnnnnctgggccaccctgcctgttttccaaatggggaaaaaggaccagttgttcaacatatttggacaaaagtcccaacct

SEQ ID NO: 108625 - DNA, 429 bp, Homo sapiens
  misc_feature (1)...(429): n = a,t,c or g
gtgcactggggtgatcttggctcactgcagcctccaccacctgggttcaagcgattcttatgcctcagcctcctgaggagctgggactacaggggtntaccacgacgcccggctaatttttttatttttagtagagaaggggttacgccatgttggcccaggctggttttgaaactccctggcctcaagcgaatccagctgccttggcctcccaaagtgcctgggattacaggcgtgcaacccgtgcctgggcctctgtgttttgtttttgatagtttctattgctgtgcccctcgagggacattaaacttttctctttacgggattctaatctggtcattaatccccatcccagcatgtttatctgacagggtaggtttccactttcttacctgtgtctcttccgagtctgaactgttgcatttttcc

SEQ ID NO: 108626 - DNA, 360 bp, Homo sapiens
ggagggtgaggaggatgaggaggaccacgaggacccggtaagaggagatatgttccgaaagccctctcgatccccgcttcctgctcctcccagaggcacactgcgcctgccaagcgggtgctctctgtcctacaggaccatcagctgcatcaacgccatgcttacccaaattaatcggcttgcacacaacagataacacgtctggagctcactggcaaatccatcgcctccatcccagatgaagcatttaatggattaccaaatttggaaaggcttgatctgagcaaaaataatatcacttcttcaggcataggtccaaaagcattcaagcttctgaattatgcattgccgaggcaaaag

SEQ ID NO: 108627 - DNA, 551 bp, Homo sapiens
  misc_feature (1)...(551): n = a,t,c or g
tcagaatcaatcagctttacgagcaggccaaatgggcanttctcctggaagagattgaatgcacagaagaagaaatgatgatgtttgcagccctgcagtatcatatcaataagctgtcaatcatgacatcagagaatcatttgaacaacagtgacaaagaagttgatgaagttgatgctgccctttcagacctgggagattactctggaaggtggtaaaacgtcaacaattttggtagggtgaatctttttttttacctactaatttagcttgaattgatgcattccattttgtggatttaggttcaaagtatttgggggtgggggagagaaatatttaatgctttagagagagaaatcagatgttaatttttcaggaactttgagcaaagtggtttattttgagacagggtctcgttctgttgcccaggctgggagtgcagtggcacacgtncattaggtcactgcattcttcaaactccaggggctcaagccatttcctacctcagcctcctgagtagctgagactacaaccnggcaccaccacaccgg

SEQ ID NO: 108628 - DNA, 390 bp, Homo sapiens
  misc_feature (1)...(390): n = a,t,c or g
gttagttaaaatgtttttttaaaggtttaaaatggcccccctatggcccggggcaatgggtcccccctgtttttcccccccccttggaggcccaggcaggtgggttcccaggttcaaaaattcagacccttctgggccacccggggaaacagggnnnnnnnnnnaccaaattccaaaacttacccggccttgtggggggggcccctttttctaaattctttggaggcttaggcaagaggaatgggtttaccccagagggggaggtttcccttaacccaaatgggccccctgcccttcagcctggggaaaaaaaagagaattccttttnnnnnnnnnnnnnntggtacccttatataagccacttataagacaccatgggctgggtgcagt

SEQ ID NO: 108629 - DNA, 390 bp, Homo sapiens
  misc_feature (1)...(390): n = a,t,c or g
gacactttatagagacaatgcaatccctataacaattccaatgacgcttttcatagaaatcaaaaatacaatcctaaaatggataatgtatgtggtaccacagaagagtccaaaaagccaaatnnnnnnnnnnnnnnnnnnnnnnnnnnnnnnnnnnnnnnnnnnnnnnnnnnnnnnnnnnnnnnnnnnnnnnnnnnnnnnnnnnnnnnnnnnnnnnnnnnnnnnnnnnnnnnnnnnnnnnnnnnnnnnnnnnnnnnnnnnnnnnnnnnaatccacagatttatattaaattgattttcaaccaaatggcaaaacatacaatttggaaagaatagttgctttgataaatggtgctgggtaaacagaatatctacatgcagaagaaactag

SEQ ID NO: 108630 - DNA, 455 bp, Homo sapiens
ggagtgcacaggctccatgccagacgcttccagaatcggcagagctggcctctggggaagaggagccaggggttcctcctgcaaaattaaaaaggttccaaaagtctttgtaattaaaaaagacgagccatggggacactggaggggttcctgcccagtgtgggctgagccagccccggcagtgagcctcagagccccaggcctcctctgtccggcttccagggccccacacaggttgtcattggggagagactgttctgctgagagcccctcacccaggtttttgcctggtagccccagcccttcccctactctctgtgggctctgggaccccagttctccgtccctggttctcatcctcactccctcgcctacccagttaggaccccacggtggggcttcagcagccccagaccccatccttggtgcctggctgtgccctgggccctccaagc

SEQ ID NO: 108631 - DNA, 901 bp, Homo sapiens
ttttttttttttaaggcaggagtacagtggtgcaatcatagctcactgcagcctcaaactcctgggctcaagtgattcttccattcttccacctcagccaccatgcccagttaatttttaaatttttttgtagagacggggggtggggctcctgctgttgctgaggctgggtcttgaactcctaggctcaggtgatccttccgcctctgtctcccaaatttgctggggattacaggcatgagtcaccatgcctgggccagcaacaattttgtgttttgaagaattaacctgagccatttccctgaagctaccctacactgcccattcccacagtttggggaatatctttcacggtatctaccccgctaaggggaaggaatcttggggggggcaagaaatcacccttattttccagaggcaggcaatttaagaccgacgtagtagggagtttttaggggagatttttaaccctaagggatttttcccatttaaaatgagatgaaaaatggggaatccactctgacttccacgattataggcatcagtgaccaaattttaacctggaaaaggcattcatggatcagttcatgctcctgggcagaattcaatattgaacatgattcctagctattgatttggtatctgttctgcagaaatgtttgaatttctcaaactcaatccaaagccattgcctgaagcaagcttcctatgtcagagaataagcacagatggtttccatcaccccgggtgatcattagtgctctccacaggtcacaggagagcaggattgcgctgggacacagggaatatcgaaatgaaaatttaggttagtgcatagttagtgctctcagtattccctggctcagtgctcctgtgccacctccagcggggccctcgtgcc

SEQ ID NO: 108632 - DNA, 332 bp, Homo sapiens
gaaagggccagcatttgcagaaggaccacaactggtgacgtccaggtcctgggactcgttcacacgcataagctgggtgtcataagtgacaaagttgttgtcactgtactccaaaggttatccgtgtggtggaaataagaccgcatcctccgtgatagaattgacctgtacaaagacggtgggcagacctgcattcaagaggtttgatatcgacagctgcgcttactactttatctgggactcccgggctgtctgcgccgtgaagcctcacgaggtgcaaatggcgaatgtgaccctttccaaccctatgaatggcgagagctttcagcttg

SEQ ID NO: 108633 - DNA, 714 bp, Homo sapiens
agacactgtcccactccatcacccaggctggagtccagtggtgtgatcatagctcactgcatcctccagttcctgggttcaagccatccctcctgcctcagcctccccagtagctggaactacaggtgtgtgccatcacacctggctttacatttttctgtggggtcttactatattgcccaagccggtctcaaactcctgagctcaagtgatcctctgcctcagcctccagagtatctgggattacatatgtcggctaccgtgtctggccgttcacatctttggccactattttgcttgtgaaaaaggtataatgaggtggtacttatccatttttaactgtgtctcatgttttgtatatttttgtttccatcaacctaagatgcacctgtaacatcctctgaaaatcctggatatattatcaatggtttatccatagttttgttagcaatacactgtcttttaatggggccctaaaataatggtatagttgtgaggtgatcttagatttgatgaagcacagtatgcaggtaggcctaatgggggaagatggtaatataaaagcaagaagtattttttttttttgtaatgactgaaagctgttctgtggatgacctaccctttcctttaaacacgattctctcacttccaactccaaacttgctcaactaatccttaaaaataaacttgagctggaatttgaaaaaaaaaaaa

SEQ ID NO: 108634 - DNA, 362 bp, Homo sapiens
tgatctggtttaattttaaattccttgtatgttccctccaccttggctttccccttcccatctttcatagcactctgaatctgagggcttggaagcaagttgagggctggaggtatgagcagatgtcgttcacagtgcggagccccaggtgctgctcgggggcagtgactgtgccgtgttgcgtgttctaggcagcaaagctggccaagatgaagattccccccagtgagatgttcttgtcagaaaccgacaaatactccaagtttgatgaaaatgtaagcatggtctgcccacacatgacatggagggcaaagagctcagcaaagggcaagccaagaagctgaagaagctcttcgaggctc

SEQ ID NO: 108635 - DNA, 559 bp, Homo sapiens
  misc_feature (1)...(559): n = a,t,c or g
caagagacatgacatcattataagagcgctgaaaattcaaaaataagggggaaagtgaaaaaaataccnctgtgagtggtagagaaagccatttcacataataaagggttcgctctaccagaaaacgtcaattttaaatgggtatgagcctaataacacaatctctaaatgcataaaacaaaaattaacaaaactcaaaggagaaataaacaaattcataataatagtggcaggctttatcctctctcagtaatttatagaaaaacagacaaaaatatcagtaaagatgtagataatttgaccaacctgattaacaaacttgacccagttgaaatacacataacacctgcacacaactgcagaatgcacattctttcaagtgcaagaacattatgataagaatattataggaaagtctgtcataaacatagcttatataaaaatataacagcaaattaatctaaattttatttaataatttacttattttatttttttgtttatacttatgtcataaacatagtttatataaaaatcgggcgcgtgggacggccatcaa

SEQ ID NO: 108636 - DNA, 360 bp, Homo sapiens
  misc_feature (1)...(360): n = a,t,c or g
gcgccnnncccggaggacgcgggcgctccctcgccatgggctaaacccgaggccggtccccaaccagaatctggcctcaggcactgcagagcccgcggtgctcgccaacaagcccgttagacccacgggacttggcaccctggaacgctcaccatccccgggtcttccctgcgccctggacccgagtaccttgctgcggggtgcccctaccaccgagaggagggcctagagcatacaagcccggcccgacggtgctcccaggagcttatatcccggaagttgatgcccagcgcagatcgcttggcacttgcttactgtgtgggctgggaggactgggaaggctgaacttgcaagaggatc

SEQ ID NO: 108637 - DNA, 368 bp, Homo sapiens
  misc_feature (1)...(368): n = a,t,c or g
atnnnnnnnnnnnnnnnnnnnnnnatgtttttaagagttttaaacatctggctctgnnnnnnnnnnnnnngaaaagggaccccctttttgccccaaggggggagcccgaggggccccattgggtcaatgagaagccccctttccgggaaccacccaatttcccggccctaaccccaaaaagggggggaaaaaaggggcccgcccaccatgcccgggaaattttgggaattttaaaaaaaaggggggtttcacccctttgacccggaggggccgcatccttgggcccaggaaaccccccccctgggccccccaaagggggggaaataaaagaaagggccccgggcccccccccttgtgagttttttaaa

SEQ ID NO: 108638 - DNA, 371 bp, Homo sapiens
ccgcctttccccgtggctggcactctggactttcaccaggtcgcgctcgcgcctggctcctttcgggagaactcggagaaatgtcttcccgccgccctgactctctccttcccccacttcctgcctgggcccagcgcgcgggccacggggccgcacctgcaggcacgcgtttcccattggtgacatcttggcgggcccggcaatggcacttcctcctctgcaccccgtgacccacgtccggctgccggtcttggatcacgaggcctccacctgccccacctcggcctccatctgtgtcacctccacctgtccctccgaggcctccacctgtgtcacccaggcctctatctttcctacctaggaatccaata

SEQ ID NO: 108639 - DNA, 641 bp, Homo sapiens
ctgtcatgaaagacgaggctatcgccttgcacagttaatgatgccgcccgaagcgaggaaaataccccgcgctgagaataggtaagcagcggatttagtggggtttcttctcaggctatcagagatgcgagaaaagcagggcgactcccgcacccgtatatggaaattcgaggacgggttgagcaacgtgttggttatacaattgagcaaattaatcatatgcgtgatgtgtttggtacgcgattgcgacgtgctgaagacgtatttccaccggtgatcggggatgctgcccataaaggtggcgtttacaaaccctcagtttctgttcatcgtgctcaggatctggctctgaaggggctacgtgttttgctcgtggaaggtaacgccccccagggaacagcctcagtgtatcacggatgggtcccagatcttcatattcatgcagaagccgctctcctgcctttctatcttggggaaaaggacgatgtcacttatgcaataaagcccacttgttggccggggcttgacattattccttcctgtctggctctgccccgtattgaacctgagttaatgggcaaatttatgaaggtaaactgccctccggtcgccggggcccgagctcgaattcgtgatcgggt

SEQ ID NO: 108640 - DNA, 444 bp, Homo sapiens
  misc_feature (1)...(444): n = a,t,c or g
taagagtccctggtgcccatgctacagtgtggtctcccctccatcgcaggacccttcacagctccctgtccatcctccagtgtgggctcccctccatcccaggacccctcacagctccctgtccatcacncagtgtgggctcccctccatcccaggacccctcacagctccctgtccatcttccagtgtgggctcccctccatcccaggacccctcacagctccctgtccatattccagtgtgggctcccctccatcccaggaccccctcacatctccctgtccatcatccagtgtggtctcccctccatcgcaggacccctcatatctccctgtccatcacccagtgtgggctcccctccatcccaggatccctcacagctccctgtctctcctccagtgggggttcccctccatcccctagtggggtctcccctccatcccg

SEQ ID NO: 108641 - DNA, 658 bp, Homo sapiens
  misc_feature (1)...(658): n = a,t,c or g
caaagaatttttgggacaaggaggggggttggccccccaatattttatccccttccccccccgggttatatctccgggctgccgtgggccccttctcccaaggggtgtacacagacccccccggggcgagaagcccctcttcaaggtgccgggccgttctcaccctccgggtggctgtcattcctgtttttcttctccactcagagttgagcctagtcccactgcagtggcccctgcacctatcgcgattcctttgagacnnnnnnnnnnnnnnnnnnnnnnngtcccccgccaaccccgttannnnnnnnnnnnnnnnnnnnnnnnnnnnnnnnnnnnnnnnnnnnnnnnnnnnnnnnnnnnnnnnnnnnnnnnnnnnnnnnnnnnnnnnnnnnnnnnnnnnnnnnnnnnnnnnnnnnnnnnnnnnnnagcagagatcttaaggttgacaaaacagactctgtagcaataagatactacattccaacctgactttagtatagcatcacatgatagagagcaggccctggaagaaatcaagcattttaccccagaatatatttctttgacatattttgaaggggccccacacggctgtctcttgaggggaaaatccacatcctgccagaatccccttccctttccaggtcttttccct

SEQ ID NO: 108642 - DNA, 364 bp, Homo sapiens
  misc_feature (1)...(364): n = a,t,c or g
ctgattacgagattcgatgtcgcgacccgtacatcgaacagactagattatggctgtggacgaggcacttactggcctatgcttcgcatctgatcagtactctgggttccatggcattggggtacccggtacattacnnnnnnnnnnnnnnnnnnnnnnnnnnnnnnnnnnnnnnnnnnnnnnnnnnnnnnnnnnnnnnnnnnnnnnnnnnnnnnnnnnnnnnnnnnnnnnnnnnnnnnnnnnnnnnnnnnnnnnnnnnnnnnnnnnnnnnnnnnnnnnnnnnnnnnnnnnnnnnnnnnnnnnnnnnnnggtgaataaatcggcaaactacggagtactggataagttggcccgaggatatgca

SEQ ID NO: 108643 - DNA, 742 bp, Homo sapiens
agtcgtgaccatcattacgagattcaatgtccgtacccgtagatcgcaccagctgggctgaaccctggacatcccaacattacccaggctctgaaaaagaaaagtctgaactgtctttgctcattttgtcttagcaatatgagaagccgctgtctgagatggagccaaaggttctgagtgagaggaagctgaagacggtgttctaccgagtcaaagagatcctgcagtgccactcgctatttcagatcgcgctggccagcacgcgtttccgagtgggactccgtggaaatgataggcgatgtcttcgtggcttcggtaattaagctgggacacctggatgtccatggggctctccatgcacctgtcctctcttcccttcttaggctgatgttttgcccctgatctcctgcaagctgacaagtgtgcacgttctctctaaaggccaggctgaagttgcaatgccctggccaagcgtgtgcgctagggaaatgataaatggatctttaccagggaggccaaggcgttagaaaggcagacactggacagaaactgtatctgaggacatttaacaatatgcactttatcgagtcttggatgccccattaaacgaattgctgaagctttttgtttggtgaacaaaggatgccgtgtgtttggcaagtcgaagtagaataagcggggttaagccagggttcaggcagtcttcacgatgtacggggacggagagtgaattcgtaatcag

SEQ ID NO: 108644 - DNA, 222 bp, Homo sapiens
  misc_feature (1)...(222): n = a,t,c or g
tggcgcagggtgatgatgcccgccttccacaagcccatcagcagcagtttcgtgaacgactgatgcaggaacttctttcgcgtgtgcagcttcagacatggacgaacgccggcatgttaaatgcgctgcaaagcgagtagaattacgttggtgcaagatctggcctgtccggtcgatgtacgggtacggaccnnnnnnnnnnnnnnnnnnnnnnnnngttcg

SEQ ID NO: 108645 - DNA, 365 bp, Homo sapiens
  misc_feature (1)...(365): n = a,t,c or g
gntacatcgagccacaactgccggatggggcgacattaaaagatgttcgcctgcaaattccgatgcagatttacagcgccgatggcgagctgattgctcaatacggggagaaacgtcgtattccggttacgttggatcaaatcccaccggagatggagaaagcctttatcgcgacagaagacagccggttctacgagcatcacggcgttgacccggtggggatcttccgtgcagcaagcgtggcgctgttctccggtcacgccgttcaaggggcaaggtccattacccagcagctggcgagaaacttttttctcagtccagaacgcaccgctgatgcgtcagattaaagaagtctttctcgcgat

SEQ ID NO: 108646 - DNA, 347 bp, Homo sapiens
  misc_feature (1)...(347): n = a,t,c or g
agcatggnttctctggtggatgtcactgagtgtccttcaccaccgtccctccccccagccccactggaccctcatatccacatccagccctccttatggtcctcctgcagtccctgttcctcagacccatccccatgtgactgtacttcccattcacggccccccacagccccccagagctctgccttctacctcctcaggacacctcccaggagctccagagagacccaggacccccactcaccaagaggccccctcactatacccgttgaaggcagggactccgtgacctcggctccagacccccattaccttggcagagcccaccacaagctggcgtttgctga

SEQ ID NO: 108647 - DNA, 275 bp, Homo sapiens
  misc_feature (1)...(275): n = a,t,c or g
tgttgccttcaagaaacacacttcacctataaagaaacacactactgaaaataaagacatggaaaaagatattccatgcaaatggaaatcagaaagaacaggaatagctatgcatacatcagacaaaataaatttcaagactaaaactatannnnnnnnnnnnnnnnnnnnnnnnnnnnnnnnnnnnnnnnnnnnnnngcaagaggatataatactcgtaaatatagacaggctggcggatgtnnnnnnnnnnnnnnnnnnnnnnnnnnnnnnnn

SEQ ID NO: 108648 - DNA, 383 bp, Homo sapiens
  misc_feature (1)...(383): n = a,t,c or g
tgccgacagggatggcgctcaaagtgtgcgccacatctcaccttgcttgcggggcgctttgacgcctacaaagaagcctcaaatcatatccgtgaaatcttctcgcgctacacctcgcgcattgaaccgttgtcactggatgaggcttatctcgaagtcaccgatagcggccattgccacgggtctgcgaccctcatcgcccaggaaatccgccagacaatcttcaacgagctgcaactgacggcgtctgcgggcgtggcaccagtaaaggttctcgccaaaatcgcctccgacatgaataaacccaacggccagtttgtgattacgccggcagaagtttcggcatttttacaaaccttaccgctggcaaagatacccggcgn

SEQ ID NO: 108649 - DNA, 144 bp, Homo sapiens
tggcggaacgggaaacacacagatcatgcttttttactggccatatggcccagtggtttgcggtgaaagcctgcaagaagccgccaacaatatggaagagctggagggaacggcaaagctgatttttattctcggtgaccgccc

SEQ ID NO: 108650 - DNA, 737 bp, Homo sapiens
ttcgcgatgctgctcaaatccaccctggtgtccctacaacaatttagcttgggtgggaagtctttcctttcctgtttgtttgttgtggtttttcctctgagccactgaaaccaagtcagagttaggtttagagttcagctgcccactttattttcttaaggacaaacttgattccattccactccttaacaccaagacagacaagggataacttaaattgcaattcaccggcctgagctccaacagctcctagtcctgctgtactttgggttgggtcagcccttccaggatcattcacagagcagtactgcatgtggaccaccaagtctgaggcaggagacacagactcagcgggaacagacaagcctggggcatccactgccctaggagggaaagaacagagccggactccgcccagttgcacacccacaggagcagaccccttagctgccctgggaggaagaggtcagagccaaaccccgtccacctgcactcctgcaggagcagaccctcagctgtcctgggtgggagaggacagagcaggactccgcccacctgctctacccacaggagcagagcctcatctgccctgggagggagaggacagagccggaccccatcttcttgccctcctgcagaagcagagcgtcagctgccaagttgagggctctgtgcccagaacaaggttgccccgcggggcccgtcagggcgttaacgccaggggttcctcagtctct

SEQ ID NO: 108651 - DNA, 349 bp, Homo sapiens
  misc_feature (1)...(349): n = a,t,c or g
caaaatcagcgtcaggccactctgttggcttaacccgaatgcgaaactgtgcgtgccgcaaactatcgatgcggggcccgaagggcgtacggtgtttaatctcatccgctttgacctcgccatgctgaacccgtttacgccagaaacccctcaggccagcggtatcttcccgggtaaagcgaacgttgcctgggacaccacgaaagaggggctgccgcagggcagtatcaccctttcggggcgtaacgtgcaggtaacgcaaaccgtcaactgatgcggcgctgcccgtggcgtttcagactctgaatctgacggcggaattgcgtaccacccccgccnannttgtctt

SEQ ID NO: 108652 - DNA, 286 bp, Homo sapiens
  misc_feature (1)...(286): n = a,t,c or g
tggcggtacgttcctcggttctgcgcgtttcccggaattccgcaacgagaacatccgcgccgtggctatcaaaaacctgaaaaaacgtggtctcgccgaagttgctggttatcgagcggtgacggttcctacatgggtgcaatgcgtctgaccgaaatgggcttcccgtgcatcggtatgccgggcactatcgacacggacatcaaaggcactgactacactatcggtttcttcantgcgttgagcaccgttgtagaancgataaaccgcccccgnnncncctntt

SEQ ID NO: 108653 - DNA, 425 bp, Homo sapiens
caaaagcggtgccctccgctcccagaagccacgtgtgcctgccccccccactctgtgttccctgtcctgtggccaagcccccccccatttcctgactgcaaagcctgtgttgtgaggggctcctccacaactgccctgcctctgggccaccgcttccccccggccccgactgccacagaatcctctcccaccttgagtaccgtcacacagggcttggcaggatctcgctggtgctcaccgagcccgttcgtgtaatcagggaccgtctgcaggagtgcaggagctgggcctgtgccttcgagcctctcactgtctccccggctggactcctccatcaccccccagttgtcctgggcctcggtgtgtcttagttgggaacagccagggtccgggcaggcagggagatctccgggtacggacattga

SEQ ID NO: 108654 - DNA, 76 bp, Homo sapiens
accaatgccagccatgtttgaggtcggggtgaaaacacggattattcaacgctcgcgtgaagttattctcatggcc

SEQ ID NO: 108655 - DNA, 164 bp, Homo sapiens
tacatcttaaagggtgcgagcctgatgtacgtattttgcttacccgacatcggcaataataatggctctcagtccccgtggatggaggagcaaattcgggatgcctggggaagcatggttctaaaaaatgttgtacgtgaaacggatgaagttggtaaaggtca

SEQ ID NO: 108656 - DNA, 338 bp, Homo sapiens
  misc_feature (1)...(338): n = a,t,c or g
ngttaaactggtacgacgtgttgacaaacggtccgttccaccgacctcggtgaactggcgcttggtcaaaaaatgcgcgtagcgttcatgccgtggaatgtttacaatttgaaagactccatcctcgtatccgagcgtgttgttcaggaagaccgtttcaccaccatccacattcaggaactggcgtgtgtgtcccgtaacaccaagctgggtccggaagagatcaccgctgacatcccgaacgtgggtgaagctgcgctctccaaactggatgaatccggtatcgtttacattggtgcggaagtgaccggtgccccccccctggttgntaagttctc

SEQ ID NO: 108657 - DNA, 348 bp, Homo sapiens
ccccgcgtcgcttgccccagcccatctccatcacttgcaatgctgtcccccatcccccgggggctcccctgctcctgcatctcccaaccccacatgggaccatgtcctgctgccatttccttggcccctgcacccatgtcccctgcctcccgcctgatgccgcagacagccctgcccgcctgcgcgtttccgtcctgcacagcctgtttacatcctgctctttctcaaccccagatttgggctgtgaacccttggttttcagccagcgccgttcagggtccccggacagagtatcagagaactgcaaactgacaaactggagaaacacgccactgctccctgagcccc

SEQ ID NO: 108658 - DNA, 86 bp, Homo sapiens
tgcgcgcgaaagcggaacaggcgggcgataacctctctctgtatcatggagacttatccttctacccacggcgtgtatgaagaaac

SEQ ID NO: 108659 - DNA, 388 bp, Homo sapiens
  misc_feature (1)...(388): n = a,t,c or g
tggtctgtccgggcagctcctggagctgtacctcctggttttggagaaagagggcagcctcttgtcaaggcaagaggagtccaaagcagcctttggtgatgaggcagaggcagtacacatgattttgacaaaaagacctcctctnnnnnnnnnnnnnnnnnnnnnnnnnnnnnnnnnnnnnnnnnnnnnnnnnnnnnnnnnnnnnnnnnnnnnnnnnnnnnnnnnnnnnnnnnnnnnnnnnnnnnnnnnnnnnnnnnnnnnnnnnnnnnnnnnnnnnnnnnnnnnnnnnnnnnnnnnnnnnnnnnnnnnnnnnnnnnnnnnnnnnnnnnnnntaattagcgtggcagcaggaggttcccattagccccgatgtacgggtacggacagt

SEQ ID NO: 108660 - DNA, 254 bp, Homo sapiens
atatgactacgcattcattgtcctgacccggacatcaaggtaagcgtgctaacacctgacaagaccactcatgatggaagacacgttgtgggcggcttccggaggtcaagtcttcatcatcagtgtggagactcatgctgtagaggtaagtcacttaggtggctacacggtgtggaaaaaatgcatttcagaaacagctcagctgacttctggtgccgaagtcaaggcttcttgcctgtggctaaatttccttc

SEQ ID NO: 108661 - DNA, 81 bp, Homo sapiens
atagagcgttaccagctgcctcaaagttaccagcgtatgcctgacatccgccgccgcttcatgcaggtctgatgttaatga

SEQ ID NO: 108662 - DNA, 99 bp, Homo sapiens
agcactgtttccgaactgatgctgggtatggactatcggtttgaaagagttcaaattcttcccggctgaagctaacggcggcgtgaaagccctgcaggc

SEQ ID NO: 108663 - DNA, 102 bp, Homo sapiens
ggatgacaactgtttttgtacacggccattgatctacgctcttcaactggtgcctggagaaatgctctttctatttgggaacctgtctgcaatgaaattttc

SEQ ID NO: 108664 - DNA, 237 bp, Homo sapiens
  misc_feature (1)...(237): n = a,t,c or g
tgttgccttcaagaagcacacttcacctataaagaaacacactactgaaaataaagacatggaaaaagatattccatgcaaatggaaatcagaaagaacaggaatagctatgcatacatcagacaaaataaatttcaagactaaaactatannnnnnnnnnnnnnnnnnnnnnnnnnnnnnnnnnnnnnnnnnnnnnngcaagaggatataatactcgtaaatatagacaggctggc

SEQ ID NO: 108665 - DNA, 1339 bp, Homo sapiens
agcccacacagaacacacagaatctggtgggtcacaatctccagccacatatgggtgtggctcttgcttcagtcctggccccttctgctgtgaggcagaaagtgggaagaaagaaatccggtgtccgagtgtttccaaaaaattggtaaccctgtttttcttcaaaatgtgccggttggatggttcgtttaaaaaaagtgcatacacgtatctggtaagcacagatcccccatattattccccaatgttatcccaaatttcccctgagcaaggggttttcttggtggtagatgctggaggcagacatgagaagcagcagcaagggcaggaaatgtccgtaccgtcctcccatctctgctccagcaactgtcaaccaaagcttctgtctctactctcctcccatctttggtccagcaactttcacccaaggttttgggtcactttccctcccattttgggtcccaagcacttgtcacccaagcttctgtgtctactctcctcccaccttggctccagcaaactgccacccaagcttctgtgtctactctcctcccacctctgctccagcaactgtcacccaagcttctgtgtctactctcctcccatctctgctccagcaattgtcacccaagcttctgtcttcttggtcaagaaatgcagatgcagattctgagtatcttttgaaaaagccccccagatttttttttggaatatgccgaagaggacaaataattcatttctgttaagcgccatctgccagataacacgggtgttttagaataccctcacagataaaacctccgttttatcgcacacacagaataagcgtgtgagagaccactcctgtgccttataattacatcaagatctaagctatatgctgacactatttagaaaacacagctattttgactagttttatgaatcataggacagtttataatcatccaacactgataagaagaagggacaaaagtttttgaacatgattatctcttcatgtatatggagcttctaaatctatttccaattctgtttcctttccttttataaagcacctctccattatcttatacacatcaggtaccaaatacatatttgtgaggttggttaaattgattgtggaaatgaacggaaaggggtttataaggaggggaccggttgaacccattaaggggacccagaaatactcgtttttattacagaaagagagtaggagcatatcctgcctctgaaagacttggaaatgtaacctgcccgcatccctaaggtgtggggctttttttcacaattcctgaatggagtgctatgtaacctgactttcgctgcctagtaagat

SEQ ID NO: 108666 - DNA, 109 bp, Homo sapiens
attccgagaggaaattcacctttcaccgtccgcttatcgcgcgtaccctggcgggtatcggtcttggggatatgaaaaccggcattattatcggcgggacgctggaaat

SEQ ID NO: 108667 - DNA, 141 bp, Homo sapiens
tgttcccggaatatcaccagctatggccgaacaaattccataacgtcaccaacggtattaccccacgtcgctggatcaaacagtgcaacccggcgcaggcggctttgttggataaactcccagcaaaaagagtgggctaac

SEQ ID NO: 108668 - DNA, 339 bp, Homo sapiens
caattgtctgtagaaattaccaaagagccatcaccaacaaaaaatcactcatggaaccaaaagcaattacagctaggtcgcaggataaaaagttaatatgaaaaatcaattgctttcttacatagaagccattaacaattggaatctgaaatttcaaaacatctttaatgcaactgcaataaaaatcccagcaagttaccttgtgactgttgacaaacggattctaaagtttatatggagaggcaaagacccagaacagccaacaaaatagggagggaggaaaacaaagtcagaggagtgacccttcccaccttcgagtctgcttttctccaagcagca

SEQ ID NO: 108669 - DNA, 258 bp, Homo sapiens
actgccaagccctcaaggtggactttttaagatctccacaccgttttaaattggcgcttttcaaaagcaacgctccgtcgagttggagccaatagtgatggttctggtgtcctgtgttttcctgcatcaggagacagtatggagccagtcattcctgatggtgcaactgtagctgttgatgctggtaataagcaagttattggcggcgaactgtgcgccatcagctcagggagatctgcgggtaccgacctgagattg

SEQ ID NO: 108670 - DNA, 142 bp, Homo sapiens
atctttaaacaaaaaggttttttcttcgccaatgtctggattgaatatagccgaatcaaagcgatgaacttgtcggaagatggcgtgttggtgatgcaattagaacagcgtcggctgcttaatccgcgttcgaaatatcgac

SEQ ID NO: 108671 - DNA, 116 bp, Homo sapiens
gcgaaatcatgaaaggccacgcgtgaccagatgaaacgtccgccgctggaagaacgccgcgcaatgcatgacatcattgccagcgataccttcgataaagtaaaagctgaagcgca

SEQ ID NO: 108672 - DNA, 218 bp, Homo sapiens
tctcgccgcacaccccaggggacagcatgacagatcctctcgccccgcaccccaggggacagcatgacagatccccggccgtgatatctacccgattagcgccaaagtcttccgttcgttcttcaatacccctaagagtggtgtcagcgagagatgtcgcacaagacacgatctcgaggactcgcacggtgtacctgacgctaatcagtggttatacg

SEQ ID NO: 108673 - DNA, 82 bp, Homo sapiens
tggctctgaaggggctacgtgttttgctcgtggaaggtaacgacccccagggaacagcctcaatgtatacggatgggtacca

SEQ ID NO: 108674 - DNA, 389 bp, Homo sapiens
  misc_feature (1)...(389): n = a,t,c or g
gagggttannnnnnnnnntccccctaggtccggagatccagacccccccttccccccctggggaaaccccccccttttttaaaaaaccaaaattaactgggggtaatggccggccccttttattcccccctcccgggaggcttaagccagaaaattcccttaccccccaaagcccagggttccagtttcccaaattcccccccttccccccagcgttggggccaaaactagactccgtttcnnnnnnnnnnnnnnnntgtgagaaatcattctgctcgtggcgtcatggcggaatgggaagcggagcaggcatcacatgccaagaggaaaaaagccataaagagggccagagagagaggaaaggagctgccaggctctttttacaatca

SEQ ID NO: 108675 - DNA, 386 bp, Homo sapiens
  misc_feature (1)...(386): n = a,t,c or g
ggttaggggggcgggtccccttaggtccggagatcgagacccccccttccccccctggggaaaccccccccttttttaaaaaaccaaaaattactggggggaaaggccggccccctttatccccccttcccgggggggttaggcccgaaaattcccttaacccccaaagccaagggttccgtttttccaaattccccccctgccctcccgcttggggggccaaaattaaccccctttccnnnnnnnnnnnnnnntgtgagaaatcattctgctcgtggcgtcatggcggaatgggaagcggagcaggcatcacatgccaagaggaaaaaagccataaagagggacagagagagaggaaaggagctgccaggctctttttacaatca

SEQ ID NO: 108676 - DNA, 663 bp, Homo sapiens
ctttaaaaggtttgtttttttgggccccccgccccgttattactgttaccttgcatctaccggttgcgaatctgcgctctttatcccgcttacctttggcaaccatcccccgggtgcattgttgctggcgcatacctcttccactctctttagtgaggaaaactgccagctactacaacacatagccgatcgcatcgctattgccgttggcaatgccgatgcctggcgtagcatgaccgatttgcaggaaagtttgcagcaagaaaccctccagcttagcgagcagctcctttcgaatctgggcatcggtgacattatctatcaaagccaggcaatggaagacctgctccagcaggtagatattgtggcgaagagcgacagtacggtgttgatttgtggtgaaaccggaactggcaaagaggtgatcgccagagcgatccatcaacttagcccgcgacgcgacaagcgggtggtcaaaatcaactgcgctgccatccccgccagtcttctggaaagtgagttattcggtcatgacaaaggggcgtttactggtgcgattaatacccatcgtggtcgttttgaaattgccgatggcggcacgttgtttctcgatgaaattggcgatccccggggaccgagcgcgagtttgtgtcagcgtggtca

SEQ ID NO: 108677 - DNA, 356 bp, Homo sapiens
  misc_feature (1)...(356): n = a,t,c or g
aaagggttcctcttgtccccccgggtgggggggcaaaggggggttttaagtcaggggcaacctttcccccccgggttaaaaaaattttcctgcccagcccccccaggtggggggggttcaggggccccccacccccaccggggannnnnnnnnnnnnnnnnnnnnnnnnnnnnnnnnnnnnnnnnnnacccgaagggttttattttccggcccccatattttgccgccccgggcccccaaaaaggtggggttcacgggtttgacccttnnnnnnnnnnnggnnnnnnnnnnnnnnncnnnnnnnnnnnnnnngaaacnnnnnnnnnnnnnnnnnnnnnnnnnnnnnnnnnnnnnnn

SEQ ID NO: 108678 - DNA, 432 bp, Homo sapiens
  misc_feature (1)...(432): n = a,t,c or g
gacgaccgactggacgacgtgcagggccgcgacgcgccatccctccgagatatgctgcgtcgtttcatggcagccctgtctacctgttcgcacgatcccggtgactcgacgaccctcgccagaccctctttctctcgctcctcgtaaggagcgcccccgcacgcggtctcccggtccggcggctgtaaaaccacggccagccccaagcgtgcatgcctccaggtggtgtctagagacnnnnnnnnnnnnnnnnnnnnnnnnnnnnnnnnnnnnnnnnnnnnnnnnnnnnnnnnnnnnnnnnnnnnnnnnnnnnnnnnnnnnnnnnnnnnnnnnnnnnnnnnnnnnnnnnnnnnnnnnnnnnnnnnnnnnnnnnnnnnnnnnnnnnnnnnnnnnnnnnnnnnnnnnnnnnnnnnnnnnnntacatctggactc

SEQ ID NO: 108679 - DNA, 261 bp, Homo sapiens
cgataagctcatggagcggcgtaaccgtcgcacaggaaggacagaaaaagcgcggatctgggaagtgacggacagaacggtcaggacctggactggggaggcggttgccgccgctgctgctgacggagtgacgttctctgttccggtcacaccacatacgttccgccattcctatgcgatgcacatgctgtatgccggaatacccgctgaaaggtctgcagagcctgatgggacataagtccatcagttcaacggaagtct

SEQ ID NO: 108680 - DNA, 464 bp, Homo sapiens
  misc_feature (1)...(464): n = a,t,c or g
ccacggagcgagcggacacgggaaggggcacgcgcgaccagcacgaacggcgcggcgggcccgcggagagcgaaggccggacgccggggcggagcgacgcggcgggggcggggagcgcggcacaagggagcgggcgccgacgacagccgggcacagaggcggcccgggcccgccggcgcgggcccggcgccgcccgcccggccgcgcggccnncccgcccnagcncnccnncnnngnnnnnnannnnnnnnnnnnnnnnnnnnnnnnnnnnnnnnnnnnnnnnnnnnnnnnnnnnnnnnnnnnnnnnnnnnnnnnnnnnnnnnnnnnnnnnnnnnnnnnnnnnnnnnnnnnnnnnnnnnnnnnnnnnnnnnnnnnnnnnnnnnnnnnnnnnnnnnnnnnnnnnnnnnnnnnnnnnnnnnnnnnnnnccgggtacgactcgaaatcgtatcatgtcaagctgtgg

SEQ ID NO: 108681 - DNA, 435 bp, Homo sapiens
  misc_feature (1)...(435): n = a,t,c or g
catcnnnnnnnnnnnnnnnnnnnnnnnnnnnnnnnnnnnnnnnnnnnnnnnnnnnnnnnnnnnnnnnnnnnnnnnnnnnnnnnnnnnnnnnnnnnnnnnnnnnnnnnnnnnnnnnnnnnnnnnnnnnnnnnnnnnnnnnnnnnnnnnnnnnncgataagctcatggagcggggtaaccgccgcacaggaaggacagagaaaccgccgatctggtaagtgacgaccggagccggcccgtcctggggtacacgcgtcacgcggcaggcttctgttcggccgtcgcggggcccggcaccgggcactccgccgccgccgcggcgcccgccgccggcgggcggcgcgcgcgggggccccggcggtcgttgcgtggcggccctgcgccttcgcttgcgacgcggcaaaagggcctcgggcggcgcagtcgctctggggtcg

SEQ ID NO: 108682 - DNA, 381 bp, Homo sapiens
  misc_feature (1)...(381): n = a,t,c or g
tcttcgacgccccgctttactccatccctaccccgttactcatctcctctcccgtactctcctccaaattgtttctctcactctttccccttctgtcccctcccctccttcgctcgccaacctaatttttactcgttacccattctcttcccccctccctcctctctacatccccgcgtcacttccaagcctgctcgctactgtatgcttttatagcattgcactcgnnnnnnnnnnnnnnnnnnnnnnnnnnnnnnnnnnnnnnnnnnnnnnnaaaaaattggtggaagtcctgaaactggttgggccaaaattttnnnnnnnnnnnnnnnnnnnnnnnnnnnnnnnnnnnnnnnnnnnnnnnnnnnnnnnnnnnnnnnn

SEQ ID NO: 108683 - DNA, 403 bp, Homo sapiens
  misc_feature (1)...(403): n = a,t,c or g
cgccgtcgcctagctccttgccacttgcctctcgctcgaactcccagggcccgcgccccaccggtacagtctcgtcaccactctcagcccaccctaggccgcgccctcgcgagccggacacgacgccaccctcaccactcccagctatgcgcttgccccgcgctcctcgtctgcccccaatgcaggccgcccagcctaacctcccacagcccaccctcctctcccgcttgggggcaccgacttggccccctttccnnnnnnnnnnnnnnntgtgagaaatcattctgctcgtggcgtcatggcggaatgggaagcggagcaggcatcacatgccaagagcaaaaaagccataaagagggacagagagagaggaaaggagctgccaggctctttttaacaatca

SEQ ID NO: 108684 - DNA, 181 bp, Homo sapiens
ttcgcactgccattcgaaccggcggcggaagcaccggatgaagagtacgacctgtggctctctaccggacgcgttctggagcactggcacaccggcagtatgactcgccgtgtaccagaactgcaccgcgccttcccggaagcggtcctgtttaatacaaccgctggatgcgaaagcgcgc

SEQ ID NO: 108685 - DNA, 264 bp, Homo sapiens
  misc_feature (1)...(264): n = a,t,c or g
gagttaacttctcctgtccgcaaatgacttctcatgcgatgggtagcgatgtcgggcaaagcccggatatggtaaaaaaatattctcgggcagtgaatgcggggttccgcccagccaatgctgggcaagatgacagctaatatcggtaatatcctccaattggcgccgccccccagcggggcggcccagatggcatcgcaacgaatagccccgttaaatccctctccattttcgatccttgggtgccnagctacaatacgtgtc

SEQ ID NO: 108686 - DNA, 1186 bp, Homo sapiens
  misc_feature (1)...(1186): n = a,t,c or g
cacatgccttctggggagacagcaccactgaggattgtggacacagggaccggcacgggtactgttagnatatgcccccactgagttcggggctccatgagatgcacatcaaatacatggccagccacatccttgagagcccactcaggttctacgtaactaccccaacagtgnnaagtgtttctgcatacggtccaggcctcgtgtatggagtggccaacanactgccaccttcaccatcgtcacagaggatgcaggagaaggtggtctggacttggctattgagggcccctcaaaagcagaagagccccggccgcggctgagtcgcgctccgggtgtggacggagccggagcctccccggggctcggtgaggacacagggccccaagccccggaccttcaaagtcttgaccgaagcgcatcccggccccttctgcgcccacacctgaggtttttgtctgtaggagtttccgcagtttgctaagaatcgacattctagaggagtactcaccacttaattgatgatcaatacacgttccttgaaagaaccgatagcatgcgatcgatacagagcatctgcactgggattgtccgccccgcctggcagggaggcctcgggggctaatggagctgagggtatactcggacttgtaccctcgctcttttcctttcctgtactagagaagagaaatgccttagctacccctcatgactgccttgcagaacaaataggacgtttaaattaccaacgctctttgaaataaacatttcaaaattattataaccctttagtacatgtgggaaaacgttgacattcatgttcaagtttatttttctgctggctcatttaggtttgttgaagccttgagtccctatgattgtctaagaacatggggtaatgggggtggaaggcctccctggagggccagagaactggccagaagccttcatgatgttaggggaaacaggaacctaaggagagccagggtgacatcggtttataatcaacaacccatcttggggggcgcggggggctcaaaccctgtaatcccagcagttggggagagaaaataacccggggtgggggggggcaccggaactcagctcttaggagccgaagcaaattgcttgacccaggagcaaagttgagtagctaaatacccatggatctaactgggcacaaagg

SEQ ID NO: 108687 - DNA, 250 bp, Homo sapiens
  misc_feature (1)...(250): n = a,t,c or g
ttatgcaatcccgctgcgtgcagataccagcaaaccgaagctgactcagcaggatgtgaccgatctgatcgcctatctgaacaaaggtggatcggtgctgatcatggaaagcgtgatgagcaatcttaaggaagagagcgcgtctggttttgtgcgtctgttggatcacgcagatcagtcgatggcactgaacacgtcgctagtaaataacgctgtccgggtccaaactcnantcggtctgtccgtcgtt

SEQ ID NO: 108688 - DNA, 658 bp, Homo sapiens
gtgctcgtgttttagccgcaacaaaacgtggtaaagtaacttcatggaagcatggccttcccaagttctgcctcggctgaattagccaggcttctccttatcccgcctctttaaaagcaaagggggggagagaatggccttcccaaacccttggccccacagaaacttttcctgggttttacccccccgtgtgtgtgtccccaggaccccaagcgcaatgccgaagcccgacttcgcagaacctggccggctactgggacatgctgcagctctccattgaggacgtcagcatgaagttcgacgagctgcagcggctgcggctcaacgactggaagatgatggagtccccggaaagaaaggtaagggcatccatgcagggccggctcccagcaaaccccctttctcactgcactaacgacctgctgcagatagagcatgacaacggggttctcagtcttttgctggcaacacacgagcaaatttccctctatgtatgtgtgcacatgtgtatacgcacatgtgtgtgcgtgtgtgtgcatgtgccgaaaatggggcagaattgaagccttgggcatgggtggtaaataatagggtctcccctgctctgtctattctatataagcctttcagagagacactagccaagatccccgggtac

SEQ ID NO: 108689 - DNA, 592 bp, Homo sapiens
  misc_feature (1)...(592): n = a,t,c or g
cccccaccacgagggtggcgcgcccccccgctcgggggagaaaaagaaagaatgttattcccccccctgtacacacccgggctgatccccacttaaaaagnnnnnnnnnncacccccaactgcagcagcaacttcttctggggggccgcaacagcgagcaatcgacgataatagggaagacgcgccgcacccaaaaaagaaaaggcagcgcggtcctcacctatcgtgggggggggaagaaaaagaatcttccctcctggagctcctcattgttatcctcctcgtcctcctccttcttctcctcctcctcctcctcctcctcctcctcctcctccaattcttgnnnnnnnnnnnnnnnnnnnnnnnnnnnctcttcctcttcctcttcctcttgnnnnnnnnnnnnnnnnnnnnnnnnnnnnncttctannnnnnnnnnnnnnnnnnnnnnnnnnnnnnnnnnnnnnnnnnnnnnnnnnnnnnnnnnnnnnnnnnnnnnnnnnnnnnnnnnnnnnnnnnnnnnnnnnnnnnnnnnnnnnnnnnnnnnnnntgccttctatcttctttttntactttnannnnttnnatcctn

SEQ ID NO: 108690 - DNA, 104 bp, Homo sapiens
tacggtgacggtagcagcaaagcgggcatgatgaacccgagctacccgctcaactatatggaaaaaccgctgacacgcctgatgctgggccgttccggtgggat

SEQ ID NO: 108691 - DNA, 522 bp, Homo sapiens
tgcctatgaccatgactacgagattcaggctccgacccggagatctggctctgaaggggctacctgttttgctcgtggaaagtaaccacccccagggaacagcctcaatgtatcacggatgggtaccagatcttcataattagtgcaaaacacagctcttctgcctttctatcttggggaaaaggacgatgtcacttatgccataaagcccacttgctggccggggcttgacattattcctttctgtctggctctggaccgtattgaaactgagttaaatgggcaaatttgatgaaggtaaactgcccaccgatccacacctgatgctccgactggccattgaaactgttgctcatgactatgatgtcatagttattgacagcgcgcctaacctgggtatcggcacgattaatgtcgtatgtgctgctgatgtgctgattgttcccacgcctggctgagttgtttgactacacctccgcactgcagttattcgatatgcttcgtgatctgctcaagaacgtt

SEQ ID NO: 108692 - DNA, 649 bp, Homo sapiens
  misc_feature (1)...(649): n = a,t,c or g
cggagtagagganataggaattcggacatgtagactaagttgcaaggccatagcatacgagcccactaggactaaggcgtccgtgaaacgtgcaaacccctgcgattggaaaaaacacacggctgtggcaaggaatgaaccggcgacaagtacaagactaaccaggtgcacaaattccaaagtccctatccgagaagttctttagtggttagtgcacagtgaccctgccgcctcagtccccctaggagagtggaagaaagcttccacaaatcccttcctgtgcaaaaggcaggcctgtggcctgggagccggggaccagggcaaacgggggacgggagtgaagaatgcggccctgggggctgcggtcgggaagggtcaggccaggccccagggccgctgagctcgcgagctgctgggaccctcctccgagcacctgccaacggtgacttgcgctgcttttcaggaagaaagaaaggtcccgcctccaataccaaagaagcctcccaaggggaagtttcccatcacaagagaaaaatccctggacctgcccgacagacaacgccaggaaggccggaggcgcctcatgcccgccaagcgagctggtgtccttccggcaggattccgcctcggagcgcgcgagcagcattga

SEQ ID NO: 108693 - DNA, 652 bp, Homo sapiens
  misc_feature (1)...(652): n = a,t,c or g
nnnnnnnnnnnnnnnnnnnnnnnnnnnnnnnnnnnnnnnnnnnnnnnnnnnnnnnnnnnnnnnnnnnnnnnnnnnnnnnnnnnnnnnnnnnnnnnnnnnnnnnnnnnnnnnnnnnnnnnnnnnnnnnnnnnnnnnnnnnnnnnnnnnnnnnnnnnnnnnnngctctgtgtgtttctttttcctgtagtcagattatggggtccagggcggctaggaaagaaccctgccctctttctttctctttttcctggcaacgcccttcccccccgcccccccgcctaccccgaaaccccgccaaccccacgccccttcccccccccacctcccccgggcccccccaaacaccacccccctcccccccgcggcgcccgccccannntatccgcgccaccccccctacccaccgcccacacttttcctctcttttntcccaggggttgtttgttctctttttnnnaanaaaannnnnnnnaaaannnnnnnnnnnnnnnnaaaaaaannnnnnagggaaanaaaaaannnnnaggaaaaaaaannnnnnnnnnnnnnnnnnnnnannaaaaaaggggananaaannnaaaaaannaaaaannaaaaanaaannnnnnnnnnnnnnnnnnnnanaaaaaaaaannnnnnnnnnnnnnnccg

SEQ ID NO: 108694 - DNA, 687 bp, Homo sapiens
  misc_feature (1)...(687): n = a,t,c or g
nnnnnnnnnnnnnnnnnnnnnnnnnnnnnnnnnnnnnnnnnnnnnnnnnnnnnnnnnnnnnnnnnnnnnnnnnnnnnnnnnnnnnnnnnnnnnnnnnnnnnnnnnnnnnnnnnnnnnnnnnnnnnnnnnnnnnnnnnnnnnnnnnnnnnnnnnnnnnnnnnnnnnnnnnnnnnnnnnnnnnnnnnnnnnnnnnnnnnnnnnnnnnnnnnnnnnnnnnnnnnnnnnnnnnnnnnnnnnnnnnnnnnnnnnnnnnnnnnnnnnnnnnttgtttcnnnnnnnnnnnnnnnnnnngggaaatggnnnnnnnnnngggggcaaacccccccttccaaaaagggaacaaaatcttttaaagtcaccttgaggcattgcaatttggcctttgcccgcgttttaacaacgtgggaatgggaaaaaccggggggtaacccacttaattcccttgggagaaaaannnnnnnnnnnnnnnncncnnccccccggaaccccgacacggaacaccnnncgccctggggcccaccccggcagggacngccgcccttnnnnnnnnnngagaaggggcgcccacacagggccaccacanncgccggggatagacccggcgccaangccgccccggccgcccaccgcnganacgccgccgccacgcctctctttcggcgcgaacgctcccccactcttgcttcg

SEQ ID NO: 108695 - DNA, 709 bp, Homo sapiens
ctgctgctgcggctgctgctactggacggaagtggcgttcccgcatgtggcgcagcagtgtggccttggtgctgctccggtactggcacatcttgcatttgaactgctgcaccaccaccacctccatcatggcctccaggctctgcaggtccggctcttcggcaccggaggctgggggcagctgcaccggggaactgggcccaccctgtgcctccaggcatgtggatgtggatgtggggccatctgccagggcctcaatggctgctaggctgtgggcccaaggtggaactggacattggtgatgtcatgggggctcccatcatctgggccctgtaggatcaggtaccgtgtggtcctcggccccgccatcctcagcactggtcacagtgatgcagttctggatgaggtcgggcccgatggtggactcgatgatcttgtcgatggccgagcccaggtccgaggaggaagctgtgcagtcggacaccagcatgttggggtctgggagtgcactagagtgcacaagtgctgggggaccgcgtgtcacccctgccactggcccatgagacacagacgagtgaatcagggaggtagctattaggcagggggtctgcgctcgagctgctctcagatacctcctcctgagaacggctgccgcggtccgagctttgccccacgccagagtcaacgacctctgccatccccggggcgg

SEQ ID NO: 108696 - DNA, 433 bp, Homo sapiens
  misc_feature (1)...(433): n = a,t,c or g
cgcagatgaattcctagttggctgtgacttttggtttaagtggaaggttgaggaggaaaatgaaaataattcttttgttatctaaaggaaaacatgtttgaaaatgtcttgtcggcgttggctggtggtgtgtaacgtcgattttgtctctgcagaattaaggtgaaaagcactgaagttgagatcctagagaagtctcaaattgaagccattgcttcctcgttagcctcacagaatgaggttcctgcggcacccctggaagaactggcctacagacggtcgcttcgcgtggctttggacgttctgagcgagggctcgatttgcagtcaagaaagctctgcagggacaggtagagataataaggtctctgcgagggaagcccatgtattgcgacgaaatggtcggcccgttnacaccaanccagttgctcttt

SEQ ID NO: 108697 - DNA, 395 bp, Homo sapiens
tttcgtatacagtgcatgcacctgcgagagcctggatgtgaaggcggcgcataagagaccatcccagaggcacggatccgaggagcctggccacagcatgcaccatggaccatgccagtcatgggttgctcgaaaggcacagaaacacgggcatccttgactccatggggcgcttctttggcggtgacatgggtgcgcccaagcggggctctgtcaaggactcacaccacccggcaagaactgctcactacgggtccctgccgcagaagtcacacgggcggacccaagatgaaaaccccgcagtccactgtctcaagaacattgtgacgcctcgcacaccacccccgtcgcagggaaaggggagaggactgtccctgagcagatttagctggcgg

SEQ ID NO: 108698 - DNA, 407 bp, Homo sapiens
  misc_feature (1)...(407): n = a,t,c or g
tttcgtccgcgtcatgtgactggagtccgcgtaggaggggtcggaggtcttacccaacttaatgacgttgcggtagaattggccgtgtacccgaaaaactgattgactgggctggcgttaactgtgcggaggcaggtatgtgaggggctggggttggggcgggggcgccaaagtttagggacgggggcgggagacccgggtccgccttccgaggacacacggggtggagcatctgagcgcaggggcccagagacagcgagaccggtcgtgtctgtgcccgaagagaggacgagctggcgttgtgggtctggcgcccatgggtgcacgattgggaaactcggggcgtgcgaaagagaagggctcgcacaagctgtgctttcgagncatgggcactgattcccattcta

SEQ ID NO: 108699 - DNA, 398 bp, Homo sapiens
  misc_feature (1)...(398): n = a,t,c or g
tttttgcccagtaaaattttttctaatacaccccttccgccccccctggggtcccccgtccctcctcgcgggncctttggcacccccccgcgggccgcttccccacggttcggaatcccactcccgcctcgggaacccggtcaaatcgcctttttaaccgctcgcccaaatttcctccgcccggtacccccagcgtggaattcccacttcttggaagcttaggccggagaattcctttgaccccggaaaagggttccgttagccaaaattccgcccttgcccttccgcctggggggctaaagttaaactcccttttttnnnnnnnnnnngnnnnnnnnnnnnnnnnnnnnnnnnnnnnnnnnnnnnnnnnnnnnnnnnnnnnnnnnnnnnnnacgaaa

SEQ ID NO: 108700 - DNA, 402 bp, Homo sapiens
  misc_feature (1)...(402): n = a,t,c or g
tgggtccccgggggggggtcaaggggttccccccgcttttccccgccttttggggggcccccgcggggggtccccaagctcccccgtttaacgcacccccggccccaagggggaaccccccttcccccccaaaatccaaaattttccccnnnnnnnnnnntgggggccccattccccgcctcttgggggcccaaggcaggaaaagggccttacccccnnnnnnnnnnnttcccttaacccaggtttcccccctccctcccggccggggggccaagccaaacccccccttggggaaaagnnnnnnnnnnnnnnnnnnnggtggttcacaaactattaggttggctatcnnnnnnnnnnnnnnnnnnnnnnnnnnnnnnnnnnnnnnnnnnntacatgacgaaa

SEQ ID NO: 108701 - DNA, 512 bp, Homo sapiens
  misc_feature (1)...(512): n = a,t,c or g
tttcgtcaaacgccatgtgaccaagaagatgtgtgtggcccccggggaggctgagcccatctgggtcgttctgtccttcagcgacctgggactcaacaacatcacggccaaagcccttgcttacggagacacaaattgctgccgggatgggaggtccagcaaacaccctgaggagaatcacgccgacaggagggtccccatcggggtggatcacgtcaggcgcagtgtgatggttgaggcggaaggagtcccccgggcgtacacctacagcgcattcttctgtcccagtgagagagtccacatctccacccccaacaagtatgagttccagtatgtgcagcggncactgcgcctcacccgctttgatgtggctgtgcgagctcacaatgatgcccgtgtggccttgtcttctgtgccccacgacacagcangcatgatcgagatcgtnctgggggggcatcagaacaccaggtcatggatctccaccagcaagaatgggagagcacgtggcg

SEQ ID NO: 108702 - DNA, 453 bp, Homo sapiens
  misc_feature (1)...(453): n = a,t,c or g
ccggacgaggcacnggnagggaattcccgggtcgacgatttcgttgttctgcagtgaaaagaaattgcgtgaagtggaacggatagtgaaagccaatgaccgtgaatataatgaaaagttccagtatgcggataatcgtatccacacatcgaaatataatattctcaccttcttgccaattaatttatttgaacagttccaaagagtggcaaatgcctattttctttgccttctgattttacagctaattccagaaatttcctccttgacctggtttaccaccattgtgcctttggtcctggtgataactatgacagctgtcaaagatgccacagatgactatactgcagaatgaaaaatggatgaatgtcaaagtgggagacatcattaaattagaaaataaccaatttgttgctgctgatttacttctcctatcaagtagtgagccacatg

SEQ ID NO: 108703 - DNA, 417 bp, Homo sapiens
  misc_feature (1)...(417): n = a,t,c or g
ccggggtttcgaccccgcccgggccccccggggttaaaccctttttttcccaaaacccaaaaataaacccnnnnnnnnnnnntccccccttggttttcccccccccggggggtggggggggaaaaatctttttccctggggaaccaggggggaagggtaaaaaatttcctcctggccccccacccggggggccaagggaaccctttttcaaagaaaaaaaaagaagagccccatggttttcaaaaaaaaagggggagggcctttagtccaggggatttttttttgggaaccccccccggnnnnnnnnnnnnnnnnnnnnnnnnnnnnnnnnnnnnnnnnnnnnnnnnnnnnnnnnnnnnnnnnnnnnnnnnnnnnnnnnnnnnnnnnnnnnnnnnnnnnnnnnnnnnnnnnnnnaaa

SEQ ID NO: 108704 - DNA, 457 bp, Homo sapiens
gacacacgtccggaattgcagtgtcgacgacttcatatgaccaagaccgacacactactttgtcgaagctggtctcactgacacatctactcttttggatcaagaaataaaccgtttagatactaagacaactggacctaaagctccaattacagacattgccattattatcaaatcagctggagaaacagcacctgatagttacacctgtgtagaagccactccatcagctctccaagcaaacttgaactatggaagtctgaaaagcccagaacttttcctctgttataagagagggagagataaaccaccgcttacagatattggagttctatatgaagggaaagaacggcttattccaggatgtgaagtgatcctagccacaccctatggtcgctgtgccaatgtcaacaatagttcaactacttcacaaagaatctttatcacttatcgaagg

SEQ ID NO: 108705 - DNA, 390 bp, Homo sapiens
atcgcagctgataagatgcaagggaaggttgtgctggcggagaccaccactgcacatgcaacgatggcaggcttacactactaccaccaggactggtcccacgcggctgcgtacgtcacggtgcctcccctgagggtggacgcctaacacctcatcctacttcatgagcctgctgcccaatgacactctgatcatcgtggcatcagatcgccggcctttcaccacaaagcagaaagctatgggcaaggaagacttcaccaagatccctcatggagtgagtggcgtgcaggaccgcatcagcgtcttctgggagagaggagtggttggaggaaagatggatgagaaccgtaatgtggccgttaccagttccaacgctgtatgcggacgaaa

SEQ ID NO: 108706 - DNA, 387 bp, Homo sapiens
ctgcccaagatgctggcccagtagttcttcagctgcagctgccatacccagcacagccttgccaaagcccaccaggtagaggttctgcctcagctgaaagttccggtcccgcaccttcagctgtctgcctccagggtccaaggatagtgcccggtgcagcatggggcccggcagcactgcacctacagcactctcaaacagctgcctggcctgctctgccaaggccatgctgctggccagacgggccactgagccccgccagaggagtggatgcaagggggctcgggccaagcggggcaggacctgcagggctgcagccatgccccactgctctcagcactgcctggcacccatggctgccagcccacagctccggccgcgacgaaa

SEQ ID NO: 108707 - DNA, 420 bp, Homo sapiens
gtccgtgccggagttcgggagcggcaacagagtgggcatatacactccgagcagcctcgccgtcgtctctgcgttcctgttgactgcctggctgccccctcccctactcctcggttcctggtgaagaggctgcgcgctgctgtttggggagggggtgtgtggagccgggtcctgtgttcgcagtggctgctgtcggggggtcgcctgttcgcggaggcgcggagagactccttgggggtcgagcacataacggggttcgggtgtctcgtgtgtgaacatcacaggaatttgtataaagagagggcagggctactacaacgccggaaaagggaaaatatgtcagatggtgataccagtgcaactgacgagtggggatgaagttcccgtggaattatatactgcatttcagcatactccaac

SEQ ID NO: 108708 - DNA, 445 bp, Homo sapiens
  misc_feature (1)...(445): n = a,t,c or g
gcagggacgcaaggggacaaccagcccctttttaagtccgcatgtaataaccaatgaaccgaaactgcctaggccattttccaccatgccacgtttgggttcccccccgcgcgcccctagcgctactgtgcaacgaagccctcccaagccctggttccaatcggagaccatgggctcccagactctgggaacttcaacacgactgcgaaacgaactccgagcgaggactccccgagagcttcccgcaacacggacctcacgcgctagcgaacaacagnnnnnnnnnngcgcgctctccctgcccctgaaacattcccagaagcccacgcagaccagaccgatgacctgtctccactgctggaggcgagtcagggacccgaagtctctaaacactcgcctctacccgccgcnccgcgaaacgaaatcgtcgacccgggaattcgga

SEQ ID NO: 108709 - DNA, 414 bp, Homo sapiens
tctctctctatcctggtgtcatctgccttccccgcacccatgcatctgcagcggggcattacgtcgctggaaagagaacaccatggcccgagtggatgaagccaaaaaaacctttcaagcaagtactcattacagaaggaccatatgttccaaggtgaggtataaggaggcaagctggtcacccaggagagttgggactgtgttctggtgagggcgtgggatgtagggggtggtgccagagatttgaactgaataaggaacctagaaaatgggtaactttcctccagcacgcacacaaacatccatgtgggcacatgtttagttttttactgaattacaaacaaatatgcaataaatagaaacataacacatcatatgtattgcggccgctctagaaaatctaagcggcgattg

SEQ ID NO: 108710 - DNA, 374 bp, Homo sapiens
atcgagctcctcgacacgcaggtcaacttcaccgtggacaacgcactcatcatttccaagcaaagggagattccagtaacttggatcttaattttgagatcagctttgggggaattccgacacccggaagatcgcgggcattcacacgtaaaagctttcatgggtgtttagaaaatctttattataatggagtggatgttaccgaattagccaagaaacacaagccacagatcctcatgatggtaaggaagcctaatgggaaggaaagaaaaaagaacattttattttttgcatttaaaaattattcatgtgaagtctccatttcatgtaatattttaagaataagttaaaactttaacagctgcccatgtatt

SEQ ID NO: 108711 - DNA, 382 bp, Homo sapiens
tcgacgatttcgtgcagatacttgcatttcttctaattaattagttacaacccccgcgggcgcctcccgcgatggctccgatccccgccgggcaaggaaggaaagcagcgtgctctcaccaccctgcttgagaaggtggaaggctgcaggcacctgctagagacgccaggaccgtacctggtgtacaacggggacctagtggaatacgatgcggaccacatggcccaactgcagctccccttgccctagctaggctgcaacagctcaaaggcaatcctattctgctactcccagtctccttccgacaagttacagttcggtgttattaacaagcagatatctccagtagcatatctccaaaatcataacagacgcctgtata

SEQ ID NO: 108712 - DNA, 453 bp, Homo sapiens
cgcggggcagccacacgcacacagcccccaggaggcacagggccggcagggaatgcaggtcaagccaagaggatgggctctggtcccttcaggatcccccaggaggagagcacccccttctgccctcttcctggggactatggtcctgcctctctgccccctgaggctggcatgcaggcacctgacgttggctccagctctctgggccagccctgggtacccgccgggcctgtggcctggttggtcacccccaagatgcaaagtgctacctgcatccggaggcacccccgcccctgaggcctccgggttcccacctgcccacctgtgtctggctgggatcctggccgtcaaggctcctgttacgggactgaactgtgccccctaaaagatattccaagccctaacccagcagcagttgtatgcggccgctctagaggatcaaggtgcgtcgac

SEQ ID NO: 108713 - DNA, 391 bp, Homo sapiens
  misc_feature (1)...(391): n = a,t,c or g
ncaccgagcagcagttccaccccgagatctacaagtccaccaagtgcaacgacatgcagcagtcgggcagctgtccccgaggacccttctgcgcctttgcccacgtagaacagccacccctgagtgacgacctgcagccttcctcagctgtgtccagccccacccagccgggtcctgtcctgtacatgccatctgccgccggagactcggtgcctgtgagcccctccagcccgcatgcccctgacctcagtgccctcctctgtagaaacagcagcctaggcagcccgtctaacctctgcggctccccaccgggctccatcaggaagcccccaaacctggagggcatagtcttccctggagagtctggcctggcccctggcaacaatgtatt

SEQ ID NO: 108714 - DNA, 795 bp, Homo sapiens
atggcagcgtacgtatgctaggatcctccagagcggccgcgggcttggtcgctgtggcagcggctgccgagtactctggcacggtagcgtcgggaggtaacctccctgggtgttcactgcggcccaagctccggggcaggccctggttttggcccgggctcgtggagcgcctctctcgatcgagccctggaggaggcggcggtcactggggtgctgagcctgagcgtctcggaaactgagggagtttccccggggagcagccaaccacgacctgacggacaccacccgggcggacctgtcgcgaaatcgcctttcagaaattcctatagaagcatgtcactttgtttctctggaaaatctcaacttgtaccaaaattgtattccgttatattccagaggcaatttttaaacctacaagctctaacattcttaaatattagtcgggaacccaacttgtcaacattgccggtacacttgtgtaattttgccatttgaaagtcttaattgctaagaataaacaaattggtgtcacttccagaagaaattggacaccttagacatttgatggaacttgatgtgagctgcaatgaaattcaaactataccttcccagattggtaacctggaggccttgagagaccttaatgtaagaagaaatcacctagtacatttgcctgaagagctggcggagttgcctttgatacggttagacttctcatgcaataaaattaccacaatccctgtttgttatcggaacctcaggcacctacagacgatcaccctagataacaatcca

SEQ ID NO: 108715 - DNA, 392 bp, Homo sapiens
aatacatgttggttctttgaaaagactaataaaatagataaacctctggtgagattgatcaagaaaaaaagtgagaaggcacaaataaccaatatcagtaatgaaaaaggagacattgttacagttcatacacagcacagaataaaaaggaaactttatgccaatgaatttgaaaatgcagacaaaatggaccaactcctagaaaactgttatcttaccaaaatcgactcaagaagaaaaagaaatcctcaacagttccatagctactaaaggagttacagcagtagttaaaactcttcccgccataacaaactaacaaacaaaaaatagcaagcagattcttccacttggtatgtggattacaggcaggtgaagagatactgatcccctca

SEQ ID NO: 108716 - DNA, 445 bp, Homo sapiens
  misc_feature (1)...(445): n = a,t,c or g
nctgtacatattattactaaattcttcagaaaattctaagaagttctcagtgtctcattgctactttaatcttgattattatgggactgattgctgtcacagctactgctgcagtagctggagtggcactacattcatcagtgcagacagcagattttgtaaataatggcaaaagaattctactctgctgtggaactctcaaactaaaatagaccaaaagatagttaatcaaatcaatgatctccaaccaactgtaatgtgggtgggagatcaagtagctagtttggaatatggaatgcagctgaaatgcgactggaatacttctgacttttgtatcactcctcccccttataatgaattagcccatgaatggaaaagaataaaaaaaagtatctggaaggacatgtatgcggccggtgtgaggtccactattcgtacgcttcaa

SEQ ID NO: 108717 - DNA, 429 bp, Homo sapiens
tacgggctgagccaggctgcagctgtggccacgtccagggaggcggcgcatggggaggggccctttgcagctttctcctcggctgcaccccccactgggggccggcccccatcggcggatgctgcggcatctggagcctctgccctctgcgccttccccctggatgagggggaccggcttgctaatcgcacgcgagatgcctgctacacccgggagggtcgcgctgaggatgggaccgaggtggcctacatcgagtatgatgtcaattctgactgtgcacagctgccagaggacaccctggatgcttatccctgtggctcaaaccacacgcccagtcccatggccagccgtgtcccgctggaagccacaccaattctggagtgccagggattcagctaacagctgtggcagtcaccatggaagatggag

SEQ ID NO: 108718 - DNA, 429 bp, Homo sapiens
  misc_feature (1)...(429): n = a,t,c or g
tacgggctgatccaggctgcagctgtggccacgtccatggaggcggcgcatggcgaggggccctttgcaggtttctactcggctgcaccccccactgggggccggcccccatcggcggatgctggggcatctgtagcctctgccctgtgtgccttccccctggatgaggtggaccggcttgctaatcgcacgcgagatgcctgctacacccgggagggtcgcgctgaggatgggaccgaggtggcctacatcgagtatgatgtcaattctgactgtgcacagctgccagaggacaccctggatgcttatccctgtggtcaaaccacacgcccagtcccatggccagccgtgtcccgctggaagccacaccaattctggagtggcagggattagctaacagctgtgcagccaccatggatgatggacacn

SEQ ID NO: 108719 - DNA, 356 bp, Homo sapiens
agcggccgccctcgatctataacctgacctctcacctgcgccaggctggtacatggccgttggaacccaccgagggaaagaggcatccaccgcagccctgcgctcgccaaccctgcgagaggcagcctcctcttgcaagctgaggctctggtaccacgcggcctctggaggtgcaccctggacccccaaggctcgtggggggtgcccaaggggagggcgggtgggcagctggggacaagcagggccgcagctgccctgggacccctgacattgcagatgtggctgaactgcgggtggagctgacccatggcgcagagaccctgaccctgtggcagagcacagggccctggggccct

SEQ ID NO: 108720 - DNA, 406 bp, Homo sapiens
gtagaatcaagccagggaggacttcaaccaggacatcggctggtgtgtctccctcatcaccgactacagggtccggttaggtacgtggggtgctggggaggggtggagctgggcagcaggcgtccagcctctgaagaccccttggacgggctgggccggagctgcctggaggcggggcatatttccgtgggcctggggcattccctgtgggtgggctggggttctggcctggcctgattatttcctaaacagagacgccgggccagcccctggaacacacttcctgggactcctcttaggtctacacagtgctctctcccctccaccccctgcaggctgcgggtcttttgctggctctttcctggaatattacgcggctgatataagtaagtctacaggctgtatt

SEQ ID NO: 108721 - DNA, 401 bp, Homo sapiens
acggccgaattggacgccctccgaagtatcgaaagattccgcaggaagatttccagagtaagtctgggttatctgctcctatgtcctccaccacagagtgttcacagcgagtgctctgtcattggtgggatgagacagatttcccagagtgggagaagctagaaggagggctgtgcctcttcgtttgagatactgagagcacagagcagtggcaaaagcagtggaggggccttgagtgaccttgggttccaatctcatgtcccccatggccttgctgtgagtctgtggggagggtacagagcttctcggggcctttggttctcactgtgcagcaagatgatgctcctgctcttctctgattctaggcttcctgggaaggaggccatggccatcactgtatt

SEQ ID NO: 108722 - DNA, 419 bp, Homo sapiens
cccataagtagctctcagttcacacaaggtgatgtcccctcccaggttgacgcaggactatctataactcacataggagagacaccttctgagcatgggaagtgtaaaaaaattcctcagtgatgtctccatccttgatcttcatcaacaattacactcaggaaagatatcccatacatgtaatgagtacaggaagagattctgttatagctcagctctttgtcttcatcagaaagttcacatgggagagaaacgctataagtgtgatgtgtgtagtaaggcatttagtcagaactcacaactgcaaactcatcagagaatccacactggagagaaaccattcaaatgtgagcagtgtgggaaaagtttcagccgtagatcaggaatgtatgttcattgcaaattacacactatgtatt

SEQ ID NO: 108723 - DNA, 420 bp, Homo sapiens
cagaggtaatcatagctgcctggtatcgcacattcataggaataatgaatttatttggactagaaactaagacctgctggaatgtcaccagaatagaacctcttaatgagttcaaagctgtgaaggattgggagatcctgcttgcttttatgttggtgtaatctttattttaaatggactaatgatgggattgttcttcatgtatggagcatacctgagtgggactcaactgggaggtcttattacagtactgtgcttctttttcaaccatggagaggtttgttttctagaaagcaatttttaagaaatagaagaggctgtagaggaacaaggaaatatactcatcaaaacaatatttaattgtatactacttatgacttcacaatattttaaagaccctcgtgttgccaccaatgtatt

SEQ ID NO: 108724 - DNA, 415 bp, Homo sapiens
  misc_feature (1)...(415): n = a,t,c or g
aaacaggtgctttggcttacctcctgaccttccagctcctccttgtcttccttcatatcccacctgtagaaacacagctcatggcacgccccaccccacttcactccagagccatgtccccctgccttcgggccctgccagacagcctctccttgccccgggctttgctgcctgtggctggtgccaccgagggtctgctggcttgcccgccccgaccttttccatcagggagcaatggtgggggctgtagtttctggtggctcctgggaccccttctgctgcctgccctggccgggccttctcccctcagctggctgcagtcctgtagccctgtgcgtctctgtgccgggcgaggcgggctaggtcgatctgctcccgctcctgcttccactgggcatagtcccagcccgcctcn

SEQ ID NO: 108725 - DNA, 374 bp, Homo sapiens
ccatccaaacaacagtaaagatgtggtgaccctcatagaagatgtgattgaaatgcttgaagatgaagatatgccctgcaaggactctgccctgcagatggggagcatcaaggagaaaatgaaagctggctcacgaacaggcaaaccacagcacatctactttccaaaccatttgagagccttaagttggagagtaagaaaaaaagatggataatggagaaagaaataccaaggaagactacttttgacatgaagagtatttctggagaagaatcatcccatggagtgattatgacaaggcttaccgaaagtggtcacccttcttcagatgcctggaaaggtgagaattggttatataggaaccagaatgtatt

SEQ ID NO: 108726 - DNA, 427 bp, Homo sapiens
  misc_feature (1)...(427): n = a,t,c or g
gagagcagatctttttatgcatcagaaaattcacgcagctgaggagccccataaatgtgacaagtgtgataagggtttctttcatatatcagagcttcatattcattggagagaccatacaggagagaaggtctataaatgtgatgattgtggtaaggattttagcactgcaacaaaacttaatagacataagaaaatccacacagtggagaagccctataaatgttacgagtgtggcaaagccttcaattggagctcccatcttcgaattcatatgagagttcatacaggtgagaagccgtatgtctgtagtgagtgtgccagcccctttagtaatagttcgagcctttgcatacataagagagtccacaccggagagaagccctgtattgcgnccgctncggtngccttcacgctaacnagcatc

SEQ ID NO: 108727 - DNA, 388 bp, Homo sapiens
aggggtgggtctgcccttgggggtggtcctagcccctggccagccctccagggagaggactgcctcatcggggacatcagccatctctggatcacctgccccttgctctgcacaaccatccctgctgggcttctgggacatcctagctccatggccctcctcccctgccaggcatcccctctgcccatccccgcatgttccgtgcccagggatgaggtcctggccctcttctccctcccgaacgtcctctccaggcccgaagcatgattattctgctttcttgggtcccagcccctttgaggaccctctccccagaggagactgccacagatgcacccacagcagcgtgcaagccatggcacgtctccccatccaaggcggctgtatt

SEQ ID NO: 108728 - DNA, 394 bp, Homo sapiens
atttaaaattgtaagtacttaaagcaacatatatgttgtaggatctttttaagcaagatttttgttgataatgcttacagtaatttaatcttcaacaaaaacaatatgttgaccttaatacattggtagtgtattaataattttatgtttgttcctcaagcccagttgtgcatttccagtttgccatgacacagaagagcgctgtagacttgtgcttagctatgttctagagggtttaaaatctgtcgatagcagcatcaaaaaaagaaaagcgcccttccaagcaagctgaccccaagcactccaatcccgttaaaatatgaagatgaatcctcaagagggggtcccgaggggcttagagaagcagatggccttggttttttggacaaaagtt

SEQ ID NO: 108729 - DNA, 429 bp, Homo sapiens
cgtcgcaattcacaccttgtagaacattggagaattcatactggacagaagccttacaaatgtagtgaatgtgacaaggtgtttaatcgcaattcaaaccttgcgcggcatcaaagaattcatagtggagagaagcctcacgaatgtaacgaatgtggcaaagcttttagagagtgttcgggacttactacccatcttgtaatccatactggagagaaaccttacaaatgtaatgagtgtggcaagaacttcaggcacaaattttctgtagccaatcatcagagaagtcacacggcggaaaagccttgcgaatgtaatgaatgtggcacggtctttagtctgctttcataccttgcaaggcatcaaataattcatagtacagagaagcatgtattgcggccgctgtggaggatccacgctactgagcat

SEQ ID NO: 108730 - DNA, 400 bp, Homo sapiens
cgggcctccaccatcattgggaatggtgacctgctgcagcagaaaccaatcagaccccagtccagccctgaagacgtccaagtagccacagtgtcatccagcccagaaaccaagaaggatcatccgaaaacaggggccaaacccgtctgtgcactgcaccggatccatagcctggcaccgagcgatgaggagtccagctggacaacgttgtaccaagacagtgcctcagccagctccccggatgaaacagcagatatatggagtgatccctcatttcagactgatccagatttgccgcctggctggaaaagagtcagtgacattgccgggacctattcttggcacatcccaacaggaacgactcagatgggaacggcccgtctccatcccagcatgtatt

SEQ ID NO: 108731 - DNA, 399 bp, Homo sapiens
tatgttctgaacatgtcagcaagagaaaacctgggactaagatgaccccggcacatgcctcaacaacaaacagcactcttgacctggataccagctctgtaccgcaggatgctgccaccatccgcagctcatccatgcaggtcccaacagtttgtatctgcttgatcaagaatgacagcacaggcccccgcttagataagaagaaggtccagcacctccctgaccattatggaccagcccgtgcctctgtggtgttgcagcagtctgtccaggcctgtatcgcactgtgcttatcaccagaaaaccgtcttctgcttcctcaagcaagcccatggtggtgaggttatctcagccgtgtttgaccgagaacagcataccctcaccctcccagcatgtatt

SEQ ID NO: 108732 - DNA, 422 bp, Homo sapiens
  misc_feature (1)...(422): n = a,t,c or g
gtacagcgtacgtattgttggataacctacagcggccgcaatacactgtgtgtgtgtgtgtattcctgtcttggggcnnnnnnnnnnnnnnnnnnnnnnnnnnnnnnnntccccccttggggcagnnnnnnnnnnnnnnnnnnnnnnnnnnccccaccgtggaacaggtgtgtgtgtgtgtgtatatacacatgtggtctcatcttggcgcaggtgtgtgtgtgcgcacatgtgtgtgctctcgtcttacaacaggtgtgtgtgcccgcccgcacgttgtctcgtgtggaggcatatatgtgtgtggccctgccttgacacaagtgtatgcgcttgtgtgtgtgccccgtggtgcacacaccccgaccgacgggcggtatgcctattcgcggacggacagtgaccacacacagtttggagtg

SEQ ID NO: 108733 - DNA, 686 bp, Homo sapiens
ctccactaccctcagaaaaccaagaaagaccatcgtggagagttggtcgcccatctgctctaaggtgctgtgtattcccctggaaggtaaacatcgtgaaggtggagacccagttaaccttttaggtggaaggccagatgacagagggcggcatctgacccggaaggccctctgcaaccaggccaaatacatctacagggaaccaatgggaaacatctggggaggacaacccaaataagtatcatgcgagcaagggatggtttgagaactttaaaaatcgctgctgttttgcaacatacgaagttgatggggaggaaggacccttaaatcctgagtgggtatcgagtattccaagcaactggagagaggctttgtgcctcaacaggtcttcaaccgccaaggagatgacccatcttttgcagtgcatgccttcctacttttggggcaaaagacaaaaatctgggaaagcttagaggaagctaaggacaggatttccctcatttttttgtggcagtgcctcaggtgacaaaatgataaaaccactgctgctttacaaagactctaacaccccacttgtcttttagagataaacgccttcctgttttcttgtaatcacacccagaatcaccactgccactttttggattagttttacaatttttttatccatcaaatccgaagtcatt

SEQ ID NO: 108734 - DNA, 395 bp, Homo sapiens
cgttcaggcagtcctaccaaaatatgatgatataagccttccaaagtcagcagcaatctgttcgcagcagcactgttgaagacaaggtctgtttcagaaaaattctctccagaaacagcctccacaagaggattaagcgcagcagaaattaatgccgtggatgcaattcatagagctgtggaatttactcctcatgttccaaaatatttattagagatgaaaagtttacttttacctccagaacacattctgaaacggggtgatagtgaagcaattgcctatgctttctttcatcttcagcactggaaacgaatagaaggtgctcttactctgctacagtgtacatgggaaggcacttttagaatgattccatacccgttagagaaaggtctgta

SEQ ID NO: 108735 - DNA, 406 bp, Homo sapiens
cctcctgacaccttctccttgcccagaatctggctgtgtgttctctgctgaagatcgcaagggtctgcagccccacctgaggcagactcacagagcagttcctgtgccctgttctttccggggctgccccctgcttttcgggagccagcagggcatggagctgcaccggcaggcgcattaccctttccactgcagccactgcagcttcataggctccaacgtcaaactcttccggcagcatcagcggagccatggtgctgggacacagggagaactttctgccgttcagggccttccatcccaggagctgctgccagctcccaaactgcctccaggagagagagaaccttcacaggaagcaggtacacccttgcctgggcaggagacagctgaagaggagtgtatt

SEQ ID NO: 108736 - DNA, 401 bp, Homo sapiens
  misc_feature (1)...(401): n = a,t,c or g
ccactgtgaaatgcactgctcaggttctgctccctactacanctgttctgctgtactgctgaagtggtctctttggagatgccttgcagcttctcctgnggaggccctgcagcatcgaaagggccgccgcaccagctacaccaacccctgtagcagcagcacttgatgcatgttcaggaaatggtagtgcagaggctgcacctgagctggacctctttgcaatgaagccacctgagaccagtgttcctgtagttacccctacagctagcacagcccctccagttcccgcaactgctccttctcctgctcctgccgttgcagctgctgctgctgccactactgctgccaccgccgctgnnnnnnnnnnnnnnnnnnnnnnngctgccaccgccacctgtatt

SEQ ID NO: 108737 - DNA, 398 bp, Homo sapiens
ttcttaatggccgggccccaaccatagggaccgtaggagtcccctatagacacagggctccatagggggccgatcccatgaacagtgcccagcattacggactcaggctgctgcaggccaaacggaccttatagacgggtgggtccccagggggcgaagggctctacggcccggcaggagcctccatagaggctgcgggccgggacaggctaggttcggatggtccaggagagactcctccagccgggggcggggcgcgagcgggtgccgggggcggagcccgtcttcaggggttcgggcctggaccccacagacccaatccctttgctcacccaccctcgcctccctccgaagccggatgggccagatcagagagacgaggggacgcttgggccaga

SEQ ID NO: 108738 - DNA, 414 bp, Homo sapiens
  misc_feature (1)...(414): n = a,t,c or g
agctcaccaccatcctgcccgccaaaaccgtcccgaagagggctggcagtggtagaggtggctgtggctctgggggtcccactccctgccgaggcctcactaggcactcctggacagtggtaggaggggagcaggggacagggcaggtaactctccactcccatcctggcccggccaggctcaggctccaagggctctgacgaagaccctggtaactgagggagagcctgacttaggggctgcggctggcacgggctgtccatggcagcagtgtcttcatcccccgggcatggagggcaccgcccgggcccatggtgccaccctcctccgcctcctcctccgcctccacttgatgcagctgggggccaccgggcctggcgtggggcanggtgaggcaaggcagacagcaagagc

SEQ ID NO: 108739 - DNA, 399 bp, Homo sapiens
gatgaaagttatagtgaagaggaggaagagatgcccgacagtgatgaaaatggatcctatagcaccagctctgatccatcagatgatagcaaagcagtagctataatcaagtctgttggagaactatcagtaccagaaaaatacaaatctattcatcaaatcagacccagttgtgcatttccagtttgccatgacacagaagagcgctgtagacttgtgcttagctatgttctagagggtttaaaatttgtcgatagcagcatcaaaaaaagaaaagcgcccttccaagcaagctgaccccaagcactccaatcccgttaaaatatgaagatgaatcctcaagagggggtcccgaggggcttagagaagcagatggccttggttttttggacaaaagtt

SEQ ID NO: 108740 - DNA, 419 bp, Homo sapiens
ctgaaggcagagcctgaattttgcgggagtcgaagctccagttttctctctcggaagaggaaaaatgctccagcatgctttttccttgcactatttcctttaccgggcaattgagagttgaggggggaagaatctcgcacctcaccagaagacaaggtgaggtctgtactgcctcactgagagctgttgtatggcccccagaaccagcagctgctgggggagcgtggcgaggagcactccccccttgagcgggacagcttgatgccctctgatgaggccagcgagagctcccgccaagcctgcacaggatcttcacagcgtagctcccgccacctggaggaggactacgcagatacctaccaggacctgtccagcctatgtatgcgaccggtctgatgagcgagccacgcaggtgcggg

SEQ ID NO: 108741 - DNA, 504 bp, Homo sapiens
gaagattcctcttgtcttcccgaagaccttagtctttccaaggcaactgaaaatccaagtcaaagaggagcctgtggaggaggctgaagaagaggcacccgaggccagcacagcccccaaagaagcgggtcctagcaaagaagccagcctgtggccctgcgagaagtgtgggaagatgttcacggtgcataagcagctggagcgtcaccaggagcttctgtgctctgtgaaaccatttatttgtcacgtgtgcaacaaagcttttcgcactaattttcgactctggagtcacttccaatcgcacatgtctcaggcttcagaggaatcggcacataaggaatctgaggtgtgccctgttcccacaaactctccctctccacccacctctgccaccggccacccacccactgccccaagatcccagcctctggagcctgacagcccccacaggcctgtccgaaaacccaactccagccacagaaaaactgtttgtgcccttgtatt

SEQ ID NO: 108742 - DNA, 573 bp, Homo sapiens
ggcacgaggagtcaaggacagttcagggaggagttctccaaggatgggaaatgcgacttgaaacccagtggtctatacttcagcaggactttttgaggggtcagacatccattgggatacaattggaaggaaaacacaatggaagggaactctgtgactgtgagcaatgtggagaagtcttcagtgaacactcatgccctaagacgcacgtgagaactcaaagtacagggaacactcatgactgtaatcagtatggaaaagatttccttaccctgtgtgggaaaacctctactggtgagaaactttctgagtttaatcagagtgaaaaaatcttcagcctgacaccaaatattgtataccagagaactagcacacaagaaaagtcatttgaatgtagccactgtggaaaatcctccattaatgagtcataccttcaggcacatatgagaactcacaatggagaaaaactctacgaatggaggaattatgggccaggttttattgactctacaagccatttctgtgcttatagaaaccctcaatgcaaaaaagccctacaaatgtaaggaatgt

SEQ ID NO: 108743 - DNA, 405 bp, Homo sapiens
ctccacccttcgccaagggggcaggggcgaggccctgcaggcgacgcttccttgtttgggggcccttcccgccccacagactcggacaccttggctcgcaggcacacagcctccggggctccggggcctgaggccaccttccaggacaggccagagagaagcgcgagggggtctaggtgcggcctctcccctccgtctgtccacggttcatgggccccggcccgccggagcaacgggctcatgagggccacttcctccggagcaccgaccccaggcctgcctggccccggcggccaccacttccagggacactccccagcccatttcacagcgcttcccaggaaacaatcactcgtcccggagccgccgcaaccgcggccgctctaggggttctccccaagacac

SEQ ID NO: 108744 - DNA, 850 bp, Homo sapiens
ttctggctcggcctgaccatcctcaagcagctgcggcctccagaccgcttccctcaccccaagcagaggggctgtggggcctgggcatgctggtggccctctggaggtgctggctgctgggccaggaacgtgggagctggtgcaaggggatagttggggtttctcattcttaacccttgattgaatctcccttctctctctttccctctcccgttccaaaccccaggcttgttgcagggacgtgtctgcagcgcctggggaccggagctgtccttcccctgtgcgggcgggcaccgcctcctcctgggtgtgaggaggaggggcctggccaaacggttctgggcatgtgaggtggggcggtgggcggggggtgccgggcatgtgcagagacctggtgatgccgggagggatacagtactgtttggaaagttcttttaagagtgaaaagcccctttgggttcttcttagacatctcgccctaccccagatgggcagagcagagttcatttccaatgcctcttttgtgtagtgccaagctcctgtcccccaggagctgacggatggcaaaaagctgtggacacccagctttgcctggtcttattctcttccctctccctctccagattgagtttgtgacgggcaccaaaaaaggcaccacgaccaacgccacgtccaccaccactaccactgccagcacagctgttgcagatgctcagaagagaaagagcaagtgggattcggctatcccagtgacaacgatagcccagcccaccatcctcaccaccacagccaccctgccagctgtttgttcacggtcaccaccagcgccaggcttccaagaccaccgttc

SEQ ID NO: 108745 - DNA, 418 bp, Homo sapiens
gagcctggacctccctgactatgggccagggggcctgcatccagcctacccgccatccccaccgctcagcgcctctgatgccttctcgggcgctttgcgctccctgagcctcaaggcctcgagccggcggggcggggatcatgtggccctgcagcccctgcgctctgagggggggccccccacgccccaccgtagcatttttgccccccatgcactgcccaaccgcaacggcagcctgtcctatgacagcctgctcaatcctggctcgcctggtggccacgcctgccctgcccacccagcagttggcgtggccggataccactcaccctacctgcatcctggggcaacggacgaaccaaccacggcccctaccccgcagtgtattgcggccgctctggatgtcttacctcgaggcgcc

SEQ ID NO: 108746 - DNA, 395 bp, Homo sapiens
  misc_feature (1)...(395): n = a,t,c or g
nctttatcacatcgttttagggagccaggaccatggacttagcaccagacagggctactggccgcccgtggctcccgttgcacactctatcagtatctcagctccttcgagtgttttggctactgtcattgcttccggggcaggcctgggtccacggggccgagccgcgccaggtgttccaagtgctggaagagcaacctccaggcactctggtaggcaccatccagacgcgccccggcttcacctacaggctcagcgaaagccacgccctgtttgccataaacagtagcaccggagccctgtacaccacctccaccatcgaccgcgagagcctgcccagcgacgtgatcaacctggtggtcctttccagcgcgcccacctaccccacatgtatt

SEQ ID NO: 108747 - DNA, 434 bp, Homo sapiens
  misc_feature (1)...(434): n = a,t,c or g
caggcacgtccaggcgtagcaagtccactgcctccaccagctcagttaatggaacccctggtagtcagctctatattccgcgctcaggcaagtcgcaatgcccatcaccctccagcccaggaagcctgcggaagcagaggagctctcagcatggcggctcctggtacgtcacttgcgtccgccaaagtctgcagctcgatggatgagaacgatggccctggagaagaagtgtcggaggaaggcttccagattccagctacaatagcagatacgatataaagtcggaagagcaataggagatggaggttgtgctgttgtcaaggaatgtgtagaaagatcgactgctagagagtacgctctgaaaataatcaaaaaaagcaaatgtcgaggcatgtattgcggccgctctgaggtttccgcaacntgagagcagn

SEQ ID NO: 108748 - DNA, 376 bp, Homo sapiens
tgatgggctggaccgctgctctcatgagctctctgagtgtcaggggaagctccaggaactacacaggctcctccagagcctggagtccctgcaccgaatcccctcagcccctgttatccccacacaccaggtaagatccaggggtacacacagggtcctgctcaggcccccgatcccatcacttccccaggatgggtcctattcctcctacatcgctgcagtttcctggagagccatgcatcgcctggtttcctccccaccccttacccatgtccaaactgtatcaagattgtctctgttcctccatgcccatgcctctgccagggtggctgtcatcttccactgggatgtcagttgtctctgtcgccctgcctga

SEQ ID NO: 108749 - DNA, 410 bp, Homo sapiens
ttcctcatcgcagcagttgttttgaactctatggctttgacgtgctcatagattctactctgaagccatggttgttggaagtgaatctctctccttctttggcctgtgatgcgcctctggacctaaagattaaagccagtatgatttcagatatgttcactgttgtaggatttgtgtgccaagatcctgcccagcgggcatcaactcggccaatttatcccaccttcgagtcttccaggcgaaaccctttccagaaacctcagcgttgccgtccactctctgccagtgatgcggaaatgaaaaacctcgtgggctcagcccgggagaaagggccagggaagttgggtggttctgcgcttggtctgtcaatggaggagataaaagtaaacgaagggtgaaggaggtgtatt

SEQ ID NO: 108750 - DNA, 403 bp, Homo sapiens
  misc_feature (1)...(403): n = a,t,c or g
aatacattctcccacctaacgtttgcagaggactcggctagactgttcatctctggtagttttctgcttggaattctgagtctttttattcattaccaccaaattatctccataaagagcacttcttatctgccactcnnnnnnnnnnnnnnnnnnggaaagggacttttcccggccccccgggggggggtccggggggaaagggaaactgggatctgtgggcccccggacgaaaaggaaaaaggaaattccctgccccaggccccgggacagcgggaaacaaaggggcccgccacccacccgggcgaatttttgattttttaaaaaaaaaggggtttcccctttgtggacgggggggtattaatgcccggaaaataggacccccccctattggcccccaaag

SEQ ID NO: 108751 - DNA, 385 bp, Homo sapiens
  misc_feature (1)...(385): n = a,t,c or g
ttttattgcacccccccttcgttcaagggggagccagggttccaccacccctgacccccaaatattttcggattttatgaaaacctgggtttttccttttttcaccggaaggtttccttttcccacccccttagacccccgccctttgctccctcaaacagtggaatttccgggtttggcccccggccccggccccggttannnnnnnnnnnnnnngnnnnnnnnnnnnnnnnnnnnnnnnnnnnnnnnnnnnnnnnnnnnnnnnnnnnnnnnnnnnnnnnnnnnnnnnnnnnnnnnnnnnnnnnnnnnnnnnnnnnnnnnnnnnnnnnnnnnnnnnnnnnnnnnnnnnnnnnnnnnnnnnnnnnnnnnnnnnnnnnnnnntatt

SEQ ID NO: 108752 - DNA, 480 bp, Homo sapiens
gccatcactgccactggccactggctaccaggagtcccacctcagctctgccagaacaaagcagccgcatgaccctctggtgcctctgtcggcctccatagagctcatcctggtggaggacgtgagggtgagcccagaagaggtgaccatctacaaccaccctggcatccaggcagagctccgcatcagggaaggctcaggttacttcttcctcaacaccagcaccgcagatgttgtcaaggtggcctacccaggaggcccaggggtgtcgccatggtaagcttgggccatcggtccccactgttggttttcattccttatctgggctgttgtgtggttaattgattgatcattttgaaagctagcacttgactcacactcggaatcccagaactttgggaggtcaaggcaggaagatcacttgagcccaggagttcaagaccagcctggacaatatagtgagacccccatctctacaaa

SEQ ID NO: 108753 - DNA, 407 bp, Homo sapiens
actctagccaagacggtcagatatgttctattctcttgcaagaaaatacatttgtagaacaagtagtaaatgaaaaagtcaagcgcttaggagataccttaaaagaccgtgaatctcaccgcagtatcttaaaagatgaggtaacttatatgaataatcgtaagttaacacttgaaatggatgctcaacatataaaggatgagttcttttcatgaacgggaagacttagagtttagaattaatgaactctttctagctaaagaagaacagggctgtgtaattgaaaaattaaaatctgacctagcaggtttaaatacacagtcttgctatgctgtacatccgcataacagagaagaacagagtcttaaggaacaatgtattgcgaccgctctagatgagacaaccta

SEQ ID NO: 108754 - DNA, 379 bp, Homo sapiens
aatactttagtggagtcatggaaatcgcacggcgacctgtcgtttagaagaagtgacgggtatccggtcttagaatacattccagagaatgtatcaagctctgctttacgaagtgtttgtactggatcttcaagtccttcaaaaatatgtatggtgtgtggggatgggcttcaggatcacattatggggtagtcacctgtggcagctacaaagttttcttcaaaagagcagtggaaggtaaatgttcatggctacacacctatttatgggctggaagaaatgattgcatcattgataagattcgacgaaagcattgtcctgcctgcagtcttcataaatgtcgtcaagatggaaaaaatttaggagcacgaatggcgaa

SEQ ID NO: 108755 - DNA, 495 bp, Homo sapiens
  misc_feature (1)...(495): n = a,t,c or g
cattgtggaaccgaccaccagtggttgggaattctcgtaggcttgggcatcattgccttggttacgtcacccgtgatactcctggcctcnccatgtataatctgttgtgtctgcaagtcctgtcggggcaagaagaaaaagcacgacccatccacaacataaagatctctgtgttcatacgccccagatatgtgagttacatgagatggcacagtgataaagccccatttagtgaccttgcctccttctccttgccaactttgaaagtgcctccgtgtccagactttgaacttgcctgccagccttcagcatcaggaaaggccaagtcctgggtgtgagtgttcctgtgtaacaagaactgggctcagcggtccagctgtttctatggagctttggggttccttgagatgaatgaacatatcattttatcatccaaaggatctcactggactgttcaacttccagccaaattcaaggagcttgcgggactgtatt

SEQ ID NO: 108756 - DNA, 545 bp, Homo sapiens
  misc_feature (1)...(545): n = a,t,c or g
ctctgcacgcgcacgtaagcttgtatcctctatagcagccgcatacagttgcctatacatttattcctctcttcccatagccctctcggtctgtgggcaattgctataagatacttgaggcctcccctctcgtttgtatgttttctcttaaaacatagaatcttaagctatgtgcatttaaccaaaaaatggtatcctgctgcagatttcatgctgtttcttctttttcttcaaggagtccacatactctagatctacccacgtcaccacattggcctgacacgttggggctgcggctttgaactgccgttttgtttgcatttccatttccctgatctctaagctctgagctgctcttcaagggcttctcctctgagtgcgtttcctcttctgtaaacttcctgttcatatcctgtgcccatcttgatagaagggttggtaccttctttcctgctgatttgcagaaattccttgagtgttttacataccggctgcttgtcgggtttatatattgcaactatctttctacacgcagtcacctgttn

SEQ ID NO: 108757 - DNA, 458 bp, Homo sapiens
gcacaggatgtgggaaagctttcaaactgaagtcaggcctgaggaaacatcatagaacacacacaggggagaagccctacaaatgtaatcagtgtggaaaagctttcggtcagaaatcactaactcagaggacatcatagaattcactcaggggaaaaacccctataaatgtaatcattgtggggaagctttcagtcagaaatcaaacctcagagtacatcacagaactcatactggggagaaaccctatcaatgtgaggagtgtggaaaaacattcaggcagaaatcaaatctcagaggggcatcagagaactcactctggggagaagccctatgaatgtaatgaatgtggaaaagctttcagtgagaagtcagtcctaagaaaacatcagcgaactcacacccggggagaaacccatataattgtaatcagtgtggggaagctttccagtccagaa

SEQ ID NO: 108758 - DNA, 455 bp, Homo sapiens
caaaatgtgaaaaggctttcaaattgaagtcaggcctgaggaaccatcatagaacacacgcaggggagaagccctacaaatgtaatcagtgtgaaaaagctttcggtcagaaatcgcaactcagaggccatcatagcattcacgcaggggaaaaaccctataaatgtaatcattgtggggaagctttcagtcagaaatcaaacctcagagtacatcacagaactcatggtggggagaaaccctatcaatgtgaggagtgtgaaaaaacattcaggcagaaatctgatctcaagagggcatagtatacttctccctggggagaaggcgtatgaatgtaatgaatgtgaacaagctttcagtgagaagtcattaataagaaaaagtaaggcacatccatctgtctgtacgctgtacagtatacaggatacaatctgatgatgcgtgcatagcaaaga

SEQ ID NO: 108759 - DNA, 459 bp, Homo sapiens
cggccaagcgcaaaaagggctgtgcatctctgcagagggccaaagggggacgggtccagggatgaccctggactccggggtgatgccccacccttcgtggctgacccagccacccaggtgagagctgggcacctgtttgggtgttaggagatggggggaaagggtgtgctctggagtgggagccacctggcagacccagggctgattctttccacaatcttgccattaataggttgaggctgatgaacagctttgcataccaccgctgaactcccaaacctgcctcctgggctcagaggagaatttagcccctttggcaggagagaaagcagtgcctcccgggaatgacccagtctctccagccatggtccggagcagaaaccataggaaagatgctgtcacaaggagagtatggcggccgctcagaggatcaccctaacgtcgcgtgcaacgacgaca

SEQ ID NO: 108760 - DNA, 374 bp, Homo sapiens
aatacactgctcgtctgtcgtggagtcccggcaccagccctcctggcggcctggggaaagagtaggtggttggagggtgcacccttgagaggaaaagagtgatgggggctgctgcaaggggtggaggctgcaggttccatcaccttttaaaagcacgcattctttctggacatcgcctgctgtccaaatgacgcgaaatgtatgttggggcaactggtcgttgagggaggcagcaggcaggtcacagagctgggagtactgggtcaaggaaatgccccagcctaaccacttttttgactgtcccacccagccctgccccagaccccaacttctgccccaccaatcctgggatacccagacatggctgggccggt

SEQ ID NO: 108761 - DNA, 397 bp, Homo sapiens
aatacacttgcctgtccacccggcatggctgggtagtgcctgcctcccccacgccagccacgggccggctccccagtcctctgtgggagggttgctggtctctgttaaaagccccccgggtgacgtgcatgccgccagggcctgtgcccccgggagacactctggggaggggccaccacaaggaaacctcagtccaagctgtccagcggaggctgggcatggctgtgccagcacaggaaggcaggtaggggtctccggggcaggcagctctccctctggcccagccccctgtgtgaagtgctcagcctgggtaggaacgtgcttcccactcagcctcctccaagccgctggaggtcccgctggttccccaaatggcttctgtcctgagccgtgggct

SEQ ID NO: 108762 - DNA, 363 bp, Homo sapiens
  misc_feature (1)...(363): n = a,t,c or g
ngagtagtcatcagtcaccaattaatggagaggtgcccgcagctgtggctccggctcaggaaaagtcattggggaacatcatccaggccaagcccacctccagtcctgccaaggggccccctcagaaggcaagggcctgtagccgtccaggtcaaggttaaaaagcccatggacaactcgcagagcagcgaggagtcatcggtcagtgcggacagtgagcaggcaccagcagccatgactgcagctcaggcaaaaccagctctgaaatttcctcagtccaaggcctgcccaaagaaaaccaatacccctgcatctgccaaggtcgcccctgagcgagtgggcacccaagccccccgatgtatt

SEQ ID NO: 108763 - DNA, 400 bp, Homo sapiens
cgggcgcccgagagcttgactacaggaggcggagcgaaaagagtaccgagttaacccccgggagagtgtgcacacctctagagggcgtgtgcgaattcagagagtacgggagtgagtgtatgaaaacaccgtcccccttcgagctgctggagctcccgacctccgggggcttcctcaggctgggccggccctgctgctacatcttccctggaggcctcggggatgccgccttcttcgccgtcaatggcttcactgtgctggtcaacggtggctcaaaccccaagtccagtttctggaagctggtgcggcacctggaccgcgtggatgccgtgctggtgacccaccctggcgccgacagcctccctggcctcaacagcctgctgcggcgcaaactggcgaa

SEQ ID NO: 108764 - DNA, 397 bp, Homo sapiens
  misc_feature (1)...(397): n = a,t,c or g
atacatgcctcgtttaagagaagaatgaattattattannnnnnnnnnnnnnnnnnnnnnnnnnnnnnnnnnnnnnnnnnnnnnnnnnnnnnnnnnnnnnnnnnnnnnnnnnnnnnnnnnnnnnnnnnnnnnnnnnnnnnnnnnnnnnnnnnnnnnnnnnnnnnnnnnnnnnnnnnnnnnnnnnnnnnnnnnnnnnnnnnnnnnnnnnnnnnnnnnnnnnnnnnnnnnnnnnnnnnnnnnnnnnnnnnggaggttgctaaagaaattaaaattggagccaccacataacccagcactccctcttctgggcatatacccaacaaacatgaaagcacttcataaagatggctgcactcctatggtcaatggaacacttattcaccatagggcaagaccg

SEQ ID NO: 108765 - DNA, 447 bp, Homo sapiens
  misc_feature (1)...(447): n = a,t,c or g
nagcatgtagtggacaagcatgccagcgagaagcatgctgctgccgcaggagggaaagccgaaaccagcgcagccttggggaagcccacagcaggcaccactgatgcaggagaggctgcgaagatcttggctgaaaagagaagacaggcccggctgcagaaggaacaggaggagcaagaacgactggagaaggaagaccaagataggctggagagagaggaattgaaaagaaaggcagaggaggaaaggcttcgcctagaagaggaagcccgaaagcaggaagaagaaaggaagcggcaggaagaggaaaagaaaaaacaggaaggggaagagaaaagaaaggcaggcgaggaggccaagcggaaggctgaggaggagctgttgttgaaagaaaagcatgtatgcgtccgctctagaggatcaagcttcggcgcgtgcaagtgcacc

SEQ ID NO: 108766 - DNA, 407 bp, Homo sapiens
cggggcatcgaatcgtgtagccaccattaagtgtaatcagtgtgcctgggcttcagtcataaatttggcctcttagccatgagggaaatcatgctggagagaatccttgcgaatgtaaagaatgtggtaaagccttcagtaggaaggaaaatcgtgttgcacatcagaaatttcatactggggaaataccgtataagtgtaatgaatgtggaaaagctttcattcagatgtcaaacgttattagacaccacagaattcatgctggggagaaaccttatgcatgtaaggattgttggaaagcattcagtcagaaatcaaatctcattgaacatgagcgaattcgcactggagagaaaccctatgaatgtaaggaatatgaaaaatccttcagccagaagcaatgtatt

SEQ ID NO: 108767 - DNA, 375 bp, Homo sapiens
ggtagagggcgggaaccccaggcatggggcgccgagacatatcacagcggagtcacaatcaaagaacttggattattatcaggctatactgggtccacacttcggaatgcgggcaatcagatagttcgacccagcaaggaggtgcgggcatcaaacctctgcccaacgggcacttaagtttccaggactgctttgtgacctccggggtctggaatgtgacggagctggtgagagtatcacagactcctgttgcaacagcatcagggcccaacttctccctggcggacctggagagtcccagctactacaacatcacccaggtgaccctggggcggcggtccatcacctcccctccttccaccagcaccatgtatt

SEQ ID NO: 108768 - DNA, 389 bp, Homo sapiens
ctgtttgtgtgtctttctctgtgtcttcatctctatctctgtcttctctataatctgttcctttgtctctctctccgtgtctgtctctcatgtctctgtcttatgtctctatctcatgcctctgtctctccatctctgtgtctctgtatctttctgtctctgtttctgtgtctctgtatctttctgtctctgtttctgtgtctctgtctacgtctctctatgtctctgtctatcattagatgggcatggacaagcccctgtgtgtgccccgccaccgtctcccttccctccacacgtccagccactgtcccttaggagtcctttggctgagtcctggacaggggattggggagggggacgcagcccctcaggcctggcccagatgtatt

SEQ ID NO: 108769 - DNA, 551 bp, Homo sapiens
accatcatggtgtatgcaaccatcacctcccagctgctgcccactccagccaagtcccactacaccttcaaacctgaagggacctctcccaaggtcttcccaaggcatgctcatggctgacccggcccaaggtcgaaggacccaagtgcagctgctgcgactgtggtatcacgagaactgccgccgtgttccgggaccgactggtgaatgaggaggtccgcagctggttcgagcagctcctcaagctctgcatggagcagtgggagtgtgaccttcaacaaggtctgccccttccagcccattctttacggggacttcatgtcacccaggctccgatgtcaagtcctacgagctcatcaccagtgagagcaagatgatgcaggtgatagaggagtacatagaggactacaaccagatcaacacggccaagctgaagctggtcctcttcatggacgccatgagccacatgtgtcgcatcagccgcaccctacgccaggcgctgggcaatgcactcctgctgggcgtgcgtggcagcggccgctctacaagag

SEQ ID NO: 108770 - DNA, 519 bp, Homo sapiens
  misc_feature (1)...(519): n = a,t,c or g
gcctcctgggttcaagcgattctcctgcctcagcctcccgagtagctgggattacaggtgctcgctaccacgtccagctaacttttttgtatttttagtagagacggggtttcaccatgttggccaggatggtctctatctcttgaccttgtgatctgcccggcttggcctcccaaagtgctgggattnnacaggtgaagcacgcctggcctttattttctttatggcttttctcattataagatactgccttgtttatttatttgcttatttattgagacacatggcccccctcacccccaaaaagaatgtaaactgctaacaacagattatttgttttgttcaccactgcatcctcagcacctagaagaaggcatggaacatagaaagtgctgtaattgtcagggtgtgctggcttatgcctgtaatcccagcgctatggtaggccgaggtggaaagattgcttgagtccaggagttggagaccagcctgggcaacatagtgagacccccatctcta

SEQ ID NO: 108771 - DNA, 405 bp, Homo sapiens
  misc_feature (1)...(405): n = a,t,c or g
agcgggccagttctttnggcatcccgtcctcaggggctcttgtgcgagttccagtgatcgaaggcttttggacaagtggggtggagctgaggaacatagacagcttcacacccccagtggcccactgcatctctgtgagccaagactacatcttctgtggctgtgctgatggcaccgtgcgccttttcaacccctctaacctgcacttccttagcaccttgccccgcccccatgctctggggacagacattgctagcgtccccgaggccagtcgcctcttctctggagtggcgaatgccaggtatccggacaccgttgccgtgacctttgctcctactaatcagtggctgtcttgtgtgtacaacggtcatagcatctatgttcgggatgtgagggacctgtatt

SEQ ID NO: 108772 - DNA, 718 bp, Homo sapiens
  misc_feature (1)...(718): n = a,t,c or g
aagaaggtgggcaattactacacaaccccgatctacaggttccggatgaaatgccacctctgtgtcaactacatcgagatgcagacggaccccgccaactgcgactacgtgatcgtgagtggcgcccagcgcaaggaggagcgctgggacatggcggacaatgagcaggtgctgaccacaggtgagcgccacccacttacctgcctgggggccctggccctgagtctgcgctggggcccccaaagcccagccgagctctgatcgttgcagagcatgagaagaagcagaagctggagacggacgccatgttccggctggagcatggcgaggccgaccgcagcacactcaagaaggcgctgcccacactgagccacatccaggaggcccagagcgcctggaaggacgacttcgccctcaacagcatgctgcggagaaggttccgggtgaggggggctccagcccggggtcagagaggatgcatggtggaccaaggcccgggtccagccctccccccaccacatcctagctttgagcaggccacttgtaccttctgagcctcagtttccccatttgctacatggtgccatgcccctgtcttaatccattctggctactataataccaaaataccatagacagaaacagtagaaaaaagaaagggcacggtgactcacgccttgtattgcggccgctcggnnggtccncctaacgaaatgat

SEQ ID NO: 108773 - DNA, 399 bp, Homo sapiens
ggatcagggggatcctagagtcgttggggacagagcaagggggaatagtggctagaggccaggccaggacattgtgatttatccacaggccttctgacagtggcccgcccgctgagcgctccccctgccgcggccgggtctgcatctctggtaagaagcacagctaccccagctgctggtaccccttgcccaagcacacggcctcctgccccatctcaacatctattcttacccctctgccccttagacctccggattccactcatgtggaaggacacagaatatttcaagaacaaaggtgacttgcaccgctgggctgtgttcctgctgctgcagctgggggaacacatccaggacacagagatgatcatagtggacaggaccctcacatactgtatt

SEQ ID NO: 108774 - DNA, 367 bp, Homo sapiens
  misc_feature (1)...(367): n = a,t,c or g
tcaggcagggcgacagagacaactgacattccagtggaagatgacagccaccctggcagaggcatgggcatggaggaacagagacaatcttgatacagtttggacatgggtaaggggtggggaggaaaccaggcgatgcatggctctccaggaaactgcagcgatgtaggaggaataggacccatcctggggaagtgatgggatcgggggcctgagcaggaccctgtgtgtacccctggatcttacctggtgtgtggggatgacaggggctgaggggattcngtgcagggactccaggctcttgaggagcctgtgtagttctggagcttccctgacctcagagagctatgaggcagcgtccacccat

SEQ ID NO: 108775 - DNA, 530 bp, Homo sapiens
ccgcagtttccgccgacgcgcgcatctcacagagcacacgaggcttcacagtggcgaggagcccttccagtgtcccgagtgcgacaagagcttctcctggaaggcctccatgaagttccaccagcggatgcacagggacgagaagcccttcgcgtgcggtcgagtgtgacaagacctacaccgcatcagtctcagctcaccgagcacctgaggctgcacagtggagagaagccctaccagtgtcctgaatgcgagaagactttccgcctcaagggaaatctgaaaagccacctgctgcagcacagtggccaaaaagccattctcttgtgtgatgtgcggcaaaagtttcactcaacagttaccggcttcacagaacacattcggagttccacagcgggggaggaagcccttcccagtgtccggagtgtgacaagagctactgcatcaggggcagcttgaaggtccacttgtataagcacagtggagagaggcccttccagtgtcccgagtgtggcaaaggcttcctccag

SEQ ID NO: 108776 - DNA, 440 bp, Homo sapiens
  misc_feature (1)...(440): n = a,t,c or g
aaaaaatcagggggcaacggaatttacctccagggcttagaaggacaggccaattccgaactttatgcaaggtcaggtgctttaagaccacagcacacactcctgggaattcagtagtccctcagctgcaagcaaatcaaaatgtccagcacgcaggtggtcaaggagctggtcctcctcaaaaccagatgcaggtgtcccacggcgcgccaaatatgatgcagcccagcctcatgggaattcatggcaacatgaacaatcagcagagtgacatatctgcaggccattttggggtaaacaataagcaaaataataccagcgcaaataaaccgaagaagaagaaaccccctcggaagaagaaaaatagtcagcaagatctaaacacnccgtgtattgcggccgctctagagctcaaanccntacggncctcccaatcatgn

SEQ ID NO: 108777 - DNA, 428 bp, Homo sapiens
  misc_feature (1)...(428): n = a,t,c or g
aatacatggaggttagatctaataaaaaagattaaattatacaacatttaaatgaagtgttataaatcaatgatctcactccctcattttcagatgagaaaactgaaggcgttttaaaaggttgtaacttataaaaatggctaacattttcactcctcattcaacatttttcactctcatttctttcnnnnnnnnnnnnnaaaaacannnnnnnnnnngtgccccagcccgaagagaacggggcaattttgggttaccccaaccctccccccccgggttaaaagaaattttcttcccccaccccccaaagaggtgggaccataaggaaacccccccctgcccggccaattttggcccccccaaaaaaaagggggtttccccttgtgggaagggtgggcaaaactctcgacttagggggaccccccccc

SEQ ID NO: 108778 - DNA, 426 bp, Homo sapiens
  misc_feature (1)...(426): n = a,t,c or g
ngctggacttacatccaatgtcctttccagctctgataccagtggtctaacccaaggaagcaccagtcttagccagagtgtcttctaccctaagctctccccgtgatacccttgaggtcagccatggcacttgggggagcctggcacctgcatccagtcggcccaccctgtccctagggctctggaattggtggtgggctggaggcagtgcagactctgtagggaaaattgggagggcaggcagcactcactggctgttctgcccatcctttgtccctagtacgcaccagaaggcgtccagaagatccttattgggaataaggctgatgaggagcagaaacggcaggtgggaagagagcaaggcgcagcagctggcgaaggagtatggcatggacttatatgaaacaagtgcctgcaccatgtatt

SEQ ID NO: 108779 - DNA, 447 bp, Homo sapiens
  misc_feature (1)...(447): n = a,t,c or g
ccccgctcgcgcgcccgtctatcgattacagtagatggagtgccctgttgatgacgtgtctatcgcgggacagccgtttctcatcagttggcagcatccagtccagcgggtggcccaacgatgtgatgcagggagcctcgggtccacagcatcagccttgcgcttcccctccacgtccatcatccagcagtcgagcccgtatttcacgcagtcgaccatccgctgccaccaccaccacgggcaggactcactgaaggagtttgtgcagtttgtgtgctcggatggctcgggccaggccaccggacagcccaacggtagcggccagggcaaagtcccggggtcatttttgctaccgccgccgcctccagtggccaggcctgtgcaccttcctatgtcttattaaaattnnctctgcacatntnttcggcgctctacagatcgagggcg

SEQ ID NO: 108780 - DNA, 458 bp, Homo sapiens
  misc_feature (1)...(458): n = a,t,c or g
ggaaagcttggcaccatccctatgccaggggctaggggggcttcccaggccaccaatcctggccccgtctgcaacccagcctgggccctttgttcctgtcccccagcttgtcctgctcactggggctcggcccctttctccccacccatggggtccctgcctttgatgattcacacttcccctcccaccagagccctcgctgtagccaggggcaggaggcagggagcaggatttcctgctgcgcccatggtgggcagtggagtggcatggggctgggaccatgcaaaccgcttggctctcccgggccgctgtagagaaggtcccggaggccacttgctctcggggccatccatgagccctggaccccgagagcccagggccctgtccataaaggaaaaaaggcagtgnnctgcccgtcaccccctactgnnnnncnttctgcaaattccccagatctc

SEQ ID NO: 108781 - DNA, 399 bp, Homo sapiens
  misc_feature (1)...(399): n = a,t,c or g
aatacatcctcccgctctagaagctgctcccgacacatgctcagctcccgggttaaggtggcaaattcctgggggagggcggagttaaggtggcgctggagctggtcccgctcgtgtatggcatcctggagccggctctgtgtggccgccaaggtctcctgactctcccgaagagactccagcaacttctcccgctcgtccagcatgttcaccatcagctgctcgaagttggcgtcagcatcggcgccatgagggnnnnannanannnnncnnacaaagcaaaggcacaaatnaagngctcaccacaggagaaggagagctgcccacccagtgaggaccgccaaacaagcgagcctgcacttcctgctttgctgttctcggatagagaaaaccctcccc

SEQ ID NO: 108782 - DNA, 738 bp, Homo sapiens
ggatcaaggacgcctgagagctcctttcacacaaatgggcaagaggatcatccacctcagggtatgctccaaacggaggttcaaagatcccaggcagctggcagatcaaaatcagacccacagcagcgatagcgacgggtagctccgggaacaaacccttagctaacagtttaccctgccctgggggctgcagctgcgaccacatcccagggtcgggtttaaagatgaactgcaacaacaggaacgtgagcagcttggctgatttgaagcccaagctctctaacgtgcaggagcttttcctacgagataacaagatccacagcatccgaaaatcgcactttgtggattacaagaacctcattctgttggatctgggcaacaataacatcgctacttgtagagaacaacactttcaagaaccttttggacctcaggtggctatacatggatagcaattacctggacacgctgtcccgggagaaattcgcggggctgcaaaacctagagtacctgaacgtggagtacaacgctatccagctcatcctcccgggcactttcaatgccatgcccaaactgaggatcctcattctcaacaacaacctgctgaggtccctgcctgtgggacgtgttcgctggggtctcgctctcttaaactcagcctgcacaacaattacttcatgtacctcccggtgggcaggggtgctggaccagttaacctccatcatccagatagacctc

SEQ ID NO: 108783 - DNA, 426 bp, Homo sapiens
cgtgtagaattcttttggatacatgccaaaaagggggatgactgtgttccttttttgacacaagcaaatattctatttagggcaagtcctcccagttcgagaaagacaacaggaagtggctagagagtcggctcgtagctctgctactgtagactgtgaaaagatggactccaccgtccgagcatcactttctatgccagctacccctgttggcaaaggaacggagaacgcttttctttctccgatagctataccaaatggttttggtaccagtccactaactccctctgttaggatatcagctctaaacatcgtgggggatctcttacggaaagtaggggctttagaatccaaattagcagcctgcaggattttgcaaaggcccgatgtatgcggctgctgagagtatcaaaaaacgactgcaat

SEQ ID NO: 108784 - DNA, 414 bp, Homo sapiens
  misc_feature (1)...(414): n = a,t,c or g
aatttcctctgagttcagacattgttacttcaagacaaagcttctatgactgtgactcacttgataagggtttggaacataatttagacttacttagatatgagaaaggctgtgtaagagagaaacagagtaatgagtttgggaaaccattttaccattgtgcatcctatgttgtaaccccctttaagtgtaatcagtgtggacaagacttcagtcataaatttgacctcattagacatgagcgaattcatgctggagagaacccttacgaatgtaaagaatgtggaaaagccttcagtaggaaggaaaatcttattacacatcagaaaattcatactggggaaaaaccgtataagtgtaatgaatgtggaaaagctttcattcagatcccaaccnnattagacaccgtgtatt

SEQ ID NO: 108785 - DNA, 467 bp, Homo sapiens
  misc_feature (1)...(467): n = a,t,c or g
aggatgccatcgtggcctgcttctttgaatccaacagcctggacgtatgtccctttgccaagttccctagcctgatggtggccaaaagcggctagttcagggaggccccaggctgcaggcggcctcttcctgcggttcccccaggctgttcccgtgtggcctgggggcatctagggaccgatggcagctgtggcggcccatcgagaattgttctcagagttcagaggggccgtcggtgccactggtccctggatctgagctggagggaggtgccgggttgtggcagctgggccagtgtggctggggctggggtgaccctgtgcttccccttgcagctgtactcactcagccaggacggagtgctgtgcatgtggcagtgtgacacgccccccgagggcttgcggctgaagccccctgcgggctggaaagcagacctaaacagcgggaggaggacggnnaggagtatt

SEQ ID NO: 108786 - DNA, 436 bp, Homo sapiens
  misc_feature (1)...(436): n = a,t,c or g
cgagagcccgaagcactagtcccggacccaccccacctcgcggcccaccactccccaagaaaagctcccccccaccgcccccaggctgtcaaaagtacacagcgctgcgagtcccctaaatactcctggaatggccccaagggcctcttcattcccctcaacaccccgcctggcctccccgacctcctttagagatggagaacctgaggcccaaagacacttaatacagtgaggggcagagcaaggggggcggcctgtgtgcagcacagtcaacatggaacaaccggggcaagctctgtccctcaggaggagaacgtannnnnnnnnnnnnnnnnnnnnnnnnnnnnnnnnnnnnnnnnnnnnnnnnnnnnnnnnnnnnnnnnnnnnnnnnnnnnnnnnnnnnnctcgtgccaagctggcgtatgatggtctacat

SEQ ID NO: 108787 - DNA, 475 bp, Homo sapiens
aggaaacggaataagagattaaggagaggatgaggagagtgagaaacgagagagaaaggcagtcgataaagaacagagaggaggagaagaatctagagagaaaaatgaaggacagcaacagatagtcaaggggcatccacgaagcccaccacaaagtgtttggagaatattaggcatgtcctcaacaacactaccactcctccctcctagcgttcttccccacggtcccccgcttcgcccgactccggccatgtagcgcgcacgtcagcccgcacgcgtacgagtgtctacgggctcgtcgctggctgctcccaccaaccaccaccttcggccgtcctgcgagccagccatcccgtacgcgctcacccacgggaacctcctcgcccagttctccactccccctcagaccctgtcaagccggctccagcgacgaaatcgtcgacccggaaattccgggccggtataagggatgtct

SEQ ID NO: 108788 - DNA, 414 bp, Homo sapiens
atgcgggtcatggcgccccaagccctcctcctgctgctctcgggagccctgtccctgatcgagacctggaccggctcccactccatgagggatttctacaccgccgtgtcccggcccggccgcggagagccccgcttcatcgcagtgggctacgtggacgacacgcagttcgtgcggttcgacagcgacgccgcgagtccgagaggggagccgcgggcgccgtggtggagcaagaggggccggagtattgggaccgggagacacaaaagtacaagcgccaggcacaggctgaccgagtgaacctgcggaaactgcgcggctactacaaccagagcgaggccgggtctcacaccatccagaggatgtatggctgcgaccttgggcccgacgggcgccttcttcgcgggtataacc

SEQ ID NO: 108789 - DNA, 387 bp, Homo sapiens
gcccgcaagcaccttaaggatgacagagcctggaacacaaatcccttccaggagagcggcctccacctaagccccacggcggccgaggccaaggagaaggctcgagccatgcgagtcaacaagcgcgcgccacagatggactggaacaggaagcgtgaaatcttcagcaacttatgagccccttcctgcctgtctcgggaccctgggacccctcccgcacggaccttgggcctcagcctgccccgagctcccccagcctcagtggactggagggtggtcctgccattgcccagaaatcagccccagccccggtgagcccccatcctgcccctgcccaccaggtactgggggcctgtggcagcaagatagggggagagagacccagag

SEQ ID NO: 108790 - DNA, 439 bp, Homo sapiens
  misc_feature (1)...(439): n = a,t,c or g
gagcattgtgtcgtggcctttgtgntatagncaacggctgactgtggaggacccggccactgtggagtacatcacccgtttttttccagtctgaagcaccgctatacgcagagcaatgggcgcaggccgtttggcatctctgccctcatcgtgggtttcgactttgatggcactcctacgctctatcagactgacccctcgggcacataccatgcctggaaggccaatgccataggtcggggtgccaagtcagtgcgcgagttcctggagaagaactatactgacgaagccattgaaacagatgatctgaccattaagctggtgatcaaggcactcctggaagtggttcagtcacgtggcaaaaacattgaacttgctggcatgaggcgagatcaatccctcaagattttacatcctgaagaaattgagaagtatgttg

SEQ ID NO: 108791 - DNA, 397 bp, Homo sapiens
acacttcgttcagtgtggcgcaattcgtaaccacctgctgttacacaagagcccatggttgaaagtgacgcaatgaaattggtacagacccgaagcattctccactacgtagcagacaagcacactctctttggcaagaacctcaaggagagaaccctgattgacatgtacgtggaggggacactggatctgctggaactgcttatcatgcatgctttcttaaaaccagatgatcagcaaaaggaagcggttaacatggcccagaaggctataattagatactttcctgtgtttgaaaagattttaaggggtcacggacaaagctttcttgctggctatcaactgagccttgcagatgtgattttactccaaaccattttagctctagaagagaaaa

SEQ ID NO: 108792 - DNA, 457 bp, Homo sapiens
aagatgaaagcgccggaatttgtggaaacaagatggaggattcggcctcggcctcgctgtcttctgcagccgctactggtacctccacctcgactccagcggccccgacagcacggaagcagctggataaagaacaggatagaaaggcagtggacgctctcttgacgcattgcaagtccaggaaaaacaattatgggttgcttttgaatgagaatgaaagtttatttttaatggggagattatggaaaattccaagtaaagaactgagggtcagattgaccttgcctcatagtattcgatcagattcagaagatatcttgttatttacgaaggatgaacccaattcaactcctggaaagacagaacaagtttatagaaaggttttaaacaagcatgggattaaaacccgttctcagattatctccccttcaaactctaaagaaaggatatttatcct

SEQ ID NO: 108793 - DNA, 444 bp, Homo sapiens
  misc_feature (1)...(444): n = a,t,c or g
ataccagannnnnncctgaagttttgcagcgaatccctcctttaacagagcttcaatgctgctcctgttcctcctcttctatggtctctgctgtcctggggaaaatacaggagggaagccagaggcctggctgtcctgtggccccagtcctggtcctggccgtctgcagcttgtgtgccatgtctcaggattctacccacagcccgtgtgggtgatgtggatgcggggtgagcacgagcagcggggctctcatcgaggggacgtcctgcctaatgctgacgagacatggcatctccgagcaaccctggatgtggcggctggggaggcagctggcctgtcctgttgggtgaaacacagcagtctatggggccatgatttaatcatccattgggggggatatttcatcttttctcattctgatccggttgactgtgaaagttaccc

SEQ ID NO: 108794 - DNA, 469 bp, Homo sapiens
  misc_feature (1)...(469): n = a,t,c or g
gcactctataagtggacgacaacttcttcatgctgcgttcattcctttaggagacatcacagatattcatgattcctctggattatgaaacagaaaagcaccgaggatttgcttttgttgaatttgagttggcagaggatgctgcagcatctatcgacaacatgaatgaatctgagctttttggacgtacaattcgtgtcaatttggccacaccaatgagaattaaggaaggctcttccacgccagtttggtcagatgatgactggttgaagaagttttctgggaagacgcttgaagagaatacagaggaagaagggtcccagcctcccaaagaagagacccaggagggagagcccattgctaaaaaggcccgctcaaatcctcaggtgtacatggacatcaagattgggaacaagccggctggccgcatccagatgctcctgcggtatgatgtcacgcccatgacagn

SEQ ID NO: 108795 - DNA, 423 bp, Homo sapiens
  misc_feature (1)...(423): n = a,t,c or g
nnnnnnnnnnnnnnnnnnnnnnnnnnnnnnnngactgggaaaacaacgtcatatacactttatgcttccggccgtggcggctggaaaaacaacgttattattttttctgccgccggccgtggtgggtaaaaaaacatctttatttttttttctcccggcggcgggggggggaaaaaaaacannnnnnnnnnnnnncccgccggcggcgggggggnnnnnnnnnnnnnnnnnnnnnnnnctcccgccggcgggggggggaaaaaaaannnnnnnnnnnnnnnnnnngcnnnnnnnnnnnnnnnnaaaaaaaannnnnnnnnnnnnnnncccnnnnnnnnnnnnnnnnaaaaaaaannnnnnnnnnnnnnnnngcgccgcnnnnnnnnnnnnagaaaaaacctgtttttttttctggcgtggggg

SEQ ID NO: 108796 - DNA, 437 bp, Homo sapiens
  misc_feature (1)...(437): n = a,t,c or g
acatcaaacgcttgcttggacgagggggagatgctgccaataactatgcccgagggcctacaccattggcaaggagatcattgacctcgtgttggaccgaattcgcaagctggccgaccagtgcacggctctccagggcttcttggttttccacagctttggggggggaactggatctggggtcacctcgctgctcatggaacggctctcagttgattatggcaagaagtccaagctggcgttctctatttacccggcgccccaggtttccacagctgtagttgagccctacaactccatcctcaccacccacaccaccctggagcactctgattgctccttcatggtagacaatgaggccatctatgacatctgtcggagaaacctcgatattgagcgtccaacctatactaaccctgataggttaataggncaan

SEQ ID NO: 108797 - DNA, 423 bp, Homo sapiens
cttaagttaggacagcggagcaccaaagtgatcagctcgtgtggagaactgaggtggtgtttatcaacctgaaccccagctgggagccgttccgcctgtgcctgcattccctatgcagctgtgatgttcaccgacctctcaagttcctggtgtatgactatgactccagtgggaagcatgaattcatcggcgagttcaccagcactttccaggagagcggagggcggctccctggcagggatcagggtatgatcaaccccaagatcggacagagagaatacaagactcaggacgtaggctggcccagtcacggtgggaaggtgccaccttcctggattacatcatgggtggctgccagatcagcttcacggtggccatcgacttcaccgcctccaatggggacccgaggagcagccagtccct

SEQ ID NO: 108798 - DNA, 434 bp, Homo sapiens
cttgacctgcatacgccaagcttggcacgaggtcgccctcttgcaggagggagcccatgttcccttacagtttcggattgtctcagggaactcagctgacttccttctccacactgttggagcagaggactctgggaactatagctgtatctactatgagacaaccatgtcaaacaggggggcatatctcagtatgccccttatgatctgggtgactgacacattccctaagccatggttgtttgctgagcccagttctgtggttcccatggggcagaatgttactctctggtgcccgaggccgggccatggagtacgaaacctttctggccacagaaagagaagccacttcaatgcagctctggggaatccccagtaatgacggggcattccccatcaccaacatatctggtactagcatgggggcgctacct

SEQ ID NO: 108799 - DNA, 409 bp, Homo sapiens
gattcttggtcgggcggcagatattcatctttttgcgaacgatatgctgaaactgggcgactggggggagatgccgaaatacggcgcggatggcgcggtgatcgatattgggttaaccaccgtcaaagggcgtaactgggacaataccattaccactattcccacctggtctctggtttctgactcctttaaaaactgcagcgggatgtcaacatttggcgcgcgatgtattaagcgcaacatcattattgatgccaccagtattcgttctcttgatgaagacgaaatgcaacggctgaataaagcgcattcggtacagccttatttaaccagccgccatcacgatattaatgaggggaattctcagcaaggttctagggaatccgttatttaatctgcgccggatgac

SEQ ID NO: 108800 - DNA, 414 bp, Homo sapiens
cgcatgcatgattacgatcactgccgtcggactggaaacagcgttttatactctttatgcttgcggcacacggtgagggggggaaaagagagctgttaacattcattacggggaggtagtgggagggataatatcaagatcattaacttaccattgtgagcctaaggttccagtttcattgctgaagtatgcaccaaacaacgggggcctgaatccactctttggccctcaacaggtagccatgctgaaccagctatcccagctaaaccagctttctcagatctcccagttacagcgattgttagcgcacagcaaagggcgcagagtcagagaagcgtgccttctgggaaccggccgcagcaagaccagcagggtcgacctcttagtgtgcagcagcaaatgaagccacaattc

SEQ ID NO: 108801 - DNA, 432 bp, Homo sapiens
gactgatacggatcactggccgcggactggaaaacagggtgctacactctatgctcgcgcgccctgctggtcagcagcacaagctggacaaaggtcgaagacttctccatcctgctggcagctttagaaaagtttgaacaactgactcttgatggacacaaccttccttctctcgtctgtgtgacaacaggcaaagggcctctgagggagtattatagccgcctcatccaccagaagcacttccagcacatccaggtctgcaccccctggctggaggccgagagactaccccctgcttctagggtcggcggacctgggtgtctgtctgcacacgtcctccagtggcctggacctgcccatgaagggggaggacatgttcgggtgctggttgcctgtgtgggctgggaacttcaagggtttacatggactggg

SEQ ID NO: 108802 - DNA, 492 bp, Homo sapiens
  misc_feature (1)...(492): n = a,t,c or g
ntgaccaccctttacaccatcttggcacgatgggggcaagccctcggagagggccaggggtcctaggtattcagcgcccaggcctgtttttcctaccagacctgccttcagccccctttgtgccgcgtgacgcccagcggcacgacgtggagctcctggagagcagcttccctgccattttgcgggacttcggggctgggagctgggacttctcagggactacccctccgcctcggggctgggccccacctctggcccccgggtgctaccagctcctgctgtaccaagcaggccggtgccaacccagcaactgccgccggtgcccgggggcctatcgagcactgagggggcttcgaaactttatgagcgccaacaccttcggcaatgccggcttttccgttctcctgcctggcgccccgctcgagggccgctgtgggcccaccaatgcccgggtcagaagccatgtgggcctaaagaaccgtccgggctggc

SEQ ID NO: 108803 - DNA, 436 bp, Homo sapiens
  misc_feature (1)...(436): n = a,t,c or g
tcctgctacggattnnnnnacggactgcaagaaatccccagaaacggcgggttgagcgacgagagtgtgtcaaggttaaaggccaaggactggggctccagctgtggatcgcagggtcgagaagactcggttctgagctacgagacagggacgcagatggaagggcactatgctcgccccatcatcatccttgggcccaccaaggaccgcgccaacgatgatcttctctccgagttccccgacaagtttggatcctgggttccccatacgacacggtccaagcgggagtatgagatagatggccgggattaccactttgtgtcgatccgggagaaaacggagaatgacattcaggcgcacaagtttattgaggccggccagtacaacagccacctctatgggaccagcggtcgatccgtgcgagaagggggaaaac

SEQ ID NO: 108804 - DNA, 460 bp, Homo sapiens
acgtatgactaccaaattggtcgagggaccggacgccccattccttgcgactcagccctcagttccttcattttcaccaggccgtgccttgtttgagtttttcctcccagtgagactgccccacggagacagaggaaagggctggctccccctccccaggctggagacccccccccaactccaggaaagagcagtcagagtccagtgctctgcctcagacgttgcctgagaagaagtggctgccacacccaggggaaggccctgaggcggaggctgtgctccgccatggtgtcccggtaccttccatacacagaggagggcagccttctccatatctccatggccctgtcccaggccggcccagatgtgtcccccccaggccttgtcctacgttcaaggtggcaaatgtctttcctgggctgccaccagcccccgccccagagtgggccaccggggaact

SEQ ID NO: 108805 - DNA, 680 bp, Homo sapiens
  misc_feature (1)...(680): n = a,t,c or g
aatcctggggtggggggttccccctgaaaactacaaanctacgctcccagctgctggnctccctgtgccccggcggggaaaaaggtggaaaaggcgggcaatgcctgcccgctgaagaaagaacataaataaacgctcccagctgccacaccccttttccttcccacggccctcctctttctcccccaaaaggaaactaaaatgtggggttctgatcattgatttttaaacaagcgtcccacaggtcagggcctatggttctgtaaactccaaggctctgatggcccaaaaacgtaggcggtggtggagcagtaggcggtgtcaaggctagatttgtattaaatatcctaggagtggggtggggatgccaggtggagggtgagcccaagtagacccaagccctcaggaaatccccagaggtgaagatttgatgcacatccccccatccttgcccaaataaaatacaagttagaggtcattgttcacattacagtcacaatgggacattttaatcagctcgttttgtgagtacattcaagacataattgaatttattttacaaaaatggatttcccggctgggcacggtggatcacgcctgtcatcccagcactttgggaggtcaaggcgggcggatcacaaggtcaggagttcaagaccagcctgaccaatatggggaaa

SEQ ID NO: 108806 - DNA, 469 bp, Homo sapiens
  misc_feature (1)...(469): n = a,t,c or g
tgacctgctacgttttactggccgtctgactgggaaacacantgncctggacagagctttaactgaatttttgagactgcttcagctatggcaactcttggggaagctcgcctaagggaaatggaagccttgcagtctctcaaactcgccaatgaagggaaattgctgtcgcctctccaagatgtggatataaaaatctgcctatgtcagaaggccccagctgcccctatgattcaatgtgaactctgcagggatgctttccacaccagttgtgtggcggtacccagaatttcacagggcctgcgaatctggctttgtccccattgccggaggtcagagaaacctccattagagaaaattctgcccctgctcgcctcccttcagcgtatccgagttcgccttcctgagggagatgcacttccatatattgagagaaagaaccgcgaactggtatctcatagcccagcac

SEQ ID NO: 108807 - DNA, 473 bp, Homo sapiens
agcgagctacggaattcttggccggacggactgccacaacttgaactacccaaccaggggctctgggatattattgttgagttcatctaccagcttcagtcattcagtcagtaccgctgtaagactgccaagaagtcacaggaggagattgactttcttcgttccaatcccaaaatctggaatgctcatagtgtcctcaatgtccttcattccctggtagacaaatccaacatcaaccgacagttggaggtatacacaagcggaggtgaccctgagagtgtggctgaggagcatgggcggcactccctctacaaaatgcttgggtactttagcctggtcgggcttctccgcctgcactccctgttaggagattactaccaggccatcaaggcgctggagaacatccaactgaacaagaatagtatgtattcccgttgctcgagtgcctaggctccactttctattattgcgcg

SEQ ID NO: 108808 - DNA, 502 bp, Homo sapiens
  misc_feature (1)...(502): n = a,t,c or g
aagctatgacatgatacgcaagactggacgacggggctgngcaaacaacaagacagagctggcctggagtccgcggctggccggtgagtaggtccctcgccggctccctcggggcctccactgcagcgcagtcgccatagctctgaacagtccctggttcccagcccaccggaaccccggcagaggcccaccaaggctctggtgccctttgaggacctgtttgggcaggcgcctggtggggaacgggacaaggcgagcttcctgcagacggtgcagaaatttgcggacgactagcgtgcgtaacgggggccacattgacttcatctacctggccctgcgcaagatgcgggagtatggtgtcgagcgggacctggctgtgtacaaccagctgctcaacatcttccccaaggaggtcttccggcctcgcaacatcatccagcgcatcttcgtccactaccctcggagcaggagtgtgggattgctgtcctggagcagatggagn

SEQ ID NO: 108809 - DNA, 411 bp, Homo sapiens
actggccgtcgtgactgggaaaacaagagccgggctggtgtttattctgtttccatagggtcccaggcagcccggggagcggctcagatggggtcacctacagcaccgagtgtgatctgaagaaggccaggtgtgattcacagcgagggctctacgtagcggcccagggagcctgccgaggccccaccttcgccccgctgccgcctgtggccccttacactgtgcccagacgccctacggctgctgcaaggacaatatcaccgcagcccggggcgtgggcctggctggctgccccagtgcctgccagtgcaacccccatggctcttacggcggcacctgtgacccagccacaggccagtgctcctgccgtccaggtgtggggggcctcaggtgtgaccgctgtgagcctgg

SEQ ID NO: 108810 - DNA, 912 bp, Homo sapiens
ggacttcaacatgaagaagctggcgtcggacgcgggcatcttcttcacccgggcggtgcagttcacggaggagaaatttggccaggctgagaagactgagcttgatgcccactttgaaaaccttctggcccgggcagacagcaccaagaactggacagagaagatcttgaggcagacagaggtgctgctgcagcccaaccccagtgcccgagtggaggagttcctgtatgagaagctggacaggaaggtcccctcaagggtcaccaacggggagctgctggctcagtacatggcagacgcggccagtgagctggggccgaccaccccctatgggaagacactgatcaaggtggcagaagctgaaaagcaactgggagccgcggagaggggattttatccacacggcctccatcagcttcctcacacccttgcgcaacttcctggagggggactggaagaccatctcgaaggagaggcggctcctccaaaaccggcgtctggacttggatgcctgcaaagcgaggctgaagaaggccaaggctgcagaagccaaagccacgtgttgagggagatacggtgcctgactttcaggagactagacctcgtaattacattctctcggccaagcgcctccgcgctctggaatgatgaagtggacaaggccgagcaggagctccgcgttggcccagacagagttttgaccgggcaagcaagaagtgaccccgtctctttgctgggagggaatcagttaggcattcacgtggaaccaccttgcgcttgccttccacggagtttcgttcaagtttttcaggacaacctaattaacggcacagttgttaaccgccacatggttgggattttgcaggaaggcagctgggggcagcttcccagggtgccatatttcccggcacc

SEQ ID NO: 108811 - DNA, 459 bp, Homo sapiens
acggatcagctggccgtcggactgggaaaacagcgtctatatcttcagcccccagcgcctggagagcatgcggctcaaacagcgacagaaggccaggagagctgggaacccttccagcctgagggacattggcaaccgacgctcccctccgccatctctagccaagcagaagcaaaagcaggcggaacatgttcccccatatgacggggggccctccatgcggcctgtggggctggggggaccctctctgaaaggttatgaggtcacagacatgatgcagaaggctctcttcgacttcctcaaacacagaattgatggcaggatctccatcacccgagtcacagccgacctctccctggaaagcgatctgtgctcaacaatccgggcaagaggaccatcattgagcgctcctctgcccgctccagcattggcttcgatgaatgcccttttcctccaatt

SEQ ID NO: 108812 - DNA, 437 bp, Homo sapiens
cattcgtatgaccatgcttacgccttgtttggcacgacgggctgaaaagaaataaaaaaggatctccactcttcatgacttcagtgattcattttttttatacgctggaaattgactcccctttcccttcccaaagaggataggaccttccaggatgcttcccagcctctcctcagtttcccatctgctgtgcctctgggaggagagggactcctggggggcctgcccctcatacgccatcaccaaaaggaaaggacaaagcctcacgcagccagggcttcacacccttcaggctgcacccgggcaggcctcagaacggtgaggggccagggcaaagggtgtgtcttgtcctgcccgcactgcctttcccaggaactggaaaagccctgtccggtgagggggctaatagactcagcgcccctggacccccaaatgcg

SEQ ID NO: 108813 - DNA, 469 bp, Homo sapiens
  misc_feature (1)...(469): n = a,t,c or g
gacatgctactgattcctggccgacggcactgaaaaacaanaggcgccctattgcgcatcatcgaactcattctggtgagaaaccctttatatgctataaaggagggaaaggcttcaccttgaagaacagtcttatcacacatgagcaaactcatacaggagagaaattatatacatgtagtgaatgcggaaaaggcttttcaatgaagcactggctcatggtacatcaacgaactcatactggagagaaaccttatatatgcaatgagagaggaaagggcttcgctttgaagagcccactcatcagacatgagcgaacacatactggagagaaaccctatgtatgcaccgaacgtccaaaaggtttcaccatgaagagtgacctcattgtacatcagagaactcatactgcgagagaagccatatatatgcaatgactgtggaaaaggcttcactgtgaagagccgcg

SEQ ID NO: 108814 - DNA, 411 bp, Homo sapiens
ctctaacgggcgtggtcaagcctcgggggccggcccgtggtcctgaccgttttttacacgcccagcaacagcatccctggctgggatgtctgcgcctttgtacctgacacaggtggcagctgtgtttgaaggccgcttccgagagcagaagtcccccgagtccatctggacgccggtgccggagtatcaggtgcctcgaccccggcccgggtgctgcgcagcccccgggatgcagtacaatgcctccagcgccttgccggatgacatcctcaactttgtcaagaccctccctctgatggacgaggcggtgccctcgctgggccatgcgccctggatcctgcggaccctgatgaggcaccagctgactcgagtggctgtggacgtgggagccggcccttggggcaaccagcc

SEQ ID NO: 108815 - DNA, 456 bp, Homo sapiens
ccacgagccttgatggaccagcaatacaagttccagtccttgtcaaggatcaggacactctccagaaggtggtgagtgccccaggaacaacacttcctcctgtacttcctggcagccacataacagctgaaatttgcccgcatcctcctactgacctagtggcattcaacctccaagatcctcagcatgaattctcctgcccctgaagcttctgcccttttcccaagaaaagaacccaagataatcaattaatggcacttatgctcctaacagcccagccccaggaattggtgaatgttcgaagaggtgtcagtatgcttcacttcagaagaatgggcatgtctgggcccaatccagaaggccttgtacttggatgtgatgctggagaattatggaaatgtgacctccctagaatgggagaccatgaccgagaatgaagaggtgacatcaaagccc

SEQ ID NO: 108816 - DNA, 419 bp, Homo sapiens
gcccagccttatcttgagactacaacagagctttcaggagaatgcggagagacggattcccacccggatctcaccagaaacccgcacaccccagccacattgctcctcattcagccagaaaggactacaactccaccaccaggaggccccccttcctggagctggccagctgcagaggctgttcatggcatcccacaggtggcgactggcccccaccctcctcctagcactttagagggtccctctgtggcagacaccatggctagggttctctttccaactcctgttggtctggcaagtgacagatcatcttcactacattaatcagtagtcacccgaacattcctatactgtcccccaattcctttcagcaccagctgcctcccccactggaattattcaatatggaactagattaa

SEQ ID NO: 108817 - DNA, 587 bp, Homo sapiens
gggacacgttacattgaggtgttcaagtcccacagaccgagatggattgggtgttgaagcacagtggtcccaacagtgccgacagcgccaacgatggcttcgtgcggcttcgaggactcccatttggatgcaaaattttcttctagcatgtgataatgagtaaactaaaactattttcagcttttctcaattaacattttggtagtatacttcagagtgatgttatctaagtttaagtagtttaagtatgttaaatgtggatcttttacaccacatcacagtgaacacactggggagacgtgcttttttggaaaactcaaaggtgctagctccctgattcaaagaaatatttctcatgtttgttcattctagtttatattttcatttaaaatcctttaggttaagtttaagctttttaaaagttagttttgagaattgagacacaatactaatactgtaggaattggtgaggccttgacttaaaactttctttgtactgtgatttccttttgggtgtattttgataagtgaaacttgttaaattttttgttaactaaatttttttcttaaaataaagactttttcac

SEQ ID NO: 108818 - DNA, 412 bp, Homo sapiens
tattcggacgagcttacatcggagcagatagcctctctccaggcggagatccgctacgagggcatcctctacaccatcgacaccgaaaactccaccgtagcccttgccaaagttcgatcctttggtacagaagacagaccgacagatcgtccaataccacctcgagatgaagtctttgaatacattatattccgtgggagtgacattaaagaccttactgtttgtgagccaccaaaaccacagtgttctttgcctcaagacccagctattgttcagtcctcactaggctcatcgacttcttcattccagtccatgggttcttatggacctttcggcaggatgcccacatacagtcagttcagtccgagttccttagttgggcagcagtttggtgctgttggtgttgctggaa

SEQ ID NO: 108819 - DNA, 419 bp, Homo sapiens
cctctctttaagaagaatccattctatatagcattgtgtaaaaatgcagagcagacgaagcagtcctgttaaggacaggtttatatatatatacgtaaaattcactcccggaacgacaatcggaggcagccaagggcaatgcacaaagagaacagagaagaacagtgattccacggacgcacaaagcccagtggcaggcatcctctccccatcctcgggcctgggtgatgaggctgtccacgttcagctccccgtccgccatcttgtcggcacagactctccttcccagcagcgggaacaagggcttctcggcggcggaggctgcggcgacggctcggcgttctctcaccagcgccgccgacggcaacaccagcagcgccactcactccgcacgtcccttgcgcgccgccgcgtcaccc

SEQ ID NO: 108820 - DNA, 585 bp, Homo sapiens
aggctcccactagggttgcgcctaagctgataaggaatgcttgtgctttttgtgcaaggcagagggacggcgtcactgattcaggagagggggctcagccaagctgctgggccatgggaggggctctacaggaagaggagggacacgccccttctcagactcctatgagctctgccccgggctccctggctgccagtctctgaaccaagttcctcccgggacttaagaggaccttggagggaacagtctgtgctggagggtgtgtacagccccacccactgcattcccactgaaccaggactggggcaaggagaggctcatcccaccctgtggagctggcagagagtgccctcagattctccaccacgacccaatccctaaacttgaaatcccccgccttcctgccatggagggagaatggggcccagtggcccctcaccactcaggcttgccccacagtgggtggcctggtacccagctcttccaggtcagtggagtagcaggggatcctgggacccccagggaagaatttccagaaagctgcaggcttggcctccattcctcgtgccaagcttggggtaatgc

SEQ ID NO: 108821 - DNA, 434 bp, Homo sapiens
gggggggcaagacgatctacgtggaagatgggcttaactcttttcatgtgaagcacaaaggcgccgacttcctggtgacggatgtggaaaatggaggctccttgttcaccaacaaggctgggaacctttctggggctgctgagcacttgcctgctgtgtcggagaaggacatccaggatctgaagtttggggtccagcacgatgttgatatggggattgcgacattcatccgcaaggcatctgaagaccatgaatttaggaaggacctgggagagaagggaaagaacatcaacattatcagcacaatctagaatcatgaggggcgccgaaggaatgaagaaggcctcggggccaatgatgggaactagctgagatccggagatggacccacatgtattcactgggacccaggcgaccttgctctcaagatgagg

SEQ ID NO: 108822 - DNA, 366 bp, Homo sapiens
  misc_feature (1)...(366): n = a,t,c or g
cnctcaattgcttaagggggggtctaataaccccaagggcgtcttacaccgtcggctcaagtattgaacaaaagaccgaaagtgctgataaaaaacagcatatggctcgagaatactgagagaaaattgatacggagctaacagatatatgccctgatgtactgtctcttttggaaaagttcttgatccccaatgcttcacaagcagagagcaaagtcttctatttgaaaacgaaaagagaatactaccgttacttggctgaggatgccgctggcgaagacaacaaagggattgtcgatcagtcacaacaagcataccccgaagcttttgaaatcagcctaaaagaaatgcaaccaacacatccta

SEQ ID NO: 108823 - DNA, 746 bp, Homo sapiens
acaggcgcctgctacctcgcccggcttttttgttgttgttatttttagtagagacggtgtttcaccatgttggtcaggctggtcatgaacttgtgaccttgtgatccgcccgccttggccttccaaagtgctgggattacaggcgtgagccactgtgcccggctgttcatctgtttttcaatacctttaagttcagtttcccttacaaagcccacttttttcttagtgggaatctcttgtaccacttaacacctacattccttaatttttaaagttaaaacacttatatactataaaatggacacatcttaagcatacagcttgatgaagatttacaaagtaaacatgccagttgaaacaccactctgatcaggatgtggaacataaccagcactccagaaatctctctgccatcattaccaccactggttatcctagccactcttctgacttgtatcaccatagataggttttacttgttttgaagccatctataaatggaatcatggaagtttgggcttccctgagagcagatcttcagagaaaaaaaacttgagtgcagtagtttatttggcgtttggctccaggatgcaggagtgggaaagatggtagagagacagaagaaaaatcaatagaaaggtattacggaggttggatatataatgcttcccagaattgtctgactgaacaggaggctgaaatatttatccgctggctcctgtttccaattgattgagggatgcccc

SEQ ID NO: 108824 - DNA, 399 bp, Homo sapiens
tgacctccgtcaggaccgcagcaaggacatgtgtacccaaggcagccatacgggacccaaagcccgcagcggtgcccgatgaccatgcagggccgggcgcaaagggccatgggcggcctctcttatacacagcagattcctccttatggacaacaaggccccagcgggtttgggcaacagggccagactccatattacaaccaggaaagtcctcaccctcagcaggagcagccaccctacttccagcaaccaccggaccagacccctcatgcccaacctttgtatcagcagcagccgctgtctcaaccaccacagctccagtcctatcagcctacatactgccagcagccattccaggctccacatgagtagaccccggctccatacccctcccaggag

SEQ ID NO: 108825 - DNA, 409 bp, Homo sapiens
  misc_feature (1)...(409): n = a,t,c or g
agcataataaaaagtctcccaataaagaaaaacctgggacccaatggcttcactgcagaattttacctactatttaaagaactaatgccaatcctattcatattcgcaaataaaaccannnnnnnnnnnnnnnnnnnnnnnnnnnnnnnnnnnnnnnnnnnnnnnnnnnnnnnnnnnnnnnnnnnnnnnnnnnnnnnnnnnnnnnnnnnnnnnnnnnnnnnnnnnnnnnnnnnnnnnnnnnnnnnnnnnnnnnnnnnnnnnnnnnnnnnnnnnnnnnnnnnnnnnnnnnatcattcacgtgaccaaatgagatttatctctaggatgcaaggatgattcaaaccgcccaaatcaatcagtgtgatatatcatgtcaacagaatgaaggataaaanctatatgattattt

SEQ ID NO: 108826 - DNA, 392 bp, Homo sapiens
aaacctgaagcataaatgttttcgaaattcacttgaaaataatgaaacattataaagcataatgaataccctagagagtgaagaagactttagaaaatatttttattacttggaaggatccaaagatgctctcctttgtggtttcagcacagattcaggtcagtgtccagaggggtacacctgtgtgaaaattggcagaaaccctgattatggctacacgagctttgacactttcagctgggccttcttagccttgtttaggctaatgacccaagattactgggaaaacctttaccaacagacgctgcgtgctgctggcaaaacctacatgatcttctttgtcgtagtgattttcctgggctccttttatctaataaacttgatcctggctg

SEQ ID NO: 108827 - DNA, 456 bp, Homo sapiens
  misc_feature (1)...(456): n = a,t,c or g
tcatcaacacccgaccccctgggggccaaaaatttttccccccccattccccaaataagtggggtttccagccaggggggggccccccgggggaattattgggcataattataataaggggggtatttagaacaaaggaagcccgctattttgggttaagggggttcttaacccctaaacttaaaaaacccttttggcccccccctttaaaattccgggggttccagggggtaaccccgcccccgggccccgtttgggttttccccccccgttttggggcccccaaccccttttttttgggtctccccttaaaacccccccaaacnnnnnnnnnnnnnnnnnnnnnnnnnnnnnnnnnnnnnnnnnnnnnnnnnnnnnnnnnnnnnnnnnnnnnnnnnnnnnnnnnnnnnnnnnnnnnnnnnnnnnnnnnnnnnnnnnnnnnnnnnnnnnnnngta

SEQ ID NO: 108828 - DNA, 377 bp, Homo sapiens
  misc_feature (1)...(377): n = a,t,c or g
cctgcagtgtgtcacccagtagcaggcatttgataattatttctctttttttttctttttgtttgnnnnnnnnnnnnnnnngggaaaaaaaaatttttttaatccccccgggggggacaaagggggcaaacctaaaaaaaggggaacccccccccttgggttaaaaaaaattttggccccaaccccccccaaaacggggaaaaaaagggggggnnnnnnnnnnnnnacaaattttttgtttttaaaaaaaaacggggtttaaccaaggggcccaggggggccttaaacctttgacccaaggggaacccccccccttggccccaaaaagggggggaattaaagggaaggccccccctccccggccaaaaattattttc

SEQ ID NO: 108829 - DNA, 424 bp, Homo sapiens
  misc_feature (1)...(424): n = a,t,c or g
ttccccccctcccccttaaaaaatttttttttcccccaaggccttaaattttttnnnnnnnnnnnncccaaaaggcccccccccaaaaaaaaggttttttttcaaaaaacccccggggggttttttttccccccccttnnnnnnnnnnnnttttttttnnnnnnnnnngttaaatttgggcccccccaagaatttttttaaagggccccccccnnnnnnnnnnnnnnnnnnnnnnnnnnnnnnnnnnnnnnnnnnnnnnnnnnnnnnnnnnnnnnnnnnnnnnnnnnnnnnnnnnnnnnnnnnnnnnnnnnnnnnnnnnnnnnnnnnnnnnnnnnnnnnnnnnnnnnnnnnnnnnnnnnnnnnnnnnnnnnnnnnnnnnnnnnnnnnnnnnnnnnnnnnnnnnnnnnnnnnnnnnnnnnnnnnn

SEQ ID NO: 108830 - DNA, 144 bp, Homo sapiens
cggacgcgtgggctcaaactatatgaatcctaggcttcaccattctagacatcaatcttttgaaagaatttatgactaagtcctcaaaagcaattgcaacaaaaacaaaaatcgacaattgagacctaattacactaaaaagct

SEQ ID NO: 108831 - DNA, 144 bp, Homo sapiens; identical to SEQ ID NO: 108830

SEQ ID NO: 108832 - DNA, 390 bp, Homo sapiens
  misc_feature (1)...(390): n = a,t,c or g
ccccgnnnnnnnnnnnnnnnaagggcgtttcgggttttcccggcctctttccaattttaaggccggggttaaataagccccggggcctttccctttaagcccccttttgaattttttccggggcccttttaacccccaagaaaaggttccccaactttaaaaaaacccggaaaaccccgcccggtttggccctnnnnnnnnnnnnaaaaagggccctaggaacaaagggaaccttggggacccccctcttgggggaaaagcccccccttaaagcccccgggggcaagggtcccaaagccccaaaaaccctgggggggaatttggccagaacccttccccgggggaaaacaggtttccaaaaaaagccctccaaaaggcccttcaaaattt

SEQ ID NO: 108833 - DNA, 367 bp, Homo sapiens
  misc_feature (1)...(367): n = a,t,c or g
ttctgggtcgacccacgcgtccgcccacgcgttcggggaagagaacaatttttttgaattatatgccagcgcttatataacgcgcgtgcccaaaagtattattgaaggactttgaaagacaaaattatcacattactggacaaggctgggatgcccactcttgccacttatattaaacattggactaaaaatcctacccagagaaattaggctagagaaagaaataaaagactttccgattacagagaagaacgcacaattatttctacttacagagaagatcatacatattgaaaagacttgacnnnnnnnnnnnnccctgttaaaactaatacttaaattcaggaaaggggcaaaatataaaacc

SEQ ID NO: 108834 - DNA, 398 bp, Homo sapiens
  misc_feature (1)...(398): n = a,t,c or g
cccacgcgtccgaannnnnnnnnnnnnnnnnnnnnnnnnnnnnnnnnnnnnnnnnnnnnnnnnnnnnnnnnnnnnnnnnnnnnnnnnnnnnnnnnnnnnnnnnnnnnnnnnnnnnnnnnnnnnnnnnnnnnnnnnnnnnnnnnnnnnnnnnnnnnnnnnnnnnnnnnnnnnnnnnnnnnnnnnnnnnnnnnnnnnnnnnnnnnnnnnnnnnnnnnnnnnnnnncactgatgaaagaaatcgaagaagacacaaaaatatagaaagatattccatgttcctggattggaagtatcaatattgttaaaatgtctatactacccaaagcaatctacagattcaaagaaatccctatcaaactaccaatgacattcttcacgaaaatagacaaaacaatcct

SEQ ID NO: 108835 - DNA, 408 bp, Homo sapiens
  misc_feature (1)...(408): n = a,t,c or g
atgaactctgctttcatttaagacgacgactcatctttttcccgctccccccccagaaatcccatttgcagaaaccctatgagattaacctgatggaggaactaactctgaagggagaaacccagtactacgcatgagggactgagcgccaaaaagtacactgcctcaacacacttttctccagggtaagaagtaggcttctgctgttgaatattatctctcgaggcccagtaaaacagaagatttcatcaattttcccaccgtcttcactgtataaaagttcgtagtgtttctnnnnnnnnnnnnnnnnnnnnnnnnnnnnnnnnnnnnnnnnnnnnnnnnnnnnnnnnnnnnnnnnnnnnnnnnnnnnnnnnnnnnnnnnnnnnnnnnnnnnnnnnnnnnnnnnnn

SEQ ID NO: 108836 - DNA, 453 bp, Homo sapiens
ttcccgggtcgagcgatcctttcgagcaaagaataataaggaagaaaaatcaacttaatttaccacatataaaaagaagtgggagtaagagaaattttcaggcaacaacatgttgtacttataaaaattcaaaagaccacagaaagaatcttagaattatagtgattggaagtcctagccagagcaatcaggcaagagaaggaaataaagggcatccaaattggaaaagaggaagtcaaactatccctggtttccgatgatatgactgtgtacctagaaaaccctaaagactcctccaaaagacttctgtatttgataaatgaattcagtaaagtttcagattacaaaatcagtgtacacaaaacagtggcactgctataaaacaaccagggtgagaatcaaatcaagaactcaatcccttttacaatagctgcaaaaaaaaaaaagtcgacg

SEQ ID NO: 108837 - DNA, 556 bp, Homo sapiens
ttttttttttttttggtagagacaggtctcactacattgcccaggaagtcgaggctgcagtgagccatcttcatgccactgtactccagcttgggaaacagggtgacactctgtctcaaaaaataaacataaagctaaattgagctactatcctaatgaatataatgtattaacttttctatttcttctcaatcacccattatgccttaaaaagtataagggaggaagggatgagaagaggaccctttgttggatcccagttaagaggacatggtccatagaagagaagagctgggccaacaggaattgggatatctctgtccacttttggcttcacctttagcctcttgcacatgtgtctattaagtcccctctagcccatctcactgcatctttgaaacagagagaacagaatgaacactcttccttcccaaccctaatgttgcaaacagattggatgctgtctgttttgagttttctggtcaaaggcatatgataaaaaacacatggtttacatgggtccttttgttaattacaagtatcagtgccaaatgga

SEQ ID NO: 108838 - DNA, 388 bp, Homo sapiens
  misc_feature (1)...(388): n = a,t,c or g
tctataatggggacaggtccccatcctatacccccatagaccggttctctcaatagatgaatacaaatagctctcaatttttaatttttatgggcaataatgcaaacatacnnnnnnnnnnnnnggaaagggagtttaatttttttccccggggggaggggaggggggcctttttaaactaagggggggccccgcccccggggtaaacccatttttctggcttgggccttgggggaaggggggacaaagggattccccccccggccccagcgaatttttggaattttaaaaaaaaggggggttcccccgggtaacccaggagggccttaacctaagaacctggggacccccccccttgggcccccaaaagggggggaataacgggcaa

SEQ ID NO: 108839 - DNA, 411 bp, Homo sapiens
  misc_feature (1)...(411): n = a,t,c or g
ccgccccccaaggttcaaaaatttttctgccccaacctccccaaaaaggggggttccggcgcccctcccccccgcccgggtaatattttgtttttttaataaaaaagggggttttcccatttgggccggggggtttcggactcccggcccccaggggtnnnnnnnnnnnngcccccccaaaagggggggattccagggggaggnnnnnnnnnnaacccgttcccccgtttccacccnnnnnnnnnnnnnnnnnnnnnnnnnnnnnnnnnnnnnnnnnnnnnnnnnnnnnnnnnnnnnnnnnnnnnnnnnnnnnnnnnnnnnnnnnnnnnnnnnnnnnnnnnnnnnnnnnnnnnnnnnnnnnnnnnnnnnnnnnnnnnnnnnnnnnnnnnnnnnnnnnnnnnnacgcgtccg

SEQ ID NO: 108840 - DNA, 392 bp, Homo sapiens
  misc_feature (1)...(392): n = a,t,c or g
nnnnnnnnnnnnnnnnnnnnnnnnnnnnnnnnnnnnnnnnnnnnnnnnnnnnnnnnnnnnnnnnnnnnnnnnnnnnnnnnnnnnnnnnnnnnnnnnnnnnnnnnnnnnnnnnnnnnnngaagaaaccctctttaaaaccccttaatgggttggaaaacgaaaaacctgcccctgaaaaaacacgggggccctaaggaaatgaagggcnnnnnnnnnnntgccttttaaacccaccgaaaaaaaaaccccaccttcccaaatttttgggaacaatttaaaaccnnnnnnnnnnnnaaattttatccccttaatgccccccaaaaaaagccggaaaaaacccaaattggcccccttaccttcccttttaaaaaacctaaaaagccgggaccacc

SEQ ID NO: 108841 - DNA, 459 bp, Homo sapiens
  misc_feature (1)...(459): n = a,t,c or g
ccgggcgcagggctcccggctataattcccgccccttgggagggccagggcggggggtccccttggggctcaaagttttaaagccccccgggccacaagggggaaccccggtttttcttaaaaaaccaaaaatttttggggcannnnnnnnnnncccgttattcccgcttcccgggggggggagggtggggaatccccttgacccccgggattaagggtttaatggggcccggctggccccctggccttttggcttgggggccaaaggggaactttgtttccnnnnnnnnnnnnnnnnnnnnntttatattatgcttaaacatttcttatgcagacttgaaaataaattttttaaaaactccttccttatatattattctccttaagaaactatctttatcacaataacctaacaacttttaaagtagctacgaaatcgtcgacccgggagattccggg

SEQ ID NO: 108842 - DNA, 459 bp, Homo sapiens
  misc_feature (1)...(459): n = a,t,c or g
tttcgtgcagaatttgagcatggaccttatgggcagaggaaacagcatagataaagtcctgaggcgagcgtaagcattgtgtatttgaataaccattgcgaggaacagtgactatttttctactagatgagatgtgtgggtttctcccatctaggcacttccttggagctgactagagaacagatacggcnnnnnnnnnnnnggaaacaaactccctttttttgccccggccggaggggagggggccaatttgggtttaatggaaccttccccttccgggttaaagggatttttctggcttaaccttccggggaggtgggattaaggggnnnnnnnnnnatgcccgacaaaattttggatttttttaagaaaaaggggggttccccatggggggcagggttgttctcaacccctggccttaggggaattgccggggttaaccttccaaaggggggggag

SEQ ID NO: 108843 - DNA, 268 bp, Homo sapiens
gtcagcagtactcttaaacgccaataatgttcaagctgagaaacacatcatcaagaatgcaatcctattaaaaatagccacaccccccaaaaaatgactaggagtatgtctaaccaaggttgtgaactatctctatgagaagaactacaaaataccagtgaaagaaatcagagacaactcgaacaaatggaaaagcatttcatgctcatgggttgaaagaatcaatatcaatgaaatgtgcaacgaaatcgtcgacccggaaagtccg

SEQ ID NO: 108844 - DNA, 445 bp, Homo sapiens
  misc_feature (1)...(445): n = a,t,c or g
nccccttgggtggccgaaataaaaaagccccccctcctcccccgggatgttgccccttttttaattcggccaagaagggcccaaggctttaatccccttcccggttataacaaaaatggttcccccctttacccccacccttttggagggccaaggtggggggttcccttagggtcagggtttcaaaccccccctggccccaagggttaattcccgcttttcccaaaaatccaaaaattactggggatggggggccgcccccgttatttccccctcctcggggggttaggccggaaaattcccaaaaccttggaaaccaaaagttccaataagtttaattccggcccctnnnnnnnnnnttggggcccaaaagaaacccccttttcnnnnnnnnnnnnnnnnnnnnganccagagtcaaacctaagcatcaatgcccatacgaaa

SEQ ID NO: 108845 - DNA, 218 bp, Homo sapiens
tttcgttaaatacaataaatataaccaaaacatggttatttgagatcagtaaaatggataagcctctaatatcaggaatgagaggttacatcactacagggtctccagatattaaaaggataatgagggaataatttcatgtccataaatttgacaacttagatgaaatggtcaaatttcttgaaagacaaactgccaaagctcactttaaataaaca

SEQ ID NO: 108846 - DNA, 457 bp, Homo sapiens
gtttgggaaatagtatgtcctaattacaaatggaatgcatataggtcttgttcttttgacaagagacatgcttttcaggcggctggagggaggaatatgcttatttccgtcagggctcttgcagtcttaatttatattactaaagttttgatcattgcttcctggtatatacaaagttttgtattgcctgcgcttggcttacacttcttgcttttataatataggactgtattttctgtcttagaaaaaattgcaaggttctagccatcaaacctttggtgctttcttttgttctcctagaatggtgaatggtgtgttgggaaacgccttggaaggtgtgcatgtggaagaggaagaaggagattaaacagaagatgaatctctggtagaaaattatgataacatagatggtatgtggagttgcatgtgacattctagagatgcgacgttgtatatt

SEQ ID NO: 108847 - DNA, 455 bp, Homo sapiens
  misc_feature (1)...(455): n = a,t,c or g
tttcgtcgtgcatctgctctctaagcaaactccttaaaatttctctcacttgaaaaagagactatgaaagacagctgagtcctgagattcaaatattcattttatgtactttaaataactccctttggagaaaccacagatagatactacnnnnnnnnnnnnnnnnnngaaaaaaaagtttctttttatccccagggtggaagccaaggggggaaattggggttaatggaaccccccccctccagggtaaaggggattctcggccccaaccccccgggaaagggggaataaagggggcgcctaccccccccgggcaatttttggatttttaacaaaaaagggggttcactggggtggccagggggggcctaaaactcgggcctcggggggaggcgcgccccgggccctccaaaggggtggggttatcggggggaaccatgggccccggaaaaaaa

SEQ ID NO: 108848 - DNA, 421 bp, Homo sapiens
  misc_feature (1)...(421): n = a,t,c or g
tttcgtatcgnnnnnnnnnnnnnnnnnnnnnnnnnnnnnnnnnnnnnnnnnnnnnnnnnnnnnnnnnnnnnnnnnnnnnnnnnnnnnnnnnnnnnnnnnnnnnnnnnnnnnnnnnnnnnnnnnnnnnnnnnnnnnnnnnnnnnnnnnnnnnnnnnnnnnnnnnnnnnnnnnnnntgggggcgaaaccccccctaaaaaaaaccccccaccccctggagggggggggcccccgggaggggtaaagtttttttctcccgggcccccgggaaaaatttttgggaacaaaaaccccaaaacccccgggggggaggggctttaaaaaaacagaaaaaacccccgggggcctttgggaaaaattaaccccctttttttaacctttttttcaaacgggttttggggccccgaaatccaagggggggaa

SEQ ID NO: 108849 - DNA, 441 bp, Homo sapiens
  misc_feature (1)...(441): n = a,t,c or g
gaccggacttcccgggtcgacgatttcggtctggaaaattggatactgatgtggatggacatgacattcattattcttgaagatataactagttgactgggattctgatgaaggtttgaaattatggattagatctttgtagaagtagtttaaagattgcaataagtgaaatcnnnnnnnnnnnnnnnnnnnggaaaagattcctttttttttccccggggggaagaaaaaggcaaaattttgggtgaatgcaannnnnnnnnnnngggttaaaaaaattttggttaaccccccccaaaacctgggattaccggcgggggaccccaaacccgggtaattttggttttttaaaaaaaacgggggtttctcatgggggannnnnnnnnntaaaactcctgccctaaagggactccccccctttggccccccaaagggggggan

SEQ ID NO: 108850 - DNA, 443 bp, Homo sapiens
  misc_feature (1)...(443): n = a,t,c or g
ccgggtcgactatttcgtatttgggcatgannnnnnnnnnnnnnnnnnnnnnnnnnnnnnnnnnnnnnnnnnnnnnnnnnnnnnnnnnnnnnnnnnnnnnnnnnnnnnnnnnnnnnnnnnnncgacaagtagagtgttcaagagacagagcttcagcagaagttgtcaggggcctagagataggaaaatagtcagaaacgaaaagggagaaaaaagacccaaagagagagagagaaacacatccaaagagtcaaagactcaaaacaggaaaacaaagatacagaggcaggagaaagggacctgaaaacaaagatccagagggtgtcagaaattcagagaaaaccccaaagacagaaatccacaaacagctggaaagagacagagacctagagatgcagataaataataacaggcagcactcatgtggtacttagtaaaaaatg

SEQ ID NO: 108851 - DNA, 436 bp, Homo sapiens
  misc_feature (1)...(436): n = a,t,c or g
ggcccggaattcccggngcgacgaaagagctgtgtgactgccaaaaatcctgcgtgagcaaatgcagcatcatctccatctgtgagaagccacaggaagtctgtgtggctgtatggagaaagaatgacgagaacataacactaaagacaggttgccatgaccccaagctcccctaccatgactttattctggaagatgctgcttctccaaagtgcattatgaaggnnnnnnnnnngcctggtgagactttcttcatgggttcctgaacctctgaggagtgcaaggacaacatcatttttttagaagaatataacaccagcaatcctgacttgttgttagtcatatttcaagggacaggcataagcctcctgccaccattgggagtggccatatctgccatcatcatcttctactgctaccgcgttaaccggcagca

SEQ ID NO: 108852 - DNA, 379 bp, Homo sapiens
agagattgcagtgagctgagataatgccactgcattccagcctgggctacagaatgagactctgtatctcaaaaaaacaaaacaaaacaaaaacacaacagtctgttctgtggaggccttgggcagatgctgggagctctgagcacagactggtccctctgttgggagcctcttcccttcatccctcctggttaacttgactcagcataaaggccatttcttctaagagcctgtccctgactctccaatcggggatgtgtctgttgtctcatagagtgcccaattcctgccaccatttgtcatttccattcgcaacatttctttcattgtttgtttttcagagcctgggtaacagaccgagattctatctcaaaaaaaa

SEQ ID NO: 108853 - DNA, 356 bp, Homo sapiens
  misc_feature (1)...(356): n = a,t,c or g
cagcccggccccgaaggaaaaatccggttttttctgaaaatcccaaatttaaccccgagtgggggcaaaagccttaaattcccgctatttaaaagggttaaaccggaaaattgccttagcctaagagggtgagggtgcaattaaccagtattaaatccccgcaagcccacctagggaactccctttccnnnnnnnnnnnnngttaaaagatacagatagggctctggggaaaatcaaagcaaaataagatagaaaatattgatcccatcctactttatgactctgcataacttgaaagtgacttttaaatagttaaatgggccaggcgcagcagctcatgcctaaagttccaccgc

SEQ ID NO: 108854 - DNA, 409 bp, Homo sapiens
  misc_feature (1)...(409): n = a,t,c or g
cctcgcagtctttcacagccatcttccacttttccaagcagaattattcctcagcagcctgtcccagccattttctgtggaggagcaggagcatattctctcgtgcctcagcatcgtcagcctctctctttgactatcagcaagccggggatcaagagggcctccatcaaagggcagatccggcttctccagccaccagccacgtcccctcnnnnnnnnnnnnnnnnnnnnnnnnnnnnnnnnnnnnnnnnnnnnnnnnnnnnnnnnnnnnnnnnnnnnnnnnnnnnnnnnnnnnnnnnnnnnnnnnnnnnnnnnnnnnnnnnnnnnnnnnnnnngaagggttggcgcataacggaacgcaggacacgaagcccagccccgggccccacgaaatcgtcgaccggggaat

SEQ ID NO: 108855 - DNA, 331 bp, Homo sapiens
ggtggggaggcaggaggatacctttcgtgttgggtggtggaaaagattccagcgggtgaggtgggaactgagcccaagcaaagcagcccaatctaccttctttctgttgcaccctacaaacgctctgaaagcagctgaagacagagttctccaagaaggaaccaaaggtcaagataatgctgagtctgccttacacccgcaggcttgctgggacccacgcagcccgagccccggcccgtttccttctcgggctggggcgctggatggagcaccggggtaggagggcgggctcccgcagaagtacagggccgggcggccaggctccacgaaa

SEQ ID NO: 108856 - DNA, 457 bp, Homo sapiens
  misc_feature (1)...(457): n = a,t,c or g
tcctgcggaccggccggaattcacgtcgacgatttcnnnnnnnnnnnnnnnnnnnnnnnnnnnnnnnnnnnnnnnnnnnnnnnnnnnnnnnnnnnnnnnnnnnnnnnnnnnnnnnnnnnnnnnnnnnnnnnnnnnnnnnnnnnnnnnnnnnnngggaaaagggattttgccctggcccaaagggggaaggaaaaggcccaaatggggcaaaagggaaacccgccccccggggtaaaaaaaattttccggcccaaacccccaaaaaaaggggaaaaaaggggccaaccccgaagggccgggaaaaannnnnnnnnnnnnnnnnngggnnnnnnnnnnnnnggggggttaaacggggggccaaaggggggtaaaaaaattggaaataaaggggacccccccctcggtgccccaaaaagggtaaaaaaaaaggccccccccggaaaatctcttttttttt

SEQ ID NO: 108857 - DNA, 426 bp, Homo sapiens
  misc_feature (1)...(426): n = a,t,c or g
tttcgtagctccagaagctcatcggcatctccttcggcagcctgcacgggctgcgcaccaagtgcgctgtgtccaacggcctcacccagcaggagatacggaccctggaggtgaggccactgaaggtctgagggagaactgacttgtcaggaactcctgttaaggagaattaacaaagtgtggttattaaaggagaactgagttgggagtcagacctggaggactgcacccttggttaagacattataccaccttgagtctggcctgttgactgacgatacaacagagaaatgcataatgtccactgaatttattaaagttccaaaatnnnnnnnnnnnnnnnnnnnnnnnnnnnnnnnnnnnnnnnnnnnnnnnnnnnnnnnnnnnnnnnnnnnnnnnnnnnnnnnnnnnnnnnnnnnnnnnnnc

SEQ ID NO: 108858 - DNA, 435 bp, Homo sapiens
  misc_feature (1)...(435): n = a,t,c or g
tttcgtctgggattttagcagtaatgctaacttctataggntntttttttcctttttaannnnnnnnnnnaaattttgggcttcccccaaattttccttcaataaaaaaggaatttaaacctttccctttttaaaatcctgcccacctattatgattttaaaagggggaaaagttaaaaccttttacagactttccccaccaaggccctggctgggaaagccccatttgtccccccccttgttttctcccccttcccgggggagtttaaaaattggggtggtttcccccaaataccccccaattggtccatttttaaacaccccctctcccccttaaaatccaaaaacccttaggaaggggccttaacctgggaggagggccaccaaaccccctcccaaagtaccaaaaaacaataatctggctggtttaaaacc

SEQ ID NO: 108859 - DNA, 440 bp, Homo sapiens
  misc_feature (1)...(440): n = a,t,c or g
tttcgtctagcagctgctcaggagcgagaacagagctccggagccgcacgcagcacaagtctggagccccaggcagccgaggaggcccacgcccacgcgctcccacttccgctccgggacccccgggacccctcttcaggaactcgggcagagtcgtcagccagctccagggaggtttgggcccgtcaggcttgagtcgagacctgcatcattcctgaagacaaaagcagcttccctttcctccacacttgaaaaggtcacccgcaacctgtccctccgggggacgcccggaaaaacatggatacaactcgggacttcctactagagaacccnnnnnnnnnnnnnnnnnnnnnaaaggaaaaaaattttggttttgcccccccnnnnnnnnnnnaagggggggaatttaagttaatggaaccttgggcctccgggtaaac

SEQ ID NO: 108860 - DNA, 433 bp, Homo sapiens
  misc_feature (1)...(433): n = a,t,c or g
tttcgtgggaagcccaggagtttgcccgtttttatgggcagtaggaagaaagatggtttaatagtgccaataaaacaactacctgcctactggtcaggtaatttggcataagctctatgcctacatatccagtataatccagtgggggccatccagtcccggtgggactctgggtgggtccacatggtttgcaactttggggatttactaaatggatttctttcttttcnnnnnnnnnnnnnnnnnnnngggaaaaaaaattccccttttttccccagcgggaatgcctgggcccaattttttttatatgggaggctcccccccggggtttaaaccattttttgtgcttaaccccccgggtttttgggaaaaaagggnnnnnnnnnnnnnnnngggaaaaattttggaatttaaaaaaaaagggggtttcccc

SEQ ID NO: 108861 - DNA, 383 bp, Homo sapiens
atcattgccagctgtctacgcaaggagtatgcagggaagaggaaaggctgtttttccaagaggaagaataagatagccacgagaaatgtctccttctgtgttagaaaaggttggccatagggatcttccacttctggctcagagccctcctcagaggttcctggttcctaatgagcattattctggaaaccacctcttggttcacatgcagacccagaggagaatgacaatgacagcttcctttgtatgtttcatttctaacttaaattaactcacctcacaaagaggagcctagtcacatctacaactaaaccataagctctctaataagatgaacttttgaagtaataacatttctattaaatgaacacaattgatttcct

SEQ ID NO: 108862 - DNA, 401 bp, Homo sapiens
  misc_feature (1)...(401): n = a,t,c or g
ctaaaggggtgggaaaacccaattcccaatatcaaaaagattgaatgaaccccctttttctccccatatcaaaatttcaatccaagataggttaaagacataaacatacccgccccaactataaactttctagaaagaaatataggggaacccctttaggatatagccaaagattttatgactaagatctcaaaagtccagaaaaataaaccaaaaatagataaataaagctattnnnnnnnnnnnnnnnnnnnnnnnnnnnnnnnnnnnnnnnnnnnnnnnnnnnnnnnnnnnnnnnnnnnnnnnnnnnnnnnnnnnnnnnnnnnnnnnnnnnnnnnnnnnnnnnnnnnnnnnnnnnnnnnnnnnnnacactcgatagtaaaaactagcggacgcgtggg

SEQ ID NO: 108863 - DNA, 433 bp, Homo sapiens
  misc_feature (1)...(433): n = a,t,c or g
cgctccggaaannnngagcgacccacgcgtccgctgtaatccatcttgagttgatttttgtgtatgatgagatatagggattcagtttatttcttctgcatatggatatccgatttccccagcagtatttactgaagaaagtgtccattttcaagtacatgttcttggagactttgctgaaaattcatcgactataaataagtgaatatacttatgaattctttannnnnnnnnnnnnnnnnnnnnnnnnnnnnnnnnnnnnnnnnnnnnnnnnnnnnnnnnnnnnnnnnnnnnnnnnnnnnnnnnnnnnnnnnnnnnnnnnnnnnnnnnnnnnnntgataagaattttttttggctattctggntccttggntctatatgactttcaggattgtgccctccttgtagcttgctgattttctttcgtaatact

SEQ ID NO: 108864 - DNA, 215 bp, Homo sapiens
gatatcgaattccttgctgcatggcgcgctgaaggcggctcttaacgaaattcgttatgtgtcgctgggcgaggcacagccggatgcctataaagacaaagcgcgtaaggcagcgattgataacgtgattcatcaggcgcagtaactggcgatcggctttcatcgtaaactgagtccggtatatagcgtgcgctaccatgtttcaaactatcagc

SEQ ID NO: 108865 - DNA, 414 bp, Homo sapiens
  misc_feature (1)...(414): n = a,t,c or g
cttgggaattcaggcagcctttcacaggcacgcccatgcatatctcctattctaacggcccctgacctctcccttttggatcctaaactgtgtctctggtctgaagactgggaaggagcaatttctcaatttatctttctactgtggatgctttcctacgccctgaggcacatgaagtcagaaaggaagggcagaggggcaagtaggcacagtaagggaattttcttttcnnnnnnnnnnnnnngaaaaaaaattttatttttgccccccgggtggaaggcaagggcaagaatcccccttctgggttaaaggaaattttctgccttaacctccccaaaaattggaaataaagggccccgccaccaccccccagttatttttgtttttttaacaaaaaaggggtgtcacccgggg

SEQ ID NO: 108866 - DNA, 447 bp, Homo sapiens
cccaaacgtagcagcaccactatggaaactgtgtatttataaaaaacaataaaaaggcatatttcttctcttaactcatttgaaaagcagttctataaaacaatatgtattcatgtattgttgggtctataacatataggaacgtaatttgctaataattgcacaaaggatggcagtaggggcaaagctgtactggatataggaaatgaatccagataattcatttctggattcttgaatctacaggaagaaagagaaatagcatttttttttttttaaggttaacataaggctgggcgcagtggttcacacctgtaatcccagcactttgggaggccgaggcaggcggatcacctgaagtccaggagtttgagaccagcctggccaacatggtgaaccttgtctctacttaaacctacaaaaaaattagctgggtgttgtggtggg

SEQ ID NO: 108867 - DNA, 394 bp, Homo sapiens
  misc_feature (1)...(394): n = a,t,c or g
cggacgcgtggggtttttgccagaacatgtcttggtaccttgtgaaagcaggctgcccttgttcttgagatagactttaaaatgaaccagctctgnnnnnnnnnnnnnnnnnnngggggcgcccgtttaaagggtccaagtttaattacccctgcttgccactgtaaaatttttttattggggcccctaaattccaatcatgggcccgcttttaaaacccccgggactggaaaaaacctggggttacccaaattaatacgctttagacaaagaagncctctgcctttctacccttatcagatgcatcgacccgcttggctattactttagttcacatgagcccagggatcatgcaaagaacgctctcctttgccgaagtgtccgcactggaggg

SEQ ID NO: 108868 - DNA, 450 bp, Homo sapiens
  misc_feature (1)...(450): n = a,t,c or g
ngcctggaggcatgactcttggctacactcaccaggaatttagtcaattcaagttggaattggaggggacaagaaatgcaggcaggctgacactccaggtgagatataataagccttgaatgggagctagacacagaccttacacccttcataaaaatgttcttaaaatggaccacagacctaagtgtaaaatgaaaaactataaaactcctgtaaaatagcataggagaaaatctggttgacctagggtttagcaatgactttttagaagcaataccaaaagtacaaccaatggaagaaagaatagattaactgaacttcattaaaattaaaaatttctaccctgtgacaatgtaaaaagaatgagaagataagccacagactgagataaaatattagcaaaggacattctgatagagaactttnnnnnnnnnnnnnnnnnnnnnnnnn

SEQ ID NO: 108869 - DNA, 481 bp, Homo sapiens
  misc_feature (1)...(481): n = a,t,c or g
cccgcaaattttgcccccccgggttcaaagattttcccgcccccacccccccaagaagtaaggattaaagggtggggnnnnnnnnnnnagccaattttgtttttttttataaaaaacggggtttccccattttggccaggggggttttaaatccctgcccccaggggatnnnnnnnnnnngcccccccaaaaggttgggattccaggggggagcccccaaggccgggcggannnnnnnnnnnnnnnnnnnnnnnnnnnnnnnnnnnnnnnnnnnnnnnnnnnnnnnnnnnnnnnnnnnnnnnnnnnnnnnnnnnnnnnnnnnnnnnnnnnnnnnnnnnnnnnnnnnnnnnnnnnnnnnnnnnnnnnnnnnnnnnnnnnnnnnnnnnnnnnnnnnnnnnnnnnnnnnnnnnnnnnnnnnnnnnnnnnnnnnnnnnnnnnnnnnnnnnnnnnnnnnnnnnntcaccgggaatccggaccggtc

SEQ ID NO: 108870 - DNA, 420 bp, Homo sapiens
  misc_feature (1)...(420): n = a,t,c or g
cagtaatataagagacagcttagaaagaaactgcaatatagaagaaattgaatcagtaattaataactttccgaaacagaaagtgccaggtccagatgggctcactggtgaattctactaaacactttaggaagaaattataccaattctctacaatctctttcagaagagagaaactgaggatatacttcctaactcattctacgaggctagcatcacctttcctaacttattctatgaggctagcatcaccttaaccagacatcaccagaaagaaagactacaannnnnnnnnnnnnnnnnnnnnnnnnnnnnnnnnnnnnnnnnnnnnnnnnnnnnnnnnnnnnnnnnnnnnnnnnnnnnnnnnnnnnnnnnnnnnnnnnnnnnnnnnnnnnnnnnnnnnnnnnnnnnnnnnnnnnn

SEQ ID NO: 108871 - DNA, 465 bp, Homo sapiens
  misc_feature (1)...(465): n = a,t,c or g
ccgggtcgacccacgcgtccgnnnnnnnnnnnnnnnnnnnnnnnnnngcgaggcatgagcagggccctccctctgaaagctctgagaaaggatctgtcttcacctctctcagctccgggtggctgctagcaatccttggtttgtagatgtgtcactccagtttctgcctccattgtcacgtagctgtcctcacattcacatggccnnnnnnnnnnnnnngaaaaaaggtctactttttttccccagcccaaagggccgggggggaattggggttaattggacccttgtccccctgggtggggggaattttttgccccaccccccccaaacaaaggggcccccctgcattccccggtaattttttgaaattttaaaaaagaacaggggttcccaatgggggcagggggggggttaatcccggggcattaaaaacccccccccaaccccccccaaagggggggataa

SEQ ID NO: 108872 - DNA, 417 bp, Homo sapiens
  misc_feature (1)...(417): n = a,t,c or g
gcccacttttgaggccagtgcccccccaggggccccccgagactaaaataatttttcccccccaaacccccaggtaggtttgggctccggtggcagnnnnnnnnnnnnnaaaaattttcggaatttttggaaaaaaaagggtttttccaatttgcccaggcaatcctcaaccttttaaaccaaaaggttttccccccccggccttttcaaaagctgggaattccagttatagccccccatccccagccccatttaaaccnnnnnnnnnnnnnnnnnnnnnnnnnnnnnnnnnnnnnnnnnnnnnnnnnnnnnnnnnnnnnnnnnnnnnnnnnnnnnnnnnnnnnnnnnnnnnnnnnnnnnnnnnnnnnnnnnnnnnnnnnnnnnnnnnnnnnnnnnnnnnnnnnnnnnnnnnnnnnn

SEQ ID NO: 108873 - DNA, 428 bp, Homo sapiens
  misc_feature (1)...(428): n = a,t,c or g
gtctgtgtggaattcgaggaaaaggcagggggcctggatgatgaagaggaggccgagctcgttccctcttaggtgctcatgcaccaggccatccacaccatcgagttctgcctgggctgcgtctccaacaccgcctcctacctgcgcctgtgggccctgagcctggcccacgcccgtgagtgacctggccaccgacggctggccccagctcctggcttctcacataccgctgctggctgggcgggttgcttnnnnnnnnnnnnnnnnnnnnnnnnnnnnnnnnnnnactgtccaaggaggtccctcgctggccccccgtgcagggagggcttcaggctgcggcaggtaggtagggggctggcaggcacccacttgccgttggcccccactgtctcctttgcttgcagagctgtccgaggttctgtggg

SEQ ID NO: 108874 - DNA, 588 bp, Homo sapiens
  misc_feature (1)...(588): n = a,t,c or g
taaagaatgctggcataggccaggagtggtggctcacgcctgtaattccagcaccttgggaggtccacgcgggcggatcaccaggtcaggactntaagacctgtaaacacgagtttacactcaagactggacaagggtttccataggacaaaagacaccattgtgtgggggattccagtagaaagaagaacacaaggagtttgccacggccatgtgggtgagaatcttgtgtgtgggcctcatttgatgctcagtcaagatgggaaagatattatggaagaacagaatggcattggccagagtccccaccccagtctgcaaaggaaagatggtttttatggccacttcccctatggttcttaggacattgttctgaaaagacatggggagggtttccaggtggtctgaactgaagagctggctatgtctgtgatgagatcagcactcttagcttttcatcttggaaagttattttggtctttcctttacccgaaatagagacactgtcatattccacagaaggggctcaacatggagaacatacccctgacaccagtttcacatttgactggtttttgggtatttatt

SEQ ID NO: 108875 - DNA, 299 bp, Homo sapiens
gggtggaattcaaaaaacattactaaacaagatttctagagggaattaacaaaccagtgcttatttaccaataaactaatacgctaattgcaggaaccctgattaaagcaggcccctgttaacacaagattcttaggatatacttggaaacaggtgcattggaaaccactgtactgagaagtttatgggctcaagactgaattggaagctaggcgtggtcgctcatgcctgtaatcccagcactctgggaggctgaggtggaaggatgagttcaggagttcgagaccagcctgggcaac

SEQ ID NO: 108876 - DNA, 448 bp, Homo sapiens
  misc_feature (1)...(448): n = a,t,c or g
tgcgccagagcggtggaattcgtcagggaaaagtaagttttggacttccatttagagccatttataggtcagcaatcttttgtctctgtgtcttctttctgccctgggcaaccggggcatcctagtcagtctctcttcatctgcataccactttaaagagcccaggggtcttccaagtacagtcactactaagaaaatgtcttcagtaaannnnnnnnnnnnnnnnnnnngaaagggagcctccttttgccccccaggctgaaaggtaggggcccaatctcacctcattgaaggctttgcctccggggttaaccccttcttcttgcttaagcctccaaaggagttgaaattaagggccccggccacctggccgggttattttttttggttttttaagaaaaaacggggtttccttgtttaacccgggaggggttaaacccccggacct

SEQ ID NO: 108877 - DNA, 427 bp, Homo sapiens
  misc_feature (1)...(427): n = a,t,c or g
nnnnnnnnnnnnnnnnnnnnnnnnnnnnnnnnnnnnnnnnnnnnnnnnnnnnnnnnnnnnnnnnnnnnnnnnnnnnnnnnnnnnnnnnnnnnnnnnnnnnnnnnnnnnnnnnttaattctctctcagttttatttatttatatagactcaatacaatcccaatggaaatcccaccaagccttaagaaattgatacgctaattctaaaatttatatggaaatgcaaagaatctacaaaagccaacacaactgaaaaataagaacactagtggaacacattagtcttttttttcctggaaacctgatttttctagagacaaatgatttttgacaaaggtacaaaggcaattcaatgcagaatggacagtcttttcaataaatggtaaagaagcaattgaatatccatgtgccaagaaaataagccttac

SEQ ID NO: 108878 - DNA, 412 bp, Homo sapiens
  misc_feature (1)...(412): n = a,t,c or g
acagtgcggtggaattcgctccaagagggaagacaatcgctttgccaaacacggcagggcatctggattggcctgggaacctcacccgccctcccaggcccttcgggctcttttcggtcccattaggaggagggggagggcggcaggtgggaccgggcacaggcctagtcgtgcgacaggagaagggaaggaagggccggccccagctgggtcctccttgcgtctggcctgtgccggacgcccccgactccgagtgatctcgggccggtccccgggggagtccagcttctcgcgccaggggagttctcagccccagggcagtccagggattaggcggaagggggcacgcagccacctggccggggcagggggagctgcgaggagccnnnnnnnnnnnnnnnnnnncttgccg

SEQ ID NO: 108879 - DNA, 301 bp, Homo sapiens
caagtatacctattttgctgtcttaacctggtcattgtttttataattttaacttaaatttttatttccagattttttttcaaaatgttctggccaattctggtagtcttttgttcctttaccagactttaattctgtcttttaatatattttatattctctatctgataattcaaatatctatagtctttcagagtgtgattctgtagtttattttttctaactcttattcatggtggtatggtttcatggtgtgtataatgacttttgagggaaagaagcagacatgtgctcatgttaa

SEQ ID NO: 108880 - DNA, 440 bp, Homo sapiens
  misc_feature (1)...(440): n = a,t,c or g
gagcggcggaattccttgttctctttgtctctggtattttttgtttcctcccaactgtctgctctctgcttaccccgtgcctatgtggccccaccttgccttggggcctccctcaggactctgtctcatggtgtcagtatttccctgtcgctgaatagctgtttcctccacatatgtattcatccaagtctgtgtctccctagcagcctccnnnnnnnnnnnnngaaggagtttttctttttgccccccggggggaggggcagggcccaattttgggctcctggcaccttcgccccccgggttaaaggaaattttcgggctacaccttccgaggaggggggaataaggggnnnnnnnnnnnnnnnnaattaatttttgtttttttaaaaaaaaaggggtttaccccgggggggcggggggggttaaaatcccgaacctta

SEQ ID NO: 108881 - DNA, 437 bp, Homo sapiens
  misc_feature (1)...(437): n = a,t,c or g
aattcgannntggacacaaagcttacgctaagctgcctgatcagtggacaggtagctgtgtaattggcaccattaagccatctttcttcttactgtccataaagacaggtgaacttcggggcttcccagtctatgcttcccggnnnnnnnnnnnnnnnnggagaaaccgaaccatacccttaggtaattaaaaaaaggataaagggcctcctnnnnnnnnnntcatacattattagggcccccccatttgaaaacaaaagggttaagggggatatggaacccccatttacatgctaaagcaaataaaacggtaacaagctgtttaaaaaataataacaaaaaaaacgggttaacccttgactgttcttgcccggcaagaaactcaaataaaaaaggctttctatcaaaaaaaactagcttttgattacttgctagaa

SEQ ID NO: 108882 - DNA, 465 bp, Homo sapiens
  misc_feature (1)...(465): n = a,t,c or g
caaatagaacaatagatttaatttgtaagactgaggccagtcctaaccatgtgtattttggaaaggaaaaaaaagnnnnnnnnnnnnccccagccaggtgatcagggttttatcaggtcactcctgttaagaaacacaaagacagaggaagaattctgggaaaatgatcagaaggaaaggtgagaagctaaaaagcaggtaatttgcagtatagtttatttacatccttccgtaaagcagagtgcattaaatacaagaaagcatcagggtgatctaatgggtttgtataataagactacttcattcaacagcagcagaatacacatttttcttaaacttacactgaaccaagaaagaccatattctgggtcataaaaaatatcttaacaaatttcaaataacataaatcatagacagtatgctcttagaccacacagaattaaactagaaagaattccaccacac

SEQ ID NO: 108883 - DNA, 440 bp, Homo sapiens
  misc_feature (1)...(440): n = a,t,c or g
atttaatttgtaaggctgagccacgtcctaaccatgtgttttttggaaaggaaaaaaaagnnnnnnnnnnnnnnccagccaggtgatcagggttttatcaggtcactcctgttaagaaacacaaagacagaggaagaattctgggaaaatgatcagaaggaaaggtgagaagctaaaaagcaggtaatttgcagtatagtttatttacatccttccgtaaagcagagtgcattaaatacaagaaagcatcagggtgatctaatgggtttgtataataagactacttcattcaacagcagcagaatacacatttttcttaaacttacactgaaccaagaaagaccatattctgggtcataaaaaatatcttaacaaatttcaaataacataaatcatagacagtatgctcttagaccacacagaattaaactagaaagaat

SEQ ID NO: 108884 - DNA, 498 bp, Homo sapiens
  misc_feature (1)...(498): n = a,t,c or g
agagtggcggaattcctggagcacccagacatataaagcaaatattattggagctaaaacaagagatagnnnnnnnnnnnnnnnnnnnnnnnnnnnnnnnnnnnnnnnnnnnnnnnnnnnnnnnnnnnnnnnnnnnnnnnnnnnnnnnnnnnnnnnnnnnnnnnnnnnnnnnnnnnnnnnnnnnnnnnnnnnnnnnnnnnnnnnnnnagagagatagacatcaatnnnnnnnnnnnnnnnnnnnnnnnnnnnnnnnnnnnnnnnnnnnnnnnnnnnnnnnnnnnnnnnaccaacaaacattagacataatgcttcagtatgtcagttgcatttttcaactctagaatttcttcttgattcatttagaaataaatggaactaatagatatttacagagcctttcatataatggctgaagaatagacattcttttcctcagcacatggatcattctcaaggatagactgtgtatgttaggtcacaaaacaagtcctaaaa

SEQ ID NO: 108885 - DNA, 489 bp, Homo sapiens
  misc_feature (1)...(489): n = a,t,c or g
ctcccaaaaaaattaaaaccccccttggccataattttccccccgccgcttgggaaaaaacccccccccaaaaagttccctttttttacaaaaagttttccaccctccccccaaatttattttaaaataaagtttttccaaacaaaagcttttgatttttttcccccaaaaataacctaatggcccgggggggttnnnnnnnnnntttataccccccctttggaaggccaaggaaacgggtccccttaagtcccaaagttcgggccccccccgcccaccatgttaaacccccnnnnnnnnnnaatttccnnnnnnnnnnnnnnnnnnnnnnnnnnnnnnnnnnnnnnnnnnnnnnnnnnnnnnnnnnnnnnnnnnnnnnnnnnnnnnnnnnnnnnnnnnnnnnnnnnnnnnnnnnnnnnnnnnnnnnnnnnnnnnnnnnnnnnnnnnnnnnnnnnnnnnnnnnnnnnnnnnnnnnnnnnnnngaattcc

SEQ ID NO: 108886 - DNA, 368 bp, Homo sapiens
  misc_feature (1)...(368): n = a,t,c or g
nnnnnnnnnnnnnnnnnnnnnnnnnnnnnnnnnnnnnnnnnnnnnnnnnnnnnnnnnnnnnnnnnnnnnnnnnnnnnnnnnnnnnnnnnnnnnntggtattttagatcacanannnnnnnnnnnnnnnnnnnnnngggggggccctttaaaaagaccaaattttaagtcccgggggagggaaagaaaaaattttttaaagggggccccaaaataaaaatccggggccgggttttaaaaacgggggagggggaaaaacccgggggttcccaaattaaaaccccttgaaaaaaannnccccnnntnggagaaacgacgcatccactactgcgattaccctggatgcacaaaagtttataccaagtcctct

SEQ ID NO: 108887 - DNA, 407 bp, Homo sapiens
  misc_feature (1)...(407): n = a,t,c or g
tgaaagactcaggcccaggggcacctttgttgttcccccaactccactaaaaggtggcagcaaaaatgctcccccgctcccggccctgctgctccacagccacccctcactgctgggtaaggcttcccaggcaacagcaggaggggcccgatggtgccacactgagtacagggcagacgcgccccacagtgaccctgccctctgacccaccccggcctcctcttcctcactcccacttcttgaggttgcacccgaaacgtcctgccctgacatcctcaggtgtccttaacatctgacaagaacagacagccaagggtacttgnnnnnnnnnnnnnnnnnnnnnnnnnnnnnnnnnnnnnnnnnnnnnnnnnnnnnnnnnnnnnnnnnnnnnnnnnnnnnnnnnnnnn

SEQ ID NO: 108888 - DNA, 440 bp, Homo sapiens
  misc_feature (1)...(440): n = a,t,c or g
tttatgtttccggctcgacccatgcgtccgggacatcaccctcccagttgaagagctaagtatggatatcctccccaccccataacaccccctctgttgcgcatccccctgcctcagggaagggagggggtcagtcctatgctccatcctgggttccccatcccttcccccatcaaatttcagtatccacccccacccccaagtgccttcgctctgtttttataccctgaattggaggtttattttttaatatatattatctacgaacaacaaagacataatnnnnnnnnnngggaaatggagaattttaaacttaacgccaaccttttaaactttctatgggggcctttctgttgagaggcgtgctttgtataacaatactgaatgtcaacctcatttgtctttagttcccagcattttcgtgccggggggttgtgtag

SEQ ID NO: 108889 - DNA, 491 bp, Homo sapiens
  misc_feature (1)...(491): n = a,t,c or g
caagtttgatgaaagccaggaattttagcatccaagaggctcaataacctccagataggataaactaaaaaagcccccacaccattaaaatcaaactgtcaaaagacaaagncaaagagataagcttgaaagcagnnnnnnnnnnnnnnnnnnnnnnnnnnnnnnnnnnnnnnnnnnnnnnnnnnnnnnnnnnnnnnnnnnnnnnnnnnnnnnnnnnnnnnnnnnnnnnnnnnnnnnnnnnnnnnnnnnnnnnnnnnnnnnnnnnnnnnnnnnnnnnnnnnnnnnnnnnnnnnnnnnnnnnnnnnnnnnnnnnnnnnnnnnnnnnnnnnnnnnnnnnnnnnnnnnnnnnnnnnnacttgttacatgcaaacggtcctgaataagactctcagccaatttcttataaactttggaggctagaaggcagtgggctgatatattcaaagtgctaaagaacaacaaaaaggccggcgcgtggacgacagggttct

SEQ ID NO: 108890 - DNA, 630 bp, Homo sapiens
gaatactgggattacgagtcacatgcggaggaatggtgaattcatgatgactaccacctggttcaaaaatgaggggcgggaaaatacagggaagtatttgaagccatcaacatcacatataatgaacaagatgttgctataattctcaagccagtaaaaaagaagaagattacgcgtgaaataaagattttggagaatttgagaggaggtcccaacatcatcacactggcagacattgtaaaagaccctgtgtcacgaacccccgccttggtttttgaacacgtaaacaacacagacttcaaggtataatatataaccaactgtttcgggctagtgggtttttagaccacatagcctttggggatgatgctgttagaagagcttgcttcgcatttgtttttaaaaagcttttcatccttacagtgcaaattttaagatagaagaactcctatataagcagtgcccactttctgcatcttgatattttgcccatttgtttaatgttctttttaatgaccaacacattgacttctcactacttagttgacagtttctgctgatgtccaacctaatgaaggcagtaacacacgttcacttaggatctggccatatggcaattcgctttaaaca

SEQ ID NO: 108891 - DNA, 447 bp, Homo sapiens
  misc_feature (1)...(447): n = a,t,c or g
gttcagagtgaaacgaaaagcatcctctacctgtcccaggaggagctgtgggagctgctggagagggtgcttttcgtttcactgggatccgggttcagagagacgtttttcctcacaagcagaaggtaacaaatttcatgctctccccaaattctgtctgattttgccttgtggtgatagattgtcatgaacacaatgtcctctggagaaatctattgacagaaattggtgcagagataacaacgctaatgtaaaacacagaatttacagaaaaatagagaaaataaacacatttgttttcctcagaaaatgnnnnnnnnnnnnnnngggcgccctttttaaagaaccaaactttacatgcgccgccatgcaccgttaaannnnnnnnnnggggaacctaaaataaaattcatggcccggggttaaacacgggagaagggaaaaacg

SEQ ID NO: 108892 - DNA, 400 bp, Homo sapiens
  misc_feature (1)...(400): n = a,t,c or g
nnnnnnnnnnnnnnnnnnnnnnnnnnnnnnnnnnnnnnnnnnnnnnnnnnnnnnnnnnnnnnnnnnnnnnnnnnnnnnnnnnnnnnnnnnnnnnnnnnnnnnnnnnnnnnnnnnnnnnnnatatggtggcttgcagtactcaggaggctgagatgtaggacctgcannnnnnnnnnnnnnnnnnnnnnnnnnnnnnnnnnnnnnnnnnnnnnnnnnnnnnnnnnnnnnnnnnnnnnngggccagccgggccgggacctaaggaccggaaaaaattcccggtggctacgggggcggggaagccttatgacctgtggaaaggttctgggggccaaaagcccaaatggaggctcagggggttaaccatcaggggggggtaaggggttcgggaaaaaaattcct

SEQ ID NO: 108893 - DNA, 415 bp, Homo sapiens
  misc_feature (1)...(415): n = a,t,c or g
ttccccccagcggggggacaaggtgggaattacaggtccgtgtacccttggccccccaggggtaaaggttcccccccctttagccccccaggaaattggggccccagggggcccccccccaaaccaaggaaatttgggattttttggaattaaaggggccggggggggtttttaaccccgggggtcaggaaatttccctgcccgggcccccccaaaatttcccttttcttagggtataaggggaaaacccctttnnnnnnnnnnnataacnnnnnnnnnnnnnnnnnnnnnnnnnnnnnnnnnnnnnnnnnnnnnnnnnnnnnnnnnnnnnnnnnnnnnnnnnnnnnnnnnnnnnnnnnnnnnnnnnnnnnnnnnnnnnnnnnnnnnnnnnnnnnnnnnnnnnnnnnnnnnnnnn

SEQ ID NO: 108894 - DNA, 279 bp, Homo sapiens
  misc_feature (1)...(279): n = a,t,c or g
ccnnnnnnnnnnnnnnnaaggaagaatgagtaagttcactgccaaccctggagcccagaagaaccaaccacagtcagtgagtggtgacaggagggagtaaggnccacctcacccacactccccccaaggaattcctcccaggagacagaggccagggggtggctgcagtcaggcctagcgactggggacccagaatgttcccccaacaaggtggggagggcccgtgacccctcctccagcacccgcagcctccagatgcacgcagaagccacacagacg

SEQ ID NO: 108895 - DNA, 387 bp, Homo sapiens
  misc_feature (1)...(387): n = a,t,c or g
nnnnnnnnnnnnnnnnnnnnnnnnnnnnnnnnnnnnnnnnnnnnnnnnnnnnnnnnnnnnnnatgggataaattttttttaagtatattaaaattattcccttatgtttataatatacatttttagggttgtattttctttttaataatatcatttgtgtagggatctttgcacattgcctgatgtagatttaagaatataatctatatgacaaagaaaaagtcatttttctgtattccaacaatgaacaagtggaatttaaaattaaaaacacagtatcatttaaattagcaccaaaataatatttaagtataaatctagtaaatgtttctctgcatgaggagaactgtaggattctgatgaaagagattcaagaacgctgaaatg

SEQ ID NO: 108896 - DNA, 439 bp, Homo sapiens
  misc_feature (1)...(439): n = a,t,c or g
aatgtaccggtcgacccacgcgtccgctttatgtcttgtagagcataaggaaacccagcccagagccacgagctcagatgaggagggctgctagcagcgatcaacttagggacaatagcccgcccccagcattcaagccagagccgcccaaggtacgtggctgggaagcccaggatgggaaggaagaggaagcagatgcctctgaagcctcctggacggccagggaggagcatgcacactgagatggtgtttaattacggttctgactcactgtgttctctattagagcctatcttttggcctgttgggtgaactcccaaattagggaagggcaaaaaggaaggaaaggcaatattaggagagcatatgattttaggactgttagtgtttatttaatttactcttcttgttaaaaaaagnnnnnnnnnnnnnngggggg

SEQ ID NO: 108897 - DNA, 441 bp, Homo sapiens
aatatattttttttatttttagagatggggcgacagctctgtctcccaggctggagtgcagtggtgctatcatagctcactgtaaccttgaactcctgggctcaagtctcctcccacctcagccttccaaagccctggaatcataggcatgagcaaccatgcctgtttagcttttttcatcttaaaatatctatctggttggcattctaaacttaaaactgcagattttgtcctgtcccaaacaaaactcaggatttacctgggactcctaatcccgcacctcccatcaccatgttgtctgggggcttcaccacctgaatctgaaatccatcatctttactgctcccacctctagtccaagccaccaccatttctccctggataactgggccatcttcgctgttttctcccataaagtcccattctccacctagcaaatgt

SEQ ID NO: 108898 - DNA, 448 bp, Homo sapiens
  misc_feature (1)...(448): n = a,t,c or g
agggggccccaaaatgtttattaaaggttcgccgttcaatccctcccaaaaaccccccaaagtggagttttttccaccaaaacttgttgggaggtattgnnnnnnnnnnnnnnnnnggactccagtaagttcattctaaatgtcagctggtggattcaagacctgaacccaagacctgacaccataaagatcctaggagcaattcctctggacgtccgccaagacaaagaatttgtgactaagtgctcaaaagcaaatacagcaaaaccaaaaacannnnnnnnnnnnnnnnnnnnnnnnnnnnnnnnnnnnnnnnnnnnnnnnnnaatcaacagccagtctacagcctgggaaaaaatatatgcatattatgcatcctacaaaggactgatatccagaatctgtgaggaacttacacaactcaaccggacgcgtgggtcgacccggn

SEQ ID NO: 108899 - DNA, 397 bp, Homo sapiens
  misc_feature (1)...(397): n = a,t,c or g
taaaactgttagaactaataaacaaatctaagaaagttgcaggatattaaatcaacatacaaaaatcagtgtttctatataccaacagcaaactgtctgaaaaagataatgaacaaaactatcccatttctattttttaatagaacacaaaatacttcggaataaatttaatcaaagaggtcaaagatctgtacatattaaactatcaaacattggtgaaagaggctgggtgggctgggcgcggtggctggctggacacagtggctnnnnnnnnnnnnnnnnnnnnnnnnnnnnnnnnnnnnnnnnnnnnnnnnnnnnnnnnnnnnnnnnnnnnnnnnnnnnnnnnnnnnnnnnnnnnnnnnnnnnnnnnnnnnnnnnnnnnnnnnnnnnnnnnnnn

SEQ ID NO: 108900 - DNA, 398 bp, Homo sapiens
  misc_feature (1)...(398): n = a,t,c or g
cgcactcagcggcgagaaggccctcatcgaggaggtcttccccgagaccggagacgtcatgtgcaactccgtcaacgccggctggaaccaggaccccacgcacgtcatccgcttcccgctcaatggctactgccggctcaactcggtacaggtgagggctgcacgctgccccctccccgccgcacccccggcgtccgcggagccctccaggggcagagtgagctggagggaggcgcgatccctgaaacggtgaagccccccgtgccatcctacaaaaaaggcaacaatgtgtcgatgcataatttatgtccctctcataattaaatgatggcgcctgggggatggacttaaaaaaatcgatctgtacnnnnnnnnnnnnnnncaaaagggaggtttat

SEQ ID NO: 108901 - DNA, 443 bp, Homo sapiens
tgcacgacccggtcggattttcgggaccgacccacgcgtccgcatttttgcggccgtgggggtgaccctgcactaatcgaaggagctgagtcgcaaacagagtcaacatctataattgctggaaagcgagctccggaaagagatacgtgacggctctgctgagctgcagatggataaattggatgtggttgatagttttggaactgctaccttccttgactactaacattatgctctgagaactttcttccctgaggcaaaagagcattgatcatattccgaaggtcgagtcttgaataataatgaaggtgcttgttgctgctgtcaaaacgagtggttgcttccaaggcagctataatgtgcttggtacaaaaataatggcttaagtttgagccgaacaaggaggaggggtaatattaactgcattcgatatggtgataaaa

SEQ ID NO: 108902 - DNA, 411 bp, Homo sapiens
gtgtatgcacttgtgtattagtgtgactatgcctgtgtgtgtacacatcagtgtgtctgcatgtatgtgtgtgtgcgtatacacattagtgtgcgtgtctgtgcctgtgtctgcactggtcctccttgctgtggcggccggcatactccaccagtagccaagggccaggtctccgcctcaccccagcactcactggctgtggacacgctgcccactccgacccccctgtgctcctggcctgctttcacttcctggagctgctctttgtccccaaacacactggtaattgtggtctatccagaagtcgaattcaaagttccaagttcctggcacgaaagccccttgactgtgctgtggacagagaccccatctgtaattagaccaggctggagagaagatagaaggtctctc

SEQ ID NO: 108903 - DNA, 424 bp, Homo sapiens
  misc_feature (1)...(424): n = a,t,c or g
tggcctattcagggaacacccacgcgtccggaagaagatgacacaaatgatgaagactttaatgtggaaataaggcagntttcttcatgttgacggaggttttcaaaagtaagtgaaatgtggcataaacatacagagtctctctgggaggatctcccgctggccagatagtatccccgaacagctggacacttaccgttttccagggtttgaggtctcctatgcttaaacttccttttgttgaagaaaagtgacctcctcaacttatagtctgtccctatcccctaggcctttagactgccattttaccttctctctttcctgtgagacaacagagattcagatagctgagaccttgggcttacctgagctctgatccccttcaggaaccccggcaccaatatatttctctctccacaaattn

SEQ ID NO: 108904 - DNA, 293 bp, Homo sapiens
  misc_feature (1)...(293): n = a,t,c or g
attactaggctagcacgagagcggnggaggggtgtggcctataatgttaggcggagcggcaggtgggccgggccttcggacgccctgtcccgcagacgttgacgagtgcagcgaggaggacctttgccagagcggcatctgtaccaacaccgacggctccttctagtgcatgtgtcctccgggacaccgcgctggcccggacctcgcctcctgcctcgacgtggacgaatgtcgagagcgaggtccatccctgtgcgggtcgcatcgctgagagaactctcccggctgctacg

SEQ ID NO: 108905 - DNA, 432 bp, Homo sapiens
cccttaagctcttgaaaaagagcaatattcaacatagcagaaaacagattatttttatggctggtaactaactgtttattattattttgagatggagtctcgctctgtcgcctaggctggagtggaatggcacgatcttggctcactgcaacctcaacctcccaggttcaagcgattctcctgcctcaccttcctgagtggctggcattacaggtgcgcacatcatcatgcccggctaatttttgtatttttgtagagatggggtttcaccatgttggttaagctggtcttgaactcctgaccttagatgatccacctgcctcggcctcccagtgttgggattacaggtgtgagccactgcgcccggcctaagtttccactctagattggctttcctttctcgccaagaactttgattttaacactcgtgcc

SEQ ID NO: 108906 - DNA, 418 bp, Homo sapiens
  misc_feature (1)...(418): n = a,t,c or g
tgcagccagcaggagctgagccgctacctgcactcctatgactgcctgctggatgaccccttcgcccacgactggccggcgctgccccagctcccgggactgcactactccatgaacgagcaatgccgctttgacttcggcctgggctacatgatgagcacggcgatccggacctttgacccctgcaagcagctgtggagcagccatcctgacaacccctacttttgcaagaccaagaaggggccccccttggacgggactatgtgagcacctggcaagannnnnnnnnnnnnnnnnnnnnnnnnnnnnnnnnnnnnnnnnnnnnnnnnnnnnnnnnnnnnnnnnnnnnnnnnnnnnnnnnnnnnnnnnnnnnnnnnnnnnnnnnnnnnnnnnnnnnnnnnnnnnnnnnnnnnnnnng

SEQ ID NO: 108907 - DNA, 456 bp, Homo sapiens
  misc_feature (1)...(456): n = a,t,c or g
gggcaggcctgtccatgttgggccaggccaatttccgccccctaaagcctttgcccgattttgccacccccccgcccccaggaagttttaaccaatttttttgggggcccccccattttaaggtttcccccggcggttaaccctgggccccgggaccaaaggaaaccccgaggcccccccgggacaannnnnnnnnnnnnnnnnnnnnnnnnnnnnnnnnnnnnnnnnnnnnnnnnnnnnnnnnnnnnnnnnnnnnnnnnnnnnnnnnnnnnnnnnnnnnnnnnnnnnnnnnnnnnnnnnnnnnnnnnnnnnnnnnnnnnnnnnnnnnnnnnnnnnnnnnnnnnnnnnnnnnnnnnnnnnnnnnnnnnnnnnnnnnnnnnnnnnnnnnnnnnnnnnnnnnnnnnnnnnnnnnnnnnnnnnnnnnnnnnnnnnnncggacgcgtgggtcgacccgga

SEQ ID NO: 108908 - DNA, 404 bp, Homo sapiens
  misc_feature (1)...(404): n = a,t,c or g
tggtggtgcccactttcggtcccagctactcattaggctgtatatgagatgactgcttgggcccaggaggcnnnnnnnnnnnnnnnnnnnnnnnnnnnnnnnnnnnnnnnnnnnnnnnnnnnnnnnnnnnnnnnnnnnnnnnnntcacagaatgggagaagtgcaacacacacataactgacaaaggacttgaatacataaaatctagagaaattgtataaatcggaaaggaaaagatatgcaacccagttaaaacagggatgaaatagctgaatgggcacttcaccaaagagaataaatacaccannnnnnnnnnnnnnnnnnnnnnnnnnnnnnnnnnnnnnnnnnnnnnnnnnnnnnnnnnnatatgtgtctaaacattggcaaatatggcaaggcttttt

SEQ ID NO: 108909 - DNA, 476 bp, Homo sapiens
ctggttggaatctgcggcggagtcggtaacactgtggtgacactatctctgtcatgcatcaaacttataaaattggctgggcatggtggtgcatgcctgtaatcccagctacttggaaggctgaggctggagaatcacttgaatccaggagacggaggttgcagtgagcagagattgcaccagtgcactccagactgggcaacacggcaagactccgtctccatagaaacaaaaaaacaaaacttacatatgtgtataagcctgtgtcaggattctgtacttttccttttatctacagtttgcatatttatatttcttcagtaatatatgctgtttcaagtactacagctttatattaagccttattgtctggtagaacaaaactttccacatctaaaaagttttcttaactattatttttctcattcatttgaattttagagtatgcttatcaagctctatgaaaaattacattg

SEQ ID NO: 108910 - DNA, 390 bp, Homo sapiens
  misc_feature (1)...(390): n = a,t,c or g
ccttctaataatgtcactttgggactgatagcattatttgcattttnnnnnnnnnnnnnnnnnnnnnnnnnnnnnnnnnnnnnnnnnnnnnnnnnnnnnnnnnnnnnnnnnnnnnnnnnnnnnnnnnnnnnnnnnnnnnnnnnnnnnnnnnnnnnnnnnnnnnnnnnnnnnnnnnnnnnnnnnnnnnnnnnnngggggggccgttttaggggatccaggtttacgtccgcgggcttgcaaggtaatattttttttatggggcccccaaaattaaattcctggcccgcgttttaacaacgtcgggaggggaaaaccccgggggtaccccaattaaatcccttgtggaaaannntnnnnntnnngnnngnntgnnntgntntgntcccngcg

SEQ ID NO: 108911 - DNA, 402 bp, Homo sapiens
  misc_feature (1)...(402): n = a,t,c or g
cccnnnnnnnnnnnnncttaaggtccctttttttagccggggggagattttttcccttttcaaaaacccctttccggcccccgcctttttttcctttaggttgagggggggtttattccctcccagggtttttcccctttttttccccccttttggcccgttttttaaaaaccccccggaatttttgcttagggggttttacccccgaaggggggggttcccttttccccgggtttcccccctnnnnnnnnnnntgggggcccggtcccnnnnnnnnnnnnnnnnnnggaagaaaaagaggagaaggagggggaagaaaagaggggagaggagggggaaggaaaagggaaaagtagagggaaaaggaagaaagaaattgatattataagcggacgcgtgggg

SEQ ID NO: 108912 - DNA, 468 bp, Homo sapiens
cgtcgacttttttttttttttgagacggagtctcgtctctgtggcccaggcgggagtgcagtggcgcaatctcggctcactgcaagctccgcctccagggttcacgccattctcctgcctcagcctcccgagtagctgggactacaggtgcccaccatcacgcccggctaatttttttttgtatttttagtagagacggggtttcaccgtgttagccaggatggtctcgatctcctgacctcgtgatccacccgcctcggcctcccaaagtgctgggattacaagcgtgacgccccgcgcccggccgagaatttgtctaattcagatactcccaaataagcagatcattttgtatgtaaaatggaaatatgtccattctgttctgtgacataatataacgaggatgaatctgagtcttcaaaaaattctgtcgacgcggccgcgaatttagtagtagtagtagtcggc

SEQ ID NO: 108913 - DNA, 397 bp, Homo sapiens
  misc_feature (1)...(397): n = a,t,c or g
aagattgtaggtgaaagtatttcatgaccttagggaaagatatcttaaactgaacacacaaaaaaactaatcataaaagaaaggaactatacatttgacaaccttaaaattaagaactctcttacagacagcataaggataaggatgaaatgttgataatgatcaaagctagatgataggtttataagagttcataacactatttttctagaaaacaaaacaagaggaaaagactccataaagagagggaaaaggcaagccaccaagtgggagaagatatttataactcatataaccaacaaagcactaggctacagcatgcagactgaacttctatgaatcaatcataaaaacaaaaattacacattagnnnnnnnnnnnnnnnnnnnnngcagtn

SEQ ID NO: 108914 - DNA, 520 bp, Homo sapiens
ctgaagggatcctcgcacctcagcctcctgagtagctgagactataggctggagtaccatgacaggatcctagctcactgcatcctcaaactcatgggctcaagtgattctcctgctttagtctcccgagtagctgggactacagagatgggtctcggctgtgttacctaagctggagtgcagtggctattcccagcacaatcatagtgcactacagtctccaactcctgggttcaggtgctccttgtgcctccgcctcctgaatagctgggattacaggcgtgagccactgcatgtggctgctctctgttttttatgcctcactgtttcctttcctgccttcttttgggttatttgactattgcttagtattcaattttaatttatcaattgattattttattatatctctttgtgtagtgttctttagtggtggctctaagaattacagtatgtacaccaaactttttactttctgcttagaattaatattttaccacttgtaaaatgtaggaacctg

SEQ ID NO: 108915 - DNA, 466 bp, Homo sapiens
  misc_feature (1)...(466): n = a,t,c or g
ggtcgacccacgcgtccggttctccattgtagaagccaagcagccagtcaacctctgctaattcagcccgtgcatgaatgaaggcagctgcgtcctgcagaatgggagctaccgctgcaagtgtcggcatggctgggagggcccccactgcgagaaccgtgagtggagctcttgctctgtatgtgtgagccagggatggtattgcgagtcctggcaagtcccacaaactcagctgaaggcaggttctaaaacattcgttcagtggaagaaattattcagtcgtttacccacgaaacatttagtgagtacctcctgcatcccaggcattgttctcagcgcaggaacatagccagacacaaatgaatnnnnnnnnnnnnnnnnnnnnnnnnnnnnnnnnnnnnnnnnnnnnnnnnncttcaaataatacaacatgtggtgtggcagactgtgcttagcaccccggaag

SEQ ID NO: 108916 - DNA, 417 bp, Homo sapiens
  misc_feature (1)...(417): n = a,t,c or g
aatttctctttggaaaccatgaaggtcagaaagcagtggaatgaaatacnnnnnnnnnnnnnnnnnnnncactgttaaccaagaattctacttccagtaatgtccttttaaaatgaagaatattctcagataaacacaaaccgagataatttgtcaatagcaacttgtgagacctaaatgtaagaactaaaattataaaacttataaaagtgtaaaacataccagaaaatgtttatgaccttggataagacaataatttcttaaatatcacaacaaaagcagaagtgataaaagagaaaagaggtaaattggacttcatcaaaattaaaaacttttgtacttcaaagaatacagcaacatcaagaaaatgaagatnnnnnnnnnnnnnnnnnnnnnnnnnnnnnnnnnnnnnnnnnn

SEQ ID NO: 108917 - DNA, 420 bp, Homo sapiens
  misc_feature (1)...(420): n = a,t,c or g
cttcccccaaccgaaagggccgggggggggcacccccccccaaagtataaatggagaaaaattttttaaaaccggaagggaataaacccccggccggcccggaaaggaaaaaatttccaaaggcctaatcccccacccttttcaaaaggccctttttgggcccaaaggcctttggggcccccccctccgggatccccccggggggccccgccccnnnnnnnnnnnnnnnnggggggggcaaattggggccccggcacccccccccggggggaaaaagaaaannnnnnnnnnnnnnnnnnnnnnnnnnngaacaatctaagaaccacaaagaaaggttctccaccttggtattactgtccgtaaaacaaactattgtgacaatcttgactctaaccacataacaagtgagtttgctaaaat

SEQ ID NO: 108918 - DNA, 411 bp, Homo sapiens
  misc_feature (1)...(411): n = a,t,c or g
gcaggggccggttttgggccccctccaccccccggtttcaaggttcaaagatttttccccccccacccccctaataaattggaggacccgnnnnnnnnnnnnagggcgggggtaannnnnnnnnnnnnataaaaaaggggggttcccccggtgggcccgttgggtttcaaaccccggccacaaaaggttcccccccccttcccccccccaaaggtggggaaacccggggggannnnnnnnnnnannnnnnnnnnccccttccttaaaaaccggcccccccggggggcccccccggcnnnnnnnnnnnnnnnnnnnnnnnnnnnnnnnnnnnnnnnnnnnnnnnnnnnnnnnnnnnnnnnnnnnnnnnnnnnnnnnnnnnnnnnnnnnnnnnnnnnnnnnnnnnnnnnnnnn

SEQ ID NO: 108919 - DNA, 458 bp, Homo sapiens
ttttttttttgagatggagtctcgatctcggctcactgcaacctccacctcctgggttgaagcagttcttctgcctcagcctacccgaagtagctgaagaccacaggtatgtgccatcatgcccagctaacttttttttttgtatttttagttaaagatggggtttcaccatgttggtcaggttggtcctgaactcctgacctcatgatccacccaccttggcctcccaaagtgctgggaccacaggtgtgagccaccgcgcctggccatttctttgttcttgacccttgagagtgcgattattatatgctttggggtggtcttatttggatctgaatctatttggtgatatttgaacttcctgtacctgtatatttatttctttctctaggtttagaaagttttctgctattatttcttggaataactttctacaccttgctatttctcaactccct

SEQ ID NO: 108920 - DNA, 372 bp, Homo sapiens
  misc_feature (1)...(372): n = a,t,c or g
aagtaatacatttacaatctctaaatttttagggctgagagggaccttaggagctatcttagccagtccctcactttataagcccaggaatctgaggcctagggttattgctacnnnnnnnnnnnnnnnngggggcggggcctttgggaattttggccccccgggggggaaaacagggggagaacaggggttaagggccccctggccccccggggtaaaagaaacctggtttaaccccccaaggaggggggccccaggggggctgcccttccccccgggtaattttttaaaatttttggggaaaacggaatttggttttgttgcccgggggggcaaaaaactcgggccccaagggaaccccccgccctcacg

SEQ ID NO: 108921 - DNA, 401 bp, Homo sapiens
  misc_feature (1)...(401): n = a,t,c or g
agtaaatcttaatgaccttagtcataatatgaccctaaaagaccagtggggaaagaaaaaataggtaaactggactgcatgaaaacttaaaacttttgtgcttcaaagaacaccatcaaggaaatgaaaagacaacgcacagtttgggagaaaatatttgcacattatatatctgagaggaaacannnnnnnnnnnnnnnnnnnnnnnnnnnnnnnnnnnnnnnnnnnnnnnnnnnnnnnnnnnnnnnnnnnnnnnnnnnnnnnnnnnnnnnnnnnnnnnnnnnnnnnnnnnnnnnntgagacacaaaaggnnnnnnnnnnnnnnnnnnnnnnnnnnnnnnnnnnnnnnnnnnnnnnnnnnnnnnnnnnnnnnnnnnnnnnnnnnnnnnnnnnnnnnnnnt

SEQ ID NO: 108922 - DNA, 394 bp, Homo sapiens
  misc_feature (1)...(394): n = a,t,c or g
ggttaatctgagacctgaaagtataaaactactggaagaaaacattagggaagtgctccaggacattgttctcagcaaagactttttcagtagggccccaaaagcacaggcatccaaagcaaaaacagacaagtgaaatcacaccaagctaagaaccctctgcagaccaaaggaaaaagtctacaaacnnnnnnnnnnnnnnnnnnnnnnnnnnnnnnnnnnnnnnnnnnnnnnnnnnnnnntgggattcataactaggagctcaaacaatagcagnnnnnnnnnnnnnnnnnnnnnnnnnnnnnnnnnnnnnnnnnnnnnnnnnnnnnnnnnnnnnnnnnnnnnnnnnnnnnnnnnnnnnnnnnnnnnnnnnnnnnnnnnnnnnnnnnnnnng

SEQ ID NO: 108923 - DNA, 379 bp, Homo sapiens
  misc_feature (1)...(379): n = a,t,c or g
nnnnnnnnnnnnnnnnnnnnnnnnnnnnnnnnnnnnnnnnnnnnnnnnnnnnnnnnnnnnnnnnnnnnnnnnnccacaacaaagcaaaaaaagttggagcagttgtattaatttcagacaaagtagtcttcagagcaaggaaaattattagggataaagagggctagtccataatgataaagaggtcagttctccacaaaaacagaaaaattcttagtgtttatggtgtggcagttcttatttgtggtctcctcccacccccgaaccactaccgcagaattagcctcatgagcttcagaagtaccagtactggctgcctcctgtcactcccagtaggggtttgaatcccagctgtgagaaacccctggccccatcacca

SEQ ID NO: 108924 - DNA, 405 bp, Homo sapiens
  misc_feature (1)...(405): n = a,t,c or g
gannnnnnnnnnnnnnnnnnnnnnnnnnnnnnnnnnnnnnnnnnnnnnnnnnnnnnnnnnnnnnnnnnnnnnnnnnnnnnnnnnnnnnnnnnnnnnnncctcatcaaagcaaaaaaagttggagcagttgtattagtttcagacaaagtagacttcagagcaaggaaaattattagggataaagagggctagtccataatgataaagaggtcagttctccacaaaaacagaaaaattcttaagtgtttatggtgtggcagttcttatttgtggtctcctcccacccccaaaccattaccgcagaactagcctcatgagcttcagaagtaccagttctggctgcctcctgtcactcccagtaggggtctgaatcccagctctgaaaaacccctggccccatcccct

SEQ ID NO: 108925 - DNA, 340 bp, Homo sapiens
  misc_feature (1)...(340): n = a,t,c or g
cacaggtgctttggatttcttatacctggatatctatctctttagcaagattagggaaattttcttgaattattttctcaaatatattttccaggtggttttcttcttctcggtctctttcaggagtgccaataatttgtagattcgggcagtttacataatcccatatttctccaagactttattcnnnnnnnnnnnnnnngaaaaatttggttgtcacccccgggcggaggggcatgggcaccattttggttccccccaactttttgccccccgggttaaggggcttttggggcccaaccccccacgtggtcaattttaccgggtggcccccccctcg

SEQ ID NO: 108926 - DNA, 359 bp, Homo sapiens
gctttttgagcagcttggagagtacaaattgcagaatgcgctattagttctgtacaccaagaaaggaccccaagtgtcgactccaactcttgtagaggtctcaagaaacctaggaaaagtggtcagcaaatgatggacacatcctgaagcaaaaagaatgccctgtgcagaagactatctatccgtggtcctgaaccaagtatgtgtgttgcatgagaaaacgcccctaagtgacagagtcaccaaatgctgcacagaatccttggagaacaggcgaccatgcttttcagctctggaagacgatgaaacatacgtttccaaagagtttaatgctgaaacattcacctttcatgcagaag

SEQ ID NO: 108927 - DNA, 369 bp, Homo sapiens
tctgtcgaaatgcaccatgaagctttgagtgaagctcttcctggggacaatgtgggcttcaatgtcaataatgtgtctgtcacggatgttcgtcgtggcaacgttgctggtgacagcaaaaatgacccaccaatggaagcagctggcttcactgctcacgtgattatcctgaaccatccaggccaaataagcgccggctatgcccctgtattggattgccacacggctcacattgtatgcaagtttgctgagctgaaggaaaaaattgatcgccgttctggctaaaagctggaagatggccctaaattcttgaagtctggtgatgctgccattggtgatatggttcctggcaagcccatgtgtgttgac

SEQ ID NO: 108928 - DNA, 371 bp, Homo sapiens
gagccctagaactgcatcctgaccacccaaaccaccctggagcactctgattgtgccttcatgggacaccatgaggccatctatgacatctgtcgtagaaacctcgatatcgagcgcccaacctacactaaccttaaccgccttattagccagaccgcggcctccatcactgcttcgctgacatttgaaggagccctgaatgttgacctgacagaattccagaccaacctggagccctacccccgcatccacttctctctggccacatatgcccctagcatctgtgctgagaaagcctaccatgaacagctttctgtagcagagatgaccaatgcttgctttgagccaggcaaccagatggtgaaatgtga

SEQ ID NO: 108929 - DNA, 387 bp, Homo sapiens
  misc_feature (1)...(387): n = a,t,c or g
catgcctggctaatttttttattttttgtagaaatggggtttccccatgttgcccaggctggtctttaattcctggactcaagcagtccaccagcctcagccttccagagtgctgggattacaggcatgagactgcaactggccccgcctttttttttgtttaatgaaaccaatgccaatgtaaaagtctgtgctttagcctttctttttaaagaccgatgaaactctttgatgaattaagatggaagattagctgagctgaacttactattgatagcgtgtaaactggttgcagtgagctgagattgtgcccctgcccttcagcctgggctacagaatgagccctatcccnnnnnnnnnnnnnnnnnnnnnnnnnnnnnnnnnnnn

SEQ ID NO: 108930 - DNA, 373 bp, Homo sapiens
  misc_feature (1)...(373): n = a,t,c or g
gagttattggccttaaagaggaggtagagaaagagatatgattagagagattatttaaaagaataataacacagaacttaccaaacctggggaaaaaaatcgatatctaagtacaagaaggttacagaaccccaagtagatttaacccaaagaagcctaccccaaggcacttaataatcaaacttccaaaggtcaagagtaaagaaaggatcctaaaagcaacaagacaaaagaaacaaataatatacagtagcgccacaatacacctggcagcagacttttcagtggacaccttgcaagcaacaaaagagtgacatgacatacgtaaagagctttgggggaaaaaaagaaatggttaaccnnnnnnnnnntt

SEQ ID NO: 108931 - DNA, 468 bp, Homo sapiens
  misc_feature (1)...(468): n = a,t,c or g
ttattattttttgagacggagtttacctaattttttcagacgcacnacacccagctaatttttgtatttttagtagagatgggtttccaccatgtttttcaggctggtctcaaactcctgacctcaggtgatatgcccaccttggcctcccaaagtgctgggattacaggcattaagccaaccacagccagcctaatttttttgtatttttagtagagatgtggtttcgccatgttggctaggctggtctcgaactcctgacctcaagtganccacccgcctcagcctcccaaagtgctgggattacaggcatgagncaccacacccggccagtgttgtacagttcttgtatatccttcatggttttttatttagtagtctatcaattattgagaaagggttgttaatgtccccaactataactgtgaatttgtctactcctttcagttctatcagttattgtttcac

SEQ ID NO: 108932 - DNA, 375 bp, Homo sapiens
ggaggcagggccactggaaatgagtggggtgcagctccagcccctccgaccagccccagaagtaaccacggtccagctccagccagcgcaggaggtgaccacagtccagctccagccagcacaggaagtaaccacggtccagctccagccagcacaggaggtgaccacggtccagctccagcccgtggccggccagctctccaattccagtgggggagctgtggctactgaggcacccaacctgctggttgttcagagcggggcagctgaggagttgctcactggcccgggccccggggaggcgggggatggcgaggccagcactggtgtggtccagggatgtctttttgaaaacttcagacgggcaaggcttgg

SEQ ID NO: 108933 - DNA, 392 bp, Homo sapiens
  misc_feature (1)...(392): n = a,t,c or g
ctggacttttaggaaaattaaaaacttttgtgctgtaaataagaccatcaagaaagtgagaagacaatccacagaatgagagaaaatatctgcaaattatttatctgataaggggtttgcatcaagaataggtaaggaactcttataagtcaataataaaaaaatannnnnnnnnnnnnnnnnnnnnnnnnnnnnnnnnnnnnnnnnnnnnnnnnnnnnnnnnnnnnnnnnnnnnnnnnnnnnnnnnnnnnnnnnnnnnnnnnnnnnnnnnnnnnnnnnnnnnnnnnnnnnnnnnnnnnnnnnnnnnnnnnnnnnnnnnnnnnnnnnnnnnnnnnnnnnnnnnnnnnnnnnnnnnnnnnnnnnnnnnnnnnnnnnnntggcgcgggcccggg

SEQ ID NO: 108934 - DNA, 480 bp, Homo sapiens
gctacagagctagaacctttattactttttaaaaataatttcaacttttattttagattcatagggtatatgtacagttttgttatataagaatatgggcaatgccaaggtttggggtatgattgatcacatcagctggttactgagcaagctacctaatagttagttttacaacccttgccccctttttaggagtccccattgtctattattgccaactgtatctccatgaatatacacttataagtgacagcaaacatgcagtatttcgttttctacaatatgaggctacagtaaccaaaacagcatgattctagtgcaaaaacagatacatagaccaatggaaccgaatagagaacccagaaataaagccacacgcctacaggcaactggtctttgacaaagttggcaaaagtaagcgatgaggaaagaactccccattcagtaaatgatgctgggatacctggctagctatatgca

SEQ ID NO: 108935 - DNA, 347 bp, Homo sapiens
tcctcacccacacactctcaaaggatttctcaagacagtttgcaagaaataacaaaatctatccttactctgcaatcccaaatagactctttggcagtagtgaatatccaaaaccgccaaggcctagacctcctcactgctgagaaaggaagactctgcaccttcttaggagaagactgttgtttttacactaaccactcagggatagtacaagatgctgcccagcagttacaggaaaaggcttctgaaatcagacaatgcctttcaaactcttataccaacctctagagttgggcaacatggtttctcccctttctacgtcccatgacagccatcttggtattaac

SEQ ID NO: 108936 - DNA, 324 bp, Homo sapiens
  misc_feature (1)...(324): n = a,t,c or g
gatggataattggctaaaaatcggaagaatggggctcgaatcccccagcagttgagacctcaggctgaggcagtggccttctcatcggcttatctgtgcctatttctttcnnnnnnnnnnnggaaacaaggcccccctcatcccctcaggcggaagggcaggggaaggaccaaggctaacggaaaccttggcccccggggttaaggggattccaagcccccacccccccgagaagtggggacaccgggcgggcccccccaaaccccacaaatttttggaattttaagaaaaaggggggtttggcttggtgggaaaagctggctg

SEQ ID NO: 108937 - DNA, 402 bp, Homo sapiens
  misc_feature (1)...(402): n = a,t,c or g
aaggatagttaggaaatattacgaacacctttatagcaataaattcaacatagatgaaattgacaaatcctttgaaaggcacaaattaccaaagctcacccaagaagaagtagatgatctgaatagccctatatctgttaaagaagttgaaattacagtttaaaaacatgtaacaaaaatctannnnnnnnnnnnnnnnnnnnnnnnnnnnnnnnnnnnnnnnnnnnnnnnnnnnnnnnnnnnnnnnnnnnnnnnnnnnnnnnnnnnnnnnnnnnnnnnnnnnnnnnnnnnnnnnnnnnnnnnnnnnnnnnnnnnnnnnnnnnnnnnnnnnnnnnnnnnnnnnnnnnnnnnnnnnnnnnnnnnnnnnnnnnnnnnnnnnnnnnnnnnnnnnnnnnnnnnnnn

SEQ ID NO: 108938 - DNA, 470 bp, Homo sapiens
atttctcccccacaaaatatttttgtaacagccccaagtcaaggcataagggtttgacatttcaagcaaaattcttaaacctaaaaacagtggaatatgatataaagcaaaccgttaacgggattacactatccttatttccaaaatccccatgccaattaaaataccctaaagaatccaagcccatttatgcccatcctaaaaatacaactgaaacccttcaaatactatctaattctaactatgaattcactggttagaaaaacccacaattcattatatttggtattgttgttccacaccctaagttaacgccaaactaaatatcgaataattcaacttcacaaacacttcttcccttcaataaaggaaaccgtaaaaatacaaagtcctggctgggcgcggggcacgcctgtaatcccaacactgtgggaggctgaggtgggcggatcacaaggtcaggagttgga

SEQ ID NO: 108939 - DNA, 402 bp, Homo sapiens
  misc_feature (1)...(402): n = a,t,c or g
cccccgggggggtctccccccgggaaactcccctttacctttttgtccgccccctttagggtccgggtgggggggaaaatcccccggccccaaacccaaaggcaagggggttttccgggccccaccaccggttcttggggggcccgttcccccttttttgagcccgccctgaaattcccaacccctttttttccttctttccaaaaaaatgggggggccccaccttaaaaggcccctcccnnnnnnnnnnnnnnnngggaaggaagggggcagagtaagtttgggagcatatatatgcccaaattattaatgatcacccgggtttgacacatctaaatagcctccctgctcaccttctgtttctccctcctgcctccactcccagctttagaaaaatcattt

SEQ ID NO: 108940 - DNA, 270 bp, Homo sapiens
  misc_feature (1)...(270): n = a,t,c or g
ngtctaggggggcttaccacaaggttgtccatcaaggtacacccgaaccgggtgggtgaatagttaaatgaagattgcatcccgcagcttccagatcctgggaaaagtntattccgttctcagtgacagagaacagagagcagtgtacgatgagcagggatcagtggacgaggactctcctgtgctcacccaagaccgagactgggaggcgtattggcggctactctttaaaaacatatcattagaggacattcaagcttttgtacagac

SEQ ID NO: 108941 - DNA, 717 bp, Homo sapiens
gagcggccgacgtaaggtaagatcccctacagcggccgccccccgtgccagccaggcctgcctcctctttctgtccggctcagcagccccggcctcctgttgctcccagtccgagctatggccaagggagactgattcctgctcaccctggggagagagctcaggattttgtctcaaaaccttataaaagatacgaggctcgacattttactaaggccgaggactcttgatctcccagacagatcctagaaccacagggcacatgtgaccagaatccaatctgtgcaaatcaatcagcaaaaggagcccccagcaaagtgcgcaggctgtggcctccggggaccggcaacctacacagcgcacagccccccaggggtccgagtcctccaaacccgtgtagggcaggagcttcctttacctttgattttgcttgatgttttgctaattcttctttttgaacaccccacagcgttgaaggtaagcaactgctccctaaacgacttagatccttaaaatatgtgtgggtgggccgcatatctcatgagagagcctccgcccaaaccagagccctcctctctctgcggccaacaccctggtagacctgggggagcagcctctcccgcccccaccccctcagcgtggtgctggcccgtggctcctgaaccactcaccagtccagtccggggcctgggccctttcccggcgccctgggggaac

SEQ ID NO: 108942 - DNA, 352 bp, Homo sapiens
  misc_feature (1)...(352): n = a,t,c or g
tacaaattttgccttcactgcctgcaaggactcagtcagcaccactacctgagatcatgatgtatctgatctaccaacataggatctctcctaatgtcacctcagaccaagagatccactttatgaaaactgtgatgcagcagtgaacacacaacaatgaaattcattggccctacaacattgtgcaccattcagaggctgctggtgtaatagagtgatagaagggcactttannnnnnnnnnnnnnnnnnnnnnnnnnnnnnnnnnnnnnnnnnnnnnnnnnnnnnnnnnnnnnnnnnnnnnnnnnnnnnnnnnnnnnnnnnnnnnnnnnnnnnnnnnnnnnnnnnnnnnn

SEQ ID NO: 108943 - DNA, 354 bp, Homo sapiens
  misc_feature (1)...(354): n = a,t,c or g
catacaaattttgccttcactgcctgcaaggactcagtcagcaccactacctgagatcatgatgtatctgatctaccaacataggatctctcataatgtcacctcagaccaagagatccactttatgaaaactgtgatgcagcagtgaacacacaacaatgaaattcattggccctacaacattgtgcaccattcagaggctgctggtgtaatagagtgatagaagggcactttannnnnnnnnnnnnnnnnnnnnnnnnnnnnnnnnnnnnnnnnnnnnnnnnnnnnnnnnnnnnnnnnnnnnnnnnnnnnnnnnnnnnnnnnnnnnnnnnnnnnnnnnnnnnnnnnnnnnnn

SEQ ID NO: 108944 - DNA, 1056 bp, Homo sapiens
gacaagacatgctcaggctggagaagacccacctcaggacagggcagggcccccctggagggctcacaaactcctcattagtcaggtggtgcgtggatggagactctttattgtccccaaagatggctcttcccaagacagccaaatagctctgtggggcagagccatcagtttcaaaaggaaaatcagtgagcgaatgaccacttccaccccagctctccccctccctacactggagagcccagcactggctccctccctccccgccagctcccacccccattggggcagtgaatgggaggctaactctgcctccccctacaccacggggctgttcccttacctgctgaggaagggaaaccaatcatcctgggagagaggacagaggtggccatgagcagagggtaactgagggcaggtgccttacctgttccctctggggaagtgcctcggcttatcatttcaagcccctaggctggaactctagtgcctccctagctgtgcccccagctcaagggacagcagcatcaggtgcccactgggactgtctgtctttcctgtctgtctgtctgagaggtctcaaggggagatattattagccacaagattcagggtgtttgtcttccctctggatcgcccaaacccgcaacccctccccttgagccctgaagcccacaggggtggcttgatttctgcaaagggtctaaaggcagttaaagcgccatagtaatagctttgttcagctgagctgtatccaagctcatgtttttccaatatcagatgttccctccatggtctctgttccctccagtctaacttggaggcccaaattagaaagtttaaaggtgttaaccctgcagcctaccaaggaaatgtccccgtaaagtcagacagtgaggggtctcctctctgacatgagggggtggatctctaaggccctgcctgctctgacacccacgggtcctgcagtcactatcctaagaaagaggctggagaggacctacttggcgtcctggccctcgacccgggaattgcggggcggtaccgcatgtcata

SEQ ID NO: 108945 - DNA, 356 bp, Homo sapiens
  misc_feature (1)...(356): n = a,t,c or g
accgggcatgggggcccatgccggttgcccccgttctccacaaggctgaagccaaagaatcgccttaaccccggaggtggagggtgcaattaacccaaattggttttctgccctcccgcctgggcgagaaagccgggctttgtttcccaaaagggtttaaaaaaaccaagaccaataccaaggccaaaaccaagctggagggggctttttttacctcccttttccaaaagggcaaagcccaaaatttcaagatggtttgcccttttaaaatatttaaattcctttttcggggggttttttttatataaaacccggggccctcccnnnnnnnnnnnccctactcatggttgtctaca

SEQ ID NO: 108946 - DNA, 362 bp, Homo sapiens
  misc_feature (1)...(362): n = a,t,c or g
taagagtaattttaaaaaatacaatataaattatcaacgaagccaaaagttgattctttgaaaagattaatgaagtaggcaaaccactggtgagatgaatcaagaaaaatagagaaaagactcaaataaacattaggaatggaaaatagggcaatgctaaagagaattcaaagatcagaaaaatatgggagtatactaaaaacgatttcatgcccaagtgttcaaatctatattgcctttaaaaatatataaaaaaggannnnnnnnnnnnnnnnnnnnnnnnnnnnnnnnnnnnnnnnnnnnnnnnnnnnnnnnnnnnnnnnnnnnnnnnnnnnnnnnnnnnnnnnnnnnnnnnaggaaaa

SEQ ID NO: 108947 - DNA, 373 bp, Homo sapiens
  misc_feature (1)...(373): n = a,t,c or g
gaattgtcaagaaatgttataaataatctctttctctggtaaataagggtaactttttcgaccacattagctgnnnnnnnnnnnnnnnnnnggggaaaaaaaccccggtggggccccccggggagagggcgggggcccacccctggctttgccggccccctgcccccggggacaaagaatattttgggcgaaacccttggggccccaagggggggggaataaagggccccgggccccgggccggggtaattttgcgggtttagggggagggggggtaccccttgggggccgggcggggccccaaaggggaccccccctccnnnnnnnnnncaataaagcccnnnnnnnnnncaaacccttaacacccactcan

SEQ ID NO: 108948 - DNA, 639 bp, Homo sapiens
ggtcttgctccgtcacctaggctggagtgcaatggggctgttataactcaccgaagcctcaaacctccgggcccaaatgatcctcctgccccagcctcccaaagcacggggattacaggcatgagtcactgttgacacataataatggccttactatcttaccagcctatgtgatgatgttgttggcgtctctacggattgaatgcaagctccaaaaagacaagaggccttgtctgcctcatgggtatccccagctgacgctcaaatatttgatgaggtcatgaggtgaaggacaaatcattaattatgcgtaggggaaagggtaaaggtgcttgaacccagggggagggaatgggacttggggaacagatgaaaatccctgatgaaagcccaaagaacagggaagtgggggataggagagggctaggagaagggagaggctgtggtcagggcaccgaactccctggaagcgtttcaacactgatgtgctggggtggtgggatcatgggcaaaactctcgagtcatataaattatataaaagtgaaggccgggcgcgcgtgcacgcctgtaatcctggtactttgggaggccgaggtgggtggatcacgaggtcaggagttccagaccagcctggccaa

SEQ ID NO: 108949 - DNA, 336 bp, Homo sapiens
  misc_feature (1)...(336): n = a,t,c or g
actggaatctctctcataaacatatttggaaaaaaatgctaaacaaaatactagcaaattaaatccaataacactttaaaagaatacatcttgaccaaatgaatttacccccaggagtgcaaagttaacatttagaaatcaatcattataccagatttaaaaacttgtacacagcaagggaaacaattaacagagtgaagggacaacctataaaacaggagaaaatattttcaagccatccatatgataaggagnnnnnnnnnnnnnnnnnnnnnnnnnnnnnnnnnnnnnnnnnnnnnnnnnnnnnnnnnnnnnnnnnnnnnnnnnnnnnnnnnn

SEQ ID NO: 108950 - DNA, 383 bp, Homo sapiens
  misc_feature (1)...(383): n = a,t,c or g
gggttttttggtttggggggccccccccggggggtttcccttttttccccccccttaaaaaataaagggggggaaacgggtttcccccgcccnnnnnnnnnnnnnnaaggggtttccccggggaaggtttctttnnnnnnnnnnccccggttaatttaattagggcgggtttaattacccggggnnnnnnnnnnnagttttggggttttggtccgtggccccggggggtttcaaactccccaaccaaggggcccccttccctgggtttccccaaaggtgggggttttgggcctgggccccggnnnnnnnnnnnnnnnnnnnnnnggatttttaaggctagaattatccataaaaatcaaaactatatgtactggttaaaaaag

SEQ ID NO: 108951 - DNA, 378 bp, Homo sapiens
  misc_feature (1)...(378): n = a,t,c or g
ccacctaaggcatgtgnnnnnnnnnnnnnnnnnnnnnnnnnnnnnnnnnnnnnnnnnnnnnnnnnnnnnnnnnnnnnnnnnnnnnnnnnnnnnnnnnnnnnnnnnnnnnnnnnnnnnnnnnnnnnnnnnnnnnnnnnnnnnnccacaggacctaagtgggtcaaggtcagaggagtgatgggggatggaagcagaggtcaaggtcagaggagtgatgggggatggaagcagaggtcaaggtcagaggagtgatgggggatggaagcagaggtcaaggtcagaggagtgatgggggatggaagcagaggtcaaggtcggaggagtgatggggatgaaagcagaggtcaaggtcggaggagtgatgggggatggaagcag

SEQ ID NO: 108952 - DNA, 387 bp, Homo sapiens
  misc_feature (1)...(387): n = a,t,c or g
ctgcttccatcccccatcactcctccgaccttgacctctgctttcatccccatcactcctccgaccttgacctctgcttccatcccccatcactcctctgaccttgacctctgcttccatcccccatcactcctctgaccttgacctctgcttccatcccccatcactcctctgaccttgacctctgcttccatcccccatcactcctctgaccttgacccacttaggtcctgtggnnnnnnnnnnnnnnnnnnnnnnnnnnnnnnnnnnnnnnnnnnnnnnnnnnnnnnnnnnnnnnnnnnnnnnnnnnnnnnnnnnnnnnnnnnnnnnnnnnnnnnnnnnnnnnnnnnnnnnnnnnnnnncacatgccttaggtgtttgacctaa

SEQ ID NO: 108953 - DNA, 288 bp, Homo sapiens
agcaagcaagaaagctaagtaaaagatacactattaaagtctatttctgtcttataagtctcagtgacaatttaacccattcttctatagtgtgttaaaactcattttttttttgagatggaattttgctcttgttgcccaggctggagtgcaatggcacgatatcggctcaccgcaacctccgcctcccgggctcaagcgatcctcctgcctcagcctcctgaagtgctgggattacaggcttgagacactgcgcccagccaagagtgtcttttatcctccgagaga

SEQ ID NO: 108954 - DNA, 369 bp, Homo sapiens
  misc_feature (1)...(369): n = a,t,c or g
aaaatatcttaattttagctggtcaaaacttttaaaaactatggtatggcagaattgttgataannnnnnnnnnnnngagggagagatcaggtggttcccttcaattcctgattaaaagaatgttcaaaactaaacccttcttgacagaaggtctccttcgtaagcccccatgtttggattcgcttttgtgcccaaagaaattcccacggagagggccaagataaatgggccaccatacaaatccggggaaagaaagcagcccaccccccgggggcaaaaaattgccttcgtttagggccgccttaggggccggatcaccaggccccttcccagcgaggcttaaatggccgcttctgaagccgcggcgg

SEQ ID NO: 108955 - DNA, 414 bp, Homo sapiens
  misc_feature (1)...(414): n = a,t,c or g
gcttagtttgaaaaactaaaaactgtaatggctgtatcagattaattcggtctacttgtgcttgctgaattttttcctcaattgatggaagttcctccaatgcttctttgaacagggagcatttactgttaaggttagaatcaccttgtaaagtagaaaagagatgagacatagtataggtaggcatgcctaaagttggatgaatccaattaatgtctcctaataatttttagaaatcatttaaggtttttaaattatctcttcaaattcgaannnnnnnnnnnnnnaaacggagtctggggacagagcgggactctgtttttttnnnnnnnnnnnnnttttatattnttgggggtgggcccgagaagaaagggcccctcttttcttaaataaaaaaaacctttttaaaggggn

SEQ ID NO: 108956 - DNA, 393 bp, Homo sapiens
  misc_feature (1)...(393): n = a,t,c or g
gtaatggacttcacgaaaattaaaaattttagcacttcaaatgacaccattaagaaaataaaaagacaagctacagtgtgagaaaaaatatgtaaatcatatttctgataaaacacttgagtacaaaatacatataaagacctcttacaatgcaataagaaaatacctttnnnnnnnnnnnnnnnnnnnnnnnnnnnnnnnnnnnnnnnnnnnnnnnnnnnnnnnnnnnnnnnnnnnnnnnnnnnnnnnnnnnnnnnnnnnnnnnnnnnnnnnnnnnnnnnnnnnnnnnnnnnnnnnnnnnnnnnnnnnnnnnnnnnnnnnnnggtaataccaagtgatgatgtggagaaatgttaactcatacattgctggtgaaaatgtaatagtatatcc

SEQ ID NO: 108957 - DNA, 577 bp, Homo sapiens
gagacagagtttcactcttattgcccaggctggagtgcaatggtgcaatctcgcctcactgcaacttccgtcgcccgggttcaagccattctcttgcctcagcctcccgagtagctgggattacaggtgtgtgccaccatgcctgactaattttcgtatttttagtagagatggagtttcatcatgctggccaggctggtcttgaactcctgacctcaggtgatccatccccgccttggtctccaaaagtgataggattaccaggcatggagccactgccacctggccctacatctttaaaaatttttaccccacgagacccagttaaaactcccttagtttaaaaaggaccagttgaattcaaatgccagctttgtaaatggaaaggttacagtttgtctgtccttcatggctgaagatcttaccaagttttaagaaaaacaggatagcaaatttacatctcaaaacagagaaaattaagcattttcaagaagaagttagggtatgttagagaaagattaaaaatggacaacaagtgatatagtttgagtatttgtcctcttcaaatctcatgttg

SEQ ID NO: 108958 - DNA, 395 bp, Homo sapiens
  misc_feature (1)...(395): n = a,t,c or g
gcaagactctgtgttaaaagaaaagtatgcagttaacgtcatactcaacagtgagactaaatggcttcccctcagattgagaaaggcaaggatgtctactctcaacactcctccaaagctacagtaatcatgagcatgtcatattggggaagggatagacacatggatcaataaaacaagaatctaaaaataaacccacacaaatttggacgactgactttttacagaggtgtaagagcaattcaatnnnnnnnnnnnnnnnnnnnnnnnnnnnnnnnnnnnnnnnnnnnnnnnnnnnnnnnnnnnnnnnnnnnnnnnnnnnnnnnnnnnnnnnnnnnnnnnnnnnnnnnnnnnnnnnnnnnnnnnnnnnnnnnnnnnnnnnnnnnnnnnnnnnc

SEQ ID NO: 108959 - DNA, 440 bp, Homo sapiens
aagaatgtcattaggaggcccgggagatcacagcactagcttagcctaaatggggtttcggcaatgagagtctggtgccaacaatatggatattatttaagatttttaataaagcaggggaaacaaagagaactgagaaggaggaataaagtgctgaaaaacatttatctgctcttaagcaatttcatttaaaggagaaagaaacggaggctcaaaccaaagatgaatattgacaatgatgttttttgttttgagacgtagtctcgcactgttgcccaggctggagtgcaatggcgcgatctcggctcactgcaacatccgccccccgggttcgaacgattctcctgcctcagcctcctgagcagctgggactagagacgcctgccatcacactcagccaatttttgcatttttagtagacacggggtttctacaaaaaa

SEQ ID NO: 108960 - DNA, 365 bp, Homo sapiens
  misc_feature (1)...(365): n = a,t,c or g
cgggttgaccccctttaaccaatggccggccccccgctttaactctggggcaggtggggggcccatttttccccgggccccggggcttcccccccctcggaaattcccgccccttttgtccaaagtnnnnnnnnnnagccttttttccccattaacaagggttccccctcccccaaggggcctccaaaaaattaaggggttttttgtttccttaagaccgctcccagacccggcccaagggccgttccccccaaatccggttggttaaagggggcccgggttttttttgttttnnnnnnnnnnnnnggatgttcctctctgctattccctccctgccccaatttttttaaaaatcctgttttccc

SEQ ID NO: 108961 - DNA, 362 bp, Homo sapiens
  misc_feature (1)...(362): n = a,t,c or g
ttcatatgctgtatcagtgttttatgtagctctacatgatcatttnacaaatatttttaatttgccaaaaattgaaaaaatttattcctagattataaaagtaataaccattttttgttaaatactcaagcattatagaattaaatcaggtataaagtggaaaactgactgtaatccttctttacagatttgtgggtttttttggttggtttgtttgaggtggagtcttgccctgtcactcaggctggagtgcagtgaggcaatctcagctcattgcaacctctgcctcctgggttgaagcaattctcgtgcctcagcctcccaagtagctgggattacaggtacctgccaccacatccagt

SEQ ID NO: 108962 - DNA, 377 bp, Homo sapiens
cctctactaaaaatataaaaaattagccaggcatagtggtgcacatctgttgtcccagctgcttgggaggctgaggcaggagaattgcttgaaccagggaggcggaggttgcagtgagccgggatcgcgccactgccctccagcctgggggtcagagtgagactgtcccaaaaaaagaaaagcccccacgcagactattggtgtgccctggaactgagcattagctgttccctctccgagttctctcccctagctctgccagccttccaggctgggctgtgggtcactgcctccgaggagccctcctggattctgctgaagatggtcaggcccctccatccccccattttctcttatgtacctgacagccctgcctt

SEQ ID NO: 108963 - DNA, 406 bp, Homo sapiens
gacagggtttcaccacgttagccaggatggtctcgatctcctgaccttgtgatatgtccgccgcagcctcccaaagtgctgggattacaggtgtgagccaccgcacctggcccagtgtttgcttcttacagaatgattgcaagccccccttgcagtcctgcctgcctttctaaaaaacgtgcattgagtggcttcataaggaaatccagagaccttggttctctgagtctgatgcagctacagaagctgtgcagatgcgggtgtgggaattattttaccctaaaggacctgggttaacacttcacacttttggccttaaatcctaggactggagggccttgaagtttttcagtttcatggaaatttaggacaagggagctggggttcattccaagtttccctttgg

SEQ ID NO: 108964 - DNA, 395 bp, Homo sapiens
  misc_feature (1)...(395): n = a,t,c or g
nnnnnnnnnnnnnnnnnnnnnnnnnnnnnnnnnnnnnnnnnnnnnnnnnnnnnnnnnnnnnnnnnnnnnnnnnnnnnnnnnnnnnnnnnnnnnnnnnnnnnnnnnnnnnnnnnnnnnnnnnnnnnnnnnnnnnnnnnnnnnnnnnnnnnnnnnnnnnnnnnnnnnnnnnnnnnnnnnnnnnnnnnnnnnnnnnnnnnnnnnnnnnnnnnnnnnnnnnnnnctcaaatttatacttaagcaaatccccaaagagaagcctccaggtctggagtgtttcattggagaattccatcaaacattttaataagaattaaccccagttatataccatttcttccaaaaactagaagaggaaggaatatttcccaactaattttataagaccagtaataccc

SEQ ID NO: 108965 - DNA, 400 bp, Homo sapiens
  misc_feature (1)...(400): n = a,t,c or g
aatccattttcaagctgctgatagagacatacccaagactgggcaatttacnnnnnnnnnnnnnngtttatgggctttccgcttcccgggggttgggggggccaaaaattcccgcggggggccaggggggaccagacccggtttactttgttaaccccccgccaaaaaaaaagcttgcccagggaaccccccctttaaaaacccttcccttttaagggggttttttccctatatggaaacctgccgggaaaaaactgcccccctgaatccattacccctcactggggcccctcccccaaccccgggaaatccaaaaaaaaatttggggggggacccacccaacttttccccccttgcctgacccctttgggggggccccttttccccaacaaaaaggagn

SEQ ID NO: 108966 - DNA, 476 bp, Homo sapiens
  misc_feature (1)...(476): n = a,t,c or g
cagtagtggnnnnnnnnnnnnnnnnnnnnnnnnnnnnnnnnnnnnnnnnnnnnnnnnnnnnnnnnnnnnnnnnnnnnnnnnnnnnnnnnnnnnnnntcagatggaacagaatacagtgtccagaaattgatccatgtgtatataatcacctggtactcaacagaaaggccaaggtaatttaagagggaaaggattgtattttcaaaaaatgatgcaagaacatttgaagagtcatgtgagaaaaaactgaacctgattctgtgccataaacaacagtcaacttgaaacagataatagacctaaatgtgaaggctaaaactattaagtttctatgagaaaacacaagagaaaagcttagtgacctannnnnnnnnnnnnnnnnnnnnnnnnnnnnnnnnnnnnnnnnnnnnnnnnnnnnnnnnnnnnnnnnnnnnnnnnnnnnnnnnnnnnnnnnnnnnnnnnnnnnnnnnnnnnnn

SEQ ID NO: 108967 - DNA, 525 bp, Homo sapiens
  misc_feature (1)...(525): n = a,t,c or g
ggcacgagatctgaatgagatcttaatctcatcgacagagattgaggttgatggagtcaaatgagaagtggattttctcattgcatgtattcttggggcatatgcatagcaatttagatgttggttagtcttcagaattacctttattcctccccaccaaagagctaaagctgccaggataccccagttttatggttagtgaagcacccttctgccatctctttcagatgctgtcttcctgattttatacaaagaattatactacaggcacatatatgccaaagtcagtgtaagtatttaagtgtcgcagnnnnnnnnnngtttttgtttttttaactctgtgctgtttttgtccctagaacacagtcatttgtttatattggttcagtgtctgggcatgattggcatgtttttgagttttaagaagcggtggaaggaacagtttaacccagaaagctgttcagacacactaacgctatataacctatgcattcttttaaatttctctgtccccacgccgagcca

SEQ ID NO: 108968 - DNA, 352 bp, Homo sapiens
  misc_feature (1)...(352): n = a,t,c or g
gagacagaatagtttaacagtctggaaaacagtatggccttatcagattcacatgccctaccccccagcaactccatttctaggtgtatagcctagaaactgatgcaaatttcccccgaaggcctatatagggatagtcatagcaatgttgttcatagtagtcaaaagctggaaacagttcacatgttcctcaaactgggcttttcaaactcaggaccagttttccccctannnnnnnnnnnaattgaattttagtatgtctgtnnnnnnnnnnnnnnnttattatacctctgtattttttaagttgaatgccaaatggtccagctgctgtgaatgcaaaatggtctagctg

SEQ ID NO: 108969 - DNA, 354 bp, Homo sapiens
  misc_feature (1)...(354): n = a,t,c or g
caggggctcctcccactcccccataaaaaaacaaatcttccctttcccaaatgggcaaagatgtttaccccccccttttccaaaaaaaggttcccaccgcccctccgccccaaaaaaaacccctccccccccttttttccccggggaccccaaaaaaaaaccccccccttccccccccttaaaagggggaaannnnnnnnnnnncccnnnnnnnnnnnnnnnnnnnnnnnnnnnnnnnnnnnnnnnnnnnnnnnnnnnnnnnnnnnnnnnnnnnnnnnnnnnnnnnnnnnnnnnnnnnnnnnnnnnnnnnnnnnnnnnnnnnnnnnnnnnnnnnnnnnnnnnnnnnnnnnnnnn

SEQ ID NO: 108970 - DNA, 342 bp, Homo sapiens
  misc_feature (1)...(342): n = a,t,c or g
gtactccgtgtctgaatggggcaaagtgtatcgatcacccgaatggctatgaatgccagtgtgccacaggtttcactggtgtgttgtgtgaggagaacattgacaactgtgaccccaatcccgtggtccagatcatttatagtgacaaatgtaagtttgtttatattaggaaaaggtctgtaagttaaatatagtagcagaattggaattcacaactatgtagcaagatagatgacaaatttctgtctaataaaaatctgaatgacttannnnnnnnnnnnnnnnnnnnnnnnnnnnnnnnnnnnnnnnnnnnnnnnngggnnnnnnnnnnnagccgccgcg

SEQ ID NO: 108971 - DNA, 350 bp, Homo sapiens
  misc_feature (1)...(350): n = a,t,c or g
gcagctgacagtgttctttaccctcttctcatgccacgtgattgacagaaatccagtagccccagcaccagatccacgtctaccaccccagagctgccttctgcttcccccaactccagttcgaggtggacagaaagctgttgtgagcaggaaaaccaacatgcacatatttattgagtccgggcttcgggtaagaattaaccttaaaatgagacttgctactttcagggagtctgcaccttttagtcttctgttgaatttctagtactgctcacttccattggaaatgccttactgtaaatacattttagannnnnnnnnnnnnacaggggcattggcccatttactag

SEQ ID NO: 108972 - DNA, 421 bp, Homo sapiens
  misc_feature (1)...(421): n = a,t,c or g
ataggtgatatttggccctcgaggtccagaacttcagctcgaggcataatcgcgggataccccaacgaagagggcatgtttgccagccagcatcacagggggnnnnnnnnnnnnnnnnnnnnnnagcaccataaccaccatcagtagtagcagcaccaggctctggaaaccaactggcacctcccgcagatgtcttccccaccgagtgcggctcggcacagactctgcctccagcccgactttggagggcccccagagttggggagcagcccgcccgtcctgtgctccaactcttccagcttgggctccaacacccccactggggccgcgtgcgcgccgggggactacggccgccaggcactgtcacctgcggaggcggagaaacgaagcggcggcaagaggaaaagcgacagctcaaact

SEQ ID NO: 108973 - DNA, 351 bp, Homo sapiens
  misc_feature (1)...(351): n = a,t,c or g
aactggattatctgacaccacacacacaaaatcaactcaaaatagattgaaatgtaagagccaagactgtaaaactcctagaagaaaacaccgaggaaaggcttcttgacattggtctcagcaatgatgtcatggatatgacaccaaaagcacaggcaacaaaaagaaaaataaacaagtgggactgcatcagactaatacacttctgcacagcaaagaaatcaatcaacagagtaaaaaggcaacttatagaatgggagaaaatatttgcaaaccatatgcctgataagaggttaatctccaaaatatataagcaactcctacaactgaatagttaaaaanaaaaaacct

SEQ ID NO: 108974 - DNA, 389 bp, Homo sapiens
  misc_feature (1)...(389): n = a,t,c or g
gcatattatgtcatagcttggctcttttatgttctaccaataggaacagtcgttgccattataggaggatttgtccactgattcctactattttcaggttatacacctaatttaacttgagtcaaaatttattttacaattatatttgtaggtgttaannnnnnnnnnnnnnnnnnnnnnnnnnnnnnnnnnnnnnnnnnnnnnnnnnnnnnnnnnnnnnnnnnnnnnnnnnnnnnnnnnnnnnnnnnnnnnnnnnnnnnnnnnnnnnnnnnnnnnnnnnnnnnnnnnnnnnnnnnnnnnnnnnnnnnnnnnnnnnnnnnnnnnnnnnnnnnnnnnnnnnnnnnnnnnnnnnnnnnnnnnnnnnnnnnnnnnnnnnnnnnnnnnnnnng

SEQ ID NO: 108975 - DNA, 421 bp, Homo sapiens
atgaacaatgctctggtaacaagccctcagtgaaggtacacaatgaggatgaatgggaagcaggtggattgggaggctagctcctggccacaggcaggatctgtccctgaaagcaaggtccctcatgtaatcccttacaataactccataaccaaggttcaaaagattaagcaacaaagagcacaggtccatgtagcttataaatggtgaaaatggattccttgcatcatttttactctttccactctaaaatactaatactgtgatttactcttcttctatatcactatttctttttctttcaataggtttttggggaacaggtggtgtttggttacataaataagttctttggtggtaatttctgagattttagtatacccatcaccctgagcagtgtacactgtacccaaggtgtagt

SEQ ID NO: 108976 - DNA, 446 bp, Homo sapiens
  misc_feature (1)...(446): n = a,t,c or g
gctaaaatggccccaggctggtctccaaccccnggccctcaaagtaacccttctgcctcaagcctccccaaagtgctggggacttccaggcgctagccaccgcacccggctatgttatccgttttttaacaattaaaaagaaaaaaaaccttcaaatgagctttaaatttcccttgaatttttaaatgaatagatttatgagttattgagtacttactatatatacttgttaccatggagatggagggcaaaatatggataaaacctaactcctctttccaagaaggctcaaagtttaaagggaaccaaaattctaaactgtttttttttcgtgtgtgtgtgagacagagtctcactctgtcacccaggctagagcgtagtggtgagatcaagggtcactgcagcctcaaccttccgggctcaggcaatcctcctaccttaaacct

SEQ ID NO: 108977 - DNA, 367 bp, Homo sapiens
  misc_feature (1)...(367): n = a,t,c or g
ttcactatgcctttctctttagtcagnattaaaagtcttttttaaagtattggtatgaaaacaaatttttgttgccctgataatggaaccttttcacaatgcttctagactgatgtgtctaatacttcctgctgggcaaaatatccacaaagtacagaccactgataactccacccatgaagctcaccaaaaaggaaagaagagcagaatacaacgagcttgtggctagggtacgcctctctgatttcacttttcctgaaagagccataaaggttacctgatggccaggcgcagtggctcacgcctgtaatcccaacactttggaaggccaaggcgggcagatcacaaggtcaggagccacttgcca

SEQ ID NO: 108978 - DNA, 402 bp, Homo sapiens
  misc_feature (1)...(402): n = a,t,c or g
aagtgacagaacagtttttttttctatttagagacctcttccaaaaagctgaataggagggattattttctcaagaacaccgcagaccagtatttctcatgcacactgatgcaaaaattctacaaaaaacttttaagtagactcttcagagaaggagaatatatcatgcccaggtgtggtttatgccaggaatccagggtaggtttaacattgaaatctcagtcgatcaatcagccactgtgattcaccagactagcaacctaaaagacaaaaccatctcaacagatgcagaaaaaagatatgacaaaatccagcatccatttctgacttttaaaaaaattctcagtaaactaggnnnnnnnnnnnnnnnnnnnnnnnnnnnnnnnnnnnnnnnnnnnnnnn

SEQ ID NO: 108979 - DNA, 403 bp, Homo sapiens
  misc_feature (1)...(403): n = a,t,c or g
cccacgcgtccgaatcatactgctcaaagcagaaatcaccaggcccagatgggttccttggtgaattctaccaaacatttcagtaggaaattataccaattatttataatctatttcaggaaatagaagctaaggacatacttactaatgcatttggtgaggctgtcatgaagctaatactaaaatcagacaaaagcattataaggaaagaaaactttagacctcttgtgtgtttttttgttttttgnnnnnnnnnnnnngaaaaaagggccccccttttttcccaagcctgaagtgggggggcgtttttaagtttaattattacccaatttcttggtgggtgggtgtcattgtgtcttttactccttaggattttgtttctgtggtcgtgactttcctcttg

SEQ ID NO: 108980 - DNA, 446 bp, Homo sapiens
  misc_feature (1)...(446): n = a,t,c or g
gagggaagaatctncgggncgacccacgcgtccgcccacgcgtccgaatcatactgctcaaagcagaaatcaccaggcccagatgggttccttggtgaattctaccaaacggttcagtaggaaattataccaattatttataatctatttcaggaaatagaagctaaggacatacttactaatgcatttggtgaggctgtcatgaagctaatactaaaatcagacaaaagcattataaggaaagaaaactttagacctcttgtgtgtttttttgttttttgnnnnnnnnnnnnnggaaacagggacacctttttttcccaagcttgaagtnnnnnnnnnnaatcaaagttaattgaggcttaaccctccggtctgggggggccttcctttttataaacccccaaattattgggacttggggcgagcccccaccacacacccccccg

SEQ ID NO: 108981 - DNA, 158 bp, Homo sapiens
gggggggccgttttaaaggatcaaagtttacttacgcgggcttgcaaggtaaaattttttttatagggcccccaaaatcaaattcatgggccggggtttaacaacgtcgggatgggaaaaacccgggggtaacccaattaaatccccttgtggaaaaa

SEQ ID NO: 108982 - DNA, 406 bp, Homo sapiens
cccacgcgtccgggctttgggacatccctacctcactgctctctccctgacagctggctggtggctcatcaggccggagcagctggcccatgtcctggggcactagggaagcttggtcatcctgcagtgcgtggtccgcaccaggatcagctacacccactggtaccagcagaagggccaggtccctgaggcactccaccagctggccatgtccaagttggatgtgcagtgggattccatcctgaaagcagataaaatcatagccaaggatggcagcagctctatcttggcagtactgaagttggagacaggcatcgagggcatgaactactgcacaacctgggccctgcgcagccttgcatgctgccccagccctacacaaaaggactcttcctcccgatccaac

SEQ ID NO: 108983 - DNA, 347 bp, Homo sapiens
aaaaataattcccaattcactttgaggctaccataattttaataccaaagggtggcaggttcattacaagaaaggaaaattataggccactatatctaatgaacatacttataaatatcttaaagaaaatattagaaagtaaagttcagtgaattatttattttaggaatgcaagattttggcttaacatcacaaaatcagtgttttcaacccattcaactggatttattttcaacaaactatctgggacaactggatatccacatgcgaaataatgaagttggatccctctttatacaatatgcaaaattaactaaaaacatattcaaggacctacccataagggc

SEQ ID NO: 108984 - DNA, 398 bp, Homo sapiens
  misc_feature (1)...(398): n = a,t,c or g
ctgagaaaggcagcaacttggaaaacgtatttgaagatgttgtccacagaagtttccccaacctccctagagaagccaacatttaaattcaggaaatgcaaagaatccttgtgagatactatacaagacaatcatccctaaaacacatagttctcagattccccaagtcctnnnnnnnnnnnnnnnnnnnnnnnnnnnnnnnnnnnnnnnnnnnnnnnnnnnnnnnnnnnnnnnnnnnnnnnnnnnnnnnnnnnnnnnnnnnnnnnnnnnnnnnnnnnnnnnnnnnnnnnnnnnnnnnnnnnnnnnnnnnnnnnnnnnnnnnnnnnnnnnnnnnnnnnnnnnnnnnnnnnnnnnnnnnnttttcttttttaaaattttaaaattattttttaaaattt

SEQ ID NO: 108985 - DNA, 393 bp, Homo sapiens
  misc_feature (1)...(393): n = a,t,c or g
tatatatgcacccaacacaggaacacccagattcataaagtaagttcttagagtacaaagaggctcccacacaataatagtaggagactttaacacaccactgatagtcatagacagatcatcaaggtagaaaattaacaatgatattcaggntctgaacccaacattccaccgaatgagtctgatagacatctacagaactctccatccaaaaacaacagnatatacattcttctcatctccacatggcacatgctctaaaattgnccacataatgcctttcttttcagtggtccatatgtaagtcttttgaaagtggcagcatctctactgctcatgcttgttgcaaggaactctactggaatacaagggcttttactaatctctaatgct

SEQ ID NO: 108986 - DNA, 268 bp, Homo sapiens; identical to SEQ ID NO: 108843

SEQ ID NO: 108987 - DNA, 392 bp, Homo sapiens
agactgcgtgcagaatgtgactgtgtcaacggatctgggtcatctcaagccttggctccttgaacgttgggccgccatgtgcttcccgaaagcactctctgatgacatgaataatctgaagggccgaatgcacctcgccatagaaagattttatgataacatgcccaatgcagaatcatgacgtggactggtgatgtcgagcccggcagagctggaggacgacttcaaagagggctacctggacacagcggcggcttactatgaagagcagcacccagagctcactcctctacttgaaaaagagagagatggattacggtgccgaggcaacagatcccctgttccggatgctgaggattccgcaaccgacgagcctggcgagagcttttggg

SEQ ID NO: 108988 - DNA, 420 bp, Homo sapiens
  misc_feature (1)...(420): n = a,t,c or g
caggacnnnnnnnnnnnnnnnnnnnnnnnnnnnnnnnnnnnnnnnnnnnnnncaagatagctgcacatggtgtcatgcaccatagttgccgctactcaggaggtcaagnnnnnnnnnnnnnnnnnnnnnnnnnnnnnnnnnnnnnnnnnnnnnnnnnnnnnnnnnnnnnnnnnnnnnnnnnnnnnnnnnnnnnnnnnnngaggcaaagaaccctgcttcataatatgaagtataagattgtctgaagtaagccagcaaaatatcgcctattttttgaaacaatcactatttttgccagggtttctaattttttaccttctttatcactagaatttgttttcttttataaaaatatggagatatccctaagaaatgcttccctgaatcttatacaacagaggcaaccagaaggatgaatgg

SEQ ID NO: 108989 - DNA, 417 bp, Homo sapiens
  misc_feature (1)...(417): n = a,t,c or g
ggcccgggccggggggccttccttttaaccccccccatttggggggttaagccccgggaatgccttaaataaccccgtccaagcccccccggggggcgaacccccccccttcccccaaatacaaaattttccccgggggggggcccccgtttttggggcccccctccctcaagggttaagggggggggcttgttttattcccgggggccaagcctccctgtgccgtttttccccccccgnnnnnnnnnnntgggcacaaaatttggccccctttccnnnnnnnnnnnnnnnnnggtaaaaagatgctggtagtgtatgttttttgtgtgtgcaagaaaaatctattaatgcacaacgcttgatgatctgttttggtgtaggcttctctataaccagccaagactcaaggctaagaag

SEQ ID NO: 108990 - DNA, 412 bp, Homo sapiens
  misc_feature (1)...(412): n = a,t,c or g
nnnnnnnnnnnnnnnnnnnnnnnnnnnnnnnnnnnnnnnnnnnnnnnnnnnnnnnnnnnnnnnnnnnnnnnnnnnnnnnnnnnnnnnnnnnnnnnnnnnnnnnnnnnnnnnnnnnnnnnnnnnnnnnnnnnnnnnnnnnnnnnnnnnnnnnnnnnnnnnnnnnnnnnaaggaaggattaaaataatctctgttcactgaggataattttatatgtagacaactccaaagattacatttttaaaaaactattggaactaaaaatgaattcagcaaaataccaagatacaaagtcaacacacaaaaatcacttgcatttctataaaccaacagtcaacaagctgaacagaaaattagaaaaacaattccaatgtcaaagcatcaaacagaataatacttaggaattaactaata

SEQ ID NO: 108991 - DNA, 394 bp, Homo sapiens
  misc_feature (1)...(394): n = a,t,c or g
nnnnnnnnnnnnnnnnnnnnnnnnnnnnnnnnnnnnnnnnnnngnnnnnnnnnnnnggaaaaccctagggctccccaacccaaaattaagggggtcctaaccaaaggggggaaaaatcccccttggaaatccgaattaaaggggaaagaaaggggaaaaaagggannnnnnnnnnnnnncccgggttggttttccaccacccaaaaaaattggcaaggggggaaacccaaacccggttccggaacctaaaacccaaggattcccaccacctccaaggaaaaaccagttaatttccaaaaagggaacccttaattgggctaactggggcgggtttccccttttaacaccccccctatattttttttaccccacctaaaacctttttttttccggc

SEQ ID NO: 108992 - DNA, 553 bp, Homo sapiens
  misc_feature (1)...(553): n = a,t,c or g
cccgcaagggtggccatttttggttggaaaagggatgccttccatcccaatattgaaaaaaaggggccgttccaatgggtcccccccgttattctaacccctttggaggcccaaacccgggggttcccctagggccagaggtttaaacccaccctggccacaagggggaacccccccttttctccaaaaaccaaaaattagtnnnnnnnnnnnnccgcccccgttattcccacttccttggagggttaaaccagaaaattccctttaacccggagggccaaatttccattaacccaaattggggccccccccttccagctggggggcaaaaccaaattttctttnnnnnnnnnnnnngaatgtggagagaaggatcagaaactccggggcagcctcaggttgtggatgcattccctagttggggagtagaacacgcagacacacagcgacgttctagacctccgtcctcgtccctctgtgatggcactgtgattatgacatgctccaggaaatccctaacgaaatcgtcgacccgggaattcaagaacggtgc

SEQ ID NO: 108993 - DNA, 427 bp, Homo sapiens
  misc_feature (1)...(427): n = a,t,c or g
agcaggtactggtccggaattaccgggtcgacgatttcgtgataccaccaaatagtctgttaaaaccaataagctgattcagcaaagtagccaggtacagggtcaatatgcaaaagtcagttgcatttttaaacatgaacaatgaacgatctgaaaaggaaattaagaaaacaatttcatttacaatagcaccaaccagaataacatactnnnnnnnnnnnnnnnnnnnnnnnnnnnnnnnnnnnnnnnnnnnnnnnnnnnnnnnnnnnnnnnnnnnnnnnnnnnnnnnnnnnnnnnnnnnnnnnnnnnnnnnnnnnnnnnnnnnnnnnnnnnnnnnnnnnnnnnnnnnnnnnnnnnnnnnnnnnnnnnnnnnnnnnnnnnnnnnnnnnnnnnnnnnnnnnnnnnnnnnnnnnnnnnnnnnnnnnnn

SEQ ID NO: 108994 - DNA, 281 bp, Homo sapiens
gacaagcacttggataattctctggcatctactaaatctgaacagatgcctaccctgtgacccaggaattccgctcctcgatgttcaatattcacgcaagagaaatgggtccaagttacacctgaggacacagacaagaatgttttctacagcttcatacatcattgcctcaaactggaatcaacctggaagcccttaatgggagagctggtcaacactttcttgttgattctatgatcagttatagcacgaaatcgtcgacccgggaattgcggatcggg

SEQ ID NO: 108995 - DNA, 433 bp, Homo sapiens
  misc_feature (1)...(433): n = a,t,c or g
tttcnnnnnnnnnnnnnnnnnnnnnnnnnnnnnnnnnnnnnnnnnnnnnnnnnnnnnnnnnnnnnnnnnnnnnnnnnnnnnnnnnnnnnnnnnnnnnnnnnnnnnnnnnnnnnnnnnnnnnnnnnnnnnnnnnnnggttttttccgggcccggccccggggtttatgccttaaaccccaaccttttggggggcccaggccggcgggttttttggggcccaaattttgaaacccccccgccccactggggaaaaaaaacccccttttttccaaaaaaacaaaaaggatcttagggggggggcccccccctttaacccccccttattagggggggtggggccggaaaaccctttgaacctggggggcaaaggttggaaggaccccggaacaacccccggccctcccccctggaggcaaaaatgaaactgttttaa

SEQ ID NO: 108996 - DNA, 374 bp, Homo sapiens
  misc_feature (1)...(374): n = a,t,c or g
cgtggggcggtagggcccaccgtgtatacccccccctttggtgggggaggcggattcatccccctttgtaaagagctccagtcccccccttcccccaaggggaaaccccctttttgtttaacaaattctacccagacgacaaggaaaaaaagccccccaatttaaccnnnnnnnnnnncccatgcccttaatcccattttcagggggggttttgccataaaaattccccaacccgggggggccaagggtccaattaaccccagggttgcccctcccgcccccctggggggccaaaaccggtctcccttcccnnnnnnnnnnnnnnngaaagaaagaaagaaattacatattcaggttctagcaaatgcacgaaa

SEQ ID NO: 108997 - DNA, 377 bp, Homo sapiens
tttcgtctcagttttcctacaaaataaaaaacttaataatgacaacacaggaaattatcttgataaaacataaaatctttgtttcgtaggccagttaccaaaaaggtaaagaaaaacctcctgtggtgtgattgcttctcctcatgggaagcccgtttggtttgcctggaagtagaagctgatgaaaagtacttgaatttaatgagacataggaagagggtgtccagtattacgagtgcgcaccgtattatagaggaatgtcaatgtgacagttagtggcttgagcagggcagtacagggctctaagtcacagtatgggaagttttctggttccatggaacaattcagacacatccagaaaagccgaatgtacagat

SEQ ID NO: 108998 - DNA, 396 bp, Homo sapiens
gggacatgagggtattcccgggtcgacgatttcgtgaaaagtaaacagcaaggatgtattataaatgaggtggataactgggggagagacggagagggagaatccaagagaggagctcaaagacacctacacacagagtcatagagacacatgcaataggcagagagagaggagggtcagtcagagacagagaagtcaaaaacagagagggacagtcacctaggcagagttagaaagcagggtaatcagagatgtagacagacgggcagagttagaaatgagggacagacagatacagggagggagacagaaagagtgaatgtcatgagtaagatggagagcttattggatttttgtctgttatttgagaagaacatgtaaatatttatagttggg

SEQ ID NO: 108999 - DNA, 385 bp, Homo sapiens
atcgcattataactgagatccttacaaaactcttatcccgttcaaaaagatttatagttgctcttatatttgctataattggcctcactgcagttaccaccactgctgcagtagctagtgtggctttacactcatctgtgcaaactgtcaaatttgttgataaatggaaaaagaattctatgaaattatggagctctcaggcccaaacagatcaaaatatagttagtccaattaatgatctctctcagacagtaatttggatgggggattgcatcataagtttataagctagaactcccatgcaatgtgagtggaatgcatgcgaaatagacgttcctcctcttagcagaaccacagaacagtgatcgtggacaggattgttgaa

SEQ ID NO: 109000 - DNA, 386 bp, Homo sapiens
tttcgtcttactcctctgcctcatcgtggcctttcatgccaaagaggtccaggtagggcaggccccgcccctaagccttgctccctccaaccccctcagcgccctgtcagctcacactttccaccctcctcctcctcctgatctgagtaatgaagttcttctgccctaggtgctgcgtccacaccctcacctacccagatgggatgaaccatgagcagacaggcagagcctccccaaccagctccgccttcccctgtagtccccagcccccccttgcacactcacggatgctgagagtgcccttgcagccctgcttccgcccccaggcctctgtccactctgctcccaggcactcagcttcccagatctctgtgctccgacatggc

SEQ ID NO: 109001 - DNA, 483 bp, Homo sapiens
  misc_feature (1)...(483): n = a,t,c or g
nagccttttgggttccctgcacccccccccttcaaggttcaaaggattttccgcccccgttttcccaggaagtgggggttccgggcctnnnnnnnnnnnnnggggnnnnnnnnnnnnnnnnnnnnnnnnaaaaacaagggttttccccggtgggccgggggggtttcaaacccctgttttcaaaggttccccccccctgggccccccaaaattttaggattccctttttaaacccccggccccgcccccccnnnnnnnnnnnnnnnnnnnnnnnnnnnnnnnnnnnnnnnnnnnnnnnnnnnnnnnnnnnnnnnnnnnnnnnnnnnnnnnnnnnnnnnnnnnnnnnnnnnnnnnnnnnnnnnnnnnnnnnnnnnnnnnnnnnnnnnnnnnnnnnnnnnnnnnnnnnnnnnnnnnnnnnnnnnnnnnnnnnnnnnnnnnnnnnnnnnnnnnnnnnnnnnnnnnnnnnngaaatcgtcgacccgg

SEQ ID NO: 109002 - DNA, 406 bp, Homo sapiens
  misc_feature (1)...(406): n = a,t,c or g
cgggggccccgcccgttaattccccccctttgggagcccaagggggggggccccccgtggtgcccagaggttttttaaccccccgggccacccggcagtgaaggaaaatccgccccctgccttccaccgtaaacaaaaaagtaaaccccccttcccnnnnnnnnnnnnnnnnnngnnnnnnnnnnnnnnnnnnnnnnnnnnnnngttaaaccgaaggtctttttcctataacttcagcaacagtcataacacacagaaccacaacccacttttatctgcggctaatcactcctaataaaccaaccacataggcatagttcacaaagacattctgctcttccaaagaaggtaaaaaattttgagaagtgaattatatgtcaccttgggatttaagaatagcacgaaa

SEQ ID NO: 109003 - DNA, 446 bp, Homo sapiens
  misc_feature (1)...(446): n = a,t,c or g
gtgccgaattcggcacgagnnnnnnnnnnnnnnnnnnnnnnnnnnnnnnnnnnnnnnnnnnnnnnnnnnnnncttcagtccatatgtgggtgtgcgcacacgcgagaaatatacagaggtgttgtgatttaatccatcttcttgagacactgagggacaactcactctgagtggcataacactgggtctgtctatacacaatatctgtatactgtgtgtacattttcccatgggtgtctacaggacgctagtggggaaaaaaggatcttttcgtgacttgagacactctcacccatctctatatcagagtttaaaatatttattggagtgtgaagggagtgtggaatatcacatgaagatctctctccatatctcacacacagatctttgtggtcacccagtggtgtgagatctagaggaatatggagataatctcccactcaccg

SEQ ID NO: 109004 - DNA, 455 bp, Homo sapiens
  misc_feature (1)...(455): n = a,t,c or g
aattctcacgaggagaacacactttcttatattgcatcgcggcgacctggaggtccgatgcttcgtgctgcggtagaagggagtggaatacgactaacaacggcggcccagcgcgcgcgagacgacccaagacccacgcgcactcgcacgagcgcgtgcacagacttggagcacagaccctcccttcagatccgcagtctctagctgatcctggagaaactaaaacctgcacagcaaaggaaacaatcaacagactgaaaagacaacctacagaatgagagaaagtctttgcaaactattcatctgacaggggannnnnnnnnnnnnnnnnnnnnnnnnnnnnnnnnnnnnnnnnnnnnnnnnnnnnnnnnnnnnnnnnnnnnnnnnnnnnnnnnnnnnnnnnnnnnnnnnnnnnnnnnnnnnnnnnnnnnnnnnnnnnnnnnnnnnnnnnnnnn

SEQ ID NO: 109005 - DNA, 474 bp, Homo sapiens
gacctcagggaatggggtcgaaggggcggcgctcgtccgcggaggtgggcgggagcggcccggggcctccggcctctagagagcgggagtgaccctcggtttctggcctccgaggggcgggagcgatcctcagccatgtccctagcctctggcttccggctgatttttaaatttttggtagaggcgggatcttgctctgttgcccaggctggtctcgaacttgtggcctcaagcgatcctacctcctcggcctccccaagtgcggagattacagacagagccactgcgcacggccgtggtcagctttgaaagctgggtagatccctttggcttatacgcctttctgctagcttaccctgattctgcttctggttcagatagtattttaatatttctagtgtgtctttttctaagatatctgaaatcaatttgtggaatgaagtggcatgaaaaataaaccaataatcattagta

SEQ ID NO: 109006 - DNA, 484 bp, Homo sapiens
  misc_feature (1)...(484): n = a,t,c or g
ttgactgtgcggaattcnnnnnnnnnnnnnnnnnnnnnnnnnnnnnnnnnnnnnnnnnnnnnnnnnnnnnnnnnnnnnnnnnnnnntttaaaaaacagtaataaaaaaaagttagcaatgacgataacgatttgcacaatagcacaacatcacacagcccacctcaggccagtgttctgatgaatgtcatggtaagttgcactcatggatcaaaatgtggcagcatgtgctcagcctctggtaatcagcaaaatgcaaacgcagccaacagtgcattatcacatcccagccatgaccacagcaaatatgaagaggtcccatcgcaccaaatgttggtgagaatgtaggaaaacaggaaatcatatgcgccagcagcatgatggtaaattgttccctccactttgaagaacaggttgccaatttctggcaaagctgaaaatggacatctccttctactcagcaattttactctggctgtgtccca

SEQ ID NO: 109007 - DNA, 440 bp, Homo sapiens
  misc_feature (1)...(440): n = a,t,c or g
cttagagatgtaccaccccaggaccacgctgcgcttccagcttgcaaggtacaacagtcctgcccagaaatgccacctgtggctcacccatgtgcccacccacagtgggaatgtaagtgcctcaagagccagggcttgcttcttttctctcagacaatcagcacagaactttacctatggatgcaactcaagaaaagcataacccaagaggagggataggggaggaggcaggggaagaggaggaggaagggaggaggaggnccaggatgacaagggtagaagaaaagaaatgaagaagaggaagaagaggaggaggagaagggaaaggaataaaggaagaacaggcagaaaaagaggacacaaaagggaaccaannnnnnnnnnnnnnnnnnnnnnnnnnnnnnnnnnnnnnnnnnnnnttccacgacactgcacatgga

SEQ ID NO: 109008 - DNA, 422 bp, Homo sapiens
  misc_feature (1)...(422): n = a,t,c or g
cgcctttagacttgagcggccgcnnnnnnnnnnnnnnnnnnnctcaattgttttttatttattttctgtggctctcgactaccccctcatttttgctgtttttacatgtgatgccttcggaatacctgctggaaatgggaagtctagaactacagaaaagagaagccccaagacttcccaagtgtgtgtgtgtgtgcatacgtatgcatgttcatgtgcatatgtgtatatgtgcatgtctgtgcatgttcacctgcatatatgtgtgcatgtgtgtgcatctgcatgtgtgtgcgcacatgtgtgcacgcgtaggcatgtgtgtgtgcatgagtgctcagcagggaggtgctggagcacggctgttctgtgggaggttataactccccagtggccattgctctccgaattccaccacactg

SEQ ID NO: 109009 - DNA, 320 bp, Homo sapiens
tctggtttgttggatttttaatgagtcagtgtttggaattgttggtcccttttattttatatttcttttctattttatgtatgcaggcatattgtgtttcctttctgttttatgtatgcatgtatatctttggctggtatatttttttcttttttatctccttttagtttaatttttttctctttactaactatagctttagttgctttccatacatttttatttgcagtaatttcattatcattttttccacatttttttctaatttccattctgatatcttttattattggtacttggattatctataaatatatttc

SEQ ID NO: 109010 - DNA, 228 bp, Homo sapiens
acattcggcaaaataggcttcaaaatagaaaatgttactagaaatagagacatattttataatgcaaaatggtcaacccatcaggaaaatatattaattgtaaagatatgtgcacctaaaaatagagcacccaaatgtataaagtaaaaattgtcaagaatgaaggggaaaatagacagctcaacaataggagttgaagattgcaatataccactttctttcttttta

SEQ ID NO: 109011 - DNA, 228 bp, Homo sapiens; identical to SEQ ID NO: 109010

SEQ ID NO: 109012 - DNA, 434 bp, Homo sapiens
  misc_feature (1)...(434): n = a,t,c or g
accaggcctggtgggggccgcctttaaacacagctactcagaaggtttaagcaagggaactccttgtccaaaagaagtgaagggtgcactgagctgaaatcatgcctgtgcccttcaggctggggggcaaagcaaaattccctttccnnnnnnnnnnncaaaacacataagcacagactagggaaggtttaaaaacagatgttgagagtataatctggtccagacttttaaatggtacacactataatgcaccaatccaatcccagtcctaggaatctaccctacagaaacaccagcttaagtgactaaaggtacatctctagcacattcaggccagcactgtctgtaaacgcaaaaagagcctgaattctcaataggactagtttttttaaggcaaatcaatgtatcagcaaataagaattacacgacactga

SEQ ID NO: 109013 - DNA, 455 bp, Homo sapiens
catcattacgccaagcttggcacgaggcgcgccgctgcccgcatctccgaggcccgcgacgagcggggcctcacgggagctggatgctcggagcagcaaggcggccctgggggccccttccggtcccggggctgacgcctggcggcgtctccgggaacccgcgccctttcaagcgccgctggctcctgtttcacagatggagaccctgaagccccaacaagcagcctccccagcacctcccagtgactgaaaaagctggcactgggcgcccgtctcactctccacccagctcccaggctgccccacgggaccagcacctttggggagagacgagacctgaacaaacgctggggctggatccccagggtgggtcagaacagccgttgccctgaaagctggcccggacagatgcgtgcggggcgtgccaccggagctccttccagcttgcgtctggg

SEQ ID NO: 109014 - DNA, 248 bp, Homo sapiens
attcctttctgtagccactgtgagccaaaagcacgggcttaaactgcagagtgctgtgtgtgcactcacaaatcccaggttcccagagtggagagccctgcaccccagccgcggccaagggtcagaagtagcaactggtgattaatcaagtggctcctgtcttaagacagtcagcagttattgtctctgcaggccagactatagaaataagcagacccacaaaagccagcaattaatatttccccggg

SEQ ID NO: 109015 - DNA, 248 bp, Homo sapiens; identical to SEQ ID NO: 109014

SEQ ID NO: 109016 - DNA, 132 bp, Homo sapiens
ttttttttttgagacggagtctcactctgtcaccaggctggagtgcagtggcacgatctcagcttactgcaatctctgcctcccgggttcaagcgattctcctgcctcagcctcctgagcagctgggattac

SEQ ID NO: 109017 - DNA, 392 bp, Homo sapiens
  misc_feature (1)...(392): n = a,t,c or g
nnnnnnnnnnnnngacaaaggtttgcttttttttgcccgggtggagggccaggggggtattttggggccccgcaaccttttgcccccagggttaaacaaattttcccccccaaccccccgaaaaagtgggggtaaaggggcccgccccccaagcccggaaaattttggtttttttcgggggtttccccttttgggccggccggtttttaaatcccggccccgtggtccccccgccctggggttcccaaaccannnnnnnnnnnnnnnnnnnnnnnnnnnnnnnnnnnnnnnnnnnnnnnnnnnnnnnnnnnnnnnnnnnnnnnnnnnnnnnnnnnnnnnnnnnnnnnnnnnnnnnnnnnnnnnnnnnnnnnnnnnnnnnnnnnnnnnnnnnn

SEQ ID NO: 109018 - DNA, 626 bp, Homo sapiens
acactggtgcagagttccggaatcgacccacgcgtccgcggacgcgtgagagagccggctcggatctgggattctgaggctccccaccgcggtccggcttctctgggagactgtctacaaaccgacgagaggcgtctaccttttaccctagggggcggatttgggtaggagccgagcgttcggtcggaaacgcccccttcttcctcctgggcggggcaagtgaggccaagtactgggcctccagggcgtcagtacctctgtgagacatggctcgctgtggggaaggcagtgcggcccccatggtacttctggggtccgctggagtttgcagtaaggggttgcaaaggaaggggccgtgtgagcggcgccggctgaaggcgacggtgtcggagcagctcagccaggatttgctcaggcttctaagggaagaattccatacagatgttaccttctctgtgggttgtactttgttcaaagcacacaaagcagtccttttaacaagagttcctgacttcaattttcatactattggacagacatcaaatagttgaacaaatcaagagcctattgctgtgttgaatgttgaacctttataacttagactgtttttacagattttatattcg

SEQ ID NO: 109019 - DNA, 391 bp, Homo sapiens
  misc_feature (1)...(391): n = a,t,c or g
cgaagaggtctctatgggtagaggccgatctgctcattgagagatctcaggacgacatgctcatcaacagagcagaggctgtgaagcattttgaggaaagcctaagccgaaccaatacctcaacagacttttaccaggcactgcagaattcactgggtggtgaggactcacatgcccgcgcagaggctgatgctacatggtattactctctggagcactccacggatgactatgcctccttctcccgggctctggagaatgccaaccggaactactttatcatctgccctataatcaacatgaccagcgtctggtcatagaggacccgatgaaacacttttatgtaccatgctcctgagaactacgagcatggcagcctggagctgctgtn

SEQ ID NO: 109020 - DNA, 392 bp, Homo sapiens
  misc_feature (1)...(392): n = a,t,c or g
atcccagcctggatgataaagccagaccttgtctcnnnnnnnnnnnggggactttaaaccccctctttaaggggaattggaccaaaaccggcctggttaaaggatcttttttaaaattcggtaggaaaataacttcaagggaaaattccaaactggacccggaataacaaaaataacctatttttggcatggggggattaattttttaaaaaaaaccaaattttggcaaaggaacctttaaaacccctaggccttggctccagggaattggnnnnnnnnnnntttacgaaagggaataaaaggttaatggttgccaggggggcctccaccacccggaacaaacctttggataaggtttatggggaaatggaaaaaaactaatttctccgggg

SEQ ID NO: 109021 - DNA, 407 bp, Homo sapiens
  misc_feature (1)...(407): n = a,t,c or g
aaatgcttggatatgacgcttcctttggctatatctttgctatttagttagcccaacaaggaaacctcttagaatatagagtaggtatgtatgtgttttaagactttgaagctttcatgttgtccttgaagttccatctattatactaaatgaatgatggcatgtatatagtatgttcttagaatactgtattataatttctaaaactttaaaagatcacacttcagaaagtcaaagccatttataggaaatcagttttcctgatgcatagcatttggagttaaagagaagactaaaaatttcttgctcttgtgatggcggttagatgactatatannnnnnnnnnnnnnnnnnnnnnnnnnnnnntattttttgtatataaaattaaatgtcctataaagcctgac

SEQ ID NO: 109022 - DNA, 376 bp, Homo sapiens
  misc_feature (1)...(376): n = a,t,c or g
agaaatggagatcaatggcatgaaatctcacttggttgattacctcggataccacacgtgcttgcccaagaatttacagagttgctaagagttatgattcatccagatccacagagaagaccttcagcaatggcactggttaagcattcactattgctgtccgcttctaaaaagagtgcagaacaattaccaatagaattgaatgcccaaaagttcagaaattcacttttacaacatgaactcaacaccgcacagatggcaaaagctgcagctgaggaaagagcactcttcactgaccggatggccactaggtccaccacccagaggaatacaacatctcgacttattggaaagaaaatgatccgctctgtcagcn

SEQ ID NO: 109023 - DNA, 384 bp, Homo sapiens
  misc_feature (1)...(384): n = a,t,c or g
ncaacttcatagtacaatcctgaagacaaagcacaatcaaagcaatggctatgaagaggtggaagtggtgcaatcaaagcaaaagcagacgggtcaaaagcaaaggtcatggcaacagtttttagggatgctgaaggcattttgcttgttgactttctggaaggccagagaatgccaacatctgcttattgtgagagnnnnnnnnnnnnnnnnnnnnnnnnnnnnnnnnnnnnnnnnnnnnnnnnnnnnnnnnnnnnnnnnnnnnnnnnnnnnnnnnnnnnnnnnnnnnnnnnnnnnnnnnnnnnnnnnnnnnnnnnnnnnnnnnnnnnnnnnnnnnnnnnnnnnnnnnnnnnnnnnnnnnnnnnnnnnnnnnnnnnnacttgt

SEQ ID NO: 109024 - DNA, 407 bp, Homo sapiens
  misc_feature (1)...(407): n = a,t,c or g
aataacgcaattgcgggagatttcatttttagattttttatcatttttcctccccgggtgcggttgtgttatacatttaatatcacaccctctagtggctcaaataccgcattctcaaaggtagtatgtttttttcccgcttgacccccatgttgaaccccccnnnnnnnnnnnccaaaaaatttacccggggtgtgggaaggcccccccctttcccccccattggggggttggggaaagaaatttccttttacccccccgcccaaggggcccagggtttcttccccttcccccccaattgggggcacaaacaaattccctttttnnnnnnnnnnnnnnnngaaatttaagataactccctaaggattgtacaatgtaccttgtgcatttcagtcatgccatttaat

SEQ ID NO: 109025 - DNA, 218 bp, Homo sapiens; identical to SEQ ID NO: 108845

SEQ ID NO: 109026 - DNA, 369 bp, Homo sapiens
  misc_feature (1)...(369): n = a,t,c or g
ctactcacaagtaggttgacacttttatctattcatgaattcaactatttactcaacaacagcaccctacagcctattacatccttacctataaatataagacaatatgggcaagatctaaaaacattaaagaaagaaaccaaagatctaaataaatagggaaatataccatgcctagggattggaagaatcaatattgttaagatgtctcttctctctaaactgatctataaattcaaagcaatgccagtcaaaatcccaggagagctttttttgagaaatcagcaagcggannnnnnnnnnnnnnnnnnnnnnnnnnnnnnnnnnnnnnnnnnnnnnnnnnnnnnnnnnnnnnacaatagataaacc

SEQ ID NO: 109027 - DNA, 594 bp, Homo sapiens
tcagtgggattgtggccactgggtttggagcaacaggattcctgggccgatgtgttgtcaaccaccttggacgcgtggggtcacaggtgatcataccctatcggtgtgatacatgtgacatcatgcaccttcgtcccatgggagacctgggctggcttctgtttctggaatgggacgcgagagataaagattctatctgacgagtagtggaacacagcaatgtggtcataaatcttgttggacgagactgggaaaccaaaaactttgattttgaggatgtttttgtgaagattccccaagcaattgctcaggtgtccaaggaagctgaagttggaaaattcattcatgttgcacatctgaatgtgaatattaaaagctcttctagatatttgagaaagaaggctgttggagagaaagcagtgagagacacattttcagaagccattatcgtaaagctgttggacatttttggaagagaggacagattccttaattattttgcaaatatgtgttgggttggagctataccccttgtttccttgggctggaaggcagttaaacaaccagtatacgtcgtatatgcatcccaaggaa

SEQ ID NO: 109028 - DNA, 361 bp, Homo sapiens
  misc_feature (1)...(361): n = a,t,c or g
aatttctacaaatgtgaagaatgagccaccacgctcagccactagtcctcagatcttaacacacataagataattcatactggaaagaaactccacaaaccagaaagatgcaataatgcttttgacaacacctcaagcttttctaaccataaaaagaatcatattggtgagaaatcctagaaatgtgaagaatgtgacaaagtctttaaatggttgtcatannnnnnnnnnnnnnnnnnnnnnnnnnnnnnnnnnnnnnnnnnnnnnnnnnnnnnnnnnnnnnnnnnnnnnnnnnnnnnnnnnnnnnnnnnnnnnnnnnnnnnnnnnnnnnnnnnnnnnnnnnnnnnnnnnnnnnnnnnnn

SEQ ID NO: 109029 - DNA, 166 bp, Homo sapiens
tttttttttggattccacactaaaagcttaggccataaaagcaaaaataaataaatggaatgacgtcaaactgaaaagcttcttcaaaacaaaggaaacaatcaacaaaatgtaacaacctatggtctgggaaaacatatttgcaaaccatttatctgataaggga

SEQ ID NO: 109030 - DNA, 247 bp, Homo sapiens
gcaagactctgtgttaaaagaaaagtatgcagttaacgtcatactcaacagtgagactaaatggcttcccctcagattgagaaaggcaaggatgtctactctcaacactcctccaaagctacagtaatcatgagcatgtcatattggggaagggatagacacatggatcaataaaacaagaatctaaaaataaacccacacaaatttggacgactgactttttacagaggtgtaagagcaattcaat

SEQ ID NO: 109031 - DNA, 378 bp, Homo sapiens
  misc_feature (1)...(378): n = a,t,c or g
aatgcatagtttaaagtttaaaccttgccgagcagtaacaatctctagatgtctgttgtttcactctaatacttactgtggaattacacctgagttgttttccttcttttttatgagcctaggagatcagccataacctaggagtttgctacatatacctgaagcagttcaacaaggcacaagaccagttgcacaatgccctgaatcttaataggcacgatctgacttatataatgctggggaagatccacttgctggagggagacttggacaaggccattgaagtctacaagaaagcagtggagtaagtgtatctgtttcctttaaaacagtgagaaactaaaaaaattgagtggatatgtgaactcccaagcctan

SEQ ID NO: 109032 - DNA, 413 bp, Homo sapiens
  misc_feature (1)...(413): n = a,t,c or g
ttcccttccccggccccaattcttttcccctttttaaaaaaaaggtcccccccttcccccccgagagcccaaagaaattcaaaattttttaggccaggcaaggggggctcccccgtagacccccccctttaggggggtggggggttttttgggccatcccctccaggccaaaggtttggggcccccctaccccccagggcaaaacccggttttttttaaaaaaccaaaaaattacccgggggtaatggggcccccccttaatcccccctccccaaaggggtggggccccaaaactgctttaccctggagggggggggttccaagacccccaacttttttttcnnnnnnnnnnnnnngttatctatgtgatggcctttcacaatttgatctttatataaccttttttctctacc

SEQ ID NO: 109033 - DNA, 311 bp, Homo sapiens
  misc_feature (1)...(311): n = a,t,c or g
agtaaatcttaatgaccttagtcataatatgaccctaaaagaccagtggggaaagaaaaaataggtaaactggactgcatgaaaacttaaaacttttgtgcttcaaagaacaccatcaaggaaatgaaaagacaacgcacagtttgggagaaaatatttgcacattatatatctgagaggaaacannnnnnnnnnnnnnnnnnnnnnnnnnnnnnnnnnnnnnnnnnnnnnnnnnnnnnnnnnnnnnnnnnnnnnnnnnnnnnnnnnnnnnnnnnnnnnnnnnnnnnnnnnnnnnnntgagacacaaaagg

SEQ ID NO: 109034 - DNA, 277 bp, Homo sapiens
agccaccttggtcttggagcgcgaggactgagacatacagcggaaggtgtggaatgcggaccctggggccacaggtactcgaggaggctgcctggctcagctcctacaggtagctgggctggagccccgttgagtccctttcctgcctggtactggccaaggtggcttttctctcaaagccccttctcagactggacacggtggctcacatctgtaatcccagcactctaggagaccgaggcaggtggatcacctgaggtcatgagttcaagaccaa

SEQ ID NO: 109035 - DNA, 362 bp, Homo sapiens
  misc_feature (1)...(362): n = a,t,c or g
gtgccccgattttagtcgctggtcggcacgccctactggatgggcccagagctcatctcccgccttccctacgggccagaggtagatgnnnnnnnnnnnnnnnnnnnnnnnnnnnnnnnnnnnnnnnnnnnnnnnnnnnnnnnnnnnnnnnnnnnnnnnnnnnnnnnnnnnnnnnnnnnnnnnnnnnnnnnnnnnnnnnnnnnnnnnnnnnnnnnnnnnnnnnnnnnnngaactatctcaaaataatgacttaacatcacaccaagaggaattaggaaaaacaagaatgaactaacctcnnnnnnnnnnnnnnnnnnnnnnnnnnnnnnnnnnnnnnnnnnnnnnnnnnnnnnnnnnnnnnn

SEQ ID NO: 109036 - DNA, 358 bp, Homo sapiens
  misc_feature (1)...(358): n = a,t,c or g
nnnnnnnnnnnnnnnnnnnnnnnnnnnnnnnnnnnnnnnnnnnnnnnnnnnnnnnnnnnnnnnnnnnnnnnnnnnnnnnnnngaaacggattttccttccacccggggcaaccgagggaaactttgtctaaaaaaaaaggcccttatttgttttaaaaaaattgggggcccggggccaggggttattccctgtatccccacctttttggggggccaggggggccaaatcctttgacccggaaatttaaaacccacccgggccaccgggggaaacccccttttccacaaaaaatccaaaatttattggggccctgtattgcgcccctgtatccccgggtcctcgggggggccagggctt

SEQ ID NO: 109037 - DNA, 393 bp, Homo sapiens
cacagcattgttcaccgattcagagtcatccctctcctttaacagtgtctcctaatcagtcacagtcagcacagcagtctgtagtggtgtctcctccaccacctcattcaccaagtcagtctcctactataattattcatccacaagcaattattcagccacaccctcttgtgtcatcagctctccagccagggccaaatttgcagcagtccactgctaatcaggtgcaagctacagcacaggtgaatcttccatcccatcttccacttccagcttcccctgttgtacacattggcccagttcaacagtctgccttggtatccccaggccagcagattgtctctccatcacaccagcaatattcatccctgcagtcctcttcaattcccattg

SEQ ID NO: 109038 - DNA, 354 bp, Homo sapiens
aaagatacaatactgtattgttcagtcatgtatacctatacatatatatcttatgtttttcattgagtcctattttgacacatatttgttctttaaatatatatctttttgttgcgcgatttcatctaggctgacagagtacttcttggtggtcctggtagcttttattggcaaggtaggttaatattttttaaattacaattggtgactatgtgtcgctgattcacctggctaattgtatgcctatgacattttacaaattattttaaagaaagaaatggaaatacaattaaagtatataaacactccattttacacagtgttttttataagaatatatataatatatattaa

SEQ ID NO: 109039 - DNA, 349 bp, Homo sapiens
gtttgagattgaaatagacaccctggaaaccacctgccatgtgctggaccccacccctgtggcatgatgcagcgtgaggcagctgaaggagcatgctgtcgaaggagactgtgatttccagctgttgaaactagatggcaagttttccgtggtatacgctaaatgtgattccagtccagactcatccgaggacgtgcgcaaggtgtgccaagactgccccctgctggccccgctgaacgacaccagggtggtgcacgccgcgaaagctgccctggccgccttctacgctcagaacaacggctccaattttcagctggaggaaatttcccgggctcagcttgtggtaaag

SEQ ID NO: 109040 - DNA, 378 bp, Homo sapiens
cacgaagtcagattatattttagaagactggtgtggtgtcacagtacagtgtccatggaggcaatgagaccacgtaggaggccgggtgagaaagagaaagctgttctactaaccctcttggaaaccacagtgctgggaattccatggtgcaaactacagatggtacacctacatctgtgcaggaagtggctccccacactgggaggctccctgcaaaccatgccccggacatcttggcaaagtccccacaatcaaccagagcagtggcaccgcagaagtgcttcttacagatcaaaggcatgacctgtgcatcctgtgtgtctaacatagaaaggaatctgcagaaagaagctggtgttctctccgtgttggttgccg

SEQ ID NO: 109041 - DNA, 359 bp, Homo sapiens
  misc_feature (1)...(359): n = a,t,c or g
tggaagaaagagaatattttaagaacatatctctgcccatctatttatnnnnnnnnnnnnnnnnnnnnnnnnnnnnnnnnnnnnnnnnnnnnnnnnnnnnnnnnnnnnnnnnnnnnnnnnnnnnnnnnnnnnnnnnnnnnnnnnnnnnnnngccaggggccctgaaatttttcccatttccaaggcaacagggggccccttttggggcagggaaaaccacaattttgcgcctgttgtttcgtttttacaacatcagctttggttgcatccgaataaaggggcgggacttttaacaggggacccaggcctttttcgggtttaacattggagttgggccccaagacactgtcctttttaag

SEQ ID NO: 109042 - DNA, 693 bp, Homo sapiens
gcggtcagagccgcgggagtaggggccggccgcccggcaggggtgcggtgtgaacagaggcggtggctggggtggaggggcggggaggagtgctacatggatcgcggctcagggcccagggggtcgccccctgggtgtaaggccgcgctgtggagcaccctcgggggctccatgcaacagtcagcgccgactggccagtggggcatcagggcagactccagtccgcggagacggacggtgcgcaccgctcagcccaaggagagaagccgtctgcacttggaaacctcaaccttggcaaaaggtggatgaacgcaccggctcccctacaccttccctgccttctactggcccacgttccccctctgaagctggagttggcagccaatcccgttacctttcaactttaaggcatcttctacatagtttttctaagcaaaaaagcaataaaaattaaggtaattctgtagtggttcacacgcgtgggcgaggcacgcgcgcaccagacggccactctctctctcagccctgcggcgggggagctgtgcgcgaggcgagaaaaggccaccggggccgacgggcggacagtggaggtggggagtgtccccgcgcccctcaacacgcctccgtgaccggacccccgcaggacagggccgcgcggggctgtgagccgctcgagcgaattccaccacactc

SEQ ID NO: 109043 - DNA, 198 bp, Homo sapiens
aacatagacaaatgaaacagaatagagaatccagaaataaagccacacatgtacagccatctgatcttcaagaaaatcaacaaaaataagcaatgaggaaaggacttcctattcaataaatagtacagggatagctggctagtcatatgcaggagaatgaaaccggacttctaccttttaccatataatgaaattcac

SEQ ID NO: 109044 - DNA, 372 bp, Homo sapiens
cataacagactgaaagtactctacagccaaaagggcactcctggctccagccggaagacctgccgttacattccttccctgccagaccgtatgctggatgcgcctgaaatccgaaaagactattacctgaaccttgtggattggagttctgggaatgtactggccgtggcactggacaacagtgcgtacctgtggagcgcaagctctggtgacatcctgcagctttagcaaatggagcagcctggggaatatatatcctctgtggcctggatcaaaaagggcaactacttggctgtgggccccaacagtgctgaggtgcagctatgggatgtgcagcagcacaaacggctgcgaaatatgaacaggcactct

SEQ ID NO: 109045 - DNA, 404 bp, Homo sapiens
  misc_feature (1)...(404): n = a,t,c or g
agtgtgttagcttgtattagattcacatatttactcagtaagaattctttcattagagttttattcttcatatataagccttctctgatacttagctaaatcttaagtctattatctcgtgtgannnnnnnnnnncttacagatggcattggagtcaagagagattataaacaggccttgaagtattttaatttagcttctcagggaggccatatcttggctttctataacctagctcaaatgcatgccaggggcaccggcgtgatgcgatcatgtcacactgcaggggaggtaaggtctttcctaccagcttgtgtgtagggagttgatttgcccagcaggaaagtctgcgctttcaattctggtttttttggatagtttcttctggagttctagacctcagc

SEQ ID NO: 109046 - DNA, 373 bp, Homo sapiens
aactggaaaattaataatagtgacctttctggaggaatgttacaagacaaacgaatggagatagattaacatagcctacatattggggattaccatcgaacggcccggaaaggccctggttctcggcctcaaatttccaaagagtcttccatggagcgcactccttattttgataagaatggccctcccagtatgattggtggtggaaacacagcaacacaaccccggggcatgcagaactctccatcacaacctcttagttcattttagcctaatctccgtgctcaagcgcctcctccattactctcccctcaggttccagcttcattgctgaagtatgcaccacacaacggtggcctgaattcactctttg

SEQ ID NO: 109047 - DNA, 552 bp, Homo sapiens
ctggatgtgcctgaattaactaattattggaagtttattgtttctaaacttaggaaagtttttaaacaggtgtttggagtaggtttatgattttaaaactttaaaaagccttattggagtttttttgaagactgtagtaatgccttgtaggttcagaaataggaaaagtgtttgcagatgagcagtcaggggaaaaaaataggcaaagggttttgagccctaccccttagtaggtgctgtaacaactttttaagcatgttaagtgctccttttctctgggcagtaggtccagggacttgatagaatcatgaggtaagctcccttacaaacggctgcagtgacattcttctgggtactgacaggctggtgttctttcagaaaggccatcattctcactcgagaagccacaggccacttccaggagtccgaacccttcagtcatatagacccagaggagtcagaggagaccaggctcttgaatatcttatgacttatcttcaaaggtaatcattttccttcttcagacaataaataacacatgtcaactggtat

SEQ ID NO: 109048 - DNA, 418 bp, Homo sapiens
gaaagaagtggggaaactgaggtacagagaggccaaataatttgccaagccagccctgggattcaggtcctggaagtgtatctccagccaccctgccatgctacctagatacctttccctaaacaagaggctcgtccctgagctgccttgacaccgtcttttcccatccctggtgccagaatgaggtgcagaacatcaagttcaacagttcaggccagtgcgaagtgcccttggttcggacagacaaccccaagagctggtacgaggacgtggagggctgcggcatccagtgccagaacccgctcttcacagaggctgagcaccaggacatgcacagctacatcgcggccttcggggccgtcacgggcctctgcacgctcttcaccctggccacattcgtggctgactggcggaactc

SEQ ID NO: 109049 - DNA, 366 bp, Homo sapiens
acaacctctactcagttctactacaaactatctcaagaaataaatggtgacatggaacaggtcactgactccctggtcaccttgcaagatcaacttaactccctagcagcagtagtccttcaaaatcgaagagctttagacttgctaaccgccaaaagagggggaacctgtttatttttaggagaagaatgctggtattatgttaatcaatccagaattgtcactgagaaagttaaagaaattcgagatcgaataccatgtagagcagaggagcttcaaaacaccgaacactggggcctcctcagccaatggatgccctgggttctccccttcttatgacctctagcagctctaatattgttactg

SEQ ID NO: 109050 - DNA, 567 bp, Homo sapiens
  misc_feature (1)...(567): n = a,t,c or g
atttttaggagagacggggtttccccatgttggccaggctggtctcgaactcctgatctcaggttatccacccggcttcagcctctccaagtgctgggattacaagtgtgagccaccggcaccccggccctaatctcagccttttttatatcttcttgggtagggccccactttttggcatccccctaacaagaagtcctccagagatttttactactcaaacatgtgtgcgtcccaactcagatgtaattgtgttctttctgttcaccactcctacttccccattcccatttccttcctctgaccttagggttaggaatgggcccaatgattcctacaactttttggatgctattttcatttggattcctctaactgtctaaaatncacaagttggctaactttacttactgtaagggatcagatagcaaatagtttaggccttgtgggccattcaatctgtcataactacccactctgaccatatgtagtgcaaaagcagcccttgacaatatataaatgaatgaacgtgaatgtatttcaataaagctttacttgtggacactg

SEQ ID NO: 109051 - DNA, 288 bp, Homo sapiens
cggtctcctggggtcatggtagcacaaacgcacatgactgagtgctcaggggttctgaggcttgtccgctgacctggggctctggccctgggagatctgggggacctgctgtcctatatgtgatgctttgaaagaaaggggcatcattccaagccaagaggccccagagagggcaccgtggggtgttcaggcttctgtgaggccccagtgagatcctgtggctgtgcccccatcacctccacccactctgccctcccactagctgcccaacggatgaatcaacgcctt

SEQ ID NO: 109052 - DNA, 360 bp, Homo sapiens
ctctgttgttcaatcaggattccccaagcccctgactgctctcccctttacaactggatcccaagaggtctcgaatgcattttcaccatccatttcgaaggctcaacctggcgctccaccttcctcactgaggggactaaatttttatctgccttctcagccaagtagtctccctcctttatatttagggaaccaaccccaaggaattccccaaccaggatacaagccataacgccatacccctggcaggagaagggctaatccttacattgcaccaccccagctgcagcagagccaaacaccaggcccttctgctcatactccaccttctggaccccctgtttagatgtaccagacgcg

SEQ ID NO: 109053 - DNA, 236 bp, Homo sapiens
cggacgcgtgggtttgcatctaccctgctgaacctgaaacaagcagaggaagcaaaaactgctgacacagccattccatttcactgtaagtgcctccctatcttgataagatatacttagctcatccttgggccctgtttcagtagcagataaagagtgatttgatgacttggacagctaatgatatcacggaagataggaggagttagtatggcagctattgagagtcaggatcg

SEQ ID NO: 109054 - DNA, 377 bp, Homo sapiens
  misc_feature (1)...(377): n = a,t,c or g
ccaaagccaagccccttcccccccccgggaaaaacctttaataaaagaaagccccgccccccccgggtttttttggggggagagaaaataaaattgggggtctgggtggttctaggagcccaacttaatggtggtttacccaaaggggccctctgccccggggaagaggcttttnnnnnnnnnnnaaacaaaaaaggggttaggttttcaaggggggaagagggaaagggccaaagccaaggatgaagggggggggtggccaaaagccaatcatggaaggcccccccgggccnnnnnnnnnnnnnnnnnnaaagactatagctaagaaatgaaaagaaaaaataaagtaactgatttccttgggcagcagaattact

SEQ ID NO: 109055 - DNA, 363 bp, Homo sapiens
catttaatgtatttattgataatatagggctctttggctgttaatctttctatctcttgtcacttttgttcctctgttcttccattactgcctgtcttactgttaaatagatattttgtagtgtaccatcttaactcctatgtttctttgactttattttttgttttgtttcttagtggttgccttgggtattaaaactaacattttaacttactccaatcttttagtttcggtaggatccaaaaatttcatttagtatggctttgtccccttccccttgatttttgccattattgtcatgcaaattatacctttatacattatgtgatcaccaaaaggtttataattcttgcttcatgcagg

SEQ ID NO: 109056 - DNA, 370 bp, Homo sapiens
  misc_feature (1)...(370): n = a,t,c or g
ggttaaagacccgcaagggccacatgggtgaacccccttttttctggaaaaacaaaaaataactgggcaagggggggggcgcccgttatccccgtttatccggaaagttaggcaggaaaatttgtttaccttggagggggagggttcaattaaaccaaattgtgcccctgcccttcaggccgggaaaaaaaactcccttttnnnnnnnnnnnnngatgagggggccacgtggaaaaaccttgggctgagaacttaagtcctaaaggaccatctcattcctatcacactgcccctctttagaatgtgacccatcaaaatggaatctttccttttgagccctgttgaacaattagggtacattctctcattc

SEQ ID NO: 109057 - DNA, 364 bp, Homo sapiens
  misc_feature (1)...(364): n = a,t,c or g
aaggtcagagaaattttgtgagtcttattgaaatggggcagaattgtatccttggaagcagcagcgtggtgaccaaggacaagaggcaacttttctctgatatattttgctccatcacaattgtgttttactttatgtcttgttcnnnnnnnnnnnnaaatttttaaagcccctggactttaaaaccctcggggataacaaatttggggaccctgaaacagaaaaccttggggtgggaggcctccccaagggctgaaaaannnnnnnnnnnaactaaaaaaaccccccggcttcaaaggggcttcaaacccaaaactttttaccaaaaaaccctaaggggacccgggtttttgcaaaaaagggg

SEQ ID NO: 109058 - DNA, 375 bp, Homo sapiens
cccctgctttcaaggctacagtaacccaaggagtatcccaggtgttaggtatacaatatcactctcactgcgcctggaggccacagtcctcaggaaaggtggagaaaatgaacaaaacactcaaatgacatctaaaaaagctaatccaggaaacccgcctcgcatggcctgctctgttgcctatagccttactaagaatccgaaactctccccaaaaagcaggacttagtccatacaaaatgctgtatggacggcccttcctaaccaatgaacttgggcttgaccgagagacagccaacttagttgcagacatcatctccttagccaaatatcaacaggttcttaaaacattacagggagcctgtccccaagaag

SEQ ID NO: 109059 - DNA, 399 bp, Homo sapiens
tccagtgggggaattccaaagaagaccctgactctttttgttttttggctgtgagtgtattcaatgcaaaataatcctctctgattttactgaggtagctggccatgtccacgaccaaatctgcctttaaactggaattcggttgctgacccagcccgagcctcggctatcttgtcggcaccaggggcacagcactccgtctgtaggacgcgcgggcggccatgcgccccttcgacccctccactctgctgcccacctgctgggattactggacctacgcgggctcgctcaccaccccgccgctgaccgagtcggtcacctggatcatccagaaggagcccgttgaagtggccccaagccagctctctgcatttcgtactctcctgttttctgcacttg

SEQ ID NO: 109060 - DNA, 157 bp, Homo sapiens
caaaattcaacagtgtatgtcattgccttctctatagggtaccagtcgtccttcacactatcatgttttatgggatgataactgctttactgcagatgaacttcagctgctaacttaccagctctgccacacttacgtacgctgtacacgatctgtt

SEQ ID NO: 109061 - DNA, 378 bp, Homo sapiens
agcagttggacgcgcaccgacagataggcgtgggtgggggagctgcggacgcacaggtggagcaaatactcggacacagaccgctctatgaagccttggacccaaggcacgttctatgaccagctgggggagacgctgcagcatatattttgggtttatcgaagctgctttaccagggacgtgaaggaattcgccaaaatgctacgctgatactatcccttggagctacaggtgtacgctggctgcgaggggcaccctgggaacgcctcaaataacttcttccatgtagcatttcaaggaaaagagatcctgagtttccaaggaacttcttgggagccaacccatgaggccccactttgggtaaacttgggcattcat

SEQ ID NO: 109062 - DNA, 370 bp, Homo sapiens
aatttctgcatggctctcgcctttgagtgtgggctttgctctttaggtaaaagaactgcgtcgtgacttgaggataatgagccaagagctggaggtgaataatgcagcaccctatgactagctgaaaaagatggtgaaagaccagcatgaggctgaacagaaaaaggtatggggtcagggaattctggcctgtaaggactgagcattttcagtctccaatgagagagtaggaaatgtagctcaaaatgggtcttagggttacagagagggagggagggagagagagtgtgcgtctgtgtgctgttgacagagtgaagaatgttgtttataatttagtcagcatattaaccaatgcttaacccatatctag

SEQ ID NO: 109063 - DNA, 368 bp, Homo sapiens
ggaacacatagaaaaagatactctgtgcaaaaatttttttaaaaaaagagaaccttaacacattgtaaaccaccttgacctaagagacatatagaaaactacagtcaacaatagcatgataaatattttgctcaagtgtatgaggaacattctccaggacagaccatctatcaggccacacaccaattctcaaaaacattaaaatcatactaagtatcttctctaatcacaatggaatgaacttggaaatcaataacaaaaaaacagtgggaaattcataaacatgtagaaattaacacactcaaccaggggatcgaagaagaaatcacaagagaaataaaacatgacattatctagcaattctactg

SEQ ID NO: 109064 - DNA, 368 bp, Homo sapiens
  misc_feature (1)...(368): n = a,t,c or g
ngtcaagaaaatcaattgcagaacagacttcatgccatataatcagactgtgaaaaggcnccatgaaagaaataattataaaatcagaaagagaaaagcatctagtcacctataaaggaatccccatcagactaatagacttatcagcagaaaccttaaaacccaaaagagaatgagatgctattttcaaagagctaaaagaaaatgtcannnnnnnnnnnnnnnnnnnnnnnnnnnnnnnnnnnnnnnnnnnnnnnnnnnnnnnnnnnnnnnnnnnnnnnnnnnnnnnnnnnnnnnnnnnnnnnnnnnnnnnnnnnnnnnnnnnnnnnnnnnnnnnnnnnnnnnnnnnnnnnnnnagtataaaactc

SEQ ID NO: 109065 - DNA, 372 bp, Homo sapiens
ctaggcagatgtgatgactgctgttggcgtcggtcccctgacattgttggtgtgtctcaattgtgtgccagtccctgagacacccccacctcaagttgctcagtttggaccctcgggcgtcagtttgattccctgtcctcacccagctcttccagtgcgtcaacaagcccagatggctttacctccaggttgagtcctcactccttcctttctcttgctccccaccccaacccccgcctcattgtccaggccacggacacgtccttcctggtgatccagccctttcagtagcccatccctcaatgcagtgttgccgccttaccatccatcccctagaccatccagtgcggtcactgctggcctcttgcggct

SEQ ID NO: 109066 - DNA, 354 bp, Homo sapiens
gtctcatggtattcgggaaggcatttgtgggaagaaacactctgagcaagtcccagatatattacaactcaatgcaatctttaacatgttgaataccaaaaactgcccaagtttgaaggacaaaccgaaggtgatcatcatccaagcctgccgtggtgacagccctggtgtggtgtggtttaaagattcaggaagagtttctggaaacctatctttaccaactacagaatagtttgaggatgatgctattaacaaagcccacatagagaaggattttatggctttctggtcttccacaccagataatggttcttggagacatcccacaatgggctctgtttttattggaagact

SEQ ID NO: 109067 - DNA, 344 bp, Homo sapiens
aaaaaacctgggagggccttttgccccggtatgaacatgctatcttcattccctcctgcacacctgaccgtatctgggtatttggaggtgccaaccaatcaggaaatcgaaattgtttacaagtcctgaattctgaaaccaggacgtggaccaccccataagtgaccagccccccaccattcccaagaacatttcacacatcatcggcagccattggaaaccagctatatgtctttgggggcggagagagaggagcccatcccgtgcaggacatgaagctcgttgtgtttgacacaagtatggactggagggaacctttgagctggtcagggccactcaactcg

SEQ ID NO: 109068 - DNA, 383 bp, Homo sapiens
gttgaatgctacaagaagaccaaggaagctgttttgctgcttatgaaacttaaagcctggaatgatatcaaaaaggtctatgcctctcatcgaatgatagctggctaaggccaaatgagaaaccgttgccgtatccagcgcaggggcccgagcatcatctataatgaggataatggtatcatcaaggccttcacaaacatccctggaattactctgtttaatgtaagcaagctgaacattttgaagcttgctcctggagggcatgtgggacgtttctgcatttggactgatagtgctttccggaagttacatgaattgtacggcacttggcgtaatagccgtttcctcaagaggaactacaatcttcccatgcacaagatgat

SEQ ID NO: 109069 - DNA, 372 bp, Homo sapiens
  misc_feature (1)...(372): n = a,t,c or g
ctatattgctgcagtaatcaagatagtgtgatactggtgaaggaatagacacagacatcaatggaacagaatagagaatccagaaatagatccacacaaatatggccaattgatttttggcaaagatgcaatttggggaaatgtgaatgaaaaaaaggcttttttttggggggtggggaannnnnnnnnnnnnnnnnnnnnnnnnnnnnnnnnnnnnnnnnnnnnnnnnnnnnnnnnnnnnnnnnnnnnnnnnnnnnnnnnnnnnnnnnnnnnnnnnnnnnnnnnnnnnnnnnnnnnnnnnnnnnnnnnnnnnnnnnnnnnnnnnnnnnnnnnnnnnnnnnnnnnnnnnnnnnnnnnnnnnnnnnnnnnnnt

SEQ ID NO: 109070 - DNA, 398 bp, Homo sapiens
  misc_feature (1)...(398): n = a,t,c or g
aagattttcgttnnnnnnnnnnnnnnnnnnnnnnnnnnnnnnnnnnnnnnnnnnnnnnnnnnnnnnnnnnnnnnnnnnnnnnnnnnnnnnnnnnnnnnnnnnnnnnnnnnnnnnnnnnnnnnnnnnnnnnnnnnnnnnnnnnnnnnnnnnnnnnnnnnnnnnnnnnnnnnnnnnnnnnnnnnnnnnnnnnnnnnnnnnnnnnnnnnnnnnnnnnnnnnnnnnnnnnnnnnnnnnnnnnnnnnnnnnnnnnnnnnnnnnnnnnnnnnnnnnnnaacatagacaaatgaaacagaatagagaatccagaaataaagccacacatgtacagccatctgatcttcaagaaaatcaacaaaaataagcaatgaggaaaggacttcatattcaataaatagtan

SEQ ID NO: 109071 - DNA, 379 bp, Homo sapiens
  misc_feature (1)...(379): n = a,t,c or g
nnnnnnnnnnnnnnnnnnnnnnnnnnnnnnnnnnnnnnnnnnnnnnnnnnnnnnnnnnnnnnnnnnnnnnnntaaggttggtttttgtttaaaaaaaggattggagaaaccccttaggggcacccagaggggtttccaaatttttgcgggaccaattggaaaaaaggagacccccctttnnnnnnnnnnncaatcccttttttggattaaaatttaaaggggaggatttaaaaaaagctttggaaaaggcttccaacctctgagaggagaaagaggctcatttaaaacaggagaacaaagggtttaaggaggtaggaggggaataatgggaccttaggggggggaggggttaaagggatttaggggtttatcctctcag

SEQ ID NO: 109072 - DNA, 482 bp, Homo sapiens
ggcacgaggtgcgtccctgatcttattacctgctaaagggcctatgctttatgctacatcaaaattccccttaatcatcaatgctaaaacctttttttacttttaatcttacttaaagattccttattatcaagtttgctggacggagtaagagcctctggtaatagagatgtttgtgcaaaaatgacaccaacccataaaggtcagcgatgggggttactcaccatgcctgttgatgaggaagtatagagccttcacctcaagttcttagctacgcctccaaatggcaactttgcagatgctgtattcaggttcaatgctaatatttcatacaagggagtcctacatgcagtaacacaagatggtctcttctcagaaaacaaagaaaaactgatcaataatgccataacagcattactgtcccaagaaggggatgtcgttgcttcaaatgcggaacttgagagtcagttccaggctgtgag

SEQ ID NO: 109073 - DNA, 349 bp, Homo sapiens
  misc_feature (1)...(349): n = a,t,c or g
gtttaactcaaccatgagtatataaagtaggtggatgccgagcaaagttatgcgatggcggtggaagcagggcatagccgaagcatgccgctcctcaagaggccggtgcggacccacgcggtgctggaccaggcagatgtgtacacccatgtcctgtcagccttcgcggaaaagaaggagatgcctcataaatttgtgatagccgcgctgatggaatacattcgttctcttaaccagtttcagattgcagtacagcgttacctacatgaacttgttatcaaaacccttgtccagcacaacctcttttatattctgcatcaggtcctgcagtaccacgtccttagcgaan

SEQ ID NO: 109074 - DNA, 454 bp, Homo sapiens
ttttttttttttcttaacagtttgttttttttaatgagacataattcacatacccataaaattcatccctttaaagtatacaatttcagcccgggtgcagtggctcacgcctgtaatcccagcactttgggaggccaaggcgggtggatcacgacttcaggagattgagaccatccctggctaacacggtgaaaccccgtctctagcagtatgaggcgtccacacctctgctccttcagtgtcttttctgggagtgagatcaagaagagaggggggggtcccgtcccagcagatggtgaaaccccgtccagtatgtggcgtccacacctctgctccttacagtgtcttttctgtggctgacagtgggccacctttgctccactcaggctccgtggccggagagtctgcagcttctatggcctctcctcctccccgtctgggtcctgggttcagt

SEQ ID NO: 109075 - DNA, 364 bp, Homo sapiens
  misc_feature (1)...(364): n = a,t,c or g
gaagtatgaatccggtatgtattgtgtggaggagcattacgtactgaacttctcacaaaacagggctgaagcagtgcctactcgacagaaccggtcatcgtacaaagaaatgccacgtgactcaaaggcaaagccagagtgcagcttggagcaaagnnnnnnnnnnnnnnnnnnnnnnnnnnnnnnnnnnnnnnnnnnnnnnnnnnnnnnnnnnnnnnnnnnnnnnnnnnnnnnnnnnnnnnnnnnnnnnnnnnnnnnnnnnnnnnnnnnnnnnnnnnnnnnnnnnnnnnnnnnnnnnnnnnnnnnnnnnnnnnnnnnnnnnnnnnnnnnnnnnnnnnnnnnnnnnnnnnnnnnnnnnnnnnnn

SEQ ID NO: 109076 - DNA, 355 bp, Homo sapiens
  misc_feature (1)...(355): n = a,t,c or g
tgagtcagtaataaaaaaccaacccaaacaggaaagcctacgaccaggtggcttcacaggttaattttactgtacatttaaagaagaattaatatcctttcttcctaaaggcttgtaaaaagtagaagagtaaatacttccatnnnnnnnnnnnnnnnnnnnnnnnnnnnnnnnnnnnnnnnnnnnnnnnnnnnnnnnnnnnnnnnnnnnnnnnnnnnnnnnnnnnnnnnnnnnnnnnnnnnnnnnnnnnnnnnnnnnnnnnnnnnnnnnnnnnnnnnnnnnnnnnnnnnnnnnnatcatattctatgacctataaatctctataaagcaagacttattcctaggatgcaaagat

SEQ ID NO: 109077 - DNA, 363 bp, Homo sapiens
cacgcatcagttcagaactttaaacacgatcttcagaaggctttcagtctccaaagtaggaacagctcagcagtaactgtcttgtatacaggccagtggcagcagttcattgtcatggcccctttctgatttgtcttccttgggatcactttccagcatccgcacttccactaatagccaagtatactagctgaccctgtcagggagtgacagcgtcatccttggtgatacaactaccaatggtgccagggatgaagaagatggacagcctcggcgggctggggacaacgagaaagaaggagtgcagtatagctacatcctatttcacctcatgctccggttgggcttctttgaacatcagga

SEQ ID NO: 109078 - DNA, 393 bp, Homo sapiens
  misc_feature (1)...(393): n = a,t,c or g
atttttaatatacaggacaaaaacctgttttaagaaataagtgggataaacttatactggtactgaatcagattttgaactttctaaaaatgaataacaattataagtagcttctataaacatgcagtaagttgatgtcaaattcaaatacattttaacgattaatctagtattaagtaaatttgactgctatttgtttttgatataagtattatggaggttttatgcagacnnnnnnnnnnnnnaaaaggaatttggttcccggcccccactgggtaccaggggcaaaaattcggttcaattgaacctcccgctcccaggttccaacattttttcggcctcatcctcccaagaagttggaattaaaggaatccccccccacaccgggttaag

SEQ ID NO: 109079 - DNA, 367 bp, Homo sapiens
  misc_feature (1)...(367): n = a,t,c or g
ccaacccgggggcccttgggtttttcaaaaaaggccccccatgggggggccagggggcccttgggcaaaaaagggggagaaaggggccttttcccttgtccagggggcggggctgggcccccaaaaccccctttttcccggcttttataaccccggccggggccaaagggggnnnnnnnnnnnnngagacagttacaagtaagtttaataggtgctgtagtaaatgccccttagagcagtggggcctagctgagaaaagctgaagggcagggcaaagaggagaaatctggaaaaaaaggaaacacaatgggtagaaagcaacacatggaaagcacacataatgaatcctctatcacatgatcatctc

SEQ ID NO: 109080 - DNA, 441 bp, Homo sapiens
agattccagtgagtgatgcttatgccacttcgctccaatatggttgacagaatgagaaaatgtaaaaaaactataatgataaaaaggattaatacaattcttggtcagtgcatggaaaggatccctgaggtctgaagtcctgcatgctattttactagcaataccgtttcgaagaataaggtcatgcttcagagaaatgtctgcttttccacaatcaaagaagtagaaagaaaatgccttttgctgggatttcttgttcagttaaaacttgtgcaggaattccatccattagcaccgagagaaagtggcagaaggtgttaagaaaaatggctggccgggcgtggtgctcacgcctgtaatcccagcactctgggaggccgaggcaggtggatcatgaggtcaggagatcgagaccatcctggctaacaaggtgaaaccctg

SEQ ID NO: 109081 - DNA, 367 bp, Homo sapiens
tgttcgagaattcctggaatacattgcggggttaatggaagaaaaggaatcactgcaagttattcaattaactggataaacacgaaatacacgagatgataattcttaatgaaggggtgacagaatgaaactctgttaaccggttgaaggatatctaccacaatcttacatcacatatcatacttcatagcggaacatcgaaattatttccttttttttatttccaaaaagggctttttgccccggcccccagggttagggggcagggggggacaatgggcccctggaaccctggaatccgggggaccatggaaccttccccccggggcttccaagggtcccggatttaccggagagacccccccct

SEQ ID NO: 109082 - DNA, 380 bp, Homo sapiens
ccttgtccctccaggccagagcgcggcagcccttacccccacagcgctgcagccctgcaggtggccctcagccctgggaggagccttccttttccagagagacctcgccctgcactttcagcttccctatggcctccgccttcctagaggcctcccggtagcgccactgcctggagggttggtaggagctctcgtcgctcactgggccctgccggccccgcgtgaggcccagcaagacccggctctggtggaggaagttggggctagagaagcagtagagcccggggtccaggacactgttgaggtaggtgaaggccagggagccatggaagacctgtgtgcacaggtccagggagcggcaggcgaacagccagaaaacc

SEQ ID NO: 109083 - DNA, 382 bp, Homo sapiens
  misc_feature (1)...(382): n = a,t,c or g
cggcacgagcnnnnnnnnnnnggaccggggtttattggggtggaatttaattttttcccccttggggggagccttttttgaaaggccggtaaattggcccaattttttccttgggggccccaaaaggaaaaaaaacccctttggggggccaagggggaaaacccttttagggctgaattttgggccggaaaaaaaaggccagagggcgcccccccctgggaaacctgggcccccggaaaattaaggggtttccctgaaagggggggaaaccgggtacccccacggccgggaaagaaaaaaagccaaaacccccattggtgaacctggggttaaaaattgggggcccaaaaaaccctgggtttttgagaaaaaattaaggggg

SEQ ID NO: 109084 - DNA, 1088 bp, Homo sapiens
tgtagaggcaggatctcactatgttgcccaggctggtctcgaacccctgacctcaagtgatcagcccgccgtcagcttcccaaagtgctgggattacaggtgtgatccactgcacccggccggcattatgattttgtgtactcttgaaatggttatctttgtgggatgattttttttttttaagctgaaacttacctcatgaataacttgattaaagtagtaggtgattaaaatttcaataggaatcaaatgagacaaaaattttaaactggacttcatttggagtttccaactttacagtccattggaccataaagcacactaaaaatgtaagttatttttaaatacatctggaaataaaaatacttactaaaaaggaagaagccgaaggatgtatatttaggaccagcacacaattttggatttccatttaggccttatttccaatatttaggcttttaaatctttcatacacattttcacggtactttgcaattgagaccagaaagacttgtaggtctttctgcagaatgagtgggtccttgcaaagtgagggggaaacctacctccccagatccagaaaggtttggccccccctgagtaaaatgtttctttccagatggaggcccatagagggggcaccctttacctcaaccttttcctttggttttggaaactttggttccccccatactgttttccagccttttgtttataattagaaattgtgagaagccttcatttaagtgtttaaaaatgtggggagataaatcagacttaacatgtatgtaagatcaattcacttaaaagtatggtccaaatagcaaaaataggccccaggtgaaacatgttagtcattttttaaaaacatggtacttggtcttttgtgtgtgtctgttttattccattagaataaatgtggcctttgatgtaaaatgcaaagcatttccttcctgattaaaattgtagatgtagactttacaatataatttcaataataaaaagtcaattaacctctagttttgtcgttgcaataaatggtctttcagatagcaaaatgtcgagctgccgcgaatttagtagtagta

SEQ ID NO: 109085 - DNA, 360 bp, Homo sapiens
gcacacaagagtgaggacgctcatcggtttacttattcgctttaaggatggccacctatatcctttcttggtggaggggagtgcgcttctagaaaacattataaacgacattgttaacctgcggtatgaggcggaagaggcttatgcgagagcctccgaactggacaaagtggcccagagcttgggagttaacatgctcgataaagcccataagactttaagtgacagtagagagcctacacagaggcctgggaaagcttaatgatctaggagcccagaaaaagtgtcatcgttctcaaactcctcctccaacaaggaatcaaaagtaaacaatgagaagtttcgtactaagagccccac

SEQ ID NO: 109086 - DNA, 364 bp, Homo sapiens
  misc_feature (1)...(364): n = a,t,c or g
ggccttatgtgtgtagtgagtgcgggagagaattcatccggaaacagacacttgttctgcaccagagggttcatgctggagaaaagctttaagagtgtagcaaatgtgggggaaagtcttaggccaatgcccccgacttactatatggtggggaactagcagtagttaatgagtgcagcagatgcaggaaagccttcccctggaggctgaaccttacccgccattgggaatttcacaccggacacaggccttagcagtctaagcaatgtgctgtctctgttcagcccaacagctcaccctagagtggaactctgggagcagccattgggagggaaccatcagntagaagtgaaacttcatagat

SEQ ID NO: 109087 - DNA, 359 bp, Homo sapiens
ggtagagacttattgcaacaatggagtgcccaccaaacatctgaagatctatcatgagccacagcatctagtggacccacctgtatggtgcaaatttaaggtttaaggattgcttttttgctatactgttgcacaagaaggataagcttcgatttgctctctgtgccttctgttagaaggggcctgcttctcattatcagtggaaagttttaccccatggtaattaaccaaagaggcagaagctgagttacagcttgtagaacaaatgcttcaccaatggtatgcctcccagctacagccacaaaagtttttgcttctgtttcgctagatttactaacgtggggttgagggtatgcttg

SEQ ID NO: 109088 - DNA, 365 bp, Homo sapiens
attagctccaagaaaggtgttagtttagatggtttcctaactgttttgtggtccttcaggggatagataaaggatgttgattatctaactttacagagcacaggaaaggaagtcctttgcaataattctaattatttttatatgggtagtgtaagtctggtagcccaaacttgaaaaagttggcatacaataaaaaacagatatctgactaattttttatttatatatgaagtaaagatctttaataatatattagaaaatcaaatccaggagtatattcaatgaataattcaccatgactaagtgggatttattccagcaaagaagggatggcacaacattgagaaatctattaatataattcg

SEQ ID NO: 109089 - DNA, 374 bp, Homo sapiens
  misc_feature (1)...(374): n = a,t,c or g
ataaaaaaaaaccccctcccctttaaaaaannnnnnnnnngcccccccccaaaaaattttcccggaaaaacccccccctttaacccagnnnnnnnnnnnnnttttctccccctttttggcgaaaaaacattccccccccaggggagnnnnnnnnnnnccccccccgggggggcccnnnnnnnnnnnnnnnnnnnnnngnnnnnnnnnnttccctttttttccccggccccaagggtggggggtttttttggttttagaaaaaatttccctttcgggttccccaaattgtccggccccgccccccaaggggtcccccccgggaagtttttttttccctcnnnnnnnnnnnnnnnnnnnnnnnnnnnnnnnnnnnn

SEQ ID NO: 109090 - DNA, 347 bp, Homo sapiens
atttaatatcaacttcattttctgaaggttttttcccaaagagacaacaaggactttgagcgaggcataacgtggcgaagcttcctaaccctcctctgtagagaccgcccagcccctcaagatcaaccccccaccccgtagcggccgttgagtgtctttcactgccgctctgtgacaccacgtccctcccacccctgccgccctccccacctgactggccaggagcagccgcagcgtgttcagaacctcccagccactgtccacccgggcggagaccccagccccgcgtggctggacgggcttccctgtcctgtggaaggggagacacacaggaccctgtgaagtgg

SEQ ID NO: 109091 - DNA, 722 bp, Homo sapiens
aatgagagatgacagaagagcagaccgatgaaaacatgagtgtctgtggtgagttcggatggcagcgtgtggcacctcgctcagtgctctccagaaactgcagacacggcatgaaatcttgcaacacgagggaccaggacaccgaaggctagcaggtgagagagggcagcagcaccccagagctgcagcagatggaggcacagctcccgactcctccgcaggacaaaaacacagatcaagtcagaaaagaccccggggcgcttgaggcagctcggacacccaggaggctccgtgaccgatcctcggagccactccccagcctgggagccagaacgctgatgtccccagcaccggcgaaaggctggggtggactccaggtcggctgccagggaagcactttttgcacaatggatttctctgtctgtgcacaggggagatgactccacatgaccaagacgggagcccgggagagatgaggccacacggccaagatgggagcccaggggagatgactccacatgagacaaagtccggagccggagggagagatgacgccacacgaccaagactggagctggagggagatgactccacacaaccaagaccagagcccgggagagatgactccacacgaccaagaccggagcccgggagagatgactccacacgaccaagaccagagcccgggggagatgacaccacaggccctcactggtgtggcc

SEQ ID NO: 109092 - DNA, 386 bp, Homo sapiens
  misc_feature (1)...(386): n = a,t,c or g
nnnnnnnnnnnnnnnnnnnnnnnnnnnnnnnnnnnnnnnnnnnnnnnnnnnnnnnnnnnnnnnnnnnnnnnnnnnnnnnnnnnnnnnnnnnnnnnnnnnnnnnnnnnnnnntttttttaaaatggccctggggcccaaaaaaacccaaaaatggccaagtttttcttgacaaaaggaaaaaaattgggggaacccttggttttaaattaatctaacaagcttgaataacaaaaaccggaatattctgggcaaaaaaccaaccccttaccccatgggaccaaaggggcccaaaaacaaaaagggccctttaccggggacttattttttgaaaagggccccggaaatttttttggggaaaaaaaaatttttttaataaacgggggtgg

SEQ ID NO: 109093 - DNA, 373 bp, Homo sapiens
tagaacactgactctgtcgaacatcaccaggagggacgcgggggtctaccagtgtgagagctggaactcagccaccagcagcatcagcaaccccactctcatcaaagttacatatggcccagaccctcctatggtcaaccctccagacccagaggtcacagctggggcagccctcaccctgtcctgctttgctgactcaaacccccctgcccagtaccactgggagatggacagaaggccaggccctgccacccagcacctggtcatttctgaggtcactctggaccagtagggcaggtacacctgtgaggcctccaacagcatcactcacctctgcagctcagtcaatgggaagatctggatcttagaggtt

SEQ ID NO: 109094 - DNA, 496 bp, Homo sapiens
  misc_feature (1)...(496): n = a,t,c or g
ttctttgttcattaagtcaacaattatgattttgtatgagtaagggcaaatcatcaccaaaaatgctttaagtttttcttcagatttttctctgttgaaccacatgtatatttacatttttaaaaaacatgaaaattataatgcatcaaaaggtgggccaaccgtggtagttcatgcctgtaatcctaacactttgggaggccaagacggaaggaacgcttgaagccagggagttcaagaccaaccagggccaacatagtgaggaacccatctctaaaacaattttttttaaaagggtaactgggcacattattttaaaagggatatttcaaaactaaatactggatgggcattctgggaaatggaaaggttagtaattaagatgtttaggttatccctggaagatggttaaagagaagttttacaaaagctggccactccttaatggatggaaaatggaaaaacnatctnggcaagcagttcnatttcccttact

SEQ ID NO: 109095 - DNA, 400 bp, Homo sapiens
gatgtcaccctcagaaatctctccagacaaatagacaacatagcttagagtaccagagatagcatctctaaactcaaggcctccatagattctctagcaaatgtagtcatgaacaacagattggccttagattacctcttagcagagcagggtggagtctgtgcagtgatcagtaaatcctgttgcatttatgtcaataacagtggggcgatagaggaggatataaaaaagatctatgatgaggttacgtggctccataactttggaaaaggtgattcagcagggtccatttgggaggctgtgaagtctgccctcccctccctcacatggtttgtccctttactgggaccagctgcacttaatagcctgctttctcctctttggcccttgcctctataat

SEQ ID NO: 109096 - DNA, 381 bp, Homo sapiens
gatgactttgcggctatttataaactcgattgaatttttgtgttctagatcccagtagatcaatttaagccatctgatgtggaaatccaggcttgcttccggcacgagaacatcgcagagctgtatggcgcactcctgtggggagaaactgtccatctctttatggaagccggcgagggagggtttgttctgcagaaactggatagctcgtgaccattgagagaatttgaaattatttgggtgactaagtttgttctcaggggacttgattttctacactcaaagagagtgatccatcatgatacttctcgtgcgtttttttggacatatacctttttggatgctagagactaagcatgtatgagacgaacaaactccttt

SEQ ID NO: 109097 - DNA, 347 bp, Homo sapiens
aacatgtgctagccactgcacctggccgataatgttataattcttatataaatatttggaggatgaaattatcaataatggaaaaaccacagcagcttgtctgaagagctcaaagcatgcctgtttttaaggaagtaaaggtacatctgttagaagatgcaggcatagagaaggatgctgttactcaggagactagaatttcacccagcggaattgattcagctacaaccgtggctgcagcaactgctgctgccattgcaaccgcagctccgttgataaaggtgcacagtgatttggaagcaaaagtcaattctgttacagaattacttagtaaattacaggagact

SEQ ID NO: 109098 - DNA, 406 bp, Homo sapiens
  misc_feature (1)...(406): n = a,t,c or g
caatgtcacggaacantcgggaatgggtccttgaggccaagacaacattacgagttattttctgcggaaagggctactgtgtctgattgagttccctttgtaagggacccgccgctcctctctagttacctatacgattttttctttcacatctaccttggagaatctgatgactgtgtgtcttggggatggttgtcttacatagtatctcacaagggttctctgcatttcttgaatttacatgacaacctctcactaaagccatagtgtctatattattttgatgtaagttgttaaattattattttttactgctaccacaatactgctgctgttgctgctgctacattaatttatgttgctatgtcattccagagaaaaatctcaactttcaattatagagcag

SEQ ID NO: 109099 - DNA, 358 bp, Homo sapiens
tttcgagtatctacctgcggctgaaccacgagggcaagagagtcctcaggatgcgcagcctcaagggagatgcggatctgtacgtctccgccagcagcctgcaccccagcttcgacgactactagctgcaatcggccacctgcggcccggacgccgtgtccatccccgcgcacttccggcgcccagtgggcatcggcgtctatggacacccctcccacctggagagcgagttcgagatgaaggtgtactacgacggcacggtcgagcagcacccgttcggcgaggccgcctaccccgccgacggcgcagatgccggccagaagcacgctggtgccccggaagacgcctcgcaagaagg

SEQ ID NO: 109100 - DNA, 355 bp, Homo sapiens
  misc_feature (1)...(355): n = a,t,c or g
nnnnnnnnnnnnnnnnnnnnnnnnnnnnnnnnnnnnnnnnnnnnnnnnnnnnnnnnnnnnnnnnnnnnnnnntaaggtgggcttttgttttataaaaggattggaaaaaccccttcggggcacccagcagggtttccaaatttttgcgggaccaattggaaaaatggaaaccacccggtnnnnnnnnnnncaatcccttctttcgcctaaattttaaccggcaaaatttaaaaaaacctttggaaagggctcccaacctctcagaggataaaaagcctcacctaaaccaagaaaccaaagggttccaggaggtaggtggcgaaaaatagaaccttagggccgggatgggttaaaa

SEQ ID NO: 109101 - DNA, 340 bp, Homo sapiens
ggagggagcaggagctggatccggcttccggaaggagctggtgagcaggctgctgcacctgcacttcaaggatgacaagaccaaagtgagcggggacgcgctgcagctcatggtggagttgctgaaggtcttcgttgggtgagcccagggcccacgctccctccgggcacagcatccggaattttgcgtttttccagcgggaaaaccaagacgtgttttcccgtttcccacaagggcctaaacttgggtctcctgagcctgtttgtcagaagcagcagtccgcggcgtgcggcaggcccaggcagaagacgcgctccgtgtggacgtggaccagctggaa

SEQ ID NO: 109102 - DNA, 1031 bp, Homo sapiens
ctgagaaaatcaaatacttacagtcaactgagcattgacaaagcaaacaaaaacataaagtggggaaagggcactctattcaacacatggtgttgggataactggcaagccacatgtaggagaatgaaactggatcctcatctctcaccttagacaaaaatcaactcaagatggatcaaggaggctgggcatggtggctcacgcctgtaatcccagcactttgggaggcccaggcaggcggatcatgaggtcaggagatcgagattgtcctggctaacgccgtgaaaccctgtctctattaaaattcaaaaaattagctgggcgtggttgcaggggcctgcagttctcagctactcaggaggctgaggcaagagaatggctcattaaaaaaaaagtctcaataaaaaaaaaaatggatcaaggatttaaatctaagacctgaaactataaaaattctagaagataacatcagaaaaacccttctacatatacgacataataaattcctcttcaaaggtttagcttgttaacttccttattctttgttctcaaactcaacttttttgttctccatgcctccttgcccctaattagggtaaacaaccttcctatcagttctaattcattaactcacatctgttcccttgggttggctaactctggcacccattcccaccctttcggaaaccacacgtccccacccactgtaaactcacatccccctttccctttccttatttggggaaaatatcccacaaaatagccaaatcaaggtcaaacttagaatgtgcagtctgacccgcctaccccccgcccatgggagattgacaccagatgtaggggccacattaggaataaccctttctctcctttgttcagtgtgctcttgtgatcgtgaatgacacgagcagcacccttctgcagaagtaaattgccttgctgggaaaacttttgcccgagtgctggtttcactttgcgaaccgagcatttatctccaacatagacattgacttaggcaaggatttcatgac

SEQ ID NO: 109103 - DNA, 349 bp, Homo sapiens
ttggaattttaaatcatagcagtggaagttcccctgattctaataagcagagaaagggaccagaagctttgggcaaagtttctttacctctttttgactttaaacggtaagtattaccgaattgtaatggtgagtcactgtggacacatctgcacatcagaattggctagatgacaaggaggtgaggggaggaacatatatgagtgaatgagcctcttcagtttttctaatgtgataaaaggaggtcagttcagagacacagattagaggaaatcaaagttagtctgctatattctaaacatatctgaataggtatgcacagctttgtttgccactcactgttccatgg

SEQ ID NO: 109104 - DNA, 391 bp, Homo sapiens
gacataaggaaacctaagtcctcggggattataggggaaaccaaggcatgaggttacctaacaaggaaccttagaacataatcttacctggctcagtacaagtaggagagaatggtagcaggtgaatgggcagtgagcatggacctgaggagaaatgaatttgcctaactttcttgctaaataaatgtgcttttggatgctgacatcgagagagtggtgtgtgaagtaccataaatatttgctttattgtctgcgcggtgtgactgcattctgctcatttgcaggtgggcaatgggcactccaatgaggcagccttgatcctccacagaaaagggtttgattgtcggttctctagcaaaggcacagggctggtttgttctactactcaggg

SEQ ID NO: 109105 - DNA, 392 bp, Homo sapiens
agttgttctttcttctccagcagcatgtgggggtatttatcttccgtggtgaaaaatgtgttcatcatcagcctagaatgataagtaaaagaaataaagattgttctgctgcttgttctcggccggtaacgcagcatgagtttgacgacaataactgcctcgtcctcttgttgcgagcgccagcagtatactcctccaaaattcgttcttttcatggtcagtgtcagcttgatttatgtcgacatgaagttcggtatggctgtataagggaagatgagtgcttttacgcccatagtcttgtggaactgaaagtctggataatgcaaaatgcaacaggtaggtttgagtgcgactgagaagtatgtctcctcaagagcagacagggtattgaa

SEQ ID NO: 109106 - DNA, 664 bp, Homo sapiens
ggagtttccccatgttggccaggcaggtcttaaactcctgacctcaggtgagccaccgcacctggcctcatttttctctatgaagtaaaataagggtccagttgcattcttctgcatgcaaatatccagttttcccaacagcatttatttaagagatcgtcctttccccattgtgtgatgttggcacctttgtcaaagatcagttgaccatgagtttggatttgtttctgagctcctgttcttcccattgtgtgtgttttcatgccagtattatacccgtaataggtccgttgccccatgagcacagcatgtcaatacagcaggttgcagcaaagaaagccggtttactgtaaagggctggcagaacaaggaggtaggatgaaaatgaaatccgtcctcccagggagtttggagctagggtttttaagggttttaaagtgtggaaatcactgcttaaagagtgcagtgtggagtcatgagacaggaagatgaagaaactattctcatgctgattctgttcctctgtggttgtcttcagactgcttggcatcagctatttcactggaatttgggacctgagaaacatcttgtgcaattcttaaaagcctcatgattctaacattagaaatcctatgtatgggaacagtggggactctgtctcaaa

SEQ ID NO: 109107 - DNA, 361 bp, Homo sapiens
  misc_feature (1)...(361): n = a,t,c or g
ggtaaaagcaccaccttaacgcaggacatgagcaccagcctccaggaaggccaggaggacgggccggcaggatggagagcgaatctgaagcccgtggacaggagaagcccagctcagaggactctgaagcccaaggaaccacgggccctggcagagccgagggcgggggaggcccccaggaaggtctcaggcagctttgctgggagtgtccacatcaccctgacccccgtgaggcctgacaggaccccacgcccagccagcccaggacccagcctcccagccaggttcccctccccaccccgccgcaggagactggccgtccctgccagncctgacgtttgtgacaactggcttcggccgg

SEQ ID NO: 109108 - DNA, 356 bp, Homo sapiens
agaactactcaatggaatggtatgaacttttccaacttggcaactgtacatttccccatctccgacctgaaatggatgcccctttgtggtgtaatcaaggcgatgcctgcttttttgagggaattgatgatgttcactggaaggaaaatgggacattagttcaagtagcaactatatcaggtaagttgtgaaaatatagcaatatttgatcattgcatcaaaatccaaatgaaagagattgttatacttccattgaaacgtttcagtaatgtttaacttagaggtcatttgtaaaatgtactttcggagccattaaactttggtcttttttttcatctgtgattcgtattctcgaa

SEQ ID NO: 109109 - DNA, 238 bp, Homo sapiens
aaagtattagggttaactaactttttaatttctttaacaaacattgagaattttttttccttaaattttgctttgctttgcagccctaggggggccccaaccatgtgatgtctggagcataggatgcattcttattgaatactatcttgggtttaccgtatttccagtaagggacaatgatctatttcaaccttgctttgcacaaaaaaggtgcctgtttatatgaataaatactttt

SEQ ID NO: 109110 - DNA, 388 bp, Homo sapiens
  misc_feature (1)...(388): n = a,t,c or g
taaaccaaggccggttagctttgttcccccctccaaaattccccccgggggttaacaacccttgggggttcaaaccatgttaagggggataaggccttgggggatttttgggtgccaagaatggtgggccccccggccccggtttttcccgtaagcttttttgggggttaacggttaagcccccttttggcggtttttaaaaacccgggcctttttgcttttggtttgggcccaagggaaataaaacctggccccccgggcccttttaaccatgccccnnnnnnnnnngtagttaaaaagggcccggtagttttaaaagggtggttccttccacccctttttcaaaaaaccaaccgaaaaaagaaactgtagaactgtccacaaagca

SEQ ID NO: 109111 - DNA, 359 bp, Homo sapiens
gtaaaaatttattctgattttgcaactactggccagagggaggttaccactgaaagggatggtaaaaaaaaatcggctgtctttgatgctgtaatggtttgatccggacatcatgtgtatcccaacctaccaaaagagtccttttcaggactaaaccactttaaaggcaaatgcttccacagcagggactataaagaaccaggtgtattcaatggaaagcgcgtcctggtggttggcctggggaattcggcctgtgatattgccacagaacttaaccgcacagcagaacaggtcatgatcagttccagaaatggctcctgggtgatgagccggtactgggacaaatggtattctttggt

SEQ ID NO: 109112 - DNA, 348 bp, Homo sapiens
  misc_feature (1)...(348): n = a,t,c or g
ataaataattgtaccatattatttctgggtttttaattatattgccttttaaaaattttctcnnnnnnnnnnnnnngggaaggggggtttggttttgccccccnnnnnnnnnnnaagggggcaagggcattctaatttaagggaaccctgggccccgggggcaaaggggattttttaccccccccctcccaggaggggggaataaagggcccccccccgggccccaaaaaatttttggttttttaagaaaagggggggttcccccggggggccaaaaggggtcaaaaaggggggccctgggggagnnnnnnnnnnggggccccccaaggggcggggaaaccggggggg

SEQ ID NO: 109113 - DNA, 366 bp, Homo sapiens
  misc_feature (1)...(366): n = a,t,c or g
cctagccaggtcatggcaaagtcagggtttaaacccacaattggctaatacccaagcccacannnnnnnnnnnnnnnnggaaagggggttttttttggccccccaggtgggagggcaggggccaattttattttaggggagggnnnnnnnnnnagggttaaggcatttttcgggcgggcctaaccccccggggaagggaaaacaagggggccccccaacaaggcggggtaaatttttttggatttttaaaaaaaaacggggttcaacggggtaacccgggggggcccagacccccggacccggggaccggggggcctgggcccccaaaagggggggaataacgggggggaacacccaccccgggcc

SEQ ID NO: 109114 - DNA, 388 bp, Homo sapiens
  misc_feature (1)...(388): n = a,t,c or g
atttgtaggaaaaaagcccaaaattcatgtgggggtttcttgtaaccccaagttaaaagggaacaaggggcggttcccccccagttgaaccccaaaaaataaaaaaaaaccacctcccccgaaaaaacccaaattttccgggcccggggcccaaaaaaaaaggtcccctggggcccccccccgggggccccgggggaatttagatcccccttttttcccccacttttttccaggtggtcccttcccccccccaattcaaaaagaggtgccccgaaaaccagaaatttttcccagggaaattaaagggcnnnnnnnnnnnnnnnnnggtagttattttgcattggtaacattgcagggaacgtctggaggcacacagcttctcgctcct

SEQ ID NO: 109115 - DNA, 392 bp, Homo sapiens
  misc_feature (1)...(392): n = a,t,c or g
gagggaaggggctcccatgctggatgactgccaggtgaccttgggctatgctcatccctccccttgtgcctcgttccaggggccccagccttaacttctcgacagttccgtgaggatgacttccggagagttgtggactttatagatgaaggggtcaacattggcttagaggtgaagagcaagactggtgagtgagcaagaaggagccccgggccagccagttcccactcactgtctgctccctcccccagctgatctcactgccttccctagagctctgaccacttgtttcctcaccctctctctctagccaagctccaggatttcaaatccttcctgcttaaggactcagaaacaagtcagcgtctggccaacctcaggcaacgggtggn

SEQ ID NO: 109116 - DNA, 364 bp, Homo sapiens
  misc_feature (1)...(364): n = a,t,c or g
aagctaaagctgccgggataccccagttttatggttagtgaagcacccctctgccatctctttcagatgctgttttcctgattttatacaaagaattatactacaggcacatatatgccaaagtcagtgtaagtatttaagtgtcgcagnnnnnnnnnngtttttgtttttttaactctgtgctgtttttgtccctagaacacagtcatttgtttatattggttcagtgtctgggcatgattggcatgtttttgagttttaagaagcggtggaaggaacagtttaacccagaaagctgttcagacacactaacgctatataacctatgcattcttttaaatttctctgtccccacgccgagcca

SEQ ID NO: 109117 - DNA, 371 bp, Homo sapiens
  misc_feature (1)...(371): n = a,t,c or g
gcaacataacttataaacactagagaatgatataaaagggaaacttcttgatattcttcataaagactcatcacttgggtatgttctgtttattctgttttgggctaagtatctcctgtaatgtaaaagtcaagttaggacttacattaaataacctgattctgttcatgatttatcagctttcttggtgtggaaagttttctatttaacttactttttttccnnnnnnnnnnnnnnaaaaaccaacaaaatttttgtctcggggcccacctattttttaagttttttttaaaattttttaaaaggaccccttaccggctaaaaattttaaaaatttggcaggtcaaccttttttatttaaagggaaaaaa

SEQ ID NO: 109118 - DNA, 371 bp, Homo sapiens
  misc_feature (1)...(371): n = a,t,c or g
attttctacttatgtttgataatagagaagtacatggttcttatgtcaaaaaatggataacaagaatgagaaactgtatactttattgattactaggaaattttatagcaaatctcaaagaagctttaggacatcaagtaataagaataaattaccttggcgattggggcatgcagtttggtaagtacacttgagattttatttttcatttcattgtaaaattcaatttgtaaaaactttgatctggacagaatataggcagaatcccattggatgaagtagtatgtcctacctannnnnnnnnnnnnnnccctaggggctttttggcaaaaaatcttctatttatttgggaaattctccccccccagggt

SEQ ID NO: 109119 - DNA, 498 bp, Homo sapiens
aaataaaatgcattttctctcctataagagcttacggtctaatggcactttaggacatgcagagagaaataaagcacagtctgccacctgtaggagcttatagtctagtggcagggaataggtaaatattccataggtccagaaggctgtacattaggaatgaagaaaccacaaaattcaggaaggttcttatgaaccattcattcattgaagagttgtttttttttctttaaatgtctactatgtaccaggaccagagaacagttcttttttttcttttctattttttggagacaggggtctggttatggccccaagagctggagtgcatggactcattcttgattcactgtagcctcccaggctcaagcgatcctcccacctcagcctcctgagtagctggggactacaggtgtgtgtctctatacctgctcatttttctatttcttttgtagagacagggtttcatcatgttgctcaggctggtctcaaactcct

SEQ ID NO: 109120 - DNA, 350 bp, Homo sapiens
  misc_feature (1)...(350): n = a,t,c or g
attccccgcctctcgggaggcccagaccggcggattcctctaggttagggattccaggcccgcccggcccatagggggaacccccctcttttctttaaataccaaaattagccctacnnnnnnnnnnnnnnccgtagttcccgcttcttggggggttggggccggagaatccctttgacctggaagggggggggtggagtggcccaatgttggctccttgccctcccggttggggtccagggccaccctccgttttnnnnnnnnnnnggctttgttcccctttaaaggaaagaaaatgatccaaaattcttactaagggtaaagggaatcagtgggtagcacgacccctg

SEQ ID NO: 109121 - DNA, 370 bp, Homo sapiens
acccttctggcttaagcctcaacttaaaaaaccaatccatatccaaatttgttctggtcttgcccaactgaccctttttctgctgttaaggaacaccatgggtttgcaccctgaaggaacacagtttctaggttcctgaccttctgtaggagatattgaatgagttgccaacttgaagatctgtattatttcttgctgtagttgtgtccaaaaaaagaaaacggtcattttaaaaatttaagagtcctggccaggcacagtggctcacacctgtaattctagaactttgggaggccgaggcgggtgaatcatgaggtcaggagtttgagaccagcctgaccaatatggtgaaaccccatctctactaaaa

SEQ ID NO: 109122 - DNA, 493 bp, Homo sapiens
  misc_feature (1)...(493): n = a,t,c or g
tccggcgccgctacccctattacctgagtgacatcacagatgcattcagcccccaggtcctggctgccgtcatcttcatctactttgctgcactgtcacccgccatcaccttcggcggcctcctgggtcagtgccaatacctgtctccctaactcttgcctctgaccctctgggcctctgtctcagccccaacttctggactctgtctggaccctccaggacccctggcatcagcctgaccatgacttgctctatgggctcctgggaaatgatctcctgaccttgatcccactgtgacctcttacccacagggagnaaaagacccgggaaccagatggggagtgttcggagctgcttgattttccactggcagtggcaggggcatttttctttcggccctgctgggggctcaacccctgcttgtggtcggcttctcaggacccctgctggtgtttgaggaagccttcttctcggtagttctgtccttgccccc

SEQ ID NO: 109123 - DNA, 397 bp, Homo sapiens
  misc_feature (1)...(397): n = a,t,c or g
aatatctccgcgnnnnnnnnnnnnnnnnnnnnnnnnnnnnnnnnnnnnnnnnnnnnnnnnnnnnnnnnnnnnnnnnnnnnnnnnnnnnnnnnnnnnnnnnnnnnnnnnnnnnnnnnnnnnnnnnnnnnnnnnnnnnnnnnnnnnnnnnnnnnnnnnnnnnnnnnnnnnnnnnnnnnnnnnnnnnnnnnnnnnnnnnnnnnnnnnnnnnnnnnnnnnnnnnnnnnnnnnnnnnnnnnnnnnnnnnnnnnnnnnnnnnnnnnnnnnnnnnnnnnaacatagaccaatgaaacagaatagagaatccagaaataaagccacacatgtacagccatctgatcttcaagaaaatcaacaaaaataagcaatgaggaaaggacttcctattcataaatagtcn

SEQ ID NO: 109124 - DNA, 1017 bp, Homo sapiens
ttgagacagccttgctgtgttgcccaggctggagtgcagtggtgcgatcttggctcactgcaacctccgcctcctaggttcatgcaattctcctgcctcagcctcctgagaagctgagattacaggcgtctgcaaccatgcctggctaattttttttttttttgtattgttagtagagacagggtttcgccatgttgaccaggctggtctcaaactcttgacctcaagtgatccacctgccttggcctcccaacagctggcattacagggcgtgagccaccgtgcccggctgagttatgtaaactttaaaacacacacacagacacacatacacacacacacacaccttttataaggaagcatgcgtgttcaggacacacatcaaacacatcacagtgggtatctgtgaggaggcatttgggagctaaagaccaataaaggggaaaaaataaatcagcatgtttgtgattctattttttgttcaaaaaaaagtcttacacacgtgttatgtgtagagaaaaatgttaggaaggatgtgtgccaacatgttcagagtgatatttctggatggtggtagtatgagtaattgacatcttttctatttactaatgagcattttgtaacttttctaccaagaatgttatatacaatatatacttttaaaaaatgctaaaagttaacaaaacaaaaatggatttcattaactgtataaaacacctgttcaacctatgcaatgtcactcgatctacatccagccactcaaggtcttccattgtctgtccttatctttcagctagctgccatcctctcatctctgactgcttctctaaaccgctcatgagcattaatgcactgcatcaacctatcgtgttcaccttgtccttactcttgctgtttcgtggcctgcaaagcccatgtgctcctgctcagagcacatccagactctgttgatccttcagcacaatgttcctccctcaatccttcactgggaacattagccaatgatgacgaattcgc

SEQ ID NO: 109125 - DNA, 372 bp, Homo sapiens
  misc_feature (1)...(372): n = a,t,c or g
aaaatgcctacatagacatcacaaaatccagaagagaggagggaatatttgtattaagggcctgacccatatctattatgcnnnnnnnnnnnnnnnnnnnaaaaacgccgggggccccgcccccaaaagaaaagggagcccccacccccgggaacagaggaaatatcccccctcaaccccccaaagaacggggaaaaatagccacannnnnnnnnnggggccaaaaatagaaacctttttggggggaggggggttaccccaggcgccccgggggggttaaaaaaaggggacgaagggccccccccggtctggccccccaaaaggctgggaaaacagggcagaacccccagggcccgcccccccaaaaaagtt

SEQ ID NO: 109126 - DNA, 372 bp, Homo sapiens
aaagatactatactgtattgttcagtcatgtatacatggacgtatatatcttatgtttttcattgatttctattttgagagatatttggtctttaaatatatatctttttgttgggggatttcatctaggctgacagagtacttcttggtggtcctggcagcttttattggcaaggtaggttaatattttttaaattacaattggtgactatgtgtcgctgattcacctggctaattgtatgcctatgacattttacaaattattttaaagaaagaaatggaaataccattaaagtatataaacactccattttacacagtgttttttaaaagaatatatataatatatattaaatatgtgtatattcctac

SEQ ID NO: 109127 - DNA, 388 bp, Homo sapiens
  misc_feature (1)...(388): n = a,t,c or g
ggagaatgaggtagaaatgaattcagaaagacagaaatattaacaaattactactaaagttttcttttttcttttctcttcnnnnnnnnnnnnnncctttcttttcttttttttcgggaaacggaatttaatttggccccccgggtgggggggagggggcccaaccccgccccatggaggtccaaccccccgggggtttaggggaccttttaccctaacccccccaaaaacttggaccaacggcttgaagggttggacccccaagcccggcgaaatttttggaattttttttggaaaaaaaagggcccactggggtgccccaggtgggtttgaacccctgggcttaaggaaccctctggcttggccttcccaaggggggggaataaac

SEQ ID NO: 109128 - DNA, 413 bp, Homo sapiens
  misc_feature (1)...(413): n = a,t,c or g
ggccaagaattcggcacgagaacaaatttaaggataaacacagctgactcttggcaagtaagcaattcagctggtaagaacagaagtgcttgggctactaagagtagcttattggccttgagaggtcagtgtacctgaccattagtgaacctctttacaaaggaaatggagagtgtcagtaaattcagagtcccttattggagtttcnnnnnnnnnnnngaaaaaaagtttccttttgtaccccaggtgggagggcaggggggaaatttgggttaatggttccctccccttccagggttaaggaatttttgagccctaaccctcccaggaagttggaataacaaactggcccccccaccccgggttaattttatattttttagaaaagggttcaccctggtggcccgggaggt

SEQ ID NO: 109129 - DNA, 663 bp, Homo sapiens
  misc_feature (1)...(663): n = a,t,c or g
tagctggaagccctttgaatccnaaaaaccctgaataaatgtggtggaaaaaactcccaatgctggtggacccccaaagaaccaaccggccaacttcgtcaatcccgnaaaagccccagtcttgcgggaaaattgcctgaaagaagtatggcggggtgaatggtcaagcttccccacgctctggcacacagagcgacaaaagtcacccctcaagggcgcccaaggactgtgtggaggcagccaagaaacgcattcaggagatcattgaggaccctggtaggcacttgggtgctcggggaggggttctcaccccccagtggccactcaccgaagccgtgtatgagtgttcgctccaccctgtagggaggtgactccctcatacagccctggaaggcttcagaaggggctttctggtgctcgctcttctttcctcagcctgtctggcctccttcctgatagttggtgagaattctgcctgcgagaagcacttanaaaaaaaaagacagagacaannnnnnnnnnnnnnnnnnnnnnnnnnnnnnnnnnnnnnnnnnnnaaaaagaacgaaaaggggagaaaaaatgaaaaagacttacattctgaagttcctgcttggcacatgcttttcctccccaccactatcccttctcaggtcatcctttg

SEQ ID NO: 109130 - DNA, 359 bp, Homo sapiens
gagaatatgattaccggccctttgttgacattcctattgacagtccctcgcgaattgtgaaaaatccatggcctgtgggaaaagcacgcgagcatttgtttggcaaggtggcttaaatcaagattaacggatgaatcttcctgatgctgggcggagaccacaggtcttgttgaataactgtgtctatgggaagctcgcgcagaggaagttaccagggccctaataagagagaaaatttacacctattgtcggaagagcattgacctatattttatatcagattttctgcctttaaaaaaattttataggttacttttattatacaaacagacttcgctcattttgaagtcttacgatag

SEQ ID NO: 109131 - DNA, 368 bp, Homo sapiens
cgtttagaggtttgaattttctcggagaaagacaggccggccacgaggaaaacagaaacaagctgcagcaacatctaagcccttgaaaggatcctgagagaggggggaaagggaaaacagcagccaccagcccaaccacttgtgtcttctgccccttcccacctatcttgcccaccccaccagcccacgctgcttgggacttgaaatctgtggccgaaggaccgtcactacataacttcaaaaataatcaaccaccctcccttcccaaaccacccaaattcactcatccagcgtttacttttttgaatccactcagaacttttttctgcgacccccctccctaaatggagttgggtgggggggaaatg

SEQ ID NO: 109132 - DNA, 267 bp, Homo sapiens
gaatgtatatgtatatctgtgtgagtgttgcatataaatatatatatttcccctccctgattagatgacttcccagaatctacaggagtaaagcgaattgtccaagccctgaatgccaatgtgtggtccaatgtagtgatgaagaatggtaagtaacttgggactcaagtcatttttttcctcttgttccttgtaagttttaaattattgagatatatgtggaaccattagtgctatatgaaatctgtagatttgttccaatttcag

SEQ ID NO: 109133 - DNA, 385 bp, Homo sapiens
atctggaatatttactgtcgcaaacccaatttggagctgtgggcatggggtttcaccaccgaccccaacaagcgctgggaactttgcgaaataccccgctgcacaacacctccaccatcttctggacccgcctaccagtgtctgaagggaacaggtgaaaactatcgcgggaatgtggctgttaccgtggacgggcacacctgtcagcactggagtgcacagacccctcacacacataacgggacaccataaaactttccctgcgaaaatttggatgaaaactactgccgcgatcctgacggaaaaagggccccatggtgccatacaaccaacagccaagtgcggtgggagcactgcaagaaaccgtactgtgacttcttccccg

SEQ ID NO: 109134 - DNA, 380 bp, Homo sapiens
  misc_feature (1)...(380): n = a,t,c or g
ctcccagnnnnnnnnnnnngaaaattttnnnnnnnnnnnatggggcccccccgggaatccccccctttcaggaggtggaggaagggggctcccccggcccggaataaaacacccccggggctccaagggggaaacccccccttttttaaaaccccaaaaacccccccggtttggggccgatcccccttaatccccccagaaaaatcccttaaaatcnnnnnnnnnnnctccccagaaaataaaatgggnnnnnnnnnnnnnngccgggggagnnnnnnnnnnnccccttttctnnnnnnnnnnnnnnnnnnnnnnnngttttccatttttttcttggtcctacccattcggttaccagctgtagatcaactgaatcaaat

SEQ ID NO: 109135 - DNA, 382 bp, Homo sapiens
aaaatattaatttttaaaaaagatttaaaaattatcttgatatagcagattagacaaaattatatatctaaggacttacaagtttaaattttttttcgacaggaaagggcattctattgtaaactgtgaattcttactattcataggttgatgttctcaatcaagttgattggaatgcctggctctactctgctggactgcctcccataaagcccaagtaagtacttgcctgctaaagctttccttctcattctcctaactcctagagagcctcaaaatatctgaaagaatagtatgccttcctgaaactgttactagtaaatgatgaaagcagagttcttaggtgttttggccttaaccctgaggccaaaagaataatttc

SEQ ID NO: 109136 - DNA, 313 bp, Homo sapiens
cagtgaaatacaaagtaaaattcttgacttgaataagcagactcaagagtttcaaccttctttagaaacttggacagaattccagcagggtttagaaagtctcaatccttagacctacgttaaacatcaccttaatgtctcttttagacttataggaacaatgttattatgtctctgttttctgtttatagtctgtaagactgggtggaccaccaactggcaattgaaagttgcacagcctggaattacctttattcaattaatgcaaaaacataaagggggagatgttggacactgaaggaatgagggttgt

SEQ ID NO: 109137 - DNA, 415 bp, Homo sapiens
  misc_feature (1)...(415): n = a,t,c or g
cactataaatttgaaataataagcttttctcctgatacaaaaagcacaagcaccttaagaaaaacatagataaattggacttcactgaaatgtaaaacttctgtgctttaaagaacaccatcaagatagtgaaatgaccaccctcagcataggagaaaatatttgccaatcatagggctaataagagactagtattcataatatataaagaaatcatatcccagcaaagaccacccaactaaaaatggactaattatccannnnnnnnnnnnnnnnnnnnnnnnnnnnnnnnnnnnnnnnnnnnnnnnnnnnnnnnnnnnnnnnnnnnnnnnnnnnnnnnnnnnnnnnnnnnnnnnnnnnnnnnnnnnnnnnnnnnnnnnnnacaataaaaaagatagacaacaagtcttgacag

SEQ ID NO: 109138 - DNA, 395 bp, Homo sapiens
agttaacacatatcctgatactttatgtataaaattatacttgtgtttaattttcagtatcacagtctcccactggaacagatgattcacttctagggggtttacaagcagcaaaccaaaccagccagcttattatacagttatcatctgtcccaatgttaaatgtttgtttcaacaaacttttttccatgcttcaagtccatcatgttcaggtatgacttcaggagaaatggtgtatttttacatattattgctagcctggtaaaagatgaaactaattgggaagttcattctaatcctgtcagggatgatttctttattatattcagttggaaaaatattagaaatactttgattaccaaaggtatcacagtttctctatgatggaccattgg

SEQ ID NO: 109139 - DNA, 395 bp, Homo sapiens
ttgtagctacttttacttcatcagcaactgataacagttgaaatcggaaagccaccatcttagctggcactgcaaatgtgaaagtaagatctacgacaccactggaggcctctcatcctattgaaaattcatctgtgcctaggccttcatcccaatttgtgggaacaagaaagtcagaacctgatgatgagctgccctttaatttccttaataggtcacagaaggagcctactgggagggtggaaatcaaaaaggaaaaaggaaagacacctgtctttcacagttcttggacgtcaagtgttagttttgtgaaccccagcataaccaccatctaaaccactgaagaaaaatcttttggaaaatgcatcatcaaatgctgcctgcactgaacacat

SEQ ID NO: 109140 - DNA, 947 bp, Homo sapiens
aagaaatccagaaaaggccaggatcatcagacacctgaaaaataatcacgttcaccctgagagcaagggaagagagacttttctcaggataaaaggaaatccagacaaccaacactgcagagaacagagcctgatcccctaagcaacctgccgagaaccagagggaccaaatgaggaaccttactgcagtttatcatttgaaatgctttgtaggaagagggaggtgagcctggcatttgctaggaaccagagtggaaccggcaaagtggccagcaacagagtcctgatccaaatggagaaagggaaccaggcgtacctcaacctggagtgggaaacttgataggagtttgaatcagcttgggtactgacaaatattgcttcaggaaattctcttcagacccgaattgtgattcaggcaggagctgtgcccatcttcatagagttgctcaactcagagtttgaagatgtccaggaacaggcagtctgggctcttggcaacattgctggagatagtaccatgtgcagggactatgtcttagactgcaatatccttccccctcttttgcagttattttcaaagcaaaaccgcctgaccatgacccggaatgcagtatgggctttgtctaatctctgtagagggaaaagtccacctccagaatttgcaaaggtttctccatgtctgaatgtgctttcctggttgctgtttgtcagtgacactgatgtactggctgatgcctgctgggccctctcatatctatcagatggacccaatgataaaattcaagcggtcatcgatgcgggagtatgtaggagacttgtggaactgctgatgcataatgattataaagtggtttctcctgctttgcgagctgtgggaaacattgtcacaggggatgatattcagacacaggtaattctgaattgctcagctctgcagagtttattgc

SEQ ID NO: 109141 - DNA, 416 bp, Homo sapiens
gacatggtctggggcacagtatttgacccatagtagtgctaaacattaattccattttctttccaaaaggatttttgtaaggtttctttatatgtcaattgtcttggtgtatctacctaatatacacagaacttttcaaaactgtaactatgacaaggcgtgaaatatttggaatcacatattccagggtttagccacacagaaattacagcaatttactctggacttattaaagcaaacaaatccctgctaaagctatggcttaccttccttccatatttaggatacacaccagttcatcctcaaaaaaaatctctggtccttcaaggttctcaatgtcactgaagccattacaaggaacctatgaagaagacatatacaagtaggcctcaattatgagtattgatgcaactctc

SEQ ID NO: 109142 - DNA, 384 bp, Homo sapiens
  misc_feature (1)...(384): n = a,t,c or g
aaaattcagagtgatatcatgcctttaatagctaatacatttaatttttactagaggaagtatacctctaatgtatgagactttcattttagaaatatattttaagaattgtttctttatattcctctcttttctctccctttcattgcataatatcttttcttagcaaaaccgtgtggttggagcaatgcagctctactctgtggataggaaggtttcacaacccatagaaggccatgctgcggcttttgcagagttcaagatggaggggaatgccaagcctgccacccttttctgctttgctgtacgtaatcccacaggaggcaaggtaagatccactctactgtcttctccctgagaaaagagtcatgagctgggnggtag

SEQ ID NO: 109143 - DNA, 396 bp, Homo sapiens
  misc_feature (1)...(396): n = a,t,c or g
cggtccccattttttatgaattcacgggtgagggtcctcaaaaaaaggagggtaaggcttaggatctaggacagtgcaaccccgttcggattaaccaagcggttagaaccagcaagcacatgcaaaaagcgggcagggggaggtgggagtggggaattaagcaggcaggaaaaaatgggtggcaggttcagggagtgccattagagccttaggtagtcctccctccctcctttctggagcagtttgagggggttcctcaggcaagttttttggagttgggtgtttacatggccccctcccttcattttctaaggggtgaggttttggatggttgggtagtttgggccatggttatacccctgcccggcggcccgttnnnnnnnnnnnctcgtgccg

SEQ ID NO: 109144 - DNA, 371 bp, Homo sapiens
  misc_feature (1)...(371): n = a,t,c or g
tagggtgttcataccaagaaccatctggggaatggtagcgcaaatatgtatatgttctaaacctcatcactaccccataaatgcagcttaggtctgtaagtctgaaggagtatgtgtatctatctgggtgccgatttannnnnnnnnnnngagacggattttcccatgctcaaacccagaaaggactgcaggcttgcctcttactgatatcccgattccaagcctaaaggattcttcctaaccatcaccaacagagtccatgcctttgtagcatctttgctaccaccctcctggaccgatgtttttaggcacaaatctttctactgttcccggaagaacctgccccgctttgtcctctattactccccctg

SEQ ID NO: 109145 - DNA, 349 bp, Homo sapiens
  misc_feature (1)...(349): n = a,t,c or g
ggggccgggttccccccccttttttccccccctttttgggcccccaccccggttttccccctgggggggggtttttcccccccccggcccccattgtgtaaacccccnnnnnnnnnnaaaaccaaaaaatttcccccnnnnnnnnnnnnnnnccctttttccccccccttttggggggtgtgcccgaaaatttttttttcccctnnnnnnnnnnntttttttataccccatttttcccccctcccccccctttgggggcnnnnnnnnnnntcctttttttnnnnnnnnnnnnnnngttcttaatgacggcatcaacaagctaaataggttaactatcactatctccatc

SEQ ID NO: 109146 - DNA, 349 bp, Homo sapiens
  misc_feature (1)...(349): n = a,t,c or g
naacacatgctgtccgagttatgagaagggtggggggtaccgtagcggcctaatcctggaaaggctccctgacccccagaggacccatgtgatgtgggcaaccatcaaggacttcgggatgcctggactccggtttggcacgctgtacccacaataccaagatgtggccactgccgaggcttccctctgccgctaccacagactcaatggcttggtccaggaccagatggcactgctgctccggcaccgtgatgaggaaaatgaggaccacatactaccccactcactataatagcttaaagttttaaaaatactgacaacatcccgtggtgcccaagattaagagccc

SEQ ID NO: 109147 - DNA, 737 bp, Homo sapiens
ttttttggtgtttttatcttaggtctctcgggatctggtgtgctttctccagctggatcatgtcaacgtttattatggccaggactatcggaacaactacaaagcacctacagactattgtctggtgctgaagcatccacaaatccagaagaaatctcaatatatcagatacgtttgttgtgatgatgtgaggacactgcatcagtgggtcaatgggatccgcattgcaaagtatgggaagcagctctatatgaactaccaagaagccttgaagaggacagagtcagcatatgattggacttccttatccagctccagcattaaatcgggatccagttcttccagcatcccagagtctcagtcaaaccactccaatcagtctgatagcggagtttctgacacccagcccagcagggacacgtccgtcccccagagcattggtgagctcccgtattcctctgaagcccctggaaacgaggcactcagttggaagagtccagcaaggtaacaagcttcgttttaatttacattgaaaattcttggggattcttttgggtttaaattgttgctctcttatgtctttatcggggagtcttatttggccttatttcagtctcctttattaattttcaatcttcctaattgtagtgggtaaagacagttcagagagacctgttgatttgacttccccttggaaatgagtattttacaaattggctctaatgacttaaaatctc

SEQ ID NO: 109148 - DNA, 364 bp, Homo sapiens
acttgaatttcttcagctgagtccacaaaccctctttatgcaaggttgtgtgttctgtagctgtgtgcatttcttaaaaaccagagtctccaggggccgacttgggagcctaagaagtgaagcctgctggtgcagaggggccagcaagccctacttgctcggcacacctgcctgcatgtgcagtggaactgagcgagtggagcagagtgtgagcactcacaatgctcaccaaacctgggacgtggcaggcagtttcccaaggactaggaaagacattcacagtggcacaactgtttagctacctcattatgacccacctgtatgtccacacaggtcagggctacccttcagtttacctgagaag

SEQ ID NO: 109149 - DNA, 329 bp, Homo sapiens
tatcattactaatctgcttaaagctggggcggaaagtaattccaggactgggagtacactaagtatttctcccctgatgttggctgcaatgaatggacatgatcctgcaataaaattgctgctctatatgggttcagacattaatgcccaagtatagaccaatcggaacaccgctctcaccctggcctgtttccagggccgagcataacccaagaggttgcttctggaccgaaaagccaatgatgaacatatggcaaagacgggtcttacccccttgatggaagcagcttctggagggtatgccgaggttggaagagttcttctttagc

SEQ ID NO: 109150 - DNA, 236 bp, Homo sapiens; identical to SEQ ID NO: 109053

SEQ ID NO: 109151 - DNA, 427 bp, Homo sapiens
ggtagagacttattgcaacaatggagtgcccaccaaacatctgaagatctatcatgagccacagcatctagtggacccacctgtatggtgcaaatttaaggtttaaggattgcttttttgctatactgttgcacaagaaggataagcttcgatttgctctctgtgccttctgttagaaagggcctgcttctcattatcagtggaaagttttaccccatggtaattaaccaaagaggcagaagctgagttacagcttgtagaacaaatgcttcaccaatggtatgcctcccagctacagccacaaaagtttttgcttctgtttcgctagatttactaacgtggggttgagggtatgcttgtgtttttgcaggagatgaacaagccgggtgggtgccctcaagatgtgtacgaccatggaacaggagac

SEQ ID NO: 109152 - DNA, 419 bp, Homo sapiens
  misc_feature (1)...(419): n = a,t,c or g
agctcagatttttatttccaaatgtgtgtctcccgctgaacagaaggggcaggtatatgtaaatataaaattatggaaaaacggattctccgtcaacgacgatttcagaagttattccgatggtgccagtcagcagattttgaactccatcaaaagggggtgagtagccaggggtgggacnnnnnnnnnnnnnnnnnnnnnnnnnnnnnnnnnnnnnnnnnnnnnnnnnnnnnnnnnnnnnnnnnnnnnnnnnnnnnnnnnnnnnnnnnnnnnnnnnnnnnnnnnnnnnnnnnnnnnttaccacccagcccagatactcaggattggttgctcttggaaaacnnnnnnnnnnnnnnnnnnnnnnnnnnnnnnnnnnnnnnnaactggacatgaacactatgcccttgcttcaaataaag

SEQ ID NO: 109153 - DNA, 421 bp, Homo sapiens
cggcgcttgtcccgagcttggggctgccccttgagggcctgcctagctcgctgtaaagcctgggacgcaggagtgtggtcgactttgccaaacgcttcagccccgggcaagcctgcccccaggatgacacaaacatgaaccctgacttgggcttgcggtcgcaggcccgtgggaggcagcagtggctgcaccgagatccccggacctcaccccgtcgcagctcagggagccccccgggctcgggcaggatccctccccgctctggtcggacactgctggacagacacgggagggaaaaagcaggaaaacgcctgtgtcggggagagggcagccccctcccgtccccgcaggcagcttgattgggcccgccgcaccttgctctgagcacagctctcccctcagggccccgtctcgcctcgtg

SEQ ID NO: 109154 - DNA, 402 bp, Homo sapiens
cctatctagatatctaagatacaggtgtacaccaagccccaggctgacatccagaccccaggtggacaatatgccccaggtggacagcataccccaggtgaacagcaggcaacagtttggcaccaaggacctaagtgaaacaaagccttaggtgattaccaggccataggtagtcattagtctccagctggacaatagtccctaggtggatacctaggccccaggtggacactagaccccagattaaaacaaaaaccaagtaaaaaaatcaagccccaagtggacaaccaggccctaggtaaatacacaaatctcaagctcacaccaggccctatttggacacccaagccccagatggacttcaggccacaggtgaacactgaactctagaaggtcttcacc

SEQ ID NO: 109155 - DNA, 162 bp, Homo sapiens
tatctaattcccacagcagactttaaaccaggagaactaccactccttgaagttggtaactgggtagtcttacctgttgaaatgtctatccacatatcagtctcatctggagacgtaaagccaacatgagctcccccatctataggcataaaaacggattca

SEQ ID NO: 109156 - DNA, 420 bp, Homo sapiens
cccttttccttccccaagaagggtccccccgcccacccctaaaaatgtccggaaaaaaccatccaccccaaggtttgggaaccccttaggaaaacccttcccctgggaaaggccccggggctttctttccccaaactttggggttttgaggagaaataagggatttaggcccacccccgggctggggccttaaagcaagtaacaccgggcgcagtcagttccaaggcaggatccggcggtccacaggccacagcctctctcctgtgataagaagacagaaccctccacttcagcctctgattgaccacggccttctccacttcagcatctgattggtcacaggtccatccttcatagggaataaccaactggaggccgctaaagggcacctaggggtattgccaagttcttttggcttta

SEQ ID NO: 109157 - DNA, 255 bp, Homo sapiens
aggacttttagatagagcagctctcacatcggcacaacccggcctggagcacggacagtgcttagacatttctagttgaactttccattcaacccaggaattgtgctccttggtgtctacacaaaggagttaaaaacttgtgtccacacaaacacctgcatagaaatgtttacattcataattgccaaaacctggaagcagccaggatgtctttctgtgggtgaatgaatcgtgatgccacatctacaaccatct

SEQ ID NO: 109158 - DNA, 162 bp, Homo sapiens
tatctaattcccacagcagaccttaaaccaggagaactaccactccttgaagttggtaactgggtagtcttacctgttgaaatgtctatccacatatcagtctcatctggagacgtactgccctcctgagctcccccatctataggcataaaaacggattca

SEQ ID NO: 109159 - DNA, 176 bp, Homo sapiens
gcagagccactcgctattgtagatcgcgctgtccagccgcgtgtccgagtgggactccgtggaaatgataggcgatgtcttcgtggcttcggtaattaagctgggacacctggatgtccatggggctctccatgcacctgtcctctcttcccttcttaggctgatgttttgcccct

SEQ ID NO: 109160 - DNA, 358 bp, Homo sapiens
  misc_feature (1)...(358): n = a,t,c or g
cccgctggcgcagtttatcttcctgaagctactgtggggggtagcgttgttcgtacggcgaataccggggcgcttctcggcgctaatgtagattgtgctgtcgctgaccgtttcatgccgttatatatggtggcgttacacctatacgctgaactgggacaatccggtcagcctggtgtgcgggctttttatgcttttcgctgaaacgtacgcgtggattgtgctggtgctcggctacttccaggtagtatggccactgaatcgtcagccggtgccattgccgaaagatatgtcgctgtggccgtcggtgaatatctttgtcccaacttacaaccaccctcccaccntnntnnnnntt

SEQ ID NO: 109161 - DNA, 255 bp, Homo sapiens
aggacttttagatagagcagctcttacatcggctcaacccggcctggagcacggacagtgcttagacatttctagttgaactttccattcaacccaggaattgtgctccttggtgtctacacaaaggagttaaaaacttgtgtccacacaaacacctgcatagaaatgtttacattcataattgccaaaacctggaagcagccaggatgtctttctgtgggtgaatgaatcgtgatgccacatctacaaccatct

SEQ ID NO: 109162 - DNA, 284 bp, Homo sapiens
acgaattcaagctccgtacccggagatccaggacttttagataaagctgctcttacatcggtacaacccggcctggagcacggacagtgcttagacatttctagttgaactttccattcaacccaggaattgtgctccttggtgtctacacaaaggagttaaaaacttgtgtccacacaaacacctgcatagaaatgtttacattcataattgccaaaacctggaagcagccaggatgtctttctgtgggtgaatgaatcgtgatgccacatctacaaccatct

SEQ ID NO: 109163 - DNA, 163 bp, Homo sapiens
ctatctaattcccacagcagaccttaaaccaggagaactaccactccttgaagttggtaactgggtagtcttacctgttgaaatggctatccacatatcagtctcatctggagacgtactgccctcctgagctcccccatctctaggcctaaaaacggattca

SEQ ID NO: 109164 - DNA, 418 bp, Homo sapiens
acactgattacggtccgtcccgacaacgtctgagtgggaaaacgtcgctgcaaccgtattggtggccttccgaccgagacccaggaagatgtgctgtcgctcatttccggtggtttcgactccggtgtttccagttatatgttgatgcgtcgcggctgccgcgagcattactgcttctttaacctcggcggcgcggagcatgaaattggcgtgcgtcaggtggcgcattatctgtggaaccgctttggcagctcccaccgcgtgcgttttgtcgctattaatttcgaaccgcgcgtcggggaaattctcgagaaaatcgacgacgggcagatgggcgttatcctcaaacgtatgatggtgcgtgccgcatctaaagtggctgaacgttacggcgtacaggcgctgggtcacccgggag

SEQ ID NO: 109165 - DNA, 350 bp, Homo sapiens
  misc_feature (1)...(350): n = a,t,c or g
atannctcaggacacggggacctcccgccgagaccctcgggacacccggacctcccgccgagaccctcgggacactgggacctcccgccaagaccctcgggacacccggacctcccgcccagaccctcgggacacccggacctcccgccgagaccctcgggacatgagctgcaggaaacccaagcagagtgcagctactgaggttccaaggaggaaacggcatggacataagcacctctcacaagacttcagttagatttttaattcccttcctgtgcttgagaaaaaattgaatgttaaacatgaagggcaaacnnnnnnnnnnnnnncaaaagggagccccgctcggc

SEQ ID NO: 109166 - DNA, 345 bp, Homo sapiens
cgctcctcggtgctgatggctgtccttctaaaccagaggggagtccaaaagcttcagtgcaggaggaaggcagtgagtgttagccctgacctgcgctgagccctgagaagaaagcttccttcgcccgcgtcctcccgctggctgagtcagccaggaccctgctgtgcgaggtccatatggggcaggtgcagctgccaacacggccaaactgaaggttcgctcgcaccaggaccagtcgtgggtgaactctttgcacgctcttgacgtcaggtagcacagaatctggcctcctggggaaactggggaaactgggaaactgggcaaactgctggtgttttcagcctt

SEQ ID NO: 109167 - DNA, 338 bp, Homo sapiens
  misc_feature (1)...(338): n = a,t,c or g
angangccgggcatggtctgtatctctatagcgccgccgaaacactgggctgagccacataagacatctaccaaaaaatgctcgacggacggatgaaaaattcctccatctttaattatccgacattgagttgggctgatatcggcgttatcggctggctggaggatggcgcaccgatcgtcaatcacgtggcgttatgccgcacttcttatggcccgtatgccagagcaatggtgaaaatctgcaaagaagagagttttcaccagcgtcaggggtttgaagcctgcatggcactggcgcaaggcagcgaagctcaaaagcagatgttgcaagacgcc

SEQ ID NO: 109168 - DNA, 314 bp, Homo sapiens
  misc_feature (1)...(314): n = a,t,c or g
atnacaaataacacttgagcctttatatcttccttgggagggccctagcttgtaaccgctcttgaaatgaccgcatttatactcttagaacaacttagaccccccacttacccatgactggacataaggtttacaaaggcttattttgaagaaagaagatgaaatcagagctgcggactgctgcagaattcagttacagcttcccgggaagcaggacaagttagtagtagctttaaaacgaaaccttcttggccaatgctggggagaaaatggttctttgtcatgacatgtatgttttttgggttgctgattct

SEQ ID NO: 109169 - DNA, 100 bp, Homo sapiens
  misc_feature (1)...(100): n = a,t,c or g
aatatgatggagcaagtgctcgatatcccttccctgtaagttatctcgaaagataacgccaacgttaccatcgaccccgccccnnnntntnttttgtgcc

SEQ ID NO: 109170 - DNA, 133 bp, Homo sapiens
tcgatgatcgttacgatctccgtccaagcgcatgggtgactccgaaaggggagtggggtaaaggcaccgttcagctggtggatattccgcccgccgattaaataaggtatcacctggttgtttcctgtcagcc

SEQ ID NO: 109171 - DNA, 627 bp, Homo sapiens
tgattacgagattcaatgtccgtacctgtacatcgcttagagtgcaaacaacgtggcgataccacagcttatttgccttggaccacaagtgcagctgagaaccaggctctcctcatctgggtcacaccaccgcgtgaggagcagggctgctgggcaccagcgtgcagacagcgtcgctgtagccctggccgtgtctgcctgccctggacttccaaacgcctgagggctgccttcctgaagcgttcaccatgaacaccacacaacacgcacggcctcacacccgcgtcgcctgccccagcccatctccatcacttgcaatgctggtcccccatcccccgggggctcccctgctcctgcatctcccaaccccacatgggaccatgtcctgctgccatttccttggcccctgcacccatgtcccctgcctcccgcccgatgccgcagacagccctgcccgcctgcgcgtttccgtcctgcacagcctgtctacatcttgctctttctcaactacagatttgggctgtgaacccttggttttcagccagcgccgttcagggtccccggacagagtatcagagaactgcaaactgacaaactggagaaacacgccactgctccctgagcccc

SEQ ID NO: 109172 - DNA, 445 bp, Homo sapiens
ttcttttcaaaagtgatcagctccctttcaaagaagttttcatgtttctaagtacactctgggatacgccaccgccaactctctactgagcaattcacatctcagtctctcatcacaccgaccatgaacgttgattctctgtgaacttgtaccaaaaccaaataaacacatcttacccacaggaaaccatgtgccgtggaaaatgaatctggctggctttcattatttaggtaaggttcagggttataagcagcacattcaatctaaaatggaataaaatcaaacgctcacatataaaacagagctaagaggctcctagactacataacgtcttaaatggatgacttacttccaatgtataaacacagaaattacaggttcattacctaccaaagattaaaatagggaggatgaaagtttaaaagtacaactctcagaagttagc

SEQ ID NO: 109173 - DNA, 255 bp, Homo sapiens
aggacttttagatagagcagctctcacatcggcacaacccggcctggagcacggacagtgcttagacatttctagttgaactttccattcaacccaggaattgtgctccttggtgtctacacaaaggagttaaaaacttgtgtccacacaaacacctgcatagaaatgtttacattcataattgccaaaccctggaagcagccaggatgtctttctgtgggagaatgaatcgtgaagccacatctccatccatct

SEQ ID NO: 109174 - DNA, 315 bp, Homo sapiens
tggtttcttcaccaccgctgaacagcgctttcagtgcgccgaaaaagcggctcaacagcccaggttgtgcaggagctgctggtgttgccggtgcacctttcggtgctggagctacaacaggcgcggcaggttcagctggcgttggcgcaggcggcacatccggcatggcaaaggttgccagcgcaggttgttccggacgcttacggtgagcgaactcttgttcagacggcagggccatcggttcttcatgcagcttgggcagcatgtaacccaaggttgggggtccttcccatttaggcactcacagcacgcggt

SEQ ID NO: 109175 - DNA, 431 bp, Homo sapiens
atgattaccgattcactgtccgtccctgtacaacgatgtgactgggagaaccctggcgctacccaacttactggccttgcaacacaaattttgtccatttcatttgcgaatcataatgaacaccctagtgaaacatctctccctggtgttaggagataaaattcgtatttacattttcagcaaactccagtgcatttatagcaaggtcccttctcccgcagttacctagcaatgtttccaggaaaatgatttctgaatccatgtcgataacggccatatgtgaacagtgtctgcagtgtccacaaaatgaagaagggtcattcatctttgtgcctgttcacttaagtgtctttaagaatgtgttctgtcccagctgtgtcttgggcatcaaaatggaaatgtgtggccgcagctggcttgacttgaggaga

SEQ ID NO: 109176 - DNA, 352 bp, Homo sapiens
cggctcctcggtgctgatggctgtccttctaaaccagaggggagtccaaaagcttcagtgcaggaggaaggcagtgagtgttagccctgacctgcgctgagccctgagaagaaagcttccttcgcccgcgtcctcccgctggttgagtcagccaggaccctgctgtgcgaggtccatatggggcaggtgcagctgccaacacggccaaactgaaggttcgctcgcaccaggaccagtcgtgggtgaactctttgcacgctcttgacgtcaggtagcacagaatctggcctcctggggaaactggggaaactgggaaactggggaaactggtggtgtttgcagcctttgtcta

SEQ ID NO: 109177 - DNA, 82 bp, Homo sapiens
aggggattgcgctatggttccctggcccgatctcgttcaccggcaaaaatgtgtaggacgtgaaaggtcatggcgttccggt

SEQ ID NO: 109178 - DNA, 200 bp, Homo sapiens
  misc_feature (1)...(200): n = a,t,c or g
gcagaaaatttttaactatatccagcttacgcctgtgcgtaaggaggggattgtcggttatgcagcgaagccgggggcagatcgttctctgttcgatgccagcggtttcaaggaaggctaagtcgccattgcgctgagtcatcacagtctcgctgatctccgggtcggacgctnnnnnnnnnnnnnnnnnnnnnnnatgg

SEQ ID NO: 109179 - DNA, 224 bp, Homo sapiens
  misc_feature (1)...(224): n = a,t,c or g
tctgcgtcggttgtcagtgctgcatccccgcctgtccgtaccgcgtgcgctttatccatccggtcacgaagacggcggacaaatgcgatttttgccgtaagcccaccctgcaggccggtaagttgcccgcgtgcgaagaagaatgaccgaccaaggcccagacgtttgccaatctggacgatctccgggtcgcgccctcnnnttantgtcnatgtctcttcctc

SEQ ID NO: 109180 - DNA, 368 bp, Homo sapiens
  misc_feature (1)...(368): n = a,t,c or g
attnntttgaaagactgtggtcagaaaaagaattgacataccacagactggcagaaaatattcgcaaaacatttatctaatagaagactggcattcagaatatacaaacagctcttaaaactcaccagtaggaaaacaaataaccgaatttaacaactggcaaagnnnnnnnnnnnnnnnnnnnnnnnnnnnnnnnnnnnnnnnnnnnnnnnnnnnnnnnnnnnnnnnnnnnnnnnnnnnnnnnnnnnnnnnnnnnnnnnnnnnnnnnnnnnnnnnnnnnnnnnnnnnnnnnnnnnnnnnnnnnnnnnnnnnnnnnnnnnnnnnnnnnnnnnnnnnnnnnnnnnnnnnnnnnnnnnnnnnnnnnnnnn

SEQ ID NO: 109181 - DNA, 817 bp, Homo sapiens
tggagaagcaggctcacttctcccgcccagtggtggccatgccatgtccctccttccacgggtcccagccgcgacctaaaactagtacagatgggaataaaacccacctctggagtgtgtgtaagttatgcaaggtgtgaatcaaacataggaaacgctgctagtgcatggccttgggcagacacacaggagaaccaacaggaaggaaatttaccaagatattaacacatggtctgtttccctctttaaggaaattggatttcccaaacttaatacttattaccatttatatcctgattaaaacaatgagtggatttctttaatagataagaagcatcaatatgtacaagtccattttattcatgggtgaattagccagaaatattttacaacccagttagccatattttgacacaccatgtctttttaaattaacacttacaagtaccttttcaccttaaccccaagaaccattacccctttgtaaaatgacatcttccctcttgtcaagtgtttaaaatgaatataaatggggcctgctgtcccccagtttttcctgagcaagtgatttgcaaaagcttaaaggcctgtagcctagaagcctgttccaaacatgtccgaaacaaggcagtgttgatgaagatgccaacccttgatattttctctttagtccagaataagtaggatgtagttacagaaaaatcacaccaggcgccatggctcacacctgtcatcccagcactttgggaggccaaggcaggcagaccatgaggtcaagagatcgagaccagcctgaccaacatggtgaaaccccgtc

SEQ ID NO: 109182 - DNA, 134 bp, Homo sapiens
tcgcccagctttggcaataaccggtaaccgctggtttgtcgctccccggcaccattttcgtggtccgcgatattgcacacgccaagctgaaagagttgattgacgccggaaaagaagttcctcagtccatcaaa

SEQ ID NO: 109183 - DNA, 368 bp, Homo sapiens
  misc_feature (1)...(368): n = a,t,c or g
natgacactgattacgtattcccgtccgcacccgtagatctaacagaatgtaatatggctgtggacaacgcatttactggcataacttcgcatcggatcaggactcnnnnnnnnnnnnnnnnnnnnnnnnnnnnnnnnnnnnnnnnnnnnnnnnnnnnnnnnnnnnnnnnnnnnnnnnnnnnnnnnnnnnnnnnnnnnnnnnnnnnnnnnnnnnnnnnnnnnnnnnnnnnnnnnnnnnnnnnnnnnnnnnnnnnnnnnnnnnnnnnnnnnnnnnnnnnnnnnnnnnnnnnnnnnnnnnnnnnnnnnnnnnnnnggtgaataaatcggcaaactacggagtactggataagttggcccgaggatatgca

SEQ ID NO: 109184 - DNA, 213 bp, Homo sapiens
cagggaggaagggcagggtctaagaattctcccctgggacccacacacaccccccctcccggaggccccaagaccccccctggagagggccccttcaaaatacgaccgcaggctgtaaattcccccaaccccaattgtgacccggtataaaaccctcccccccaaagttaaaatcccggccccagtggggggctcccgccggtctttcccctc

SEQ ID NO: 109185 - DNA, 315 bp, Homo sapiens
cacaacaagaacgggtagcggcctggaatcttcgcgctgaatgagatctcgccgctttccagacctcgccaaagcaagcctaccaggatgaaaaagcgcgcgatcgcaaactgtgcgacaacctggaagaaccgattcgtcgctctggtttacaggacggcatgacggtttccatccgtcacgctttccgtggcggtgaccagaccgtcaatatggtgatgcacgtcatcgcgaagatgggctttaaaaacctgaccctggcgtccagctccctgagtgcctgccatgcgccgctcctaccccacattcgtcagg

SEQ ID NO: 109186 - DNA, 331 bp, Homo sapiens
  misc_feature (1)...(331): n = a,t,c or g
ctcctctttttcgggggggcaaagggggaaaatcccttttccccccgggggccaaagctacaaattttttattncccccccttctctcctcggggggggaaaaaagggggcccccccttccnnnnnnnnnnnnnnnnnnnngggcccccttaaaatggccccccccaattccatggaaatgggcccacccctccctaaaaacctccttggtaatttccaaaattaaggcccaaaaaaaaattttcctttgaaccaataggacaaaaaccccggtccccaattttttggggcatttttcccccggggtttaaggggcccccnnnnnnnnnnn

SEQ ID NO: 109187 - DNA, 135 bp, Homo sapiens
aaatatattgaccgggcgcttaactttatgatcggcacgattaatgtttgatgtgctgctgatgtgctgattggtcccacgcctgctgagttgtttgactacacctccgcactgcagtttttcgatatgcttcgt

SEQ ID NO: 109188 - DNA, 354 bp, Homo sapiens
  misc_feature (1)...(354): n = a,t,c or g
nnnnnnnnnnnnnnnnnnnnnnnnnnnnnnnnnnnnnnnnnnnnnnnnnnnnnnnnnnngtgtttcgttttctttcnnnnnnnnnnnnnnaaaaaaatgtcccttttgtacccccaggggggagggcaaggggggaattttgggaaaaggaaacccccccctggggggtaaaacgctttttgtggcccaaaccccccaaaaaaggggaattaagggggccggccaccaagcggggaaaattttgggtttttaaaaaaaagggggttttacccgaatgggccaggggggcttaaaaccccgggcttaagggatacggccccccttgcccccccaaggggggggattaaaaggggg

SEQ ID NO: 109189 - DNA, 420 bp, Homo sapiens
gacattacagcgtatggaaacccgactatgagtgtcgggagagcgcataagcgtcggagcagccggaagcttcggagacgaacagagaactaagtggccggcggcccatcgcatggcgccctgcgtcggatggggggtcacaaacaaccgggccctaaggagacacgaacgcgccatcgccgaacaaatgtgacgaaacgcgcggaagtccgctaagaagggtggtcccgtaggtcatgacgcagagttcaccatgatggacctgtacatggcttacgcagattacaaagatgtgatggagctgcccgaatcgctgttccgtactctggcacaggatattctcggtaagacggaagtgacctacggcgacgtgacgctggacttcggtaaaccgttcgaaaaactgaccatgcgtgaagc

SEQ ID NO: 109190 - DNA, 397 bp, Homo sapiens
cggtcttcctctacagaagtcctataggtggccgcgcactccctgacggtccgtacagtcgcactatccgcgccgtcgtcagagctaagatgcgacacacgccctcttctacatgagttgcagcggacaagttcaccgaagtggactccgtcggtaaggaagtgtattctattattcgcgatctgccggatgccgccgtgaaaatggtacgcgtccaggctatcgagaaaaaccgttatcgcgctgaagaactggcagaagaacgtattctcgacgtgctgatcccacctgctaaaaacagctggggacagaccgaacagcagcaggaaccgtccgctgctcgtcaggcattccgcaaaaaactgcgtgaaggccagcttgatgacaaagaaatcga

SEQ ID NO: 109191 - DNA, 546 bp, Homo sapiens
  misc_feature (1)...(546): n = a,t,c or g
ctatatcaattggcttgttcttgnnnnnnnnnnntcacttgtaaggaattgtgctgggctcaaatacaatgacccctcctcccctgtgggagcccttgctgtctcccaaagctcctgctacccccacagactccctcctttgcccccagtgccctatccccatgaaaatcccctttacttgaaaaccaagcctgcctggctcacccctctcacctgggactccgacagccaaacgattgttgtggttgtgaatgctgggatgagaaagctggaatgtttaactttgggctcacaattctctatccaaggtgggcttgggaaatggaaaataccctctaatttagaattctaaacccgaaacatattcactatctgatatagtagtaagtttaggggaggaaaaacccctgaaactcagcccccaaacagcacaaaccctgactggagtccccccttttgtccccacccacatgcctgccatgagtaacagaaattgcttcctgaacatcctacatccagatccccgggtgccgagctgaaaaagat

SEQ ID NO: 109192 - DNA, 213 bp, Homo sapiens; identical to SEQ ID NO: 109184

SEQ ID NO: 109193 - DNA, 800 bp, Homo sapiens
ggggcttggatgtcaaattattttccttgaggggctttaaaaatattactccagccgtcttctggcacccattgtggcctctggaaactgtgaaatgaaacttactcttttgtcagtgatctgctcttcttcatagaaacttttggaattttctttgatattcttgagtttcactgtcaattatgggtaagtttcccatccatcctattagacactctctaagccctttcaacttgagagctttcatctttaatttttctgattttacctttgaatatttttttctccatttttatttttctctgttcctggaactccattatctgtacattttcacttttttaaatacctttacttacctttaacccattcttttatacattctctcttttcctattgcctttggggtgagttgcttctagcctgctcatctggctttgggctgcatttggcctcatcatgttcccttatttcaattatttcattggatgctagacattccttcttccctgctttatgtctctggtgtctgcctttatctcttttgaaaatggtaaattggaaaaaatcctgggcgcatctggtttaaaacttttgacagggggaggctgaagtgggcagaacacccgtgggcggggtttgaaccacccggccccaccgggggaaaccggttttataaaaacacaaattatccgcggggggcggcgggcccggacttccgtcttggcgggagggggcggaaatcccgggcgcggaagagaggccaggcgttccgatcacccgtgcctctggttgggcgg

SEQ ID NO: 109194 - DNA, 537 bp, Homo sapiens
  misc_feature (1)...(537): n = a,t,c or g
tcccgcaacccactctnnnnnnnnnnnnnnnnnnnnnnnnnnnnnnnnnnnnnnnnnnnnnnnnnnnnnnnnnnnnnnnnnnnnnnnnnnnnnnnnnnnnnnnnnnnnnnnnnnnnnnnnnnnnnnnnnnnnnnnnnnnnnnnnnnnnnnnnnnnnnnnnnnnnnnnnnnnnnnnnnnnnnnnnnnnnnnnnnnnnnnnnnnnnnnnnnnnnnnncaagaatgacttaacagatatagacacagctgtgatatgggtatagatgtagaaatatagagatatgggtatgggtatagatattgatatgactgtagatgtagatgtaaggggatatgtagacacccataaggggaccgacctttaattggggccccggccccggggaataccccaaataagaaaggcgtgctttcttctttcccaaacccgggacctactggggagaaaaacccccaattgggtccctgggccctcccagggcccaacctgcccctatgcccaccggggagacccttcacccccggcaagaaagctcgcc

SEQ ID NO: 109195 - DNA, 634 bp, Homo sapiens
  misc_feature (1)...(634): n = a,t,c or g
atttttgccccttcccctttttttggaggtccccaatgggggtttaaatttggtccttccggggggccggggggccttacggtaatccacccccttgggggggtagggggggcactcccccttaatccggagtttttaaccaccctgcccacaagggggaaaccccttctcttaaaaaaacccaaaaattccccgccttggggccggggccccaaaatcccccccttccnnnnnnnnnnnccggaaaaaagggtctcacccccggggggggaggcccaagggaccaaatttcagcccttggcctcccagttgggggtcaaaaatggaacggttttccnnnnnnnnnnnnngaaagannnnnnnnnnnnnnnnnnnnnnnnnnnnnnnnnnnnnnnnnnnnnnnnnnnnnnnnnnnnnnnnnnnnnnnnnnnnnnnnnnnnnnnnnnnnnnnnnnnnnnnnnnnnnnnnnnnnnnnnnnnnnnnnnnnnnnnnnnnnnnnnnnnnnnnnnnnnnnnnnnnnnnnnnnnnnnnnnnnnnnnnnnnnnnnnnnnnnnnnnnnnnnnnnnnnnnnnnnnnnnnnnnnnnnnnnnnnnnnnnnnnnnnnnnnnnnnnnnnnnnnnnnnnnnnnttgact

SEQ ID NO: 109196 - DNA, 621 bp, Homo sapiens
  misc_feature (1)...(621): n = a,t,c or g
gatcaacgcaagatgatagaccgcgcaatacccaaaacgaagacggctctcctggccagagtaacggcaacaagatcgaacaatccacatctcatcagcataggagcggcaagtgcctgacatgtttcgttaagataagctacagtccgccaaacacatccttcaaaaaatttttgggaggggtcctggatttcatcacattcccaaaccccaagcctggtagggtcccggaccctgcgctgaagagtccaaactcgccctccagccagtgcacattagggctggaaatctttcgtctaaagggcgggtaagtttggatnccgactccccctcctcggctgggcgcaccccgggtgtccgcagggaggggcgatgttctgggggggggagcgtctgcccaacgccccctccctcaggtgagctcagcccgtgggggtccgcagaaagggcggtgctctgggagagggttagggtctgcccggcgcaccctccccaaggggcgcagctctgagccgggagcaggctctgcggggaggatccagatgttgggggcggggagggcactcggtctgcccagcgacccctcccgaagtgagcgcggcccggggtccgcggggcagg

SEQ ID NO: 109197 - DNA, 213 bp, Homo sapiens; identical to SEQ ID NO: 109184

SEQ ID NO: 109198 - DNA, 644 bp, Homo sapiens
  misc_feature (1)...(644): n = a,t,c or g
nagatacccctcaaaacaaaaaaagtaggggatcacgcccgccgcttgtcccctaattatattaaggacggaggtaaaccacccctgtgcggacgggggtggtcggcgttatccacaacccatggggagcggcgggggccaacctctcannnnnnnnnnatggccaaaacgccccacctgggtgcaccccccccnnnnnnnnnnnnnnnnnnnnnnnnnnnnnnnnnnnnncttttggggccaggggggcccccccctttaatccccccttctgggggggcaaggggggggaattcccggggcccccaggggcaaaatttccaagattttaatatccccccctttcccccccccggggggccaaaaaggggaccccccctccnnnnnnnnnnnnnnnnnnnngggtcccctcaaaatggccccccccaattcaatggaaattgggcacccggttcctaaaaaattccttggtaaaaacccaaattaaggccgaaaaaaaaaggttccctgaaaccaaaagaaaaaaaaccccgggccccaaatttttggggcaaatttccgccagggtttaaagggccnnnnnnnnnnnnnnnnnnnnnnnnnnnnnnnnnnnnnnnnnnctccatgcaggagttcagcagtac

SEQ ID NO: 109199 - DNA, 127 bp, Homo sapiens
cctcgggggggggccgggaccccaattccccttataggggggggaataacaattcatgggccggggtttaacaacgcggggacgggaaaaacccgggggttacccaatttaatcgcctttgcaaaaa

SEQ ID NO: 109200 - DNA, 255 bp, Homo sapiens
aggacttttatatagagcagctctcacatcggcacaacccggcctggagcacggacagtgcttagacatttctagttgaactttccattcaacccaggaattgtgctccttggtgtctacacaaaggagttaaaaacttgtgtccacacaaacacctgcatagaaatgtttacattcataattgccaaaacctggaagcagccaggatgtctttctgtgggtgaatgaatcgtgatgccacatctacaaccatct

SEQ ID NO: 109201 - DNA, 255 bp, Homo sapiens; identical to SEQ ID NO: 109157

SEQ ID NO: 109202 - DNA, 637 bp, Homo sapiens
  misc_feature (1)...(637): n = a,t,c or g
ttggtgtgttgtggaaagggttttcccactgttttaacccccacggttccagggggtttcttcccattttttttcaacaaaattttttgtttttggggccacaaaaatttattttttttgccgggggccctgttttttttccnnnnnnnnnnngggccccccccgcttttcctttgttttcttggggcccccccaccctaataccccccccttttttagggccgccccgaaaaggtgttcccaaaaaatttgaaannnnnnnnnnnnnnnnnnnnnngaaaggggggtttctttttttcccccannnnnnnnnncaaaggggggtttttagttcagggcaccctttcccccccgggtttaaaaaatttttcgcccccaccccccccgtaaatgggggttaaagggccccccaaccccaacggggaaaatttttgggttttttgaaaaaaccggggttttccccttttaacccggaggtttttcttttcccgcccccaaattttgccccccccggcccccaaaaagggggggttccagggttgagnnnnnnnnnnnnnnnnggtttttttccccccnnnnnnnnnnnnnnnnnngaaacnnnnnnnnnnnnnnnnnnnnnnnnnnnnnnnnnnnnnnn

SEQ ID NO: 109203 - DNA, 445 bp, Homo sapiens
cgatcgtccggttcggaattcccgggccgacgatttcgtagaaaagagaccgaacctcacgatcgggctccatgggagggaagggtcacctcctccgtctggccgcgctcgctctccttgggtcgtgggcctggccctccccaagctcttaggaggatgctgccacttctcacccccctcgccgccttgcacacaccgttgcaacaccccattttcccagggagagagatccccctctaatctaggcgacccaactccccctttcatgtttttcctgggtcaggacgcttcccctcccccaacgcctcttcaccccctttcctgggaactgcctactccacgtttacctttcccctgaggagaggcctcttgctgccctccgctcgaaatacacaggcatactttttttctctccccgatcccgcactccctacccccgttctcg

SEQ ID NO: 109204 - DNA, 412 bp, Homo sapiens
  misc_feature (1)...(412): n = a,t,c or g
ttcgtacagagcaaggccgcgagtgactggctgattgccagcgtggaggggcggctgacggagctgtgcggagaggaccttcccaccatcgccatcgtgggccactacgacgcctttggagtggccccctggctgtcgctgggcgcggactccaacgggagcggcgtctctgtgctgctggagctggcacgcctcttctgccggctctacacctactagcgcacgcacgccggctacaacctcctgttctttgcgtctggaggaggcaagtttaactaccagggaacctagcgctggctggaagacaacctggaccacacagactccagcctgctataggacaatgtggccttcttgctgtgcctgtacaccgtgngccggngcagtagactgcacctgcacgtggtcaagg

SEQ ID NO: 109205 - DNA, 443 bp, Homo sapiens
atcttccagtcctggttgtgtaggacccagacagcgatcgcctcgtaggacatgccatacaccatgaccgaggctgagaagctgctcacgcagcacgagaccatcaagaatgagatcgtcaactacgaggaggactaccagaagatgaggtacatgggcgagatggtcacccaggggcagaccgatgctcagtacatgtttctgcggcagcggctgcaggccctggacactggatggaacgagctccacaagatgtgggagagcagacaaaatctcctatcccagtcacatgcctaccagcagttcctcagagacacgaagcaagccgaagcctttcttaccaaccaggagtatgttctggctcacactgaaatgcctaccaccttggaaggagctgaagcagcacgaaatcgtcgacgcgggaattccagaacggtcgtgat

SEQ ID NO: 109206 - DNA, 400 bp, Homo sapiens
acttttgttgagttttctctagcatgaagaagaatttgcgcggcttgctggaaggcgcccttggtgtaggtgccgccacctcggtaggagatggcagggatctcttggaggagcagcgcgcacttgtgctggcgcgcgcggcgggtggagatgtaatcgacgcgcggcaccacgtagttcttggacgagaaggtcacgatggccacgcgcgtggccgtgggcaccacggggaagtcggacagcagcttgcggacgaacatgagctcgctgcggaagttgacttcgcccacgctggacgaatcatccaccaggaagacaagctccaggcgctcgctgagctcccgcagcagccgcacgcgtcgacggaacgcctggcccagccgctccactctgcacgaaa

SEQ ID NO: 109207 - DNA, 397 bp, Homo sapiens
tttcgtgtgggatgagaggggtcaagggtggtacagccctccctctggcaggctctttctccctgccccaagtgtgccaaggagtccagccctgacatctcccctgactctcctgggaccccccagatttcattgacagggagacgacccctcggatgccatggcgggacgttggggtggtcgtccatggactaccggcccgggaccttgcccggcacttcatccagcgctggaacttcaccaaggtgttcattccctccgataggggctggaggtagggagggagccagggcagattggcacctcctgctgactctgccatccctccacgtcagaccaccaaggccaagtacaagactcccacatacccctacctgcttcccaagtctaccagcac

SEQ ID NO: 109208 - DNA, 408 bp, Homo sapiens
tttcgtggggagcatcacgcatggtttgggtttgcagtgacttctggatatctctccccacaagtgctgtggaaggacccgtaccggaagcctgtggacctgtgggcttgtggggtcatactgtacatactgcgtggtgggtaccccccgttctgggatgaggaccaacaccgcctgtaccaacacatcaaagccgccgcctatgatttcccatcgccggaatggtacactgtcaccccggaagccaaggatttgatcaataagatgctgaccattaacccatgcgaacgcatcacagctgccgaagcccttaggcacccctggatctcgcaccgctacaccgtggcatactgcatgcacagacaggagaccgtggactgactgaataagctcatgccacgaagaaac

SEQ ID NO: 109209 - DNA, 484 bp, Homo sapiens
atttatttttcggctcccaccctgtcacagtacttaccaatctttattagttaccaaagttaaactcattttatgaatcaactagccatgtgtatgtttttctatgaccagctttccattacctccatatagcaatgataggtaagccgctgctacatttgaaaagtaaatactatgcaaaactacactcagagtgagaagattaattttacaagagaccactttgccttagtaacaacactcaagtcttcatcatccaatgtaggcaatgaatccacacacagttcatgcaaaatgctgactgcagattcatcaggaattccaacatcgtggactcgagagctgatatgagaaatgtcaccaccatcctgctctccgacggaatcatcttcaacagactcctcatcttcaatggactcctcatcttccatggactcctcatcttccatgggcagggtggaaactgcaacttgtgccatgatcc

SEQ ID NO: 109210 - DNA, 390 bp, Homo sapiens
  misc_feature (1)...(390): n = a,t,c or g
tttcgtctgtggagtgtgactcacggcgcgcgatgacggtggggtccgccgcgatcgcggaatggatggaaatggaggagggaaggggtgggggccacggcttgggcttgagtgaggaaggggacaagatggaggatggcctggacgtggccggggattggctatgggtgtggactcagggaactccattggctgtggagtccgccgggatcacatgctggttcaggcatgcgtaccatcaaggtcctcataatcatctggaagcttgctggaaatgcctattggtagcctctgtcccagatctactgaattagagctttctcttnnnnnnnnnnnnnnnnnnnnnnnnnnnnnnnnnnnnnnnnnnnnnnnnnnnnnnnnnnnnnnnnn

SEQ ID NO: 109211 - DNA, 422 bp, Homo sapiens
gtttcgctggcaccgattggagttcgggacgactggcgagtagcccctcgctgtggctgcggacggtcactttctgtgtctggctctgaccactcagtacatgatccacaattacagctcaggcggcttccacgacctgttttcctactgcagtgaggagaggccgccgatcgtcaagaggataggcagacaggagttcctgctggcgggccccggagggctgggcatgtttgccacagtcgcagggatatcccaccgcgcccccgtgcactggttggagaatgtgattggggcgggtgtgtcctttccatacgtcatagcgctcgatgacgaattcatcacagtccacagcatgttggattagctacagaagcagacgctgccctttaaggagggccatatcctacacgactttgaaggag

SEQ ID NO: 109212 - DNA, 432 bp, Homo sapiens
tctgtacgaccgctcttgaattcccgggtcgacgatttcgtgggaactggacatcattctcaaagctatgacgttcatcaaggtatgtgatggcttttaaggagcacgggaagatcacatcctgctgtattccgggttagtttgagtgagtacatgtgtgacaaggacagcccagtgttcctgtatatgtgactgcagatatccttagctagtgtaacaatgttgaaagtgatgtgagaaggggtatgtttcccaatgtgtatccgccgggggctgtaactgtcgtggtgtcacagtgagtttatgtactggcgcctgtgtgtgtcaagatatgtgtgagcctgtgagtcgtgggtgcatgtgtcgccatcatttctctgtttgaatgtgtatgtgcatgccactgcaatgtgcgcatctctgcgattctgg

SEQ ID NO: 109213 - DNA, 417 bp, Homo sapiens
  misc_feature (1)...(417): n = a,t,c or g
aaaaaaaaataattttgggccgggcccgggggcccccccccttaatcccccccctttgggggcccaagggggggggttcccggggtcaggaaattagccccccccgggttnnnnnnnnnnnncccccctttttcttaaaaaaccaaaaaaaccccccgggtttgggggggggccccctttttcccccccccttggggggctaaccccaaaaaaagggttaacccccggagggggaccccccaataacccaaaatttgnnnnnnnnnnnnnnnnnggggggcaaaaaaaaggttttttttcnnnnnnnnnnnnnnnnnnnnggaaaaagaaaaactaacaaactctgattaggttcttcattctgtaatatgggaataaaaggaatacaaacagctattagaactgtgaaggacgaaa

SEQ ID NO: 109214 - DNA, 419 bp, Homo sapiens
tttcgtcaaaagcaacattgacatctccagtgggttttagtatgaggagcccaagaggccgatgccgcggaaacagagcgactcctccacctatgactgcgaggccatcacccagcaccatgccttcctctcaagcatccactccagcgtgctaaaggatgagtctgagaccccggcggctggggggccgcagctccctgaggtcagcctgggccgctttgacttcgatgtgtccgacttcttcctcttcggctcgccactgggcctggtcctggccatgcggaggacggtgctgcctgggctggacggcttccaggtgcgtcctgcctgcagccaggtctacagcttcttccattgcgcagacccctctgactcacggctcgagccactgctggagcccaagattcacctggtgccgc

SEQ ID NO: 109215 - DNA, 391 bp, Homo sapiens
  misc_feature (1)...(391): n = a,t,c or g
ntcagtagcaaacaagcatctttttcaactcccacgtttcagcagcaggctctgctgagtgacattttgcaaggctgaggcccccgtaggcgcaggcgccgttggggtgcgcatccggggacctgcaggttacaagcagcagatcccaccttcagtcctggctctgacaagccctccaggtaaggcgcctttgcatttagccgagctagagaagagagctggaagccacctctacctttcacggggggaagggactgcccgcgcgctcgcccccattatctcagccctccgaagcgcgccacggactccagccttgtctctcacccccagcctcaccccgcgtccctgacccgcgagtctcccgcccagctccgcgtccccggtcacgaaa

SEQ ID NO: 109216 - DNA, 496 bp, Homo sapiens
actgacgtaccggttcggatttgccgagtcgaccacttcgtgctgtcgcggagccggaacagcagcggtgaagcccctcggctcggccgagaccgccgtgcccattgctcgcctcggttgccgccgctttagccgcagccgctgctgccgccgccgggggagaggcagcctattgtctttctccgcggcgaaggtgaggagctgtctcggctcggcccgcgggggagccccgggagccgcacgaatgggacaacagaagaagtgacttcaaaagaagacgaagaggaagagatggatgaagatatagaagacttagatcactatgagatgaaagaagagcctattagtgagaagaagttggaggatgaaggaactgaaaaagaaaattgggcaatattagagaaaattatgaagactgaaaggcaaggccatttaaatgtgttgaccctgatagtcctttgcacagtgatctttagatcttataaagaagcgatag

SEQ ID NO: 109217 - DNA, 420 bp, Homo sapiens
gacgcagctaccggacctgaattcccgggacgacgatttcgctgaattccaggagcctgttcctgcttcgataccattctactataaaattataaagaaaccaatggatttatccaccgagaaaaagaagcttcagaaaaaacattcccaacactaccaaatcccggatgactttgtggccgatgtccgttcgatcttcaagaactgcgaaaggtttaatgaaatgatgaaagttgttcaagattatgcagacacacaagagattaatttgaacgctgattcagaagtagctcatgcacggaaagcagctgcattgtactttgaagataaactcacagagatctactcagacaggaccttcgcacctttgccatagtttgagcaggaacaggatgatggtgaggtaactgacgactctga

SEQ ID NO: 109218 - DNA, 460 bp, Homo sapiens
  misc_feature (1)...(460): n = a,t,c or g
agcaggagctaccggnnnggnaaannnggngcgacgatatcgtccgcatgtcccttcgcgggaaggctgaggtgtttttgggcaacaacaccatgatgcgcaaggccatccgagggcacctggaaaacaacccacctctggagaaactgctgtctcatatccgcgggaatgtgggctttgcgctcaccaaggaggacctcactgagatcagggacatgttgctggccaataaggggccagctgctgcccgtgctggtgccattgccccatgtgaaggcactgagccaacccagaacactggtctcgggcccgagaagacctcctttttccaggctttaggcatcaccactaaaatctccaggggcaccattgaaatcctgagtgatgcgctgctgatcaagactggagacaaagtgtgagccaccgaagctccgctgctgaacatgctcaacatctcccg

SEQ ID NO: 109219 - DNA, 405 bp, Homo sapiens
  misc_feature (1)...(405): n = a,t,c or g
tttcgtaggactatgattttttgattgcttactgtaaacctatggcataaaaatctctgggaacaaggcctggaaataattcnnnnnnnnnnnnnnnnccggaaaaaagtttaatttggcccccaaggtggaagggaaggggggaaattgggtttaatggaagnnnnnnnnnnngggttaaacccatttttctcccttagcccccccaagaggggggaacaacgggnnnnnnnnnnaggggcgggaaannnnnnnnnnnnnnnnggaggttaaaaaaaaaggggggttcaagggggaaaccaaagagggtctgaacccccgccccttttaaaaccccaagtggggcccccaaaaggggggggaataaggggagacccccccggcgcccctgaaaaaaatttttag

SEQ ID NO: 109220 - DNA, 424 bp, Homo sapiens
ttgggcctgccaccagcaccctttcaatgaactctggaagaagtcccctaagtagtctacaaacctttccacaaggctgccagagtgattctttaaaattccccaccagatcacatcactcccctgtttaaaattctccagtggctttctactcctcttggaatagaactccagcccttaccctggctcccaaggtcctgccagatatacctgcacttccctctcatcctctgttccctcgttccccacttctctctccttggctcactctgctccaggcacactgacctcccttctctcctcaaacccagaaaccttttccccagccagactctatgcttgcacttcacaagatgcctggtgtattctcacacatcaggtctcagctcagctgtcaccacttcaaggggcagttcctacgaaa

SEQ ID NO: 109221 - DNA, 423 bp, Homo sapiens
  misc_feature (1)...(423): n = a,t,c or g
tttcgtggcactgtgagtagagagaggcccacagagcccagaagggagtcagcagaggcgtgcccccaacaccgccacctgtgccctccccatggttgtgctgcagatacagccctcaccaggacgccgacccgctgaagccccgggagccggccatcatcagacacttcattgcctacaagaaccaggaccacggggcctggctgcgcggcggggatgtgtggctggacagctgccggtgagtcagagcggcgtgtggctttggcacaaagggggcatggcgcgtcttcccctagccccctacagagacaggagagcaaagcagagaggggaagccagacatactgacgtttggccttctggtcccccagccaggcaggggcatagaatggcagcaggcagtggccnnnnnnnnnnncaaaa

SEQ ID NO: 109222 - DNA, 456 bp, Homo sapiens
acgacgagctccggacttaagtcccgggacgacgatttcgttccaatgctgccgggaggacataaggagaatctttttcaaccaccagaacaggaaatagaaatagatggaaatatcatttaagaagaagaaaaacaagcatttcctgagttttttgaggggcgccaagctaaaacaccagaacgctatttgaaaattagaaattatattttggatcaatgggagatatgcaaaccaaaatacttagataagacctcagtacgtgctggcctgaacaactgtggagatgttaattgtattggaccgattcatacatacctcgaattgataggagcaatcaattttggatgtgaacaggctgtgtataataggccacaaacagttgacaaagtacgaatcagagacagaaaagatgcactataagcataccaacttgcccagcgtctgcagattatg

SEQ ID NO: 109223 - DNA, 554 bp, Homo sapiens
ttttttttttttgcacttatggtatttattgttggaagattgagtaccttaatgcacaccaatgctcaaatgacttgggggcacataggggactgctgtcaccatgcctcactcctgcagggaaggggctgccctactaaaaccccagcgggcccagtgctgtgtccagaacaggtccttatattactgcagcccacaatggaactactgagttggacccaaaagaggagggagcaggaagaggtggcatttggagaggggagaccgcacccacaggtctgccacagcgcgtcaacggtatggggtacttttacagtcaagttgacttcggtgtccgcccaccatctacctttgtaggaccactgaaacaagggacatccaccacggcccacagccggggcgccacggccccaggaggatatgctaagaaaaccattccacggccgggcgcggtcgcacgcctgtaatcccagcgctttgggaggccgaggcgggtggatcacgaggtcaggagtttgagaccagcctgaccaacatggtgaaaccccgtcttt

SEQ ID NO: 109224 - DNA, 418 bp, Homo sapiens
  misc_feature (1)...(418): n = a,t,c or g
ccattcccggttcgacgatttcgtcagaaattgactctatcaaagttgctttcttgtatgtttcgatcacgagcttcaaatgctctaagcagagtttgtatgtgcccacttttgcttactctggacttgatgctgttgatggattccaggatgtcttccagtttcatatccaatatatctgtgccagaaatatattacttccaatcttcttgatcttgtgcctgctctcccatattatccaggattaattcagagaaaatcaccttctcagaaatggtgctgaatgtattgtccaagcagaacatgtcttcaccaacttcagtctgtacannnnnnnnnnnnnnnnnnnnnnnnnnnnnnnnnnnnnngcagtggctgacccattattactttgtatacgcgtgagaactatatctga

SEQ ID NO: 109225 - DNA, 434 bp, Homo sapiens
ctctagagcggccgcaatacatggccttagtctgttctcagaacatactccatcacctggttcccagaactcagattgcgcagtggtctcgtcatcatcggccaggactcacagtgcccgcggcagaggcctccctagacctccctcccgtccagcctcacccgctgcctactctcctcacgcccctgctccaggtcccctggccccatttcgctcgccacgttttcataatcctctcaggctccgggcaagcggcgccgcccgcaatgggacctgatcatataaggaaaatactgcgggctcatccgggggctgcaatggggacccgaaagcgccctagcctactacaatcaccgcaccccaactgccgcccacctctctgccctgcccccagtacagtacccaaaaccggtccgggtccagctcggacgaaa

SEQ ID NO: 109226 - DNA, 488 bp, Homo sapiens
tttcgttgggaagtataggctgtgttgtcacgccggtgtcagtctgatgaagattggcatcaggtgaagtctggagcaggacttctgaggctttctatcctccatgctgctcactagaaaaggggctgtgaactgtgctttggctctagcagacaggaagaaatttttggcccagctggaagtagaaagaggggagtgagtctcctgaggaccatctcagaggccccgggatcacccgaacagtcctccatgtgaatcaatcccatgatgcaacatgcctccccagcccccgctctgacgatgatggccacgcagaatgtcccgcccccaccctaccaggacagcccacagatgaacggcaccgcccagccaccctccaaggcccaggcttgccacatctctggcccctcagctgctgccagcacacctgtgcccagtgcccccatcgacccccaggcccagctggaggctgacaagcgagctgtata

SEQ ID NO: 109227 - DNA, 447 bp, Homo sapiens
  misc_feature (1)...(447): n = a,t,c or g
gtcgcttcgctttcctggacagggaagaaggatgccatcagctttgcggcttcgggttcctagcaagaaagtgcaaaaaccgtcccgtgcctcgtggtggaagaataggccagtccaggcagagatccgagatgataacatctccacccctgggtctgtgcggcatacacaggtgtctgcctcactcaaccgcactcttgagacctccagacgctgacggggcccggcaccctcatggcccgcctggaaaagggcacgattctgcctccctttcagggtccgttcccagttaatgttcaagcccccagaaaaaggggtccccgagtggggaggcgagggctccaccctcccaaacccctgaggcgccgtcgaagaggaactgcaatgcagcgtctacccggccccctccgcctacggtnnnnnctcgggtcgtctacccgggacgtg

SEQ ID NO: 109228 - DNA, 436 bp, Homo sapiens
  misc_feature (1)...(436): n = a,t,c or g
ccccccggcctaaagggtcccccatatttcccccccgggcccccaacaattgccccccaagaagggggtccaagggggggcccatgtcccccccaagttttttgaccagaagggcccccccaccaagggggcccccagtggggtcaaaattaaaannnnnnnnnnnnnnnnnnannnnnnnnnnnnnnnnnnnnnnnnnnnnnnnnnnnnnnnnnnnnnnnnnnnnnnnnnnnnnnnnnnnnnnnnnnnnnnnnnnnnnnnnnnnnnnnnnnnnnnnnnnnnnnnnnnnnnnnnnnnnnnnnnnnnnnnnnnnnnnnnnnnnnnnnnnnnnnnnnnnnnnnnnnnnnnnnnnnnnnnnnnnnnnnnnnnnnnnnnnnnnnnnnnnnnnnnnnnnnnnnnnnnnnnnngtctncctgnaattacgncgcaagtcctc

SEQ ID NO: 109229 - DNA, 433 bp, Homo sapiens
  misc_feature (1)...(433): n = a,t,c or g
gcgaactgcgaattttgtgnagaagatctcgcgtttgagtgtgtggtaagctcgtgcctgcaccctcatcttgttttgaagtttgagtgcgtggtaagcacatgcctgcaccctcagcctgtcgtgaagtttgagtgtgtggtaagcacatgcctgcatcctcagcccgccctgaagtttcaatgcgtggtaagctcgtgcctgcaccctcagcccgccgtgaagtttgagtgcgtggtaagcacatgcctgcaccctcagcctgccgtgaagtttgagtgcctggtaagcacatgcctgcaccctcagcctgccgtgaagtttgagtgcctggtaagcacatgcctgcatcctcagcccgccctgaagtttcaatgcgtggtaagcacatgcctgcaccctcagcccaccatgaagtttgaatacctggtac

SEQ ID NO: 109230 - DNA, 405 bp, Homo sapiens
tttcgtcggccacatcctcgtcctagtccggcgacagggcactgagtgcaacctctgggccagcggtgagggacgcgcctccctgcctgccagggccgcgcctacgacactccgttggcagttgtcccagggagatcagcagtcccagatccggagagaccgttggggcctgtgagaccttcggaggccacgccaagaaaggggaagcatcatctttagaccctccttggtgcagccttgcccaggacccgggagccacgagtcaggtggcaaacaccgccttctgcttctccagcacgcgtaagtccctgggaatcttcgagcccactcagagggagccacagaagccccgacgttgcacagccctgcaggcagggctgggggcatccttcactgagctggacc

SEQ ID NO: 109231 - DNA, 386 bp, Homo sapiens
aatacacagggtgtgtgtgggttgtggggttctgccctgatgtccccctagagaaagggtcactgagcaggcctggaatcagctgccttgttggggatggggatggggcaggcggtgggaagggtggcggccatcagtccccatccagctctgggctgggcgcatcctcaggttcttcctcatcaaagtacctctcctcctcatcccgtgccacgatgtcgaggttgtcgaagtcggggttgtcgtctactgtgctgtagtcaaagtccccgtccttgccatctacgaagcgctggtgcatgcggctggtgaactcctctcgcaggatcagcctctcctccgagtcgggaacccaggcctccgagtccttgcctgacctctggtct

SEQ ID NO: 109232 - DNA, 407 bp, Homo sapiens
aaaaaaattccaacaaagaaaaggagaaggagaagacccgaccacgatgtcgttcgcgctccaaatcaagatcccggacgcggtgccgctctccttctcacactcgacatagacggcgccatagatcccgatcaagatcgtattcacctagaaggcggccaagcccaagaaggcggccatctcctcgaagaagaactccgccaagaagaatgcctcctcccccaaggcatagaaggagtagatctccagcaagatgaagaagacgttcgtcagcatccttgtctgggagtagctcatcatcctcttcatctcgttcacggtcgccgccaaagaaacctcaaaagaggacatccagccccccgcaatgtattgcggccgctctgaggatcaacctaacgtcgtgagct

SEQ ID NO: 109233 - DNA, 413 bp, Homo sapiens
tcagaggcttggcagggatgtgtgtgtgcatgcacatgtgcgtgtgtttgcccgtacgtgtgtgtgggcatgtatttgtgtgtttgcctatgagtgtgcatgtgagcgtgcatgcatgtttgtgtgtgtgtgcagttgtacccatgggcacatgtgaatatctgtgtgggtggatgtgtgtgcatgtgtgtgtatgaatgcatgcctatggatgtgtgtgcacacgtgtcaggggtgctccgcctccggggagcccaggaggcaatcttgctgctcccagtgtgcctcactttgacaaacaagccctgatgtttcccaatcggcattccagctttctgaaatcacagtttccatctgcgggcacctgtattgcggccgctctaggggatttacctacgtcgaggcttatccgt

SEQ ID NO: 109234 - DNA, 393 bp, Homo sapiens
aatacatcttgcgtttaccttagaatatgtgctttctgcctgaaaacaacatgagaaatgaacattacctcatttgaatctattccattgttgactgaccaggttgtttgaaaatattcgagcatcctctgcttgagttgttggggcaagtgatggacacggatgaaatctttcagatccttagttctagtgtgatagagggaccatctggagtacatcctctgtatgattgctgtcacgtttccaaacaccaaggcgtgcatcaaggcaccaatcagcatggtgcagatggagaagatcttttctgcttctgtattagcagaaacggtcccaaaacccacgctggtgaagctgctcatcgtgaatcacagagcgggtatttaggcacttccg

SEQ ID NO: 109235 - DNA, 409 bp, Homo sapiens
cctccccccatcactgccagggatctgttctttaaccatctgacctccagcatccccactcgctttacccacttcctcatctttcatctctcctctcccacctacaggtgtgttcaggcgttctctagataaaaaaacaacagaacactaatcttaccacaaactctatccattcacgtcacccccactcagtctctctttcctggtaccaccaaacatgggagtgagtccattctggctgcccccacctccctccagtgtcgcctgagctctctccaatcccctgaggtctagcttctttccccacctttctgctcaaatggctctctccgaaactacccataaacccctaatgccaaatctgaccttggtgtgtgtatgcccctcacatattgaccaccccatgtat

SEQ ID NO: 109236 - DNA, 448 bp, Homo sapiens
  misc_feature (1)...(448): n = a,t,c or g
ggttctgagaagcaccnnnganntntagagcggccgaatacagtctgggataggaacaggtgcaatttctacagtgtctgcttccattttctcccgagacaagaagccagatcataagttgaggtgagaagaaagggagacagataaagcatgaggaagcatccacgagttggggaaggaagcaagaccgtagctgcagctggggacaggggagtcacatgcgacattttttctcnnnnnnnnnnnggaaagggagtttctctttttttaaaacgggagtgcatgggcctgatttgggttcaccgaaatctcggcctcccaggtgaaacaaattcttctgcttaaccctccagagtagtgggaataacaggtttgcgcccccagcccgggcaaatttgtgttttttttaaaaaagggggtttttccacgttggcaagagctggcctaa

SEQ ID NO: 109237 - DNA, 447 bp, Homo sapiens
  misc_feature (1)...(447): n = a,t,c or g
ctgtgacttgctcgtatgggaggaacctctccagcggccgaatacaccctgaggtcatgaattggaaaaattattattgtttaaatgtccacactactcaaagaggtggacaaatttaatgccatctctataaaagttccatgtcattttttacagaaaaatactaatatttgtataaaccacataagacaccaaatagccaaagtaatctggagcaaaaagaacaaannnnnnnnnnnnnnnnnnnnnnnnnnnnnnnnnnnnnnnnnnnnnnnnnnnnnnnnnnnnnnnnnnnnnnnnnnnnnnnnnnnnnnnnnnnnnnnnnnnnnnnnnnnnnnnnnnnnnnnnnnnnnnnnnnnnnnnnnnnnnnnnnnnnnnnnnnnnnnnnnnnnnnnnnnnnnnnnnnnnnnnnnnnnnnnnnnnnnnnnnnnnnnnnnnnnnnnnnnn

SEQ ID NO: 109238 - DNA, 468 bp, Homo sapiens
aggaaactgattgctgaacaacttttgtacgacctctggaaaaagatcaacccgaaacttcgagagatggagctgggccttctccagaagcatgtcgtaaactcttgggaaatgcagaaagaagaaaaaaaaacagcaagaagccaccgcagagcaagagaacaaacggtatgaaaatgaatatgaaagggcccgaagggaggcgctagaaaggatgaaagctgaagaggagaggaggcagctggaggacaagctccaggccgaggcactgctgcaacagatggaggagctgaagctgaaggaggtggaggcgaccaaactaaagaaggagcaggagaatctgttgttcattttcttgcaactctttgactctgatcccctgagcagcacgttcatcacgcatgctttttgttgcgttccccatttcagatgtccagtaatggtgaaataaaatcctgcttcgccagc

SEQ ID NO: 109239 - DNA, 441 bp, Homo sapiens
acctgtcgttgggaagcgaattttccagcgagctggttgagagcgcatgcgaggagaagaccaacttcatcttcagccagccctacccagaggaggaggtcgatgagggcttcgaagccgacgacgacgccttcaaggactcccccaaccccagcgagcacggccactcagaccagcgaacaagtggcatccggaccagcgatgactcttcagaggaggacccatacatgaacgacacggtggtgcccaccagccccagtgcggacagcacggtgctgctcgccccatcagtgcaggactccgggagcctacacaactcctccagcggcgagtccacctactgcatgccccagaacgctggggacttgccctaaacagacggcgactacgactacgaccaggactgtatgcgcccggtgtgagttccaagatcgagggggc

SEQ ID NO: 109240 - DNA, 404 bp, Homo sapiens
tgggcaccgcttgcggtctgcagagataaccggaggagtcggggcggcagcacgtgttgtagccgtgggggggacccagagacccgcagcctcggagctgggcctagagcaaggcagagcaccaggtcgctggcacgctcgcatcctccccagccctcgcctcccagagcatgcccgaatccccaagccgggcgtcctcgaagcggaaagcagccactgtcgcccagagccactccagggtggcagccgagtgctgataatgtccagagcaccacttcttaaacttgtctgcccgttggcgttgcttgggaagcattaaaaaaataccgatgccctagttccacccccgcccccccccagagactcaaatgtgattggtctgggcgggggactggacatctggg

SEQ ID NO: 109241 - DNA, 401 bp, Homo sapiens
ttcaacaaataaagagatacccccagcttgtgataattagccttcccctcttgcatccttcttacagcttgggctgccctaaccagccacagggccagcctgatcaagtcactcaccttaacacagcctgtggttccccatggtccgtgtggctgtaggagcagcgccctcctctctgccccttctccccaccatgccacccccactgcccatgtgcttggtgtctcagccgccgtgctccttggtggcccctgcactcgccatgatctcccaccctgtgccattcccacatccgtgaatgctcctcccctgtcccctttctgctctcccgggactcaggaacgaggtcttccctcgaccctgctcatcccctgtgctctctgacttccccaccgtgtatt

SEQ ID NO: 109242 - DNA, 404 bp, Homo sapiens
gtcagggtcagctccaaacagtaccaaaacatcctcatgtcagggtctctctacaggctgactgtccaaaacagctggaaggcatttacatttgtgctgagcagggcgtaccttatggcttttcagcctgccaagatagacgaggatccgctgttgagctacaacgtgcacgtgtgtctgtctgtccagatggacatcctggatggctgcgactagtgctttctagtcattttcccccagaatgtccttcgcctccgagctgagacccgacagagggctcaggaatggatggaggctctgacgatagctgccaatgtggcgaggagttcagagcaaaacctgcaagtcacactgaggaacaaacgcaaggatcaaatgggtgggcatgaactcaagaatgtatt

SEQ ID NO: 109243 - DNA, 407 bp, Homo sapiens
  misc_feature (1)...(407): n = a,t,c or g
aatacacggcccataattctgactgcgggaggtgcctgagcacacatctgtttctacgcccggcccataatcctgactgcgggaggtgcctgagcacacatctgtttctacacccggcccataatcctgagtgcagcaggcgcctgagcacacatctgtttctacacccagcccataatcctgagtgcagcaggcgcctgagcacacatctgtttctacacccagcccataatcctgagtgcagcaggcgcctgagcacacatctgtttctacacccagcccataatcctgagtgcagcaggcgcctgagcacacatctgtttctacacccagcccataatcctgagtgcagcaggtgcctgagcacacatctggttctacacccagcccataatcctgagtgcagn

SEQ ID NO: 109244 - DNA, 405 bp, Homo sapiens
aatacatcggcggtgctccagccctccgacccccagaacaggccgtgctcctgtgtgagagcagcactccaacaatcccacacctccctccagcccaggaagagctccctgcctggaggctaccacagctccttcggctcttccctgacaacctgccagccctgtgttcatgagctctcctgggtcctctgggacctgacctgaggctccccaccaccagagcacatccctgctctcactcccctccccatcaaagatcccaactcgggcccagctctcgcccaggtcaccagggttctccctgacggtgcctggggtgcagcaggagggctcccaccttcccacagctccctgtggaccatggcaccctccgcctcttccctctgtctccaggcctcccgggag

SEQ ID NO: 109245 - DNA, 402 bp, Homo sapiens
tatacattggtggccttgacggagagtgagggcttcctggtgactgagcctcgctttcctcgtgtgtcctgggctcggagaagtcctttctggaggaaggagggtcccttcctcttggtcagggcgggaagaaatgtgccccaaggagggatggcagcgcccactgcgcccctttcctcctccccccaccccgggctcctcctctgattccgttttggggactctttcctgcccctcagagtctgaggcttctaggcctgcgctgttcataccttgaccccaccccagcccccatgttcgcaagcctgtgtcccctggagcctcttgtcacagaggaccctctcctgtggagtcccagggctccactcgcccccatggggtttccagcttgcagcctggggt

SEQ ID NO: 109246 - DNA, 417 bp, Homo sapiens
  misc_feature (1)...(417): n = a,t,c or g
ctggtattctagaaaggttccctggaggaggcatttcttgagctgagcccagagagatggcattggaggcagagaggatggcaggagcaaaggcctaggggcaagaaacatccgctgggaggtgtgtgttgggggagaggtgggccatcatgggcagaggccgggccagcatgctgggaccatctcctttggtccgtgggagccactggaggtttaatgggacggggtcagatatgccttgaggaggctccttgagggtcctgcttgagcccactgtgtcctcaaacccccacaggttcactccctgggcctgaagtcgggtatctacgcggacatgggcaacttcaaaaaaatgggttacccaggcaccacctgtattgcggccgctctagggttcntcccaaaacgcaagacttg

SEQ ID NO: 109247 - DNA, 403 bp, Homo sapiens
gaactctggcctccagcctccgaggtcccctcatcccacctaacccccagactcagagaaggacactccacccaagcaatttctcaccttccccttaattggtacagatcagaaacgggagcacctccttctcctggcccccacgtttagggttcccaggacagcctccgacccaccctctgcccctcctgtatccctttcctcggccctgggtgacagcacccctgcccagaccagctctgactgcctccaagtgccaagcgctcacagtcctctacccccagccccagccggcaccctcagtctcgtcccaccgtctctctgcctcctgaatccctccctgagtcccatgccctctgccccagcgactgcccttgtaaagtgaaaatccgaccccctgtat

SEQ ID NO: 109248 - DNA, 409 bp, Homo sapiens
ccctaccctctctttccgacacaagggccttatgtgcccagaccacaagtaagaggtgacccactactgcaagacatgccagcgcttggtatgtcaactctgccgggtgcggcgcacccacagcgggcacaagatcacaccagtgctcagtgcctaccaggccctcaaggacaagctgacaaagagcttgacatacatcctgggaacccaggacacagtacagacccagatctgtgagctggaggaggccgtgaggcacaccgaggtgagtggtcagcaggccaaggaggaggtgtcgcagctggtgcgggggctgggggctgtgctggaggagaagcgggcatctctgcttcaggccattgaagaatgccagcaggagcggttggcccgtctcagcgcccgatgtatt

SEQ ID NO: 109249 - DNA, 412 bp, Homo sapiens
cttcggagtatgatcaggttcggtatgtttcactagctcaggttttgcgtggtgaatatatattaagcgccgggacaaagacatttaggttattcatccgtgacccggcctccccatatcttttgtggagttgacagactcccgatgcccatgaagcagatctaggtattaagtcagaagaagcaagaaagttcattttcagctgtttagatgatatggcgcaggtgaacatgacgtcagatttgaaagggagcgacatgttggtagaaaaggctgtccggcgggagttcattgacctgttgaagaagatgctgtccattgattctgtcaagagattctctccagtcggatccctgaaccatccctttgtcaccatgtcactctttctcgattttccccacagcatgtattt

SEQ ID NO: 109250 - DNA, 426 bp, Homo sapiens
  misc_feature (1)...(426): n = a,t,c or g
agaattggcctgagggtcccccaggtgcctgtcctttgcttggtttccctttcttcctccacaaatttcctccttcgtgactctgactgagcccccagtcaggaaggagaggaaagaccccctggactgactcctgttccccccatccagggaagacaccctctctggacccccgtcagaccaaagagcagaagattctgcaggaacctctcaatgaactggacaaaaggagaaaggaggtgctggatgcctccaaagcactgttaggccgattaactaccctaatcgagcttctgctgccaaagttggaggagtgaaaggccccccagcaaaaagcttgcatcagagctcacataaaccgcgggttggaacagctggagccactgtatcggtccgctggtnggttccccntatcnggcagatcag

SEQ ID NO: 109251 - DNA, 386 bp, Homo sapiens
ctggagaaatgtagagaaaagctcgctgtctagagagatgaaggacagcaaggtagggagaggggcagctcctcagacggagagttagggagaggagggggtatttggagccaggatagacagagcagcgtggtgctgggacagcaagaaggggcagctggtgacaaggagagcagagggagaaccacagcagggggagacctgggatctgggggtgccaaagagtggggacaaggaagtgaaacagggaagaggggatttaacagggagagcagagataagggaagaaagaggcagaaatagatggagattggggacaaccaaaagacgggtgaaagaggaataagaggtgaaacaagttgcaagaatggaacagaacatgtatt

SEQ ID NO: 109252 - DNA, 419 bp, Homo sapiens
agcccgaccccctgcttgccactctagaaaagcaagaaattatagagcagcttctatcaaatattttccacaaggagaaaaatgagtcagccatagtcagtgcaatccagatattgctgactttacttgagacacgacgaccaacatttgaaggccatatagagatctgcccaccaggcatgagccattcagcttgttcagtaaacaagagtgttctagaagccatcagaggaagacttggatcttttcatgaactcctgctggagccacccaagaaaagtgtgatgaagaccacatggggtgtgctggatcctcctgtggggaatacccggttgaatgtcattaggataatataaagcctgcttcaaaccaataccagcagtgtatgcgggcgctcggtccctatcgcaggtcagccg

SEQ ID NO: 109253 - DNA, 431 bp, Homo sapiens
  misc_feature (1)...(431): n = a,t,c or g
gcgttctatcatcactgccagagcctcatgaagcctgcttggtcagatgcagctcatggggatgaagtaccctatgtttttggggttcgtatggtaggccccactgaccttttcccctgcaacttctccaagaatgatgttatgctcagtactgtcgtcatgacctattggaccaactttgccaagactggggatcccaacaagccggtcccccaggacaccaagttcattcacaccaaggccatccgctttgaggaagtggcctggtccaaatacaatccccgagaccagctctaccttcacatcgggttgaaaccaagggtcccccatcattcgcgggccactaaggtggcattttaaaaacatctggtgccccacgctgtattgcggccgctctggaggaggcnagctaacctaacagggcattgccg

SEQ ID NO: 109254 - DNA, 388 bp, Homo sapiens
ggagccagagctagcccttctacttctgcatgaatggtgaccgcatgaactcggtgctggagagcgaccggcaccacacgcacatcatggatgtcatgcaggacctcttcagcggcgcgtccagcatcatagacgagctcttccaggacaggttcttcgcccgggagccccaggatacataccactacgtgcctttcagcctgcgccacgggaggctacgcttcttcgttcccaagtcccgcatcgtccgcagcttgatgccattctctccgtacgagcccgtgaacttccgcgccatgttccagcctttccatgagatgatacgcgagggtcagcaggccatggacatccacttccatagcccggccttccagcaaccgcctgtatt

SEQ ID NO: 109255 - DNA, 431 bp, Homo sapiens
  misc_feature (1)...(431): n = a,t,c or g
gccccaatacatggcccgaaccagttctggcagtgccttcttctcctcttcggcttgacgcttcttctcctcgtactccagaagctcctctttgttaagggctgcatccatgggcacaggcaggtgcatgatgtagacaactcgctggatgtacttcaccttctatgcggccaggcactagagcttttcctccaccaagaagcggaacacttcattaagattttcagagctccggcaattcctctccaccatgttgataaggcgaaggaagaactcctgggcatcctgctgncggttggagaagaattcatggtggcccttgccgatgagggccttgcacatgcaaggggcaatgccatcttgaacttccttatgatatggcacccgctccccatcgcccgactccggtactggcttggaatactacccgg

SEQ ID NO: 109256 - DNA, 387 bp, Homo sapiens
cccacttctacttggaaggcaccgtgctcaagcccagcatggtcaccccaggccatgcttgcactcagaagttttctcatgaggagattgccatggcgtccgtcacagcgatgcgccgcacagtgccccccgctgtcactggcatcaccttcctgtctggagcccagagtgaggaggaggcgtccatcaacctcaatgccattaacaagtgccccttgctgaagccctgggccctgaccttctcctacggccgagccctgcaggcctctgccctgaaggcctggggcgggaagaaggagaccctgacggctgcgcaggaggagtatgtcaagcgagccctggccaacagccttgcctgacaaggaaagtacactccgagccatgtat

SEQ ID NO: 109257 - DNA, 402 bp, Homo sapiens
agtggagggtgcccccaaggaaagccaggaaagcgaaaaacccccagccttcatccagtaaccccttgcccaaaagttcatagtcccagatttcctctccggccacctcccatggtgaccccccggtaggcaagggcccagggcaggacaggcccccattggggcccactgtgccctacacagaagcactgcaagtgttccaccaccccgttgcccagacacccctgcatgagaagccatacctgcccccaccagtctcccttttctccttccagcatctcgtgcagcatgagccaggacagtctccagaattcttctccacccaggccatgtccagcctcctgtcctcaccatactccatgcccccacttcctccctccttatttcaagcccccgtgtatt

SEQ ID NO: 109258 - DNA, 410 bp, Homo sapiens
  misc_feature (1)...(410): n = a,t,c or g
cggccccccgccgccaggttttaaagtttttcagccccacccccgaaggnnngggatggaagggtgcccccccccgtccggtcctttttgatcttttattaaaaaccgggggccacacgggtacccgggtggtttttaaaccccggcccccaggggatccccccctttggggcccggggttcccccgccttttcccccccaaagttttagggttccgggggggaaccccttcgcctggccaaacctctgggcnnnnnnnnnnnnnnnnnnnnnnnnnnnnnnnnnnnnnnnnnnnnnnnnnnnnnnnnnnnnnnnnnnnnnnnnnnnnnnnnnnnnnnnnnnnnnnnnnnnnnnnnnnnnnnnnnnnnnnnnnnnnnnnnnnnnnnnnnnnnnnnnnnnnnnnnnntatt

SEQ ID NO: 109259 - DNA, 410 bp, Homo sapiens
  misc_feature (1)...(410): n = a,t,c or g
ccttcagcttcaagactgaggagaaggacggtcttctgctgcacgccgagggcgcccagggcgantacgtgacgctcgagctggagggggcacacctgctgctgcacatgagcctgggtgagctcggcgaccatgtgcgatgcggagccaacccctgaagctctctcaccgccctcctcgtggcacctcctccgcgcatccgcgctcagcctggtcttccacttctctaaggcctggaccaaactgcccctttcttgtagcatttggtgctagcaaaacactggagttgagtgagaactggattccagtctcagctctaccactacacagagatgtgacctcggatggggcacttccgagcctcagttccctccttgtaaacacacacacacagacgcacgaatggcgaa

SEQ ID NO: 109260 - DNA, 715 bp, Homo sapiens
tccgcagacgtcagctagaatactctagagcggccgcaatacaccgtgtgcagcatgtgtggtgtgtgcgcgcacatgcgtgtgtgtgcatgtgtgcgtgtgtgcatgcgtgtgcatcgtgtgtgcgtgcgtgtgtgcgcatgcatgcgcgtgtgtgtgtataagcattatgctgcgtggtttttccagttatataaaaatcaagacttttggctactagagatataggtaaatgaagacgtggcctattctgcagagctccttcatctccaggaacagaaaaaaatttagacttattttgtgagggagaaattcatatgccataggggaaaatttctctcacattcatcaaaccaaatgggagattggcaaaaatatccatcaaggtgaggtggatttcaggttaatacacacggtggtgaatgatccctccgtgcgaggaggacagcgctctcagccatggggaatgccagctccctgccgggagagccatcatttctgagctttcagggaagatgctcgtgtgctggccattgcaagcccaattctcaattacagggccaaggagtagaggacattagtcaagaaatggggaaaaaattaagctattctggagggacactctgccaatcacaaggcacattccgggtgtcagaggagcagcaggaatcatttctcagcctacgaatggaattccaccgcactggactaatga

SEQ ID NO: 109261 - DNA, 425 bp, Homo sapiens
  misc_feature (1)...(425): n = a,t,c or g
ggtcgacacgtttgggaaaancacagagcggccgcaatacagtgggacgctcgagttctttattgtgatcctcccggggccggcgccgatttgggtgaggctgcggtctctgcgcagatcctccccgactctagcgcgggctctcgagcagggtcgggtcggcgcaggccttaaggcccatccggccgctcttcctccggccccgcgctgccctcctctccgtctggggccacctcctcttcctccccggaagcgcctggctggaagtcgatggtccgcagcatttcggccacgtgctccacccttacggtgaattgctccatgctctcatagcctggctccggccgccctgccagctccaccttcgacatggccccgaccttattgatcagctccttggcctgctggagatacagcgccatttg

SEQ ID NO: 109262 - DNA, 436 bp, Homo sapiens
aacaggggagaaggtagtaccaggagaggtaaacccacccaatggccctgtgggggacccactgagcctcttgtttggggatgtgacatccctgaaaagctttgattcattgacaggttgtggtgacataatagcagaacaggacatggacagtatgacagacagcatggcctctgggggccagagagcaaaccgagatgggaccaagcgaagttcctgcctggtgacctaccaaggaggtggggaggagatggccttgccagatgatgatgacgaggaggaagaagaggaagaagaggtggaattagaggaggaagaagaggaggttaaggaggaggaagaagatgatgacttagaatatctgtaagaaactgcccaaatgtatccacggccctgtatgcggccggtctgaggatctagctacgaggcggtcatt

SEQ ID NO: 109263 - DNA, 395 bp, Homo sapiens
tgccctgctgagtgctgggacctgaaggtgaagtgggggccatcaaggtccctcggcagcagagcccacagcctggtgcagggacacatactgggaaaatcccacaccccaagcgagtgtgcccagcactgcaaaggggaggcactgggctgggtggctccaggaaggtttctttgaggaagggacatttgggctgagacctacaggaggcctaggagctggccaagtggaggatgagagggcggtgttccaggctgagcagacagccagagggaggagtacttggtcaggctgagggactgcgccagctgaaaggtggaggcaagggagcagaggccagcaggggctgcctggagcctggggactataccccaaccctagcagcgggagtgtat

SEQ ID NO: 109264 - DNA, 431 bp, Homo sapiens
  misc_feature (1)...(431): n = a,t,c or g
tgatacggcagcgtcngtaagctttgagcctatagagcggccgcaatacatggggccttgagattaacccccctgtattctcagaatcatttctatccaagggggtggcttcagacatgtcctccaggtcgccaggcccgagcctggcccaagccctccaggagagttgaggggtcgggacctgagtcagtggcctcccccacagcaagcctagagacagatttgaccccagttcagatacagcctcaagcgggtgccctatgctgggctactccacaggccaccaagagaagagcacagtcccaggcctcctccacgcctggctccccaggacgcaactgactgccccttccctcctcacggngggggccacagcccttggcctcctgctccctcagagactgcgagctgggctcgaggcacccctcccn

SEQ ID NO: 109265 - DNA, 415 bp, Homo sapiens
  misc_feature (1)...(415): n = a,t,c or g
nagagctgccaggacatcatcgagcagtttgggccatgcccagaaaacaagagtaaggggctgctgggcattgatggcttcaccaactacaccaggagccctgctggtgacatcttcaaccctgagcaccaccatgtgcaccaggacatgacgcagccgctgagccactacttcatcacctcgtcccacaacacctacctcgtgggtgaccagctcatgtcccagtcacgggtggacatgtatgcttgggtcctgcaggctggctgccgctgcgtggaggtggactgctgggatgggcccgacggggagcccattgtgcaccatggctacactctgacttccaagatcctcttcaaagacgtcattgaacccatcaacaaataagcattcatcaagaatgagtacccagtgtagt

SEQ ID NO: 109266 - DNA, 385 bp, Homo sapiens
aagctgggccactctggaggttccagttcccgccgggcagccagagagggtctccagggggaaaggctccccaaagagaagccagcacctgggccccagtgacatctacctggatgacttgccctccctggactctgagaatgcagcgctttacttcccccaaagtgactctgggctgggggccagaagatggagtgaacccagcagtcagaagtccctgagggaccccaaccctgaacatgaacctgaacccactctggacacagtggatacaatagcactgtccctctgtggtggactggctgacagccgggacatctccctagaccaattcaaccagcacagcgtctcttaacaggacatcaccaaaaaccccgaatgtatt

SEQ ID NO: 109267 - DNA, 433 bp, Homo sapiens
cgatgctgggatcctccagcgcggccgcaatacattgtgggggtggagctctcagctctatttttgccaggccctggggtgatgctgggcagagctgtccctgcgagggccctcggaatccaggagtgggcgagtccgggatggttccagagcttccaaacccacatccagcccaggatgtgagaagcagcccagaaaggcctgagccaggctgtcctggtggggcaggtactgtgggccccgcctgcccagctgacaggaggcagccagcggatgcccgggtgggaggggctcgagctctcagggtgtcccccagctaggactcatccagggcagggacccctcatgggaggatggggagtcacatggtgcccaggacccccgactgaggactgcagcagacccgtcacagcaaacggagtggaggcctgtt

SEQ ID NO: 109268 - DNA, 428 bp, Homo sapiens
  misc_feature (1)...(428): n = a,t,c or g
cgcaggtgtgtgggcagagtactgaccaaggtggtgggcttgagaaaggccagactaggctccctgtccgcttcacctcactcacttccctttgcagcctgcaggagtccattttagcacaggtccagcgcatcgttaagggtgaggtgagtgtggcgctcaaggagcagcaggccgccgtcacctccagcatcatgcagaccatgcgctcagctgctggcacacctgtcccctctgcccaccttgactgccaggcccagcaagcccatatcctgcagctgctgcagcagggccacatcaatcaggcctgccagcaggtacgataggcattaggccccctaagggtcacgtgtctcttgacaaggaacacaaaccatacaatgtactccacccactgtattcgnccgctgtgannntnttcccaggta

SEQ ID NO: 109269 - DNA, 382 bp, Homo sapiens
tgggaagaggagccatcgtaagtgagacgctgtacttggttttacaagggggccgcagatagtcgatttattccctatactgaggagttcagtgaaaaactagaggtgcgggtgctttatttctctatgagtttctttaaaaaatgtaggtcctatatacattggtgagtaacatcattcacagtggagcggactttacttacaagacagcttgttttgatgctgttcacagagaagattactttttaagtggtgtcatcactcatgaggtgctaatcgtggcatctgtgtctaaagatagaatatgatttgcagagccccatcacagatctaataaggtgcttgtgtcaaacatacaatagaacctaggccgctatgtatt

SEQ ID NO: 109270 - DNA, 868 bp, Homo sapiens
aggttcaagtgattctcctgcctcagcctcccgagtagctgggattacaggggggggccaccacacccggctaatttttgtatttttagtagagacggggtttcaccacattgctcaggctggtctgaaactcctggcctgaagtgatcctcccgcctcggcctcctaaagtgctgggattacaggcacgctctaccacacctggctaatttttttttgtatttttagtagagatggggtttcgccatcttggccaggctggtctcaaacacctgacctcaagtgatccgcctgccttggccccccaaagtgctgggattacaggagtgagccactgtgcccagcctccaacctaatttgagtttcatttgtatttttttcatcaccttacatgtgttaacagctgtttcaacataaactccattataatctatatccatttaaagcccgtgtttacataacccccctccgggtagaaaatggaaataccttaaccctttgccattgggcccccttccaggcttgaacaacagtggcctgtatcctgccatccgtggggttgcctggtggtagaacactttggtgttaggaaagtttggaaaagaggatatccctgtattaggcccattatgattagagataagcagccctgggagaaacatacaagacctgtggctactggtagagaattgggaataggcttccaacaatggactgtagagattaatggagattgtttagtgggcccatggctaggtggggtattaatacagttgaagttatgttgcccttggcacagatctttgagaatcccatacatctgtgaaaaagataatgtgaaataaacagtaaaaaaaaaaatagtcga

SEQ ID NO: 109271 - DNA, 450 bp, Homo sapiens
  misc_feature (1)...(450): n = a,t,c or g
nttggcattgctgcttctgaacccagatggttcttgtctgtggggtcgtcctgggcaccgcagggcgctggcagcacccctggcctcacccgccccatgtcaggagcacccccaccctctgcttcgacaatcaaaagtgtccccaatgttgatgtcccaagcaagacccatcagtagtgagcaccaaaagctggctctcctggctgagcccagggaggtcacacccccaccccaccctggcgtgggctcctcctcgcagtgcagagacactgatcacaacacagcggcgtctgcctcctaaggttcaggcaagggaagcagagcgccgggtgcgccgggcgcaggtggacctcccgatgcccgggcactcatgcttccaaagggacggcctttggcagggagttccttgactgggatcctcggagagccatcccccacacacactgtatt

SEQ ID NO: 109272 - DNA, 457 bp, Homo sapiens
  misc_feature (1)...(457): n = a,t,c or g
cgtttttccnnnnnnnnnnnnngaaaagaaaaagagncaaaggcccaccccagcagttgttggacattttacacttccatctagaacttaaagactaatttcgtggggccaaaaccagagtcttctgctgttagttagtttcccttggagctagcctctgcacaggcctcacccatgtggagattaaggctaggagaagaggcagtgggagatgcgtgtgtgagggtggggctcagtgtgggacacggcgatgcaccctaagcttgctcttgctctctgcagaagttcttgtggtttaacattggcagcgttgataccttcgagcggaacctggagtctgctcaaggggagctggggatcgagccccacaaccaggcagtggtagtctacaccagcgagagtgatgggtgagcacgaatggcgaagcggccgctctggaggatcctcgctggcgttc

SEQ ID NO: 109273 - DNA, 419 bp, Homo sapiens
  misc_feature (1)...(419): n = a,t,c or g
nggcgcgcattangttaggtngaancctccagagcggncgcaatacagccttggctggagctccaccttcctttcctggctctgggtccggccctgtccttccctggctctagggggctttgtgtccacaaaatgtcaggctgctccgtcagccacagggggctggggggacaccccatcgaagtcctgggcgaggccctcatctcccaacaatcctgaggacctgtctggcatggccaggagacgtggaagggccacatgcaaatgaggtggcacctcccacacagggcacaaacgcaggagccccctcatcctcagggggtgccactcgtggtcccagcatgtgtgtgtgggggggtggagcctcatccaggcctggtgggcagcccctcccacctgagacctgagaataattctcg

SEQ ID NO: 109274 - DNA, 397 bp, Homo sapiens
cttacagaggcgcatgcagcagttgcacagagagaaccagaagctgagggcagctgtcagccagcaaggggagcacctgcagacagagagggagagggggcgcactgcagcggaggacaacgttcgcctcacttgcttggtagctgagctccagaagcagtgggaggtcacccaggccacccagaacactgtgaaggagctgcagacatgcctgcaggccctggagctaggagcagcagagaaggaggaggactaccacacagccctgcggcggctggagtccatgctgcagcccttggcacaggagcttgaggccacacgggactcactggacaagaaaaaccagcatttagccagcttcccaggctggctagccatggctcagcagaatggcgaa

SEQ ID NO: 109275 - DNA, 381 bp, Homo sapiens
ccatcaggacggaaatcagcctccacaaccactcgctcctgccccaggagttcgggttcgtcaggcttcccaagtttgtggacgtccaacccaacgatgggtttgggacgatcctgcccctgaaaacgctgcagttctgtgtgatcttccagcccaccaaggccgaggaacacagattccaactgacctgcaagtctgagatcaaccggtgcttcaagctgtcttgccgggctgtaggcgtccacccacccctggagctgtcccactaccagatcaagtttgccgccacggccctatacgacacctccgtggctacagtgtacgtcatcaactctcacctgagcatgagatcaaaaacccactccaagccccgcgtgtatt

SEQ ID NO: 109276 - DNA, 410 bp, Homo sapiens
ctccccaccacgccccaggacgagagcctcaacttggagaaccggctggactccatggaggctgaggtggtgaggaccaaacatgagctggaggcactgcacgtggtgaaccaagaggccctcaatgcccgggacattgccaagaaccagctgcagtacatagagcagaccttggttcgagagcgcaagaagcgggaacgctacataagtgagtgcaagaagcgcgccgaggagaagaaactggagaacgagcgcatggagcgcaaggtgggcgcacccaggggtgcacgcctgtgactccagcccagcccagcacaaaccagccatgccctggctctccctcatcctaggccttctcccattttctgtttctcctaaccccgccccctctctgactccacccatgtatt

SEQ ID NO: 109277 - DNA, 410 bp, Homo sapiens
aatacatgggtataatccttaaacttgggggtcaggggacacgcacatttaaaattccaatgagcaggtgccacccactgagcggtgggggcatgttctctccaccctcaccctacacccatattgcccagcactgctctcacaacacccgccctggggccggccatagggtgccctctgctccgccttctgctcttgcagcacccgccccggggccacctcttggtgcctctgcccagcccatactacccagcactgctctcgcagcacccgccccagggcccgccctgtggtgcctctgccccgccttctgctctgctgcagagggcaccacctcccggaacgtgagctccgcctgatgctgcaggtaccttctccccaccagtcaccatttttaactttccctgtgg

SEQ ID NO: 109278 - DNA, 413 bp, Homo sapiens
aatacacttccttaattcccacaatccagaggccaagtgcaactggtcacccacaacccctacttgtatgcctagcgccatcccaattgcctcctcctccatatgtaccagcgtgccctccagtctgcacggggcagtcctcctgggcttgacctctctgtacccacagctgggggccaggcagcccccctctatccctcccagcacctcatccctctccacgtacacaacagatcccccaagtgctgagaatcaagctcccacctgcccacagagtgcccacagatggcatccctggatggcagctcaggtggactgagacacttgagtcatcgctcaggaggtccttctgggatctgggcaggtgactgccccaggtggcaggacgtccccacccatcttagactgatcag

SEQ ID NO: 109279 - DNA, 383 bp, Homo sapiens
atcgggccttcactgttattttttatatgttgtacacacgaaatatttcaggcataccaaataagtatagatgatgatgtaacagagacctgtgtatccaccagccagattcttgtacgcccgcaagcaggttgtgttgcagaaccgcttttgttggccctcgtggaagaggagctcagggccaggactcccggacttggtgtagatgtaagccccacactggtcgcaacagttggttttcagtcccttgttggcccggaatttggagaaccaagaatcgctgcagagccggtgtaccacgctgccattgctgacctcgtgcaggacctggcacacacatacacgcgccctgagctatggactggcctggaccgcccagccca

SEQ ID NO: 109280 - DNA, 382 bp, Homo sapiens
ctttaaaatagatatcaaaggccgttgatgtcccttgtaaagatacagtaatagatgtattgaaatgcaatacccattttcgcctttgctctttagattttctcaactgaagggcctgaacttgtcccataataaacgtgggttgtttcctatattgttatgcgagatctctaccatgactgagctcaacctttcctgtaatggatttcatgacctaccaagtcaaattggcaatctgctaaagtaagtaacttttactagattcctcttttcccttgcagaataaggaacttgcctggggtttggaatgaaggtagtatcttgaactcttgcagtgaactatatcatgtacaacttaggattctaatcagcagcatgtatt

SEQ ID NO: 109281 - DNA, 388 bp, Homo sapiens
ctgatttctgaggagagagaaaaccaaagccttgcctttcatggccgaggctggtggccaccccagggcgtgctctgtgatgggccttctctgaggacagcccagggcttttggatgacactaaccccactctttcccccaaagcctgtgcccaaggctggcacacctggcagtggcactggcccaggggtctggcccacctctgtgtcccaggcccccgctgaagggcggcactgtgtgcctggggcttcctggcccccaccacccaagacagaacaatctggagacactccgccataaagaacaccattctttgctcatccggttgcccctggagacaggcatccctacgcagaaagcctgcttgcttcctgaccagatggagacg

SEQ ID NO: 109282 - DNA, 401 bp, Homo sapiens
  misc_feature (1)...(401): n = a,t,c or g
atacatggcttgggcttgcttcaagtcattaaattgagtcaatttgttgctttgttttggctaaatttataaaagcacaaaagtttaaggtaagataatactatttggcctttttatcatcnnnnnnnnnnnnnnnnnnnnaaaatttggaaaaaaaattttatttttttccccagggtggagggcaaggggaaaatttgggctcattggaattttggcccccggggttaaaggaatttttttggcttaaccttccaaggaggggggattaaaggggccccctgcccccccggggtaatttttggttttaaaaacaaagggggtttccccattttggcccggccgggggtaaacttctggccttagggaatttgccccccttaacctcccttttaaaattt

SEQ ID NO: 109283 - DNA, 405 bp, Homo sapiens
  misc_feature (1)...(405): n = a,t,c or g
aatacagcctccccaaccaaaagacatgaagtggctgaatataatgaattaaaaaaaagattcaactatatgccgcacaagagacattttattaaaatctggaaatcaatggcaaaagaaaaggtggaaaattcacaaatatgtggaaattaaacaacacactcttgaacaatcaatgagtcaaagaagacatcaaaaggaaaattagaaaatatcttgagacacnnnnnnnnnnnnnnnnnnnnnnnnnnnnnnnnnnnnnnnnnnnnnnnnnnnnnnnnnnnnnnnnnnnnnnnnnnnnnnnnnnnnnnnnnnnnnnnnnnnnnnnnnnnnnnnnnnnnnnnnnnnnnnnnnnnnnnnnnnnnnnnacnnnnnnnnnnnnnnnnnnnnnnnnnnnnnnnnnnn

SEQ ID NO: 109284 - DNA, 382 bp, Homo sapiens
ccggccgcccccgtgggggacacctactcttcgacacagctttaggaaacacctctacctcctgcgaggcctcccgggctccgggaaaactacactggccagacaattgcagcatgactttcccagggccctgattttcagcacggatgattttttcttcagggaagatggcgcctatgagttcaatcctgacttcctggaggaagctcatgaatggaaccaaaaaagagcatgaatagcaatgaggaatggcatatcccccattattattgataataccaacctccacgcctgggaaatgaagccctatgcagtcatggcacttgaaaataactatgaggttatattccgagaacctgacactcgctggaaattcaacgtt

SEQ ID NO: 109285 - DNA, 427 bp, Homo sapiens
ctttttctggtatagtgaagggcgcgcgcgatttttacgcggtgggctcgctggtgtgtttgtctggagggcgcggccagacatatatggaggatgccctccgaggagacggccccctcccggtgttccactgagcccccccgcgggggcgtcgtagatgcaccccatccaccgggggcttctgtgggaaagaaaccccttccgaggatgacagaagccagtcccgggagcacatgggcgagtccctgagcctgaaggccggtggtggggacctgctgctgccccccagccccaaagtggagaagaaggatcccagccggaagaaggagtggtgggagaatgcggggaacaaaatctacaccatggcagccgacaagaccatttcaaagttgatgaccgaatacaaaaagaggaaacagcgtgtatt

SEQ ID NO: 109286 - DNA, 391 bp, Homo sapiens
atagtccccagtgctgtggctttgagttcctcgaggaaagatactaacaatgcactttctgcacaacaggggccaatctcaaagtcatcagcaccatgtctgtgggcatcgaccacttggctttggatgaaatcaagaagcggtaactgcagcttgggatctggagggggcctagagagaggggtggctatgagagaaagaagagctgttgatttgtttttactgcatatccctcggccattcagggagaatgtgaggtggctgatgatagaatctgtccacatgtgcacaggtcagttacaataaaccccagcagtcagaaacagtgggtaacttctgtgtaggtggcaccctttcacattcattatcttttttgatccccacatgtatt

SEQ ID NO: 109287 - DNA, 413 bp, Homo sapiens
cggtcccgttccatggtgagggcggccaggacgctgctgagggagcttgtgcaccttctgggccagggcccagaagctgcgctgcaggtgggcatagtctgtgggtggcagcccacggttgcccgaggagtcccgagactccaggtagcgagacaggttgggaacagagccatggagacgaccaacctcacccgtccaatggtgtcatccttggcaaagctctgggtgcaccacatgcggcttgtccgtttccccttcttgggtctttcggttgtcactgaggcctggcaagtcaaggtgggggcaattttactcacagggtggggaaaaggggcagaaaccatcacagcctgggagaggtagacggcctcctgcgccatggaggagggcgcagattacccagcacagaggat

SEQ ID NO: 109288 - DNA, 413 bp, Homo sapiens
gacgtggtgagaaaagaggggggcgagtaagtgcgagcggcggtgtcgatcagagatttcgagcagggaagaaaccgtatggagacaatgagtgtggagaagcctttcgctgtaagtcaatcctcacttgacatgagagaactcacacaggggctaaaccctacaaatgtaatgaatgtggaaaaacttttcactgtaagtcgcttctcaccttgcatcacagaactcactcaggggaaaagccctatcagtgtagtgaatgtggaaaaacctttagccagaagtcatacctcgcaatacatcatagaactcacacaggggaaaagccctatgcatgtgaccattgtgaagaagcatttagccataagtcaaggctaactgtccatcagagaacacacacaggggattgtatt

SEQ ID NO: 109289 - DNA, 414 bp, Homo sapiens
aatacaggggtgttcataggtccccattcattttcggctggcagaggcggtagaggcgcggagcaccctggggcatctggtccttgactcgcaggtttctggccagaatctccacccttgggccctgcttccgcatgatgtccgtggcctgcatgatgcacttggacagcaacccgtggctccgtgccaagatggccgcctgcttcagggacacgctcacggtgctcctctgcatgcctgtgccacacatgaccatctggcaggcccccaggcggtagcagagctccgaggagatggggatgaggccggtgcccacactcccagttgtaccaggctttggtcggaccaaaggacttcttgaggcgccgcagctcatccacgggatctccgggggcggctcacctcgcccatccg

SEQ ID NO: 109290 - DNA, 391 bp, Homo sapiens
  misc_feature (1)...(391): n = a,t,c or g
ngttattcattacgcaggttgctagggccaggaaaaaattgttctgtggctttatcagtttatgcaagaacagggcatctcgttggatgaagtagaccaggatggcaacagtgccgttcatgtagcctcacagcatggctaccttggatgcatacagaccttggttgaatatggagcaaatgtcaccatgcagaaccgcgctgggaaaaagccctcccagagcgccgagcggcaggggcgcaccctgtgctccaggtacctggtggtggtggagacctgcatgtcgctggcctctcaagtggtgaagttaaccaagcagctaaaggaacaaacagtagaacgtgtcgcgctgcaaaaccaactacaacaatttctagaagcccagtgtatt

SEQ ID NO: 109291 - DNA, 541 bp, Homo sapiens
gctattgggggcggatgagattaagagccactcagacgcgtagaaaggtctaggggactaccatctccccatacgaaaccacacaggcgtgaaaggcctagtgccggagaggtctgcggtgttcggttcaccaggaaggtcaaggtgaagatcctcatgcgtaagcacgcgggagagcgcccctactcatgaccgcgctgctcagcccgcttcctgcacaggtgcgacctcaagaaccgcatgcacctgcacacaggggaccggccctatgagtgccacctgtgccacaaggctttcgccaaggaggtcctcctgcagcgccacctcaaaggccagaactgcctggaggtgcgcacccgacggcgccgcaaggacgatgcaccaccccactacccgccaccctctaccgctgctgcatcccccgctggcctcgacctctccaatggccacctggacaccttccgcctctctctagctcgattctgggagcagtcagaccccactgggcccccggtctctaccccagggccccctgatgaca

SEQ ID NO: 109292 - DNA, 400 bp, Homo sapiens
gccttcgagagcattcttataggcctcccgcgtgatgggggagacgcaagagcgtgagtgggtcctcacactggtctcccgccggtcttgccagtgcagccctgataacagcacttcggaagatgggatccacgcgttcccgtgtgccttgatgatgttctcgcagagcctgcacggccacaacattggcaaaaagatgtcctgtcagcaattcattggcatcttggcccagatgaatgatggtcaagtctgtgccaaagacttgctgagtatcctttacaactccatcaagaatgaaaagctggaatgggccattgatgaggatgagctgaggaaatccctgtctgagctggtggatgacaagttagggacaggcgcgaagaaggtgactcgatgtatt

SEQ ID NO: 109293 - DNA, 435 bp, Homo sapiens
  misc_feature (1)...(435): n = a,t,c or g
ggttcagcctcctagcaagccagcctgaagcgtggcctcccagccagccagcattccgaacagcattccagcacccctcttcccctgccagaagactcgtgatttgattagcctcccatgcagccaggctctaggccagcctccaaaaaaccggcctgccaccaggcctccaagtcacattcatcttgccggactcttcagcaagcgttttaggaagcatttaaggcagcctctcacacagcctctcccgcaggctcttggccagcctcctagacagccagcctccgatccagcctttcagaaagtctctaagcgaatctcccagacaatcagcttccagaccaacctcccatgcagccagcgttaataacagacatccagcaagcctctgcacagctgtatgcggccgctctagcgaaaccncggtacgtactg

SEQ ID NO: 109294 - DNA, 411 bp, Homo sapiens
  misc_feature (1)...(411): n = a,t,c or g
aaattcaaagagttccacgggagtcgcggctagaccggggcgcttcttcagcatctacgtgctctaaggcctgaacccccgtcatcagggccacgtttatatggggttcactgtcagccctgcttgtcaggtccagcagcacaatggggaccacacaaaaggcagggcccnnnnnnnnnnnnnnnnnnnnnnnnnnnnnnnnnnnnnnnnnnnnnnnnnnnnnnnnnnnnnnnnnnnnnnnnnnnnnnnnnnnnnnnnnnnnnnnnnnnnnnnnnnnnnnnnnnnnnnnnnnnnnnnnnnnnnnnnnnnnnnnnnnnnnnnnnnnnnnnnnnnnnnnnnnnnnnnnnnnnnnnnnnnnnnnnnnnnnntattcgtccgctgtagaggatccaaccccacgaacgcgatcat

SEQ ID NO: 109295 - DNA, 394 bp, Homo sapiens
  misc_feature (1)...(394): n = a,t,c or g
tacccctgcccctgggtctccaaccccctttccccgtctcccccccagtttcccgggccggcagaggcgccgcagcgtcggaacaatgcaaggctaagccgggaagatctgcctgcactgcaagtgtccccaggaggagcacatggtgacagtgatgccgctggagatggagaagaccatcagcaaactcatgtttgactctcagaggaactcgacctcagatgatgactcatgctgtgctttggaagagtatgcctgggtcccgcctggtctgaggcctgaacaggtacaccagtactatagctgtctcccagaagagaaagtcccttatgtcaacagtcctggagagaaactgcggatcaggcagctactacaccaggtggcgtcacatgan

SEQ ID NO: 109296 - DNA, 448 bp, Homo sapiens
cgatctctccctttatgctatagagcgcccgccgcgcacaggcagcgctgtcccagctgcgtgtttttctttagggggagctggaaggcatctgcggagctggggcttgttagagtgagcgggtcatcacgtcccgtcaggggccgcacatccgcgtggacggcgtctccggaggtaacgctccgttccgggagtcgttccaagacctttcccgagcttgcgctggaatggaggtcctggaggagggggtgggcggctcctacactcttagctactgttccccttcgcatctctcagggcgactttatggcttcctaatattgactcttgcctggttaaacccttttgacggagggaggcgatttgcccagcaagaaaacccgcatttcttgagcggctcctttgtgaaggtctctaccaattgttgctgcacgtgaactcctgctag

SEQ ID NO: 109297 - DNA, 1008 bp, Homo sapiens
  misc_feature (1)...(1008): n = a,t,c or g
ccagtcacaatgagtaatttaatggtaactataatagcggttatcaccactgccatgagtattccttcaataagggctgacacagagaacaattacacttattgagtatatttatcaatcttggctggcaataatgcctggatgcaatcactctgtgacacagttacacatgctttctgatctcagtatttactataataaacctgctcctataattgaggcataccaccctcaaaaacctatttgtaaacaggattggaccgagttagaaaaaatgaacatactcattcaggaagattgcattgcggaacaggcagaggtgctgcacaatgattcctatggaatcatcattgattggtcccctaaggggatgtttagcttgaattgcacctctcagtctgcgtgccatggccacactatgttcagatgatctgaacaaaacggtcagatggtagaaatgataagaagtatggcaaaagttcctattatctggaaccgtggcggtatagtggcacctcaacctcaaatgatatggcctgctctagaagcttaacataaggatttgtggaaactattagatgttcttaataagatcaaaatttgggaaagaataaaaaggcatctagaaggacactctacaaacttgtttttggatatggcaaaattaaaagaacaaaaatataaagcatcccaggcacacctgaccttaatgccaggaactggagtccttaaaggagctgcagacaaattagcagctagtaacccattagaatggataaaaacacttggaagctctgtgatttcaatgatgattgtgcttttaatcggtattgtttgtctttgtatagtgtgcagatgtgggatcctgactcctgtgaggaagtagctcacagtgtcaaaagctgcctttgcttttatctcttttgcaatccanagganggggggacatgttggggngcaggccccccccaaaatctggcccttaaactgtcccccaaaactggncct

SEQ ID NO: 109298 - DNA, 456 bp, Homo sapiens
  misc_feature (1)...(456): n = a,t,c or g
nccagctcagccaggtctcgggcccaggagaaggggagcctcagtgggggcttgagcaagagccgggagctcaacagtggcaacacctctgattcagggaactccttcaccacctcctcaccccagaacaagggggccatgttggagaatctctcccccaccagcaggggcagagagtcaaggggatttcagtcaccgtgtctggaatgtgccgaagtgaagaagtccagtttggtcccatccacagcccggagctcacccatgaaagggtgttcccgcagctcctcctatgccagcacccgatcctccagtcactcgtcccaatccccaaatcccagggcttccaacaggtacacccaaagccgatccacctcttctgaaaaaaaatcctactaacgctctcccagctagtgtattgcggccgctgggnnnnnttcgcgcaatgtcgcgtctctc

SEQ ID NO: 109299 - DNA, 449 bp, Homo sapiens
  misc_feature (1)...(449): n = a,t,c or g
cagctgctggttcctccgagcggccgaatacatgtggggggaacatcgctggactctcttggggtgtctggcttcccaggccttgtcagggtgctcctctctcttcaaatttggtggcctcgcggccaaaagtggcatggccagggcctttgtcctccaaagtggtggtggaggagttggccagagaggcatcgttctcttcgtcctcatccttttctgccgtgaggctctgctccttctccttggccagccgggtactctcctcccctagctcctgcttaatcttctcaagctccttctccttgtcttccaccttgagggctttcaggactggtttcttgatgggtcccgacctccggctcctgcccgtctgctccgggtgctggctgctggaactccggngctcgggagtccattcaagctcccaggatggcttgttggtgggggct

SEQ ID NO: 109300 - DNA, 420 bp, Homo sapiens
  misc_feature (1)...(420): n = a,t,c or g
ttcgccattcgtgctttcttttttccttaaaaagagacatcataggtcatactgaaaagacaatggagttactagctagaaggattctgaatatctaaatcacnnnnnnnnnnnnnggaaagggagtttggcttggtcccccaggcgggggggaagggggggaaccccggcccagggaaccctcggcctcccaggttaaggggattnnnnnnnnnnacccccccaaaaagggggaataaagggatggccccatggggccaacaaaattttggattttcaagaaaaaagggtttggcccaggcgggcctcaaaccccggccctaagggaaccgggccgcctaacccaacaaagggggggggaccacgggttggacccccggcaccgggccttaaactcatttttaaaaaaaaggcttgggg

SEQ ID NO: 109301 - DNA, 445 bp, Homo sapiens
  misc_feature (1)...(445): n = a,t,c or g
nnnnnnnnnnnnnnnnnnnnnnnnnnnnnnnnnnnnnnnnnnnnnnnnnnnnnnnnnnnnnnnnnnnnnnnnnnnnnnnnnnnnnnnnnnnnnnnnnnnnnnnnnnnnnnnnnnnnnnnnnnnnnnnnnnnnnnnnnnnnnnnnnnnnnnnnnnnnnnnnncacctctatgcacatagactagaaaacctaaaataaatgaatacattcctggaaacatacaaactcccaagattgagccagggagaaattgaatccctggacagaccaataaagagttccaaaattaaatcagtaataaaaagcctaccaaccataaaggacccaggacaagaatgattcacagccaaattccaccagatgcataaagaatagcttgtaccattctaactgaaactactccaaaaaattgaggaggaggaactcctctccaactgattctatga

SEQ ID NO: 109302 - DNA, 409 bp, Homo sapiens
  misc_feature (1)...(409): n = a,t,c or g
aatacatacgtggctaagtcatagaaagcaaggaaaagcaggactaaccctccctcaggccaggtactcaccctcaggccgggcaggatcacggttgagcacagcatatcgaggcagatcaataccctcttcctgcaggatccggtacacctccctcctgtcacccccaaataaaatagctgggagaggtgggagtaactaaggggagagggtggggatttcatttgcacaggattaaaagacaccagggcacaaaattatggtacaaaaattaggcatgttggtttgactctgcccctctcacagtgggtgccccgaacacgcatgatcccatagccacccatctcactggtcaacaggaagttagtacctacctcgcatgtatcactggccgcccacaacattgatn

SEQ ID NO: 109303 - DNA, 436 bp, Homo sapiens
  misc_feature (1)...(436): n = a,t,c or g
aaaacattgccccccactgtgcctttgaccactggagctctcacaggagccctctgcacccaggctcccatccaagtgctggggcctccctcacacgggcatctggaaagcgtcacagcaccttccactcaccagggacgaaggctgccggccagatgaggcaagcgtcccccacagccgagcacacaagggctccctggaggagctgggtgtagcccccgcttggggacatgacccacaggaacccagccaggcagaggacaggcaggcacttgaccagggcagcgaaccaggacagctggtcctcgggaatccagaggcagaagtacacgcagcaggagaggatgaaggggctcagccacctgcagacatctgggcgctttggggagtggngagctactgagccgaaacccagcccagcccccattcttgggag

SEQ ID NO: 109304 - DNA, 374 bp, Homo sapiens
ccttcgcaacactgtcttagtttgggtagccccatgtctattcttggacttgctgtgggtggctgggagcagtggaacagcagatgtcactttgtccagggggtgacaagttgtcatctttctgtccccatcctgccttagcagcctccagaggacatcaaggcactgtcttggaaccggcaagcccaacacattctgtcttctgctcaccccagtggcaaggcagttgtgtgggatctcaggaagaatgaacctatcatcaaagtcagtgatcacagcaacaggatgcactgctcaggcaaggcctggcatcctgacatagccaccctgtattgcggccgctatagaggatacagcaatacgacgcgggcata

SEQ ID NO: 109305 - DNA, 541 bp, Homo sapiens
atgtgcaagttctgtgggaagaagtacacacggaaggaccaactggagtaccacatccggggccatacagatgataaaccattccgctgtgagatctgcgggaagtgctttccattccaaggtaccctcaaccagcacttgcggaaaaaccacccaggcgttgctgaagtcaggagtcgcattgagtcccccgagagaacagatgtgtacgtggaacagaaactagaaaatgacgcatcggcctcagagatgggcctagattcccggatggaaattcacacagtgtctgatgctcccgattaagatggtaaagaagtgcacccaaacaaagcacattaatcaatgcatatttgtgatttgctttgttgtaatctttggttttcccaaccatctggaaatctcttggtctcttggcagtttttctaaagtttctggatggaacacttcgttgtgtaatcctttcccctgccctccctccccgaaggagctcaaagcacgaatgggagagcggccgctctaaagaatccgagctgacgtacag

SEQ ID NO: 109306 - DNA, 538 bp, Homo sapiens
agtaagcgtccctgtgaaaatggtgggatctgctttctcctggacggccaccccacctgtgactgttctaccgctggctatggtggcaagctctgctcagaagatgtcagtcaagatccaggcctctcccgcctcatgatgagtgatcaagctcgagaggagaatgtggccactttccgaggctcagagtatctgtgctacgacctgtctcagagcccgatccagagcagcagtgatggagtcgccctctcctttaagacctggcagcgtaacggcctcatcatgcacacgggcaagtcggctggctatgtcaacctggctatgaaggatggtccggtctccttggtcgttaacctggggtccggggcctttgaggccattgtggagccagtgaatgaataattcatcgtcaacgcctggcatgatgtcaaagtgcctcgcaacctccggcagatggcaatctctgtggatggctttcttacctcgactggctacactcaagaggacttgtggtcagacagctctagaatgtcctagc

SEQ ID NO: 109307 - DNA, 472 bp, Homo sapiens
  misc_feature (1)...(472): n = a,t,c or g
gggcccgggtcaccaggaaganntnaaactctcacccaccccctctaccatcacctctaaccaggcaagccagggtgggagagcaatcaggagagccaggcctcagcttccaatgcctggagggcctccactttgtggccagcctgtggtggtggctctgaggcctaggcaacgagcgacagggctgccagttgcccctgggttcctttgtgctgctgtgtgcctcctctcctgccgccctttgtcctccgctaagagaccctgccctacctggccgctgggccccgtgactttcccttcctgcccaggaaagtgagggtcggctggccccaccttccctgtcctgatgccgacagcttagggaagggcagtgaacttgcatatggggcttagccttctagtcacagcctctatatttgatgctagaaaacacatatttataaatggaagaaaaacgttaaaggcatgtatt

SEQ ID NO: 109308 - DNA, 358 bp, Homo sapiens
  misc_feature (1)...(358): n = a,t,c or g
agagatgggtgcttcataagagcccagaaagctttgctaatatctgtctcgtccctcttcacccctacttttctggccacattgacagaactgctcaatctgaaaccacttgagaagccatcttccctggannnnnnnnnnnnnnnnnnnnnnnnaacctttggnnnnnnnnnnggggggcggggggnnnnnnnnnncaattgggggaagggggggggccaaaagtgatctaaaaattctgtaggggggggtttgagggggccaaaaaaacccccccccnnnnnnnnnnngaagggggttttttttacggggggggaacaggggttaaaaaccccaatttgggggggnnnnnnnnnnt

SEQ ID NO: 109309 - DNA, 436 bp, Homo sapiens
gacacacggtcctgactgccaggaaccacccacgcggccgcagacatagctgaagtacaggacaattttttttaacttaaaaggagtctagaaaatccagctgaaaggaaaatggaaggtcagaattcccatagtcctcaatgtttcaaaacatgctcagagcaaaatggttatgttctcacattgtcaaatgcacaaccagttctgcaatatgatggagcagatggtgctttttacccagatgaaatacaaaggccacctgtcagagtcccctcttggggactggaagacaatggtgtctgcagccagcctgctcgaaactttattcggcctgatggcttagaggactctgaggatagcatagaagatgagaatgtgcctactgttcctgatcctccaagtctacatttacgtgggcatgggacaggcttttgct

SEQ ID NO: 109310 - DNA, 351 bp, Homo sapiens
cagcctaagatcctccgtgatggggaccatgacttgaagcgctgccagtaggtgaccgagaaggtgctggctgctgtctacaaggctctgagtgccccccgcatctacctggaaggctccttgctgaagcccaacatggtccccccaggccatgcttgcactcagaagttttctcatgaggagattgccatggcgaccgtcacagcgctgcgccgcacagtgccccccgctgtcactgggatctccttcctgtctggagccccgaggaggcggcctcctcttcaagagtgggagggggcagggcctggagtgttgggggcagccaccgaccccctccgcttaataggcgtg

SEQ ID NO: 109311 - DNA, 360 bp, Homo sapiens
ggtcacacatatgctcacacatcacacatacctgctcacatacatgctcacacctcacagctgctcacttatcactcacacgctcacgccagctctttcacacctcattgacacctgctcactcatatttcgccacttacacttgcacctcacacctgctcacgcatgcacatacattctgctcatgcatatccacttgcgtgtttgagagcttgttctcactcagcctctcagtcactgttaggcacagggcaatgatcactagcattcagataaggcatccgctcacaacggcgcgctctcaagaggggttacgctcttctgttataacgcacccaccccccagccattctcggtggg

SEQ ID NO: 109312 - DNA, 463 bp, Homo sapiens
gcgtgagaccgcacctgaagtgtcgagtcgagccacgcgtccggaggactgtgccaagcacatgcacgtgctcctggcccttgtccagaactcagagcagctgctgcggaccctgtaagggaccgtgagccaggcccacgatcgggtgcagctgcagatggcggatctggtcaccacccacaagagcctgcaccatgaggtaaagcggttgaatgaggataaccaagggctccgggccgagcagctggcatcctcagccccccagggctcgcagcaggagcagggcgaggaggaatcactgcccagctctgtgccagagctgcagcagctgctgtgctgcacgcggcaagaggcgagggcccggctgcaggcccaggagcacggggccgagcgcctgcggatcgagatcgtgacgctgcgggaggctctggaggaggagacagtggccagggccagcctggag

SEQ ID NO: 109313 - DNA, 410 bp, Homo sapiens
cctgcctgaaggagccaagaacattgaaattgatagtttctatgaaatcagccgtgccccagatgagctgcactacacctatctggacacatttggccgccctgtgattgttgcctacaagaaaaatctggtagaacagcacattcaggacattgtggtccactacacgttcaacaaggtgctcatgctgcaggagcccctgctggtggtggcggccttctacatcctgttcttcaccgttatcatctatgttcggctggacttctccatcaccaaggatccagccgcagaagccaggatgaaggtagcctgcatcacagagcaggtcttgaccctggtcaacaagagaataggcctttaccgacactttgactagactcgctataagtacaactaattccgggacattt

SEQ ID NO: 109314 - DNA, 411 bp, Homo sapiens
  misc_feature (1)...(411): n = a,t,c or g
gttaccaaagaagtggtgacctccgaagatggttctgactgtcccgaggcaatggatttaggcacattgtctggcataggtactctggatgggttccgccataggcaccccgatgaagctgccttcttcgacactgcctcaactggaaaaacattcccaggtttcttctcacctatgttaggagagtttgtcagtgagactgantctaggggctcaaaatctggcatcttcacaaatacaaaggaatccagttctcatcaccctgcgatagctgaattccctttccgcgggagatcttgcagctacaggaaccgatctactatctagcccgagtaccatacaggatactcccgatttgtacgctagagatacaaaccggcctatgacggcgtcagcgattcccccttgccg

SEQ ID NO: 109315 - DNA, 402 bp, Homo sapiens
cgcctacgatggctaggattatctcaccctgaatgaggacctgcgctcctggaccgacgctgtcacggcggctcagatttaccagcagaagcttcatgatgcctttgaggcggagcaccagagagcctacctgaaagacacatgcgtggagtggctgcacaaaaacctgtagaagggtaaggagacgatgcttctcctggagcccccgaagacacacgtgactcaccaccccatctctgaccatgatgccaccctgaggtgctggtccctgggcttctaccctgcggagatcacactgacctggcagctggatggggagggccatacccacgacacggagctcgtggagaccaagcctgcaggggatggaaccttccagaagcgggcccctgtggtggtggc

SEQ ID NO: 109316 - DNA, 377 bp, Homo sapiens
taggcttaactagacaagtcacagattcatgatattggcctgggtggggggtctactcgtatccccaagattcaaaagcttctccaagacttcttcaatggaaaagaactgaataagagcatcaaccctgatgaagctggtgcttatggggcagctgtccaggcagccatcttgtctggagacaagtctgagaatggtcaagaattgctgctcttggatggcactcctctttcccttgggattgaaactgctgggggagtcatgactggccccatcaagcgtaataccaccattcctaccaagcagacacagaccttcactacctattctgacaacccagctggggtgcctattccaggttatgaaggcgagcgcgg

SEQ ID NO: 109317 - DNA, 478 bp, Homo sapiens
  misc_feature (1)...(478): n = a,t,c or g
tattgactctaannntcgctcctcagcacccgaagattcgcctgtacaacgcagagcaggtcctgagttgggatccagaggccctgagcaatagcacgaggcctgttgggtaccgagtgcagtttaaatacaccgacagtacatggttcacggccgacatcatgtccataggggtgaatagtacacagatcacagcaacagagtgtgacttcactgccgtcagtccctcagcaggctttccaatggatttcaatgtcactctacgccttcgagctgagctgggagcactccattctgcctgtgtgacaatgccttgctttcaacactatcggaatgtgactgtcttgcctccagaaaacattgaggtgaccccaagagaacgctccctcatcatcaggttctcctctctctttgacatagctgatacctacacgggctttgtttgttattatgtccattactgagaaaaaggaggaac

SEQ ID NO: 109318 - DNA, 446 bp, Homo sapiens
  misc_feature (1)...(446): n = a,t,c or g
ttcgtagtacacagcggaggaattctagctctggagcggaccgagaaactgctggagaccattgaccatctgtacttgttttttgccaagcggtctgcacccttcaacaactggatggagggggccatggaggacctgcacgacaccttcattgtgcacaccattgaggatatccagggactgaccacagcccatgatcagaacaaggccaccctccctgatgccgacaaggagcgcctggccatcctgggcatccacaatgaggcgtccaagattgtccagacctaccactgaaatatggcgggcaccaacccctacacaaccatcacgcctcatgagatcaatggcaaatgggaccacgtgcggcagctggcgccttggatggaccaagctctgacggaggagcatgcccgacagcagcacaatgagaagctacccaagcagtn

SEQ ID NO: 109319 - DNA, 211 bp, Homo sapiens
gaggaggtgccggctgaggagcacgacccaagccctgaggcagcagattcagcttctggtgctcccaatgattttcagaacaacgcgcaagtcaaagtcattcgaagccctgcggatttgattctattcatataggagctgaaaggcggaacaaaaaaggggaagcccaatataggccaagagcagtctgtggatgatgctgcagaagtcc

SEQ ID NO: 109320 - DNA, 404 bp, Homo sapiens
gcgtccctagtgagtgtggttgaattcctgaagaatgcccctggaaactgcccttatccgctgaccagcagctgccagaggccccaggtcacctcgggtccccttgaaagaatgtctcggtcacatcaggcccgctaggtccagagagcgagcccccaatgcccggccaggctaagccgcagagaccctctcagcccccacctcaggttagggctctgcccgcagcctgacctctagccctggtggcagaggtccctcagctgcgaggctaattgggtgaccaccgattccagctgcggttaatccagcttgggcctgtctgcactgcgatcctcttgggctctcctaggatccccccatgccccgtaagaggtggaagacgcttccttccaggacagcaggcg

SEQ ID NO: 109321 - DNA, 448 bp, Homo sapiens
gactactagtccagcgcggtggaattcgtcgggaagggtatcaaggaataacaccctattgtgggcttgcggagaatgggggacttcaaggcgtgtcagtttcaggagggtgagggcaggagcgtgggtggagtcagcaggtccccatgatggccctcactgagagcttcgcccttgtctcctacaagctctgactccattcccagtgggcacccagcacctccaacccctccacagcccccaacccagcctctgtcggaggcgaattctcagagtgagggttccctgtcacttgagagaaggttccctgtgacgtgaccttgggggacgtcattgccctttctgtccccacccaccccctcggcagttctgttggccaggactttggcctatacaaaggatgggggttgtggctgtggagcggaactggttctcacccctattaagg

SEQ ID NO: 109322 - DNA, 427 bp, Homo sapiens
tggcggaattcgatggccagctgcagctaggtttggtttccttaaaaggaatgcgaggatgccagttatgctctctctgagagaaggttcattctgagctctcagccagctgggagcaggcccctttcctcactgtccttccacgtttagggcctgtatgggggaagagtcggggaccctctaatcccagcttgaagctaccaaacgcaagcaccaggaaatccgagccatgagaagtcagctcacaaagatcgaggacctgggggccgccatggaggaggccctcatcctggacaacaagtacactggacacaggaccgtgggccttgcccagcagtgggaccagctggaccagctgggcatgcgcatgcaccacaatctggagcagcagatccaggccacgaacacaccaggcgtgactggagcg

SEQ ID NO: 109323 - DNA, 414 bp, Homo sapiens
  misc_feature (1)...(414): n = a,t,c or g
acgagggaatcaataacatgttgcaattacaggatacaaaaaaagaagcacggaaggaaaaagaaatttatgaacaggaagcaaatgcctcaacatttcatagaaggaggactccattggataaagaccttattaatacggggatctgtgagtcttctggcaaacagtgtttgcctctggttcagctcatacaacagcttcttaggtaaatcatattagctgtattgtatnnnnnnnnnnnnnnnnnnnnnnnnnnnnnnnnnnnnnnnnnnnnnnnnnnnnnnnnnnnnnnnnnnnnnnnnnnnnnnnnnnnnnnnnnnnnnnnnnnnnnnnnnnnnnnnnnnnnnnnnnnnnnnnnnnnnnnnnnnnnnnnnnnnnnnnnnnnnnnnnnnnnnnnnnnnnnnnnnnnnnnnn

SEQ ID NO: 109324 - DNA, 417 bp, Homo sapiens
tgacgtgacaaaacaactggggcaagaactgcgccaaggttgcggcgtacgtgaattcccctcccctgagcccggaccctaccacgcccgactacttgacctccctactggcctgtggggacttgcaggtcacaggcagcggccactgtccctacagcactgcccagaaggcggaggacacggacaactttaccctgatccccgagggcgtcaacgggatagaggagcgcatgaccgtcgtctgggacaaggcggtggctactaggcaaatggatgagaaccagtttgtcgctgtcaccagcaccaatgcagccaagatctttaacctgtacccaaggcaagggcggcttgccgtgggctcggatgccgacgtggacatctgcgaccccgactagttcgagaccataacagccaaaa

SEQ ID NO: 109325 - DNA, 438 bp, Homo sapiens
cgacctgatacgcaagcttggacgacgcgcgtgccgatgatgaagctgacctccgggccaaggccgtggagctggaacatgagacattccggaacgccaaggtggccaacctctacaaggccagcgtgctgaagaaggtggccgatatccacagagcctccaaggatgggcagccctatgacatgggaggcagtgcacagagctgcagtgcccaagctgagcccccggagcccaatgagtatgacattccaccagcctcccatgtgtactcgctcaaacccaagcgggtgggagctggtttccccaaaggctcctgcccgttccagacggccacggaactgatggagacgactcggatcagggagcaagccccccagcccgagcggggaggcgagcatgagcccccgagccggccctgtggctcctggatgaggatgg

SEQ ID NO: 109326 - DNA, 464 bp, Homo sapiens
ttgtgtgtgtctcacaatcctctcgtgtaggtctctaaatttcccccacaaaatatatgtccgtgtctcatcggagatagtgtttgaccagttatgtgtgtctctcaatccagtcaagtagatgtctaagattaaccatcagaatatttatgcctgattcatggctgaaatggtgtttgaccagctatgtgtgtctctcaatccagtcaagtagatgtttaaaattaaccatcagaatatttatgcctgattcatggctgaaatcgtgtttgaccagctatgtgtgtctctcaatccgatcaagtagatgtctaaaattaaccgtcagaatatttatggctgattcatggctgaaatcatgtttgaccagctatgtgtgtctcttaatccagtcaagtagatgtctaaaattaaccgtcagaatatttatgcccctcgtaccaagattggcgtaagcagatcgc

SEQ ID NO: 109327 - DNA, 403 bp, Homo sapiens
  misc_feature (1)...(403): n = a,t,c or g
ctctcgcaagtgcctccgtgaggagattcacaaggacctgctagtgactggcgcgtacgagatctccgaccagtctgggggcgctggcggcctgcgcagccacctcaagatcacagattctgctggccatattctctactccnaanangatgcaagcaaggggaaanttncctttaccactcaaaattatnacatntttcaactntgttttgagagcaagggaacagggcggatacctgaccaactcgtgatcctaaacatgaagcatggagtggaggcgaaaaattactaagagattgcaaaagttgagaagctcaaaccattagaggtagagctgcgacgcctagaagacctttcagaatctattgttaatgattttgcctacatgaagaagagagaagag

SEQ ID NO: 109328 - DNA, 478 bp, Homo sapiens
  misc_feature (1)...(478): n = a,t,c or g
taacgtcttnnnnatcttacgccaagcttgtcacgagggtctttccagagcagaaatttttaattttaatgaagcccagcttatcaattcattctttcatggattgtggctttggtgtcatgtttaaaaagccattgatagactcaaagtcatctagattttctcctatgttatcttctaggagttttatggttttgcattttgcattcaggtttgtgatccagtttgagttaannnnnnnnnnnnnnnnnnnnnnnnnnnnnnnnnnnnnnnnnnnnnnnnnnnnnnnnnnnnnnnnnnnnnnnnnnnnnnnnnnnnnnnnnnnnnnnnnnnnnnnnnnnnnnnnnnnnnnnnnnnnnnnnnnnnnnnnnnnnnnnnnnnnnnnnnnnnnnnnnnnnnnnnnnnnnnnnnnnnnnnnnnnnnnnnnnnnnnnnnnnnnnnnnnnnnnnnnnnnnnnnnnnnnnnnnnnnnnnnnnnn

SEQ ID NO: 109329 - DNA, 418 bp, Homo sapiens
ggtctctaagcaccttcaggtatagaactaagccataattccaccacttctgactctagtgaggcaactggcggtgcctaagcaaagaagaccctagctgggtgagaagaggccttggaagggagagatgggggggcgggttgtaaggggactccagctctgggcacagcaggggctgggaaccactgtgggactcttcggctttacagggggtcccatcctgctcccatccaggcgccctcgggcttggcagcatcatcacagagaagtggaggggctggatcacaggtactggcagccaccatcccaggcacatgccctcctcagccctacatggtgactttgacccacttcacagggcacagaacagaactaggagagggaatccgagtggctcgtctatagggaaagaaaccag

SEQ ID NO: 109330 - DNA, 482 bp, Homo sapiens
  misc_feature (1)...(482): n = a,t,c or g
tgacatcgttnnnacatgcttacgccaagcttggcacgaggcctcgagccaatcttgggacgaggatgatccatacacaaggctttcttcaagtgggggatgagatcctagaagtcaatggcacacatgtgacaaatcattcagtggatcacctgcacaaggcgatgaaagaaaccaaaggaatgatctcattaaaagtaattcccaaccaacaaagccgtcttcctgcgctacagatgttcatgagagcgcaggttgactatgatcccaaaaaggacaatctgatcccttgcaaggaggcgggactgaagattgctactggggacattatccagattatcaacaaggatgacagcatttggtggcagggacgggtggaaggctcctccaaggagtcagcaggattgatcccttcccctgagctgcaggaatggcgagtggcaagtatggattaatcagctcctagcgaagccccgagctgg

SEQ ID NO: 109331 - DNA, 398 bp, Homo sapiens
cagtcatatttctgtcccatgtagatcagttatgaggatggaaaaagaaaaactctcacagaaaaatagtaatagtcttaatcctcactcttagggcaggaagaagaaaactgcccttgctctgttttattcctttgctcaattcattttcatgtatttatttttcagcctttccctacagctctagaatactttaagactgatttggagtattctggtggtcttggttaatatgaactaacaaatgtattctgaatctttgtttcctcagactataccaaaactcacctttcctggtgggttactaattggttagagtcctgcgtttatgaatgctcccaagatcaaaggtactcacacagccatgaaaagtggaattttagcaccacaatctattg

SEQ ID NO: 109332 - DNA, 444 bp, Homo sapiens
ctgacgacgacacgccaagcttggcacgaggggcaagcatgtgccccgggcagtgtttgtagacttggaacccacagtcattgatgaagttcgcactggcacctaccggcagctctttcaccctgagcaacttatcacaggcaaggaagatgctgccaataactatgcccgagggcactacaccattggcaaggagatcattgacctcgtgttggaccgaattcgcaagctggccgaccagtgcacgggtctccagggcttcttggttttccacagctttggtgggggaactggttctgggttcacctccctgctcatggaacgtctctcagttgattatggcaagaattccaagctggagttctctatttacccggggccccaggctttcacagctgtagatgaggcctaaatctccatccttaacaaccacaccaccctgtc

SEQ ID NO: 109333 - DNA, 442 bp, Homo sapiens
ttgacccagcctcccagacttgcctcagccctggcctctctgccctctccccttcatctgctcctcccccaggaactctgtgccaaacaagtcctcaaaataggatttattactaggccctctccctggggtctccctttctggggtctctgggtctagaccaagtgacagggtaagagagagcatgtcccccctgagagcgtgggaccaggctagcccaagtgcagcgcccaggtccagcctccctggtgaggcctgtgcccgcggagccagtggctgccctgccgggtgccagcgcctgtgaccctcccctagctcttcttggcctcctgctctcggcgccggagcttctccccgtgcgcgcagccttctcctgggccagcgctccttctcgcagctgctgccatctcctccaacttgcgcctctgtccaagctggatgt

SEQ ID NO: 109334 - DNA, 427 bp, Homo sapiens
  misc_feature (1)...(427): n = a,t,c or g
gnnnnnnnnnnnnnnnnnnnnnnnnnnnnnnnnnnnnnnnnnnnnnnnnnnnnnnnnnnnnnnnnnnnnnnnnnnnnnnnnnnnnnnnnnnnnnnnnnnnnnnnnnnnnnnnnnnnnnnnnnnnnnnnnnnnnnnnnnnnnnnnnnnnnnnnnnnnnnnnnnnnnnnnnnnnnnnnnnnnnnnnnnnnnnnngatctgtcagccactttccttgtcctctacagctaatcacccagttctgtgcctgtgttttacacacaaaaacctgcacatatttatagcagctttatttataattgccaaaagttggaagcaaccatgatgtacctcacttgatgaatggatttggctgggcctggctcccctctatctaaccagggaagaggagtgggactgcgtgtgtgttacatattggacggacctgttg

SEQ ID NO: 109335 - DNA, 470 bp, Homo sapiens
ggaaaaaagaggagtgtgggcacgtttcaaagaaaactggcttatgcctccctgtttctggcgtggccttccctgggagcgagttaaggacacggaatctcacccgcttctgaatgggtccactcctggggatttccgcggccttccctgggagcgggttagggacacggaagctcacccccttctgaatgggtccactcctggggatttccgcggccttccctgggagcgggttacggacatggaagctcaccctcttctgaatgggtccactcctggggatttccacggcctttcctgggagcaggttagggacatggaagctcacgcccttctgaatgggtccactcccggggatttccacggccttccctgggatgatccactcctgggggattttccgcagctctccagatgacgtgcacgcacacttaaacacccagaatttaggggaggcattgatccagtga

SEQ ID NO: 109336 - DNA, 433 bp, Homo sapiens
gatacaggattcacatgaccgacgtgactgggaaaacaaggagggcggcgggcccggcggccagggcttctcctacccctacaaggccgtgttcagtacccagggcccccctctggccagcctgcaagatagccatttcctcaccgacgccgacatggtcatgagcttcgtcaacctcgaggaacatgacaaggaattattccacccacgctaccaccatcgagagatccgggttgatctttccaagatcccagaaggggaagctgtcacggcagccgaattccggatctacaaggactacatccgggaacgcttggactatgagacgtttcggatcatcgcatattaggtgcaccatgagcacttgtgctggggattggatttcttattggtagataagcctgaaccctccgtgcgcttggtaggagggcag

SEQ ID NO: 109337 - DNA, 476 bp, Homo sapiens
  misc_feature (1)...(476): n = a,t,c or g
gttgggccccntnnaacgaccacgagggagaactccttggactctttgcacaggatgtggagtcctcaggacttgaagtacaacattccgcccacacagctttccctgaaacccaacaggcagtccctgcgcagtgggaactggtcataaaggaagagccaccggctgccacgattacccaagaggcacagccatgacgacatgctgctgctggctcacctgagtctgccgttctcaccctccagcctcaatgaagacagcctcagcaccaccagcgagctgctgtccagccgccgggcccgccgcattcccaagcttgtccaaagaattaactccatctacgatgccacgagaggaaagaagagattaaaaaaggtgtctatgtccagcattgaaacagcatcactgagagatgaaaacagtgagagcgagagcgactcttatgacaggttcaaagcccacacacaagcgcctgg

SEQ ID NO: 109338 - DNA, 481 bp, Homo sapiens
  misc_feature (1)...(481): n = a,t,c or g
actgcaaccccnnncggcgcggcacgaggagatggacatcgagtcccagcctgagtgtgcctacgaccacctataggtgttcgacgggcgagacgccaaggcccccgtcctcggccgcttctgtgggagcaagaagcccgagcccgtcctggccacaggcagccgcatgttcctgcgcttctactcagataactcggtccagcgaaagggcttccaggcctcccacgccacagagtgcgggggccaggtacgggcagacgtgaagaccaaggacctttactcccacgcccagtttggcgacaacaactaccctgggggtgtggactgtgagtgggtcattgtggccgaggaaggctacggcgtggagctcgtgttccagacctttgaggtggaggaggagaccgactgcggctatgactacatggaactcttcgacggctacgacagcacagcccccaggctggggcgctactgtggctca

SEQ ID NO: 109339 - DNA, 299 bp, Homo sapiens
agtggatcctgacaaactggttctaaagtttacatggaaaggcaaaagacccagaatagctggcacaatattgaaagagaaaaaggtcagaagactgatattacccaactttaagactcactataaagctacagtaattaagatagggtggtaatggtgaaataatagacataatcactggaaccaaatagggagcccagaaatagccccacacaaatatagtcaactgatctttgacaaggaagcaaacgcaatacaatggagaaaagacagtcttggctggggcagtggctcatgct

SEQ ID NO: 109340 - DNA, 420 bp, Homo sapiens
  misc_feature (1)...(420): n = a,t,c or g
tatgaccatgactacgcattctttggcacgagggactgccaaaagaatcttccagagaaactatagtcatatgcagcccataggcagatgctgtgaaagttgttaaattgttaactttcatttaggttttaaagcactgctgggctgggcaagttgatttgacaagcttttcttcattcggtagcacattgcacagcatcaaaagttaatatgactattaaaaagtagtgcttgtttttgccatgggtttttgtccacacattttgaaaatacacaaagaatagtaatcttcttgctaaaaaacggtttattatcttaggtggtgcaggcaacaggaggccctgaactagcccgttcaagacttagtcccctattgaataaggacacaattgaattcttaaattaaactgtcaaagtgcn

SEQ ID NO: 109341 - DNA, 441 bp, Homo sapiens
ttatgacacccattcttggccgggggactgccaagaaactgttcttattggctggcggcgagagggtatttagtttcttcggaatgagctcttcctggatgtgctggagagtgtgaacctgctcatgtccccacaagggcaggtgctgagtgcccatgtgtcggcccgggtggtgatgaagagctacctgagtggcatgcctgaatgccagtttgggatgaatgacaagattgttattgaaaagcagggccaaggcacagctgatgaaacaagcaagagcgggaagcaatcaattgccattgatgactgcacctttcaccagtgtgtgcgactcagcaaggttgactctgaacgcagcatcagctttatccccccagatggagagcttgagcttatgaagtatcgcacaaccaaggacatcatccttcccttccgggtgag

SEQ ID NO: 109342 - DNA, 430 bp, Homo sapiens
cgcaatactgtacgcgagcactggcacaacagcgccatgactttggtacttagaatgagttaatcgaacttcagagttgagcctgccacaggcacggggcttgtgagggcagcactccggcttggccccaggcttctctggctctccctggaagcccctggctccaccacctcctcccaggggcagggtgggcagaggggaccctagagtcctgcacagagtgagcgcaattcctgggaggagaatgcagcagggcctccgctgtctccaggagcaggctgagctgaagatcagggccagcgagctccgggccgaggagaagcagctggcagcggagagagcagccctggagcaggagcggcaggagctgcggctggagaaggagaggatcaacgccaccgccctgcgtgtcaagctccgcgccgaggag

SEQ ID NO: 109343 - DNA, 461 bp, Homo sapiens
gaccatgcattacggaatcactggccggacgggactgcaaaaacaaggaggcatcgtcagtcatgccagagtacctaaaaggattagccttaatgccttggtggcctcactggcagaacctgactttgtggagacggacttcgccaaggtttctcgccctgcccaggtgcacattgggttgcaggccctgcaccagatctgtgcttaacatggtcggccaccttggacccgcaatgaggaggatgcagcaaaactggtagccttagcacaggctgtgaatgctcgagccctgccagcagagcatcaaaataacctggacgaggacctcatccggaagctggcatatgtggctgctggggatctggcacccataaacgccttcattgggggcctggatgcccaggaagacatgaaggcctgctccgggaagatcatgcccatcatgcagtggctatactttg

SEQ ID NO: 109344 - DNA, 485 bp, Homo sapiens
cctgccttcagttatgaccatcattactgcttgtcttggcaccacgggagtggaagcacagagaaatcaagtatacatagaaatgaaattattgaaaaatcaaataaacgaagtcgaagtggcagtcaaggaataactgacagtgttgaaaaatcaaaaaaacgggaacatagtcccagcatagaaaaatctagaaagcgtagtataagcaaagaacgttcccacaaacgagatcacagtgatagtaaggaccagtcagacaaacatgatcgtcgaaggagccaaagtatagaacaagagagccaagaaaaacagcataaaaacaaagatgagactgtgtgaaaatattttgtaaaagtggatcacattgaatcctataaatgattaaatctgcttttttcccccacgttgagattgtgcagtagttcgcactcctcaagctctccctgtaggctgcattttcatttcctctttcgtgtagggaa

SEQ ID NO: 109345 - DNA, 401 bp, Homo sapiens
actaggcattcatagcgggatctaggggagcagcttcaccgccgaagaccacaatctataacaacctctaccccaagggtgcatgaaattaaatttgagcttatcgaaaccgacaacctagaaggagggcccgggcccgaatcaggcctatcaagggaaagaccatcttctggtgaacgaaaatcaacacctgacagacctcgagataaacaaggagattctaataaatcaagatctgataaacttggttttaaatcaccaactagtaaagatgacaaaaggacagagggtaacaagagtaaagtacacactaataaagcacaccctgacaataaggcagaatttccaagttatttgttggggggcaggtctggtgcgttgaaaaattttgtcattccccg

SEQ ID NO: 109346 - DNA, 441 bp, Homo sapiens
tacgtcgtcctgatacgccagcctggccgagggatgggcactagatgaaagcgaggctttctatgcccatgtactgcctaaccccctcccctgagttgagctgggctccattatgacctggggctcaggcagaaaagcatttgaccggaggaggcggtccgcactcagcgcctcctccagagcctccagagccgaggctgactgcagcctggggagagtggaggcagcacagctggaggtggaactgaggaaggactgggcggggcatggagcaggcccccttctccggcccctcctcccactgtcctctgcccctacttgtcctgctctctgtctgtggggtctccgtgtctctgcccctttttcttgagtttccgtctttgccactttctcttacctctcagtccttccctcagtctctatctcgctttgcaatctctg

SEQ ID NO: 109347 - DNA, 466 bp, Homo sapiens
  misc_feature (1)...(466): n = a,t,c or g
gaccatcctactccnttaacggacgaggaccttatcttttaactaatcacgagccagcagatttaatgaaaatgaaaaggtgttttgcctcatttggcaacattttacttaggcttcttttggacatgatttttcaaaaaaatcttttaatgatgaattattcactattttagggtctgctcttgataaaataacagccagtttatgtgatcttaaatcaaggcttgattcaagaactggtgtggcaccagatgtcttcgctgaaaacatgaagctcacagaggacacccatcatttgggcaaaaatattaaatgctctttaagttaacccatttgcaggtctgatatcattaaggatgctacatatacgataaggatatcaagactttactcactactaatctgatgtcagtgaaaactcattgggatataatgaaccttatcttcatccttcattaccacgagg

SEQ ID NO: 109348 - DNA, 406 bp, Homo sapiens
ctgccgttgagcaattcgagacgaggaaaaacaggaaaaaggaatggcaaatctggctcaattagaagccttgtaccagtcttcttgggacagccagtttgtgagtggtggggaggactgttttttcataaatcagtcttgagaggtagggaaggatgaacaagatgagaaggaaaacacttacactagttacttggacaagctctttagcaggaaagaagatactgaaatgctagaaactgagccagtagaggatgggaagcttggggagagaggacatgaagaaggatttctgacctacagtgtggagctcgtatataacaagcagctcgagtccataggcctcccacaggttcccagtccacatgattcaccactgaagtcagtaacctgccccttttttccg

SEQ ID NO: 109349 - DNA, 441 bp, Homo sapiens
aggaattcggcacgagatttgctctctctacagcaccacatatatcacatgccctgcagaccacaagaagacgctgggaattaaacttcctttccttgacatgattatgacaaacctgaagaagtattttaccttctaagcgcaggtactagatgacaagaaagtgcgtagtcgctttcggtcgagtaactaccagagcaccacccgggccaaacccttcatctgcaccatgcccatgcggctggatgacggctggaaccagattcagttcaacttgctagacttgacacggagagcatacggcaccaattacatcgagaccctcacagtgcagatccatgcgaattgtcgcatgcgacgggtttacttgtcagacagactctactcataagatgagctgccggcagagttcatactgtatctcccagttcagaacaaggg

SEQ ID NO: 109350 - DNA, 427 bp, Homo sapiens
ggtttgcttggaggtgtgccattgcaaaggcagagtctctgcgttacaaactcctaggagggcttgctgtgcggagggcctgctatggagtgctgcggttcatcatggacagtggggccaaaggctgcgaggttgtggtgtctgggaaactccgaggacagagggctaaatccatgaagcttgtggatggcctgatgatccacagcggagaccctgttaactactacgttgacactgctgtgcgccacgtgttgctcagacaggatgtgctgggcatcaaggtgaagatcatgctgccctgagacccaactggtaagattggccctaagaagcccctgcctgaccacgtgagcattgcggaacccatagatgagatactgcccaccacccccatctcacaacagaagggtgtgaagccagagccgcc

SEQ ID NO: 109351 - DNA, 424 bp, Homo sapiens
ggcaatcgaacgagccagagtccgcggatgactttgaccgactggtgctgagctcccccaacagctccattctgtgactgcagtacatggctttccacctgcaggcctcggagatcgagaaggcccgtgccgtggctgagagggcccttaggaccatctccttcagagaggagcaggagaagctgaacgagtgggaggctctgctgagcctggagaacatgtacggctctcaggagcccctgaccaaggtctttgagcgagccgcgcaggacaacgagcctctcaaaggctttctccacctggctgacatctacgccaagtcacagaaattccaggaagctggagaactctacaaccggatgctgaagcgtgtccggcaggagaaagctgggtggatcagatacggcgccttccttctgcggag

SEQ ID NO: 109352 - DNA, 425 bp, Homo sapiens
ctgcagcaattcggcacgaggagccgtcaagcaagaatgtgtgggagcagatctgcacggagtatgaagctgatcatcctccctttccaaaaggatatacagtcgcacaggagcctgtgattacggttgcgccactataggaaatgctttttcatgtcttcagtgcagagcactattttccggtttcccatttcaccatgatctcacgtactccctgtgctcaagataaatcggaaacaatcaacccaaaaacatgttctcccaaagaatatttggaaactttcatctttcctgttctgcttcccggaacggctagcctgcttgaccaagcgaagaacgaatgatgtttagagaggaaaagagccaaattcattggctgtgattttctgactgagtggttatacaaccatcatccccagaaggcg

SEQ ID NO: 109353 - DNA, 466 bp, Homo sapiens
atacgccaagcttggcacgagggtgtttccacacctactgagtcaggtgtcccctcagctgaagaagtatttggttccagccagccagagagaatatctcctgaaagtggacttgccaaggccatgttaaccattgctatcactgcgactccttctctgactgttgatgaaaaggaggaactccttacaagcactaactttcagcccattgtagaagagatcacagaaaccacaaaaggttttctgaagtatatggataatcaatcatttgcaactgaaagtcaggaaggagttggtttgggacattcaccttcatcctatgtgaatactaaggaaatgctaaccaccaatccaaagactgagaaatttgaagcagacacagaccacaggacaacttcttttcctggtgctgagtccacagcaggcagtgagcctggaagcctcacccctgataaggagaagcctt

SEQ ID NO: 109354 - DNA, 591 bp, Homo sapiens
attggagaactgaatgcacctgcattacgccagcttggcacgagggcccgatggccagatgccaagtgacaagaccattgggggaggagatgattccttcaacaccttcttcagtgagacgggggctggcaagcatgtgccccgggcagtgtttgtagacttggaacccacagtcattgatgaagttcgcactggcacctaccgccagctcttccaccctgagcaacttatcacaggcaaagaagatgctgccaataactatgcccgagggcactacaccattggcaaggagatcattgacctcgtgttggaccgaattcgcaagctggccgaccagtgcacgggtctccagggcttcttggttttccacagctttggtgggggaactggttctgggttcacctcgctgctcatggaacgtctctcagttgattatggcaagaagtccaagctggagttctctatttacccggcgccccaggtttccacagctgtagttgagccctacaactccatcctcaccacccacaccaccctggagcactctgattgtgccttcatggtagacaatgaggccatctatgacatctg

SEQ ID NO: 109355 - DNA, 1049 bp, Homo sapiens
ggacccgggatgagctggaccagttcctggacaagatggacgatcctgactactggcgcaccgtgcaggacccgatgacagggcgggacctgagactgacggatgagcaggtggccctggtgcggcggctgcagagtggccagtttggggatgtgggcttcaacccctatgagccggctgtcgacttcttcagcggggacgtcatgatccacccggtgaccaaccgcccggccgacaagcgcagcttcatcccctccctggtggagaaggagaaggtctctcgcatggtgcacgccatcaagatgggctggatccagcctcgccggccccgagaccccacccccagcttctatgacctgtgggcccaggaggaccccaacgccgtgctcgggcgccacaagatgcacgtacctgctcccaagctggccctgccaggccacgccgagtcgtacaacccaccccctgaatacctgctcagcgaggaggagcgcttggcgtgggaacagcaggagccaggcgagaggaagctgagctttttgccacgcaagttcccgagcctgcgggccgtgcctgcctacggacgcttcatccaggaacgcttcgagcgctgccttgacctgtacctgtgcccacggcagcgcaagatgagggtgaatgtagaccctgaggacctcatccccaagctgcctcggccgagggacctgcagcccttccccacgtgccaggccctggtctacaggggccacagtgaccttgtccggtgcctcagtgtctctcctgggggccagtggctggtttcaggctctgacgacggctccctgcggctctgggaggtggccactgcccgctgtgtgaggactgttcccgtggggggcgtggtgaaaagtgtggcctggaaccccaaccccgctgtctgcctggtggctgcagccgtggaggactcggtgctgctgctgaacccaactctgggggaccggctggtggcgggcagcacagatcagctgttgagcgccttcgtcccgcctgaggagccccccttgcagccggcc

SEQ ID NO: 109356 - DNA, 451 bp, Homo sapiens
ataacgccagcttggacgaggccttcttcagtgagacgggggctggcaagcatgtgccccgggctgtgtttgtagacttggaacccacagtcattgaggaggttggcactggcacctaccgccagctcttccaccctgagcaacttatcacaggcaaggaagatgctgccaataactatgcccgagggcactacaccattggcaaggagatcattgacctcgtgttggaccgaattcgcaagctggccgaccagtgcacgggtctccagggcttcttggttttccacagctttggtgggggaactggttctgggttcacctccctgctcatggaacgtctctcagttgattatggcaagaagtccaagctggagttctctatttacccggcgccccaggttttcacagctgtagttgagccctacaactccatcctcaccacccacaccaa

SEQ ID NO: 109357 - DNA, 494 bp, Homo sapiens
ccgtaccggcccggaattccttgggcgacccacgcccccgtctacctattatttacaaacaatgagcttatcaccaccactacccccaaaccagatgagctcctcattaatgggagggactgcattttattcatttttatgtctccagatgtctggcgtatttgtttgatgtataaattgaacatttttttcaatcttcatgatgggtttatataatagaaattttttctatcaaaatgataaactatccattttttttcccacccagctgtttcttaagtatttgtatttcctgtacctgaagtgtagcgaaaatgctactatgactcttcctggaatacacccacctaccttgaaccaggtgagattatttttttactttgatttggtgctgggaaaaatctgtgaaaaaaagatgtattcaaggtcagcacctgcattccagagctgacttctttgttcctaggccgtaggaatcccttcctcataaacca

SEQ ID NO: 109358 - DNA, 182 bp, Homo sapiens
aaaaaaacacaagcacatgctgcccagtggcttccggaagttcctggtccacaacgtcaaggagctggaagtgctgctgatgtgcaacaaatattactgtgccgagatcgctcacaatgttttctccaagaaccgcaaagccatcgtggaaagagctgcccaactggccatcattagcacct

SEQ ID NO: 109359 - DNA, 406 bp, Homo sapiens
  misc_feature (1)...(406): n = a,t,c or g
cgtgtacaaacttgtgacctcagtgtttatactgagacatgtcagattagctcatatttattttaattataatggtcatattgtattccagataaaatgaaagatgccatcatagctaaattggctaatcaggctgcagattattttggtgatgctttcaaacagtgtcaatacaaagatactctccccaaggtcagttattgtttttataaacacttgcttactttgcatgtgaaatatttagacttttttgtgtataagaagcaagttgaaacttataaagaaatttgaagttttaatagagttatctgaagtatatagtagaaatagcnnnnnnnnnnnnnnaattaaaaaggccggaccattttttttatgttaaggggaggcctttgcctttacctttaag

SEQ ID NO: 109360 - DNA, 523 bp, Homo sapiens
cgaccatagctgcatcccaccataactggcgaatttttggtagagatagggtatggctatgttgcccaggctggtctcaaactcctgggctcaagtgatctgcccgcctcagcctcccaaagtgatgggattacaggagtgaaccactgtgcccagccctatttcctcacctttaaaatgggaataagtacagccctcattggttaggccgctgtgagttcagtgagtgaatccacctgcttaaacccgatagcaggtgttctatcggcagaggtcagctgccaccactccttctatcagtgtggcaagagctgctacaaataaacaagaaaatgacaaacagcacaggagaaaaatggtcaaaaggtttgtaccaacacagaagaggaatgtgaatgaatggtcagcaatcatataaggagatgtttaagacaggtacagtggctcatgcctgtagtcccagcactttgggaagccaaggtgggtggatcgcctgaggtcaggagttcgaggccagcctggg

SEQ ID NO: 109361 - DNA, 408 bp, Homo sapiens
  misc_feature (1)...(408): n = a,t,c or g
ttttttaaaaaatagctgctgcttttcccccaagattataattccataagccctagtccctgcctttatagttaaataaaaccatcctaattctcaaaacagaagagaaaaggtgggaggaactttcagtctgctcccagaaggaatatgctgaaaggcccacatgagaaagaagcagcagttcgaaaacgcaagcaagaggaacaaatggaacctgagcagtaagtannnnnnnnnnnnnaaattttgggttctttttaaaggctagcatggaatttttaaataatagactttcattttccagactttatgaagccttttgaagaagtgacttttcccatgtgttagaaaaatcttcaatatatgatgatgatcttatttcaggcttcattctcttctgagaggatg

SEQ ID NO: 109362 - DNA, 389 bp, Homo sapiens
  misc_feature (1)...(389): n = a,t,c or g
ttttgggaggccgaggggggaggcccccaggggcacagattttaaacccccggggggccccccggggaaccccccgttttttaaaaaaatccaaaaattacccnnnnnnnnnnncggggccccctttttcccatttcccaagagcttaaagcaaaaaaaagggtttacccccgaagggggagggtccaaaaacccaaaattggccccccccaattcacccgggggnnnnnnnnnnnncccccctccccnnnnnnnnnnnnngaaagaaaggaaggnnnnnnnnnngaaaggcaaagattggaccagtctaccctgtaaaaatgtgattctttgctagtacctttgtccttcttgaaatccagtgcatcttgtttatctgtgacaatttc

SEQ ID NO: 109363 - DNA, 415 bp, Homo sapiens
  misc_feature (1)...(415): n = a,t,c or g
ttcccccccgggaaaaccaaggatttttttccgaattttgggcggtttttttttaggcccggggttttggttccccccccttgttgggttttggtttgtcccccttcggggagggccccttttcccccccctaaaaagaaccaatgtcccccgggggtttttttttgggggggggttgtttttcttaattttaaccagaaaacnnnnnnnnnnnnnnnnnnnaaaagccagnnnnnnnnnnnccccccgggggcccccaaaagggaaccccctttccnnnnnnnnnnnnnnnnnnnnnnnnnnnnnnnnnnnnnnnnnnnnnnnnnnnnnnnnnnnnnnnntggagtgaccagagctcactgcnnnnnnnnnnnnnnnnnnnnnnnnnnnnnnnnnnnnnnnnnnnnnnnnnnnn

SEQ ID NO: 109364 - DNA, 392 bp, Homo sapiens
agttcccagaggtcctgggacaggggagaagggaggtcagggtcacagagagagaggcaggaagtagcaaaggcagagtctgcctgtgcaccaagcccgaccccccttgctctgcccctgggccgtctctacctcaccccctcagctcccccggtctgagagaggggaggccgagcaggctgcagacccagccacatggggcaggggaaggagaggctggcattggtggagccacccactgcactgccagtcatacaaagaagtctatcacacagaattatgtgcagtattttttttttttgagacagagttttgatcttgtctctcaggctgggttgcaatggcacaatctcggctcactgcaacctccacctcctggcttcaagcgattc

SEQ ID NO: 109365 - DNA, 386 bp, Homo sapiens
  misc_feature (1)...(386): n = a,t,c or g
ttttttttttnnnnggtagagatggggtttcaccatgttggccaggctggtctcaaactcctgaactcaagtgatcttcccgcctcagcctcccaaagtgctgggattacaggcagccctaacgtttttatgtagtgtatattagggcttaccaactgtcatacacaatttggagtccttggtggttgcaggtttacctaccagaaaaggaataaaacaatttatagagtgttttccttagtaatatttcaaaaccacaattctacttgttactatttttactggtctgtaagactataaaatactactttaaaaaagaaattttcatttaaaaagcttaatgcaataaaaacccacgcgtccgcggacgcgtgggtcgacccggg

SEQ ID NO: 109366 - DNA, 431 bp, Homo sapiens
  misc_feature (1)...(431): n = a,t,c or g
acccgttcggaattcccgggccgacgggaggcgggaggccctgaccaacatgcgctctacgagaagtaccatctcaccagccagcatgggccgctggggctggcgctcctgctggggggcggcagtgcctacatggccctcatcatcattgccttcagccagggggtgagtgagggcagcccctgggcttcacgtctcggccccaaccttggccaagctgctatcttctcttagcctcttctgtaaaatgcttatcttctgtaaaatgctatgcnnnnnnnnnnnnnnnnnnnnnnnnnnnnnnnnnnnnnnnnnnnnnnnnnnnnnnnnnnnnnnnnnnnnnnnnnnnnnnnnnnnnnnnnnnnnnnnnnnnnnnnnnnnnnnnnnnnnnnnnnnnnnnnnnnnnnnnnnnnnnnnnnnnnnnnnnnnng

SEQ ID NO: 109367 - DNA, 406 bp, Homo sapiens
  misc_feature (1)...(406): n = a,t,c or g
ggaggcaggaggtgaaaaagacagagagagacagcaggaaaaggagaaagagctggagaaggagcaggaaaaacaaagagaaatggnnnnnnnnnnnnnnnnnnnnnnnnnnnnnnnnctagaacggcagaaagaaaaggaaaaagaactacaaaagatgaaagaacaagaaaaggaatgtgagctggagaaggaaagggaaaaattaaaggagaaaattgaacccagagaacctaatttagagcccatggtagaaaaacaagaaagtgaaaacagctgtaataaaggtttgatagtattcttcattctcttttaaaaactttacaaagagctttatgttggttacagtttgggggttgtatattttaaatatatgtaatcaatataaaagtgattgttttatgaa

SEQ ID NO: 109368 - DNA, 401 bp, Homo sapiens
  misc_feature (1)...(401): n = a,t,c or g
ggaggcaggagaagagggctgcagccagaaggccacagagggggcgggaggccaaagggcgaggtgtgctgggtgcacggaggccaggcccctgctggcaggcaggtgcaaagggcagctgatgaagcaggtccccccgccagatgccaaaacacagtgacgccaggggaagaggagctggcacaaggtcaaggtcgagatcttgctgaggtggcactgacaacccagcctccatctnnnnnnnnnnnnnnnnnnnnnnnnnnnnnnnnnnnnnnnnnnnnnnnnnnnnnnnnnnnnnnnnnnnnnnnnnnnnnnnnnnnnnnnnnnnnnnnnnnnnnnnnnnnnnnnnnnnnnnnnnnnnnnnnnnnnnnnnnnnnnnnnnnnnnnnnnnnnnnnnnnnn

SEQ ID NO: 109369 - DNA, 476 bp, Homo sapiens
  misc_feature (1)...(476): n = a,t,c or g
ctctggccggaattcccgggtcgacgggaggcaggaggggtggatggggagtgtgtgggtgctgatggctacgtgtnnnnnnnnnnnnnnnnnnnnnnnnnnnnnnnnnnnnnnnnnnnnnncggttgcatgacattatagatgtactttactcaacgctgttgaaacgtagttaaaatggcagattttgcgttgtatctgttttaacacacacataaaaaaggtgccaagcctggcatccgccttccctgccatctcgaggcgtgtcctctgagctctgctgctgcctcctgctcctgcctgctttggccagctcatttgttgaccgactccaggcttccaggcttggctgtgtgggtcctgaccattcttggcaactctctcctcagctgaactttgacctggaccggggcgtgtttccagtagtcatccaggctgtggtggacgaaggagatggtgagtgcgtcctcttccgt

SEQ ID NO: 109370 - DNA, 464 bp, Homo sapiens
  misc_feature (1)...(464): n = a,t,c or g
ctgtccgntnnnnaattccgggtcgacgggaggcagnnnnnnnnnnnnnnnnnnnnnnnnnnnnnnnnnnnnnnnnnnnnnnnnnnnnnnnngagaccgtgagtcggcagagcaggttcagaggtgtgacgagactcgcgtgggaagaagaagacactcctggaggagtcggcagagcaggcagaccaaggagttcatcttctcggagctgctgtccaacctgtactcgcgtgggaacctgcagacactcgtggaggcgttggcagagcaggcagaccaaggagtccatcttctcagagctgatgtccaacctgtactcgcgtgggaacgagaagacactcgtggaggcgtaggcagagcaggcagaccaaggatgcgatcttcttatagctagtgtccaacctgtactcgcgtgggaacgagaagacactcgcggaggcgctggcagatgaagcagaccaagg

SEQ ID NO: 109371 - DNA, 428 bp, Homo sapiens
  misc_feature (1)...(428): n = a,t,c or g
ggaggcaggagagcgacggtgggaatcgccatgtgggctggaccagctaaaggctcgcatttgcatattaaaggttgccaagccgggtctaagagccagggctttcacgctagacaagaaacatttttttggagctgcaaaaaatgcttccaaggaccccttttcctctctctctctctcnnnnnnnnnnnnccttttgggaaaagggagttccacttttgtggcccacccggaagggcagggggggaatctccgttcattgaaccctccccctccggggttaaaggaattttcttgcctaaccctcccaaaaacctggaataacaggggccaaaggggcccaccaccccccccacctaattttggaattttaagaaaaaagggggtttttgaaagtggcccaggttggtctgaaactccggacctaa

SEQ ID NO: 109372 - DNA, 461 bp, Homo sapiens
  misc_feature (1)...(461): n = a,t,c or g
ccggaattctcgggtcgacgggaggcaggagaaggaaaaagacagagagagacagcaggaaaaggagaaagagctggagaaggagcaggaaaaacaaagagaaatggnnnnnnnnnnnnnnnnnnnnnnnnnnnnnnnnctagaacggcagaaagaaaaggaaaaagaactacaaaagatgaaagaacaagaaaaggaatgtgagctggagaaggaaggggaaaaattagaggagaaaattgaacccagagaacctaatttagagcccatggtagaaaaacaagaaagtgaaaacagctgtaataaaggtttgatagtattcttcattctcttttaaaaactttacaaagagctntatgttggttacagtttggggtttgtatattttaaatatatgtaatcaatataaaagtgattgtttatgatagcatttgcagaacaaaatatgggctaaagccggg

SEQ ID NO: 109373 - DNA, 340 bp, Homo sapiens
gagaactagaacggcagaaagaaaaggaaaaagaactacaaaagatgaaagaacaagaaaaggaatgtgagctggagaaggaaagggaaaaattagaggagaaaattgaacccagagaacctaatttagagcccatggtagaaaaacaagaaagtgaaaacagctgtaataaaggtttgatagtattcttcattctcttttaaaaactttacaaagagctttatgttggttacagtttggggtttgtatattttaaatatatgtaatcaatataaaagtgattgttttatgatagcatttgcagtacaaaatatgggctagagccgtgttttctaattct

SEQ ID NO: 109374 - DNA, 407 bp, Homo sapiens
  misc_feature (1)...(407): n = a,t,c or g
cgcaatccccagattcgagggtcgacaggaggcaggagaaatggaagatgagtgtgatgtaggaagtaaaattaacaggatttggtgataagttggttatggagatgaaggacaaggaagtgtgaaagatgacttccaagtatgtgacttgtatgactggacggcctatggttgtatttacattagaaaaatgtaggacaactagtagaggattgttcaaatttaaaatgtacagtcatataattggatgctacttaagcaggaaaagctgtgtagataatgaacgatgggccgggcacagtggctcacatcagtaatcccagcactttgaggggccgaggcaggnggntcacgaggtcaggagatagagaccatcctggctatcacgggtgaaaccccatctttta

SEQ ID NO: 109375 - DNA, 462 bp, Homo sapiens
  misc_feature (1)...(462): n = a,t,c or g
cgtgtaccgtccggaattctcgggtcgannnnnnnnnnnnnnnnnnnnnnnnnnnnnnnnnnnnnnnnnnnnnnnnnnnnnnnnnnnnnnnnnnnnnnnnnnnnnnnnnnnnnnnnnnnnnnnnnncccctgttaaagaaagatggtgtcagtaaatacatcatcagtcacatcagtcggtacaccatcagtcagtacaccatcagtcacatcactcagtagaccatcagtctcatcactcagtacaccatcagtcacatcagtcagtataccatcagtcacatcagtcggtacaccgtcagtcagtacaccatcagtcacatcagtcagtacaccatcagtcacatcagtcagtacaccatcagtcacatcagtcagtacaccatcagtcacgtcactcagtacaccatcagtcacgtcactctgtacaccatcagtcagtacaccatcagtcccatcact

SEQ ID NO: 109376 - DNA, 273 bp, Homo sapiens
ttttttttttgagatggagtttcactccagcttgggtgacagaatgagactccatctcaaacaaaacaaaacaaacacaaatgaaagggaaggaagtggattactgatgataactaaggtatggaatcaacctgagtgttcatcagtaggtgaatggagaaagaaaatgtggtatatgtacacaatgaaatgccattcagcccttaaaaataaagtcttgttatttgcaacattcatgaatctgaaaggtatgctaagtaaacccagcacaga

SEQ ID NO: 109377 - DNA, 458 bp, Homo sapiens
  misc_feature (1)...(458): n = a,t,c or g
ggtaccgttccggantcgctggtcgacgatttcgtgtagatttgaaagtgcgaagagtatcgaagagcggaaagaacagacccggaatgccagggccgaggtgttgcgccaggctaaagccaattttgaaaaagaagaaaggcgtaaagaacttaagcgacttcggggtgaggatacatggatgctacctgatgtgaatgagagaattgaacagttctcacaggaacactctgtgaagaaaaagaagaaaaaagacaagcattcnnnnnnnnnnnnnnnnnnnnnnnnnnnaaagagcaagaaacagaaatatgaaaaaaacaatgagtcatctgatagctcatcaagctctgaagatgagtgggttgaggctgttccatcccagactcctgacaaggaaaaagcctggaaagtgaaagatgaaaagtcaggaaaagatgacacccaaattatcaaga

SEQ ID NO: 109378 - DNA, 478 bp, Homo sapiens
  misc_feature (1)...(478): n = a,t,c or g
cgggnnnnnnnnnnnnnnnnnnnnnnnnnnnnnnnnnnnnnnnnnnnnnnnnnnnnnnnnnnnnnnnnnnnnnnnnnnnnnnnnnnnnnnnnnnnnnnnnnnnnnnnnnnnnnnnnnnnnnnnnnnnnnnnnnnnnnnnnnnnnnaggatgcacatgggaggatgcacagaggaggatgcacatgggaggatgcacatgagttgtacagaatggatgagtccctacaaacaggagactccttcctgtcacaacctgagaccccctcttcctgtcacggcccgagaccccctcttcctgtcgcagcccgagactccatcttcctgtcacggcccgagaccccctcttcctgtcacagccggagaccccctcttccagtcacggcccgagaccccctcttcctgtcacggcccgagaccccctcttcctgtcacggcccaagacacgaaatcgtcgaaccgggaattccggccgagtaca

SEQ ID NO: 109379 - DNA, 259 bp, Homo sapiens
tttcgtgaggaagaggtgcatcatttctttaggcttctatcctcaaagagtggaataggaaatacatgacaataaagccaaaatttaagacttgtatttggtgttcatttcagctactccccatattcatgcaacttggatcacgggagctgatgatgttctatattgacctgaagcaaactaatgatgtcctgcttacatttgaggcactaaaggtaaagttcttaaaaatattgggtcaccggggattttttaaaaa

SEQ ID NO: 109380 - DNA, 302 bp, Homo sapiens
gttcttcctgattacttaagaggggcctgactaatgtccagcatggttggggacccaggcccctcaagccctggaagtcccttgcctggggtcatccagtctcctccctcaaagggctctcactccccaccgccgctccctctcctcttcctgctgctgagagacgagagaccagcagaaagagacttggagagacggagacacagaggcagatggagaatgctgggcgcccgggaaagcccaggaaggagcccgggccacgggaggagcgggtccggagacgaaatcgtcgacccgggaat

SEQ ID NO: 109381 - DNA, 1280 bp, Homo sapiens
taaatagagtggggtttcaccgtgttgcccaggctggtctcgaacccctgggctcaaatgattctccagcctcggcctcccaaagtactgggattacaggagtgagttaccaagccaggcctggtcagggctctttgaaatgttttccttgtcagactgttaccctttagagacaaggcctcacaaaccaagtaaacacttctatccatcactccttacagtcggcgatggcttcatgctgggctaaatagtatacaacaggagaaaaggctcagcaatggcagtgaggaaaaatgctcccttccctgaaggacaatgagtctttccagaacccaggagacaggggagaccagccttaggagaaagcacatgtacagcattgctcaatgctgtttcttggagcaatctgaatgtgctaaatattcagaaaattcctgctgccgagggaaaaataaccaaactcatactattttcctagaagttccttacttaaataatactaccccaaagaggagtgaaaaccttaaattcctcaaatctggatgaacaacataatggctgtattgggagcaggcacacagaacatagcccactgagtgtacagttttggaactggagagctcttggtagagcagggatctgaggagtccacacaatctgagctgctttccaccaaggcatgtcaccccttatacatattcactggaacaaagacagctgtattttctagtatatctgcacttctaggggcaggtgggattacaggagtgagttaccaagccaggcccagtcagggctcttggcaatgctgtcccatagacactgctttgaagatagctataagggaaagtggaattgaaacgaaacaaatgaactggggagaaggatgagtggaacaggtcaactccagagtaaaccatacaggtggtttttaaatcgtgaaaaaatacatttctattcttcaaaattttatttataaaattctaggcctctaccatgtaaatatgccaaagccaaataagggtttcttaaaagtaaaagagacttcattagctgttggtgtatcaatgggaacgcagaacaggcatttctgctgtgcagttagttctgctatgcactgtgcgtccagcacagccaggcgagggaggacctcagacatctcccctgcagggtgcaacagactgagagcaatctatgccccggctacacatcactgagaacccatgtgtgcacctgctagaaaaacagatacaccaatgtttatagaactggaactcctg

SEQ ID NO: 109382 - DNA, 411 bp, Homo sapiens
  misc_feature (1)...(411): n = a,t,c or g
tttcgnnnnnnnnnnnnnnnnnnnnnnnnnnnnnnnnnnnnnnnnnnnnnnnnnnnnnnnnnnnnnnnnnnnnnnnnnnnnnnnnnnnnnnnnnnnnnnnnnnnnnnnnnnnnnnnnnnnttatattgtgttttataaaagcatttatctctatcgaccaaacttctttttagaactgannnnnnnnnnnnnnnnnnnnnnnnnnnnnnnnnnnnnnnnnnnnnnnatatagagtgaacttagcccacccatgttgatagaacaccctcttagatgtcttgttctgtgtgcccaagtacatgccggaatgtggagaagaaatgggttctctctagtaaaccaggtaagtgttttctaattctatgaagagatttcattccattcttggcttctgtgaaggttgtaattttn

SEQ ID NO: 109383 - DNA, 397 bp, Homo sapiens
  misc_feature (1)...(397): n = a,t,c or g
tnnnctgtttggtggttaaatagaaaccagttagggttagacaggtactgttaaggtttttgatcaattttccttcttttaggcaagaaacaaaagaagcacagctttatgctgcccaggcacatcttaaactcggagaagttagtgttgaatctggtaatgcattttccattttatactctcctactctcttcagctccctcgttcttcctctaatagattctctggaaccgaacttgatctttaaaaagataggtctgtgttccctgtagaccctggaacaatgaacagtctcttccaagtggcactcagtcttccagtagnnnnnnnnnnnnnnnnnnnnnnnnnnnnnnnnnnnnnnnnnnnnnnnnnnnnnnnnnnnnnnnnnnnnnnnnnn

SEQ ID NO: 109384 - DNA, 242 bp, Homo sapiens
catcgggaaaagatgttgctcaactcagacattttttggaagccccaggaggctgtgcagggtgagccccttaatccccccgtacacatatgtggtcctcccagtccctctcctcctggtttttgctgcagctggcttgagcctggtacagttatttaggcccagaccttgccctaggggtaggcagtcaaccaaagacaaataggtggctctcaaactgaagaaagcctccttccttaaaa

SEQ ID NO: 109385 - DNA, 469 bp, Homo sapiens
tttcgtggactccccgcgcttcagggcgaccattgacgaggtggagacggacgtggtggagattgaggccaaactggacaagctggtgaagctgtgcagtggcatggtggaagccggtaaggcctacgtcagcaccagcaggcttttcgtgagcggcgtccgcgacctgtcccagcagtgccagggcgacaccgtcatctcggaatgtctgcagaggttcgctgacagcctacaggaggtggtgaactaccacatgatcctgtttgaccaggcccagaggtccgtgcggcagcagctccagagctttgtcaaagagtgagtggcccccagggctgggggaagaacactgaggccacgctccctcccttggaggggaagggggtctggggcagagcagaagcaccttgtgcccaggcctccaagctgtgcagcggctccacaaggcaaaaagctcagaagcagacagccg

SEQ ID NO: 109386 - DNA, 365 bp, Homo sapiens
  misc_feature (1)...(365): n = a,t,c or g
ngttcccctgttaaccaagatgttttccctttcccggccttgtgaaccggccccctcaacctttcaaaatggttaaactacaagggnnnnnnnnnnnggccgggtagcnnnnnnnnnnnnnnnnnnnnnnnnnnnnnnnnnnnnnnnnnnnnnnnnnnnnnnnnnnnnnnnnnnnnnnnnnnnnnnnnnnnnnnnnnnnnnnnnnnnnnnnnnnnnnnnnnnnnnnnnnnnnnnnnnnnnnnnnnngctcaaccgctttcaactggcgctgcccagccgcctggtcaaagcccaaccccctgaggcagatggcggcaaatgcgactgcgcacccaggttcaggcatggaccgcgcgtccacgaaa

SEQ ID NO: 109387 - DNA, 404 bp, Homo sapiens
  misc_feature (1)...(404): n = a,t,c or g
ggaattcccgggtcgaccaagcggctcaagatgtctggcggggccagtgccacaggcccaaggagagggcccccaggactggaggacaccactagtaagaagaagcagaaggatcgagcaaaccaggagagcaaggatggagatcctaggannnnnnnnnnnnnnnnnnnnnnnnnnnnnnnnnnnnnnnnnnnnnnnnnnnnnnnnnnnnnnnnnnnnnnnnnnnnnnnnnnnnnnnnnnnnnnnnnnnnnnnnnnnnnnnnnnnnnngttctttccttcatcgtcagggtcagcatccactcctcaagaggagcagaccaaagaggagttgttgctcgattggaggcagagtgcagaagaggtgattgtcaagcttcgtgtgggagtaggtcccctgcagcn

SEQ ID NO: 109388 - DNA, 407 bp, Homo sapiens
tttcgtgagggaatgaggctccaacacacccagtatgtagagctcagtgacttctcttgtatttggggagttccagtgtctgtcattgaggaggggggagcatttacagagcagatagggccccctgcctctctcacccatcctctgggcagcaaggcttcatgggaaatttgggagacaccttgatggggtattttacatccaccatatggatgtaaaatccatctacttggagcaaaaggaataggagcaatgttcttggctgttaacggtcacccttggcctggcgcggtggctcacgcctgtaatcccagcactttgggaggccaagatgggcggatcacgaggtcaggagatcgagaccatcctggccaaaatggtgaaaccctgtctctactaaaaataca

SEQ ID NO: 109389 - DNA, 452 bp, Homo sapiens
  misc_feature (1)...(452): n = a,t,c or g
ttctcgggtcgacgatttcgtatgacctgaagacagggagagaacaccatctacaagccaaggttcacctgaggctaccacaagccaggagagaggcagggaacagatttttccttctggggaannnnnnnnnnnnnnnnnnnnnnnnnnnnnnnnnnnnnnnnnnnnnnnnnnnnnnnnnnnnnnncttgtctccaatgttctcattttctcctgcaccaacatcgtgggtgtctgcacccactatccggctgaggtctcccagagacaggctttccaggagacccgagagtgcatccaggcgcggctccactcgcagcgggagaaccagcagcaggaacggctcctgctgtctgtccttccccgtcatgttgccatggagatgaaagcagacatcaacgccaagcaggaggatatgatgttccataagatttacatccagaaacatgaca

SEQ ID NO: 109390 - DNA, 600 bp, Homo sapiens
atgttcgacccacgcgtccgcggacgcgtgggcgtccggttaccttcaggaagattggataaccaagaaatgactaatcaagagtctgccgtacatgtgaaaatgatgccagaattccagaaaagttcagttcgaatcaagaaccctacaagagtagaagaaattatctgtggtcttatcaaaggaggagctgccaaacttcagataataacggactttgatatgacactcagtagattttcatataaagggaaaagatgcccaacatgtcataatatcattgacaactgtaagctggttacagatgaatgtagaaaaaagttattgcaactaaaggaaaaatactacgctattgaagttgatcctgttcttactgtagaagagaagtacccttatatggtggaatggtatactaaatcacatggtttgcttgttcagcaagctttaccaaaagctaaacttaaagaaattgtggcagaatctgacgttatgctcaaagaaggatatgagaatttctttgataagctccaacaacatagcatccccgtgttcatattttcggctggaatcggcgatgtactagaggaagttattcgtcaa

SEQ ID NO: 109391 - DNA, 243 bp, Homo sapiens
ttttttaaagagacagggtctccctatgttgcccaggctggtctcgaacttctggcctcaagtgatcctcctgcctcagcctctcaaactgctggaattgcaggcatgagccaccaccacacctgacccagtggtgatttctcaagagaaaaatcagttaataaaagaatgaaagaagagaaggcaagggcaggagatgggacagagtggcttgtatcctatttgaatttgttaaaggaggaa

SEQ ID NO: 109392 - DNA, 314 bp, Homo sapiens
cgtaagtgcggtggaatttattgcaagaatacagctatagtaattatgactgtggggtattggtggatggaaagacacatcaatcaatggaagacaatagaggacccagaaataccccatgcaatacagtggaggaaggatagttttgtcaacaaatggtactgaagcaaattgatgttcataggaaaaaacaaaaaacaactccacagaaattggctttctgtgatctgatacagcctgcctagaagcagaagttctggctgcccatcacactgtttttagtaaacctagagttttatttgaaatattgagtc

SEQ ID NO: 109393 - DNA, 390 bp, Homo sapiens
  misc_feature (1)...(390): n = a,t,c or g
aagagggcccttcctttttaaaggtttttcctttccccgcgttttccaaacaaaggttttcctggccgtgaaccccgcaaataatcccgtttaattggccccaccaccttccaaggtcaggggcaggtttaaaaaaaaggggggtggcgagaacccggggtcctccccccgccggggcccctaaaggtttatgggtcccttgggcaagaccgctttcccggggccctttaggtcccccatgcctgggcataaagttcccggcccctcctttaaaaatttccttgnnnnnnnnnnnnnnnnnnnnnnnnnnnnnnnnnnnnnnnnnnnnnnnnnnnnnnnnnnnnnnnnnnnnnnnnnnnnnnnnnnnnnnnnnnnaattctcctgcctca

SEQ ID NO: 109394 - DNA, 426 bp, Homo sapiens
  misc_feature (1)...(426): n = a,t,c or g
ctgtgcctctgcacaagctgaaacctgcccctccatgtcctctcctcatcacacttgaagacagctcaggtgtcacttccttcaagaagccattccnnnnnnnnnnnnnnnnnnggaaaaagagcttactggaaccccccaggtggaggggcgggggggcaatttgggtaaattaaaccaatccccaccctttgggcttaagccgattttttgcccaaacccccgggagagcggggaataagggggcccccccatccccccccctaatttttggttttttaaaaaaaaacaaagtggccccaggtgggcaaggcgggcttgaaatcccgaacccaagggagacgcccccccttggtccccaaggtggggggggtaacggggggagcccccaatccccgcccggaagcccttctttaaaccggggga

SEQ ID NO: 109395 - DNA, 456 bp, Homo sapiens
  misc_feature (1)...(456): n = a,t,c or g
actccggccggagttcccgattcgaccacgcgtccgcaatgcctgttccagagaaaagggtccatgacaatgagcatccagtggaaaacacgccagcttcaaagcnnnnnnnnnnnnnnnnnnnnnnnnnnnnnnnnnnnnnnnnnnnnnnnnnnnnnnnnnnnnnnnnnnnnnnnnnnnnnnnnnnnnnnnnnnnnnnngaaagggaattatttttgatgagtcattaaagtatatccattcccagnnnnnnnnnnnnnntnnnnnnnnnnnnnnnnnnnnnnnnnnnnnnnnnatnnnnnnnnnnnnggngggggccccnnnnnnnnnncggcaaaannnnnnnnnngggccccaaaaatttattttgggggccgcgttttaaaaacatgggaaaagggaaaaacccgggggacccacaataaatgagcgnnngnccaagattggcttgggana

SEQ ID NO: 109396 - DNA, 462 bp, Homo sapiens
  misc_feature (1)...(462): n = a,t,c or g
nnnnnnnnnnnnnnnnnnnnnnnnnnnnnnnnnnnnnnnnnnntccagnnnnnnnnnnnnnnnnnnnnnnnnnnnnnnnnnnnnnnnnnnnnnnnnnttactttcttcttcttcnnnnnnnnnnnnnnnaaaaacgaagcccggggggaaaattgggccaaaaaagcccctggcccccggggtaaaggggaatttttgggttaacccccccgaaaagggggaaaaaagggggggggccccccgccccaggaaattttgggtttttnnnnnnnnnnggggtttaaaaggggggccggggaaaaccaaatccttgggcctgggaaacccccctcccgggccccccaaatggggggaaaaaaggggaagaaccaagggccccacccccttaattttttaaaaaaaaggcgcccggggnnnnnnnnnnnaaaannnnnnnnnnnnnnnnnnnnnnnnnnccccccc

SEQ ID NO: 109397 - DNA, 370 bp, Homo sapiens
cttcagcgtacgtgtgcttcagccagtgtgtgtgcttcagcgtctgcgtgcacccacaacatacacccaggctccaggcagaaagcagccaggcaactcaggccgatgcctccagcagacaaggttgcctgagatgatcagggcctggtggccctggaaaccagatggacacttctgcctctttataggacttcactgaggatgtcaactgtgcttttgagttcctgctgaaactcacccccttgttggacaaagctgaccagcgctgcgactgtgactgtacaaacttcctgctccaagaatgtggcaagcacgggcttctgtctgaggccagcgtcaacaaccttatggctaagcgcaaagcggaccg

SEQ ID NO: 109398 - DNA, 373 bp, Homo sapiens
  misc_feature (1)...(373): n = a,t,c or g
nnnnnnnnnnnnnnnnnnnnnnngcccgtgcccggcctgactctgatttgtagttcagattntgcgggaattaggcaggtccctgagtgcccaccctttggatggggactgagcactccccggtggccacacatcaggccccagagccgctcccctcaactcaccgcctcacccttcccaggacctgctgaagcacacacctgtggaccacaccgactacccgctgctgcaggatgccctccgcatctcccagaacttcctgtccagcatcaacgaggacatcgacccccgccggactgcagtgacaacgcccaagggggaggtgagctcagagcccggcacggcccctcacccaggctgagaagtatcaggt

SEQ ID NO: 109399 - DNA, 579 bp, Homo sapiens
  misc_feature (1)...(579): n = a,t,c or g
ggcctcgtgcnnnnnnnnnnnnnnnnnnnnnnnnnnnnnnnnnnnnnnnnnnnnnnnnnnnnnnnnnnnnnnnnnnnnnnnnnnnnnnnnnnnnnnnnnnnnnnnnnnnnnnnnnnnnnnnnnggcaaaagaaaatttggaaggaaggggggtatgccttctccattgtctgggattccatacacctgctgggacaggggcctcacagttttgtttttcgaaggcctgcaccctggttcgggggaatgctgaggggtttttcaagaacatccacaggaacaacgtcagcatgcccagggtcgccagccacactcggggacccgagcaacaagggaaaggtcagtgaaaaacctgcccagccaccagtcattttagcgacagcccctccctgaaatataccatgtacccagttttcacacaatctcaaatttcctgctgcttctccttaaaaatgaaaatgtatgatgtgggatggtgtggggcagtaatgattcatggtcaatttttaaacccccntcagatctggaaggcaaaaacagggataaaatttcccaagtattttatttattttaaaggcgg

SEQ ID NO: 109400 - DNA, 445 bp, Homo sapiens
  misc_feature (1)...(445): n = a,t,c or g
gcnnnnnnnnnnnnnnnnnnnnnnnnnnnnnnnnnnnnnnnnnnnnnnnnnnnnnnnnnnnnnnnnnnnnnnnnnnnnnnnnnnnnnnnnnnnnnnnnnnnnnnnnnnnnnnnnnnnnnnattgaagctttatataaatgcactatcctgtctgtgtcctcccataatgtgctcttttcactcattgttaagtgtctgagatctattcatgttgacatatgcaactgtgtgtcatgcatttttaactgctttaaactcaccattgggtgaatacacagtttatctgttctcttcttgatgagcattgggcttttttaaatttatgagactatttattcttttctccccaggcttggcttggactcatcgtcaacagcagcagcatcatcatcatcaccatcatcatcatcatcatcatcatcatcatggggtnnngngctggaca

SEQ ID NO: 109401 - DNA, 452 bp, Homo sapiens
  misc_feature (1)...(452): n = a,t,c or g
ctcgtgtggtggaattcnnnnnnnnnnnnnnnnnnnnnnnnnnnnnnnnnnnnnnnnnnnnnnnnnnnnnnnnnntatnnnnnnnnnnnnnnnnnnnnnngggggaaatgggggtttagggggccccgggcttccttttttttaaaaaaacccccccccttgccctttttaaaaaaccccnnnnnnnnnnnnttttgnnnnnnnnnnnnaaacccnnnnnnnnnnaaaaaaaagggggggcccccgggcccaaatttaggggggggnnnnnnnnnngccccaaaaaaacctttttttgccaaccccgggcccccccccggggggcccgttttaaaaaaaaagggggcaaacccaccttttttaaataaccgggggggttttttaaaatcccccaaggggggggtaaaacccaaannnnnnnnnnnnnnnnnnnnnaaagaaaaattttttgg

SEQ ID NO: 109402 - DNA, 457 bp, Homo sapiens
  misc_feature (1)...(457): n = a,t,c or g
gccagtgcggtggaatttattggctatggttctaaaggataaaacaaccgaagctcctaagtcaaactaaaacatgctgtctcatgtttcaaattttaacttgttcttagatgattagtaactatgacactcaactcaaattacatgtatttcccacagaactctgaggagtgtattataaatgagataactggggaagaatctgtgaaaaaacctcaaaccctcatggaggtaagttgataatcatttgtcctgaatttttaagtcctggagggagggctttaaaacctgcacctgagnnnnnnnnnnncnnnnnnnnnnnnnnnnnnnnnnnnnnnnnnnnnnnnnnnnnnnnnnnnnnnnnnnnnnnnnnnnnnnnnnnnnnnnnnnnnnnnnnnnnnnnnnnnnnnnnnnnnnnnnnnnnnnnngcacctgagctttgttttcacattaatac

SEQ ID NO: 109403 - DNA, 461 bp, Homo sapiens
  misc_feature (1)...(461): n = a,t,c or g
ccacatgcattaagagtctcatttntgctgtaaagccctttatttcttgttgtcttaaggacaagatatcttgagcctgctttaatttggcaaaaatgtcttcctctgctacacaaaccgatgaatgattggaatccttgtggagactgcaacgtcttctctttccccttcatcgttttataaatctatttgagtttaaaggatccccatgatgctgtgagggtcagctgggcagacaactctgtccctaagaaccaaaagacgtctgaggtgcgactttacaccgtccggtggagaaccagctttnnnnnnnnnnnnnnnnnnnnnnnnnnnnnnnnnnnnnnnnnnnnnnnnnnnnnnnnnnnnnnnnnnnnnnnnnnnnnnnnnnnnnnnnnnnnnnnnnnnnnnnnnnnnnnnctagcgccagtccagtctgtcgagtatcagtcttcacacgcctg

SEQ ID NO: 109404 - DNA, 415 bp, Homo sapiens
  misc_feature (1)...(415): n = a,t,c or g
aacaatgatagcctcgtannccgcgtggngtaattccacctgtaaaatgaagctagttataatgctnnnnnnnnnnnnnnnnnnnnnnnnnnnnnnnnnnnnnnnnnnnnnnngagagagaggaataagggaaataatatatatagcacatttcacatagcacttgacacacagccctcatatggtatttgcttttatttttggcgcaaatatttgtatatttctgagcataccactttctttcaggggaagatataggactgttaacacacaatggagctggtaaaagcacatctattaagatgatggctggagacacaaaaccaagtgcaagacatgtgattttgaaagggagcggtggaggagaacccctgatctttatggggtactgccctaaagacaatgcctctgccgc

SEQ ID NO: 109405 - DNA, 443 bp, Homo sapiens
  misc_feature (1)...(443): n = a,t,c or g
agcccggtggaattcggcaagtgcggcctcccggagatcttcgaccccccggaggagctggagcggaaggtgtgggaactggcgaggctggtctggcagtcttccagtgtggtgttccacacgggtgccggcatcagcactgcctctggcatccccgacttcaggtctgtgattgtgcaggggaagtcgaggcaaggcctaccaggctgccagaggcttccctgcgagccacacacatctgggaatgagaacacatccatctgctttcctcctggatgtgtcctgggtactccctttaagatgtgtcccttnnnnnnnnnnnnnnnnnnnnnnnnnnnnnnnnnnnnnnnnnnnnnnnnnnnnnnnnnnnnnnnnnnnnnnnnnnnnnnnnnnnnnnnnnnnnnnnnnnnnnnnnnnnnnnnnnnnnnnnnnnnnnnnnnnnn

SEQ ID NO: 109406 - DNA, 490 bp, Homo sapiens
  misc_feature (1)...(490): n = a,t,c or g
agggggcccccttttttttccaacattaaaaaatttgcccggcccggtgggtccatcccttttccccccccctttgggggcccaggggggccgattcccctaggtccggagtttcgggcccccccggcccaccttgtttaaccccgnnnnnnnnnnaaccaccaaaaaatttacccnnnnnnnnnnnccccccccgtttttcccacttcttgggggggttaaaccagaaaatccccttaaccctggaggggggggctcccattaacaaaaattcccccccttccttcccccctgggttaaaaaaccaaactcccttttcnnnnnnnnnnnnnnnnnnnnnnnnnnnnnnnnnnnnnnnnnnnnnnnnnnnnnnnnnnnnnnnnnnnnnnnnnnnnnnnnnnnnnnnnnnnnnnnnnnnnnnnnnnnnnnnnnnnnnnnnnnnnnnnnnnnnnnnnnnnnnnnnnnnnnnnnnnnnnnnnnnnngaattcc

SEQ ID NO: 109407 - DNA, 412 bp, Homo sapiens
  misc_feature (1)...(412): n = a,t,c or g
nnnnnnnnnnnnnnnnnnnnnnnnngtatttttttaacttgttagtctttattaaacatgggtaaagatagagttccacactgcgccaccctctggatcacttagcagccttgtgtgggatcggtgagatcttctgtgctgatcttggagaaaccggagcgcctgcagcgtattgacaccagaatgaacaagcgccgctgcttcccgcttccgcttgggtctcttggggccgggcagtgtggggtttggggagagagctggttccgcgagttctgacggcgtgttctggacgcacagacagactgtgatcctctcgtgagaggaggatagtgtacagtgttgcccttctcttctaggtacctggtgacctttagccccctgatggacacgcaggatgaccctcaggccatan

SEQ ID NO: 109408 - DNA, 409 bp, Homo sapiens
  misc_feature (1)...(409): n = a,t,c or g
nnnnnnnnnnnnnnnnnnnnnnnnnnnnnnnnnnnnnnnnnnnnnnnnnnnnnnnnnnnnnnnnnnnnnnnnnnnnnnnnnnnnnnnnnnnnnnnnnnnnnnnnnnnnnnnnnnnnnnnnnnnnnnnnnnnnnnnnnnnnnnnnnnnnnnnnnnnnnnnnnnnnnnnnnnnnnnnnngccccacccgcagggtaccacaggccagcccgggcttgggggggttgccaccccttgttaaaaccccgaccccacaggtcctgaaggccttgttgccgttaagggccctaaagaaccggggggaacccgccgggaccttgatcttaaaaacccaccaggccctgaaccgccgggacctgacttttggggccgggcctttttattacaagttgggggccgttgaccagaacan

SEQ ID NO: 109409 - DNA, 282 bp, Homo sapiens
agaaacaggatttcaccgtgttgacagagctggtctcgaactcctgacccaccttggcctcccgaagtgctgggattacaggcgtgacgactttttaaatatccatgaagaacagaccattgaccataattaaatcagtgtatttatttagtccatttagtctgaggtaactagttattcttgttttgttgatcttgggttaagcagtctactgccatcacatgtctgctcctgaactgaaatgatgactcaattacttgattcagtctaagagcaggtgtc

SEQ ID NO: 109410 - DNA, 424 bp, Homo sapiens
  misc_feature (1)...(424): n = a,t,c or g
tcgcgatcgcttcacagccatggtctggtgggccatcacttttcctgtgttcggcttcttcttctgcatcatctggtccctggtgttccactttgagtacacggtggccactgactgtggggtgagtgccagctccccagcccctgggtcagggccaggtcaggaggtggcagttagggtagaattagatagtggagaggaagtggaggatcagagagagggaaagggacaaggggatgggggaagggtaggtaagtcagagtcacagataattcatggggggagactcagagagaatagaatcacagccctccctgagttggaagatgatgatagaaatgcaagggagatgannnnnnnnnnnnnnnnnnnnnnnnnnnnnnnnnnnnnnnnnnnnnnnnnnnnnnnnnnnnnnnnacccggg

SEQ ID NO: 109411 - DNA, 432 bp, Homo sapiens
  misc_feature (1)...(432): n = a,t,c or g
ttttgaaaagatctcactgactatctagggacgactgtaatgaggcgggattggaaaaagggaggccagcagtattgaggagagaggcaggtggtagaggttgcatctggggtgtggtccaaagatcaatatcatcatcaccatcaccaccatcatcaccatcatcatgcccctgctttggcatcaataggattagtaagatgagccccttatttctaagcatcaaatgtgaacaatacaaagtgctctgtgaaatgcaaattccagacttatcannnnnnnnnnnnnnnnnnnnnnnnnnnnnnnnnnnnnnnnnnnnnnnnnnnnnnnnnnnnnnnnnnnnnnnnnnnnnnnnnnnnnnnnnnnnnnnnnnnnnnnnnnnnnnnnnnnnnnnnnnnnnnnnnnnnnnnnnnnnnnnnnnnnnnnacagat

SEQ ID NO: 109412 - DNA, 381 bp, Homo sapiens
  misc_feature (1)...(381): n = a,t,c or g
aaacttcgcaagtccgaatccaagtcttccatctcgagcaagcgcagctctgtccgcagcgacgcggccatgagcagaattagttccagcgatgccaactccacgatcagctttggcgatgtagattgtgatttttgcccggtggaagaccacgtggacgccaccaccacggaaacctacatgggcgagtggaagaacgacaagcgcaacggcttcggcgttagcgagcgctccaatggcatgaagtatgaaggggagtgggcaaataacaagaggcatggatatggctgtaccgtgtttcctgacggctccnnnnnnnnnnnnnnnnnnnnnnnnnnnnnnnnnnnnnggggggggcccttttaaaaaaccccctttttc

SEQ ID NO: 109413 - DNA, 480 bp, Homo sapiens
  misc_feature (1)...(480): n = a,t,c or g
actgaaataaataggtttgactgtgttccaataaaccttcatttacagaatcagagttagggcacaggccacagttcactgagccctgacttagagcagcaaatacgaggcagcaacgcttaaaaactatagcttccactcattagttaacgtatttctttagacattctagtttctttttgccatcnnnnnnnnnnnnnnnnnnnnnnnnnnnnnnnnnnnnnnnnnnacccagctatttagtctggagtcaggttcaccaggaggatatatatgctctgaatcagtatccaacatatggtatggtttgtcccataaccaggattcacaggtcccagaatcaaggggtggaagtgggagtggcaccactcactgttatccctactgatacactagcaaaatttaagcttcctgttcctataactttatgttatattggcctagagggaccggacgcgtgggtcgacccaagggattctg

SEQ ID NO: 109414 - DNA, 409 bp, Homo sapiens
  misc_feature (1)...(409): n = a,t,c or g
ctttaaacgccgggccctgaattttatttttggggccctattaaaaaacttttacctcgccaacacgcggtccttaaactgggtccccttaaacggcccccccnnnnnnnnnnnnnaacgttacactggtttttctcttaataaaaaacaagtacctctaaacaaagaatattccttggaaactacaggaaaagcactctcccctgaggcagccgaggcagggctcagggaccagggaagcctttgggcaagaagggcttctggggcctggagaggtggcgcgccgacacccctgcagcgccagagccggggtacgcgcaggagtgccagcggcccctgttacattcagtcttcagacccaggctcagccccggagggggcggaaagaaaataagctattgtctgtttt

SEQ ID NO: 109415 - DNA, 701 bp, Homo sapiens
cgcgggctcgtccgtgatgctctgggatcccgcgcttccgagactcgcagtctacgcgagctgcctgtttttttcctgcttggacgcgcatgagggccccgtccatggaccgcgcggccgtggcgagggtgggcgcggtagcgagcgccagcgtgtgcgccctggtggcgggggtggtgctggctcagtacatattcaccttgaagaggaagacggggcggaagaccaagatcatcgagatgatgccagaattccagaaaagttcagttcgaatcaagaaccctacaagagtagaagaaattatctgtggtcttatcaaaggaggagctgccaaacttcagataataacggactttgatatgacactcagtagattttcatataaagggaaaagatgcccaacatgtcataatatcattgacaactgtaagctggttacagatgaatgtagaaaaaagttattgcaactaaaggaaaaatattacgctattgaagttgatcctgttcttactgtagaagagaagtacccttatatggtggaatggtatactaaatcacatggtttgcttgttcagcaagctttaccaaaagctaaacttaaagaaattgtggcagaatctgacgttatgctcaaagaaggatatgagaatttctttgataagctccaacaacatagcatccccgtgttcatattttcggct

SEQ ID NO: 109416 - DNA, 375 bp, Homo sapiens
  misc_feature (1)...(375): n = a,t,c or g
cggacgcgtgggatcaggtaccccttaccatcccattaaaacctagtcactcttaccccgctcaatgccagtaccccatcccacaacaggctttaagaggactaaagcctgttatcactcacctgttacagcatggctttttagagcctataaattctccttacaactnnnnnnnnnnnnnnnnnnnnnnnnnnnnnnnnnnnnnnnnnnnnnnnnnnnnnnnnnnnnnnnnnnnnnnnnnnnnnnnnnnnnnnnnnnnnnnnnnnnnnnnnnnnnnnnnnnnnnnnnnnnnnnnnnnnnnngggggggcccttttaagggaaccaagtttaagtaccgggggttggaaaggtaaaattttttatttggggcccc

SEQ ID NO: 109417 - DNA, 409 bp, Homo sapiens
  misc_feature (1)...(409): n = a,t,c or g
tgcgagctgcggccattctcagccgagaccgtctgctacctcgacctggcccctaccttggggaccaggcccttgcgctgtggaaccaggtgggcatcctccttccgttcctccaaatgggaatcttgcttctctggtgggaccaggaagttctcagtccatttcctatctcctacactctccacagtttatctgagttggagggnnnnnnnnnnnnnnnnnnnnnnnnnnnnnnnnnnnnnnnnnnnnnnnnnnnnnnnnnnnnnnnnnnnnnnnnnnnnnnnnnnnnnnnnnnnnnnnnnnnnnnnnnnnnnnnnnnnnnnnnnnnnnnnnnnnnnnnnnnnnnnnnnnnnnnnnnnnnnnnnnnnnnnnnnnnnnnnnnnnnnnnnnnnnnnnnnnnnnnnnnnnn

SEQ ID NO: 109418 - DNA, 418 bp, Homo sapiens
  misc_feature (1)...(418): n = a,t,c or g
aattgggtaaccccaaggtttttcccgtccccgcgttgttaaaccgcgggccatggatttgattttgggggccctataaaaaaactttttccttgcaagcccgcgtaagtaaaccttggttcttttaaacggcccccccnnnnnnnnnnnnnnccagtatctagcttttatttattttttagcaatgacattaacaagattttgccaggttataaaaatgagggctttcttgagaattacttatagtttccgagttgaatggcagagcgcacgtagacacatctgaaggtggatggctgtatctcccggtccagtactgggagaagtcacttggacaacaacaagcttaccagagtacctggtgggctggcagagcataagtacatccaggttgtctaccttcataacaacaatatct

SEQ ID NO: 109419 - DNA, 397 bp, Homo sapiens
  misc_feature (1)...(397): n = a,t,c or g
acttcgcatgcccccgtacgtaaacttgattcctttaaacgggccgccccnnnnnnnnnnnnnccaaagtagatcctntattcaaaatctgtgggggttttttgactgtttttgctgacctgtgacctctcactgaggacggcagtccaggaccacccccagaggggttcaaagacctccgaaaccagagaccacccccacatacaggtccatggagagggcctggaccatctggacccccacggtcaggccaagtcccagataatagcaccagatgtttcctgtccgacttttggtctccccaaggcgaccagaggccgagctgcccctacacaggcgcaaggccgaggcagggcgcagcacagcatctcaggtgtccatctcgccggcggcgggc

SEQ ID NO: 109420 - DNA, 392 bp, Homo sapiens
  misc_feature (1)...(392): n = a,t,c or g
natgcccgcgttgtataacttggatcctttaaaacggccgccccnnnnnnnnnnnnnnccaaagtagatcctttattcaaaatctgtgggggttttttgactgtttttgctgacctgtgacctctcactgaggacggcagtccaggaccacccccagaggggttcaaagacctccgaaaccagagaccacccccacatacaggtccatggagagggcctggaccatctggacccccacggtcaggccaagtcccagataatagcaccagatgtttcctgtccgacttttggtctccccaaggcgaccagaggccgagctgcccctacacaggcgcaaggccgaggcagggcgcagcacagcatctcaggtgtccatctcgccggcggcgggc

SEQ ID NO: 109421 - DNA, 414 bp, Homo sapiens
  misc_feature (1)...(414): n = a,t,c or g
caaggcgggttttgttaagttggattcttttaaaccggcccccccnnnnnnnnnnnnnccaaagtagatcctttatcaaaatctgtgggggttttttgactgtttttgctgacctgtgccctctcactgaggacggcagtccaggaccacccacagaggggttcaaagacctccgaaaccagagcccacccccacatacaggtccatggagagggcctggcccatctggacccccacggtcaggccaagtcccagataatagcaccagatgtttcctgtccgacttttggtctccccaaggcgaccagaggccgagctgcccctacacaggcgcaaggccgaggcagggcgcagcgcagcatctaaggtgtccatctcgccggcggcgggcccggacgcgtgggtcgacccggg

SEQ ID NO: 109422 - DNA, 406 bp, Homo sapiens
  misc_feature (1)...(406): n = a,t,c or g
tctaactttattatgtatttgacagacaaagccacagacccaagcatgtcggaacaggattggtcagctatccagaatttctgtgagcaggtgaacactgaccccaatgggtaaggtaacttctcacacacatagttgactctgggggcaccccacactgagtgtaggcctttgtctctcaagattgttttagggttaagctctctaggcannnnnnnnnnnnnnnnnnnnnnnnnnnnnnnnnnnnnnnnnnnnnnnnnnnnnnnnnnnnnnnnnnnnnnnnnnnnnnnnnnnnnnnnnnnnnnnnnnnnnnnnnnnnnnnnnnnnnnnnnnnnnnnngcagtcaggctggcattcattctctcattatcccctataatcctgccttggtctccggacgcgtggg

SEQ ID NO: 109423 - DNA, 404 bp, Homo sapiens
  misc_feature (1)...(404): n = a,t,c or g
cnnnnnnnnnnnnnnnnnnnnnnnnnnnnnnnnnnnnnnnnnnnnnnnnnnnnnnnnnnnnnnnnnnnnnnnnnnnnnnnnnnnnnnnnnnnnnnnnnnnnnnnnnnnnnnnnnnnnnnnnnnnnnnnnnnnnnnnnnnnnnnnnnnnnnnnnnnnnnnnnnncacaggctgttttttaggactagaagacacttctctcccctgtatccttcccttcttctacatgtgcaacctcattcctgcgctacagctctctctttaccaggtggatggcacctatacacctacagcttgggcatcagcatcactgtgggcgtctccccaatcccaccgccagcccttacttcaccttctattctatcaaatacttcgatgtggctcctcatatgggcgtacgcgaggg

SEQ ID NO: 109424 - DNA, 440 bp, Homo sapiens
actgtagtacccggttggattttgcgaatcgacccacgcgtccgggaggctccaagttgcctccagttctggccaatcttatgggaagcatgggtgctggaaagggcccccaaggccctggaggaggaggcattaatgtccaagagatcctcacctccatcatgggtagcccaaacagtcatccttcagaggaactactgaaacaaccagactattcggacaagatcaagcagatgctggtgccacatggactcctaggccctggcccaatagccaatggtttcccaccagggggtcctgggggccccaagggcatgcagcactttccccctggacctgggggacctatgccaggtccccatggaggccctggtgggccagtgggtccacgtcttctgggtcctccaccccctccccggggaggggattccttcttggaa

SEQ ID NO: 109425 - DNA, 440 bp, Homo sapiens
  misc_feature (1)...(440): n = a,t,c or g
gtgacggtccgaattttgtgatnggaacacgcgtccgcggacgcgtggggggtgaggcccaagcttggtttcttcagagccgggctggaagcctggaaccggagggccggggcgaggtctcggcctgatggctgcccgcacccgccacagactgctaccacggcgcaggggagcagtaccgcggcacggtcagcaagacccgcaagggtgtccagtgccagcgctggtccgctgagacgccgcacaagccgcagttcacgtttacctccgaaccgcatgcacaactggaggagaacttctgccggaacccagatggggatagccatgggccctggtgctacacgatggacccaaggaccccattcgactactgtgccctgcgacgcttcgctgatgaccagcccgcatcaatcctggaccccccagaacaagggcagttt

SEQ ID NO: 109426 - DNA, 296 bp, Homo sapiens
ggccatggtcttcggaggggtggtgccctacgtcccgcagtgtcgggacattcgcaggacgcacaacgcccacggcttctccacgtacgtgtgcctggtgctgttggtggccatcattctgcggatcctcttctggtttgcaaggcgctttgagtccccgctgctgtggcagagcgccatcatgatcctgaccatgctcctgatgctgaacctgtgcaccgcggtccgtgtggccaacgagctcaacgccaggcgccgctcctctacagctgcagatagcaaccatgaggacgtca

SEQ ID NO: 109427 - DNA, 324 bp, Homo sapiens
ggccatggtcttcggaggggtggtgccctacgtcccgcagtatcgggacattcgcaggacgcagaacgccgacggcttctccacctacgtgtgcctggtgctgttggtggccaacattttgcggatactcttatggtttggaaggcgctttgagtccccgctgctgtggcagagcgccatcatgatcctgaccatgctcctgatgctgaacgttgtgcaccgacggtctgtgtggccaacgagctcaacgccaggcgccgctcctctacagctgcagatagcaagcatgaggaagtcagggtcgcccagggaattccggaccgc

SEQ ID NO: 109428 - DNA, 412 bp, Homo sapiens
  misc_feature (1)...(412): n = a,t,c or g
atgaaggcactcctggccctgccgctgctgctgcttctctccacgcccccgtgtgccccccaggtctccgggatccgaggagatgctctggagaggttttgccttcagcaacccctggactgtgacgacatctatgcccagggctaccagtcagacggcgtgtacctcatctacccctcgggccccagtgtgcctgtgcccgtcttctgtgacatgaccaccgagggcgggaagtggacggttttccagaagagattcaatggctcagtaagtttcttccgcggctggaatgactacaagctgggcttcggccgtgctgatggagagtactggctggggctgcagaacatgcacctcctgacactgaagcagaagtatgagctgcgagtggacttggaggactttgagaacn

SEQ ID NO: 109429 - DNA, 178 bp, Homo sapiens
ggtctcccacactaatgagattgcagagaagcgaacacacaacgtcttggagcgccagaggaggaacgagctaaaacggagcttttttgccctgcgtgaccagatcccggagttggaaaacaatgaaaaggcccccaagggagttatccttaaaaaaaccacagcatacatcctgtcc

SEQ ID NO: 109430 - DNA, 398 bp, Homo sapiens
  misc_feature (1)...(398): n = a,t,c or g
atttcctgatggcagagcctatttgtccatgtcctgctgcagacagggtgttcattcattccgcaaatgtttactgagtattcaccaggtgctgggtggagaaagaagacttaaagattccgtagacatctcctctcccctagactcaggaccatggcacttattttctagtcaatattctggtctccagcatgtcaggatgattaatgatggtgtcaagcttgtctccctctactttttcccatccccatggatataaatagaggtgaccttttaatccccctctcaatcaggtggagacgattggggatgcttacatggtggtatctggcctcccaggccgaaatggtcaacgccatgcaacagaaattnnnngtatggccctagcattactagat

SEQ ID NO: 109431 - DNA, 477 bp, Homo sapiens
  misc_feature (1)...(477): n = a,t,c or g
cccggatttgaatttaggggccctttataagaaatttttccttgccttgcccgggttgttaaggtggattcttttaaggcggccccccnnnnnnnnnnnnnnnnnnctgtaaatgttgtggttttattcatcattatcatagctgcatctggggcaacctccttgtgcatacaggacaataaattcctgagcctcctggcttccctccttcctccctccttctccctcttcttggcaaaggcttaaacataggtggtggggcgggggggggcggtagggacagagacagagttccagctcctctttgcttcacccccttccctcctcctcccttctttcccattgctacactaaaggagtcagggctgtgtccaccaatatgctctgtgactagcagtcaacacaatttcatacccagccagtcattccgcaggcatcggacgcgtgggtcgacactgaaattgctgtcctcgtatc

SEQ ID NO: 109432 - DNA, 395 bp, Homo sapiens
  misc_feature (1)...(395): n = a,t,c or g
nnnnnnnnnnnnnnnnnnnnnnnnnnnnnnnnnnnnnnnnnnnnnnnnnnnnnnnnnnnnnnnnnnnnnnnnnnnnnnnnnnnnnnnnnnnnnnnnnnnnnnnnnnnnnnnnnnnnnnnnnnnnnnnnnnnnnnnnnnnnnnnnnnnnnnnnnnnnnnnnnnnnnnnnnnnnnnnnnnnnnnnnnnnnnnnnnnnnnnnnnnnnnnnagcctccctcaggtaggcctgtctcaggtagatctgtctcaggtaggtctccctcaggtaggcctgtctcaggtaggtctccctcaggtaggcctgtctcaggtaggtctccctcaggtaggcctgtctcaggtaggtctccctcaggtaggcctgtctcaggtaggtctgtctcaggtaggtctccc

SEQ ID NO: 109433 - DNA, 441 bp, Homo sapiens
  misc_feature (1)...(441): n = a,t,c or g
cttccggaattcccgggtcnannnnnnntccggcaaaggcaatggaatcaagacagttatagtcattatggttgacgttgcaaaggcgcttaatcggcctccaacgtgtaagtaaagcttggaaaagtccacagggcatattatggatagagtcttcaaagtctttgagctgcaaaacttgttctaattgtatgctagctaattaccttacaagttaagtgaggaaccgtggtttattggttgccatgtttacaaaactaccaggggaacgcatttaaagagtggannnnnnnnnnnnnnnnnnnnnnnnnnnnnnnnnnnnnnnnnnnnnnnnnnnnnnnnnnnnnnnnnnnnnnnnnnnnnnnnnnnnnnnnnnnnnnnnnnnnnnnnnnnnnnnnnnnnnnnnnnnnnnnnnnnnnnnnnnnnnnnnnnnnnnnnnnn

SEQ ID NO: 109434 - DNA, 424 bp, Homo sapiens
  misc_feature (1)...(424): n = a,t,c or g
attgacgttccganccgcaattncaagtcgacccacgcgtccgattgacggcctggagcctgggctgcatggactctacgtttatcagtacggggaccttacaaacaactgcaacaggtgagttgtctgaagtctccccagtagcattctcagctacacattttcacactgggccctcaccaatactctgtgaggcacatacacacaggcacaacctcnnnnnnnnnnnnnnnnnnnnnnnnnnnnnnnnnnnnnnnnnnnnnnnnnnnnnnnaggtaaaaggtagagttggggtttgagtcaagatctgaccttnnnnnnnnnnnnnnnnnnnnnnnnnnnnnnnnnnnnnnnnnnnnnnnnnnnnnnnnnnnnnnnnnnnnnnnnnnnnnnnnnnnnnnnnnnnnnnnnnnnnnnnnnnnnn

SEQ ID NO: 109435 - DNA, 418 bp, Homo sapiens
  misc_feature (1)...(418): n = a,t,c or g
attgacggcctggagcctgggctgcatggactccacgtccatcagtacggggaccttacaaacaactgcaacaggtgagttgtctgaagtctccccagtagcattctcagctacacattttcacactgggccctcaccaatactctgtgaggcacatacacacaggcacaacctcnnnnnnnnnnnnnnnnnnnnnnnnnnnnnnnnnnnnnnnnnnnnnnnnnnnnnnnaggtaaaaggtagagttggggtttgagtcaagatctgaccnnnnnnnnnnnnnnnnnnnnnnnnnnnnnnnnnnnnnnnnnnnnnnnnnnnnnnnnnnnnnnnnnnnnnnnnnnnnnnnnnnnnnnnnnnnnnnnnnnnnnnnnnnnnnnnnnnnnnnnnnnnnnnnnnnnnnnnnnnnnnnnnnnng

SEQ ID NO: 109436 - DNA, 373 bp, Homo sapiens
  misc_feature (1)...(373): n = a,t,c or g
ccccccttaaaacgccaggggggtggacccccagggtgttgggggttaaacacccccatacccccagcgcaaaacctgttttccccccaaaaccaaaaaaaacccccgggtggggggcacacccccgtatgccccactcctctagggggtaagcccagaaaacccccttcccctggcaggggggggtcacaatggtcaaaaattggnnnnnnnnnnnnnnnnntggggtaaaaaacaaaacccggcccccnnnnnnnnnnnnnnnnnnngtattgttcagatatatatccatgtatttatagcgaggaacagtttttaaactaatgtgattattactgatcttatagaagagtttataaaatgatacagtttg

SEQ ID NO: 109437 - DNA, 412 bp, Homo sapiens
  misc_feature (1)...(412): n = a,t,c or g
cttaaagcatttggccatccagtgtcattggtctcagaggccaccagttattggagatgtccttcaaggctacagtgggtctgaagggagggctattattttctgtgagaccaagaagaatgtaactgaaatggccatgaatccacacataaaacaggtaagactttttttcatgctttctctaattgaaattatggggatgaatcactgaacgaaaattatattgtcctttgtggaccagatttgatagtcattctcaaaactgagttgtannnnnnnnnnnnnnnnnnnnnnnnnnnnnnnntgtgacctgataagtcaggatagaattttatcannnnnnnnnnnnnnnnnnnnnnnnnnnnnnnnnnnnnnnnnnnnnnnnnnnnnnnnnnnnnnnnnnnnnnnnnnn

SEQ ID NO: 109438 - DNA, 430 bp, Homo sapiens
  misc_feature (1)...(430): n = a,t,c or g
gagaaaggggtctccatggtgagtttggtctccctggtcctgctggtccaagaggggaacgcggtcccccaggtgagagtggtgctgccggtcctactggtcctattggaagccgagggtgccgagaccacaaagcgcccagctgtgtgtgctgctgtgttgtgaactccgtggtttgaacacgaaagaaatgtaccttctttcactctgtcatctttcttttctttgagtctgtttttttatagtttgtattttaattatgggaataattgctttttcacagtcactgatgtacaattaaaaacctgatggaacctggnnnnnnnnnnnnnnnnnnnnnnnnnnnnnnnnnnnnnnnnnnnnnnnnnnnnnnnnnnnnnnannnnnnnnnaaaaaaaaannnnnaaannnnnnnnnnnnnnntataaaa

SEQ ID NO: 109439 - DNA, 409 bp, Homo sapiens
  misc_feature (1)...(409): n = a,t,c or g
ttgctccacttgggggccgtgtactccctggtgctcatccccaaagccaagccactcactctgctctgggcctacttctgcttcctcctggccgctctgggtgtgacagctggtgcccatcgcttgtggagccacaggtcctaccgggccaagctgcctctgaggatatttctggctgtcgccaactccatggctttccagaatgacatcttcgagtggtccagggaccaccgagcccaccacaagtactcagagacggatgctgacccccactgagnnnnnnnnnnnnnnnnnnnnnnnnnnnngggggggggcccttttaaaaaaaacaatttttatacccnnnnnnnnnnaaggtaaattttttttaatggggcccaaaaattaatttccggggcccggttttaaa

SEQ ID NO: 109440 - DNA, 525 bp, Homo sapiens
ccaaatcccaatgccacgtctccctggacatggtccacctcgtgcatgcccgcaaagctcagcatttagccacagacgtaggctacaagacagcggaacatcactttacggctttgcccacagacatgaaggtggaatgggccaagaaggcttatggcttacagagtgataaccaatacagggcagatgtgaagtggatgaaaggcatgggctgggtcgccaccgggtcattaaatgtggagcaggcgaagaaggggataaacagcaggagaggagaggggtacaaaataaggagcacaatcccagggaaaaagaaaagaaaacaagagctagagagagaaggggagaatgagagatatgcacagaattagggagggaagcacagtaatgaagaaagaggggctgggcgcagtggctcatgcctgtaatctcagcactttaggagactgaggcaaagggattgcttgagtctaggagttcaagaccagcctgggcaaaatagtgaggctccccccatctctgtca

SEQ ID NO: 109441 - DNA, 401 bp, Homo sapiens
  misc_feature (1)...(401): n = a,t,c or g
nnnnnnnnnnnnnnnnnnnnnnnnnnnnnnnnnnnnnnnnnnnnnnnnnnnnnnnnnnnnnnnnnnnnnnnnnnnnnnnnnnnnnnnnnnnnnnnnnnnnnnnnnnnnnnccaaacctgcccaccaggaaggaatccgagggctggcaccccacccttttttggcaccaacggggcacccgggggtcaccaaacaccgggggccaagcaaagcccaggaggcagaagggctgaaacctgtcctttgccctgcaggaacccctccacccagttcggaagcctcacggaactgcagtctttgataagcgcgcttttcgcccttttgcaaaagccgttgtttttggccatgaggggccctctccagggagcccctctgggggaaaaaggggtcgggggatggtg

SEQ ID NO: 109442 - DNA, 396 bp, Homo sapiens
  misc_feature (1)...(396): n = a,t,c or g
ctcttgttaaaatatcagccccnnnnnnnnnnnnnnnnnnnnnnnnnnnnnnnnnnnnnnnnnnnnnnnnnnnnnnnnnnnnnnnnnnnnnnnnnnnnnnnnnnnnnnnnnnnnnnnnnnnnnnnnnnnnnnnnnnnnnnnnnnnnnnnnnnnnnnnnnnnnnnnnnnnnnnnnnnnnnnnnnnnnnnnnnnnnnnnnnnnnnnnnnnnnnnnnnnnnnnnnnnnnnnnnnnnnnnnnnnnnnnnnnnnnnnnnnnnnnnnnnnnnnnnnnnnnnnnnnnnnnnnnnnnnnnnnnnnnnnnnnnnngctcatcgacagcacaccgtaccgacagaggtacaaatcccactatgcgctgcccttgggccgcaagaatgtagccacgctgactcctga

SEQ ID NO: 109443 - DNA, 399 bp, Homo sapiens
  misc_feature (1)...(399): n = a,t,c or g
ttttttctttaagctgtctatttccctgaatatttctcccttcacttctcnnnnnnnnnnnnnnaggaggggaatctccttttttcccccaggcgggaaggccggggcccaattttggttttttgaaaccttggtgttccgggaaaaagaaatccccccggttctacccccccaaaaagggggaataaagggcccccccacccgggcccagtaaatttttggttttttaaaaaaaaaggggttcccccggtggggagaggggggaaacagccctccaacattaggggacccccccccttggggcccccaaaggggggggattacaggggggannnnnnnnnnnggcgccctttttggggtttnnnnnnnnnnngggtttccccattggggccaaactgg

SEQ ID NO: 109444 - DNA, 385 bp, Homo sapiens
acaggcacatgccacaacgcctggctaagtatttgtatttttaagagagatgcggtttcaccatgttgggcaggctggtctcaaactcctgacttcaagtgatctgcctgccttggcctcccaaagtgctgggattacagatgtgagctaccgtgcctggccaccttctggtatttaattagagcatcaagaaaactgggttttctcatatggtcctgatcacctgtaagttattatttctcataaataccatttattaaaggtaccaataacgtggtttaaatctttgtcaaaatttccaagaactgataaagattgttcaaacattattaaatggaaaagaaacagtgttaaaacaagtctgaccgtacgcgtgggtcggccg

SEQ ID NO: 109445 - DNA, 443 bp, Homo sapiens
  misc_feature (1)...(443): n = a,t,c or g
gaggttcactcggtaaaactgtgctttggccttggcggtccctgtctcctcttcccaatattccggcccctcctgctccatccacggcgcccgcggctccatcctgggactcgtggcgtcgctgtcgagccgcacgcactgcgtgtcgtccacgtcgcccacggagaggaagcggggatccgcgcggccgggccgggacatggtggtgtggaaatacctcaaggagtggaagcctgcccaggtctgggtcaggaccagggcccccgagagcagcagaagcagggttcggggcgccatgacaccatcctcggcgactgtccccgtggactcttctagaagaaaaatcaccccagggagcttgttgccagagagtgagcatgccctgctacgtgactgttctctgcacagtggtccggacgcgtgggtcctccnnnaattccagg

SEQ ID NO: 109446 - DNA, 306 bp, Homo sapiens
ttttatataatgggcttggttgaacaatctagttctaccttactctctgaaggacctctcttagtaggaaatgggcttatgttaagatgttttaatccaaggggtaagccacacagttggaatagaatttttaatatatccaaaggaaatgaaatcagtatgtcaaaaagatatctgcactccaatgttcattgcagcaccatttacaatagccaagatacagaatcaacctaaatgtctatcagtgaacgaatggataaagagaatgtgggatatatacacagtggaatactattcactcttaaa

SEQ ID NO: 109447 - DNA, 714 bp, Homo sapiens
tttatgtttatcaaaagatttactgaaattcacgaaaaaatcttgagagagaaatggataggaaagtcaatatcataagagtatcaattctacccaaattcatatataaattcagtgcatttccaattgaaatctccacagaattttctttgagagactgtacaggccgattctagcattgatacggaatgtatatcatagttaaaatcagtcccttgaagattaaagtcttaaatataaaaaacaaaaaaaaaatttttttaattagttgagtgtggtgttatgtgatcccagccgtggtcccagctactcaggaagctgaggtgggaagatcacttgaggaggtcgaggctgcagtggcccctgattgcactactgcattccagcctgggtggtgacagagtagtgataccttttatgacatcaggagaacagtggtgtgtcccatcatcgatgtgatcagtgatgatacttttgagtacatggcaggctctgatatgacctatggtgggttcaactggaagctcaattttcgctggtatcaatggatctagttgagattcctaggttctgtttcatgtacaagccgtgacgcaggtttggagaggggtgaacagatgagcatctggctggttactccatggtcaggttttgtttggtggttgtttttaaccatgagccacattaataaatacattatacattctgcacaca

SEQ ID NO: 109448 - DNA, 420 bp, Homo sapiens
  misc_feature (1)...(420): n = a,t,c or g
cttttggaagagctaagagagacatactactgtataaattactaataaaaatatattagccatgttttataattaatcagtatcttaccatcacagtggaaattggggtgattacaggacatcagagaatttaagcaaattttccaaagctagttttcaacacattaaagttactcttacccttttttcnnnnnnnnnnnnnnnnnnnnnnnnnnnnnntttcttcttatcctacatttaaatcttatgggatgtgcataactctaaatagagctgtgctgcagcaactaaaactgctgatgaatgttttctaggttgaagctgatctgggctatccaggtggaaaggcgaaagtcatccataaggaatctgatatgatcatggcattttctgttaataaggcaaattgtaatgaaattg

SEQ ID NO: 109449 - DNA, 426 bp, Homo sapiens
  misc_feature (1)...(426): n = a,t,c or g
actgaactcatcctctttccccagaatgtatctcgcggatgtccagaatacgccatctgcaaaactgaactcgtcctctttcccccgaatgtatctcccggatgtccagaatacgccatctgcaaaactgaactcgtcctctttccccagaatgtatctcccggatgtccagaatacgccatctgcaaaactgaactcgtcctctttcccccgaatgtatctcccggatgtccagaatacaccatctgcaaaactgaactcgtcctctttcccccgaatgtatctcccggatgtccagaatacgccatctgcaaaactgaactcatcctctttcccccgaatgtatcatctcccggatgtccagaatacgccatctgcagnnnnnnnnnnnnnnnnnnnnnnnnnnnnnnnnnnnnnnnnnnnnnn

SEQ ID NO: 109450 - DNA, 388 bp, Homo sapiens
  misc_feature (1)...(388): n = a,t,c or g
gtaaaaaaaaacaaaaaaaacccccaccaaatatttgctgttttcaagagattcagctaacccctaagccctcccataaactcaaggtgaaaggttggagaaagatttttcccccaaatgggaaccaaaagccagcaaaagtagcnnnnnnnnnnncagacaaaacaggctttaaagcaaccacagttnnnnnnnnnnnnnnnnnnnnnnnnnnnnnnnnnnnnnnnnnnnnnnnnnnnnnnnnnnnnnnnnnnnnnnnnnnnnnnnnnnnnnnnnnnnnnnnnnnnnnnnnnnnnnnnnnnnnnnnnnnnnnnnnnnnnnnnnnnnnnnnnnnnnnnnnnnnnnnnnnnnnnnnnnnnnnnnnnnnnnnnnnnnnnnnnnnnnnnnn

SEQ ID NO: 109451 - DNA, 376 bp, Homo sapiens
ctgaaacattcaccttccatgcggatatatgcacactttctgagaaggagagacaaatcaagaaacaaactgcacttgttgaactcgagaaacacaagcccaaggcaacaaaagagcaactgaaagctgttatggatgatttcgcaacttttgtagagaaatgctgcaaggctgacgataaggagacctgctttgccgaggagggtaaaaaacttgttgctgcaagtcaagctgccttatgcttataacatcacatttaaaagcatcttagcctaccatgagaataagagaaagaaaatgaagatcaaaagcttattgatctgattttctttttcgatggcgtagagccaacaccctgtctaaaaaacataaattt

SEQ ID NO: 109452 - DNA, 372 bp, Homo sapiens
acggcgcgcacgctggcgagtatggtgccgaggccctggagaggatggtcctgtacttgcccaccaccaagacctacttcccgcactttgacctgagccacgggtctgcccaggttaagggccaccgaaagaaggtggccgacgcgctgaccaacgccgtggcgcacgtggacgacatgcccaacacgctgtccgccctgagcgagctgcacgcgcacaagcctcgggtggacccggtcaacttcaagctcctaaggcactgcctgctggtgaccctggtcagccacctccccgtcgagataacccctgcggagcacgcctccctggacaagttcctggcttctgtgagcaccgcgctgacctccaaatacc

SEQ ID NO: 109453 - DNA, 371 bp, Homo sapiens
ttggatttgagaagattcatttgataagcacacagggtgccgttccatatgcattaagagtggaactggaagactggaatggcagaaccagtactggaaactatgccacgttcatggtgggacctgaagctgacaagtaccgcctaacatatgcctacttcggtggtggggatgctggagatgcctttgatggctttgattttggcgatgatcctaatgacaagtttttcacatgccataatggaatgcagttcagtacctgggacaacgaccatgataaggttgaaggcatttgtgctgaacacgatggatctggttgttggttgaacaagcgtcacgctggccatctcaatggagtttattaccaaggc

SEQ ID NO: 109454 - DNA, 367 bp, Homo sapiens
tttacttttgtttgacaagagagacacttctgactttgaccttctgacagggagagatactgcctctgagccccctcaaaatgacggtaattccttcaattcaccccgcatcctgaccatggaggcatcctacatcaaccacaatttctcccagcaaagcttgagaatggcgaaggaaatattcaccttacccaacccaaacccgtttgtggaggacgacttggataagaatgaaatctgctgtgctgcgtaccagtaccgcacgtggaagcttggagatgatattgaccttattgtccgtggggagcaccactgcgtcatgactggaaccaacagggaagaggacttcatcaacattaagacactg

SEQ ID NO: 109455 - DNA, 343 bp, Homo sapiens
  misc_feature (1)...(343): n = a,t,c or g
ccagtctatgatttacgaaagcctaaattcaattggtctatttcaacccttaagagaaaatgatatgtacagttcacagaggtggatcaagcaatttttcattcaaagttcacaataagtcagcannnnnnnnnnnaccttagtctgaaaacgcttcagggcttctgtaactggggattttaacaaaaccagagccggggcagccttcacaggggctacatcaaagtcatctgggatcttctggatttcaaattggagttaatctgagcatggaaaactatgccctgacgtttggaattaatcccttcattgccttgatgattcaacccatcgggacgatgaa

SEQ ID NO: 109456 - DNA, 694 bp, Homo sapiens
gacgttgccttcaaagacctggatgtggccattcttgtgggctccatgccaagaagggaaggcatggagagaaaagatttactgaaagtaaatgtgaaaatcttcaaatcccagggtgcagccttagataaatacgccaagaagtcagttaaggtgaccaaatgctgtattttatgggatttttcattattagcatttgagacttatgcttttagcatttaagcaaaaccaaaattatttgcccttttttctagttctgtacaatcatcagtaaatacggctctagagttttgcttgataagctctccctttctgggttttttcttacagtatagaaatctatattcagagtgctcaaaaatatttttcctattagtataacgtgaaaatttagtattagttcttaaacatatagagaaggcacaggatcttctggtgcatttttgctgcgtgggaatatttatttagacatttaaatttgtgtgtgattgtgaaaggagatagctagctgtaaggtaagttttaattctcaggaatagaagatagtggtttccgaatgctcagattttccttaatgcagaggaattttaatatgcttgtctcttgaagaattgagtcagtatgacttatagttctctctttgtgttcaaactatttactttagattctaatatgtcttaatattacagtaagc

SEQ ID NO: 109457 - DNA, 404 bp, Homo sapiens
  misc_feature (1)...(404): n = a,t,c or g
cgggtggtcgaacatggcacgtggaggcttaccttgccagggtgaattttcattttgcataaacctaccgagcatgnnnnnnnnnnnnnnnnnnnnnnnnnnnnnnnnnnnnnnnnnnnnnnnnnnnnnnnnnnnnnnnnnnnnnnnnnnnnnnnnnnnnnnnnnnnnnnnnnnnnnnnnnnnnnnnnnnnnnnnnnnnnnnnnnnnnnnnnnnnnnnnnnnnnnnnnnnnnnnnnnnnnnnnnngactgccctttttatccttcttgctgcattctcatcccctgccaaagccccaggcattgcccagcctgcagcagcccccaaccacagctgttgcaaacccaccaccatcgccacaaccaccaccacctgagatccctcaggaactgtgagtgggctaac

SEQ ID NO: 109458 - DNA, 375 bp, Homo sapiens
  misc_feature (1)...(375): n = a,t,c or g
ccgcccaaaatttgggttggggaaaaaggggggnnnnnnnnnnnnnnnngggggtttcccccccccgggggcggtggggttaaaaccccccttaattccccccttttattccccggggggcnnnnnnnnnnccggggaaattccccccctttttggggccccttttttatttgtccctaaagccaaaattcttcccccgggggttttaaaaaagggtttcccttttccccccaaaaatgnnnnnnnnnnnncaaggattttttgagagtttggggttacccccccaaaacccnnnnnnnnnnnnnnnnnnnnnnnnnnnnnnnnnnnnnnnnnnnnnnnnnnnnnnnnnnnnnnnnnnnnnnnnnnnnnnnnnnn

SEQ ID NO: 109459 - DNA, 436 bp, Homo sapiens
gcaccatgtatgccactcagtgggaaactctgactgattttactaagtggctgggcagagaaggtaagaatgagattttaaagttgctttttctttcccacttcctaatccttccataggatgagatgtttgggataagaaaagagaaaaaaaattgggtcagtgttttgctttttcatcggtgttagttgattccattttggggagcataatttctgccttaagttaatagaacatcatataactgttgggacattaaatacttaggataggaacttgaattaaatactatgccaggataatacagttgtctctcagtatccgtgggggattgggtccaggaccccttgctgataaccaaaattcacagatactcaagtcccttatataaaataaaatgatgtagcacttgcatgtaacctatatacatcctccc

SEQ ID NO: 109460 - DNA, 381 bp, Homo sapiens
gaactacaggaatctagttgcactggggtatcagctttgtaagccagaggtaatcgcgcagttggagctagaggaagaatgggtgatagaaagagacagcctgctggatactcatccaggtaagtgcacactcttgggcactgctacttaatgagggaaaacagccacttctgaaccactcagtggagtgttccaaaaatctccctctgggatataaggaatactaagccttttgaaaaaaatcaggtcatattttatatttttctgaatttgaaatggctgtcttattttttctcattgaacagataatatacacttatattgttttaaaaatgcacacaaaccaaaggttattttgaaggtatccatttaaacacccat

SEQ ID NO: 109461 - DNA, 591 bp, Homo sapiens
ttttactttggagatggaatcttgccctccagcctgggtgacagagtgaaactctgtctcaaaaaaacaaaaaaaaaaaagatttacttaccctgtggtaaaaaccctagtatgtagagtttagttatttacttactgttctttttttgtcgttaaccaaattgtatttagtacaaatatttcaaaagttatttatccttcttatacaaaatacagcatactacagatagtcccacacttgacatttttcacttaaaatatctttgagatcactccatatgatccttatttgttttaagagttatgtagtactttatggcatgattgaaacagtttattgaatcgttctcctggttatgggcagttaggttgtttccaatgtttacattataaataatgctacagtgaataatattttgtatacgtatttttgtactgctggaagtgtcatttggggctatatttatttgattttttctttttcttagggacagggtcttgccctatggcccaggctggagtgcagtggtgcaatcatagctcactgcaacctcgaactcctaggctcaagtgatttcccagcttctgact

SEQ ID NO: 109462 - DNA, 401 bp, Homo sapiens
  misc_feature (1)...(401): n = a,t,c or g
cggcacgagccttttacaaaccagaaattagctgtacatacaaaggttaaaccatagtgtgcagctgacnnnnnnnnnnnnnnnnggaaagggagcccccttttgtcccccagccggaacccaagggggcaaatttggccaaagggaacccttgccctcgggggccaagggaattccccgcccaaaccccccggagaagggggaataacgnnnnnnnnnnnnactaaattttggttttttaagaaaaaagggggttcccccagggggcccgggggggtccaaaaccccggacccagggaaaaaaccccccctggccccccaaaagggggggaaaaacgggggggacccctggcccccaggggaagagaatttttaagcttttttttaaaataacaaataaa

SEQ ID NO: 109463 - DNA, 387 bp, Homo sapiens
  misc_feature (1)...(387): n = a,t,c or g
ctgggggtctgatggggcagccccagtctgagatggtcaggccttgtcattgggtgcacgtctcccatggggatggatggacccacagctttcagatggattgcggttggcagtcacagcatcccagcacattaaaatacatcaactcctgtgctttcaggtagatttagaatttttctcataccctagccactttccatttttcattttgaaaaatttctccttgagttttctcaaaggcttcagttttttttgttgttgttgttttttcctgtaagccatgtaactaggaaaggcattagtaagaatttgatacactgggtctcatggaactccactactaccacnnnnnnnnnnnnnnnnnnnnnnnnnnnnnnnnnnccagtt

SEQ ID NO: 109464 - DNA, 359 bp, Homo sapiens
  misc_feature (1)...(359): n = a,t,c or g
aattgnnnnnnnnnnnnnnnnnnnnnnnnnnnnnnnnnnnnnnnnnnnnnnnnnnnnnnnnnnnnnnnnnnnnnnnnnnnnnnnnnnnnnnnnnnnnnnnnnnnnnnnnnnnnnnnnnnnnnnnnnnnnnnnnnnnnnnnnnnnnnnnnnnnnnnnnnnnnnnnnnnnnnnnnnnnnnnnnnnnnnnnnnnnnnnnnnnnnnnnnnnnnnnnnnnnnnnnnnnnnnnnnnnnnnnnnnnaaagcaatcttgagcaaagagagccaaactggaggcctcacacattacctgatttcaaactatattacaaagctagagtaattaaaacaccatcgtactggcataagaacagacacatag

SEQ ID NO: 109465 - DNA, 300 bp, Homo sapiens
tcccacttaataagcttactgaacttctccgacatgacatggcagccgctggcttcactgaacgacttacctttgccctgtgctcccaagaagatattgctgataaactaggtgtggatatctctgcaacaaaggctgtccacataagtaattctaatacagctgaatttcaagtggcacgcactacccttcttcctggcctcctgaagaccatagcagcaaatcgtacgatgccccttccactgaaactgtttgaaatctctgacattgtgataaaagattctaatacagatgtatgtg

SEQ ID NO: 109466 - DNA, 267 bp, Homo sapiens
gaggctctggactgcatcctaccaccaactcgttcaactgacaagcccttgcgcctgcctctccaggatgtctacaaaattggtggtattggtactgttcctgttggccgagaggagactggtgttctcaaacccggtatggtggtcacctttgctccagtcaacggtacaacggaagtaaaatctgtcgaaatgcaccatgaagctttgagtgaagctcttcctggggacaatgtgggctttaatgtccagaatgtgtcttgtcag

SEQ ID NO: 109467 - DNA, 346 bp, Homo sapiens
aaggatgttcgtcgcggcaacgttgctggtgacagcaaaaatgacccaccaatggaagcagctggcttcactggtcaggtgattatcctgaaccatccaggccaaataagcgccggctatgcccctgtattggattgccacacgggtcacattgcatgcaagtttgctgagctgaaggaaaagattgatcgccgttctggtaaaaagctggaagatggccctaaattcttgaagtctggtgatgctgccattgttgatatggatcctggcaagcccatgtgtgttgagagcttctcagactatccacctttgggtcgctttgctgttcgagatatgaaaacaaacg

SEQ ID NO: 109468 - DNA, 360 bp, Homo sapiens
taggaatgccctgtgcagaagagtatctatccgtggccctgaaccagttatgtgagttgcatgataaaacgccagtcagtgacacagtcaccatatgctgcacagaatccttggcgaacaggcgaccatgctttttagctctggaagtcgatgaaacatacgttcccaaagagattagtgctgaagcattcaccttccatgcagatatatgcacactttctgagaaggagagacaaatcgagaaacaaactgcacttgttgagctcgtgaaacacaagcccaaggcaacaaaagagcaactgaaagctgttatggatgatttcgcagcttttgtagagaagtgctgcaaggctgactata

SEQ ID NO: 109469 - DNA, 580 bp, Homo sapiens
aggaccgcggggctcctggggttcaaccgtgccgcctcgttacgatgaccagtgtggttaagacagtgtatagcctgcagcccccctctgcgctgagcggcggccagccggcagaacacctgaatggtaatcctggcaccagcggggactaggagttgctggaagaactggagccaggtctctcagctgctgtgtctttcccttagatgcggtgcccctgagtcagtgggcagtgactagctctctcagccaagttggaagtgttcatctctttgatttctatctctgtcccagctttatgatcatatgtaactggaacagtttcaaatttttaggctgcctcccaggatttttgttttgattttgagcatgggctggataagtaatatatgcacatgtgaaaaaaaaaaaggtggaaaaccatatacaatgataaacaagtttccttcccttccttgacaccagccatccagttcctctcccagtgtctcccatttttaagagacagctttgttaaatcctactgaatttttcctacagtgcaatcctagattttagcaaatacaaattattggaacca

SEQ ID NO: 109470 - DNA, 288 bp, Homo sapiens
aattaagtaaataaaaatttatacttctttttgttggttcttctgtcttcggtgaagttagggctgctcacacacagtagcaatgatacttttcaaaataaaccaggcctaagaggcatggtggctcatgctcgtaatactttgggaggcggaggcgaagaggatctgcttgagcctgtgagactgagactgaggctgcagtgagccatggctgcgcagctgcaacctccgcctcccaagttcaagcaattctcctgcctcagcctcccaagtaactggggttacggg

SEQ ID NO: 109471 - DNA, 415 bp, Homo sapiens
ctcccacctccagtttccccgaagtagctgggactataaggtgtaatgggcccgcatgcctggctaattgtgttttcattttttgtagaaatggggtctcattatgttccccaggctggtctcaaactcccgggctcaagcgatcctcctgcctcggcttcccaaagtgctgggattacaggtgtgagctactgcacccagcctacatggaatctttctaagtatgggacactatgtaactgcacatgtacaacctctttaagccagccctgaatctaaatctctttcaactacagctatggaataccaagacgatagttatctttgtcccttgagttcccagtactaaactaggcatataatagggattcaaatgttcgttgaatgaaaaactgagtcttaacttgcagttttc

SEQ ID NO: 109472 - DNA, 395 bp, Homo sapiens
cgcccactgctgtgtggagatgggcatggacatgatcgaggccatctcgttggtccgggaggtgacaggggtgaacgtgaacatgcgtgtgggaattcacagcgggcgagtacactgcggtgtccttggtctcaggaagtggcagttcgacgtctggtctaacgatgtcacgctagccaaccacatggaggctggcggcaaggcaggacgcatccacatcaccaaggctacactcaactacctgaatggggactacgaggtggagccaggctgtgggggcgagcgcaacgcctacctcaaggagcacagtatcgagaccttcctcatcctgcgctgcacccagaagcggaaagaagagaaggccatgatcgccaagatgaaccgccagatgtatt

SEQ ID NO: 109473 - DNA, 406 bp, Homo sapiens
ggttcggccgaggggcatccgcctccgcccactcacacagtgcagcacgagggcttcctactgcgcaagcgcgagctcgacgctaaccgcaagtcgtccaaccggtcgtgggtgagcctgtactgtgtgcttagtaagggggaactgggcttctacaaggactccaagggcccggcatccgggagcacacacggtggggaaccgctgctcagcctgcacaaggccaccagcgaggtggctagtgactacaagaaaaagaagcatgtcttcaagctccagacccaggatggcagtgagtttttgctccaggcaaaagatgaggaggagatgaacggctggctggaggctgtaccttcctcggtggcggaacacgcagagatcgccaaatggggccagacactaccca

SEQ ID NO: 109474 - DNA, 447 bp, Homo sapiens
ggctttgggccctcttggggggtcccctcgtccgcctgcccggccatttgtggggtgtctgccatgtccacaacatgcacttcttcctgtcagccttgaccagggcagctgttagttctcagaggtgggcgtgtggttggggatgtcagcgagtaggatcttcccttttattcgcttgtcattaacctgagaacgtggcagtgggggaggagaggcttggcccggggtgcacaggactgtgggctggtcctgtccctctgatgagtgggacgagccttggtccagtcctgtgggcttggcgcagagccggccccctgccatgtcctggtgggattggaagtgctggctcgtcctgtctgcctcccccaagggctgggagccccccactatttggacatttgtagtgtaagcagacagtgtcggacgcgtgggtcggagttggagaat

SEQ ID NO: 109475 - DNA, 276 bp, Homo sapiens
ggctggcttctcaagtggaccaactatctgaagggctaccagcgccgctggttcgtgctgggcaatggtttgctctcttactacagaaatcagggtgaaatggcccacacgtgccgtggaaccatcaacctgtccaccgcgcacattgacacggaggactcttgtggtatcttgctgaccagtggggccaggagctaccacctcaaggccagctcagaggtggaccggcagcagtggatcaccgccctggagctggccaaggccaaggctgtccgc

SEQ ID NO: 109476 - DNA, 355 bp, Homo sapiens
  misc_feature (1)...(355): n = a,t,c or g
nnnnnnnnnnnnnnnnnnnnnnnnnnnnnnnnnnnnnnnnnnnnnnnnnnnnnnnnnnnnnnnnnnnnnnnnnnnnnnnnnnnnnnnnnnnnnnnnnnnnnnnnnnnnnnnnnnnnnnnnnnnnnnnnnnnnnnnnnnnngggttttttttaacttggccattttaataaaaaaatttggggccattcgttttacggaagggggcctttttttttccccccttaaaaaaaaggccttggaaaacctttggaaagggaaggggggtttttccgccctaagggatggttaccttttttttgaaaattttaaaaaatggccacaaaatttttttctggcaaaaactttgaaatttttt

SEQ ID NO: 109477 - DNA, 353 bp, Homo sapiens
cgagaaaagccccacccagctcttgtactgccggaagctgggctacctggacctgagccacaacaacctgaccttcctccctgccgacatagggctcctgcagaacctccagaacctagccaacacgggcaaccggatcgagacgctgcctccggagctcttgcagtgccggaagctgcgggccctgcgcctgggcaacaacgagctagagccactgccctccatggtgggcgagctgaccaacctgacgcaaatcgagctgcagggcaaccggctggagtgcctgcctgtggagctggacgagagcccactgctcaagcgcagcggctcgagggaggaggaggacctgctcc

SEQ ID NO: 109478 - DNA, 392 bp, Homo sapiens
  misc_feature (1)...(392): n = a,t,c or g
ctaaaaaagtccctgtacgccatcttctcccagtttggccagatcctggatatcctggtatcacggagcctgaagatgaggggccaggcctttgtcatcttcaaggaggtcagcagcgccaccaacgccctgcgctccatgcagggtttccctttctatgacaaacctatggtgagcattgcgggtacggaggctgtgtgggtgtgtaaaatgttataggagactgggcgggcctggattagaggaggggatattacggttcatttgnnnnnnnnnnnnnnnnnnnnnnnnnnnnnnnnnnnnnnnnncactaagaatctttaacataccttcccctactgaataagcaccatgaaagaaggggttttggctattttggtcattgctttatt

SEQ ID NO: 109479 - DNA, 385 bp, Homo sapiens
  misc_feature (1)...(385): n = a,t,c or g
gctcttggtttggagatgatttgctcagggtcatgacgaactagggctggaatctagggtttgtgctcccaaatattttannnnnnnnnnnnnnnnggaaacaaagtttaacttggtcccccaggcgggagggaaggggcccggcccgggctcacggaaaacccggcccccggggtcccccccattccccggccttagcccccggagaacctgaaactataggggccggnnnnnnnnnnnggaaaatttttggttttttgggaaaaaacggggttctaccgggttacccagggagggcccaatctccggacctggggaaccggccccctgggccccccaaagggcggggaatacgggggggagccccacacccgggccttttggg

SEQ ID NO: 109480 - DNA, 379 bp, Homo sapiens
  misc_feature (1)...(379): n = a,t,c or g
aaaggggcccaggcaannnnnnnnnntggggtcctggcaannnnnnnnnntgggggtcaaaggattttcctcccccacccccccccgaaaccggggtacaaggggggggcccccccgcccccttaattttgtgttttttggaaaaaaggggggttccccccgtgggcccggaggggttcaattttttgcccccaaaattgggccccccggggttcccaaagggggggaaaaaaaggggggggcccccccgccccccccnnnnnnnnnnnnnnnnnnnnnnnnnnnnnnnnnnnnnnnnnnnnnnnatggcaactaacagcagaacatttaaggttagttggaatctgtaacaactagtttttctggaatagtttttaat

SEQ ID NO: 109481 - DNA, 397 bp, Homo sapiens
  misc_feature (1)...(397): n = a,t,c or g
nnnnnnnnnnnnnnnnnnnnnnnnnnnnnnnnnnnnnnnnnnnnnnnnnnnnnnnnnnnnnnnnnnnnnnnnnnnnnnnnnnnnnnnnnnnnnnnnnnnnnnnnnnnnnnnnnnnnnnnnnnnnnnnnnnnnnnnnnnnnnnnnnnntaggtggtgaagcctggattcgattcctgattctaggctcataaccccctcaataaatagtacctaactgatattgctcatttttagatttctagcaacttataagcttttccccacttcccctgctgccccctagaacctccaggtctcctgcctcaatgctgagcagaaccagcacctccgggccttccttagccgcctgcatcgggtggcacaggtaacccctcctgctggaaccagcacctccggg

SEQ ID NO: 109482 - DNA, 860 bp, Homo sapiens
aatggattaagtgttcctattcttcaacatccagaccttcaagatgtgttacttattcctgttattggacccagaaagaatattaaaaaacaacagtgtgaagccattgttggagcccagtgtggcaatgcagttttaagaggagcccatgtctatgccccaggaattgtgtcagcatcacaatttatgaaagctggagatgttatttctgtatactctgatattaaaggaaaatgtaagaaaggagccaaagaatttgatggaacaaaagtatttcttggaaatgggatttctgaactaagccgcaaagaaatcttcagtggattacctgaactgaaaggcatgggcataagaatgacagaaccagtatatctcagcccttcatttgacagtgtactgccccgttacttatttttacaaaatttgccatctgccttagtaagtcatgtactaaatcctcaacctggagagaagattctagacttgtgtgcagcacctggagggaaaacaacacacattgcagcactaatgcatgatcaggtctgctgcggtttgctggaggtccaccccagaccctgtttgaccgggtatcaccagtggaggctgcagaacagcaaaaattgctgcctgctccttcctctggaagcttcatctgaaagggcactggcccgatgctagctggaactctcctgcatgaggtgtctgtcgacccctgttgggtggtctctcctagtcaggaggcacggagatcagggacccacttgaggcaatctgtcccttagcagagctggtacactgtgctgggagaatcccccttgtcaggatcagcttctctcttcagagcccgcagcttgggaaag

SEQ ID NO: 109483 - DNA, 330 bp, Homo sapiens
  misc_feature (1)...(330): n = a,t,c or g
aagtnaagaaaaattagaccatggaaagaaattgaggtgtgcaagggatgataaattcaggaaacaccagtaagacagagtgaaaagaagaggcaaaaaagtgacaggagaagaggctggaaagatagacaaggaccacattatgaaggtcctcatatttaagtttcaacttcttaaagttagtccttaaagctgagtggttttaggagttttaagcaagagggatgtaatagaaatttaaaaagttttggccaggcgcggtaggtcacgcctgtaatcccagcacttcgggaggccgaggcgggcggattacgaggtcaggaaatcgat

SEQ ID NO: 109484 - DNA, 430 bp, Homo sapiens
gttggcaggttggtctcgaactcctggcctcaaatgatccgcccgcctctgcatctcaaagtgctgggattacaggggtgagccaccgctcctggctgattttggctacattttaaaagccccaacaggatttgcctcgccatactggccccgggggaggagagagagttagggagtcaagaatagctcccaaggtttttgggcctcaaataactgtaagggaagaatggaattattttactgaaatgaggaaaaactggaggatcttgttgggggttaaagctcaggttttgggacatattagcctaaagtttgaattactagacattgaaaagaatttgtcaagaagacattcggatatatgagtctagaattcagaggagaggtctgcgctgagtatatacatttgtaagtcctcagtatatggcta

SEQ ID NO: 109485 - DNA, 586 bp, Homo sapiens
ttaattgagacgttcttgttttgagtttcgctcttgttgcccaggctggactataatggcgcaatcgggctcacagcaacctccacctcccaaagtgctaggattacagacatcagccaccgtgagcagcctagcagaataatcttaaccacaggagcaaaagacttgtacaatgaagactacaagacactgctgaaagaacttacagatgccagtaaatggaaagatacttcatattccatggatggggaagacaatattgtaaagatgcccaatactaccccaatgcagtcctacagattccagtgcaatcctatatcaagatcacaatattttttgaagaaacagaaaaatcccaacctaaactttatgtggggccagacacggtggctcacacctgtaatcccagccctttggtaggccatctgcaccacagtataagctatcctaagacacagcaagagaaaagaaagcagatctagaaggagtgattcttccccatgtgtgtgcctttgtgggatccccatttgctcatgacctagcagaaaaatcagacgcttcctctggggttatcacatcaccataa

SEQ ID NO: 109486 - DNA, 396 bp, Homo sapiens
  misc_feature (1)...(396): n = a,t,c or g
aactggaagacattcctttataaccttgaagtaagaaggactttttaaccgtgaatcagaatccagcagccattaaaaaaaatgataaatttgactaaattcaaataaagtatttttnnnnnnnnnnnnnnnnnnnnnnnnnnnnnnnnnnnnnnnnnnnnnnnnnnnnnnnnnnnnnnnnnnnnnnnnnnngaaacattctttttgtgctcctcttggcagcacatatgcaaaaataggaaagatacagagaagattagcatggcccttatgcaaggatgacacacacatttatgaagcattttatatttttatccttatgaaacactcaaagaaacgtcatttaccacttttccagctgcggtggaccagacattttcagatttgcctgttttn

SEQ ID NO: 109487 - DNA, 355 bp, Homo sapiens
  misc_feature (1)...(355): n = a,t,c or g
attctatatacctgtaatttnnccataaaagtagctcattactctgctttctttctttcnnnnnnnnnnnnngggcaaggccaaatttttgggccccccccaaggtttttttttatgttttggggggggaaaaaccgaccccgggggggtaaaaacaagggggaacccggggttgtttccttttttggggaaaaggggggaaatggggggcttaaaaaaaannnnnnnnnnnnctttttttcctnnnnnnnnnnnnnnnnnagaacttggtccccaaaaaaatgcgggggaaagttttttgtccccccgagccccgggccagggaccctggggttacaaagggcccctccccaac

SEQ ID NO: 109488 - DNA, 411 bp, Homo sapiens
  misc_feature (1)...(411): n = a,t,c or g
aactgggattgtgtattcctaactgcagagctttgttgagatgcaaatgaccaccccccaaccccaccccaaaaccctcccaaagagtagcgattttatatttgatttccnnnnnnnnnnnnnnnnnnnnnnnnnnnnnnnnnnnnnnnnnnnnnnnnnncccctcataaacccgaacaatgtaggtgtctagtcatatacaggtcttagcaagaaagaaagttcgagaaattcacgccgccattaaggtacgtctggcttgcccacttgtacggggcttttcatatccatggttacaggcttttcctttgttttccttccttcccctaccctgcaggtgtctaatcacattcaggttcttgccagaacgaaatcttttgattttcattacaagctaaaaggtatgcgctg

SEQ ID NO: 109489 - DNA, 287 bp, Homo sapiens
ttgaggatattacctcaatccctgcatcaggcttcttcccattttcactgtcctgcgcctcactccctgcatcaagctccttcccaccctcagtgtcctgcgcctcactccctgcatcaggctccttcccaccctcactgtcctgtgcctcactccctgcatcaggccgcctcctaccctcactgtcctgctcctcactccctccatcaggccccttcccaccctcactgtcctggaaactgctgggtctcgactttccccaccctgacaccaccagcaagataagc

SEQ ID NO: 109490 - DNA, 363 bp, Homo sapiens
gtctcgatctcctgacctcgtcatcctcccgccttggcctcccaaagtgctgggattacaggcttgagccaccgcgccccgctctttcgtgttccaaaggctttttaaataaacttccactcctgtcctggattctgctttatggccctcagtcgaattctttcttctgaggaggcaaggactgaagttgcttctgaccagtacaggtacgccgcaggagaaaacgaatacagcagggatgacttccaccagctccactttgcagctctgaggtgtattaaaaatgacctggaagaagtcatgccacgggccagaccttaccattcctttcggcttaccccaggatttcagacaaagcttcac

SEQ ID NO: 109491 - DNA, 302 bp, Homo sapiens
gcaccatgtatgccactcagtgggaaactctgactgattttactaagtggctgggcagagaaggtaagaatgagattttaaagttgctttttctttcccacttctaatcttcataggatgagatgtttgggataagaaaagagaaaaaaaattgggtcagtgttttgctttttcatcgtgttagttgattccattttgggagcataatttctgccttaagttaatagaacatcatataactgttggacattaaatacttagatagaactgaataaatactatgcaagataatacaggtgtct

SEQ ID NO: 109492 - DNA, 300 bp, Homo sapiens
  misc_feature (1)...(300): n = a,t,c or g
gggaagtcttcatgcatcagggctcccttaataggcacatgagatctcacactgaacagaaaccaaatgagtgtcacgaatatggagagaagccacataaatgcaaagaatgtgggaaaaccttcactcgcagctccagtattcgaacccatgaaagaatatatactggagagaaactataaagaaaattctatatccatcccatcttttgtgggggttgttttttgnnnnnnnnnnnnggaaaggaaattttgcttttgtgccccagcctgaagggcagggggccaaccggggttaacc

SEQ ID NO: 109493 - DNA, 365 bp, Homo sapiens
ctccctgtccccatctgaggtctggcagctcttagtcatgtcttgccgggaggacgggcatccagggctgaccggtcaacgtccagcacctcccagggactatgggaagactgagtggtgggtctcgtcctctcgggatacttgcgcttctcttactggtgattgtgtgccccctgttgtgtgccttcctggacctctctgagggaggaaagggcagggcctgaaacgttctcccggccacagcctccctgttatccctcccctttgtttccttcgccaggccaaggcgaacctagacaagaataagcagacgctggagaaagagaacacagacctggccggggagctgcgggtcctgggccagg

SEQ ID NO: 109494 - DNA, 258 bp, Homo sapiens
ggcacgagcgagaccttagcggactgaataatgagcattttgcaaaaatcctacagttaccattatacctaatggagaaagcctgaattctttctacctaaaatcaggaactgggaaatcacaactcatattcgacattgtactggaagttctagccagtggaccacggcatgacgaggaaataaaagtcatgcagataaagaaaggaataaagctgactctatagaaaatcataaggaacatacatacaaacacctg

SEQ ID NO: 109495 - DNA, 412 bp, Homo sapiens
  misc_feature (1)...(412): n = a,t,c or g
agaaaacaggcacaaattcgaaaagtttaccctggactttcatgttttaaagatggagttcgacagattcctatagaaagcattcctggaattagtacgtatagaccttcttttaaaagcgaaattttttagtaatgccgtggtttgtgtttgaaacaatttccagaatgcagtaacttcgaaagctttattgccctgcccgtctctgtgttatctctagtcttttaagaaggcagcaaatgttatccttttatgtcttccctaccacccaataacaaaccaaagggagcttagatgcccccttgtaatagctgttaatatccaccacttattaagagtctgccatttgtagcacagtgcgaattattacacatatgcaaccttgaaagnnnnnnnnnnnnnnnnnnnnngc

SEQ ID NO: 109496 - DNA, 524 bp, Homo sapiens
  misc_feature (1)...(524): n = a,t,c or g
ttaangcctctcaaatgtttctgggctgaaaacaattttttggaggcgtgaagagtcaaaactgtcacagtgactgggatatatcaaacacttaaccccggacatctttaccttgaaatttctaggaaaacattacacaacatgagttacatgaatgacatcagttactgtagcattaggtttttccatagttattggtctttgttttgttttgtagagacagggtctcccgtatgttgcccaggctggtttagaactcctgggctccagtgatcctcccacttcagcctcccaaagtgctaggattaccaggcataagccaccacgcctacccacagttacagtcttaaacacgatcttcaagtagattgatgataaaattttcagttagttatagtctcaacaccggcaaatagccaaaaatgctaggcattgctaatttaaaaaggaaatcagtcttcctcttttcaggactcaaatatatttctaagttacctgtagaaatcatgctcgtaacgaactgg

SEQ ID NO: 109497 - DNA, 235 bp, Homo sapiens
caagataatgcttttgaaaataaaagttgatatggcttgcttgtttcctcaggtctgacggtaactgctgtaaaagactcaggagaatggaatttggaggctggggcattagttcttgcagatgcgggcctttgctgtattgatgagttcaatagcctcaaagagcatgataggaccagtatccatgaagcaatggagcaacaaaccataagtgttgtaaggctgggtaagagat

SEQ ID NO: 109498 - DNA, 364 bp, Homo sapiens
  misc_feature (1)...(364): n = a,t,c or g
nnnnnnnnnnnnnnnnnnnnnnnnnnnnnnnnnnnnnnnnnnnnnnnnnnnnnnnnnnnnnnnnnnnnnnnnnnnnnnnntgctcccagtaaattctgctggaaagaccagagtgctcttttggccagtcgctcagcagtgtcctggccatctacccgaggatctccctgcttctggacctctgcttccctcccaccactgtcagggtggagccccctcgtcaccaagttgctgtactgcagtagctgcctcctggcaccaggtgtgcccacctcccaccacggctaccagagctgtcttcctcaaacccagctcagatggtgttgccctccacgttacatggctccacgctgccactagaatn

SEQ ID NO: 109499 - DNA, 352 bp, Homo sapiens
  misc_feature (1)...(352): n = a,t,c or g
agttctttggnnnnnnnnnnnnnnnnnnnnnnnnnnnnnnnnnnnnnnnnnnnnnnnnnnnnnnnnnnnnnnnnnnnnnnnnnnnnnnnnnnnnnnnnnnnnnnnnnnnnnnnnnnnnnnnnnnnnnnnnggaccccagttttttctcagcctacgcatctatcctcatgaaggaacatttcattttagtactgggaagactttgaatacatcctggatccagaagccaagaagccagataactggaaggaggctatggatggggagtgggaaaggcctctgatgccaaatccgaagtataaggtgaggggggtctctctttccaatgggtgtgagaaatgagacaaaagac

SEQ ID NO: 109500 - DNA, 363 bp, Homo sapiens
  misc_feature (1)...(363): n = a,t,c or g
ctaacgtgcatgttctaatttcttctaataccatgtaattgatctattcagttttctcaggaaatttatgagtctccctttctgactgaaacaggagagtattacaaacaagaagnnnnnnnnnnnnnnnnnnnntctatctgctcgcagtatatggaaaaggtaagaaataaaccatatcgaatgcatttatctatttggtatctggcctggttttagttaacatcgttcttagttttcttgttttgtttcatggtggaaaaatattcggtttatttaatctatttaatcattagctctgagttcccgttattccctaatatcgatccctaagtccctgctcttaaaaatcgcctgaacatt

SEQ ID NO: 109501 - DNA, 354 bp, Homo sapiens
  misc_feature (1)...(354): n = a,t,c or g
ggagacagaacccagaagtaccatggcttctgacctagagagtagcctcacctccatagactggctcccccagctgaccctccgagctaccattgagaagcttggaagtgcctcccaggctgggcctcccgggagcagccgcaagtgttcaccagggtcacccacagatcctaatgccaccctgagcaaagacgaggcagcagtgcaccaggacggcaagccacgatacagctatgccactctcatcacctatgccatcaactcctnnnnnnnnnnnnnnnnnnnnnnnnnnnnnnnnnncccaccccaaaaaaaagaggaatactaatatctactctactgagggggtgtgan

SEQ ID NO: 109502 - DNA, 371 bp, Homo sapiens
  misc_feature (1)...(371): n = a,t,c or g
ctaaaatgcatattggtcatgcatcaaagaaaactatttaaaaaaagagaaaagacaacctaccaagtgggagaacgtttttgcaaatcaggtatctgataaaggtctaatatctagaaaatagnnnnnnnnnnnnnnnnnnnnnnnnnnnnnnnnnnnnnnnnnnnnnnnnnnnnnnnnnnnnnnnnnnnnnnnnnnnnnnnnnnnnnnnnnnnnnnnnnnnnnnnnnnnnnnnnnnnnnnnnnnnnnnnnnnnnnnnnnnnnnnnnnnnnnnnnnnnnnnnnnnnnnnnnnnnnnnnnnnnnnnnnnnnnnnnnnnnnnnnnnnnnnnnnnnnnnnnnnnnnnnnnnnnnnnnnnnnnnnnnnnnnnnn

SEQ ID NO: 109503 - DNA, 360 bp, Homo sapiens
gatcttgaactcctgggctccagtgatctgcctgcctcggcctcacaaaatgctgggattataggtgtgagccactgcgccttgctgatggcatcttagaaataaagaaatactaagtaaactcatactttattttactttttacttttctctgtgaaaatgttaacaagtcatttaatatctgtggtactcaatttatttgtaaaatggggatgatgatagcccagttaataagctaccttagcaatttcttaggcttggtctgaagctatatgaaataacttttaaagagcaaagcactcttaaaattcagattttattattcatattaataatataattaaacagagtactgcccag

SEQ ID NO: 109504 - DNA, 386 bp, Homo sapiens
  misc_feature (1)...(386): n = a,t,c or g
attgggctggctgagaaggtcccgctgggctggcggccctgtggctgtcctcgtaaccagggacccgtaccccagactgcatgggctggagcttttggaggcctcccacccagtctcactttgcctgggaagggggagaggatggcggcagagacaggtgacatgggcttggtcttggggcaggtgactagaagatccagacagagcaaannnnnnnnnnnnnnnnnnnnnnnnnnnnnnnnnnnnnnnnnnnnnnnnnnnnnnnnnnnnnnnnnnnnnnnnnnnnnnnnnnnctgtttagctcttcctctgtacaaaggggatgataattatccccatctgacaggatttagaaagataacacactgtgagcccaatctatgtgn

SEQ ID NO: 109505 - DNA, 359 bp, Homo sapiens
  misc_feature (1)...(359): n = a,t,c or g
atttgattcagttgatctacagctggtaaccgaatggttaggaccaagaaaaaaatgtaaaannnnnnnnnnnnnnnnnnnnnnnnnggaaaagggagttttcttttgcccccccnnnnnnnnnnnnnnnncccccataaagtttccgggnnnnnnnnnnnnnngatttaagggggatcccccgcggggaaaaaggggggcgggccccaacccggggggattttgggggtttaaaaaaaggggggggtcccccctggggccccggcggggccttaaatccggccccgggggaccccccgcccacccccccagaagggcggggaaaaaggggggggccccannnnnnnnnnnnaaaattt

SEQ ID NO: 109506 - DNA, 358 bp, Homo sapiens
  misc_feature (1)...(358): n = a,t,c or g
tgtagtttggggtttgttccttttagctgtgggtatgatctaattttttaatgactaatggagaatcaggaaaccttctcatgcctagctctctagcaatataaaactaagagtgacagaataccttgttattatcataggtgcctaatgttaannnnnnnnnnaattctctcaagcctttatacccaatacctatgacgcccatgccagtgaatcaagccaagacatatagagcaggtaaaggtgagaataatcctgcctgtgtttgcttgtagtttgcatgctgcatgaattgagtaactaagtttataatgaataaatagttgtagtttagctctgactttttgatgaggctatg

SEQ ID NO: 109507 - DNA, 1004 bp, Homo sapiens
gccaataatatttttattgtcatagatttccttcaagatagcccctaaaagttacttcagagctatggtaaacaggaaaaccctgcctcttcattttataaacagctgcagaaaacctgtcttgggtttttaacactttaagaaccaagctgagcatggcacatatgcctgtaatcccagctccttgggaggctgaggtggaaggattgcgtgagcccaggagtttgaggccagactgggcaacatagtgagacactatctcttgaaagaaagaaaatgaaacaagacagggtttttttggttttgtttttcatttttgtttttgggcatgccctaaaaataatggaatattgccatatgccattttaattctatagctgttgagaacttgtgttgatttcttccgcctggttccatttatggtgttcttaattgtacccttcatggaattcttattaccagtgtttctgaaactcttcccagagatgttgccatcaacttttgaaagtgaatccaaaaaggtatgattttttaactttaataaaatttaataaaccttattagaggagtttttaggtttacagaaaacttgggcagaaagtactactctcccccacccaaccccatcccaatttctcctgtaattaatatcttgcattagtgtgctatatttgtaatgattaaaaaaaccaatattgacatggttaattattaaaagctcatactttaggggcccactcttcatgttgaaagcatttcctgtgggctttgcaaatgcataatttcatgtatcccacccatcacagtatcatacaaaatagtttcactgctctaaaaattccctgtgggccaggcacagtggcttatgtctgtaattccagctccttgggaggctgaagcaagaggatcacttgagcccaggaggtcaaggctgcaatgacctatgatagtgtcactgcactccagaggcactgggtgacagggggagaccctgtctcaaaaaa

SEQ ID NO: 109508 - DNA, 402 bp, Homo sapiens
  misc_feature (1)...(402): n = a,t,c or g
aactggatatctacaggcaaaagaataaagccgaacctctatctcacaccatatataaaaattaagtcaaaatggatcaaagatctaaatgcaacatctaaagctgtnnnnnnnnnnnnnnnnnnnnnnnnnnnnnnnnnnnnnnnnnnnnnnnnnnnnnnnnnnnnnnnnnnnnnnnnnnnnnnnnnnnnnnnnnnnnnnnnnnnnnnnnnnnnnnnnnnnnnnnnnnnnnnnnnnngnnnnnnnnnnnnnnngggagggctgaaaatttttnnnnnnnnnnnnnnggggaaaatttttggaaacttgtttaaaacaagggttttttatttttaaacccgaatgtcccgccgnnnnnnnnnnnnccatttattcctcgggggtcaaaaaaaataaaaaacg

SEQ ID NO: 109509 - DNA, 439 bp, Homo sapiens
  misc_feature (1)...(439): n = a,t,c or g
ctgtataccccctccgannnncgggtcgacccacgcgtccgaaaaaatcccaggaaaatatattcaaaggaaacaatttccaagacatacaactgaggacaagtgagccagatttcacctctgcaaatatgagagattctgcagaaggtaagcttgtgatattggcttggtctgaattgggtgtgtatgtacccagtgaatttaactttgtatctctttatattgttcttctgagaatcatttaggatctttacgaggttaaacagcaaaaaagctgcctaaatttaatgtggtaagctgagccttctatatgctaccttcccttcaaacaattgggaaagacttttcttcttaaaaatgagcttgttcctttgttnnnnnnnnnnnnnnnnnnnnnnnnnnnnnnnnnnnnnnnnnnnnnnnnnnnnnnnnnnnnnnn

SEQ ID NO: 109510 - DNA, 437 bp, Homo sapiens
  misc_feature (1)...(437): n = a,t,c or g
ngacatagaaacccacgcgtccgaacggatggaagcacattactgtctcttggattgggcgcattaacactttaaaaatgaatgtgcttcccaggatttcctatttgttccaccagctgcctgtggatgtgccagataaacagtttaaggataagtatgtaaaagatgcatgtgtaactttttgtgtgctgaagtgcacccttgtatcaagagtcctcaactgtggcccctttggannnnnnnnnnnnnnnnggcccaaggctgggaaggataaaaagaaaagggctattttctttttgggagattcgggggaaaaccctccaaaaggtggattcaactttttgacaagaggccggccggggttaaatcttttatcatttccacctatagtgattccaaataatagggatggtttgcaaaaaaattttgggatgagt

SEQ ID NO: 109511 - DNA, 832 bp, Homo sapiens
cggccgcaccgaccgctttgccttccagctgccctttgctgagggcgcgggcgatggggcgcgcctcgacttcgtggtgcgctatgagacccctgagggcactttctgggccaacaaccacggccgcaactacacagtcctgctccggatcgcacccgctcccacacccactgatgccgaaaggggtgcccccagcagcaggcagctgccgcagctgggagccacagcccgagtgcccagggtcccgtggaggctgaggccagggcagctgaagagctgcaatgaagccggtgagggccaggcttgccgagggaggaactgaaagacgaaggaacatggatgataacaccttttgccatggcaggagcattcctggatgttccaggggagttcagtggggtccactgggtaggccccccacccttctccgttccatgggccccagattgacattttcaggtctgctggagtttgttggagttccactccagaccctgtttgcctgagtatcaccagcagaggctgcagaacagcaaagattgctgcctgttccttcctctggaagcttcatcccagaggggcacccactagatgccagccagagctttcctgtatgagtgacataagggaattctaaattgatacaccatcaggattcaccctcaagattcaacttcaacatttttcaaagtccttcaataagaaggtaaaactcagtttcaagtttctttgtcaacaacaacctttactcctattaccaagaatttctattcaacaaactgcaaagcagttataaaagtaataaaggtaaaaaaaagtggtaccatgaaaa

SEQ ID NO: 109512 - DNA, 429 bp, Homo sapiens
tcctctactcaaggatgtttagcttgttctcaatcttgctgctgtaaacagtgctgcagtgaacaccctttcctgtgtgtctccatgcacgagtgcatgtgtagctgtcggagccatttctgcacacagaattactctttccaagagtctgtgcgcttaaaattttgtcatgtattttttaattgccttctttttcattctgaaaatgtatatattttaaaaggcaccccgccttcacccccagattcaaatttgtttcctccatgagctcctctcgtgctgcacctgcttagcaacggtgaagccagtgagctcattcaaatatttactgaccttgccgggcgcgatggctcatgcctgtaatcccagcattttgggagtccaaggcaggcagatcacaaagtcaggagttcgagacctctactcgac

SEQ ID NO: 109513 - DNA, 450 bp, Homo sapiens
gggccggaggtcccgtgtcgacccacgcgcccggaaaatatgtccacgatgtaatgctcaatttcgtgttactgaagctttgagaggtcacatgtgtgtaagtgatatcacctgtgatccagcttaagtggcttctgccatttaccttcattaatattggaagcttgtaagcaggggctctaaaatgactgaagctttttaaagggttactgtttctcttggtctgtttttagaagagctgtgtactttggaatgtgatgggatacatttaaagaccctcaaatagatcagaacatatgtgatcttactttcttagtgtggtagattttgaaaccacacaggagaacaggtttatagataataaggactcaaaccatattggcctcagttcatttttgttaattgtgtcattggatgaatcgggagctcttacttccattttttagcttt

SEQ ID NO: 109514 - DNA, 346 bp, Homo sapiens
ccagcctccagcacagactggctcctgtcctttgctgtctatgaacgacactgcctcaggacgacactaaaggcactgcccgagggcgcctgccacctcagctgcctgcagatagcatccttcctgctctccaagcagagccgcctgaccggtcccagcgggctcagcagctaccacctgaagacggccctactgcacctcctactcctccggcaggccgccgactggaaggcggggcagctggacgctcgtctgcacgagttgctgtgcttcctggagaagagcttgctccacaagaagctccaccacttctttattggcaaccggcaaggggccggaggccatg

SEQ ID NO: 109515 - DNA, 426 bp, Homo sapiens
  misc_feature (1)...(426): n = a,t,c or g
tccggaatttttgtctgtacccacgcgtccgcccacgcgtacgcccactcgtacgcccnnnnnnnnnnctggaataaggggaactctttcctcgtggagggacagtgattatgatcccggcttaaaaccactgaccatctcttatgacccagccacctgcctccacgtctggtataatgggtactctttcctcgtggaatttgtagattctacagataaatcagcatgcatagaggaaaaaaagagtgaatgaacataataaataataagtgaaagaaagcaggacattttagaaacaaaggcaagaaacaattctagaaaagtaaaaacctaatatatatcgatgtctataaatttcaaagacaaaaccctaagaaatgctgccacagtgtgctttgtgaggattggaatacagtgcatggaaat

SEQ ID NO: 109516 - DNA, 447 bp, Homo sapiens
  misc_feature (1)...(447): n = a,t,c or g
nnnnnnnnnnnnnnnnnnnnnnnnnnnnnnnnnnnnnnnnnnnnnnnnnnnnnnnnnnnnnnnnnnnnnnnnnnnnnnnnnnnnnnnnnnnnnnnnnnnggggtttgagggtttaacattctgccagcacttgcttatttctgtgttgcacagggatgcactggcaggaatttgtattttcacgtttcaggtttggaaagcagagtggagaacaaagagttgattccaatgcaacaaattttagaagaagcggagccacaggggcaactacaagaagcgttccaggggaagcgccccctgttttctaagtgtggcagtacccatgaggacagggtggaaaagcagtccggagaccccttgcccctgaaacttgaaaattctcctgaagcagaaggactcaacagcatctcagatgtcaataagaatggttccatagaaggagaagag

SEQ ID NO: 109517 - DNA, 416 bp, Homo sapiens
  misc_feature (1)...(416): n = a,t,c or g
atcttgaccaatggctacacgataatgacaatcatgttgcagcacctcactgtaaagcgggacagggacgaactgctgtaatgacatgtgcatatttattacatccaggcaaattattaaaggcacaagaggccctaaatttctatggcgaagtaaggaccacaaacaaaaaggcaagctattttctgatgttgtgcctttcctcttcctggatctgaaaatttattgtgaaacagattatgcgcttgtttttttccttcagatttattgaggagctattgacacgtacactgtatttatacctgcgctgcataacatgacgctttgatgtatgtgtannnnnnnnnnnnnnnnnnnnnnnnnnnnnnnnnnnnnnnnnnnnnnnnnnnnnnnnnnnnnnnttattctccccccag

SEQ ID NO: 109518 - DNA, 463 bp, Homo sapiens
  misc_feature (1)...(463): n = a,t,c or g
gtgctgaatataccgcgtcgacccacgcgtccgcagtgttnnnnnnnnnnnnnnnnnnnnnnnnnnnnnnnnnnnnnnnnnnnnnnnnnnnnnnnnnnnnnnnnnnnnnnnnnnnnnnnnnnnnnnnnnnnnnnnnnnnnnnnnnnnnnnnnnnnnnnnnnnnnnnnnnnnnnnnnnnnnnnnnnnnnnnnnnnnnnnnnnnnnncnnnnnnnnnnnggaaagggagcttggtttggccccccagcttaaagggcgggggcgcattttgggttggtggaaaccttggcttctgggtttaaggggattttctggcttaagcctcccaagagctgggaattacgggggccccccattatgccggcttattttttggttttttatagagacagggggttgacccccgtgggacgggtgtggctaaaattcggagctctaggtgaccggcctgcttggttttccaaa

SEQ ID NO: 109519 - DNA, 140 bp, Homo sapiens
tgctcccaacatttattcttcattatattgatggtattttaattgctgcccccactgataaagaattaattgactgttctcaaagtttgagaaaacaagatacagaggctggattacacatcgctcaggataaatatcac

SEQ ID NO: 109520 - DNA, 443 bp, Homo sapiens
  misc_feature (1)...(443): n = a,t,c or g
nggtccctaagccccttgcccattggggcgggtaaaacaaaaattccgggggtggggccttttttaaaacaaaaaaggtttttttccccagttttgggggtaagaaagtccaaaacaaaggggccgccacccgggaagggcctccttctggggccccccatccccaaaagtggggaaaagggaaaaggaaccccttttttccccaaaggcccttttaaggggccccatccccctcccaaagggggaggcccccagggcttattccccctcaaaaaaccccccccnnnnnnnnnnnnnnnnnnnnnnnnnnnnnnnnnnnnnnnnnnnnnnnnnnnnnnnnnnnnnnnnnnnnnnnnnnnnnnnnnnnnnnnnnnnnnnnnnnnnnnnnnnnnnnnnnnnnnnnnnnnnnnnnnnnnnnnnnngacgcgtaggtcgacccggaa

SEQ ID NO: 109521 - DNA, 368 bp, Homo sapiens
tgactttgctgtctttcttacaattctgtgtatggttttaattgactatgccattgggatcccatctccaaaactacaagtaccaagtgttttcaagcccactagagatgatcgtggctggtttgttacgcctttaggtccaaacccatggtggacagtaatagctgctataattccagctctgctttgtactattctaatttttatggaccaacagattacagctgtcatcatcaacaggaaagagcataagctaaagaaaggttgtgggtaccatctggacctattaatggtggctgtcatgctcggtgtatgctccatcatgggcctgccatggtttgtggctgccacagtcctctccatcactt

SEQ ID NO: 109522 - DNA, 375 bp, Homo sapiens
cccacgcgtccgcccacgcgtccgggcttacctgatccgtgggtatctcagataacaaatacagatacacttgcggctgtagctcatatcttgcaaagtcctcaaggccagcagcttcaacaattaatacaaaccttacagatacaacaacagaagccccagccttccattctgcaggccctagatgctgggcttgttgttcagatgcaagctcttacggcacaacttacagctgcagctgcagctgccaacactcttactcccttagaacagggagtctgctttaacaagaagttgatggataggtttgattttggggaagagtctgagcatagtgaagaacccaaaaaggaaactccagcttgggcaacacag

SEQ ID NO: 109523 - DNA, 770 bp, Homo sapiens
gcggtggaattcgtcaaacaaaatcccttaccctcttcattccctggtaaaaagatcacaatcagattagctgctcctgtgtgttcttctaagactctgcaggctgaggtccctttgtcagactgtgtccaaaaagcaagtaaacccacttcaagcacacaaatcatggtgaagaccaacatgtatcataatgaaaaggtgaactttcatgttgaatgtaaagactatgtaaaaaaggcaaaggtaaagatcaacccagtgcaacagagccggcccttgttgagccagattcacacagatgcagcaaaggagaacacctgctactgtggtgcagtggcaaagagacaagagaaaaaagggatggagcctcttcaaggtcatgccactcccgctttgccttttaaagaaacccaggaactattactaagtcccctgccccaggaaggtcctgggtcacttgcagcaggagagagcagcagtctttctgccagtacatcagtctcagattcatcccagaaaaaagaagagcacaattattctctttttgtctccgacaacttgggtgaacagccaactaaatgcagtcctgaagaagatgaggaggacgaggaggatgttgatgatgaggaccatgatgaaggattcggcagtgagcatgaactgtctgaaaatgaggaggaggaagaagaggaagaggattatgaagatgacaaggatgatgatattagtgatactttctctgaaccaggtattataatgcttgcaggctc

SEQ ID NO: 109524 - DNA, 448 bp, Homo sapiens
aacataattgattactggagttggcaattgtgaaatcgcttttgcaacttaactaagtagaagttggaattctcagtagttttttttctttcagaaaagaatattctcataaatatgttacttgcctttagaaaaaaattggaacaattaagtacgaaatcaaagggactggtgacttttgaatatatagtttgttgttcttaaaaaggtatatgtaaatgatgatcttgacttctttattagggcctgaaataactactctttccactttaacaatcaccctagagctgcagctttggaacagttcaagtctcttggtgctgagcccttggaggtggacttgaaggaatctggtgagggacaaggaggatatgcaaaagagatgtccaaagagttcattgaagctgaaatgaaactctttgctcaacaatgcaaggaggtagacatc

SEQ ID NO: 109525 - DNA, 406 bp, Homo sapiens
  misc_feature (1)...(406): n = a,t,c or g
ngtgtttctctacagagacatctgagtgccacagatacttctttctctctggaagacttattccagttgctttcatcgcagcatgaaaattctctggaggtaattggaactttggatatcatcctcgcaggaacatatctgcactgaccttttggtgaacaaatacaactcctttacttggatgacacagcagtttaaagtaatgcttatttttacagaagcgcttcagcttagaattagccaaatatgtatagcattcctcttttcaaataatcccaaaggtataatcaagttaagactagtcatggaaaacagcgtgtagatttctcaaaaacctaaaagaattgtcannnnnnnnnnnnnnnnnnnnnnnnnnnnnnnnnnnnnnnnnnnnnnnnnnnnnnnn

SEQ ID NO: 109526 - DNA, 403 bp, Homo sapiens
  misc_feature (1)...(403): n = a,t,c or g
ngcgccacgggccgcccagactacagacaaggcctggctatgcagccctcactggcaccgcggccgtgaagtcggcttctcctcagagccctggaggcaggcctggcagagcagaggtggtgtccccgccttgggggcctgtgcccctgggaaggtgctggcccaaatgtctcaggctttctgcagcccatccccagcagttcaggccagaggctcttcctgcaggtggcggtggcctgatgggctcagcaggcatgcctggagctgctgccctgagctctgctcagggagtctgtttcttcttccccaaatttccacggcctccctgagctctcagattttgagnnnnnnnnnnnnnnnnnnnnnnnnnnnnnnttcttcacttgcgggcagttccaaggaa

SEQ ID NO: 109527 - DNA, 414 bp, Homo sapiens
caaggtaactttgtcagatggtgagtgttattttttcgttttttttttgagactctgtcttaaaaaaaaacaaaaaacaaaaatctaactgtaaaataggattactacttctacttaagtatctaggagaaaagatgctttttattctgcacatatactgtatttttgtatcacaacgcagttcattttaatgttatgaatatccattgtttttcctgatgaacaaaactgtaggctcattttggtgaaaatgttggtttttaaaaaatgcagattcacggccaggcgcggtggctcacacctgtaatcccagaactttgggaggcggaggtgggcgtatcaaaaggtcaggagttccagaccagcctgaccaacgtggtgaaacgctgtctctactaaaaatagaaaaaaaaa

SEQ ID NO: 109528 - DNA, 593 bp, Homo sapiens
tccaactcctgagaaacctaggaaggttcatgcaaagtggatcctggacaccgacaccttcaatgaatggatgaatgaggaaaactatgaagtaaatgatgacaaaaaccctgtctcccgccgaaagaagatttcagccaagacactgacagatgaggtgaacagcccagattcaaatcgacgggacaagaaggggggaaactataagaagaggaagcgctccccctttccttcaccaaccccagaagcaaagaagaaaaatgctaagaaaggtccctcaacaccttacactaagtcaaagcgtggccacagagaagaggagcaagaagacctgacaaaggacatggacgagccctcaccagtccccaatgtagaagaggtgacacttcccaaaacagtcaacacaaagaaagactcagagtcggccccagtcaaaggcggcaccatgaccgacctggatgaacaggaagatgaaagcatggagacgacgggcaaggatgaggatgagaacagtacggggaacaagggagagcagaccaagaatccagacctgcatgaggaaaatgtgaataaacagacccaccacgtgtatt

SEQ ID NO: 109529 - DNA, 166 bp, Homo sapiens
ccttccccatccctgatcgatgtgagggcaattttgacgccatcgccaacatccgaggggaaactttcttcttcaaaggtgagtcatttcacttggcctcatatatgttggtttcctgcccacttccagtgacccactggggctgtgggcttaccctggaagcgga

SEQ ID NO: 109530 - DNA, 221 bp, Homo sapiens
tttcgtctttctccatccccacactcgtgatcacagaacagtttgccaccgcctaccaaggaacaagggctagatctgacaacacacactactggctgatcatctcctgttctattgcctatgttgcgttagtgactctactgatctgggttcctgtaaaagttatcctgcacaagaaacgttatatttacagaaaaattaaaggatggtaagtaaaagaa

SEQ ID NO: 109531 - DNA, 221 bp, Homo sapiens; identical to SEQ ID NO: 109530

SEQ ID NO: 109532 - DNA, 531 bp, Homo sapiens
cgagaattcccgggctactcacgcgtccgcgacaagggctacaagaaccagtccttctacaggaagcactttgacacataagatacccgggtgaatcagctgtttgcacaagcaaaggcctgcaaggtgctggtggagaaatgcacagtcattgttaaggacatccaggcgcacctggctcagggccatgtggccatcgtgctggtgaactcgggggtgctgcactgtgacctgtgctccagccctgtcaagtactgctgcttcacccccagtggccaccactgcttctgccgcactcctgactaccagggccacttcatcgtgctgcgtggctacaaccgggccactggctgcatcttctacaacaacccagcctatgccgaccgaatgtgcagcaccagcatcagtaactttgaggaggccagaaccagctatggcacagatgaggacatcctctttgtctacttggacagctgacagcaggagcctggtgcgcctaggccctcggaccccatccccaccccagccggc

SEQ ID NO: 109533 - DNA, 689 bp, Homo sapiens
ctcccctctccttcctctcgcttcctctctcgcacctgagcgtacgcacctgcccgggcccggctccctcctcctctcccctccctctttccccgcccggccgcgggagcctcgtggctgcgtcaccgccgcccccccagacaagatggacaccgcggaggaagacatatgtagagtgtgtcggtcagaaggaacacctgagaaaccgctttatcatccttgtgtatgtactggcagtattaagtttatccatcaagaatgcttagttcaatggctgaaacacagtcgaaaagaatactgtgaattatgcaagcacagatttgcttttacaccaatttattctccagatatgccttcacggcttccaattcaagacatatttgctggactggttacaagtattggcactgcaatacgatattggtttcattatacacttgtggcctttgcatggttgggagttgttcctcttacagcatgccgcatctacaagtgcttgtttactggctccgtgagctcactactgacgctgccattagatatgctgtcaacggaaaatttgttggcagattgtttgcagggttgttttgtggtgacgtgcacactgtgtgcattcatcagcctggtgtggttgagagagcagatagtccatgggggagcaccaatttggttggagcatgctgcgtatt

SEQ ID NO: 109534 - DNA, 462 bp, Homo sapiens
  misc_feature (1)...(462): n = a,t,c or g
ctcgacacaattttggaattttctcagaatatgaatacgaaatactatggactacaaattttggaaaatgtgataaaaacaaggtggaagattcttccaaggaaccagtgcgaaggtaggaaaataaagaattataaattcagaattttgtttttcctggcatttttattatagttgactgtttgagggggcatgtaatgaatctttagtatattttgctctaatggagcttattgcttttatcatgaagcaaacaggtctgtttgtattggtgggtacaggaaggccacttacaggttatcttttgggagaaagaggagactggactgttgaaaactctgacaataaatattctagttaaaaatatgggctannnnnnnnnnnnnnnnnnnnnnnnnnnnnnnnnnnnnnnnnnnnnnnnnnnnnnnnnnnnnnnnnnnnnnnnnnnnnnnnnnnnnnnag

SEQ ID NO: 109535 - DNA, 391 bp, Homo sapiens
  misc_feature (1)...(391): n = a,t,c or g
agacccagatctgtttccaggtggaaggcaggcttgaaaactgcccaaggctttctcctcccagnnnnnnnnnnnnnnnnnnnnnnnnnnnnnnnnnnnnnnnnnnnnnnnnnnnnnnnnnnnnnnnnnnnnnnnnnnnnnnnnnnnnnnnnnnnnnnnnnnnnnnnnnnnnnnnnnnnnnnnnnnnnnnnnnnnnnnnnnnnnnnnannnnnnnnnnnnnnnnnnnnnnnnnnnnnnnnnnngatccctctttatacacaatctacagattcaatgcaatccgtatcaaagttataatggctgtttttgcagaaataaaaaagttgatcctcaaattcatatggaattgcaaggagctccagatagccaaaataatatgaaaaaacgaaa

SEQ ID NO: 109536 - DNA, 305 bp, Homo sapiens
  misc_feature (1)...(305): n = a,t,c or g
gtctgcaggaattcggcacgagcagcagtgcacacagaaaccaagcagttcttcactttatataataccctggatgataaaaaggattatttggaaaaagagattattctgttgaactcagttcatgagaacttctcacaggccatggactcccctgctgaccgggaccagtttttacgtcatatggaacagattgtggaaggaattaagcaaagtagaatgaagatggataataaaaaccccnnnnnnnnnnnnnnnnncttgggggggggcccgggccccaatttccccttatggggggcggt

SEQ ID NO: 109537 - DNA, 131 bp, Homo sapiens
ttcccgctatggaccagtgaacaaggcgttggtcgcaacaaacaaacctatgtcacctggcaggccgactgcaaagaaaatgcgggcggcgactattactggactttcttcccacagcctacgtttgtcag

SEQ ID NO: 109538 - DNA, 384 bp, Homo sapiens
ggaatgagaggagcagggcagtgacccttttttgtatgtacatgtcatatagatcagaaagtttattctcttcatccccaagaggtccagtgcctcatggttgtcaagtggtcaggaggagtaaacaacagcataagtgatcacccagaaaagaggataaatttgtattcactgccatatgtttagcctatggccaaaaaggacatctcctttcctgctcagcctccttgccctcagccctggagaggccttctctgttcagtaacctctcctccttttctctctgtggtataggttggctatcaagcagggagcaatggccagccccttccctcgcagtacatgaatgatctggacagcgcctcgtgccgaattcttgcagac

SEQ ID NO: 109539 - DNA, 131 bp, Homo sapiens; identical to SEQ ID NO: 109537

SEQ ID NO: 109540 - DNA, 427 bp, Homo sapiens
  misc_feature (1)...(427): n = a,t,c or g
ngaagacctgtttcaatttgcctctatcaggtgctcgatcccaggcagcttccattttaaccaagtttcaagaactcaaagatgttcaggatgaactgagaatcaaagagaatgagctnnnnnnnnnnnnnnnnnnnnnnnnnnnnnnnnnnnnnnnnnnnnnnnnnnnnnnnnnnnnnnnnnnnnnnnnnnnnnnnnnnnnnnnnnnnnnnnnnnnnnnnnnnnnnnnnnnnnnnnnnnnnnnnnnnnnnntagctgttggctaattctcagacttcatctgctgtcactctctcttgctctcattctgttgtagtcacacctgtcccggcatgggatcctctcaggatgctcttcatgttgcttctaacttcacaagtgtagaaagtagaaaagttcctcttcaagctcgtgcgaagagcccttn

SEQ ID NO: 109541 - DNA, 131 bp, Homo sapiens; identical to SEQ ID NO: 109537

SEQ ID NO: 109542 - DNA, 131 bp, Homo sapiens; identical to SEQ ID NO: 109537

SEQ ID NO: 109543 - DNA, 1091 bp, Homo sapiens
  misc_feature (1)...(1091): n = a,t,c or g
acagagcaagactctgcctcaaaaataaaaagataaaataaattcctatttgcatttggataacttaggagaacctgtcttccccggtttgctgacggaaagtcaattgtctgaagtacctaaggctgacaattctcagtttttgctttaggtttgggtattcatttaaataataatctcacaaataatgaaatagtttctgggggaaaaattattataaccttatgcccatatctaaccccattcccttgagccctggtcagtgccaagtgccagtagcttggcacaaacattagtgccctgccaaaccccaattcctctcccactcttttctcacatagctcagctggccgcaccttcatggctaaacaacctgagctcttggagatgccctggctcccctctctctgctccttatcacacaaggttctaggcagctgatgaggcnnnnnnnnnnnnnnnncccctgcaaaaaggggcccccatgtatgggggtgtggggggccaacataaccttgaaaaaaaaagggttggaattccctctgccaggtaacaaggacccctgggcacatccaaactctcaattttggcccccggttcgccagtgccccatcatggacccaccctggaaggccccaaagggggcccccattgaccccataatctttgggggccgaaaacccaaaggggtcccccgggtatacaaggccttaaactggcgtcatggggtgtttgtggccagcgccatgcgctctgagtccactgctgcagcagaacacaaaggtgagcaccctcaccattcctccctctcctgtgtgtgcacacagcacgtcctctctcccttcctgagccagaccttccttttgtccacccctggagtctgatatggccccacctcttcccacttctatcttttccccatccctgaagatattcagaaccataagcctttcacagcttcctctcccactcttttctcacatagctcagctggccgcaccttcatggctaaacaacctgagctcttggagatgccctggctcccctctctctgctccgtatcacacaaggttctaggcagctgatgaggc

SEQ ID NO: 109544 - DNA, 455 bp, Homo sapiens
  misc_feature (1)...(455): n = a,t,c or g
ctccctagtcgcagagtggtggaattcggtcctgatcccagctctgcatctgttagctacannnnnnnnnnnnnnnnnnnnnnnnnnnnnnnnnnnnnnnnnnnnnnnnnnnnnnnnnnnnnnnnnnnnnnnnnnnnnnnnnnnnnnnnnnnnnnnnnnnnnnnnnnnnnnnnnnnnnnnnnnnnnnnnnnnnnnnnnaggtagcgtcaggtgcagtgtgagcgcccgccatcttgtctttcttgtgtccttcatcattgccctcccggggcaccagcctttgccacagtgttcatggttttccttccatccatgtcaggtcttggccaacaagagccacctctgggtggaggaggaggtctggcggatggagatctacctctccctgggagtgctggcccttcgcacgttgtccctgctggccgtgacctcactggcgtccattgcaaactcgc

SEQ ID NO: 109545 - DNA, 748 bp, Homo sapiens
aagagttattgggactctgcctatgatgacgatgtcatggagaaccgggttggcctgaacctgctttatgctcagacggtatcagatattgagcgtgggtggatcttggtcaccaaggaacagcaccggcaactcaaatctctgcaagagaaagtctccaagaaggagttcctgagactggcccagacgctgcggcactatggctacttgcgctttgatgcctgtgtggctgacttcccagaaaaggactgtcctgtggtggtgagcgcgggcaacagtgagctcagcctgcagctccgcctgcctggccagcaactccgagaaggctccttccgggtcacccgcatgcgatgctggcgggtcacctcctctgtaccattgcccagtggaagcacgagcagcccaggccggggccggggtgaggtgcgcctggaactggcttttgaatacctcatgagcaaggaccggctacagtgggtcaccatcactagcccccaggctatcatgatgagcatctgcttgcagtccatggttgatgaactgatggtgaagaaatctggcggcagtatcaggaagatgctgcgccggcgggtggggggtactctgagacgctcagacagccagcaagcagtgaagtccccaccactgcttgagtcacctgatgccacccgggagtctatggtcaaactctcaagtaagctgagtgccgtgagcttgcggggaattggcagtcccagcacagatgcca

SEQ ID NO: 109546 - DNA, 443 bp, Homo sapiens
  misc_feature (1)...(443): n = a,t,c or g
tgcagcgtgctggaattcgtggctacattgggctcccagggctcttcggcctgccagggtctgatggagaacgaggcctgcctggcgttcctggcaagaggggcaagatgggtatgccggttcttctaccccaaagttcagaggccagaggtgggaactcaatgccttcagaaggtgccctnnnnnnnnnnnnnnnnnnnnnnnnnnnnnnnnnnnnnnnnnnnnnnnnnnnnnnnnnnnnnnnnnnnnnnnnnnnnnnnnnnnnnnnnnnnnnnnnnnnnnnnnnnnnnnnnnnnnnnnnnnnnnnnnnnnnnnnnnnnnnnnnnnnnnnnnnnnnnnnnnnnnnnnnnnnnnnnnnnnnnnnnnnnnnnnnnnnnnnnnnnnnnnnnnnnnnnnnnnnnnnnnnnnnnnnnnnnnnnnnnnnnnnnnnnnnnnnnnnnnnn

SEQ ID NO: 109547 - DNA, 445 bp, Homo sapiens
  misc_feature (1)...(445): n = a,t,c or g
ggagcggcaattcgttattctaaaagatgtctgataccatgcaatgcagcactgcatgtccctggtaagcttggtgttggtggttctgtaacctaattctcctgcttggcattctgcaggtggaatatcacccttacctcaaccaaagcaaactcctggagtactgtaagtccaaggacattgtcatgactgcatattctgccttggggtctgactcagacaaagactggtaatcatcttcataaagnnnnnnnnnnnnnnnnnnnnnnnnnnnnnnnnnnnnnnnnnnnnnnnnnnnnnnnnnnnnnnnnnnnnnnnnnnnnnnnnnnnnnnnnnnnnnnnnnnnnnnnnnnnnnnnnnnnnnnnnnnnnnnnnnnnnnnnnnnnnnnnnnnnnnnnnnnnnnnnnnnnnnnnnnnnnnnnnnnnnnnnnnnnnnnnnnnnnnn

SEQ ID NO: 109548 - DNA, 398 bp, Homo sapiens
aagctgtcctcttgaacaacgtcttggtggagagactgaccctgcacaccaggatcaccgcaggtgcgctgggccccgccacgggacacctgcctgtcatggcttccacctgcctggccggtcacccactcacccagtttccctgagcctcactcccctcgtctgtaaaatgggcacacttcctagggctgccctgaggtgtaagacaccgtggtggggcctctgtaccccaagtcatgtccctgggccttgcccaagctcttccccacgtccagtgtgttcttcctttcccattcctctgcacggcaacatccagcttcaaggcccggctcaaatggtgcctcctacaggaagccctccaggtgcccctgttagactcgtaaagcatccctggcccc

SEQ ID NO: 109549 - DNA, 617 bp, Homo sapiens
tgaaaaactccaatatagtgactgtatttagcacatatataaatataatttgcacttgtcagcagactggggtaatcctttcacttgctacacttggcacccccccgcccccaccacaaccctgcctctccatcatgaacctgcctttcctcctccctcgctcctcccacaacctcagcccacccagccggtatcctctgaggaaagtcttggggcactagaggccactgtctccacctggcctccaactccagaattggagccctccagacattacaagaggaacatcagagagccaaaaagcctgacttcttagaaggagccctggactggggagccgggaggctcaggttttcaaatctgctccatgacagacgtcccaatgaccttgagcaagtcccttggcccctgagtctcagttttctgggtggggtgagtgaggagaactgggagatctttagggtcccttagattcaagtagaatgtgacacagatcccgtgggaaaccactgtgctgtgctgtctcaccttctgaggagagaagaaagaggggagaaaagggcaggggcatggggggctttaccgcctggtaattcccaaagcacttttttgagggg

SEQ ID NO: 109550 - DNA, 165 bp, Homo sapiens
gacatctccagcaacatccaggcaatcgtgaaggaacatcctccatcagaaacagaagataagaacaaaatcactgctgcgatcttttattgcatcagcttgacccagcagggactccaaggggtggagctgggaacattcctcataaagcgagtcgtcaaggag

SEQ ID NO: 109551 - DNA, 165 bp, Homo sapiens; identical to SEQ ID NO: 109550

SEQ ID NO: 109552 - DNA, 432 bp, Homo sapiens
  misc_feature (1)...(432): n = a,t,c or g
ccccccctataaggcgaattggggtcccggcccccccccgaggnnnnnnnnnnnnnnnnngtttcagggctttgaagactgcttggtatttgatgagttaatggataaattcagtaacgaccttagtaagtaaggtcaatttctcaactggacatgtactagctcttctgactaattgtgggcttatttctgatcctcaatgatcgcaaacctgtgatgtataatgtatattatctccccaggattacatatttttctactaatagtctatgccaccgttttcccatagcaacaactaacacccagaaaaagaaacatagtttcttttgaagtttctatgtggaggtccatgaagtgattcactcagagataaaagctcagagtacccgtgcttggcagaaataggctgcttctcgtaccgaattcgtcaag

SEQ ID NO: 109553 - DNA, 400 bp, Homo sapiens
  misc_feature (1)...(400): n = a,t,c or g
tgcaggaattcggacgnnnnnnnnnnnnnnnnnnnnnnnnnnnnnnnnnnnnnnnnnnnnnnnnnnnnnnnnnnnnnnnnnnnnnnnnnnnnnnnnnnnnnnnnnnnnnnnnnnnnnnnnnnnnnnnnnnnnnnnnnnnnnnnnnnnnnnnnnnnnnnnnnnnnnnnnnnnnnnnnnnnnnnnnnnnnnnnnnnnnctggaaattacctggggccaaattcggcccgaaatatttaacaaaggaggggctgacaaaaacatacgggagggggccaaacccaaaggattcggaccctttttttttggagggaccaaaaataatgggtggaacggggggccaaataaatgggaaaaagggaaaaaaggccattttgaaaccttttaaaaaaaggcagaaccg

SEQ ID NO: 109554 - DNA, 437 bp, Homo sapiens
  misc_feature (1)...(437): n = a,t,c or g
gaagacgtgctcnggcgaattcggcacgaggggcaaggtatgtgctgagcctcctactggactggcgaggatgcagcctgaattactacaagagtgatgttcccttccagaatgaggggccgaccctgagaggggaagcacagcgcgagagactgataattgcccacgaccaagaagaaagacggcttgcagaacggagggcacgaattcagcaggagtatgaagaggaacaggaaaagaaaagagagaaagaggaggagcaaaggctaaaaaatgaagagcatattcggctagctgaagaacgactaaaagaagcagnnnnnnnnnnnnnnnnnnnnnnnnnnnnnnccctcggggggggccccggcccccaatcccccttatgggggggggaataacaatccctgggccggggtttaaaaacggggggaggggaa

SEQ ID NO: 109555 - DNA, 397 bp, Homo sapiens
  misc_feature (1)...(397): n = a,t,c or g
cccacgcgtccgtgacatcatggagtccaatgcccagggctgcagactgatcctgcctcagatgccaaaggccctgttccggaagaaacaaaaaaagaaagagaagaaaggaaataaggaaggagggagggagagagtgaaggagggaagaaaggagaattaaacacgattatctacatatcaatggaaaatttcaaatatattctagcataatttttttctacttagtatccattaaaaaagggaatcattgtggaatgcttaaatcaatcaaatgaacacagccatccctcggatacttannnnnnnnnnnnnnggggggaaaacattggaaatggattcttttagtagttccaaagggtgccttttgtaacctatagtcactgggcggggaaaa

SEQ ID NO: 109556 - DNA, 383 bp, Homo sapiens
agaattcatacaggagagaaaccttatgaatgcaatatctgtgagaaagccttcagccatcgtgggtctcttactcttcatcagagagttcatactggagagaaaccctatgaatgtaaagaatgtgggaaagctttccggcagagcacgcatctggctcatcatcagagaattcatactggagagaaaccttatgaatgtaaggaatgcagcaaaaccttcagccagaatgcacacctcgcgcaacatcagaaaatacacactggggagaaaccttatgaatgtaaggaatgtggtaaggccttcagtcagattgcacaccttgttcagcaccagagagttcatactggtgagaagccttacgaatgtattgaatgtgggaa

SEQ ID NO: 109557 - DNA, 421 bp, Homo sapiens
  misc_feature (1)...(421): n = a,t,c or g
gatcccccnnnntcgctgcccacgcgtccgcccacgcgttcggcatgtcattgagatgtcatatatctatttccataccatctagagcagtttcattgtgcatccagctgtgctctgaactagcattcctgaaagagaactgctttgcatttttgttttttgttaattgcgttggtttattttaggatgactgtcttaggtcattgacgagatttgccgcagcacactggacagtggcatcagtttcagtggtgcaaggacatttttgtaaactttttgcatgtgagtattaatacatttataacatgttgtaatttttcatcctctgaaattttgtttttaatggtacagcttctctcaataatgaattaaatatttagtagtactggttttcttatatataagctctagcttataaatt

SEQ ID NO: 109558 - DNA, 402 bp, Homo sapiens
  misc_feature (1)...(402): n = a,t,c or g
cggcgggagggagaagagaaaaggggggggaggggggggaagaagaggggaggggggggaggagggggaannnnnnnnnnnnnnnnagaaaaggaaaggggaggggggagggggggaagaggagggaaggggggggnnnnnnnnnnnnnnnnnnnnnnnannnnnnnnnnnnnnnnnnnnnnnnnnnnnnnngngggggnnnnnnnnnnnnannnnnnnnnnnnnnnnnnnnnnnnnngngggggggannnnnnnnnnnnnnnnngcggggnnnnnnnnnnnnnnngggnnnngnngctgttgaaaggcttacaaactgtttttcaagtttttaaagctcatctcgatccctcaatagagtatacctatattcactgagagctccttccagaaactagcacc

SEQ ID NO: 109559 - DNA, 833 bp, Homo sapiens
tgcagaaccgcccggaatcccggtcgacccacgcgtccggatctttttcacagtcttaatttattaatcactgaattagaataaaagatctaacatttctgtcttagtagatatgctttgtgacatatagtacattactaagccttttatctgtctgaaaaatggatccgaaccctgcttctaacttatgttttaagagacactgggaaggaaatgggtaaaaggacctagagggctttcgaatttgtcagctctctaaacgcaaattatttgaagacattgctaaggtcttcattctctttattttcttgagctgaaacagataagatagtcgttggttcatcagttgcccctggcaacactgccccatccccatcctctcccacctctcctacttctgatgccacgacctctctggagatgaacaatcctcatgccatcccacgccggcatgctccaattgaacagcttgctcgccaaggctctttccgaggttttcctgctcttagccagaagatgtcaccctttaaacgccaactatccctacgcatcaatgagttgccttccactatgcagaggaagactgatttccccattaaaaatgcagtgccagaagtagaaggggaggcagagagcatcagctccctgtgctcacagatcaccaatgccttcagcacacctgaggaccccttctcatctgctccgatgaccaaaccagtgacagtggtggcaccacaatctcctaccttccaagggaccgagtggggtcaatcttctggtgctgcctctccaggtctcttccaggccggtcatagacgtactccctctgaggc

SEQ ID NO: 109560 - DNA, 375 bp, Homo sapiens
cagcaagacattagttttgtcagctctacttttgttacagaaatggaaaagactgatttagatattgctgtccatatgacttacaatactggtcagacagttgcggcatttcatagtccttattggatggtcaataaaactggccgcatgttacagtacaaagcaaacggaattcatcgaaagcatccacctaattataaaaagccagatctcttttcttttcagccaaatcacttttttaataacaataaggttcaacttatggcaactgatagtgagatgaccaatcagttttcaattgatactgttggtagtcatggagctgttaaatgtaaaggcctgaaaaaggactatcaagttggtgtcactatagac

SEQ ID NO: 109561 - DNA, 109 bp, Homo sapiens
cctctttagccaccgccgccggcagcgaagacgcggagaaaaaagttctcgccaccaaagtccttggcactgtcaaatggatcaacgtcagaaatgcatatggatttat

SEQ ID NO: 109562 - DNA, 410 bp, Homo sapiens
  misc_feature (1)...(410): n = a,t,c or g
cccacgcgtccgttcagaagcactgccgtgggtatcttgttcgcagcctgtatcagttgattcgcatggccaccatcacaatgcaggcctacagccgaggattcctggcaaggaggaggtatcgaaaggtgaggccaacctctgtctagaggaagggagggtgtacgggccttccttactgagaacaaaacagggcccagggaaagacttcactatgggcaacctcactttgtacaaagtgtcagccaagccagaaaggagattcttnnnnnnnnnnnnnnnnnnnnnnnnnnnnnnnnnnnnnnnnnnnnnnnnnnnnnnnnnnnnnnnnnnnnnnnnnnnnnnnnnnnnnnnnnnnnnnnnnnnnnnnnnnnnnnnnnnnnnnnnnnnnnnnnnnnnnnnnnnnnnnn

SEQ ID NO: 109563 - DNA, 155 bp, Homo sapiens
catcaggtttctgtgctgaaaagttatcaagaccagctctctgctgcatttgcattgttattaggaacacacacatacacacgcacacacacacgcaaacacacacacgcgctcacacacattgagtttaatgtgaggctagtacagaaacagag

SEQ ID NO: 109564 - DNA, 333 bp, Homo sapiens
aatgccagggggctgttcacacatctgtctactcagcagcagttacaaaactcggacttgtcgctgcaggactggcttcaacttgggaagtgatggcaggtcatgcaaaagaccaaagaatgagttgttcctcttttatgggaaaggacgcccaggaattgttagaggaatggacttgaataccaagatagctgatgaatacatgatccccatagaaaatctggtaaaccctcgtgctttagactttcacgcagaaaccaattacatctactttgctgacaccaccagtttcctaattggccggcagaagatagatggcacagagagagagtg

SEQ ID NO: 109565 - DNA, 1027 bp, Homo sapiens
  misc_feature (1)...(1027): n = a,t,c or g
ctttcttactaaaaatttgttgtaggtacacctatggaaagcccatgctaggggcagtgcaggtatctgtgtgtcagaaggcaaatacttactggtatcgagaggtggaacgggaacagcttcctgacaaatgcaggaacctctctggacagactgacaaaacaggatgtttctcagcacctgtggacatggccacctttgacctcattggatatgcgtacagccatcaaatcaatattgtggctactgttgtggaggaagggacaggtgtggaggccaatgccactcagaatatctacatttctccacaaatgggatcaatgacctttgaagacaccagcaatttttaccatccaaatttccccttcagtgggaagataagagttaggggccatgatgactccttcctcaagaaccatctagtgtttctggtgatttatggcacaaatggaaccttcaaccagaccctggttactgataacaatggcctagctccctttaccttggagacatccggttggaatgggacagacgtttctctggagggaaagtttcaaatggaagacttagtatataatccggaacaagtgccacgttactaccaaaatgcctacctgcacctgcgacccttctacagcacaacccgcagcttccttggcatccaccggctaaacggccccttgaaatgtggccagccccaggaagtgctggtggattattacatcgacccggccgatgcaagccctgaccaagagatcagcttctcctactatgtgagaccgggaaacggggacgggtgagagtatgctgggaaggaaagagaatgagaagagtcagccagagggtgcacctaggctatctgaattgcagatgcacatctaattaaaaacaattttaaagccacactaaaaaagtaaaagaacagttgacattnnnnnnnnnnnnnnnnggggcggccgttttaaagggaccagttttacttaccccgggctttgcaaagnaaaagcttttttttataggggccccc

SEQ ID NO: 109566 - DNA, 412 bp, Homo sapiens
  misc_feature (1)...(412): n = a,t,c or g
gccttttagtagagatggggttttaccatgcctgactgggctggtctcaaactcctaacctcaagtgatctgcccgcttccgcctcccncagtcctgggattacaggcatgagtcactgcgccgggcctatattttatctctctgtcttccatatcatcttctgttattgttttcatctctatgcccacttctttgtaatctgacactttcctcagatttgtcctttatgttaatgatttagtttctttaacttttttcccctgaaagtaatgtatgttcattgaaggcaaatttagaaaaaagaaaataaaaatcacctattcaatccaatactgtttatgctttgtaggtacttttttaagacttttttcaacaaaatgtgttttgtataatatttcgttttataaccgg

SEQ ID NO: 109567 - DNA, 396 bp, Homo sapiens
  misc_feature (1)...(396): n = a,t,c or g
aaaatctggtgtttatatcatcttgcctgtatcacagaattttttgtctgttcagaattgagtttttatggtaatgaacaggctttataagtataaatattttacatgtgacagttctgtaacctccatttttcttgttgggaacaggtttgaaggttgaagtgactcattgtggaacaatgagacggaaataccgtgtttgtaatgtaacaaggaggcctgccagtcatcaaacgtaagaaaagtttgtcagagcagcgatggtgtgaggcagcttgctctatttagtggggttgggagtttttctggctcataatgggcaagaattgttcatgtgtacttttttttcctcagctttcctttacagttagaaaacggccaaactgtggagagaan

SEQ ID NO: 109568 - DNA, 379 bp, Homo sapiens
  misc_feature (1)...(379): n = a,t,c or g
ggcatggtgaccttaaatattaaaggtgtatgtacatgttagttttataggtacgagagaatgaagggcaacgaaagcacttcannnnnnnnnnnnnnnnnnnnnnnnnnnnnnnnnnnnnnnnnnnnnnnnnnnnnnnnnnnnnnnnnnnnnnnnnnnnnnnnnnnnnnnngttggaatttttattttaaagcacaaaagcacttcagactttttgaggggaggtactgttaacaaatgtgatggctgtatttgatatttttttcttctacagatggaacgagaaatgaggcacaaactgaaaacagcctttaaaaatttcattgagaaagtagaggctctaactaaggaggaactggaatttgaagtgccttttatg

SEQ ID NO: 109569 - DNA, 403 bp, Homo sapiens
ccagatggagccttacaggtggcaagcccaggcacagatggagtactgggacttcatacattaaccatgacgcattcctgccgtactcatcaaggtacaactattcttcagtatgcacagacctctgatggacagcagatacttgtgcccagcaatcaggtggtcgtactaactgcatcaggagatatgcaaacatatcagatccgaactacaccttcagctacttctctgccacaaactgtggtgatgacatatgctgtgactatcacctctcagacaactaagacagatgacccccaattgacaagagacatgagggtaatgaactacacagaagctgctcgagaatgtcgcagaaagaataaagaatatgtgaaatgcctggagaccgaggtgcagcctg

SEQ ID NO: 109570 - DNA, 383 bp, Homo sapiens
  misc_feature (1)...(383): n = a,t,c or g
aagtgctggaatgaacattcnnnnnnnnnnnnnnnnnnnnnnnnnnnnnnnnnnnnnnnnnnnnnnnnnnnnnnnnnnnnnnnnnnnnnnnnnnnnnnnnnnnnnnnnnnnnnnnnnnnnnnnnnnnnnnnnnnnnnnnnnnnnnnnnnnnnnnnnnnnnnnnnnnnnnnnnnnnnnnnnnnnnnnnnnnnnnnnnnnnnnnnnnnnnnnnnnnnnnnnnnnnnnnnnnnnnnnnnnnnnnnnnnnnnnnnnnnnnnnnnnnnnnnnnnnnnnnncttaaactaaacagctgctctgcacagcaaaagaaactatcaacagagtacacagacaacttacagaatgggagacaatatttgcaaactatgcatctgacagaagtc

SEQ ID NO: 109571 - DNA, 222 bp, Homo sapiens
ggaccccagttttttctcagcctacgcatctatcctcatgaaggaacatttcattttagtactgggaagactttgaatacatcctggatccagaagccaagaagccagataactggaaggaggctatggatggggagtgggaaaggcctctgatgccaaatccgaagtataaggtgaggggggtctctctttccaatgggtgtgagaaatgagacaaaagac

SEQ ID NO: 109572 - DNA, 387 bp, Homo sapiens
gatgtctttacccttggtgagcctgttcgtgtttgcttttgcaggtcagcgcattgtgaataggctgagaacttcattattctcctccattctgaggcaggaggttgctttctttgacaagactcgcacaggagaattgattaaccgcctctcatcagacactgcactcctggggcgctcagtgactgaaaacctctcaaatgggctcagggccggggcccaggcttccgtaggcatcagtatgatggtatgtgggcctggttccccttggtaccttcctgccagggcttgcttgcaccaggcctctcacgtgtgagacgagctcaagctgagcgggtcgcatcattctgtgagtgcctagagccaaaagtgcttgtgcagaagctg

SEQ ID NO: 109573 - DNA, 341 bp, Homo sapiens
ggcgcgcacgccccgcaccccaatgtcatgccggccagtatgggatccgctgtcaacgacgccttgaagcgggacaaggacgcgatctatgggcacccgttgtttcctctgttagctctggtctttgagaagtgcgagctggcgacctgcactccccgggaacctggagtggctggcggagacgtctgctcctccgactccttcaacgaggacatcgcggtcttcgccaagcaggttcgcgccgaaaagccacttttttcctcaaatccagagctggacaatttgatgatacaagcaatacaagtactaaggtttcatcttttggagttagaaaagggccc

SEQ ID NO: 109574 - DNA, 828 bp, Homo sapiens
  misc_feature (1)...(828): n = a,t,c or g
gaaggggaggatgataggacatgaggctaggaaatgtaggttgcagctcaatgatgtgtatgtagggccttattttccattctgaaacatagttagtggatttatatcaaaggatttcaaatagaagaacatcatgatgagaataattttaggatttatatactctactttagggggtggagagttctttttacctaggcttagggaatagaaagtggtgtagagaatataacttcaattacttctttcatcatttttcttcctttagtccacaagccctagccatgccgtggtagccaatgttcagcttgtcttgcatctaatgaagcaacacagtaaagctttgtgcaatgatcgagtcatcaacagtattcctttggcaaagcaagtatcttcacgaggtggtaaaagtaagaagttgtcagtaacacctccctcctccaacggtattaatgaggagttgtcagaagtcttacagactttacaggatgaatttgggcaaatgagcttgtgagtttttgnnnnnnnnnnnaaattcagtttagctctaaaacctcattttttaaaaacttgttgactttattaaatcttactttcctttgttgagcaagtatggttgagcacaatccttataccaaccaagttactgggactttaacaaatacaactaataagggtaaaatctctctctttttaaatactgttaaaggttttgaagaccaaggtttatatttaagttttatttctttgagaacttatgatatacagccatgcatcactgaatgacaaagatgtgctctgagaaatacatcattaggcgattttctt

SEQ ID NO: 109575 - DNA, 366 bp, Homo sapiens
  misc_feature (1)...(366): n = a,t,c or g
aaaaatcctcaacaaaacattagcaaatcaaaatttgcaacatataaaaagtgttatacaccacaaccaagtggaatttatcccaggagtgcaaagttggtttaacnnnnnnnnnnnnnnnnnnnnnnnnnnnggtctcgcccnnnnnnnnnnnnnnnnnnnnnnnnnnnnnnnnnnnnnnnnnnnnnnnnnnnnnnnnnnnnnnnnnnnnnnnnnnnnnnnnnnnnnnnnnnnnnnnnnnnnnnnnnnnnnnnnnnnnnnnnnnnnnnnnnnnnnnnnnnnnnnnnnnnnnnnnnnnnnnnnnnnnnnnnnnnnnnnnnnnnnnnnnnnnnnnnnnnnnnnnnnnnnnnnnnnnnnnnnnnnnnn

SEQ ID NO: 109576 - DNA, 420 bp, Homo sapiens
  misc_feature (1)...(420): n = a,t,c or g
ngatgtctttgaacaacnnnnnnnnnnnnnnnnnnnnnnnnnnnnnnnnnnnnnnnnnnggcccgagattaaagatctttactcctacaacaatctgtcggtggaatcaagaaggcgaaccaagcagctctttgaggtgttacatttcctggcagagaacttcatcttctcctacatgggcctggcactggttaccttccagaagcacgttttcagccccattttcatcatcggagcttttgttgccatcttcctgggcagagccgcgcacatctacccgctctccttcttcctcaacttgggcagaaggcataagattggctggaattttcaacacatgatgatgttttcaggcctcaggggagcaatggcatttgcgttggccatccgtgacacggcatcctatgctcgccagatgat

SEQ ID NO: 109577 - DNA, 409 bp, Homo sapiens
  misc_feature (1)...(409): n = a,t,c or g
tgtgtgcatgcagctggtcgggcgccatctccacctggccagcccggtgcaagagagtccgttttacgtcctcatcgagacttcaggctccaacgcaggccatgacgctgagaagctgggccacttcctggagcacgcgctgggctccggcctggtgaccgatgggaccatggccaccgaccagaggaaagtcnnnnnnnnnnnnnnnnnnnnnnnnnnnnnnnnnnnnnnnnnnnnnnnnnnnnnnnnnnnnnnnnnnnnnnnnnnnnnnnnnnnnnnnnnnnnnnnnnnnnnnnnnnnnnnnnnnnnnnnnnctccacaatggaagttcgaagcaagcaaaagccacgcaaaccacaggccgatctgtctgagccctaggatttggcccggttctgcttcaaacacc

SEQ ID NO: 109578 - DNA, 650 bp, Homo sapiens
ggatcttataatgcagttgttggctttttaaaaaaaatttatgaaaaacattttaaatttctttcattctttgtatatacagactaatattccaggaagaaaaaataaaataaaatgtgcttatttaacttgaaggaaagtgcccgccttcttgcatatattgcaagaataagcattcagtcaataatcggtcatcttcaacacttcttacaaataaactaggttttgtagtctattgcaagtcagcatttctcactggctatgatggagatggacttgggatcctaggaagaaggcccggaaacaacatttcttctccttttatgatttcagtgaagaatgcaaattgcacatcagattttgaggaatactttgccaaaagaaaactggaggaacgcgatggtcatgcagtcagcatcgaggagtaccttcagcgcagtgacacagccattatttacccagaagcccctgaggagctgtctcgccttggcacgccagaggccaatgggcaagaagaaaatggtgaggctgtaaatcatttttagccactgcactgacctctgcagctgttacaattacaaatgcactacatgcctgggtgtttaccttaaaatttgaagaacagctgcagaggcatggaatttcatgag

SEQ ID NO: 109579 - DNA, 368 bp, Homo sapiens
taccctgcttccatttatgcagtatgccaggcatcggcacgattttcagtggcacacaggcggttgccaccaccagggccctaggcaaaattgcaaagaaggcagagtttgtctttggccctcccacctcccttatgcatttctctcccacctcctggcagtccccctgcccagcctcccggcaccatcatgctgccctcagattgtctaaagcccccaacttccaccactcacccaggaatgtcctttcttgaagtgcccagtgatccaaaattacctctccatttccctgctaacaaaattcctactcctaaggattccagtgaagtttaggtaatctaaatgattaactactttatgtaattcaa

SEQ ID NO: 109580 - DNA, 366 bp, Homo sapiens
cccaaacataccatacacagtttggggggtgcaagggataggagagaacctttcctccttcccatgtgactgatttttaggagtcagttgtgcgctgattattcctttttgtacctaatgctgatcctggttatgttcttacacaagcagggtccctgaggtcggggctcaataaagagcctcattcaccctttgggctggactcgttcaactccactgcaaaggactctccactgactccaaagctttttaacagtctgttgctgggtcccactgcctccaacaagaaaaccgaagggagtagccttcgagacctccttcactccgggccgggaaaacttcctcaatcccccttggacacaggcc

SEQ ID NO: 109581 - DNA, 583 bp, Homo sapiens
taccgtgccggaattcccgggtcgacagaacaaatctgtattgagacctgccgtcaccaatgggatgtcacagcttcctagcataaaccctagtgcctcttctggaaacgaaactaccttctctggtggaggaggaccggcaccagtaacaactccagagccggaccatgttcccaaagccgacagcactgacatcagatctgaagagcctctgaaaacagacagttcggcatcaaatagcaatagtgaactgaaagccatcaggcctccttgccctgacacggccccaccctcctccgccctgcactggttggcagatttagcaactcagaaggctaaagaagaaacaaaagaagcagggtccctgaggtcggtgctcaataaagagtctcattcaccctttgggctggactcgttcaactccactgcaaaggtctctccgctgactccaaagctttttaacagtctgttgctgggtcccactgcctccaacaacaaaaccgaagggtctagccttcgagacctccttcactccgggccgggaaaacttcctcaaacccccttggacacaggcagttgtatt

SEQ ID NO: 109582 - DNA, 382 bp, Homo sapiens
  misc_feature (1)...(382): n = a,t,c or g
ggaccttttttaatggaaaagccccccagggtttccccctccccccaaagggtcccaagggccccacggggggccggggtcttggccctttgggccaccnnnnnnnnnnnggtccccaaggccagggccaccccgcctagcaatttttaaagggnnnnnnnnnnnntggggggggnnnnnnnnnnaaaaggggaannnnnnnnnnntttgccaataggggtttactagtttacaccggggcacccccttcaaggggnnnnnnnnnnnnngtcctatgagggctcttttctctctggcagtcatgagaggtaggtacttggggggtaatactgcatcactgtgagactggggcaacagtgtgctgatgaaaataactccagtt

SEQ ID NO: 109583 - DNA, 374 bp, Homo sapiens
  misc_feature (1)...(374): n = a,t,c or g
ggggcaaaaaagcccaaattttttcccnnnnnnnnnnnnnngggtactaagaggtcaaagtggccaagtggtccagtgaaaggaaaagcagactggtcaagagtaaaggtcatggcaatagttttttgggatgctcaaggcattttgcttgttgagtttctggaaagccaacaaatgataatatctgcttattatgagtgtttggacaaagtcaaagctttagcagaaaaatgcctgggaaagcttcaccagagagtcctcctccaccatgacaatgttctcgctcattcctctcatcagacaaggccaattctgcaagagttcccatgggaaatcattaggcatccagcttacagtactgatttgactccttc

SEQ ID NO: 109584 - DNA, 392 bp, Homo sapiens
tgcccgcaccgccccaggcgcactgggtaggactgaaaggcagggactaaggtgacagctgactctgccggggcggagtgcgtgtcctcccaccgtgctggcgctgaactgactgtccgctgccaagggaagtgacagccgcagccgggctctcagccagcggccgggcgccccgcggaccatgctctccagtacgcagaacgcgggcggctcctatcagcgggtccgcggggcgcttgatacacagaaatgcagtccagagaaaagtgcctcatttttcagtaaagtgacatattcctggtttagcagaagaattactttaggctataagagacctttggaaagagaggatctttttgaactaaaggaaagtgatccttctgcactgcgtg

SEQ ID NO: 109585 - DNA, 613 bp, Homo sapiens
cttgaatctcagctctagctgattcactgggtggcactggacaaatcactcccgccacctgagcttgagcgtcttcatctgagataggaatagcagtccctacactgaggaggtattaaagctaggaggagccaggctaggccttctgtcaacattgatgcccggtgtctctggccacagaaacaggcctcagtggctgcagagaacagcgtcatctgcagcttcctgcactacatggagaagggtggcaaaggatggcacaaggcatggttcgtggtccctgaaaatgaacccttggtgctgtatatctacggagcccctcaggtatgcatcctactccttcgggtcctttcagccacctggcaaagccagatccagtccttgacctctccttggccttggaagataaggtgagccttggaagataaggtgagcctatctctaagaggaaatcagaaccccaacccttgagagacaaagactggctagagacaaggagtggttgtggtatgtagggaaaaccaggatgagttgtgggcctggcttcctggaaggagtagagatggggaactgctaggtccaatttggagtgggtaagagtatgcagaattcg

SEQ ID NO: 109586 - DNA, 373 bp, Homo sapiens
  misc_feature (1)...(373): n = a,t,c or g
ttgcattcacatcacagacatcgattctgcagtnnnnnnnnnnnnnnnnnnnnnnnnnnnnnnnnttgttagagaggagttgggacattcatgctgggagtcagatgtctggagaaatggcttcgtgtgatcgagtgaattcactgctggagaatttacctgcaggttggtggcctcctctgcccaccagacttcaaactctttctgtagcttcaccttggctttgtccatgagcagctgcaagtgctcgatctccaccttcagggctttcaggcgagtgaacattgttttataccttctcttttcttcctccagttgtgatcgcagcttctcctcctgctggtctggcatcagaggcacggccatgttttcc

SEQ ID NO: 109587 - DNA, 409 bp, Homo sapiens
  misc_feature (1)...(409): n = a,t,c or g
gggaagtcttcatgcatcaggtctcccttaataggcacatgagatctcacactgaacagaaaccaaatgagtgtcacgaatatggagagaagccacataaatgcaaagaatgtgggaaaaccttcactcgcagctccagtattcgaacccatgaaagaatatatactggagagaaactataaagaaaattctatatccatcccatcttttgtggggtttgttttttgnnnnnnnnnnnnggaaaggaaatttggctnnnnnnnnnnnnnnnnnnnnnnnnnnnnnnnnccggggttccccgaaccctccaaaatggggaaaaataatttggttttttataaggaaaaaaaaacccccccnccnnnnnnnnnnnnnnnnnnngaagaaaagagaagagacaaaggggttt

SEQ ID NO: 109588 - DNA, 485 bp, Homo sapiens
tcccgggtcgacgatttcgtcggcggggaaaatggcggacgggaaggcgggagacgagaagcctgaaaagtcgcagcgagctggagccgccggaggacctgaagaagaagcagaaaaacctgtgaaaactaagactgtttcttccagtaatggaggggaaagttccagtcgcagcgctgagaagcgatcagctgaagaagaagctgccgacctcccaacaaagcctacaaagatctccaagtttggatttgccataggtagtcagacgacaaagaaagcatcagccatatccatcaaacttggatcaagtaagcctaaagaaactgttccaactcttgctccaaaaactctttcagtagcagcagcttttaatgaagatgaagatagtgaaccagaggaaatgcctccagaagcaaagatgaggatgaagaatattggaagggatacaccaacatcagctggaccaaactccttcaataaaggaa

SEQ ID NO: 109589 - DNA, 388 bp, Homo sapiens
  misc_feature (1)...(388): n = a,t,c or g
taactgtgattgtgtattcctaactgcagagctttgttgagatgcaaataaccaccccccaaccccaccccaaaaccctcccaaagagtagcgattttatatttgatttccnnnnnnnnnnnnnnnnnnnnnnnnnnnnnnnnnnnnnnnnnnnnnnnnnncccctcataaacccgaacaatgtaggtgtctagtcatatacaggtcttagcaagaaagaaagttcgagaaattcaagccgccattaaggtacgtctggcttgcccacttgtagggggcttttcatctccatggttacaggcttttcctttgttttcctcccttcccctaccctgcaggtgtctagtcacattcaggttcttgccagaaggaaatctcgtgattttca

SEQ ID NO: 109590 - DNA, 182 bp, Homo sapiens
acattgtgacatggtcattacatatggattagaccaactggagaattgccagacttgtggtaccgattatatcatctcagtcttgaatttactcacgctggtatgtgaattattcttttcctttttaatgtgttggtttattcaggcccttaaatggatatgtaagaaattaagggctttgt

SEQ ID NO: 109591 - DNA, 388 bp, Homo sapiens; identical to SEQ ID NO: 109589
  misc_feature (1)...(388): n = a,t,c or g

SEQ ID NO: 109592 - DNA, 457 bp, Homo sapiens
ggcagcatggcttgctcatgcaactgctcaagctcactcataactgcctcaactttgacttcatcggcacttccactgatgagtcctcagacgacctgtgtacagtgcagattcccaccagctggagatcagccttcttagattcttcaaccttgcagctgttttttgacctgtatcattccatccctccttcattttcacctctggtattatcctgcttggtacagatcgcttcagtcagaagatccctgtttaacaatgcagagagggccaagtttctctctcatcttgttgatggtgttaaacgaatactggaaaacccacagagtttatcagacccaaacaattaccatgagttttgcagactactggcccgattgaagagtaactatcaactgggagaattggtaaaggtggaaaactaccctgaggtcatccgattgatagccaacttcag

SEQ ID NO: 109593 - DNA, 534 bp, Homo sapiens
acaaaagctgtgccggctttggggaaaagcccgcctcaccactctggattccagcaggtaagttacagttgtgtgtactatccagctgaatgaaataaggggaaatgctgaaagattcaatgttagaaatgctcattaaaatttgacatacttcttgcttagatttatagtgattatgggaaaacaaaagtattgtctctactgtttatgaaagttcaaatgttttccttactcttgtaaaggataaaatactagatcttaagtaccattcttggctgctactaagtgtccattttattgaaaatggattttctgcaaataattctcctataggaacataaactactagggaaatagaatcacagtcttgatgaggtgctaagacagatgtgacaccaatcttaaatgttgtcgttggaagcacagcacttgtagcagaaaggggaaacaaacactcttatgcaaatatattcattcattcattaaacctcttaaatagctgaattaaaaaaaaatatgagtgtggtgcccatg

SEQ ID NO: 109594 - DNA, 385 bp, Homo sapiens
cagattaattatcaataaacacactgatgagtctttaggggactgctctttccttaatacatggttccacatggatacctgcaagtatgttcactatgaaattgatgcttgcatggattctgaggcccctggcatgaaagaccacacgccaagccaggagcttgctcttacacagagtgtcggaggtgattccagtgcagaccgactcttcccacctcagtggatctgttgtgatatccgctacctggacgtcagtatcttgggcaagtttgcagatgtgatggctgacccaccctgggatattcacatggaactgccctatgggaccctgacagatgatgagatgcgcaggctcaacatacccgtactacaggatgatggcttt

SEQ ID NO: 109595 - DNA, 363 bp, Homo sapiens
taagagagagctatacctgtgcgttcccttccgtgggcggatgaagcaatatatatgatacagcaagtgttcactcctgtggcatacttttaacctttctaagcttgtcagggggaacaaatgagaggggtataggcctttgcactaaatatgctctttggacaagtgcctgacatctgcttgattgggctttaacttttactggagccggtgcttttggctgtcataccatagcatttcaaaactttatttgctactactctgacggctcacatggcctccctagggccccctccttttccacgagtccctctcatgagcacccccatgggaggccctgtaccaccacccattcgatatgga

SEQ ID NO: 109596 - DNA, 887 bp, Homo sapiens
agggttcactgttcctgaaatcaagaccatccttgggaccatgcctgcctttgaagtcagtcttcaggctcttcagaaagctaccttccagacacctgattttatagtccccctaacagatttgaggattccatcagttcagataaacttcaaagacttaaaaaatataaaaatcccatccaggttttccacaccagaatttaccatccttaacaccttccacattccttcctttacaattgactttgtagaaatgaaagtaaagatcatcagaaccattgaccagatgctgaacagtgagctgcagtggcccgttccagatatatatctcagggatctgaaggtggaggacattcctctagcgagaatcaccctgccagacttccgtttaccagaaatcgcaattccagaattcataatcccaactctcaaccttaatgattttcaagttcctgaccttcacataccagaattccagcttccccacatctcacacacaattgaagtacctacttttggcaagctatacagtattctgaaaatccaatctcctcttttcacattagatgcaaatgctgacatagggaatggaaccacctcagcaaacgaagcaggtatcgcagcttccatcactgccaaaggagagtccaaattagaagttctcaattttgattttcaagcaaatgcacaactctcaaaccctaagattaatccgctggctctgaaggagtcagtgaagttctccagcaagtacctgagaacggagcatgggagtgaaatgctgttttttggaaatgctattgagggaaaatcaaacacagtggcaagtttacacacagaaaaaaatacactggagcttagtaatggagtgattgtcaagataaact

SEQ ID NO: 109597 - DNA, 367 bp, Homo sapiens
  misc_feature (1)...(367): n = a,t,c or g
aaaatatcttaattttagctggtcaaaacttttaaaaactatggtatggcagaattgttgataannnnnnnnnnnnngagggaaaaataaggaagtttaattcaatttctatttaaataatattcaaaactaaaccctttttcgaggaaggtaaacttgggaatcacccaagttttcattggctttggggcccaaaaaaaatcccagggaaagggacaaaataaatggtccagcaaaaaaaactggggaaagaaagcaagccaccccccgggggcaaaaaactgccaacagtcagggccgccgtaagggccggatcaccaggtccatgacaaacaaagctgcaattgccattgctgtaacccaaggg

SEQ ID NO: 109598 - DNA, 925 bp, Homo sapiens
atcgagattagtagaccctacgcagagcggtggaattcgtggccaggccttgtgccgcggctgggtggacaccatttacaatgcccataaccagctgcatcagctgcgtgcacaggagcccggaggcagtcagcaacccctgcagagcctggaagaggaggaggatgatcaggaggaggaagaggaggaggaggaggaggaggatgaaggcgaggacagtggcacttcagctgccagctcccctaccatcatgcggaaaagcagcggcagccccgactctcagcactgtgcctcagatggctccacggagaccctggccatggttgtggtagagcctggggacacgctgtcctcccccgagttcgacagcggtcctttcagctcccagtctgatgagacctctctcagcaccactgcctcatctgccacgcccaccagtgagctgctgcccctgggtccggtggacggccgctcctgctccatggactctgcctacggcaccctctccccaacctccttacaagactttgtggccccaggcccaatggcagagctagtgcctcgggccccagagtccccacgagttccttcccctccaccctcgccccgtctccgccgccgcacccctgtccagctgttgagctgcccgccccacctgctcaagtctaagtccgaggccagcctcctccagctgctggcaggggctggcacccatgggacaccctctggccccagccgcagcctgtcagagctctgcctggctgttccagccccaggtattaagactcagggctcccctcaggaagctgggcccatctgggattgccgaggggcccctatccctggcagcggtcctgggctaatcggctgcctggccggggaacctgcaggctcccacaggaagaggtgtggagacctgccctcc

SEQ ID NO: 109599 - DNA, 385 bp, Homo sapiens
  misc_feature (1)...(385): n = a,t,c or g
tagctggagaactgggtctgggccgaggatatggcctttgtccccatggctgtgccctggagccctgagcaccagatgcagaggctgcaggtgacccggaagctgctggagacagaggagcaagccaccttccccatgggaggcgccacccctcgctacctgtacctggccagcaaccacagcaacaagtggggtcacccccggggctaccgcatccaggtgcgcagcttttctggggagccactgccccagaacagctccgtggagagaggcttcagctgggggaggtgagtggtcggcggtcaggagggagtggggcaagtagaatgtatgaagggctccacactgctccaccttccnnnnnnnnnnnnnnnnnnnnnnnnnn

SEQ ID NO: 109600 - DNA, 384 bp, Homo sapiens
caactggcaggggcttctttgctaagtagggtttgttgggtacaaaaagaacctttgttcctaccaggtatgtttttctgataattttccttttgttgctcctatgttacagggacgattccaaggctgcttagccccagacatcaggaaatccagttacttccctagctacgttgacaaaaatctagaccttttcagagagaagagagtgctgatgtactgtaccgggggcatccgctgtgagcggggttcagcctacctcaaagccaaggtgagccaccaccccggggcactgtgggcatggcagtgaaggaggcagctccaccagcagcttacgtggagctgtccgctgcccccagtactccccacccccaggcagccaaa

SEQ ID NO: 109601 - DNA, 417 bp, Homo sapiens
ggacatttcacaggtgacccaggcctctctccggtctcacattggagttgtgccccaagacactgtcctctttaatgacaccatcgccgacaatatccgttacggccgtgtcacagctgggaatgatgaggtggaggctgctgctcaggctgcaggcatccatgatgccattatggctttccctgaagggtacaggacacaggtgggcgagcggggactgaagctgagcggcggggagaagcagcgcgtcgccattgcccgcaccatcctcaaggctccgggcatcattctgctggatgaggtgcgccctgggtctcctcccctccttcctgccttgtgtatgctcaagccgttcctcctgggcactgtccccacctagaacagataccatgaattcaaatctcacaaaacacactg

SEQ ID NO: 109602 - DNA, 359 bp, Homo sapiens
ttgtgaaattcagtgtctatgcctataaaatggctatggagtcactgatctacccccacaagataacatgaaagtgcttgcaaactgtaaagctcagcacagacctcaatgtccatgccctgcccccagcaccctgcctcctcctttgccagggtgtcatcttcatctcagccctgacactcagagccctggaaagaagagggagggatgtacaccggcgctttcccttccagccttcccatactgcatcccctccccacctcccaactcaccacagggatttccaaatgtttctttgtgtgtgcggatttttccccccaagaacactccaaatttctggaatccacagactgaatttc

SEQ ID NO: 109603 - DNA, 209 bp, Homo sapiens
cgcattactcataatttgctgctcaactatggtctctaccgaaaaatggaaatctatgtgagttaccagaggtgctaccgctccctaacctcatctgctctggttccccatatgccattcattatctcattttctccaccactcattcactcattcatcaaatgcatgttgactgctgttacaaggcaggtactgtaaatgataaagat

SEQ ID NO: 109604 - DNA, 394 bp, Homo sapiens
gagaagcagaggcggatagaacggataaagcagaagcgggcccagctgcaagaacttctcctacaggtaaagataccgagatgttttcattaccttccctgtttctccacttgctgccttttggagtcagtgtgttttctaattgtggtgcctctgagtggtgtgtggtgagcccacgccagggcagcctctctcacctcctagcttgttgccatccacgtgctctgccttaagatggtcccatctgttgccatcatctcagctccacagtagcttccctgccctgtgtgtgacttacgccaggcagcagttcactgttgacactcaggcctctctaaacataaactgtcaggggtctttttgtgtttgtttattttaacccgaatttggaata

SEQ ID NO: 109605 - DNA, 355 bp, Homo sapiens
ggtgaggcctgctcaccacgactcctgtcattcctacatggccctgaacttcattaattctagtatttctcaacaggtcacttcctcctaacccatctgctgctagagaaactaaaggaatcagccccatcaaggatagtaaatgtgtcttccctcgcacatcacctgggaaggatccacttccataacctgcagggcgagaaattctacaatgcaggcctggcctactgtcacagcaagctagccaacatcctcttcacccaggaactggcccggagactaaaaggctctggcgttacgacgtattctgtacaccctggcacagtccaatctgaactggttcggcactcatctg

SEQ ID NO: 109606 - DNA, 366 bp, Homo sapiens
caaatgtgggtggacatcttccccaagaagctggggcctcctggcccccaagtcaacatcaaccccagaaagcctaaacggtgagtgacagcccacttcccaactgctgcatttcacagttcagaactcccccagtgcagggcaccactgtcctcaggtactgagctgcagtaattcgtttctctattgggaagagaggaagctctactgggagctttcttcccctgaattccccacactgagcaaaaacacacagggcagcctcccaggcttctctgccctcactgaggctgcagctggggagctcctcctcagcaaagcctcagagcacagtggccacaggtatgagctgcgatgcatcatctg

SEQ ID NO: 109607 - DNA, 399 bp, Homo sapiens
attccattcactcattcatccggcatatgagagatggacatttcattcagtcattcatccagcatctgagagatggacatttcattcagtcattcatccggcatctgagatacagacatttcattcagtcattcatctggcatctgagagatggacatttcattcagtcattcatccagcatctgagagacggacatttcattcagtcattcatccagcatctgagagacggacatttcattcactcattcatctggcatctgagagatggacatttcattcagtcattcatccagcatctgagagacagacatttcattcactcattcatctggcatctgagagatggacatttcattcagtcattcatctggcatctgagaggcagacatttcattc

SEQ ID NO: 109608 - DNA, 457 bp, Homo sapiens
atgactaccaatttactatagggaatttgggccttgtggccctcaatgccgcacgagagggaacatccctgcaagatgtggaaatggagtctattgtagcagtagcagcacttgtcttaaaataagaagaaaactactggttattcttttaactatcatggctttgatgactttgatctatgcaggaaatgtgttttctcttaggaatgtgattttttcttcttaaaaacttattactttgagtaaattataatagtattatttagttgtggagttacatattttattctgggtgtccttatattatctatttggctcattttcagaaatcctcagaagaacaaattgctaagctacagaagcttcatgaaaaggagctggccagaaaagagcaggaactgaccaagaagcttcagacccgagaaagggaatttcaggaacaaatgaaagtagcttt

SEQ ID NO: 109609 - DNA, 383 bp, Homo sapiens
aattgaaggaatgctgtgaaaaacctctgttggaaaaatcccactgcattgccgaagtggaaaatgatgagatgcctgctgacttgccttcattagctgctgagtgctggaccagaatcccattttatttatttacttctacctgtatcatgctctgggaatcagcatttcctacactataaaggaaatttccaaggcagagcagctaattttaccctggatattctcagcacctcatttctaatccttgtggcatacagttcttttattgacccctatattctcaaacacatctcccattgagctatgtttctttggggtgtacttctgtggcactctgcagtatcctcagtatctttctattatggccattggattccact

SEQ ID NO: 109610 - DNA, 967 bp, Homo sapiens
ggcacgaggtcagcttcatcgtccagcttgtccggaaactgctgatcatcatctcacggccagctcggctgctggagtgtctggagtttgaccctgaggaattttaccacctgctggaggcggctgaaggccatgcgcgggagggccaaggcattaagactgaccttccacagtacatcattgggcagctgggcctggccaaggaccccctggaggagatggtgccactgagtcacctcgaagaagaacagcccccagcacctgagtccccagagagccgcgccctggtcggccagtcacggaggaagccatgcgaaagcgactttgagaccatcaaactcattagcaacggagcctatggggccgtctacctggtgcggcaccgtgacacacggcagcgctttgccatcaagaagatcaacaaacagaacttgatcctgcgtaaccagatccagcaggtctttgtggagcgtgacattctcacctttgccgagaacccctttgtggtcagcatgttctgctcctttgagacccggcgccacctatgtatggtcatggaatacgtggaaggcggcgactgcgccacgctcctgaagaacatgggcccgctgcccgtggacatggcccgcctgtacttcgccgagacggtgttggcgctggagtacctgcataactatggcatcgtgcaccgtgacctcaaaccagacaatctgctcatcacctcgcttggccacatcaagctcacggacttcggcctgtccaagatcggcctcatgagcatggccaccaacctctatgagggccacatcgagaaggacgcccgagagttcatcgacaagcaggtgtgtgggacgccggagtacatagcccccgaggtgatcttccgccagggctatgggaagccagtggactggtgggccatgggcgtcgtcctctatgagtttctggtgggctgcgtgcctttctt

SEQ ID NO: 109611 - DNA, 311 bp, Homo sapiens
cttagctacatcatggagaaagcagatcttgtcatagtttttgctgaaggagttgttgaaaacggaggaattattaacaaggttagagcatcagttctccccagttccctgctcaagacttggaggtgtcttgctgacctaggacaccacagcagtgttgattatggttccttctaatcctgcttcacttcaggacttcatcatggtattgagttgttgcccatttcccgtaagtcatagcaatgggcagtccagtttcagtcaaatcttttttagattgatctacataaatgaagacaatgtaatttggt

SEQ ID NO: 109612 - DNA, 369 bp, Homo sapiens
agagctagcaccatgagctgtgtgttgtttgtggagacagagcctctggataccactataatgcactgacctgtgaggggtgtaaaggtaagcatctttgattggcagatttctccttcaggttttactatattggttgttgaaatcccttgaactaattgcttcccttttcccaggcaacttcccattttctcctcctgtgcgcctacctcctcctacatcctcacctttgttgtgtagtcaaagatctgtaggaaaagactgttagagtatttagcttaatgtttaagactgttagagtatctagcttagagtgtttagctttcttccttttcacaacctcacacgtagcttaagggaacttatgat

SEQ ID NO: 109613 - DNA, 973 bp, Homo sapiens
gcggtggaattcggggaaagtgcagtgttgcccttctgaatgagacagaatcagtattgtcatatcttgataaggaggataccttcttctactcattggtctatgacccctcattgaaaacactattagctgacaaaggtgaaatcagagtgggacctagatatcaagcagacattccagaaatgctgttagaaggagaatcagatgagagggaacaatcaaaattggaagttaaagtttgggatccaaatagcccacttacggatcgacagattgaccagtttttagttgtagcacgtgctgttgggacattcgccagagccctggattgcagcagttctgtgaggcagcctagtttgcatatgagtgctgctgcagcttcccgagacatcaccttgtttcacgctatggatacattgtatagacacagctatgatttgagcagtgccattagtgtcttagtaccactcggaggacctgttttatgcagagatgaaatggaggaatggtcagcctctgaagctagcttatttgaagaggcactggaaaaatatggcaaagacttcaatgacatacggcaagattttcttccttggaaatcattgactagcatcattgaatattattacatgtggaaaactactgacagatatgtgcaacagaaacgtctaaaagcagcagaagctgagagtaaactgaaacaagtatatatcccaacctacagcaaaccaaatcccaaccaaatatccactagtaatgggaagcctggtgctgtgaatggagctgtggggaccacgttccagcctcagaatcctctcttagggagagcctgtgagagctgctatgctacacagtctcaccagtggtattcttggggcccacctaatatgcagtgtagattatgtgcaatttgttggctttattggaaaaaatatggaggcttgaaaatgcctacccagtcagaagatgtatt

SEQ ID NO: 109614 - DNA, 351 bp, Homo sapiens
  misc_feature (1)...(351): n = a,t,c or g
agtgcaccggcctattgcccccccttgggggggccaagtcggcccaattccttttcgccccaaaggtttaagccccccctggcccccctgtgtaaactttgcccctctaaaaaaatccccaaaaaatcccgggcagggggggggccccccccggtgttccctcttccttggaggcttagggtggaaggtttccttaggcccgggcccccaaggggccagtaacccaaggttcccccaatcccccccaaccgggggaccaaaaccaaccccgtttccnnnnnnnnnnnngttaaatgctgatgactgaatagaacacaattctctgtaaattcttcaatgtgataaagcatt

SEQ ID NO: 109615 - DNA, 453 bp, Homo sapiens
ggcagttttatggttggtagctgcctgtgcctcccagccagagcagattggagacttggttgttggtgtggagaaagcccacgtgtcagaagtgctgggagtagacagctttcttctactgcccccgagcaagcctgtgtctccccttgggctcctttgtgtgtgcacaacacccaggtttacccaaccccgctgtgaacccacctgccctccccccacacacgaagtgggtacccctgcacactccggggatgccggtggacgtggcacctgagccgacccagcctggcccccaccagcaagttcttaccagcacacgtgacttcctgtgtgagctgacccccaccccactctaccgcatctccccttccttgcacctcagttgctctgtccagccccacaccccctttacctttcctctaccacccttgtcaccatcctggcctgggacct

SEQ ID NO: 109616 - DNA, 559 bp, Homo sapiens
gggagctgaagatcctcaagcactttaaacacgacaacatcatcgccatcaaggacatcctgaggcccaccgtgccctatggcgaattcaaatctgtgtaagaagcgggatgggagagggagccagacttgggacttttctgaaggctgcaaccatgttgccgaagttctggaaaggcagctgaatctaatctgaagcaggctgggaaaattcccgcagttctaggaccagttctttagagttttgccagggacaactgttattcctcaagaagtgtacagatgattttacagttttatagaatcttagtatataggatgtcaaatgtaggacattcctactatgaccacaccctcctattcccatagcagacttcactaatcaatcacagaacactttcctacagacagtggacaagcctggtcaattttcatcatagttcttcaagctgccactaccaaacaatggagatagccccaaaaggaaacctattggccaaccctggtgagtccaaccccatcttttatctgatggggaaactaggtctggagacaaaagt

SEQ ID NO: 109617 - DNA, 363 bp, Homo sapiens
  misc_feature (1)...(363): n = a,t,c or g
gaaaaagttcctgaggcaaagagactctacggaaaacgaggtgaccctttctatgaagcccaagaaaatcacaacctcatcggggtggcgaatgtattcttggaatgcctcttctgtgatgtgaaacttcagtatgcagtccctatcatcagccagcagggggaggtaagcacaggccagccttggagaacgatggtggttcaannnnnnnnnnnnnnnnnnnnnnnnnnnncattctatttaagctatgttcttgaggtggatcaagaaactaaggcaaatnnnnnnnnnnnnnnnnnnnnnnnnnnnnnnnnnnnnnnnnnnnnnnnnnnnnnnnnnnnncnnnnnnnnnnnnccaaaaaa

SEQ ID NO: 109618 - DNA, 515 bp, Homo sapiens
aatcctccaggttaccttgaggatagttttgtaaaatctggagtcttcaatgtatcagaacttgtaagagtatccagaacgcccataacccagggaactggagtcaacttcccaattggagaaatcccaagccaaccatactatcatgacatgaactcgggggtcaatcttcagaggtctctgtcttctccaccaagcagcaaaagacccaaaactatatccatagatgaaaatatggaaccaagtcctacaggagacttttacccctctccaagttcaccagctgctggaagtcgaacatggcacgaaagagatcaaggtgagtaataaggagatgcctctagagaccatgagtaaaatgttggctcgtttcttaagtttcgttgagtcaaaatttcataattaaaccaatatggattggatatttttttcataaaatgattcctgtagaattatttttgagataatgttagtcaaatgtcgtcaaagttaatttatccaaaatcttatttttc

SEQ ID NO: 109619 - DNA, 358 bp, Homo sapiens
tagggtttgttgggtacaaaaagaacctttgttcctaccaggtatgtttttctgataattttccttttgttgctcctatgttacagggacgattccaaggctgcttagccccagacatcaggaaatccagttacttccctagctacgttgacaaaaatctagaacttttcagagagaagagagtgctgatgtactgtaccgggggcatccgctgtgagcggggttcagcctacctcaaagccaaggtgagccaccaccccggggcactgtgggcatggcagtgaaggaggcagctcctccagcagcttacgtggagctgtccgctgcccccagtactccccacccccaggcagccaaa

SEQ ID NO: 109620 - DNA, 380 bp, Homo sapiens
ggccaaagacataacctcagacacatctggagattttcggaacgctttgctttctcttgctaaggtacaactcagatactttaggaaatgcctcttgttttataaagactaatttcttagtccattttgtgttgctataagggaatatctgaggctaggtaatttttaaagataaaaaggtttatttggctcaggattctgatggctaacaaattcaagtttgggtatctatgtctggggagagcctcaggctgcttccactcctgacagaagaggaaagggagctggtgtgtgcagagaccacatggcacgaaaggaagcacgagagagaatggggaggtgccagcctcgttaacaaccagctctcgtggttctcatga

SEQ ID NO: 109621 - DNA, 383 bp, Homo sapiens
ctggtaaacacttggttctgattgcacttgagacagcagtggatggagaggagggtggattcatgcatctgtcttcattggtgcatgaagaaagggtggactgggaagcgcgagccagcactgtagttggtagagagagccttacacaggcatgaggaggcctgtgcctcgtctgacatgctgactgcctacagatgccttctcgtacccttgccctcctaaagtctgtttgatccctgcgctcacatgcgtgtgtgtttgctggaactgcagtcagatggttctgctgctggaactcgggttcattctaacagatatttactgaagatctcccggaagtggagtctctgccacgtgatcgagtcctcggcttcttaatagag

SEQ ID NO: 109622 - DNA, 362 bp, Homo sapiens
  misc_feature (1)...(362): n = a,t,c or g
ttcgaggacttccttaaactttaaccgaacgctgagacttctgatgagtcagtatggccatttccctttcttcagagcctacctaggacctcatcctgcctctccacacacaccagtcatccaggtgagggatgcactggcgaagacacagttggacctggcctgcctccaactctagccaatcatcccttataggaaggttgcaggttgggaagagaggacacctgtgtgatataggaaacaaccctaccttaagggaaaattattgatgtgaaagtcagggacattagctgggggtgggaaatggagcagcagagccagtgctgggaagacagaagtaggcctggtctttcttactgttn

SEQ ID NO: 109623 - DNA, 917 bp, Homo sapiens
gatgttctaaggaaattgtattctgaccagttaagagatgggacagtatttacttcgtgaatgtcaggcataagcaattccttttttcatagactcgttttataaagatgagtagtgtgagttcatttaacaccttgggtttaccagtttatttcttcttcacacattttaaaatgtttgtttatgtttattaaatagggacggtaaatcagtaatgatatagagctttttgccttattgtacaaatcattttatcaccttattttaatttcattgaaagcagcaaaccaaatcccaaccaaatatccactagtaatgggaagcctggtgctgtgaatggagctgtggggaccacgttccagcctcagaatcctctcttagggagagcctgtgagagctgctatgctacacagtctcaccagtggtattcttggggcccacctaatatgcagtgtagattatgtgcaatttgttggctttattggaaaaaatatggaggcttgaaaatgcccacccagtcagaagaagagaagttatctcctagcccaactacagaggaccctcgtgttagaagtcacgtgtcccgccaggccatgcagggaatgccagtccgaaacactgggagtccaaagtctgcagtgaagacccgccaagctttcttccttcatactacatatttcacaaaatttgctcgtcaggtctgcaaaaataccctccggctgcggcaggcagcaagacggccgtttgttgctattaattatgctgccattagggcagaatgtaagatgcttttaaattcttaaccttatatgttgtgcttctgaccattttctcttttcctctctttcctttttttttggttggttggttggcaaaaaacataagtccttgtgaacagccttttatttgttaatttt

SEQ ID NO: 109624 - DNA, 366 bp, Homo sapiens
  misc_feature (1)...(366): n = a,t,c or g
ctcacggaggggccctggaggcgatctcggggttctcaagcctgtgtgggagccccacctctacccacggccccgtctcactgcacctccacccgctgggggatgagccgggtgaggctgggtgaggcgctgagcccggccctgaccgcgtgggcttctgttctccgtgcagggatcctgtacgacacgtacccactctcggaggagacctggcacacacaccagttcaacttcatcaagaaccacgcctttcgcctgctgaagccggggggcgtcctcacnnnnnnnnnnnnnnnnnnnnnnngggagctgatgaagtccaagtacttagacatcaccatcatgtttgaggtgcgcccacctgan

SEQ ID NO: 109625 - DNA, 352 bp, Homo sapiens
tgttttttgattttgcaggaccctcttgttaaaagtcacgtgtcccgccaggccatgcagggaatgccactccgaaacactgggagtccaaagggtgcagcgaatacccggcaagctttcttccttcatactacatatatcacaaaggtcgctcgtcaggtctgcaaaaataccctccggctgcggcaggcaaaaaaacggaacgttgatgctattaattatgctgccattagggcagaatgtaagatgcttttaaattcttaaccttatatggggtgcttctgaccatgggctcttttcctctctttcctttttttttggttgggttggaggcactaaaccttatttctgg

SEQ ID NO: 109626 - DNA, 370 bp, Homo sapiens
tttcacgagacttgatttcaaaggaatacaaacaggtgatcctaatgctgtggtcatgggattggcaccagaacattttcattatcaaattctgaatcaagcattccgggtactccgggagggagcacctctgataacaatccacaaagccaggtattacaagaggaaagatggcttagccctggggcctggaccatttgtgactgctttacagtatgccacagataccaaagccacagtcgtggggaaaccagagaagacgttctttttggaagcattgcggtgcactggctgtgaacctgaggaggctgtcatgataggagatgattgcagggatgatgttgggggggctcaagatgtcggcatgctg

SEQ ID NO: 109627 - DNA, 653 bp, Homo sapiens
ttgaggtggtggagggtgtggctggagaagaggattatcatgatgaacaggaagaacacggggaaaaaaatgctgaggcagagggacaacatgatgagcatgatgaagacgggagtgatatggagctggacttgttagcagcagctgaaacagaaagtgatagtgaaagtaaccacagcaaccaagataatgctagtgggcgcagaagcgttgtcactgcagcaactgctggttcagaagcaggagcaagcagtgttcctgccttcttttctgaagatgattctcaatcgaatgactcaagtgattctgatagcagtagtagtcagagtgacgacatagaacaggagacctttatgcttgatgagccattagaaagaaccacaaatagctcccatgccaatggtgctgcccaagctccccgttcaatgcagtgggctgtccgcaacacccagcatcagcgagcagccagtacagccccttccagtacatctacaccagcaggcaagtctgaaaacttagtattgctaagaatacttagatagattttttaaattatgcatgttcatctggggataaaattagttttatgatagttcctcattgttttgttgagtttcaaatataaaaaatatgtacatatgattatagcaggg

SEQ ID NO: 109628 - DNA, 373 bp, Homo sapiens
gttgtcttcctacctttggagcggacaaggcaaagggggagcgcgttcggacctctagtacaataaggcgaacctcctatttggatacaataacaggaccttacctcacaggacagtggccacgggatcctcatggtcactacccttcatgcatgaaagacaaagctactcaggtaaaatcaggaaatcaaaatcagcttattaccctgcacttcttctgttttgatcacagtcaagaatatgtactatactcaaatttccccagatttgaaacacattcaaccaaggaagaaaggacaaatccattgtttcaagaaaactttgcagtaattgttttttgtcatctggcttttacaagtttgaaattctttac

SEQ ID NO: 109629 - DNA, 490 bp, Homo sapiens
ggaattcgagggttctgataatgatgatgatgagggagaagaagaggaggaagagaatacagattaccttacagattccaataaggaaaatgaaaccgatgaagagaatactgaggtaatgattaaaggcggtggacttaagcatgtaccttgtgtagaagatgaggacttcattcaagctctggataaaatgatgctagaaaatctacaggtattaaatgtcatttgtttcaaagactcttctcaatacaaaacattgcagcccattacattctggttcatgtgaaggcctctcctatctaagtgtctcttctgcagcagcttttgctagatcatgtgtagacagcttgcagccagcttcttgtccttcttgtatcccacatcctgatttgcatgaggtagagtcggtgaaaatgcaacacacacaagatttggaacagaataatttcattgtgccaatctttgccttttatttcttaagtcatatttc

SEQ ID NO: 109630 - DNA, 413 bp, Homo sapiens
aggatttgccttcaaaatgaactagggtctgaactctaccttgttttgtccttgccagtggggacttgcaggtcacaggcagcggccactgtccctacagcactgcccagaaggcggtgggcaaggacaactttaccctgatccccgagggtgtcaacgggatagaggagcggatgaccgtcgtctgggacaaggcggtggtaaggctggatctcttctcaggagcattctagaaacactctacctgccctgtgaaagccgatgcattatgcacgctgggttcttaaaagttcccttcttacatggaggcggaagcagatatactaggagggcgcaggagggaatgcataacttgagagatagtagctcaagtccgggagaggcctctgcatttgtggatgtcacccttgtcc

SEQ ID NO: 109631 - DNA, 374 bp, Homo sapiens
cggcacgagatcactgtgatcttaccaaagaggagctggagccaagagttttccgagatgtgaccgtaaaaggaattgatgcttctgattaccagacagtccagctccccaagggtactgagtcttccagaaactgaatcactggttgattgatgatgacgaaaaatgtctctgttcctttgcaatgagaggtcaccaatagggcaccaggtgtttatcaaggcccctcccacctggagggctggaccacacaggccacagattaggaatcagaacattgtttgtgaaggaagatgagaataaagagcgctggatgttccccacaatgtttctgtgaaactagggcattattatagcttggtgaattacccttt

SEQ ID NO: 109632 - DNA, 399 bp, Homo sapiens
gtgattgaagtaaacaatagaaatggaaagaaaactaaaaggccacgtgtcattgtggattataacgagaatatgggagcagtggactcggctgatcaaatgcttacttcttatccatctgagcgcaaaagacacaaggtttggtataagaaattctttcaccatcttctacacattacagtgctgaactcctacatcctgttcaagaaggataatcctgagcacacgatgagccatataaacttcagactggcattgattgaaagaatgctggaaaagcatcacaagccagggcagcaacatcttcgaggtcgtccttgctccgatgatgtcacacctcttcgtctgtctggaagacatttccccaagagcataccaacaacgtccgggaaacagaat

SEQ ID NO: 109633 - DNA, 585 bp, Homo sapiens
ggcacgagaactgaagatggatatcagttacccctgttttcattttgaactacttagcattttgggaaaatctgcaaaggctttgcatactctaatgttattgctacatgtgtttttacctcacttttcttaattctgccttctcatttgttcaggccgaaagggaatatgtctttaaaaatttgcctttcaaagtataacggaggagcagttctatatttattctggggctatctacttcaaatactagaatcgtttccaaaagtatgtattagattatttgcccatcagatattactgattcagaaagagaaactgctcctcctccaccctggctctttctaaagcagaagtattaatatatttaattttctacaggatattcaaatagaagccttgctgatgagagcctgtgagcccataattcagaacttctgccacgtaagtgatgtctggaggagcaagggttaaaaacagaaacaaattgacagggactctcccctgagtatctcagactcacctctgtctgcagcatgtattactcttgagtgttagccagctttgacaagttaaaattaaaaatgt

SEQ ID NO: 109634 - DNA, 1137 bp, Homo sapiens
gtgaaaatatcaaagactctgataagatgctgagttttcgagcccatggcccggaggtccaggctcataacaaacggaacttgatacagcacaataactccacgcagacagacatcttctacacggacaggctggaagacaggaaggagccaggccccccaggaggcagcagctcctttctgcataagccattccctgggggacccttgcaggtctgcccccaggcctgtcccagtgcctctgagcgtagcctgagctccttccgctcagatgcctctggggaccgtggctttgggctggtggacgtgcgtggccggcggccactgctgccctttgagaccgaggtgggcccctgtggggttggggaggcctccctggacaaggcagactctgaaggctccaacagcggcgggacctggcccaaggccatgctcagctccacggcagtgcctgagaagctctctgtttataaaaagccaaagcaaagaaagtccatctttgaccctaacactttcaaacgcccccagacaccccccaaaatagactacctgcttccaggtcctgggcctgctcactctccccagccctccaagagggcggggcctctgacacccccaaaacctcccagaaggagcgactccattaagttccagcacaggctggagactagctccgagtcagaagccactctggtgggcagctccccatccactagtcccccgagcgccctgccccctgacgtggaccccggggagcccatgcacgcatcaccccctcgcaaggccagggtccgcattgcttccagctactaccctgaaggagatggggactcctcccacctgccggccaagaaatcctgtgatgaggacctcacctcccagaaggtggatgagctggggcagaagcgtcgccggccaaaatctgctcccagttttcggccgaagcttgctccagtagtgattcctgctcagttcctggaggaacagaagtgtgtcccggccagtggagaactctccccggagctccaggagtgggcaccttactcgcctgggcattccagccggcacagcaaccccccgctataccctagcaggccgtctgtgggcactgttccccggagtttgacccccagcacca

SEQ ID NO: 109635 - DNA, 383 bp, Homo sapiens
  misc_feature (1)...(383): n = a,t,c or g
caaatgttgtaaacatcctgaagcaaaaagaatgccctgtgcagaagactatctatccgtggtcctgaaccaattatgtgtggtgcatgagaaaacgccagtaagtgacagagcgagaccctatctttnnnnnnnnnnnnnnnnnnnnnnnnnnnnnnnncccccccaacccccccatttaaaaattggggccccttgtttggggggcaccagggggggcatgggccgggccctgtttttggtcatttggaaaaaaggaggggtttttcccttgacccaaaaaggtgtgaggggttgcaaaaaaccaaaaattcttaaaaannnnnnnnnntgttagaaggggggaacaaatacagtgtcggccttgcgcggcctcctgaccg

SEQ ID NO: 109636 - DNA, 415 bp, Homo sapiens
gtcatgcagtattaaaaagtgcttcaagtttaacgatcaggaatgtaaagccatgagtgatttggatttggtttatactatggaaagtttacagaaagcaattcttacaggtgcagttatatttgaaccagactcagcatgaaatatttctttatttcaattcagtgccaatcctttgatctcactcagcaagttaatttccaccacaccttctaagcaacacaatacatacttctatttatttatttatttgagatggagtttcattcttgttgttcaggctggaatgcaatggcacaatctcagctcacagcaacctccgcctcctgagttcaagctattctcctgcctcagtctcccgagtagctgggattacaggtgcccacaaccacacctggctaattattattattat

SEQ ID NO: 109637 - DNA, 407 bp, Homo sapiens
  misc_feature (1)...(407): n = a,t,c or g
gttttttgcacagtagttaacctcatcactactttgggtgggctgtacagggattctttccttcatcttacagaggagtaaacaggcacagagaggaaggggaaaagtgacttctttgaggtgaggcagcaacccaagagaacctggcagagctgaggccagaacccgagctcctgtctcctagcaccgtactctcccgcgaacccgagctcccgtctcctagcaccgtcctctcccgcgaacccgagctcccgtctcctagcaccgtgctctcccgcaaacccgacctgctgtctcctagcaccgtcctctcccgcaaacccgacctcctgtctgctagcaccgtcctctcgagcaaacccgacctactgtctcctagcaccgtcctctcccgcaaacccgacctn

SEQ ID NO: 109638 - DNA, 374 bp, Homo sapiens
cggcacgagtcacagtaaacaagcttgttacccactggcctttggggttcctgctgctctcatggctgtagccctgagtaagtggaaatcggttgaattaatagaagcctaggaccaggtcaggccctacgtgaatgattgtgactaattttttaaagtgcatgtaacaagtggcaacaaaaagtagtgagaagaattggcatcaaatgttaaacatgctctaagtattcaaagaaagtaggattggcacatcaattccgagggaataggatcaaaaaaagaattacaggaaaaggaaccaactgagttggtcattgaaaggtgtaatactatttaggcagattaagatgaaggtgagagaggcccagcatggg

SEQ ID NO: 109639 - DNA, 299 bp, Homo sapiens
acaggatctgctcgccacccttcatggagctcacgagcctgtgcggggatgacaccatgcggctgctggagaagaacggcttgactttcccattcagtgcgtaccatcccagctccacctgagggcaggcgttgtagaccgcaggccagcataggggaggggctgggtttatagtgccctctggatttaagctcacccgaggatggatgagcacatggccctgggtcccacctccacccactcctcccgcttcatccctctcaagtaatggctcagctaataaaggcgcacatgactcc

SEQ ID NO: 109640 - DNA, 628 bp, Homo sapiens
attcctagtccgtgtggtggaattcgattgatttcatcctgttactgctttgatttcaagccttcaatccattaacttggcatttaagggccattttccatctgtctgtaaatcaactttctagacctggctgtaataccttcctatatgaatactcagccaacctgatttcctactcccatgttttttatttatgctgttcttgttttatatggttaatatcagatccatccttttaggctcaacttaagttctttccccttaaagcttctcttagtattctagaatgacattagtgctattgatttaacactgtttgtcatttggtgccctcatgtggtgtacatcttttatgtacatgttgcactttattgctagaagacagaaagtgagttgccattgtattttgtagtacctagcccatgtcctgtccatatatttatcaatgtgttgatgagagacttgaggtggaactcaggatggggagaatgcctgggcttggctaatagggtgatctgtgtactttcagcatccttgctgaactacagcttcgagaaccaagctttcccgatgttcagcatggggtactcatccataaagtcatcttgggctcccctgcacaccggga

SEQ ID NO: 109641 - DNA, 379 bp, Homo sapiens
  misc_feature (1)...(379): n = a,t,c or g
gctcgtaccccctcaccaagtttgtctgagagctctgaagatgaaaaaccaacaaaaaagcacaaaaaaggtaaagcattaagacttaagagaagattctgggtggtcttaatgtctgctcttccttgcattcactgatagttgataatcaactcaagtgtgaaaggggaaggtgtggggaagcatagtttaattgggaaagcagggagtatcagtggaaggctggtgcnnnnnnnnnnnnnnnnnnnnnnnnnnnnnnnnnnnnnnnnnnnnnnnnnnnnnnnnnnnnnnnnnnnnnnnnnnnnnnnnnnnnnnnnnnnnnnnnnnnnnnnctcaggatgggaattaccttgtacagccactcgacatatcaaaggtg

SEQ ID NO: 109642 - DNA, 378 bp, Homo sapiens
gttttaagacaaaaactgtcttcatggcctctgtgaacagcctcccttcattctgttggaatttcctgttgactttttttatcctggcatactgagatcttaaatgatggttgttttagatgttggccacttggtagttaggagggtgtgagaaattatttaatacttcagccaagaagtctttctagactaaattgttccttttttcccaacagagaagaagagctgtgtcatcattccagttcttcaactccattggcagcagacaaggagtcccagggagaaaagggtaggttgctgagccaggatgaggggctgctgttggtggtggaggtatttgtggaggatgtagagattaatacctattgaaaaaagatc

SEQ ID NO: 109643 - DNA, 565 bp, Homo sapiens
gagcgtgggtaaccctcagactccactgtgcccctctctggatccccatctcacctgacctccgcacctccccacatcacccagggtgtcagcctctacctctgcacttcccacctcttcctccagccgtggtcagcaccatcaacagctctgacctccctgtactctgggggttcccagacaagcacctccagtattccaccttcccctcactctcgaagaactagaaggggtgggtctcaaaatgaaccctgcctgcaaagaattggggacgatagtgggggatgattcccgggcagaccctggtttccccagagactgactctgcattccaccccccagattacaaagccttcgaggatgcagctgaggagtttcatccctacatccccttcttcgccaccttcgacagcaaggttctcctccccgcagctgtattggttctgcctcatgtcctgaagctgtcctccagtttcctctcccagaatcgatggctgacctggtcccttccaatgtgctgcccccctcttaatactcaccaataaattctacttcctgtccaaaa

SEQ ID NO: 109644 - DNA, 392 bp, Homo sapiens
  misc_feature (1)...(392): n = a,t,c or g
ctttaaagcactgacggattctaatgccattttatatccatctttggcatcaaaagcttctaatcataatactcatgtgggggatatgctaaggaaaaatgaaagtcctcacacttcaacaaatgtaggtgttctaaatagttgcctggatgtaagaacagttattcctgaaacatctgtatccagtactgtttccagcacacaaactatggtaacccaccagaccattaaaactgaatcatccaatacaaatggggcagatgttaaagatgaaacttcactaacaacattcagtaccaaatctgaagttgatgaaacatatgcactgcctgcaacgaagatcatccgtgtagagacacatgctacagcaacgctgttttctaaagagactn

SEQ ID NO: 109645 - DNA, 365 bp, Homo sapiens
cggcacgagatcactgtgatcttaccaaagaggagctggagccaagagttttccgagatgtgaccgtaaaaggaattgatgcttctgattaccagacagtccagctccccaagggtactgagtcttccagaaactgaatcactggttgattgatgatgacgaagaatgtctctgttcctttgcaatgagaggtcaccaatagggcaccaggtgtttatcaaggcccctcccacctggagggctggaccacacaggccacagattaggaatcagaacattgtttgtgaaggaagatgagaataaagagcgctggatgttccccacaatgtttctgtgaaactagggcattattatagcttggtgaa

SEQ ID NO: 109646 - DNA, 100 bp, Homo sapiens
tgaattttcattttacagggaagtgtttgtttatgtcagggctcagtgaggtccagctgaaccatatggatgatcacactctaccagggtattgaagctc

SEQ ID NO: 109647 - DNA, 1010 bp, Homo sapiens
aaggagtctaacacgtgcgcgagtcgggggctcgcacgaaagccgccgtggcgcaatgaaggtgaaggccggcgcgctcgccggccgaggtgggatcccgaggcctctccagtccgccgagggcgcaccaccggcccgtctcgcccgccgcgccggggaggtggagcacgagcgcacgtgttaggacccgaaagatggtgaactatgcctgggcagggcgaagccagaggaaactctggtggaggtccgtagcggtcctgacgtgcaaatcggtcgtccgacctgggtataggggcgaaagactaatcgaaccatctagtagctggttccctccgaagtttccctcaggatagctggcgctctcgcagacccgacgcacccccgccacgcagttttatccggtaaagcgaatgattagaggtcttggggccgaaacgatctcaacctattctcaaactttaaatgggtaagaagcccggctcgctggcgtggagccgggcgtggaatgcgagtgcctagtgggccacttttggtaagcagaactggcgctgcgggatgaaccgaacgccgggttaaggcgcccgatgccgacgctcatcagaccccagaaaaggtgttggttgatatagacagcaggacggtggccatggaagtcggaatccgctaaggagtgtgtaacaactcacctgccgaatcaactagccctgaaaatggatggcgctggagcgtcgggcccatacccggccaacaggaggttattaaaggcctagttagttttttctggggagcctcgcctgcagatgtcccagcctgctcaccccacccatggaaggagcctttatcctgagagaagctacggagccctggaaagctggagccccacaggtagttaagattaaggtgaaaggaaactgggagggtcttactgataataaagctattgttttgaggcactttttagactttttaagataaaaacgtcagatttatgtaaaaaaatgaattagtat

SEQ ID NO: 109648 - DNA, 383 bp, Homo sapiens
  misc_feature (1)...(383): n = a,t,c or g
aaaatatcttaattttagctggtcaaaacttttaaaaactatggtatggcagaattgctgataannnnnnnnnnnnngagggaaaaattagggggttttattcaatttctatttaaaaaatatccaaaactaaaccctttttcgaggtagggatccttgggaaccacccaagttttctttggctttggggcccagaaaaaatcccagggaaagggccaaaataaagggcccggcaaaaaaaccgggggaaagaaagcaggccccccccggggggcaaaaaactgccaccagtcagggccgccgtaggggccggataaccaggcccatgacaaacaaacctgaaattgccagtgctgcacccgcaggggttactgaagaccccc

SEQ ID NO: 109649 - DNA, 444 bp, Homo sapiens
atgacttgattacaaattttatacgactctctgtacgtaattggcccctctaggccacgaaataggccctgaggactgtaggtatagcaaagaaaaggtgacgcaatacattaatactgctgataagacaggaagggttaaagaagcccgtctgatctcacctccggaattcgttcatgatctgaaaatggggtctggagatgagagacttgtcacatgcctggagtctctccgagtgtctttgaccagcaatcctgtgagttgggtggaaagctttggacatgaagggcttggattattattagacattttggaaaaactgattagtggaaaaatccaagaaaaagttgtaaagaaaaatcaacataaagtcatacagtgtctaaaagccctgatgaatacgcagtatggcttggaaagaattatgagtgaggagaggagcct

SEQ ID NO: 109650 - DNA, 408 bp, Homo sapiens
actcctcagcaggaggagggggctgaggtcaggaggggatgtgagtgcagtgcctggcacttggccaacatgagtttctgctgctgttaggatttctctccagggcaatggggagccatggtggcttcttgagcaggggaggggcaggtaggcatgaatttgaggggacgggggctgccctcctgaagctgctggtcctctctgccgtccacagagactgtgtccaggaccgacagcccctccaagatcatcaaactagaccccgtgcgggtgattgcagaaaaagtaagccaggtcctgctacgggtcccatttcatggatgggggaaaccgaggcctgggcatccaactgaatgtcctgacctgttctcagcccacaccccacaagtgcagtcttccatagagcga

SEQ ID NO: 109651 - DNA, 380 bp, Homo sapiens
cccagataaagtataggcgatagaaattgaaacctggcctaatttatgtatttttagtacagacggcattttgccatgttggccaggctggtctcaaacccttgacctcaagtgatcctcccgcctcagcctcccaaagtgttgggattgcaggcatgagtcaccgtgtccagtgttgtctaagaaattcttgcttatgctgaggctgtcaagatattctcctgtattgtctttttaaagttttctatgtttgcttttcacactttagtctttaatctacttaaaggtgattttgtattgggtgttgctaaggctccaattccatttttttcacctacaaatgtctaatttttgcagcataatttattgaaaagtccatc

SEQ ID NO: 109652 - DNA, 357 bp, Homo sapiens
gttttatggtattcggcaaggcatttgtgggaagaaacactctgagcaagttccagatatattacaactcaatgcaatctttaacatgttgaataccacaaactgcccaagtttgaaggacaaaccgaaggtgatcatcatccaagcctgccgaggtgacagccctggtgtggtgtggtttaaagattcagtaggagtttctggtaacctatctttaccaactacagaagagtttgtggatgatgctattaacaaagcccacctagagaaggattttatggctttctgctcttccacaccagataatggttcttggagacatcccacaatgggctctggttttattggaagactcag

SEQ ID NO: 109653 - DNA, 380 bp, Homo sapiens
gaacaactctcttccccataaaacccagctcccaggtgtcctgggccatatgttaagaagcctgggccttaagtgccagccctaacaccctacttgtttggatttttccagccccacgcctttcccttgatttcaacaaatcatgtggacaaaattgttgagagtatatcaagaaacactaccaaaagagtaaaaaggcagtccatagagtgggagaaaatacttgcaaatcaatgcttacttcagcagtacatatactaaaattggaacaatacagagattggcatggcccctacataaggatgacaagcaaattcatgaagcattccatattttttataagcaaaaatatatgtacataataaagtttttaaatttgc

SEQ ID NO: 109654 - DNA, 361 bp, Homo sapiens
  misc_feature (1)...(361): n = a,t,c or g
taacaaaccatcaggtttctggggaatgataaaaagtgttaccacttcagcatcaggaagtgaaagtatcctttgtccctctgcttgattctttttctcaactctggaccaagagcaaaagaaaaaaagtagtgttgggatagtcccttctaaggtacctgactacatcagagtccaaactcctaagagctaggcttaggaaataccatgtgtacagtcatctttccagcacctgcacaatatcataaaatcattgtctttgagctgaagtggtcctaaaaagtcagcctttnnnnnnnnnnnnnnnnnnnnnnnnnnnnnnnnnnnnnnnncacacggtggtttgtggcaaagctagaaa

SEQ ID NO: 109655 - DNA, 363 bp, Homo sapiens
ccatgtcaggaggtggctggtgggttttgtgaatggcgccataatcttttcatactcatcttctctgtgagggcagggacttgtgtcttgtcctcactgcagtattctcagaaactaacacagtgcaggaacatgctagatgcttaccagacatcaatggggaatgcatgttagggtccacttcctctgctgctcctgagaagcaacctgtacaaaagttgtaattctattctctgatattcatgtgtaacaattcttaaccctgtttcacctttttttctcttgcccttaggagttttgggaatgcacttggaaactgtattctggacaaagactacctgagatcactaaataagcttccac

SEQ ID NO: 109656 - DNA, 392 bp, Homo sapiens
ctctatatatatttttagattcgggaatattggcatatacatgagatatcttggggatgggacccaaatctaaacataaaatttgtgtttcatatatgcttagacacatagcttgagggtaattatacaaaattttaaataattttgtgcatgaaacaaggttttgattgggttttgactgcgacccatcgcgtgaggacaggggtggaattttccactgttgctgtcatgttagtgctcagaaagtttcaggttttggagcataccagatttcagatttttggattaatgatacttgttaaaagaaattaaagaagatctaaataaacagaaaagcatcccatgttcatggagcaaaatacttaatattgttaagatggcaacgctccctg

SEQ ID NO: 109657 - DNA, 397 bp, Homo sapiens
  misc_feature (1)...(397): n = a,t,c or g
ggcccggctggagggcaggacaattatcccggttccatgcagccctggccctcccgagttcctgggggtcacgggtcgcaagtcaggggcccgcttatttttggattttttgggggaaagggggtttcccccggtggcccgggtgggtttttacttcccgggtcaaatggtttggcccccctggcccccccaaagggtggggtttccggcctgagcccctgcccctgggcccccannnnnnnnnnaaccactatggccnnnnnnnnnnnnnnnnnnnnnnnnnnnnnnnnnnnnnnnnnnnngaaactccgtttcnnnnnnnnnnnnnnnnnnnnnnnnnnnnnnnnnnnnnnnnnnnnnnnnnnnnnnnnnnnnnnnnnnnnnnnnnnnnnnnnnn

SEQ ID NO: 109658 - DNA, 807 bp, Homo sapiens
tcgagatttatctaggatgtagagcgacagtggagggggcatgagctcaatgaggacggcctcgtttcctgggatgagtataaaaatgccacctacggctacgttttaggtaggtccctactgtctgggggaaaaagccttgtggagctggcaccttgaaacgtaactgttttgtcttgtagaatgattgtagataaaatagacgtggataaagatgggtttgtgacggagggggagctgaaatcctggattaagcacgcccagaagaaatacatatatgacaatgttgaaaaccaatggcaggagtttgatatgaatcaagacggcttaatctcctgggatgagtacagaaacgtgacttatggcacttacctgggtaaggggcaagatgtcagcctggcagggaccgtggtcttgagtcaaagaaacaaatgggtcacacagtaaaggaaaggaagcttatcttaaatagttcaattcagtgctaagctgattccctttattaattttaaatttgtatattatgtatttttaaatttgtttaatttttgttttctgaagtctggaagtctggtatcttcctacatttttagcattttacatatattttaccattttttctttatgtcatccctcatagagacaatttttggagtagatttcatttaaaagaatacattgggctgggtgccgaatactcacgcctataagcactttgggatgctgaggcaggaggattgcctgggcccaggagtttgagaccaatctgggcaacatagggacaccctgtctctaccaaaaaaaaaa

SEQ ID NO: 109659 - DNA, 386 bp, Homo sapiens
  misc_feature (1)...(386): n = a,t,c or g
caaataacatacacatgttcctaaaaagaggtattgaggggcggaatagtaatagtttggcttcataaaattatgcagctagtacttaatatattcttcggcattagtaaaacaaattttttttaatattccagcttgaaattcagaatcatcctttttttgaatcactcagctgggctgaccttgtacaaaagaagattccaccaccatttaatcctaatgtggtgggtatatatccaaatctttctttctagaatcgtgaaacttaatagcagctcattgtaagtttgaaactagatctcagaatcacctgaagtaaatggagtcattacctacatatttgtgaaatatgtcactcaggggtgtctagtataactaataacttn

SEQ ID NO: 109660 - DNA, 404 bp, Homo sapiens
tcagataatcatagtcactgttccatgagtttttttccagataacgatgattatcattatggtcactggttttttgaataatttaacacatgcatcctggcaaataataacctctcccctttcagaagcagacaatgcttccaggagaaatttaccgagacactaggacaacttattttattgtccttgaagcaatctttatattaaaaacatcattgaatgctcatatcaaaatctaaactaacagtgtttcaacctttgatattctgtcttttgttagacatgggagatgaagtttacgatgatgtggatacctctgatttccctgtttcatcagcagagatgaggtaattaaaatgctttcattacaatgaagtaatgaaaatgagaatactcaagaaaat

SEQ ID NO: 109661 - DNA, 743 bp, Homo sapiens
  misc_feature (1)...(743): n = a,t,c or g
tggggttttgccacgttggccaggctggtctcaaactcctgaactcaagtaatttgcctgcttcggcctcccagagtcctgggattacagtcgtgagccatcgcgcctggccgtgatagaaactttcagctgaggagtctatatgccatactactctatgtggcatctttaggtctctgtgaaatcatgttgatgtaattgattaacaaaaataatttagaaaatacgtcaggcacagttgatggcttctcaatatctgctttgcatttttaaacaaatcaagaatgtaattttaacttttggcttatggtcattcttgatgactacacggaaagggatgggaatcatacttacttgccttatacatggactgtttttagttaacaataacataactacacaaaggaaaggaaatgtttacattttaaaaaattactgtcaattacatctggtatttttcagattatgcataaaataatatgagtttgactattgtatcagaatattttaatcaaatcctgcaatttatattaacttaaaaaaacattctggtaaagactgggtgtgggcatccaccgcctttgatcccagcactttgggaggccgaggctggatggatgattgcttgagcgcaggagttctagaccagcctgggcaatancagggagaccctgtctctatttcaaaaataaataaataggccccggtgtgtgatgttccccttcctgtgtccatgtgttctc

SEQ ID NO: 109662 - DNA, 631 bp, Homo sapiens
gatgatgtggagtgggaggaagatgtggtcgatgccacgcccctggaagtgttcttgctgtctcagcacctggaagaattcctgcctatcttcaagagagagcagattgatctagaagctctgctgctctgctctgatgaggaccttcagagcatacaaatgcagctgggtcccaggaagaaagttctgaatgctatcaacaggaggaagcaggtgcttcaacagcctgggcagctggtcgacaccagcctgtgatggagagttttggcctggagcattggggtgatgctgtggcccgctggcagcactccaggcggcaccccctctttacccaatgccagaccactgggaatggattttagggcatcggaaatgcctacctgagagagagacccaaactttactctgggaggtaggctatgcccatccaaaataaatctccatgcgaaacttgaggagacttcataacaagaatctggcatttctcttcagttatcttatatgtacatataattgtttttgtggttgttttgttttgttttgttttgttttttggagatgaaggtctcagtctcttacccactgcactctagcccaggcggtaagagagactccatctcaaaaaaaaaaa

SEQ ID NO: 109663 - DNA, 370 bp, Homo sapiens
  misc_feature (1)...(370): n = a,t,c or g
gtgggaaagccttttgtcacaggtcacacctcatccgacaccagcggatccacactgggaagaaaccatacaaatgcgatgagtgcgggaaggccttcagccagagctccaacctcattgagcaccgcaagacccacactggcgagaagccctacaaatgccagaagtgtgggaaagccttcagccagagctcctccctcattgagcaccagcgcatccacaccggtgagaagccctacgagtgctgtcagtgtggcaaggccttttgccacagctctgcgctgatccagcaccagagaatccacaccggcaagaagccctacacctgcgagtgtggcaaagccttccggcaccggtcagccctcattgn

SEQ ID NO: 109664 - DNA, 391 bp, Homo sapiens
  misc_feature (1)...(391): n = a,t,c or g
tttagggttcacacaaattaatgaaggagtaagtttgtttgcttgatgtatgaaggaccagctaggcatgttgtaacctgcaaatctagaaccttcagaacctgaggcccctgtcctctcctgaggatcactcccgagcaccgcagcctgtctgcagcagcacctggggctgtgagacccacagcaggtgtgccctttatagcagagctcctaagctgttgtgttctgataatgtgtgtgaaattaaaaattttccatcttgcgttggcaggcctgaaagcaggagatgagattcttgagatcaataatcgtgctgctgacgccctgaactcttctatgctcaaagatttcctctcacagccctcgctgggcctcctggtgagtacctacn

SEQ ID NO: 109665 - DNA, 252 bp, Homo sapiens
gagtcatccaacgcacagtcatcctcaacacctccctctcacccccacgtggaattggtcatcaactcctgtggatttcatcttcagaaaggctcctcctgtcttcccccactggcagcatcatagggcaggacctgggcacttctctgattcccacagatgctccccaggggggcctccccaccccctccttacccctccagtccatcctccacacccaccattcccaagagagacctttctaagacagtc

SEQ ID NO: 109666 - DNA, 402 bp, Homo sapiens
  misc_feature (1)...(402): n = a,t,c or g
aaagaaaatacagtgtgtctaaactggaaaagtcctgtaatagtttgttcatgagcatttacacagtggagttactgttcatcatgggggtactgtggacaagcccagggctgcnnnnnnnnnnnnnnnnnnnnnnnnnnnnnnnnnnnnnnnnnnnnnnnnnnnnnnnnnnnnnnnnnnnnnnnnnnnnnnnnnnnnnnnnnnatacatgaagttatgaatttaagatgtgaagatttacagcttgataaaccagcttcaggagacatgatcttatgaattcaacacatgaagatttacaacttgataaaccagcttcaggagatcagaacttcttatgatacaactgaagttactcagcctagaacaaatacaacagggatgaagctcatggtgctactc

SEQ ID NO: 109667 - DNA, 412 bp, Homo sapiens
ggcacgagcaagtgtgccaagtatgaatgcgtgctcagttatggcaaacaaactcactcagcactgattggattccaggctccatggtccccttctcgatgcgcatcttgcacgcggagcttcagcagtacctggggaacccacaggagtcgctggatagactgcacaaggtgaagactgtctgcagcaaggtaggtggcgctgtcattcttccctgccacggggagaacatgccctccacgccctccccacaggacatgcccgtgctgttccctgcccgtcctgccccatgcaccatccgctgcttctgccttcagaaggctaggtgaccccggtttgtgtggcctggtagtcgtggctcttgctgaaatcttttttagggatggtaagagtttctagcagagctcgagcg

SEQ ID NO: 109668 - DNA, 373 bp, Homo sapiens
gcagctcacacccacttcttgttttccttcccaacatgggcttcttggtcccccaaaatgagcacttcagcctctataactcgagtgtattggcttttggaaattgtgaagatttttctgtatgaagcagccccaggtgaaccagaggctgccttttctggagctgctgaaatccaagggctattttcaagtcggtcagaacctgccctgtaccccccacccaaccctgccgaaatgtcaaggccagaagctgtggcgttggtgcgggtaccacctccttcactctgagcgtgtggccccacaggtacatcactcaggaaggccacaagctggaaacaggggccccgcggccaccagccaccgtcaccaacgg

SEQ ID NO: 109669 - DNA, 493 bp, Homo sapiens
atcacgctcgagagatattacttgcctgtatctcacctacacatgttcttttgtctaaaaatacattatttagcggcttgccaagcatagagcaccttaccacgggattctaggtagccatgcttgtgcgaattactttttacatagacttaatgggtgccactgaaaaacttttttcagtgtaaacagaatctgttttcgaattgacacctctgttttctaaactactttccaaaaattatagtatctgaagcttacttgactttaccctgaatcaaatcttaactaatttgttagctttggtaagctgataccccgacttaaaccatgtttatgataagtgcccgactaactcttatagagcacttacttactgctctataaatattttatcacaaagatggtaatgatttttttttctctttgtagacagggagattttgaaaagaagaaaaagaaaaagaagggaaaattgcctaagaattatgaccca

SEQ ID NO: 109670 - DNA, 395 bp, Homo sapiens
ccgggcttttttcaagtgaaccatagacaaggggcagaagattctccctttggctggctcagctaaagactaaagtgagagaagacagaggactcttgttcctctgagttttgccgtaaatatcacttgctccttgctggattggaggaagggaggggcagaagacaagactattatcatgattagcctattttctcttatacatttattcaacaaactttaaagggaacattttaaatgttgttgacagttacaccttggttactttattttaaaaagcattgtattctttgattttttaatgcaaggtctctctattgtagctggctcctctcattcaaaaaaaacaactggctctaaagcatcagcttcgccatccacttcatccacctcat

SEQ ID NO: 109671 - DNA, 391 bp, Homo sapiens
  misc_feature (1)...(391): n = a,t,c or g
nnnnnnnnnnnnnnnnnnnnnnnnnnnnnnnnnnnnnnnnnnnnnnnnnnnnnnnnnnnnnnnnnnnnnnnnnnnnnnnnnnnnnnnnnnnnnnnnnnnnnnnnnnnnnnnnnnnnnnnnnnnnnnnnnnnnnnnnnnnnnnnnnnnnnnnntaccaccaaaaaaaccccaaatctcttactggggattgggggccccctgttgggggccttcctggacctctttgagggaggaaagggcagggcctgaaacgttttcccggccacagcctccctgttatccctcccctttgtttccttcgccaggccaaggcgaacctagacaagaataagcaaacgctggaaaaagagaacgcaaacctggccggggagctgcgggtcctgggccaggn

SEQ ID NO: 109672 - DNA, 846 bp, Homo sapiens
cccctggaaggctattgtagggccattaagagaagcagggggaacggacgtggccagccagagtagcccatatccaccacatcatacagggaggtttctttttgatccctaagtaaagaatgataactggaaaataagatccatgaaagagaagaatactcccattatattaaatgagcggggatagttcctgagacacatttttattaaagtgcattttcaggattttccttcatatgtataaagcacaccttctgttgctgttaatgaaagctaataacattaaaaatatacttaagtgtcaacttgcaacagcacagcctttatttttttaagtacatggtgagtaagcaacattaaataattagttcttagactggtgttttttcttccagtgtgaatctggcaacattggctctgggttatgtctcctcatcagtgctggtatgttgttgatttactgaatattggtgtttttaagaatgaatttaaaatcactcaatccctcctggctcttcacagtttttatggaatgggagggaggggtgttagggtttgtgtattctgataatctaacaaagagttgttcttgttttgggtagggctgcagcccaatgtgatagcatgacgatgactcctggcccgtggctgggtttgccagctgttcctgcggtgacactgtataaacacgatgaccctgccttggtaagtttccactcactggggagggagtgggtgtggctaatacacattattggctttgggggcaaaatccagaaaaatacaggaaaaagtgaaaaatacccataatttcacttctatttcatttttttaaagagaaacttg

SEQ ID NO: 109673 - DNA, 348 bp, Homo sapiens
gataaactacggggggatatctctgcaagaggggcagtccacataagtaatcctataacagctgaatttcaggtggcacgcactacccttcttcctggcctcctgaagaccatagcaacaaatcggaagaagccccttccactgaaactggatgaaatctctgacattgtagtaaaagattctaataccgaggtaggtgcaaaaaactacagacatctctgtgctgtgtattacaacaagaatcctgggtttgagatcattcatgggctgctggacagaattatgcagatgctcgatgtgcctcctggcgaagacaaggggggatatgtgatcaaagcgtcacaacgt

SEQ ID NO: 109674 - DNA, 502 bp, Homo sapiens
ggggtttcaccatgttggtcagactggtctcaaactcctgacctctggtgatatgcctgcctcagcctcctaaagtggctgggattacaggcatgagcagctgtgcccagccgacagatactattattatttccattctaccgagaaggagactaaggctctgatcatttaaataagttgcctaaggtgatgcagtgatataagtaggcagagctagggaattgagccttgggtaactttaactctgggaccccaagtccttaggctacttaagctttacttgcatgggggtttagtcaaatttaaggacttttgggaatatggagttactttttgaggattaggctttgtggatatttttttgtggctccatcccacaaagtctattttattttccatcttaattaggggttttgtatgaatatgcacgaaggcatgctgattactctgtcatgctgctgctgagacttgccaagacatatgaaaccactctagagaagtg

SEQ ID NO: 109675 - DNA, 279 bp, Homo sapiens
ttaaaaatttaattttaaaaaaagcaccaaaaccaaatggttgcctggcagcgggggctgcagggccctcctgtttgtgtgactcaggtcgggtccctccctcacccctggccttttttgttttttgcagggctggggaattaccaaatctttgtcaagggcagtaacctgttcaagttgaaagtgcgttttttggatgcaaaaaacaaagtcgtggcgaatgggactggaacccagggccaacttaaggtgccaggtgtcaccctctggtggccgtcc

SEQ ID NO: 109676 - DNA, 378 bp, Homo sapiens
gtataatgaaaactgaaaagtgaagtagtcattgggatactctactgtctcacttaattctcacggcttccctgcaaggtgggtaaaattgttcctacagatagtcaaattgagttttacagttagaaaatgattgggctaggatttgagccaatgtctgtcagattcctgagtttctgctacttctactaaaatatgctgcttcttgtgtgtccggtcttctgtttgggacaagcagatgatatccctaacaaaatcaattttctttattattattctcttttaccttttgtttcccaggcagtacaagtcccagtttgaagctcaaaagatctggtatgagcataggctcatcgacgacatggtggcccaagctat

SEQ ID NO: 109677 - DNA, 427 bp, Homo sapiens
ccgctccttgaagctggtctccacacactgctggttccgtcaccccctcccagggaagcaggtctgagcagcttgtcctggctgtgtccatgtcagagcaacggcccaagtctgggtctgggggggaaggtgtcatggagccccctacgattcgcagtcgtcctcgtcctcctctgcctgtggctgctgcggtggcggcaaaggagggatggagtctgacacgcggacaaaggctcctccgggcccctcaccagccccaggtcctttcccagagatgcaatgtgccggcccagggtgggcagcggccctgcctcctacccttgcgcctcatgaccagcttgttgaagagatccgacatcaagtgcccaccttggctcgtggctctcacttgctcctgccccttctgtcgtcttctcgcagccgtata

SEQ ID NO: 109678 - DNA, 367 bp, Homo sapiens
gatgtgatacatgggcaaaatgaacaaaacagaaaatacttaatggtaaattaagtataaatactcctatggtaaatacattgttaacatagaaatatctaagttagaaatatccaagttcaaacttagaaatatgtgagtttctcctaagaaattttctgtataaccaagttccagatgagcaaaagacattggtttgttatggaacctctgtagaataggaaatgtttttagtagttcagatgtatttttttcttaccttgttgagaacaaaacagaattatgtttttcaggttgccatggctccgtagaaaagagctcctctgggagaataacgttaggagagcaggcagctgccctagcaaat

SEQ ID NO: 109679 - DNA, 355 bp, Homo sapiens
ctcacagccctgttcgtggaacttaaccacaagaccctcatcctctaccccagtctgcaggcctacaggctgtacaactcctccctgccgggggacagttgtccggacctcaagctgcatcctgccacgacaaggaaggacgtctccaggattgagctggccagcgaggacggggtgtctgtctcctgtgacgtgcccaccggcctctgcagcctgactctgggcctctggcagcacggcatatccgctggccttctgggcaccaatgacaatgaagcaggcaatgagctgatgttgccggatggctctatggcccgcagcctggaggagctcagcctggcctggcaggtgggtg

SEQ ID NO: 109680 - DNA, 359 bp, Homo sapiens
  misc_feature (1)...(359): n = a,t,c or g
nnnnnnnnnngaaactgcatagggctcgggggggctgccatgctgctttcctgctggggactggcggccgtctgctccatcaccggctacacccacggaaggcacaccttggctttcatggctgcaaaggtgaaatactggacccaggacttgctcaaattgaatttctgtctgttttcaaggaagctggatgtttgacaagttattttcacccatgaaaggacagggggatatttggcctttcattttaacaagcatttcagttcctttttgggtgtggggaactggaactgaatgcttttgtggggaattttatgaaactctttctttacgaagggtataaagaatttacaaaaaag

SEQ ID NO: 109681 - DNA, 370 bp, Homo sapiens
aaaattgaacaaatgagatgccctgggtatagagagctatcacaattgacattttcttgagggaaaaataaagagaaaaaaattatttaaaaggctctgggtgtagattctatggaaataattgaaaattattagagtaaactaagtaatgaaattcaagcttatatcaagtaacagcctgtttaatgtctttgtctagtcgtctaatgtttttaacactgggatctccttttatattaacagaagaacactgggcaacgtatggatggacctcttgtacttataagcagtgggctgtcttcagaacaacagaaaatgctcagtgagcttgcagtaattcttatagctaaaaaatatactgagtttgacc

SEQ ID NO: 109682 - DNA, 363 bp, Homo sapiens
ccagtgaagaaagcagagccccataccaaagacaaaccttatcctgactgccccttcctgctgctagatgtgcgtgatagagattcttaccagcagtgccacattgttggagcttacagttacccaattgcaactctgtctagaacaatgaacccttattcaaatgatattcttgaatataaaaatgcccatggcaagatcatcattctgtatgacgatgatgaaaggctggccagtcaggcggccaccaccatgtgcgagcgtggatttgaaaacctcttcatgctttccggaggtgagcaaggtctaaaagtcttagctcaaaaattcccggaaggactgattactggttccctgccagca

SEQ ID NO: 109683 - DNA, 364 bp, Homo sapiens
  misc_feature (1)...(364): n = a,t,c or g
catttnnnnnnnnnnggccaaaaaaaaatttggggcgggggccgcggggaccccttggggacaaaggggttttgtcggtgggtacaaaccttttttttacccccaaaaaaggggccccggggaaaacccccccttggaaaaaaatggggggaccccccaaaaaaaaagggagtttttttcccaattgggggggccccaaaannnnnnnnnnnnnaaaaggcaaacnnnnnnnnnncccttggcnnnnnnnnnnnnaaccccctcccaaaaccggtaaggggacccnnnnnnnnnnccccggggaacctcttccggggccaaggggaaactccaagggcccgcggggttggccttggcccccccg

SEQ ID NO: 109684 - DNA, 408 bp, Homo sapiens
gtgttttgcctttcttccaaaacacactcaccccactgaacgagagaggggacactgacctcaccttcttctccgaggactgttttcacttctcagaccgcgggcatgccgagatggccatcgcactctggaacaacatgcaatgcccaggtactgcgaggggatccctttgtaatcagataggttggctggatgaaaataccaacttctacctcgtactgtgtgaccttgggcaaacgatctctctggccacctgtatcaacatctataaaacagtgaaaacaagacaggtctcagacaacgcattgagatcatgtgtacatggcacctagcacaatagttagcactcagcaaatgtcaccaccatcagccttccaggcactgcgggctcaactcatacccaactta

SEQ ID NO: 109685 - DNA, 372 bp, Homo sapiens
  misc_feature (1)...(372): n = a,t,c or g
agcttttgtaaactcagtattatgaatttataggtatttttcattgacattaagtttcagctcatttttataaataattcaaattgaatttcatttaaatacttaaaattttgaggaactaattttgctttctgttttagtccttgcctgacaaagatggaaagaaatgcctttttctcgtaaaatgttttgataagacttttgaaatcagtgcttcagataagaagaagaaacaggagtggattcaaggtaaggtgattttttattatttgccatgatataacttgaaagctctgactttcnnnnnnnnnnctgaaacgaaactttgcttnnnnnnnnnnnnnnnnnnnnnnnnnnnnnnnnnnnnnntac

SEQ ID NO: 109686 - DNA, 360 bp, Homo sapiens
cttttttttatttgagaaagcaaaaagagatgaagcaggattttgaagaacaaatggccttgaaggaattattgctacaggctgcaaaagaggaagaggagaactttagaaaaactatgctagctaaatttgctgaggatgatcgaatagaattaatgaatgctcagaaacaaagaatgaagcagctggaacacaggagggctgtggaaaaacttattgaagagcgtcgccaacaattccttgcagacaaacaacgtgaactagaagagtggcagttgcagcaaaggcggcaaggatttattaatgcaattattgaagaaaaaaggctaaaacttcttaaagagcatgctacaaacttac

SEQ ID NO: 109687 - DNA, 362 bp, Homo sapiens
gatgatcgtgcactacctgatttcaaaggaatacaaacaagtgatcctaatgctgcggtcatgggattggcaccagaacattttcattatcaaattctgaatcaagcattccggctactcctggatggagcacctctgatagcaatccacaaagccaggtattacaagaggaaagatggcttatccctggggcctggaccatttgtgactgctttagagtatgccacagataccaaagccacagtcgtggggaaaccagagaagacgaactttttggaagcattgcggggcactggctgtgaacctgaggaggctgtcatgataggagatgattgcagggatgatgctggtggggctcaaga

SEQ ID NO: 109688 - DNA, 390 bp, Homo sapiens
  misc_feature (1)...(390): n = a,t,c or g
ctttcaaaagataggtgtaattcaaagactatttttaggtggataatttgagtattcatcccttttttaaaaactaggtgctgcttttcccccaagattataattccataagcactagtcactgactttatagttaaataaaaccatcctaattctcaaaacagaagagaaaaggtgggaggaactttcagactgctcacagaaggaatatgctgaaaggccaccttgagaaagaagcagcagatcgaaaacgcaagcaagaggaacaaatggaaactgagcagtaagtannnnnnnnnnnctaaattttgggttctttttaaaggctagcatggaatttttaaataatagactttcattttccagactttatgaagcctaaataagaag

SEQ ID NO: 109689 - DNA, 377 bp, Homo sapiens
  misc_feature (1)...(377): n = a,t,c or g
gttttccctatttttggataaagctttctaaatgtaatttagcctattcatgatgactccttttgtcatttgagcattggttattatataatgggcttagtaatacagagatgccattaaattaaatactcagactgccagaaaacttagcacatgaattgactcattaaatctgaaatatatttttctcctctttaaacagctttagtgcagccgtcattatccatgacaccggaaactgtgaaagatgttggatttggtagccttgttatacccagcggttctgttgccagcaatcttgctacttccgctctgccaactggaaatgtttttaatgctccaactaaacaggcagagcctgaagaaaaagtacctcn

SEQ ID NO: 109690 - DNA, 221 bp, Homo sapiens
taaactgagacgaagtctcactctgtcgcccaggctgggaggttgaggctacactgagccatgattgttccactgtgctctagcctgggcaacagagtgagaccctgtctccaaaaaagggagaaagactcctcaagggctgacgcatgtcctctcaattgcagaccatccataatgtacgtgaacacaggccaggggctttctcaccacaaagaattcgt

SEQ ID NO: 109691 - DNA, 364 bp, Homo sapiens
gctgaaggaggctcggggcaagatcgacatgctgcaggcagaggagacagccttgaagacgctggacatcacgtccacaccagcctctcccaaccgcgagcttcacccccagctgctgagccccaccaaggccgggccccgaaagggccactctcgccacaagagcaccagcagcaccctctgccacgccgtgtgtcccgctgcgggacacaccctcaccccaaacagagagggcaaggaggtggacacaatcctgtttgcagagttccaggcctggagggaatcccccaccctggacaagacctgccccttcctggaaagggtgtaccgggaggacgtgggcccctgcctggacttcacgatg

SEQ ID NO: 109692 - DNA, 301 bp, Homo sapiens
gatcggtccttcgatatcctaaaaaatccaagccgccctccgacattgcttgttgcaggccggctttcacacatgctgaatggaggtgatgaagtctcccccacctgtatggggattgatcaggttggggatttggatatcagctatattaatatagagggaatcactgccactaccagccctgaatccagaggttgcactctgtggcctcagagcagcaaacacacccttcctacagaaaccagtcccagtgtgtacccacttagtgaaaatgtcgaagggacagcacacactgaagccg

SEQ ID NO: 109693 - DNA, 361 bp, Homo sapiens
gatggataatcattttaatataacaaaatcacaagtagagcctcacagagggggtagctgtcctttcttttctatgtaattgatgctatttatttagaaggtctatggtttacccttgtgaagtaatttttctgtatgtgtattttttttccagcttagatggaaaccatttgagattccaaaagcatctcagaagaaagtagactttgtgagtgtaagtcagtcccatccacacccttcctactgctctcctctcttctgtggtgagtgagccaaccatttgcagcctgaatgccaagcagaagcagccctatcaggaggcagcagagacaaaaccacctgcgtatgctttgggggctgg

SEQ ID NO: 109694 - DNA, 1278 bp, Homo sapiens
cagatgactaatgcatctaattcacaacagtctatttcaatgcagcaattttctcaaacgtcaaatccttcagcacacttccacaagtgtagcagtcatcaagaaggaaattttaatggaccttccccaaatatgacttcttgttctgtcagtaattcacagcaattttcttcacattattccttttccagtaatcatatatcaccaaacagtctacttcagtcctctgcagttcttgcatctaatcatacaaatcagactttatctgattttactggaagtaattccttttcacctcatagaggaatcaagcaagaatctactcagcatatcctaaaccccaatacatcattgaattcaaataatttccaaatattggcattcatcacatcctcagggtaattatagcaattcaaaattatctcctggtgcacatgaacttcccagatcctggttgactcaggaactcaaatgggccatttcaatgatcatgtagaaactaatggcttttcatctttagaagagaatttacttcatcaagtggaatctcaaactgagccattcacaggacttgaccccgaggacctccttcaggagggtcttcttcctcactttgatgagtcaacattcggacaagataattcaagtcacattttagatcatgaccttgatcggcagtttacttcgcatctggtaacacggccttctgatatggctcagactcagttgcaaagtcaggctcggagttggcattcatcattttctaatcatcagcatttacatgacagaaatcacctatgtttacagcgacagcctccatcttccaagaagagcgatggttctgggacatatactaagttgcagaatacccaggtgaggctcatgtctgaaaagaacgcagagaaaaaaggtggaatcagaaagcaagcaagaaaaggctaatcgtataatatcagaggccatagcaaaagcaaaggagcgtggggaacgcaatattccacgagtaatgagccctgaaaactttcctactgcttcagttgaaggaaaagaggaaaagaaagggtaaagggatgaaatccaagccaaaggacaaagacagcaaaaaaacaaaaacatgttctaagttaaaagagaagacaaaaattggcaaactcattattacattgggtaagaaacaaaaaagaaagaatgagtcttcagatgaaatatctgatgcagaacagatgccacagcatacattaaaagatcaagactctcaaaaaagaagatcaaatcgac

SEQ ID NO: 109695 - DNA, 374 bp, Homo sapiens
gtctttagagcatttacgattttgaatgggcctgctgaagtagtgctggctaattgcagttgtatcattaatttttcacagaataaatcaatgtggccatgctggttggaaatgggtttgtgtgggagggagtaaggtggtttactaagtactaaaaagacatgattatccttttattcataacactccatttgttttctagcggaatattttcgacttgctctttcaaaactgcagagttgcgaactctttgatgagtttgacaagaaatcctggacgctgacataaaaggggatctcaacaacccctaagaattcaaagggttaaaacttcttgaccttagtggcttggatcaatgggaaagcctcaaaagg

SEQ ID NO: 109696 - DNA, 456 bp, Homo sapiens
gaaaaattttgggaatggtgggaagaaatagtaagaaacttgggatagagcattttttaaggaagctaaagaagtagtgggtaaaaattcagatcctaagaattggagcatctctgggagggctttctgactccaagctaaactattgtttgaccctacgcgtctctcatttccatttttttactctttcccctcagctcctttgtctagcagacctaaccatgcttgaaaaacaaacctgctacttaggatctttgagttccagcttattggtgtttctcagctgcaatgttgggagagaaataggggtagaatgtccattcatgatagaatgtctgttcatgagttgggatgggtcctgaccccattctccctcctgtccaggtccaatgaagcgtcaagtggcagtaaaatcaacccgaggctttgctcttaaatcaacccatgggattgcaa

SEQ ID NO: 109697 - DNA, 399 bp, Homo sapiens
gagtcatattacaaaaccgagggcgatgaagaagcagaggaagaacaagaagagaaccttgaagcaagtggtaagtgacttcagcatgtagtgccattcggtgtgtggaagaaagaccttccctgcctatctctgctggatggactttgctgtttgatggcctgcccttctcctcccagataattctgaaattcttttcttcctttgaacttcgcagagctaccctaggctcttatatgcagatcttactctagtgtgccctaagttttttttggacactggtagtttgacatcttttggtccctgataaatggccatgaccataggtattttttgtcatcttaagtggttcaggtgagacccttctcatccaggaaagtagtgttaccattccaggat

SEQ ID NO: 109698 - DNA, 89 bp, Homo sapiens; identical to SEQ ID NO: 98757

SEQ ID NO: 109699 - DNA, 364 bp, Homo sapiens
ctgaccctgcggcccccaagcctggcagccccctacgccccagtgcagagttggcaacaccagccagagaaactcatcttcgagtcctgtggttatgaagccaattatctgggctccatgctgatcaaagatctgcgagggacagaatccacgcaagacgcctgtgccaagatgcggaaatctacggagcacatgaagaagatccccaccatcatcctgtccatcacatacaaaggtgtcaagttcatcgatgcctccaacaagaacgtcattgcagagcacgagatccggaacatttcctgtgcggcccaggacccggaggacctctgtacctttgcctacatcaccaagggacctggcgacc

SEQ ID NO: 109700 - DNA, 373 bp, Homo sapiens
tctgaacggctcccagctgctggtcaattttggcttgagccccgctgctcctctgacccctcgtcagtttgctctgctgtgcccagccctgctttatcagatcgacagccgcgtctgcatcggcgctccggcccctgcacccccaggggatctactatctgccctgcttcagagtgccctggcagtcctgttgctcagcctcccttctcccctatccctgctgctgctgcggctcctgggacctcgtctactacagcccttgctgggcttcctgggggccctggcggggggcactctttgtggggatgcactgctacatctgctaccgcatgcacaagaagggcggcacgcaggacctggcggactaccagag

SEQ ID NO: 109701 - DNA, 361 bp, Homo sapiens
ggccatggaaacctttaccaacttaggacccattgtcgatatgtgcgtggtggacctggagaggcaggggcaggggcaggtaagggccattctgaaagtggatagttggtatatgcccactcaaactgtgtcctcctagctatgcttatctagaatggggagggtgcactgaaaatacttttaagagccccctcatgaatcccagtgatataaggataactactgtttattgagtgcctatcttggtctgccaggcactttatatacattatctctaattacacaagtaccctagatagggatatttggccatctcagaagtgaggaaaattagggctgagaaagattaagtaactttttc

SEQ ID NO: 109702 - DNA, 381 bp, Homo sapiens
cctggggatttgcagcccaagagtttgtgtaccctgcccgagccccctctgtggtcagttccatgcccttcctgcaggaagatctgtacagcgcgccccagccaggtaaggcctgcaggaggcagctatgctgagcagtagaaggcacatcttccagaaagccttttgattttacgttggtatttattaagcagcttctgtttgccaagtacattcccagagcacccagaacatgtgcttacactcttttcatcctcacccctacaccaaaaggaaggagagtgaaatcagccacactttatagcataaggaacgagactcaagtcacttaacccacccaaagacgtcagttaagaacaggttgagcaccacagcggcagg

SEQ ID NO: 109703 - DNA, 389 bp, Homo sapiens
  misc_feature (1)...(389): n = a,t,c or g
nnatgagcactttcttgcctttccacttgagattctggtttaaggtggcagaaaatatgaactggtggatcctgtttattttcattgaccaagtcatctttatttcagattactttatatagagttttcagtaggctctattatttcaatgaatctctgaataatatcaatgttttgtgtgtttttaaatagctcaagtaattctgtaacctgaatttaaattacagggctatcatatatttacttggcattaaatctttcacatatgtaattattacagacatcacagcgattttcgtcagttgatgaacaagcaaaacttcataagactatgtctcaaggagagattaccaagttggcagggagacagaaggcttcaaattcagata

SEQ ID NO: 109704 - DNA, 370 bp, Homo sapiens
  misc_feature (1)...(370): n = a,t,c or g
aactggatatctacaggcaaaagaataaagccgggcctctatctcacaccatatataaaaattaagtccaaatggatcaaagatctaaatgcaacatctaaagctgtnnnnnnnnnnnnnnnnnnnnnnnnnnnnnnnnnnnnnnnnnnnnnnnnnnnnnnnnnnnnnnnnnnnnnnnnnnnnnnnnnnnnnnnnnnnnnnnnnnnnnnnnnnnnnnnnnnnnnnnnnnnnnnnnnttgaaagccccttgaaaaaggaaggttgcatatttctaagaaaaaaacagaggggaaatttttgggagacttgtataaacgcagtggttttttctttataacccaaatgcccaatctgaaaaaagaaacacatt

SEQ ID NO: 109705 - DNA, 383 bp, Homo sapiens
gaagaatactccaaatacctccaacaggcttttgaaaaatccactaatgcgagttttactcttggacacggtttccaatttgtcagtttgtcttcacctctccacaaccacactttgtttccagaaaaacaaatatacactacgtctcctttggagtgtggcttcggccaatctgttacctcaatgttgccatcttcattgcccaagcctccttttgggatgttgtttggatctcacccaggcctttatttgtctgctttggatgctacacatcagcagttgacaccttcccaggagctggatgatctgatagattctcccaagaacttaaagacttcatcagccttccagtcctcatctcacaaattgactagccagaagga

SEQ ID NO: 109706 - DNA, 359 bp, Homo sapiens
tattcactgacacccccaaagcctaccataacgtcggtgcccagagaagatgctcagtaaatagttttggaataaacagatgctgtagtggggagaagggtttggattctggatgatgggagaggcttggctgcaaaactctcttgtcccaggaaactagccagaactgcaagttaatttccagttgacagccagttgctggtggagctctggaggatgtgggggtgaggtgagagcacccatggggagggctacttctaaccagaaccttttttctgcacttcctgcagcttgagattaaaaaccatgtattcttcagccccataaactgggatgacctgtaccacaagaggcttact

SEQ ID NO: 109707 - DNA, 450 bp, Homo sapiens
cgttttgccttgagaacatattttcttggcattgatatgaaaggagcaaaataaatttgcctaatagcaagaagatatttaaagagtggtcataccatttcccagctaggaccaagcaggagtcctagctgccaagtgctgcagtagtttgaacagattgtcaggggcacacgcggtgagaagcatccgtggtgcacatggcctctgttttcacaggttttgcactgctgtgtgtgtggctcaagcacgtacacccaacagagtcactacatactgaccctggctgacttgtcatccacggattatgaccccttcctgccactggcaaatgtgaagagctctgagccagtccagtatcattcatcagcagaattgggtaacctcctgactgttgaagagggtgagtattctttcagagaattgaagagctctctctcgtgccgaattctg

SEQ ID NO: 109708 - DNA, 242 bp, Homo sapiens
ttctattttaaaaacctgtattgcaatctgattttacccatagttcttacgactcacgtgaaatacatattgctgattctgatagcccttaaaactgtgattctgcatcgccggtggactattgcatactagccttacgagccggagccaaccttaagaacctcatgtaccatgcacaaggagcatttgggagaactttggggtttcaaattttacaaccagattttgggggaaccaaaatt

SEQ ID NO: 109709 - DNA, 352 bp, Homo sapiens
ggacatgcaggtcacagtcagcggccactgtccctacagcactgcccagaaggcggtgggcaaggacatctttaccttgatccccgagggtgtcaccgggatagaggagcgaatgaccgtcgtctggcacaaggcggtggtaaggctgtatctcttctcaggagcattctagaaaccctctacctgccctgtgaaagccgatgcattatgcccgctgggttcttaaaagttcccttcacacatggaggcggaagcagatattctagtagggcgcaggagggaatgcatatcttgagagatagtagctcaagtccgggagaggcctttgcttttgtgaatgtcccccttgtcc

SEQ ID NO: 109710 - DNA, 341 bp, Homo sapiens
gagggcaggcctggaaggaccgctttattgatggcttcatctctcttggggctccctggggtggctccatcaagcccatgctggtcttggcctcaggtgagaaggcctcgaacacttaggtccagcgatgggtgagaccaagctgatcctgggcctgccttcattgcggctcctgctcacagtggcctctaggggtgctatctaccactcctgggctggcatgcttgctgtcactggcccccagagcagtgaccctggcctgagcaattagggtggctccttccagagtctgtgtcagtgatggcaaaggggcagtgaacacagaaagtgaatcccagctt

SEQ ID NO: 109711 - DNA, 555 bp, Homo sapiens
gtgtctcctaagtgggttccccagatgggtgaccacactgaagtcttgaagggcattcagaagtttcctggcatcaactacccagtcctgaccccaaatttgaaaggcttcgaggcagcggtaagaggatagcttgttggtgggggctcctgaaatgagattgatggcattggtccctgccttgtcttggcgcctcagtcccctgtcctgggatgtccatctgaatagcttgtctgtcagccagaccctggggcaaacctggccctgccactcactgctctgtgatcttgacaagttgacaagcctataaaatagggctaaatgatagtacctgaagttgtgagcatttcagaagataggatgcatgtacattgcttagcaagagccagataaaaggtaactgcttaataaatgttagctcttttgattatccacttctttagagaaatgtaaccaaactctccacaagagtttcaacagtagttgctggcatctgccaactttcttacaattttaaacaaaaacatctttggaggcgttggttctgtatttagg

SEQ ID NO: 109712 - DNA, 349 bp, Homo sapiens
gggaaactttgaggcactgaggcagattcagtatagtcgctacacggcattcagtctgcaggatccatttgcccctacccagcatttagttttaaatcttttaaatgcttggagagttcccttaaaagtgtctgcagagttgttgatgagtataagactacctcccaaactgaaacagaatgaagtagctaatgtccagccttcttccaaaagagccagaattgaagacgtaccacctcccactaaaaagctaactccagaattgaccccttttgtgtttttcactggattcgagcctgtccaggttcaacagtatattaagaagctctacattcttggtggagagggg

SEQ ID NO: 109713 - DNA, 376 bp, Homo sapiens
  misc_feature (1)...(376): n = a,t,c or g
gttgagggaccgtggagagtgtgcaccatagcccagggcgcctgagggcctatctggatgcagctgctaccggtcataggacagcaaacactattcattggattctgacttaagcaggcaccctgccgagtgccttaaaggtgtaatctccgttactcttcacagtacattaaaaaaatagttggccgggtgcagtggctcatgcctgtaatcccagcactttnggaggcaaaggcaggcagatcacgaggtcagtagatcgagaccatcctggccaacatggtgaaatccccctcttacctaaaacttcacagccctcgntgttcactttccttagggntttttaacagcccttggaccttaacttaccttgacc

SEQ ID NO: 109714 - DNA, 367 bp, Homo sapiens
ggaatgaggttgtcggaattagctaagagccgttaacgatccagcacctggagccagcagcatggccgccctcacagatgggcagccagttaggtggcgagagggagaccggtagatgaatgctgtcggcctcaggcacagtgccccgtctcaccttcctgcactcacgaactccgttgtgccccaacccaggaggtggatgcgtctgagatccaggtgcaggtgtgtttgtacgccttcgacctcatctacctcaatggagaggtgagttccagcttcctgcccctctgacttccatttccgactctgccacttcacatggccaggaagccacacttgggcagcagttctcaaagtgtggtctgag

SEQ ID NO: 109715 - DNA, 361 bp, Homo sapiens
agatcaaagatgtttctcctctgtgaggaggtgacagtggtgtgctgggtgaaggagagcagctttgtcctggaaggaatctgacttggaaggaggcccagttgtccagcagtggatatgacgtcagatattgacacagccaacaatcgactcatcatttctgaagacctgtggagtgtccattgtggatttcttagaaccgcacagagtatgccgagattcaaacaagtcatctgtgtcctgggctcccctcgcttcacctctggacaccattactgggagtggacatggctgcactcttccaagaagcaagcagctgtcccgtctgctcagactatctagagaaaccaatgtccctgga

SEQ ID NO: 109716 - DNA, 363 bp, Homo sapiens
aactcctggaagaaattgggcttagccagctgtacaagagtaggaaagctaagtttccagctgtcatgtaagaaaagggggtaagttgaggtcatcatcgtattttttattctcaagtttacctctctcatttcttttgtgtgtcctttttttcatttttaacaccccaggccaagtttcttcctaacagtggtgattctactctggccatgtgtgcccgtgacgggcaggttcgagtagcaaaactgtctgccacacagtgttgcaagaatacaaaacgtgtggcccagcacaagggagcgtcccacaaggtaagtaagaccttgctccaaaatttgtgcaatccaaatcctctgtggttct

SEQ ID NO: 109717 - DNA, 350 bp, Homo sapiens
  misc_feature (1)...(350): n = a,t,c or g
aaaggattgtttcattatttatcaaggacatcatggtgatgttggggctcccatagctgatgttattctcccaggagctgcttacacagagaagtctgctacatatgtcaacactgagggtagagctcagcagactaaggtagcagtgacacctcctggcttggcaagagaagactggaaaattataagagcactctctgagattgctggaatgactcttccatatgatactctggatcaagtaaggaacagattggaagaagtctctcctaatcttgttcgatatgatgatattgaaggggctaattacttccagcaagcaaatgagctctcaaagctagtgaaccagn

SEQ ID NO: 109718 - DNA, 348 bp, Homo sapiens
aaagatccagaaagcttttttaaggtattaatgcatcttaaagacttaggactcaatttccacgtgtctgtacttggagaaaccttcacagatgtcccagatattttttcagaggccaaaaaggcattgggatcttctgtcttacactggggctacttacccagcaaagatgactatttccaagtactgcgcatggctgatgttgtcatctcaacagctaagcatgaattctttggagcggcacagttggaagctgtgtactgtgggtgttacccactttgtactaaagattcgtgttatcccgaaatattcccagctgaatatggtgtttctacccctgaacagatt

SEQ ID NO: 109719 - DNA, 395 bp, Homo sapiens
  misc_feature (1)...(395): n = a,t,c or g
gaaaactacaggaacctagtttcagtgggtctttgcatttctaaaccagatgtgatctccttactggagcaagagaaagacccttgggtgataaaaggagggatgaacagaggcctgtgcccagnnnnnnnnnnnnnnnnnnnnnnnnnnnnnnnnnnnnnnnnnnnnnnnnnnnnnnnnnnnnnnnnnnnnnnnnnnnnnnnnnnnnnnnnnnnnnnnnnnnnnnnnnnnnnnnnnncctactttcagttcttatagtttcaacaagaggattgtgggttacttgtggtcctatgtacattaataaataagaaataatgaaaatcagtaagcatctgattcacaatattagaaaaagaacaaaatgaatttaaggaaagcccagataagttatt

SEQ ID NO: 109720 - DNA, 334 bp, Homo sapiens
  misc_feature (1)...(334): n = a,t,c or g
gctgaggcctgcggagaagggagtgtctgggaacttttcggaccccagttcccaacactgcatccagtcccgccnnnnnnnnnnnnnngaaaaaaggggggtttggttttttccccaagggggctttaaaccccaaccccaaagggaaccccccgcctgggccccccaaannnnnnnnnnaaaaagggggaacccccagggggggccccatttttaaagggggggaccgggggggaaccttccccggccaaaaaccttcccctggggaaaaagggggttggaaattggccttaatttttggccnnnnnnnnnnnnaaccccccccctccttttg

SEQ ID NO: 109721 - DNA, 352 bp, Homo sapiens
ttttcgagttaaaatgcagttgaatcatggagagcttcaggggaaactgctctgagagcttacgtaaaaaaacattacccgaatggagtctgcactgtaagtcatcagtagcagctttgtgtgtgtgttttgtgtaaatgtgagtctttatcggctcttaaaatttacagtaacttacagaattgacattgtataatttgtcatttttttccttaaatatttctaagaatgtttactattttttcaagaaattctggataataaatagatatactaggatggcttaaaatagagaaatggttgtaccttgatttaaatccatgtagaaattctaatacattgattaaaggag

SEQ ID NO: 109722 - DNA, 342 bp, Homo sapiens
gtggcggcggtagctgctacggcgctgaagggcgggggggcgagaaatgcccgcgtcctccgggggattctcgcaggagccacagctaacaaggcttctcataacaggacccgggccctgcaaagccacagttccccagagggcagggaggaacctgaacccctatccccggagctggaatacattcccagaaagaggggcccgaaccccatgaaagctgtgggactgggctgggccatcggcttcccttgtggtatcctcctcttcatcctcaccaagcgggaagtggacaaggaccgtgtgaaacagatgaaggctcggcagaacatgcggctgtccaac

SEQ ID NO: 109723 - DNA, 346 bp, Homo sapiens
  misc_feature (1)...(346): n = a,t,c or g
catgaccacctccttcacctccaccatcacttcttccaccatcatcattgtcaccatcataaccactacccnnnnnnnnnnnnnnnnnnnnnnntcccatcaccaccacgttctctgtggttagtcacttagtgactttagataagtttttccaattttatgggtcttaatttcctcagttttaaaataagaagggggggttgagagatttgagggctgatcaacgaaaaggataggaccataaaaagcagtgacatacaagcttcattgagcagcacttggacagggttacataagagcggaagcccctcccagcatgagaacagccataggcctgcagtgagga

SEQ ID NO: 109724 - DNA, 1593 bp, Homo sapiens
agtttatggagtaaaatattacaagagtttccggggagaaactttaggatatactcggtttcaaggtgtttatctgcctttgttgtgggaacagagtttttgttggaaaagtccgattgctctgggttatacgaggggccacttctctgctttggttgccatggaaaatgatggctatggcaaccgaggggctggtgctaatctcaataccgatgatgatgtcaccatcacatttttgcctctggttgacagtgaaaggaagctactccatgtgcacttcctttctgctcaggagctaggtaatgaggaacagcaagaaaaactgctcagggagtggctggactgctgtgtgacggaggggggagttctggttgccatgcagaagagttctcggcggcgaaatcaccccctggtcactcagatggtagaaaaatggcttgaccgctaccgacagatacggccgtgtacatccctgttctgatggagaggaagatgaggatgatgaagatgaatgaaaaaaaaaatcaaacagcagaagaccaaggcatcagatctgtaatgaccctaaagttagtgtggtgctccaagcagagtcgacatcatggaatgaaccaaatctgggcaggatctgctccggggaagtgttttcctgggaccacacacaccttattggagataatggcctcttgctggcgttgagggagacaccccaactttagttggactacagtttgtaaaaaaaactaattttattaagacagaactttttttccttccaaattgtaaatctgtctataaatgtaacgcatgtggtttgtgtaagacattggtttaatgggaaaagttgtacccagcatcttcatattattgagaaaattttttcccagcatgggcaccttagaaaaaagcacatggcaaatggctcctttgttcccttccagataataattccagtagaacctggcattctcctttcaccttaaaagatccatctaagtctcagatctggaaacgttttgtaccgattattcacagcaaaacaaaaataagcttttattttattaacaatttcgttcctcttgtgcccaatcaaatcttttagggaacaaactgcaagaaaagctaaggaatgttttagagtgaactaaatacagaccattgcttacttgttttgaaaaaagggttttgggttttgggttaattgtgtccttttaaagttttcctgatatgccccctttccaatatttaggatatttatttgttggggaagaataccttaaaatgagggttcttattcccagattcctgggcagtgggctgtgaagtagtttttttccctgggatgaaaagggagcaagcccacttgtcactaaatgaattgtgtgaaatgtgctcacttggactccatcaacaatggggctgctcccagattggccatgccagaagggtcttcggattcttccttctatcacctctggctctaagcaaatcctggttagaaggggcatgcctttgcctaggcagattgggacataccaattcactacagaataaagattttaaaaatgcaataaggtggcaaatgcattgtat

SEQ ID NO: 109725 - DNA, 663 bp, Homo sapiens
  misc_feature (1)...(663): n = a,t,c or g
ttaatttcttaaactgcttgttctaatttcttctaatatgatgtaattgatttattcagttttatcaggaaatttttgagtctccctttctgactgaaacaggagagtattacaaacaagaagnnnnnnnnnnnnnnnnnnnntcaaactgctcacagtatatggaaaaggtaagaaataaaacatatcgaatacatttatctattttgtatctggcctggttttatttaacatcgttcttagttttcttgttttgtttcttggtggaaaaatattctgtttatttaatctatttaatcattaactctgagttacagttattatataatatcgattgataagtcattgctctttacaatacccttccagttttcatcataattgatgctttttgataaatcctgactgcttggtttacttgtccttgaaattaatatatatgcacattcttggcagaataatcagtttatactggatttcatgcttagtggttagtttagagaataggataagtgcagaagctctgtgttgaggttttttttcttcctttaaaatgagaggaaaaatatgaggaaaatatagtaattctagacatttggatgagtcactcttttggtctgttaagttctagaaaggctgagagacaaccccacgtgatgtatt

SEQ ID NO: 109726 - DNA, 377 bp, Homo sapiens
ttgtcatatgttgttttaatgtttatgttaaaattagtaacttttccaaggaaaattttatttgatagcataacttctctggatattattttaaatcagtctggtaaagagaaaaaatacagaaagtattataatttgtgttttcatcataaaatattttgcatcagtatcttactgcagtacggtaggagactatgagaaatattttgaatcttaaaagtaccagataaagacacaataactaatgattttgtctttaggagggccagaactaattgatcctgctggtctgccattacctcagccagctcagtcctgggtatggcttgtggatctagaaagaacaattgctctccttattgggcggtgtcttggtg

SEQ ID NO: 109727 - DNA, 342 bp, Homo sapiens
  misc_feature (1)...(342): n = a,t,c or g
aaaaaaaagtatttcttagttggcatgttctggatctcataagttggtgtggcaagtagaatgtgtatctctgacaatgatttaaagtgtggtgtctgtcatcagttgcaaatacnnnnnnnnnnnnnggggaaaannnnnnnnnnnngcccggtttaagggccgggggccaatttggggtcactggaatttttgcccccggggttaaagggaattccccgccctaccccccccaagaactgggattaccggagggnnnnnnnnnnnnnnnttatttttgtttttttaaaaaaaacgggattttcccttggtggcccgggggggttccaacccctgggccaa

SEQ ID NO: 109728 - DNA, 375 bp, Homo sapiens
  misc_feature (1)...(375): n = a,t,c or g
cccccccctgttgtttgggtattttccccaaaggcgaaaaaagaattcgggttcaaactttgggtttgccagtagttttggctttgaaagatgttttttttggaggtgatgttccagccatttcaggggttttggcccatatgggttaaaggtgttttttgtttttaatttttttcaagtaataacctttggcccctcccaaccggtttgttttcccttaaaaaggtagccttataggttgaaagttttaaatcccccgggggcctggtaagtaaatttttgaaaaaatttggcgcaaaaaattctatccnnnnnnnnnnnnnnnnaaacaaannnnnnnnnnnnnnnnnnnnnnnnnnnccacttcacccagtt

SEQ ID NO: 109729 - DNA, 575 bp, Homo sapiens
ctctttggaacctacctaggccaaaaggaagcccactgcctgaagggaaagtcccaggcctgcaagtattcaacccaaggtgactgaagagcccttgggccttaaagtaaacatttgtggtaccctgaaaaaaactccttgtgggcctgtggtaatggtggaacacggggaaaagaatccatctgccctggaaaaaaggggagggaaagaaatgggaaaggaatgctgtcttgtaaccctgggtgcccagctcagccacagtaaaacagagcacccaggattattcctaaggtttccaactcccaggccctggctccctggacagaatctctggacctacccacagcccagggaaactcagtgcccttaagggatggacacaagctaatcaaattaatgatttaagacagtctgttatttggcttggagattgggtggtgagtctcgaacatcgcatgcaaatgcagtgcaactggaatactttggatttctgtatcatcccctattcctataatgagactgattattcatgggaaatggtcaaaggacgccttctgggtagggaagataattta

SEQ ID NO: 109730 - DNA, 460 bp, Homo sapiens
cgaggatttcgtcgcccaggatggcggcgtcaagtggggcaatttttggttgaggttttggagagcaaggtggcagccgggagcccatcagaggaaaagtgggaggcgctggaaccctgcgtccaggcgtgacggtcatcccgaaaggccggccccagtttcatccttttatcctgtaatctgtcaccatgaccctgacaaaaggttccttcacctactccagtggggaggaatatcgtggcgagtggaaggagggccgcaggcatggttttggtcaactgatgtttgcagatggtggcacctacctgggtcattttgagaatgggctctttaatggctttggggtattgaccttctcagatggttcaagggtatgaagggggagtttgcccagggcaagttttaatgggccgtcggagtccttccatttcgatatgacaacactgaccttgagggggag

SEQ ID NO: 109731 - DNA, 374 bp, Homo sapiens
gcagaaagtatagtgacgcttccgactgccacggtgaagattcacaggctttctgtgagaaattcagtggacaggtaggttgaacactattttttctagagaatagcgataaaggcattgttgaaaagcagtgagttgcagcatttttctgacgcaggaagagaacaatctagaagagaattccatgttggctattgtaatttttcaaaaaaatcatgaacttagcacaatgggaattatttatttctcgtaattgcccattgtgagtgtttcagaacgatagacgctgagccatctaaagcctccatgggcattcacttctacaaaggaaggaaaaaaccatacacctcttaattggcttagctgggcaggcc

SEQ ID NO: 109732 - DNA, 360 bp, Homo sapiens
  misc_feature (1)...(360): n = a,t,c or g
tcatctccagagcctttgccaccatgggggagaccgtaatgagcgtcaaaattatccgaaaccgcctcactcggatcccagctggctactgctttgtagaatttgcagatttggccacagctgagaagtgtttgcataaaattaatgggaaaccccttccaggagccacacctgcccaggaaactgaagctcagggaattgaaataacttgtccaaggcaacacaggtagtaaatggcagagccaggattcagactgaagattggttgcctcccaaatccatgcctttccattctgcattgctgcctcccataaccgaagacttgaaactctagacctcttgcctgattgggaaactaan

SEQ ID NO: 109733 - DNA, 363 bp, Homo sapiens
  misc_feature (1)...(363): n = a,t,c or g
nnnnnnnnnnnnnnnnnnnnnnnnnnnnnnnnnnnnnnnnnnnnnnnnnnnnnnnnnnnnnnnnnnnnnnnnnnnnnnnnnnnnnnnnnnnnnnnnnnnnnnnnnnnnnnnnnnnnnnnnnnnnnnnnnnnnnnnnnnnnnnnnnnnnnnnnnnnnnnnnnnnnnnnnnnnnnnnnnnnnnnnnnnnnnnnnnnnnnnnnnnnnnnnnnnnnnnnnnnnnnnnnnnnnnnnnncagacccttatttcaactcttctggattgaatttgtcatgcgccacaaaggagccaaacatcttcgagttgcagcccacaacctcacctggttccagtaccactctttggatgtgagtgggttcctgctg

SEQ ID NO: 109734 - DNA, 414 bp, Homo sapiens
acacaccaaatgttcgcaggaccaagagaacacgtttgaaacctttggagtactggcgaggagagcgaatagattatcaaggaaggccatcaggtaaaacttatttatgttataatatctgtcaataaaaaatttgtttactatgtgccagacactgcactacatgtttatatacattaccttacttaatcatcacccccccaaattttgataataggatttaaattcatttttgtctgattaatgtagagatgctgatattttctctttggtagctgaatgttgttattcctgtatcatctgacaagatttccaattgcataatataaagcgttagattagaacgtgagaaaattgtaactggtaaaggtaaagtagttttcattatttttcctattaaccattttccatttt

SEQ ID NO: 109735 - DNA, 389 bp, Homo sapiens
ctgctctgtgtggggcacaggacatccaggataagttttcttctatcctcagccggggccaagaagcctatgagagactgctgtggaatggtgagttcggggagcctaagtagtcttaaggcagctgagaggacaccaggagccttatttttctcttcctcgactccaggccgctattacaactatgacagcagctctcggcctcagtctcgtagtgttatgtctgaccagtgtgctggacagtggttcctgaaggcctgtggcctaggagaaggagacactgaggtgagagaggaggaggagcagccagagagaaaaatgggttttccctggaggtgggaagtaagtatatgagaccatgttcctgcccttgcccctccaggtgtttc

SEQ ID NO: 109736 - DNA, 356 bp, Homo sapiens
agaagaagttttaaaattagggagagagttctgcctgagagatttcaagctttttctgctttatttaaattatgacttaaaggatcaggcagggaaaataggctatgggaacattttctattaattgacgaaaaactagatatggggtaaagtagaaaaattgtttgtgttctttgcagtacctccaaatggtctggttgtatactgtggaacaattgtaacagaagaaggaaaggaaaagaaagtcaacattgactttgaacctttcaaaccaattaatacgtcattgtatttgtgtgacaacaaattccatacagaggtaagaagtcaaacccagaacattttcatcgctccag

SEQ ID NO: 109737 - DNA, 355 bp, Homo sapiens
  misc_feature (1)...(355): n = a,t,c or g
acagcagtggctgctagctaacttcctctaggccagagggggtcacatgctggtgtttggagactcttgagggcagcaggtggccaaagcagcgctgtggatgggacctggaggggatgttgtgctcactctccacttgtttcccaggcagcagcagcagtgccctgggcctgcagagcctgggactgtccggccaggcacccagctcttcctctctggacgcaggaaccctctctgacaccacagcatcagctccagcctcagacgacgagggcagtacagcagcgacagatggttctacccttcggacctctcctgctgaccacggtggtagtgtgggctcggagagcggngg

SEQ ID NO: 109738 - DNA, 361 bp, Homo sapiens; identical to SEQ ID NO: 109715

SEQ ID NO: 109739 - DNA, 350 bp, Homo sapiens
ggctatgtaactcttctttgccttacctctggcctttgattcggtctaccttctgtatatcaaaatctttcactttcatttagtaataacagattctgctttttgaggaaaggaaaggaatggtgcccccaatttccatttattcttaatacctgagctaaccagaacctcacagtgtttgtctgtatgcgtttctgacttaggcatgtttgctccaacacagaggacagaaggtatctccacatcacacatcatcacccgaattgtgcgggattatgatgtgtatgcgaggcggaacctgcagaggggctacacagccaaggagctcaatgtcagctttatcaacgtgg

SEQ ID NO: 109740 - DNA, 407 bp, Homo sapiens
cagcccgctttggattatacgggaggcaggcgctagggctgagcgggggccagaaatgctgagtgccaagagtcctggcagagcactttgagccaaaaagaccatgatagtgtgttaaattcttttaagtctgtggcagtcctgccagaaaactggaagagccactggctggcatgtcaggatgcctgtcccagagctagacttggtcttggtcctcagggcagggactgttgtccccagatgcagcctatagggttgacctgaggctctgagggggttggctttccaggagaacgtcaactcgcttgtggcaggattcgaggagttcctgaagaacgcgcccaatgatgccagctacgatgctgtgcgacagagaggggtggtcctgacgggctttctggccaagc

SEQ ID NO: 109741 - DNA, 370 bp, Homo sapiens
acagcggcgagtctgtggaactcctggctcatgacagtgtggtagaaatgattagaaagggtggagatcagacttcactgttggtggtagacaaagagacggacaacatgtacagaatggtaagtaatgcaaggccatatattcatgcattaaggctgggcccattcactcatgacctcaacttttgcagtgagttaggactttgttcctcaaactggaagaggcataccactcatcattaaggctaaactgaagctcaactcaaattggtagtgataagagaatgcccaatgattgataaatgagttttaagtccttggtcttaaggttttgaaagaatttgtgaatataactgcaggcatactcatgg

SEQ ID NO: 109742 - DNA, 357 bp, Homo sapiens
ttcgagttgagacggagtttcaaagaaaaaaaggattactttaatggctacccgggaggaattgttccccatatgtttcagaaataattaaagagaaaaggatagattattacagtatgaactctgttttaagacatatatcatgtttaacttttcgaataattattcctgttaaccattttctgttggatctcatttcttaacagcctgggttactaggtgtctttcagaagctgattgcatccaaagcaaatgaccaccaaggtttttatcttctaaacagtataatagagcacatgcctccgtgagtatgactagaactttgtgcatttatttagaaattttgttaggcgctcg

SEQ ID NO: 109743 - DNA, 383 bp, Homo sapiens
ccaagccctcatatggctctcccagaggcagaaggacaatggctgtttcaggagctctgggtcacttctcaacaatgccataaaggtgaatcattctggagctagttttgatttgtccattatgatatctgcaaggatgaggataggaagtgataatgtgaaaaattctaagggaaagcctcagaggaaaataaaacctggatggcaccaaaaaagaggggatagaacaaaagttgattgtgatactttgtcctatagggatggatatgggtaaggatgaattccatgacacagcagaatagaaagaattaatcaatagcattctcagaagttgaattattcaaatctctctctcgtattcacagggaggaagaaaagatgaa

SEQ ID NO: 109744 - DNA, 428 bp, Homo sapiens
cggtgagcgggggtgacaaagagagcattggtggctctgtactgccgaggggcactgacttgcagcccctatcaccgaggcaaagaccctcagtgcagcccggccttaatgtgcttctgcactttaggctgcgtgagggggctggggttagctcaagagcctcaccttattttgtagttccagattctagttgtggagacccctcagaattggaaaagtttagagtatagatggcatgccatctctccagcacacgacaccacctgggatgactcctccccagccagcagctcccactcagccatcaactcctgtgtcgtcttccgggcagactcccaccccgactcctggctcagtgcccagtgctacccaaacccagagcacccctacagtccaggcagcagcccaggcccaggtgaccccgcagc

SEQ ID NO: 109745 - DNA, 359 bp, Homo sapiens
ctctctctccgaagacatctccttgacccagtctatttatgacaagaagcttgtgttaatgcagaaaaatctccagggcctggatccgaaagccctgaacaactgctctttctgccatgaagctgggcagctggggccagagatccgaaaactgcaggaggagctggagggaattcagaagctgcttctggcccaggaggtgcagctggaccagaccttacaggcccaggaggtgctctccaccaccagcagacaaatctcccaggagatgggcagttgctccttctccatccaccaggttaaccagtctctggggctcttcctggcccaggtgagaggctggcaggccaccacagctg

SEQ ID NO: 109746 - DNA, 408 bp, Homo sapiens
cggcacgaggtcataatagttattcagtgaaatgggtatgattgttattctctactttcaaacatactcaatatataacaacccatcatataactaaccatcaacccaaatagccccaattcatggaggacagacgatatccctgcctaattcttctttgctgataattcctttttttttctccatcttgctcctcttctgtcagttgatttatgaagactctatggatctaatcgcaaagctaccttgtgttgcagcaaagatctaccgaaatctctacagagaaggcagcggtattggggccattgactttaacctggactggtctcacaatttcaccaacatgttaggctatactgatcatcagttcactgagctcacgcgcctgtacctcaccatccacagtgg

SEQ ID NO: 109747 - DNA, 546 bp, Homo sapiens
catttttcatgcctgatataattttagtcattccatgtgtttttgtttgatgtattctaattcattccagtcagtccaaatgtactgtcttccataggttatccttcccttcaagtggaactggaaacccccacagggttgcactacacaccacctacccctttccagcaagatgattattttagtgatatctctagcatagaatctccccttagaacccctagtagactgagtgatgggctagtgccttcccaggggaacatagagcattccgcagatggacctccagtcgtaactgcagaagacgcttccttagaagacagcaaactggaagactcagtgcctttaacaaaaatgcctgaaacagtggatgtagatgagagccagttgggagaatgtatgtctgagttggcagaatgagacatcaagtgggaaacctaggagtcctgcgctcaagcttcgaagattaactgggtggggttacttagatcgactggatgacagccctgaccagtggagagattccattacctcatatctcaaagg

SEQ ID NO: 109748 - DNA, 242 bp, Homo sapiens; identical to SEQ ID NO: 109708

SEQ ID NO: 109749 - DNA, 356 bp, Homo sapiens
  misc_feature (1)...(356): n = a,t,c or g
ccaaaatcacaatccataaaagaagttgccaatttgaacattaaaattagagacttttgtgcttcaaaagacactattaagaaaatgaaaaggcatgtcacagactgggagaaaatatttgcaaatagtatatctgagaaaagacttgtattcaggatatataaggaactcnnnnnnnnnnnnnnnnnnnnnnnnnnnnnnnnnnnnnnnnnnnnnnnnnnnnnnnnnnnnnttggatcaagacactttctcaaacacaaacagaccaaaaccagagtaactaataatcacatgaaaaaatgctcagcaccattagntattttatgctttttttaattattattatgttttgagac

SEQ ID NO: 109750 - DNA, 203 bp, Homo sapiens
  misc_feature (1)...(203): n = a,t,c or g
gtactgggcttttttaacgaggcctctaaggacaggcatttgtatcctttccagcctttcactattacaatgttgtagggaataactttacacactgtcatttattttacttttttttttttttattttagagaaaggaatcttgccatcttgcccaggctggtctcaaattcctgggnccaaacaatcctcccgccttggcc

SEQ ID NO: 109751 - DNA, 235 bp, Homo sapiens; identical to SEQ ID NO: 109497

SEQ ID NO: 109752 - DNA, 736 bp, Homo sapiens
  misc_feature (1)...(736): n = a,t,c or g
gaaacgtgagaatgaaagtggatgcccgcgaatcccggaagtcagactgtttttttcagttccctggaggctttttgatactgattcgcgtacacctgttgtttgaaagctctcagcgggacaatgctgacccagagacacgtccttgatatgttttccagtctggtcttgaactgggaaatgatcctctcgcctcgtccctgcaaagcatgagccnnnnnnnnnnnnnnnnnnnnnnnnnnnnnnnnnnnnnnnnnnnnnnnnnnnnnnnnnnnnnnnnnnnnnnnnnnnnnnnnnnnnnnnnnnnnngcaaaatcagaggggaagcttgcaaaacagatttgcaaagttgtgttggatcattttgaaaaacagtattccaaagaactcggagatgcctggaatacagtaagggagatactaacatctccatcatgctggcaatatgctgtcctgcttaaccgattcaattatccttttgaactggaaaaggatttacatttgaagggctatcacacactctctcagggatctttacccaactatcctaaatcagtgaagtgttaccttagcagaactccgggccgaatcccttcagaaagacaccaaattggaaacctgaaaaaatattatctcctaaatgctgcttctcttctcccagtgttggctctggaattaagggatggggagaaggttctggatctctgtgctgctcctggagggaaatcaatagctt

SEQ ID NO: 109753 - DNA, 404 bp, Homo sapiens
  misc_feature (1)...(404): n = a,t,c or g
ttcgagattattttaagattctttcccatggggtaaaggtgagaatcagtattgtcaagtatggtaacggtggtgagaaaaggagctcagtttttaagtatgttaaggggtaatatttccttagttacaaaaatactgcgttattgcagatctcaatactgtttaatagaatttggaaacattcctgtacgcgtgttcttgggagattattctgtacttcagttaggaatcctttaagtctgtaaacttcagtttcagcctaggtttttaagtagattaagcaaagttaatacttttcttttcntttcttttctttttgagacagagtctccctgtgtcgcccaggctggagtgcagtggcgcgatcttggctcagtgcaagctccgcctcccggggtnacgcc

SEQ ID NO: 109754 - DNA, 352 bp, Homo sapiens
  misc_feature (1)...(352): n = a,t,c or g
aactggaagacattcctttataaccttgaagtaagaaggactttttaaccgtgaatcagaatccagcagccattaaaaaaaatgataaatttgactaaattcaaataaagtatttttnnnnnnnnnnnnnnnnnnnnnnnnnnnnnnnnnnnnnnnnnnnnnnnnnnnnnnnnnnnnnnnnnnnnnnnnnnngaaacattctttttgtgctcctcttggcagcacatatgcaaaaataggaaagatacagagaagattagcatggcccttatgcaaggatgacacacacatttatgaagcattttatatttttatccttatgaaacactcaaagaaacgtcatttaccactt

SEQ ID NO: 109755 - DNA, 358 bp, Homo sapiens
  misc_feature (1)...(358): n = a,t,c or g
aactggaagacattcctttataaccttgaagtaagaaggactttttaaccgtgaatcagaatccagcagccattaaaaaaaatgataaatttgactaaattcaaataaagtatttttnnnnnnnnnnnnnnnnnnnnnnnnnnnnnnnnnnnnnnnnnnnnnnnnnnnnnnnnnnnnnnnnnnnnnnnnnnngaaacattctttttgtgctcctcttggcagcacatatgcaaaaataggaaagatacagagaagattagcatggcccttatgcaaggatgacacacacatttatgaagcattttatatttttatccttatgaaacactcaaagaaacgtcatttaccacttttccag

SEQ ID NO: 109756 - DNA, 376 bp, Homo sapiens; identical to SEQ ID NO: 109713
  misc_feature (1)...(376): n = a,t,c or g

SEQ ID NO: 109757 - DNA, 365 bp, Homo sapiens
  misc_feature (1)...(365): n = a,t,c or g
nnnnnnnnnnnnnnnnnnnnnnnnnnnnnnnnnnnnnnnnnnnnnnnnnnnnnnnnnnnnnnnnnnnnnnnnnnnnnnnntgctcccagtaaattctgctggaaagaccagagtgctcttttggccagtcgctcagcagtgtcctggccatctacccgaggatctccctgcttctggacctctgcttccctcccaccactgtcagggtggagccccctcgtcaccaagttgctgtactgcagtagctgcctcctggcaccaggtgtgcccacctcccaccacggctaccagagctgtcttcctcaaacccagctcagatggtggtgccctccacgttacatggctccacgctgccactagaatac

SEQ ID NO: 109758 - DNA, 348 bp, Homo sapiens
tggaaaggtatgaagttttcttttttcccctttacaaaacaggtaaaagaaatccaggaagaattggataaattgagtccacataaaattaaacacactaagaaggtatgctgcaattaaattatgatcaatacttgcttataaatgacatttcccagtgttttgttagtattgtgtagggccctctgcactaatgttattttcagtacttgcagaaacctgttagtgagggagtgagcaccttacatattctgaatatggttgccttctaaggaacaggttctaaaaaatagatttttgttgttgctgctgctggtataaaaaattggaagcagtaaggaaaagact

SEQ ID NO: 109759 - DNA, 339 bp, Homo sapiens
ggaaagccaagtatctgtgacttcagcagatccaggttttcaagtgccaatttcaaaggcagttcaacttactacgaatgatgccataaaaaccactctgctggtagaattggacatttcagtaagttgcaaaatttatttctcagcacagtaatattgtcaggatgtgcagaaagagttgtgtggagcttggttatatatgctgagtggtgtgctgcttggttacatatgctgagttgtgtgcggcttggttacatgtgctgagttgtgtggtgcttggttacatatgctgagttgtgtggtgcttggttacatatgctgagttgtgtggcgcttggt

SEQ ID NO: 109760 - DNA, 394 bp, Homo sapiens
gaagaatttgtttgtaaggtatgggaaggtcggtggcgagtgatccctcatgatgtactaccagactggctcaaggataatgacttcctcttgcatggacaccggcctcctatgccttctttacgggcctgttttaagagcattttcagaatacacacagaaacaggcaacatttggacacatctcttaggttgtgtattcttcctgtgcctggggatcttttatatgtttcgcccaaatatctcctttgtggcccctctgcaagagaaggtgggctttggattatatttcttaggagccattctctgcctttctttttcatggctcttccacacagtctactgccactcagagggggtctctcggctcttctctaaactggagtactctggag

SEQ ID NO: 109761 - DNA, 672 bp, Homo sapiens
  misc_feature (1)...(672): n = a,t,c or g
tagaaatggggtttcaccatgttgcccaggctggtctctaattcctggactcaagcagtccaccagcctcagccttccagagtgctgggattacaggcatgagactgcaactggccacgccttttttttgtttaatgaaaccaatgacaatgtaaaagtctgtgctttagaagttcttcttaaagaacgatgaaactctttgatgaattaaggatgggaagattaggctgagctggaacttacttattggataggcgtgttaaactgggttggcatctattttgggagtttcttactgtgacgagaggtctctgaaagggaatgtatttgttgaaaagtctttgggtacaaaacaagaaagggtaaccttttattcaaaaaggacccaaaggaaatttctncattgtcctagggtccatggaaataatactcagggcatcctcctcacaacttggaaaatatagaacttgtgcattacctcatcccactggcttccagattatatgtgcaagagatatttgtgtgagggaatgagcacttctaagtcagtgaaagctaccaacctgtatataccctctgacttttttttggagacaaaattttgctcttgttgcccaggctgagattgtgccactgcacttcagcctgggctacagaatgagacctatccaa

SEQ ID NO: 109762 - DNA, 470 bp, Homo sapiens
acttctgcttaattggattgtttttattcccacaggccttgtctggttttagacagattcatgttatagatatggacactatagatgtttccaatctaaataggcagtttttatttaggtaagttttaatatcttagcggttttctttttttaagctctgataatcatttgaacttgtacattgcagtttaataatttttaaaaatgacttgagaggataatactaattttattttaaaaaacaaaaactaccattcccattgtaggtaaagttttgtaagaaaattttgggcatcttggtgatagtagttatgtaaacaaatacatgtttttgttttttcgaagaagtctccttccaaaggtttatgtgatttttgggaatatcctcacgttaactgtgctctgaagaaaggaaagaacggtagctcttcctccagttgatgtcagaagagaatactcgctggagtatt

SEQ ID NO: 109763 - DNA, 386 bp, Homo sapiens
  misc_feature (1)...(386): n = a,t,c or g
cggcacgagatgagctgacttttcttcactctcagattgcagcaattgtggaaatgcaggaactgaaaaatagtacaaattctagttcctttggcttgagtgacgagcgcattagtttgggtcagctgtcatcatcgcgggctgcccatctgagtgtggacccagatcagcttccaggttcagtgctttctcctcctcctcctccaccacttcctcctcagttttcatctctccagccaccgtgttttcctcccgtacaaccaggatctaataatatttgtgactcagataatccagcaactgaaatgagcaaacagaacccggctgctaataagaccaattatagtcatcattcanaaagccagagaaataaagatattccaaac

SEQ ID NO: 109764 - DNA, 349 bp, Homo sapiens
  misc_feature (1)...(349): n = a,t,c or g
gacgacaagaccgctgccacagtccatactactcctgacgcacaccggactttgccccccaaccccggcgcttctgggctccccctacaaaagtcttgtcagtcagccctgccccttcagcagacagctcagtccctgccctcgccgatcaccccggggtgacgttgggcgggtgactcctggggcgccccactccattactgggccctcacctcttgccgccccaagttggacctccctgggctctttgggctcgcatatccaaggacctgggccccccagccccaggccccgccctcgccagttgtccctgggtgactatgggctggtgactcctggngctccctgc

SEQ ID NO: 109765 - DNA, 369 bp, Homo sapiens
  misc_feature (1)...(369): n = a,t,c or g
cctgtaatagtttgttcatgagcatttacacagtggagttactgttcatcatgggggtactgtggacaagcccagggctgcnnnnnnnnnnnnnnnnnnnnnnnnnnnnnnnnnnnnnnnnnnnnnnnnnnnnnnnnnnnnnnnnnnnnnnnnnnnnnnnnnnnnnnnnnnatacatgaagttatgaatttaagatgtgaagatttacagcttgataaaccagcttcaggagacatgatcttatgaattcaacacatgaagatttacaacttgataaaccagcttcaggagatcagaacttcttatgatacaactgacgttactcagcctagaacaaatacaacagggatgaagctcatggtgctactc

SEQ ID NO: 109766 - DNA, 379 bp, Homo sapiens
gacagacatgcggtgtcggactaccttctacacagcacttgggcgtctcctcatggtggatttaggtactggaagaaatcgtagtggctcatgaagacatctggcactcttctaaatttttatttgaggactgaaaactagatgttggggaggccttttctgttttttcaacagtaacaaaactatctgaaataacagcctgatttcaccaagaacagatcatgctgtcgaggtccttataactggaagagagtaacagtctgctcctgaagttttcatctgatacgcagtggctttaaaattctcttcacattcttcgggtgttaaataagggaattgagattcctaaatgtatctttttggccagataacttctcca

SEQ ID NO: 109767 - DNA, 382 bp, Homo sapiens
aaataagtcaagctgtaaaaatctcttgttttgtttgcgtttagtagatatggaaataaataatttaattgtatttaatagcttctataattctattttagggtggtagagatccctcaattcatatatgggatacagagaccattaaaccattgtccatattaaagggccaccaccagtatggtgttagtgccgttgatttctcagcggatgggaaacgtttggcatcagttggcatagatgatagccatactgttgtgctctgggactggaagaaaggagagaaactttctatagcaagaggaagtaaagataagatttttgttgtaaagatgaacccctatgtgcctgataaactaattacagccggaattaaacacat

SEQ ID NO: 109768 - DNA, 385 bp, Homo sapiens
  misc_feature (1)...(385): n = a,t,c or g
aatgcttacatcttaaagaagtctcggatctctaagaggccgcaggtcccgaagaaaccccgagaatggaagaacccggagtcccagcgcggcttgtccgggacccaagatccattcccaggccccgcccccgtccctgtggaagtgggccagaagttctgtcgcattgacaaatcccgaaagctaccacattctaaagccaaaactcgaagccgacttgaggtggctgaagctgtggaagaggaaacaagtatcaaagctgctcgttctgagctgctgcttgctgaagaaccttgaacagccctacctcacccaccggctctcaggccctgtgcatggccttcagttctgcccctttgaagatgngctgggggtggtgcacact

SEQ ID NO: 109769 - DNA, 389 bp, Homo sapiens
ccaacagtagcagattaatgaggcattaataggcttgtaaaaattggggtaagtgggaagctactgtgtatttggcctaacatggtttttaaatgctgacaatagagttatctatttttaaatacattgctttcatttttggctgcatgaatatcctattttcttcttttagaaaagatattactgcattaacaatatcacttttaggttttgttttttcttgtcttaaaatagtcaaattgtagctttttcacttgctgtgtgcgctttcaagatttttttttacccgttttcttctctgcagcagtctcctgggttaggcaggcctatctggctccagattgccgagtctgcttacagattcactctgggctcagttgctggagggg

SEQ ID NO: 109770 - DNA, 386 bp, Homo sapiens
aaaaagtaaacagttctaccaagaactctgtggtggtcaaatagcaggtctctagatgaaattcagtccctgtatctcctgttagaaacacttcctgtagtatatgctgtctatactgagatgtcccatcttcttgcctgatccactcctccttccatcttgaatgatttccagtggtagtacagtacatcacagttttctctgtctccacttatatctctccccttttccttaactcatctcaggtatagctatttatagtctcatgttcttgcttccttatcgcagacctgttgtgtgtctctgttacagagggagcagatctgagcctgagactggtagatggagtcactgaatgttcaggaagattagaagtgctcgtgccg

SEQ ID NO: 109771 - DNA, 396 bp, Homo sapiens
aaaataaataaaatgaagactttaaagagaaagaaactgttgaatcagattctttcaagttctgtagaatcaagtaataaagggaaagtgcaatccaaactccataatacggtatcaagtcttgctgccacatttggctctaaattgggccaacagataaatgtcagcaagaaaggaaccatttatataggaaagagaagaggtcgcaaaccaaaaactgtcttaaatggtattctttctggtagtcctactagccttgctgttcttgagcaaacagctcaacaggcagctgggtcagcattaggacagattcttcccccattactgccttcatctgctagtagttctgagattcttccatcacctatttgctctcagtcttctgggactagtgga

SEQ ID NO: 109772 - DNA, 397 bp, Homo sapiens
ccaagaattcggcacgagaaccctacagctcttccaaatatgccactgaccttttgagtgtggctttgaacaggaacttcaaccagcaggtaaggcctgtctcagtgatacggaaatggcagaggagggttctcttaattacctgctgttgatttcctaataaggtagctggctttccactaactcttatagtttagattgatatttggtgtatatgaaagtgttagggcagagataattggctcctgacattatagttataggtagttcattctgtgggtcttcaggaattctaacttatgttaacagagtgacactactaaaagtgataatagctactgtgctggtacttgctatgtttcaggtgctgtattcgtctgtgtatgtcattaaatac

SEQ ID NO: 109773 - DNA, 356 bp, Homo sapiens
  misc_feature (1)...(356): n = a,t,c or g
nnnnnnnnnnnnnnnnnnnnnnnnnnnnnnnnnnnnnnnnnnnnnnnnnnnnnnnnnnnnnnnnnnnnnnnnnnnnnnnnnnnnnnnnnnnnnnnnnnnnnnnnnnnnnnnnnnnnnnnnnnnnnnnnnnnnnnnnnnnnnnnnnnnnnnnnnnnnnnnnnnnnnnnnnnnnnnnnnnnnnnnnnnnnnnnnnnngtagatttttcctgagaacaaatgttgcagttgctgatgtctacatttgataactgttcttttctgaaatgtttttttcttttaaggttaagaaaacgccttctgatttgtttttggaagtaccaagtgccaccagtctgcagatttgcaaggatgtcatg

SEQ ID NO: 109774 - DNA, 393 bp, Homo sapiens
ctgacatataggacggaagagaagggtataagatggtttttaatgatttttcttgtgagggaattgtccattttgtagtttaaaacttgttagctaagaaacttcattaagaaaaaggataagcctgctttgttttaacacaaaagttaacttaaaatttttcagccccgtccagagtctaagcctgaatctcagattccaccacaaagacctcagcgggatcaaagagtgcgagaacaacgaataaatattcctccccaaaggggacccagaccaagtaagagctcagaagggcgatttctcgtttgggggattttgaggtgagagcttattttgggagggcagttgatatttatatactttaaaataaaaatattgtagggttgatggaat

SEQ ID NO: 109775 - DNA, 790 bp, Homo sapiens
tccctgccgatgacagtcccgctacccccaccagcatctaaggagagtcttctttctgtttggagttctgtgataagacagatgacctcaccccaggtggatggaggaggatgaccgaggggcagttctcctcagagagggagttctgggctcttcagcttttgtgtcccgccccaaccctcagggttcaaccctggccattcccaaagcagttaagtttcccccaagcatgctttcaagttttgacaattgctgttacctttgcctgagataccccttcttggttacttgaacttttacttgtccttcaatccctccagtacctcctcctccagggaagccttcccaacccaccctctgagctttttattgggagcactgatgatcctggggtcaataatgcctgatacacatttgtctttccccatgagaactgagccccatgggaacaaaggctatgtctgattcattctgtgttcccagttcccagcacccagcacagggcttgggcacaaagaaagggaggccccagggaggccagcggattaggcctgaacagggatcatccagcccatcctcccattcctcttccctggctgattctgtaactttccctaaagggaaaattggcttctgagataacctggctgcgggaagcagaggttgtcgtgagcagagattgtgccattgcactccagcctgggcaacaacagcgagactccatctcaaaaaaaaaaaaaagaaaaaaggaaaaaaaagaggccgggcgcagtggctcattcctgtaatc

SEQ ID NO: 109776 - DNA, 359 bp, Homo sapiens
  misc_feature (1)...(359): n = a,t,c or g
ccaaaatcacaatccataaaagaagttgccaatttgaacattaaaattagagacttttgtgcttcaaaagacactattaagaaaatgaaaaggcatgtcacagactgggagaaaatatttgcaaatagtatatctgagaaaagacttgtattcaggatatataaggaactcnnnnnnnnnnnnnnnnnnnnnnnnnnnnnnnnnnnnnnnnnnnnnnnnnnnnnnnnnnnnnttggatcaagacactttctcaaacacaaacagacaaaaaccagagtaactaataatcacatgaaaaaatgctcagcaccattagntattttatgttttttttaattattattatgttttgagacaag

SEQ ID NO: 109777 - DNA, 316 bp, Homo sapiens
  misc_feature (1)...(316): n = a,t,c or g
gtgatacaaatgtgttgttcattttagtccttgcattatcttattttcaggataaaacataccctaaagttttcataaaatatttttctttccattattcttgttaattcacaattgttctttacttatttatggatatgtttgaaatgaaggttccccacgtgtgaaagtcaagaatctgattgaaagcatgcaaataaatgggtcagtgttgaagaatggctccctgacaaatcatttctcttttgnnnnnnnnnnggccagagtggctgtcttaatatctggaacaggtgagatgtggcttccccttcactgt

SEQ ID NO: 109778 - DNA, 338 bp, Homo sapiens
ggcacgagatagcaattattttaataaaataattctggtttcagtatcatatcaataagctgtcaatcatgacatcagagaatcatttgaacaacagtgacaaagaagttgatgaagttgatgctgccctttcagacctggagattactctggaagggggtaaaacgtcaacaattttggtagggtgaatctttttttttacctactaatttagcttgaattgatgcattccattttgtggatttaggttcaaagtatttgggggtggtggagagaaatatttaatgctttagagagagaaatcagatgttaatttttcaggaactttgagcaaagtg

SEQ ID NO: 109779 - DNA, 719 bp, Homo sapiens
ctcactaaatgaaatctattcttggatagaatttataactgagaggcatcctgatatgcttacaaaaatccacattggatcctcatttgagaagtacccactctatgttttaaaggtttctggaaaagaacaagcagccaaaaatgccatatggattgactgtggaatccatgccagagaatggatctctcctgctttctgcttgtggttcataggccatataactcaattctatgggataatagggcaatataccaatctcctgaggcttgtggatttctatgttatgccggtggttaatgtggatggttatgactactcatggaaaaagaatcgaatgtggagaaagaaccgttctttctatgcgaacaatcattgcatcggaacagacctgaataggaactttgcttccaaacactggtgtggtaggttgttggctttatttcttgcaatgtctcttcactgaaagggtgatgttcacagggaaaggcccatgaattcaaattaaatacagagctggcctgtctgaatcagggaataatttaaatgataaatgcttaggtaaatgtaatgctgcgactgttggccagagtcagcaaatcactttgcctctcctctctcctgtttccctatctttaaaataagaaagttgaatcagttttttaagatcccttctagcttcaaaattctaaaatctattatcttggaataataaagaa

SEQ ID NO: 109780 - DNA, 591 bp, Homo sapiens
tcccgggtcgacgatttcgtggtggcccaggtcaagtcatggccagccaggcccaacagagcagtcctgtattaggtttgataaatagcatggtcaaaagcccaatgacacaggcaggcttgacttctcccaacatggggatgggcactagtggaccaaatcagggtcctacgcagtcaacaggtatgatgaacagtccagtaaatcagcctgccatgggaatgaacacagggatgaatgcgggcatgaatcctggaatgttggctgcaggcaatggacaagggataatgcctaatcaagtcatgaacggttcaattggagcaggccgagggcgacagaatatgcagtacccaaacccaggcatgggaagtgctggcaacttactgactgagcctcttcagcagggctctccccagatgggaggacaaacaggattgagaggcccccagcctcttaaggtaagtacagttttggtttgtgtgcacaatcggcatgcatgtgagtattgtcatgatggatggagggtttgccttacattgtatagcagtttccactattacacgccaggaatttactgtgctgtcataagtt

SEQ ID NO: 109781 - DNA, 358 bp, Homo sapiens
attaaagatctttacacctacaacaatctggcggtggaatcaacaagtcgaaccaagcagctctttgaggggttacatttcctggcaaaaaacttcatcttttcctacatgggcctggcactgtttaccttccagaagcacgttttcagccccattttcatcatcggagcttttgttgccatcttcctgggcagagccgcgcacatttacccgctctccttcttcctcaacttgggcagaaggcataagattggctggaattttcaacacatgatgatgttttcaagcctcaagggagcaatggcatttgcgttggccatccgtgacacggcatcctatgctcggcagatgatgttca

SEQ ID NO: 109782 - DNA, 364 bp, Homo sapiens
  misc_feature (1)...(364): n = a,t,c or g
tttgcatttctaaaccagatgtgatctccttactggagcaagagaaagacccttgggtgataaaaggagggatgaacagaggcctgtgcccagnnnnnnnnnnnnnnnnnnnnnnnnnnnnnnnnnnnnnnnnnnnnnnnnnnnnnnnnnnnnnnnnnnnnnnnnnnnnnnnnnnnnnnnnnnnnnnnnnnnnnnnnnnnnnnnnnncctactttcaggtcttatagattcaacaagaggattgtgggttacttgtggtcctatgtacattaataaataagaaataatgaaaatcagtaagcatctgattcacaatattataaaaagaacaaaatgaatttaaggaaagcccagataagttatt

SEQ ID NO: 109783 - DNA, 159 bp, Homo sapiens
gactgccctttttatccttcttgctgcattctcatcccctgccaaagccccaggcattgcccagcctgcagcagcccccaaccacagctgttgcaaacccaccaccatcgccacaaccaccaccacctgagatccctcaggaactgtgagtgggctaac

SEQ ID NO: 109784 - DNA, 386 bp, Homo sapiens
ctgaaaatgataatgaatcaagaccctactacatttccaaagccgaaaagccatgagggttacaatttaaatgagcttgggaaggaacgctcccgaagacgtctccagcctgaagggtcagagccgctggaagcctggctgtctctgggctttctcgtctcagtgcagcaaggcaccgtgatcaaccaacccgtgatggggaaggccctggttctgtctttgtttggggatggcagaaacggtggacacaagcgaaatggtcaacggcgctacagaacaaaggacgagctctaaagagtccagccccatcccctccccgacctctgatcgtaaagccaagactggcctcccagcccagagtgccgccaccttaccagccagaaccc

SEQ ID NO: 109785 - DNA, 388 bp, Homo sapiens
gagtgtcatggaaaaagaccatgcggcaaaaagtggcagaggtaagatggagccagggtttgctgtcatccacagtgaatgccgtcctccacggcatggttctgtctcacagagagggattgtctggggagactgctaacacttcagtccctttttatgagcattgattttatacattttgatatgaactttcattaagtttgcatgtttttccataggtgcacatattcagtttctgaatttttctaccgaagctaatcatgacttccttgaaattcaaaatggaccttaccacaccagccccatgattggacaatttagcggcacggatctccccgcggccctgctgagcacaacgcatgaaaccctcatccacttttatagtgac

SEQ ID NO: 109786 - DNA, 393 bp, Homo sapiens
gacaggccctgctgacttttcccgtcatctcttggccgatgcagctctgcttgtccccacccccatcccccttttgcccaggctggccacgccccacagcagccccacttccagctgcgttccctcaggatcaccaagttgctttccactgagtgggctttcctgtcaccttccatcctgtcaccggaaaccagccatcctctgtttaggtctcccgtgctccctgcagacacctaatgcctgtctccacactggaccgccacatcccagttaccgaatcacctccctccctgaggctgtgggcatcaggagcgagagtcatccccagcccccggcacaggccctgcgtgcgctgggccctcagtgggtgtcgggggagaatcgccgatggca

SEQ ID NO: 109787 - DNA, 371 bp, Homo sapiens
attaaagatctttacacctacaacaatctgtcggtggaatcaagaagtcgaaccaagcagctctttgaggtgttacatttcctggcagagaacttcatcttctcctacatgggcctggcactgtttaccttccagaagcacgttttcagccccattttcatcatcggagcttttgttgccatcttcctgggcagagccgcgcacatctacccgctctccttcttcctcaacttgggcagaaggcataagattggctggaattttcaacacatgatgatgttttcaggcctcaggggagcaatggcatttgcgttggccatccgtgacacggcatcctatgctcgccagatgatgttcacgaccacccttct

SEQ ID NO: 109788 - DNA, 368 bp, Homo sapiens
gaatgataaagtgcttctatcactctccccacccaaaacctgggtgtgtaaacacctgattcagaatttctcacttctctatgttttatgggttgactcatcacttgggtcctctcctacctccaggaaaatggttttactttgaactgctttgtaataccgagataacttaagcatgcattgaggctcaagggcagggaggtggattccatcacagcatgaaatactgaaatacaactacacaaaaccagtctccattacccaattcagaaagtggaaaagctaagccttgttctaatttctgttcaggtactacttattgggcgtgcaggagcagcaatgcgttgatggggagtggagcactgcac

SEQ ID NO: 109789 - DNA, 404 bp, Homo sapiens
  misc_feature (1)...(404): n = a,t,c or g
gctggaacagatcccttccagctaagatgggccaagaagtctctgaaggtgggtgagctgagttgagttgtaaagggcaaatatgtttccaagatcataggggagtggaggtgacagcaggtgtggctgctgcccaatctcttcacaggctttttcccatcgtattgacctcgggcnnnnnnnnnnncctcactcttgaccgttcttacaaggtcttgtgacaaaaattcacccaaggacctacttttcatgaatttttttgtggcatacgtggaccaaaatctgggggaattgctccaccttcctggtttagaggaagacaaagctttccaaatagagataggcctcaagacttgggggtctaaactttacaggaaccgtcccatgggatgggcggaatcccc

SEQ ID NO: 109790 - DNA, 398 bp, Homo sapiens
ggcacgagcgaagaaaccgcaggctccttcaaacaatgcatcatcttcacttgcttcattaaatccagtaggtaaaaacacttcttcaccagctttaccaagaactgcaccttgtatatctgagtcaccgagaaaatgtatttcatcccccaatacccccaaggccaaggttattccagcccagaattcagcagatctgcccgagtccacacttttgccaaataagtgttcaggaaaaactcaacctaagtatttgaaacataaccatatttcttccagagataatgcagtatctcacttagctgcacattcaaattcatcctcaaaatgtcccaagctgcctaaagcaaatatacctgtaagacctaaaccttctttccagtcctctgcaaaaatga

SEQ ID NO: 109791 - DNA, 397 bp, Homo sapiens
ttcttatgcagtaaaagcaacaaatcaagctgatgaaagtcagacattgaaggtgatctaagaaataactataatgagaaagggatctaaaaaatattttatattttcatgctctcaagtggctcttaggtgaaaaatgttggctatataaaatgtctagtcctgtattggtcctcttgggatagacctgtatccattggtgctgcttctttgtggagatcctgtcagccctgttgggtattccagctgggtgcttgctcttgatcctcatttccagacatcctagaagacttattggggcatatttaaacctgtgtcctcccccctcctcaggtgctgtaccctgtgtgccatgtgcgtaacctgatgctgtggagtgcagtgtacctgccctgcg

SEQ ID NO: 109792 - DNA, 631 bp, Homo sapiens
ttcgaggatggtactcaccttcataaacatttttggtttttagcggctcaaagacaagttttggaattttattttctacaagttcattttcatctttggtgtgctgaatgtccagacagtggaagaggtggtcatgtggtgcctctggtttgccggacttgtctttctgcacctgatggttcagctctgcaaggatcgatttgaatatctttccttctcgcccaccacgccgatgagcagccacggtcgagtcctgtccctgttggttgccatgctgctttcctgctggggactggcggccgtctgctccatcaccggctacacccacggaatgcacaccttggctttcatggctgcaaaggtgaaatactggacccaggacttgctcaaattgaatttctgtctgttttcaaggaagctggatgtttgacaagttattttcacccatgaaatgacagggggatatttggtctttcattttaacaagcatttcagttcctttttgtgtgttgggtactggtactgaatgcttttgtggggaattttatgtaactctttctttacgtagggtataaagattttacaaaataatgaataaactgtactcatcattttgaaggaaaaatctggc

SEQ ID NO: 109793 - DNA, 460 bp, Homo sapiens
aagaattcggcacgaggttcttctgtatgtttgtgctcacactgcgatcatctacaatgtgttcaggaacaatcaataccaccttcagggccacgccaatattatctcctgcctctgcgtcagtgaagacaggcggtggatcgccacagcagacaaagggccagactgcctggtgattatatgggactccttcacaggtattcctgtgcacacaatatttgacagctgccctgaagggaatggcatcatggccatggccatgacccacgacgccaagtatctggcaaccatctcagatgctgaagtccagaaggtatgcatctggaagtggactttggcagtggaaacgccagcatgcactctcgaactccccacagagtacggtgttcagaactacgttacttttaacccaacaaataataaagaattggtgagcaatagtaaaacacgggcctgtatt

SEQ ID NO: 109794 - DNA, 423 bp, Homo sapiens
gacttggtgctgccaggaagctgtcaggacccagcctgctctgacaaggctccggggatggagggtacagctgcccttcatggggacagcccagccaggccccagcaggctaaggagcagccagggcctgagcgccccattccagttggggatgggaaggtgagcgtcttctcacctccagagcctgacgaaactcacgacccgaagctgcaacatttggctccagaagagctccacactgacagagagagccccaggcctggcccatccatgttaccttcgggtcctaagaaggaagctccaagagtcatggataaaggcacttcagatgagaccagaggtgcggaaggaacaaaaaggtcaccacaagatattggtctttggaaggccatgatgccttctttaatacagaccgacgggtgg

SEQ ID NO: 109795 - DNA, 222 bp, Homo sapiens; identical to SEQ ID NO: 109571

SEQ ID NO: 109796 - DNA, 426 bp, Homo sapiens
gatgtgaggacactgcatcagtgggtcaatgggatccgcattgcaaagtatgggaagcagctctatatgaactaccaagaagccttgaagaggacagagtcagcctatgattggacttccttatccagctccagcattaaatcgggatccagttcttccagcatcccagagtctcagtcaaaccactccaatcagtctgatagcggagtttctgacacccagccagcaggacacgtccgttcccagagcattgtgagctccgtattctctgaagcctggaaacgaggcactcagttggaagagtccagcaaggtaacagcttcgttttaatttacattgaaaattctgtggtattcttttgggtttaaattgttgctctcttatgtctttatcgggatcttatttggccttatttcagtctccttt

SEQ ID NO: 109797 - DNA, 327 bp, Homo sapiens
aggtatgccaatttttctattagtaagctctgccaccctttctcaggtgctgttccaccccaacagcggggcagctggagagtttggagccctgcagactgtccgcctggagcgttacaaggccttctacattaccggtgagtgaggggccacttagccctgcctcccacagtcacagctgcacggggaccccatggactctcacccaggcctctgggaatgagtgtgagtccctcctttgtggggggttttcactacctcttgacaagcagatcctccaaacccagggtctctgcacaggctctctggatccctcatatgcaaata

SEQ ID NO: 109798 - DNA, 400 bp, Homo sapiens
gtggataactacctgaaacctctcaatagctctttctccctcccatttctgttacatggatcataactcttcctctgtctcctgaaaagcctggacctctctgttccttacacctcccacttcctagtgatgctgtttcctctgttccaggctatggctttgtagattttgacagcccttcagcagcacagaaagctgtaacagcactgaaggccagcggtgtacaggcacagatggcaaaggtaagggtactaccccatgtctgttcctccaaggggtttgtggttagcaccaaagttccagttctaaggtttccagagggcttaagaaccatgaaattgagtgggcaagggctatccgtggtgctttctagacagtccatgagcacccctggctgctg

SEQ ID NO: 109799 - DNA, 357 bp, Homo sapiens
  misc_feature (1)...(357): n = a,t,c or g
gacgcgcatgaatggatgaacgagattcccactgtccctacctactatccagcgaaaccacagccagagtgattttttccgtccccttnnnnnnnnnnnnnnnnnnnnnnnnnnnnnnnnnnnnnnnnnnnnnnnnnnnnnnnnnnnnnnnnnnnnnnnnnnnnnnnnnnnnnnnnnnnnnnnnnnnnnnnnnnnnnnnnnnnnnnnnnnnnnnnnnnnnnnnnnnnnnntatgcctagttggataatattttgaccaataaagaaaaagagggccggggccggtggnnntttntttttnnnnnnnnnnnnnnnnnnnntttttntttttttttgttcttttggggatttttngttc

SEQ ID NO: 109800 - DNA, 340 bp, Homo sapiens
cggcacgaggccgtctcaacgtgctgctctgacgggaagctctacgacgcctacgtctcctacagcgactgccccgaggaccgcaagttcgtgaacttcatcctaaagccgcagctggagcggcgtcggggctacaagctcttcctggacgaccgcgacctcctgccgcgcgctgagccctccgccgacctcttggtgaacctgagccgctgccgacgcctcatcgtggtgctttcggacgccttcctgagccgggcctggtgcagccacagcttccgggagggcctgtgccggctgctggagctcacccgcagacccatcttcatcaccttcgagggcc

SEQ ID NO: 109801 - DNA, 367 bp, Homo sapiens
agatactattattatttccattctaccgagaaggagactaaggctctgatcatttaaataagttgcctaaggtgatgcagtgatataagtagcagagctaggaattgagccttggtaactttaactctggaccccaagtccttagctactaagctttactgcatggggtttagtcaaattaagacttttggaatatgagttacttttgagattagctttgtgatattttttgtgctcatttgtccaaagtctattttattttcatcttaattaggtttttgtatgaatatgcaagaaggcatcctgattactctgtcgtgctgctgctgagacttgccaagacatatgaaaccactctagagaagtg

SEQ ID NO: 109802 - DNA, 627 bp, Homo sapiens
tccagcccctagacatacagtagatgtgcagcttttcagagaagacaaccctgaagaacctagcaaggaaatcacctctcacgaggaaggaggtggagacgtttcacctcgaaaagaacctcaagagcctgaggtttgccccacaaagattaagccgaacctgagcagctcccctaggtcagaggaaacgacagcctccagcctggtgtggcctctccctgctcaccttcctgaagaggacctgccagaaggtggctccacagtctcagctcccacagcaagtgggatgtcttctcctgaaatagtcagtagagaagaaagtcctcagtgctcagaaaatcagagttccccaatgggcttggagccccccctgaatttgggaaaggctgaggacaaccaaagcatcagtgctgaggttgagtctggagacacccaggagctaaatgtcgacccactcttgaaggaaagcagcacttttactgatgaaaaccccagtgaaactgaggaaagtgaggcagcaggtggtataggaaaattagagggagaggacggtgatgtaaaatgcctgtcagaaaaagacacgtatgatacaagcattgactcactcgaagagaatttggacaagaa

SEQ ID NO: 109803 - DNA, 630 bp, Homo sapiens
gggtcgacccacgcgtccgcccacgcgtccgggctcccttgtcatctgatggcattttgattgtctcgaggccaagtgacttgctgtccatgatgagtgatgagaagaaccttggtgtgtcccaaaaattggtatcaccttcaaggagcacaagtagctgctcttccaagcaaggaagtcgacaggacagctgggaagtggtggaaggactgaggggggagatgaattacacccaggagccaccagttcagaaaggatttttgctgaaaaagaggaagtggcccttaaaaggctggcataagagattcttctatctggacaaaggaatcttgaaatatgccaagagccaaaccgatatagagagagagaagctgcatggctgcattgatgtcgggctctcagtgatgtctgtaaagaagtcatcaaaatgcatagaccttgacaccgaggagcacatctaccatctgaaggtcaagtcagaagaagtctttgatgagtgggtatcgaaacttcgccaccacagaatgtatcgtcagaatgaaattgccatgtttccacatgaagttaaccactttttctcagggtccaccatcacagactcttcatctggggtggttgactccatttcaa

SEQ ID NO: 109804 - DNA, 364 bp, Homo sapiens
  misc_feature (1)...(364): n = a,t,c or g
ggctcaataccctgatactaaagccagacaaggacattacaagaaaagaaaactacaggccaataaccttgatgaatatagacaaacatttagccagactaagaaaaaaagagagacaacacaaaatcagagatgaaaaaggagacattacaactgataccgcaaaaattcaaaagatcattagtggctattatgagcaactatatgccnnnnnnnnnnnnnnnnnnnnnnnnnnnnnnnnnnnnnnnnnnnnnnnnnnnnnnnnnnnnnnnnnnnnnnnnnnnatccaaaacctgaacacaccaacaagtaacaagattgaagccataataaaaagtctcctagcaaagaaaagcccaggacc

SEQ ID NO: 109805 - DNA, 182 bp, Homo sapiens; identical to SEQ ID NO: 109590

SEQ ID NO: 109806 - DNA, 357 bp, Homo sapiens
  misc_feature (1)...(357): n = a,t,c or g
gttgttccagtacccagacacggaggggaaggtggaagactttacggaactcgtggagagagctcatcagagtggggtaggtatacctttcttgtggggggtccgtggaggcgtatcccaacttgtatctgtctacctatctctctctctgtcttttcatgtgccttaatttctttaccattatcacatggaatggtaaaactctccttcctgactccttgctgctacttttttctgttcccggattnnnnnnnnnnnnnnnnnnnnnnnnnnnnnnnnnnnnnnnnnnnnnnnnngcaatggagttcacaggatgtgaacacactctgcccgtcttcctgtagttaagataatttc

SEQ ID NO: 109807 - DNA, 417 bp, Homo sapiens
aaccaaaaggccagactgaacacgatgagggtatgcttgaatatttagaagatataattggttgtggacggctaaatgaacctattaaagtcttgtgtcggagagttgaaatattaaatgaacacagaggagagaaggtgaatcatctgtagactttcattgtaaatcagaatgtttcatttatgatctaacaaattttagtaagtcagatattcatgttataatacttaatgaagaagtgttatattgaaatttatatcttaacatttaagatgaacattctccttattaactgtttttatctaatggttgcatattttaagttcatattgtacatatgaagtgtgtattcagtctttaaacttttaatttctgtagttaaacagggtaaagatggtggaaaaggaaaaggatgcc

SEQ ID NO: 109808 - DNA, 356 bp, Homo sapiens
tttgatctccagcaccgagggccatggggccctgtgcgtttctcctctcagcagaagtccaggttcccatgccaactttctgatgacccctctgtcacccactggcactcaaggcagtccctcattctgcgttgggagtctggaagaagactctcccttcccttcctttgcccacaagctgagggttggaaaagcaaaagcagatgcttggcccaaaactgctccaaagaaagatgataacagcttaaattctcctgcccctgtggacagagacggggagagtgataattcataccgtgatcctgtgcccaggtttcaaaaatccttcagccaagctattgatacacccctcatga

SEQ ID NO: 109809 - DNA, 392 bp, Homo sapiens
cggacgcgtgggcgggggcggaagatggcgacgcccctcgggtggtcgaaggcggggtcaggatctgtgtgtctcgctttagatcaactgcgggacgtgattgagtctcaggaggaactaatccaccagctgaggaacgtgatggttctccaggacgaaaattttgtcagtaaagaagagttccaggcagtggagaagaagctggtggaagagaaagctgcccatgccaaaaccaaggtcctcctggccaaggaagaggagaagttacagtttgccctcggagaggtagaggtgctatccaagcagctggagaaagagaagctggcctttgaaaaagcgctctccagtgtcaagagcaaagtccttcaggagtccagcaagaaggaccagct

SEQ ID NO: 109810 - DNA, 472 bp, Homo sapiens
cattttcagaatacttaaaaactaaaaaactaactcccaaccttcaacattttgtactgcactcaattgcaatgacatcagaatcatcttgcactacaatagatggtcttaacgcaactaaaaacttccttcagtgtctcggacggtttggcaacaccccctttttatttcccttgtatggccaaggagaaattccccagggtttctgtaggatgtgtgcagtttttggtggaatctattgtcttcgtcataaagtacaatgctttgtagtcgacaaagaatctggacgatgtaaagcaattatagatcactttggtcaaagaataaatgctaaatattttattgtggaagacagttacctttctgaggaaacatgctcaaatgtgcagtataagcagatctctagggcagtactcattacagatcagtctatactaaagacagatttagatcagcagacttccattctgat

SEQ ID NO: 109811 - DNA, 407 bp, Homo sapiens
cgtgtgctctggagattgcatcccacgcaggcagcccccttccgtacaagtaaagtggtctcgctgagaaattttctaagtgctggtttctctttgcgggaccgactcgccgcccccaaatatcccatttggatcccattctgtttcaggagaggctggcggttacctttcttggggagacgcgtccgactgcttcattgtgggggcctcaggagcggaggatcgggtcccgcccgaggtgacgcgtaaacccagactctcagcaacgcgggtaggaaggacccttgaagttccgcggcgaccacgtcggctgaaaccagcagcccaggacaagtggaccagccagcaagacccagaccatccaaaccggctgatcctacgacaggacccagatgccagtgaaagtg

SEQ ID NO: 109812 - DNA, 393 bp, Homo sapiens
agtaaagccaatttatcaggaggtgtttggaaagataacatcaacatggctctagttgtcgacacctactatgatgatcaactcattagctgtggcagcgtcaacagagggacctgccagcgacatgtctttccccacaatcatactgctgacatacagtcggaggttcactgcatattctccccacagatagaagagcccagccagtgtcctgactgtgtggtgagcgccctgggagccaaagtcctttcatctgtaaaggaccgggtcatcaacttctttgtaggcaataccataaattcttcttatttcccagatcatccattgcattcgatatcagtgagaaggctaaaggaaacgaaagatggctttatgtttttgacggaccagttc

SEQ ID NO: 109813 - DNA, 392 bp, Homo sapiens
gatggataatcattttaatataacaaaatcacaagtagagcctcacagagggggtagctgtcctttcttttctatgtaattgatgctatttatttagaaggtctatggtttacccttgtgaagtaatttttctgtatgagtattttttttccagcttagatggaaaccatttgagattccaaaagcatctcacaagaaagtagactttgtgagtgtaagtcagtcccatccacacccttcctactgctctcctctcttctgtggggagtgagccaaccatttgcagcctgaatgccaagcagaagcagccctatcaggaggcagcagagacaaaaccacctgcgtatgctttgggggctggcggagggatgtcttacttacagaaaccatag

SEQ ID NO: 109814 - DNA, 373 bp, Homo sapiens
cacttttctttcggacttagggaaagtcaagggttctcctctctgagaggaagagctgcagttagtgaaagggttcacagtcctgaatgaggaatggatgtgcgcatcctaaaggagaaacgagatacagatccatttgcttgtctgttttgcaagcgggaaatctagtctccatttgtcaagaacctgagggaaattcctgtagctggcaggtaactgtcaggaatttcaaggctgaaaattttactttgctgacattttacctcttgacatttgcattctttttctctctcttctctctaccccaggactgcttcaccagtttttctactggctccttctttgaactggatggacgtccattctgtgagct

SEQ ID NO: 109815 - DNA, 250 bp, Homo sapiens
tgagaccttagcggactgaataatgagcattttgcaaaaatcctacagctaccattatacctaatggagaaagcctgaattctttctacctaaaatcaggaacaaggcaatcacaactcatattcgacattgtactggaagttctagccagtggaccacggcatgacgaggaaataaaagtcatgcagataaagaaaggaataaagctgactctatagaaaatcataaggaacatacatacaaacacctg

SEQ ID NO: 109816 - DNA, 344 bp, Homo sapiens
cagtaacttgatggaaaaattcaaagaaaacctcaggattctgagctctccatggacccaggtctgccataatttccctgctctcatcgaatatttcccaggaagccataataaaatagctgaaaattttgcttaccttaaacgttatgtactggagagaataaacgaacatcaagaatccctggacatgaacagtgctcgggactttattgattgtttcctgaacaaaacggaacaggaaaagcacaatcaacaggctgaatttactgttgaaagcttgatagccactgtcactgatatggatggggctggaacaaagacaacgagccccacttctagatatg

SEQ ID NO: 109817 - DNA, 602 bp, Homo sapiens
caagttctcaattatttgagcctccgggcgacagagcaagaaaaggctgcgatggatagtgctcggcttagtgctgccaaatcttctccaatgatggaaacaatcaacatgtgcctgcaataccttgatgtgtcagtgctgggcgagctagttcctaggttgtgtgaactgatcagaagtggtgtaggtcttggaactaagggtggctgtgccagtgtcattgtgtcattaactactcagtgtcctcaggacctaacaccttactcaggtaaacttatgagtgctttgctgagtggcctgacagatcggaacagtgtgattcagaaatcttgtgcatttgctatgggccatttagttcggacctcacgggatagcagcactgaaaaactcctgcagaagctcaatgggtggtatatggagaaagaagaacctatctacaagacctcttgtgctttgactattcatgctattggacgatacagccctgatgtattaaagaatcatgcaaaagaagtcctgcctctggcatttttaggcatgcatgaaattgctgatgaggagaaatccgaaaaagaagaatgtaatttatggaccgaagtgtg

SEQ ID NO: 109818 - DNA, 656 bp, Homo sapiens
cttagttcaaggacagcagttgaatccatatttgagactcaaagttagacgtgaccatatcatagatgatgcacttgtccgggtaagttgggctgctagattaaaacctaataatggggatatcatgatacagttcagtgaattcattttaaaagtgactgaaaaaaatgataccatatagcataggaacacatggacatttctgatcttatataagtattatacttttgttgttcctgtgcaagtttatagatgtgttctacaaagtatcggttgtattatataatggtcatgctatctttgaaaaagaatgggttttctaaatcttgaaaactaaatccaaagtttctttcattcaaaagagaatagagtgttggacaaagaccagaacaagagaaatgtggagatacccaataataagtgtggatgtgcagtcttgaactgggagtaatggtacagtaaaaccataccataaaattataggtagtgtccaaaaaattccatcgtgtaaaattcagagttgcattattgtggacttgatgaagtgaccatggcagatcagtgcctgttgccagtaagagttgagtcctgctgggccacttaaaatatccctgtgtggacggcactgcctggctgtggtagtttcttcccactta

SEQ ID NO: 109819 - DNA, 450 bp, Homo sapiens
agcctgatcacgctcagcttggcacgaggtggaaaagaaagaaagagctcgattgaaaactgtgaagttccatgccaggacggggatgattgagtctaacagggtaagtggggatccccaaggaaatcagccagtaggtaaagagggttgagaagcctggagtttagtctgatgtgtaggagaactggggaacacaaaagaaaatctctttttcagggggctggctctgtcctatcagaacattgactgcttttcagaaagcagagagggagctcttaaagttcacagccagtctgtgctcctttcccctgggtaccggctcttgaagatgtgttagagttggactgtctggaaggctgacttgcttggggaaaatgaaaccactcgtgggtgtctccctggctatagatcctgtcagagcatccggccaagaagcccagctccagagct

SEQ ID NO: 109820 - DNA, 436 bp, Homo sapiens
  misc_feature (1)...(436): n = a,t,c or g
caatgngcgaacgagtcaggaggcatntacaaggaaagctgaactagaagcagctgtgttatagacgactgaatttgagagaaaagctctagggtattgttggggagcttttagaggagaatattacagaagagttcctaatggagtgtgggaggttcattacacctgctcactacagtgatgtcggggatgaacgttctattgtcaaactctgtgggtatcctttatgtcagaagaagctgggaattgtaccaaaacagaaatataaaatttctaccaaaaccaataaagtctatgatattactgaaggaaagtctttttgcagcaatttttgttatcaagcatctaagttttttgaagcacaaattcccaaaactccagtatgggttcgagaagaagagaggcatcctgattttcaactggctaaaggaagaag

SEQ ID NO: 109821 - DNA, 423 bp, Homo sapiens
gtcctcgccgtcatcgcgtacgtgggtgggcgaaatgcaagcgtccgggagcatctcggtcggtgaattcgttgccgtggtgggtctggcacagttccttcgcggtccgatgatcgacatcatctacttcggcgccggcctggcccgggcgcgcgcctccgccaaccgcgtcgcatcgcttctggcgaccggcgaggctgtcactcccgcgagtgatcctgcacccctgaaccacgcagagttcctgacgctgcgcgacgtcgtgctggccggagcttcaccggtcgatctggacgtcaaacgcggcgagatcatcggcatcgtcaccgagaatgccgcctgggcggatgcgttggtcgacgcactggctcgtcgaatcgagccttcgagcggaacgattcatctcggccctcgtgccaagct

SEQ ID NO: 109822 - DNA, 430 bp, Homo sapiens
cggagcccccgggaaaaccccccttcaagccttttgcacgcaggattgggtgtcaaccacccaaaaccatccatccacactccgacagtccatccacacgcccgcctgcccgtccacacgcccgcccgcccgtccacacgcccgcccgtccgtccacatgtctgaccgtccgtccacatgcccgccgtccatccatatggccgccatcgactgacgtcagcagacctcagtattccctgtctccatccacatcactcgctcttccagggcagtcttgcctagggagatgaagatggcaaacaaccttgctgttcagctcaggaacttccaacccgcaatggacacttctgtaggaggcaacaagacgttcttggtgatatgtgtgttttcatcacgtgctggttgcaccctcgtcacaagcagaggtaat

SEQ ID NO: 109823 - DNA, 345 bp, Homo sapiens
  misc_feature (1)...(345): n = a,t,c or g
ttcatattcatgcagaagccactctcctgcttttctttcttggggaaaagggcgatgtcatttatgcaataaagccctcttgctggccggggcttaccattattccttcctgtctggttctgccccgtattgaaactgagttaatgggcaaatttgatgaaggtaaactgcccaccgatccacacttgatgctcggactggccattgaacctgttgctcatgactatgatgtcatagttatcgacagcgcgcctaacctgggtatcggcacgattaatgtcgtatgtgctgctgatgtgatgattgcccccccgcctggtgagttgtttgnctgcgcgtgaaata

SEQ ID NO: 109824 - DNA, 423 bp, Homo sapiens
atatgccatggttcagggccacgctggcgcaatggcgttatgcgttacgcaatcccattgccatgtgtctggcgctaacggttgcctattatttaaatctggatgaaccctattgggcgatgacctcggctgcagtggttagctttcccaccgttgccggtgttatcagcaaaagcctcggacgcatcgctgacagtttgctcggagccattgcggcactgcttcttgccgggcatacgctcaatgagccgtggttttttctattgagcatgtcggcgtggcttggcttttgtacctgggcctgtgcgcaattcacgaataacgtagcgtatgcatttcaactggcgggctacacggctgccatcatcgcctttccgatggttaataaaactgaggccagccacctgtgggatatcgctcagg

SEQ ID NO: 109825 - DNA, 335 bp, Homo sapiens
  misc_feature (1)...(335): n = a,t,c or g
nnnnnnnnnnnnnnnnnnnnnnnnnnnnnnnnnnnnnnnnnnnnnnnnnnnnnnnnnnnnnnnnnnnnnnnnnnnnnnnnnnnnnnnnnnnnnnnnnnnnnnnnnnnnnnnnnnnnnnnnnnnnnnnnnnnnnnnnnnnnnnnnnnnnnnnnnnnnnnnnnggtgaataaatcggcaaactacggagtactggataagttggcccgaggatatgcagatctgtcaaaagcggagagnnnnnnnnnnnnnnnnnnnnnnnnnnnnnnnnnnnnnnnnnnnnntacaattcatgcgtcagaactcattcgctctttactgaaaagctcgcgcccatg

SEQ ID NO: 109826 - DNA, 357 bp, Homo sapiens
  misc_feature (1)...(357): n = a,t,c or g
actcaatttggaaaaacaaatgtctaaaataatgctatttgctcccaatgttgttatgatagtgttgggaacataactcagatatccttccnnnnnnnnnnnnnnnnnnnnnnnnnnnnnnnnnnnngnggtttttgctttttctcttaattatcctttcatatgttttatatcaggattctcaatcctaggggtacattagaatgataaaggaataatccaggaatcccacttctgggtatttttctgaagggaataaaatggatgtgtggaaggggtatctgctctctcgtgttcgttaagatgctgttcaccacagccaacacgcataaccaacctcaagcccatcagcagagg

SEQ ID NO: 109827 - DNA, 431 bp, Homo sapiens
  misc_feature (1)...(431): n = a,t,c or g
ggacggggatggacagatgtattttcgccaaacatttggcaggctgtttcgcaaacgcagtttggtggcatctggttatggcaaattgttctcgccctcgtaacgttgatcgtcgcccttatgcatccgcggaatatgccacgtttgctgtttatgctcactaccgcgcaatttattctgctggcgggagtggggcatgcgacgctgaatgaaggggtaccagcgaaaatccatcagtctaatcacgcgattcacctgatttgtgcggcggcgtggtttgggggattactgccggtgctctggcgtatgcaactcatcaaagaccgttggcgactgcaggnnnnnnnnnnnnnnnnnnnnnnnnnnnnnnnnnnnnnnnnnnnnnnnnnnnnnnnnnnnnnnnnnnnnnnnnnnnnnnnnnnnnngaacta

SEQ ID NO: 109828 - DNA, 414 bp, Homo sapiens
  misc_feature (1)...(414): n = a,t,c or g
atacggattcaatggccgtccgtcgacaacgtaccgactggcagaaccctgccggtacccagcttactcgccttgcgggacaagaaagcttcccctcccccctacaccttaccattccatcaatagcacttttgtattaaaaaagagnnnnnnnnnnnnnnnnnnnnnnnnnnnnnnnnnnnnnnnnnnnnnnnnnnnnnnnnnnnnnnnnnnnnnnnnnnnnnnnnnnnntaaaaaagagacccaacagcatgctgttaccagaaaagcgctttaaatataaagacactgattaaaagtagacaccatagagcagtgtaaaccatgctaacactaatccaaagaaagctgcagtcactgcattaacaccagacagggcacccttcagacaagatatctcctccaggacacagn

SEQ ID NO: 109829 - DNA, 268 bp, Homo sapiens
tcgtcagataatcactaacatgttcatcaggtgtatagcccatggtatgttgggaagcagagatggggacagcgtgcccagcactccaggggcagagagagctctcagtggagaaggcccctccttcacatgcagccaacagcgatggcccacacctcctgctcctgcgaagcagctgggagctcctcctcctcctgcagactggaaaccgaggctcccagggcaggtgtgggagtatagacccaaacccagccgcgccccttggtct

SEQ ID NO: 109830 - DNA, 341 bp, Homo sapiens
agctcatattaaaattgggtctttgtatcttccttgggatggccctagttattaaacacttttgaaatgggcgtatttatttcctttgacaaacttagaccaggcagcagcccatgattggacatcaggtttacaaaggcttattttgaagaaagatgatgaactcagagctgcggactgctgcagaattcagttacagtttcccgggaagcaggacaagttaccagtagctttaaaacgaaaccttcttggccaatgctgggagagaaaatggctctttgtcatgacatgtatgttttttgggttgctgagtctatcacacaggcagaatgagtgattta

SEQ ID NO: 109831 - DNA, 255 bp, Homo sapiens
  misc_feature (1)...(255): n = a,t,c or g
acacgccttgtgggcactgccgtcagtttatgaatgaactgaacagcggtctggatctgcgtattcatctgccgggccgcgaggcacacgcgctgcgtgactatctgccagatgcctttgggccgannnnnnnnnnnnnnnnnnnnnnnnnnnnnnnnnnnnnnnnnnnnnnnnnnnnnnnnnnnnnnnnnnnnnnnnnnnnnnnnnnnnnnnnnnnnnnnnnnnnnnnnnnnnnnnnnnnnnnnnnnnnnnnnn

SEQ ID NO: 109832 - DNA, 325 bp, Homo sapiens
  misc_feature (1)...(325): n = a,t,c or g
tgttgnnnnnnnnnnggggctctgtgaccaattgtttaagaatttttttttatttttttaagtgtgttgattctcacatgaaaatcgaagcttgtcgtggcctttaagggtcaggttccagcgtattatggaagccgccacatggtcgttttcttctttcctcctaattctctgattcagatcggaagttgcacccatcaaatgggtcagattgccatcgtctcgtttcaaaattccactcccaaagtcattgagtgcttcaatgtggaatctcgcatcctgtgcatgctgtacgttcccntcnagcacaagcccananancntt

SEQ ID NO: 109833 - DNA, 131 bp, Homo sapiens
gctttgcgcgtcgcaataaccttagcgtctccgccagtccgcaggatatcggcgtgctgacgcgtaagctgtatgccgcgtttgaagcattaacagaaaaagtgacgctggtaaacccgcacatttcaccc

SEQ ID NO: 109834 - DNA, 360 bp, Homo sapiens
  misc_feature (1)...(360): n = a,t,c or g
aaaaagggatatctggactctgggatttctctctgaatttcctcctgtgtttcagttttataagtccatggtgctggatgcatacagtgaatatgtgaacaatttcagcacagccgtggcagtcctcaagaaaacatgtgccacaaagcccgcttttcttgaatttttaaaggtaagcgcnnnnnnnnnncatttgggttttaacaccatctgataacaagttacatgtcaaagcttgactctgaatgcagttattcgttattaagatttcagtatcaatagtgccctagatattggattaatgctagaaatgaagatgaattttaggtcctaatgtagctttttgaaaacanttttatt

SEQ ID NO: 109835 - DNA, 346 bp, Homo sapiens
  misc_feature (1)...(346): n = a,t,c or g
cgactctgtgatttctctctgaatttcctcctgtgtttcagttttttaagtccatggtgctggatgcatccagtgaatatgtgaacaatttcagcacagccgtggcagtcctcaagaaaacatgtgccacaaagcccgcttttcttgaatttttaaaggtaagcgcnnnnnnnnnncatttgggttttaacaccatctgataacaagttacatgtcaaagcttgactctgaatgcagttattcgttattaagatttcagtatcaatagtgccctagatattggattaatgctagaaatgaagatgaattttaggtcctaatgtagctttttgaaancaatntnntt

SEQ ID NO: 109836 - DNA, 354 bp, Homo sapiens
  misc_feature (1)...(354): n = a,t,c or g
aagantcnncttgctggggtnnnnnnnnnnnnnnnnnnnnnnnnnnnnnnnnnnnnnnnnnnnnnnnnnnnnnnnnnnnnnnnnnnnnnnnnnnnnnnnnnnnnnnnnnnnnnnnnnnnnnnnnnnnnnnnnnnnnnnnnnnnnnnnnnnnnnnnnnnnnnnnnnnnnnnnnnnnnnnnaaagggttcgagcctgatgtacgtattttgcttaccaaatacagcaatagtaatggctctcagcccccgtggatggaggagcaaattcgggatgcctggggaagcatggttctaaaaaatgttgtacgtgaaacggatgaagttggtaaaggtcagatccggatgagaactgttg

SEQ ID NO: 109837 - DNA, 406 bp, Homo sapiens
tgagtgacaggcagatgcctgcggttgcccgcctttggcggcttttcaccaacatgacttacattgatgagttttcagagctgcatggcaaagatgttccggtgcgtgaagccctagccggacaagtgcccagcgcatgcgttgggacctgtttcatacgcctcgccgagaccgcactgttagctgacggtgacggcattgctttccacgcgcacaggcttactgaggattacaacattggctttcgcctgaaagaaaaaggggtgacggaaatttttggccgtttttcggaggtggacgaagccatagaacgcgagcactgtgcatttttacagcacgcgcggacattcaacatgatttgcgtgcgcgaatattttcccgataccttttccactgcgggtccacc

SEQ ID NO: 109838 - DNA, 80 bp, Homo sapiens
atagagcgttaccagctgcctcaaagttaccagcgtatgcctgacttccgccgccgcttcctgcagggctgtgttaatga

SEQ ID NO: 109839 - DNA, 181 bp, Homo sapiens
agctggacgacgctggtactcgagcaaattgacgatatgcatgattactatgcacgctatctgccgcaaatggcgctggcagtgtccgtgcccgtgctgaatgtggtggcaatctttccctctaactgggctgcggcgctcattctgctgggcactgcaccggtaattccggtggttaagg

SEQ ID NO: 109840 - DNA, 381 bp, Homo sapiens
  misc_feature (1)...(381): n = a,t,c or g
ttgttacaccacgaaggagggcatcgttaccggggacggtataggtatggcgataagccacggcgttccgctgcgtaacatgaaattggtacagtatcacccagccggtctgccaggttccggtatcctgatgaccaaaggctaccgcgctgaaggcggtattctggtcaacaaaaatggtaccgcttatctgcaagattacggcatgggcccggaacctccgctgggcgagccgaaaaccaaatatatggacctgggtccacgcgacaaagtctctcaggccttgtggcacgaatggcgtaaaggcaacaccatctccacgccgcgtggcgatgtggtttatctcgacttgcgccccctcggcgagaaaaanctgcagca

SEQ ID NO: 109841 - DNA, 93 bp, Homo sapiens
aaggggttgcggtgaaggcctgctggaagccgccaacaatgtggaagagctggaggagacggcgaagctgatttttattctcggggaccgccc

SEQ ID NO: 109842 - DNA, 93 bp, Homo sapiens
agtggtttgcggtgaaagggggcaagaagccgccaacaatatggaagagctggaggaaacggcaaagctgatttttattctcggtgaccgccc

SEQ ID NO: 109843 - DNA, 634 bp, Homo sapiens
cggagtcacatgtccgtacccgtacatcttccagacgggcaagaccctggcggtaacctgcttagtcttcttgcaacggaccacgctccgcctttttcacacggaaactctcaagcacctgcaggacatcaacatcgccacccctgttcacaacatgctgccaggtaaggggacgggacggggcccagggatgggacagcaaccggggacggacgtggggggtgcggagcgctgtcagcccaccttatcgcttcccagtgcaggacactgttcacaacatgctgccaggtaatggggtgggacaaggcccagggacagacgtgggagtacggagcatggtcagcccactttagcgcttcccggtgcaaggcacaagtcctgaaagagccccgtgcttggaggagccgcgtgctgggaggagccgcgtgctgggaaggagccgcgtggcagtgccatctctgtaggtcagagtgggtgggagacgatttctcatcatcggtgcaacaaggccctggggaagccaggacctgaggctgaagaacacagaacaggaggcctccctttggctgggagggctgttggggagaggccaacagaggcctatgtttgtgaatgccctgttgctggtgggtgt

SEQ ID NO: 109844 - DNA, 151 bp, Homo sapiens
ttaaagggttcgagcctgatgtacgtattttgcttaccaaatacagcaatagtaatggctctcagtccccgtggatggaggagcaaattcgggatgcctggggaagcatggttctaaacaatgttgtacgtgaaacggatgaactcaagaa

SEQ ID NO: 109845 - DNA, 356 bp, Homo sapiens
  misc_feature (1)...(356): n = a,t,c or g
actggacgactggaaatttcgtgattggatggcgcagctcgacgaagagattcgttactccatgcgcgccacagttaacgcgcaaacacgcgaccgccgcaaaggcgtccagccaccgacaacgtggatttttaatgccaccaaaggccagctggagcggcgaatcgtccgtatggaaacgggcatggcctggacagaagacccaccgtcacgcacccgtcacttaatcagcaattgccagataagcgaaaccgtcatcccaaacgtattttctgtgcgggtaaattatctgctttgtcgggcacaaaaagagcgcgatgaaactttctatccccccacgcgtttcnacaaatttc

SEQ ID NO: 109846 - DNA, 106 bp, Homo sapiens
gctaaagtgaccgatgatatcggccgtcgtcagaccttcaacaccgcaattgcggcgattatggagctgatgaacaaactggcgaaagcaccaaccgatggcgagc

SEQ ID NO: 109847 - DNA, 421 bp, Homo sapiens
  misc_feature (1)...(421): n = a,t,c or g
ataannnnnnnnnnnnnnnnnnnnnnnnnnnnnnnnnnnnnnnnnnnnnnnnnnnnnnnnnnnncgacagccgcaaaaaaacaacccttggaggaactatgccatcaccttctgcatcagctgtgaccactaagccagttgaccaggcagcaactcagacaactgcatcagctgaacaggccactaccgttgacacgacaattgcttccgtagcagcccctgtagatgtcagtgcgcaggttactgcagcagtagctgcagagaatagtcgcatcatgggcatcctgaactgcgacgaggctaaagggcgtgagtcacaggcgcgagcactggccgaaacgccgggtatgacggtagagagcgcacagcgcattctgcatgctgctccgcaaagggcccagatgcgttccgacacggcgct

SEQ ID NO: 109848 - DNA, 107 bp, Homo sapiens
gccccattcttaataaccttagctggcaggtgaatccaggcgaacactggcaaattgtcgggccaaatggtgcaggaaaatcgccgttattaagcctggttactggc

SEQ ID NO: 109849 - DNA, 80 bp, Homo sapiens
atagagcgttaccagctgcctcaaagttaccagcgtatgcctgacttccgccgccgcttcctgcaggtctgtgttaatga

SEQ ID NO: 109850 - DNA, 80 bp, Homo sapiens; identical to SEQ ID NO: 109849

SEQ ID NO: 109851 - DNA, 351 bp, Homo sapiens
ccttccgtctgtatgaaaacctggcgggaatgaccggtactgctgataccgaagctttcgaatttagctcaatctacaagctggataccgtcgttgttccgaccacccgtccaatgattggtaaagatctgccggacctggtctacatgactgaagcggaaaaaattcaggcgatcattgaagatctcaaagaacgtactgcgaaaggccagccggtgctggtgggtactatctccatcgaaaaatgggagctggtgtcaaacgatctgaccaaagccggtattaagcacaatgtcctgaacgccaaattccacgccaacgaaacggcgattgtcgctcaggcaggtaatc

SEQ ID NO: 109852 - DNA, 91 bp, Homo sapiens
gcgtgcgctattactggccggacagccagattgatgacgctttcgctcatctggtacgtaatctggcggattcaccaattccgctgccgct

SEQ ID NO: 109853 - DNA, 347 bp, Homo sapiens
ccacgctccgcctttttgacacggaaactctcaagcacctgcaggacatcaacatcgccacccctgttcacaacatgctgccaggtaaggggacgggacggggcccagggatgggacagcaaccggggacggacgtggggggtgcggagcgctgtcatcccaccttagcgcttcccagtgcaggacactgttcacaacatgctgccaggtaatggggtgggacaaggcccagggacagacgtgggagtacggagcatggtcagcccactttagcgcttcccggtgcagggcacaggtcctgaaggagccgcgtgctgggaggagccgcgtgctgggaggagccgcgt

SEQ ID NO: 109854 - DNA, 354 bp, Homo sapiens
cagacagacttgttaagaatagtccctctaaatattttcattaggcacccaggttatcaattcggaaggaaatagaagttcaacacctcaaaagcaaagatgactcttcgcattgtaaaaagcaagtccagggatgcagaacacgttcattttgggggcagtggaatgcacaggaaggatgaggagctttcccggtcacccctgtcaagaaaccactcaaaccccaccgcctccagttgcttctcgaccgactgcagcggcccctccactcccctcacccccagactcaccccaactcagagccctgccagctccatcccgtgccatgtggccaggggctcctggctttgttct

SEQ ID NO: 109855 - DNA, 149 bp, Homo sapiens
ttagcttgtctgcatggtgctcgaggggccgagggtggagcttggctcgctgcctgggaacctgaccatccttgcttctcggggcagatggaggacaagctggcctgggagagacacacatttgaagagcggataagcagggctcctga

SEQ ID NO: 109856 - DNA, 300 bp, Homo sapiens
  misc_feature (1)...(300): n = a,t,c or g
agttaatgcgctacgtgcaggaacagcgcggtaattcaggcattatccactgcaccagccgcgctaaagtagaagaccccggtgcgcgcctgcaaagcaaggtaattagcgcgccggcctatcatgccgggctggaaaataatgttcgcgccgatgtgcaggaaaaattccagcgcgatgacctgcaaattgtggtggccacggtggcgttcggcatgggcatcaataaaccaatcgttcgcttcgtggtccactttgatattccgcgcaatatcccctcccctnntcannaatcctgtc

SEQ ID NO: 109857 - DNA, 95 bp, Homo sapiens
tccatcggtgatgcgcattcgggttatccggtaatgaacagcagcttctcgccgaacagcaccacgctgccgacgacgccgctgaacgactggct

SEQ ID NO: 109858 - DNA, 274 bp, Homo sapiens
  misc_feature (1)...(274): n = a,t,c or g
agangctatgggcggtctctctggcggcgctgggctactacgtcatctacggtcaggagttatcgcagagcgttctgtttgcgatgtgcgaaaccaacaccagcgaagccagcgagtgtttaagcccgaagttcagcctgaatattgtgcttatcgcgctggcctatacggtggaggctggtctgtggtcgacactcctgcgcccggtgtatattacaaagccgtggcgacatgacgtaacttttgtgctgctttatggcttgattcttgatcc

SEQ ID NO: 109859 - DNA, 337 bp, Homo sapiens
  misc_feature (1)...(337): n = a,t,c or g
agggttccgaaaactaaaaccacaaaagcgccgggcttaccccgtgaattaaaggggagtcacctgacaatcatcagcaatggcgtttcgagaggagcagcctttcgggttgcttcgagcgcatgctttcggtgtcctgacgtggaaggaagcaaggtctggcctcttcctccgcttccaagggcgctcattctcccctgnnnnnnnnnnnnnnnnnnnnnnnnnnnnnnnnnnnnnnnnnnnnnnnnnnnnnnnnnnnnnnnnnnnnnnnnnnnnnnnnnnnnnnnnnnnnnnnnnnnnnnnnnnnnnnnnnnnnnnncccctccagcncgnnnct

SEQ ID NO: 109860 - DNA, 80 bp, Homo sapiens
atagagcgttaccagctgcctcaaagataccaacgtatgcctgacttccgccgccgcttcctgcaggtctgtgttaatga

SEQ ID NO: 109861 - DNA, 144 bp, Homo sapiens
gctgaggtaggcttcccgtactttggtggcgacggcacggaacacttcaacaaagtggaactggaaaacgtgctgctgcacaaactgccggttaaacgcctgcacctgtatgatggcagccccgccctggtgcccaccgtttat

SEQ ID NO: 109862 - DNA, 161 bp, Homo sapiens
aaacggcatcgtggggtgccaatctgcaattttatgaaccgcgcactattcacgactcgtcattaagtaaagcaatccacggcattgttgccgcacgctgtggcctgctgacccaaagttatcaattctggcgcgaggggactgaaatcgatcttggtgct

SEQ ID NO: 109863 - DNA, 345 bp, Homo sapiens
  misc_feature (1)...(345): n = a,t,c or g
aaaccaaaaaacaggtcgattacgtgccgggtacgccatgcaaaccagatcaacaaaacggcatttggattgtgcaggcgcatgagtggggcaaatacgtggcacgggctgattttgagtttcgtaatggcgaaatgaaaatggttaactaccagctgattccggtgatccttaagaagaaagtgacctgggaagacgggaaaagcgagcgcgtgctttacactcctgaaatcgctgaaaaccagcaaatgatctcgctgttatccccgttccataacaaagacaaagggcagctgggattgaaaataggcgaaaccaatggtcgtctggcagccgatcgngaca

SEQ ID NO: 109864 - DNA, 101 bp, Homo sapiens
acttcatggactggctggcggtgcagtacatcagcgcgctgaatatcattctctacatgcgcgacaagtacaggtaccaacattgtttgatcgctctgcac

SEQ ID NO: 109865 - DNA, 352 bp, Homo sapiens
  misc_feature (1)...(352): n = a,t,c or g
gacacanngggaacagacaagcctggggcatccactgccctaggagggaaagaacagagccggactccgcccagctgcacacccacaggagcagaccccttatctgccctgggaggaagaggtcagagccaaaccccgtccacctgcactcctggaggagcagaccctcagctgtcctgggtgggagaggacagagcaggactccgcccacctgcacacccacaggagcagagcctcatctgccctgggagggagaggacagagccggaccccatctacctgcactcctgcagaagcagagcctcagctgccaagttgagggcactgtgcccagaacaaggtgaccactcgg

SEQ ID NO: 109866 - DNA, 110 bp, Homo sapiens
ggcaaaacgacccggatgccgagccgtactggcgcgatgtgggtacgctggaagcttactggaaagcgaacctcgatctggcctctgtggtgccggaactggatatgtac

SEQ ID NO: 109867 - DNA, 350 bp, Homo sapiens
  misc_feature (1)...(350): n = a,t,c or g
ggcgaaagcgtagcggtgagcgttttgacagtctcggaaacaaaaatgcgctgtttggtatcatccaggccagcgtttacgaagatttacgtgatatttctgttaaaggtctggtagatatcggttttgatggtcacactgtcggcggtctggctgtgggtgagccgaaagcatatatgccccgcattctggagcatgtatgcccgcaaattccggcagacaatccgcgttacatgatgggcgttggtaaaccagaagacctggttgaaggcgtacgtcgtggtatcgatatgtttgactgcgtaatgccaacccgcaacgcccgaaatggtcacttgttngtgtcctgc

SEQ ID NO: 109868 - DNA, 118 bp, Homo sapiens
tatctaattcccacagcagaccttaaaccaggagaactaccactccttgaagttggtaactgggtagtcttacctgttgaaatgtctatccacatatcagtctcatctggagaggtgc

SEQ ID NO: 109869 - DNA, 107 bp, Homo sapiens
  misc_feature (1)...(107): n = a,t,c or g
aaaannnnnatttgaggctgcgccgtggcgaaatcatggcgctgctcggtgaaaacggggcgggaaaatcaacgcttatcaaagcattaactggtgtataccacccc

SEQ ID NO: 109870 - DNA, 107 bp, Homo sapiens
  misc_feature (1)...(107): n = a,t,c or g
aagcgtgaacaattactggaagttggcgatttcttaaagaaactgtcgaaaccttacgtcatgctgtttgacttacacggcatggacgaacgtctgcgcncncncct

SEQ ID NO: 109871 - DNA, 281 bp, Homo sapiens
gataatggtaaaaaaccagggcgcaaaatccttatgtctggcggtgggcgctgcaactttaccaacctttatgtcgacccaggcgcttatgtgagccagaatccgcatttttgtaagtctgcactcgcacgttttacccagtgggatttcattgatctggtcaataaacacggcatcgcctggcacgagaaaacgttagggcaactattatgcgatgactccgcgcagcagattgttgacatgctggtggatgagtgcgagaaggccaatgtgaccttcag

SEQ ID NO: 109872 - DNA, 116 bp, Homo sapiens
gaaatatatggcccgcaccactcatgaacatgcgaaagcaggcaacatcatcaatgcgctgaaatatgccaaaggcgagttcgtgtcgattttcgactgcgaccacgtaccaacgc

SEQ ID NO: 109873 - DNA, 115 bp, Homo sapiens
aaaacgaggctctgaaaattcgtgaaggcgatgcgaaagagattatcagcatcaaaaattcgatcgcggaaatgaaagatgccgaaattgaacggtcaaataaattgctctcact

SEQ ID NO: 109874 - DNA, 347 bp, Homo sapiens
tctaaaccattgttgctgccaagccgtcacaaaatgaacctggcggctctggtcgtttccttcctgctgcagatagtatttgttcgcacggacagcgtcggcctgcaagtgctggcattgctgataatgaccgcaactgcgctggtatacggctggcatttagtcgcctccatcggtggtgcagatatgccagtggtggtgtcgatgctgaactcgtactccggctgggcggctgcggctgcgggctttatgctcagcaacggcctgctgattgtgaccggtgcgctggtcggttcttcgggggctatcctttcctccattatgtgtaagccgacgcaccgttcctt

SEQ ID NO: 109875 - DNA, 344 bp, Homo sapiens
  misc_feature (1)...(344): n = a,t,c or g
nnnnnnnnnnnnnnnnnnnnnnnnnnnnnnnnnnnnnnnnnnnnnnnnnnnnnnnnnnnnnnnnnnnnnnnnnnnnnnccccgccccaaaaaaagaaagatgctctctgcccttcggccctgaaagcctccatcgtttcatgctctctgcccttcggccctgaaagcctccatcgtttctgtgcagtgcccctgtcatcgatgattccgtacacgcacttcgacgtccagtttttggagaagtttggggtcaccttcatgagggaaggcgagacgggcactctcaagtgcaccatgctggtgacgccggacctgaagccggtgcatccccgcgcccaagtggac

SEQ ID NO: 109876 - DNA, 180 bp, Homo sapiens
  misc_feature (1)...(180): n = a,t,c or g
tgggctttattaaagatatccgctggctgttccgccgtatgccgcctgcaagccagcgcctcaacatgttgttctccgccacgctttcgtgccgggtacgtgagctggcgttcgagcagatgaacaatgccgaatatattgaagtggaaccggaacagaacccggcccnccgnantaant

SEQ ID NO: 109877 - DNA, 130 bp, Homo sapiens
  misc_feature (1)...(130): n = a,t,c or g
acacttgatgctccgactggccattgaaactgttgctcatgtctatgatgtcatagttattgacagcgcgcctaccttgggtatcggcgcgattaatgtcgtatgnncagcagacccccccanngnnnnt

SEQ ID NO: 109878 - DNA, 634 bp, Homo sapiens; identical to SEQ ID NO: 109843

SEQ ID NO: 109879 - DNA, 111 bp, Homo sapiens
  misc_feature (1)...(111): n = a,t,c or g
gtcgggatggggctggacggtcgtacgctggtgaccaaaaactccttccgctatttgcaccccctgcacactatggggccggcaacggacccccccccgnccnttntgtgc

SEQ ID NO: 109880 - DNA, 371 bp, Homo sapiens
ctccgcgaactggaagaccataaccgggaattgctcaatccagccacaacgcgagaactgaccagtctggtacgaaacctgaaccgattgttaaaaagtgaacgcgaacgttacgacaaataccgtacgacgctcaccgacgtgacccatagtctgaaaacgccactggcggtgctgcaaagtacgctgcgttctttgcgtagtgaaaagatgagcgtcagtgatgctgagccggtaatgctggagcaaatcagccgcatttcacagcaaattggttactacttgcatcgtgccagtatgcgcggcgggacattgctcagccgcgagctgcatccggtcgccccactgctggacaatctcacctcagcgct

SEQ ID NO: 109881 - DNA, 78 bp, Homo sapiens
ggcatttcgtaatatcacttttgacgggctggtggcggcttatcgagagtccaccaaagcgctggtggaaggtggcgc

SEQ ID NO: 109882 - DNA, 147 bp, Homo sapiens
gacgaagcaaaccgcatgctggatatgggcttcgctcacgatatcgaacatattgctggcgaaacgcgctggcgtaaacagaccctgctcttttcggcaacgctggaaggcgatgcgattcaggactttgccgagcgtctgctggaa

SEQ ID NO: 109883 - DNA, 164 bp, Homo sapiens
  misc_feature (1)...(164): n = a,t,c or g
aangnnngnnngggggggggtttagaggttggcgcaggtgcggctaacgaaaagcgtgttgacgcgctggttgccgcaggcgttgacgttctgctgatcgactcctcccacggtcactcagaaggtgtactgcaacgcatccgtgaaacccgtgctaaatatcc

SEQ ID NO: 109884 - DNA, 366 bp, Homo sapiens
  misc_feature (1)...(366): n = a,t,c or g
aagtacttattactccccagattttaaaaagaacttttataccttgtcgtttaatcaggaactcgctgataacttcggcgttaccgccggtttatcgcgccgccagtctgatatcatcgccgcggattatgttttgaatgacggcattgtctccggtcgggcacagtataaaaacgttatcgatgctgcattaagcaaatttacatggtttgccagcgccgtctttacccacgatttaaccttaaaatataccggctccagccgtgattataataccagcaccttcccgcagtttgatcgcgaaatgggtaataaatcctatggtctggcatgggatatggatacgcagctngcatgggctgtgcc

SEQ ID NO: 109885 - DNA, 360 bp, Homo sapiens
  misc_feature (1)...(360): n = a,t,c or g
ggacgcgaaccgtcgctgcattcgcgctctttactgccaacgctcagcgccattgccgagctgcatctgctttctgaaaacgatgctgaacaattgcgagtggcgtatctgttcctgcggcgtctggaaatcctgctgcaaagcattaacgacgaacaaacccagacgcttccttgtgatgagcttaatcgtgcgcggctggcgtgggcgatggactttgatgactggccgcaactgtccggggcgctgaccgcacatatgaccaatgtgcgccgggtgtttaatgaattgattggctacgatgaaagtgaaactcaggaagagtcgctgtcggaacagtggccccacctnntncnannt

SEQ ID NO: 109886 - DNA, 98 bp, Homo sapiens
  misc_feature (1)...(98): n = a,t,c or g
gtcgagtatttcgcgcatgtctggcaacccatccaggcatgtatcgatcgcgggatgaacaccgaaggtgtactnccagcccccccgcnnnnnncnnt

SEQ ID NO: 109887 - DNA, 256 bp, Homo sapiens
tcgtcattggtacgggcgcacctaaaatcatcgtttcgctgatggcgaaagatatcgccagcgtgaaatccggagctctcgcctatcgtgaagcggcctttgatattctggaatggcgtgtggcccactatgccgccctctccaatgtggagtctgtcatggcggcagcaaaatttttccgtgagaccatgccagaaaaaccgcccctgttcaccctcccccaaacaaaaaacgtggatgatccggtctatgcggc

SEQ ID NO: 109888 - DNA, 346 bp, Homo sapiens
gaaagccgtggttataccgtctttattttcaaccgttcccgtgagaagacggaagaagtgattcccgaaaatccaggcaagaaactggttccttactatacggtgaaagagtttgtcgaatctctggaaacgcctcgtcgcatcctgttaatggtgaaagcaggtgcaggctcggatgctgctattgattccctcaaaccatatctcgataaaggagacatcatcattgatggtggtaacaccttcttccaggccagtcttggtcgtaatcgtgagctttcagcagagggctttaacttcatcggtaccggtgtttctggcggtgaagagggggcgctgaaagttc

SEQ ID NO: 109889 - DNA, 93 bp, Homo sapiens
gtggtctggtcgagcagaccaacgcctcgttactcaacgaaatcgccaacaaagacagcaaggtgattccaacccagcgcgtcctgctggccg

SEQ ID NO: 109890 - DNA, 339 bp, Homo sapiens
  misc_feature (1)...(339): n = a,t,c or g
ctccgccaatgacgttaataaaatttccagtataagtaatgacctgcggagagtattatctgcaataactgcattgaatttctatcatggcgatgttccttctgtcatgatccgaatccaaccggaaaatatgagtccattcattatagatatttcaacaggagaacatgatgattatctcgtgcaatcactagatgtaggcacttttgcaccgtttggtgaccaatgtgcttgctcagcggtcaataaaaaagagctggaatgtgttaaggagacgatttctaagtattgtgcaaagttcacctggaaagaagctatttcaaacccccccgcgcnctt

SEQ ID NO: 109891 - DNA, 149 bp, Homo sapiens; identical to SEQ ID NO: 109855

SEQ ID NO: 109892 - DNA, 162 bp, Homo sapiens
ataacgcagcgttcgatatcggctttatggactacgagttttcgttgcttaagcgcgatattccgaagaccaattctttctgtaaggtcaccgatagccttgcggtggcgaggaaaatgtttcccggtaagcgcaacagcctcgatgcgttatgtgctcgct

SEQ ID NO: 109893 - DNA, 138 bp, Homo sapiens
  misc_feature (1)...(138): n = a,t,c or g
agcggtgaagaggaagcacgtctgatttatcagggcgttgctcacaccactggtggtgccgatcagcgcctggtggtggatataggcggagccagtactgaactggtaaccggcacggctgccccaaccaccnntntt

SEQ ID NO: 109894 - DNA, 120 bp, Homo sapiens
tttaaggcggcggagccgctgattccgaaatctggagcgcgcgtaatgtcgatgctggagccgaccaagaagatgtccaagtctgacgataatcgcaataacgttatcggcctgctggaa

SEQ ID NO: 109895 - DNA, 326 bp, Homo sapiens
attcaatctccgtacccggagatcctcccaaaagccggacctgtgggcaccgcgctcctcggcatgctgcctccaaaacgcggaggggcagcctctctggcttgtaagccagcccgtctgtggcgtgtgtcacagcagccgaagggctcggaggcagagcccttacttcatgccttccccttaaaactgcaaatgtcttccaatacccaccagcaggcgaagaagcaaaacagcccttccacggaccccacagcggcctccggctacccgtgaaagaagccggttgggccccctcctcatttctttcctccatcctgttgtaggat

SEQ ID NO: 109896 - DNA, 359 bp, Homo sapiens
  misc_feature (1)...(359): n = a,t,c or g
tctatcgcgctgaacggcgcaacgctgctcaccatcgccagtgcgccggcattggctggcgaagcgggagagaaactgggatctgagtacaacgcgactcanaaaatgatcaatcgtatggagcgttgttatccgaaagcaatgctgaaagagcttatctatcacccgacgttgacggaagctgacctttctgatgagcagaccgttacccgctgggtgaacgcgctggtcagcgaactgaacgaccaagaacagcacggcagccagtggaagtttgatgttcacaccaatgctgagcaaaacctgttcgagccgattgttcgcgtgcgtacccacggtgtggatactgactatccgct

SEQ ID NO: 109897 - DNA, 82 bp, Homo sapiens
tcgccaataaacagcgttacgatgagccaacgttaatccagcatgctgaacgcctgaaaatgctgattgcccagttcgccgc

SEQ ID NO: 109898 - DNA, 105 bp, Homo sapiens
gccatgggtcacgggcagatgcgcgagcgcgaactggaacgggtgatgaatgatttccatcatcaacgtttcaacgtgctggtttgtacaaccattatcgaaacc

SEQ ID NO: 109899 - DNA, 332 bp, Homo sapiens
agagcaaattgtattggactgccaggcaggtaaacgctccagtaataatgccgataaattaacagcgattgccgcccccgcagaaatctttttactcgaacatgggattgatggctggaaaaaagcaggattgccagtagcggtaaataaatctcaacccttgccgttaatgcgccaggcgcacatagctgcgggtggcttaatattaatcggcgttgtactgggttataccgtaaatagcgggttcttcttattaagaggctttgttggtgccgggttactgtttgcaggaatcagcggtttttgtggaatggcaaggttgttagataaga

SEQ ID NO: 109900 - DNA, 128 bp, Homo sapiens
tgacccaactggagatgttcaacgcggttgccgaagctggcagcataacccaggctgcagcaaaagtgcatcgcgtgccgtcgaatctcactacccgtgtgcgccagctggaaacagaactgggggtt

SEQ ID NO: 109901 - DNA, 333 bp, Homo sapiens
aagaggtgtggatccgccaggggatcaaagcacgccgtacccgtaatgaagcccgcgtacgcgccctgaaaacgatgcgtcgcgaacgtggtgagcgtcgcgaagtgatgggtcccgcaaacatgcaggtggaagaggccagccgctccggtaaattcgttttcgaaatggaagacgtttgctcccaggttaacggtaagcacctggtgaaagatttttctgcccaggttctacgtggcgacaaaattgccgtgattggtccgaatgggtgcggcaaatccacgctggtaaaaatgatgctcggtcagcttcacgcgcacagcgggcgtattc

SEQ ID NO: 109902 - DNA, 426 bp, Homo sapiens
  misc_feature (1)...(426): n = a,t,c or g
tgattacgagtattcatggccgtccccggagatcggcgcgaccggaactaccatgcagacactcggggtacccggacctcccgccaagaccctcgggagacccggacctcccgccgagaccctcgggacacccggacctcccgccgagaccctcgggacactgggacctcccgccaagaccctcgggacacccggacctcccgcccagaccctcgggacacccggacctcccgccgagaccctcgggacatgagctgcaggaaacccaagcagagtgcagctactgaggttccaaggaggaaacggcatggacataagcacctctcacaagacttcagttagatttttaattcccttcctgtgcttgagaaaaaattgaatgttaaacatgaagggcaaacnnnnnnnnnnnnnncgaaagggggg

SEQ ID NO: 109903 - DNA, 149 bp, Homo sapiens
ttagcttgtgtgcatggcgctcgaggggccgagggtggagcttggctcgctgcctgggaacctgaccatccttgcttctcggggcagatggaggacaagctggcctgggagagacacacatttgaagagcggataagcagggctcctga

SEQ ID NO: 109904 - DNA, 127 bp, Homo sapiens
aaccggattgcgggcaacctgctggaccagatcgagaagcagctgccgctgcaccgggacggcttccacacgctgcagtaccagaggacgtccgcggccgccgagcagcgcagcgagagccccgggc

SEQ ID NO: 109905 - DNA, 343 bp, Homo sapiens
cccggtatttcaaaagcgcttgctttcccgaccaatacgcggatggtgcccatctggttcccggaacatgaacgcgcttctgccgttggtttttatacgtctggtcagtttgtcggtctggcgtttctgacgccggtgctgatctggattcaggaaatgttgagctggcactgggtgttcattgtccctggtggtatcggcattatctggtcgctgatttggtttaaggtttatcagccgccgcgcctgcccaaaggtatcagcaaacctaaattggattacattcgtcatgccgcaggtttggtggatgttaatgcccccgtaaacaaaaaggtgtgtcaca

SEQ ID NO: 109906 - DNA, 85 bp, Homo sapiens
tgcgcgcgaaagcggaacaggcgggcgataacctctcctgtatcatggtgacttatccttctacccacggcgtgtatgaagaaac

SEQ ID NO: 109907 - DNA, 127 bp, Homo sapiens
aaccgcatcccggccaacctgctggaccagttcgagaagcagctgccgctgcaccgggacggcttccacacgctgcagtaccagaggacgtccgcggccgccgaccagcgcatcgagagccccgggc

SEQ ID NO: 109908 - DNA, 91 bp, Homo sapiens
ataagcgccagacttcctgaaagatatcggtggtcttgaaactaaccgtatcaaccagctggtggtggaaccgacgctgcaaaccacccgc

SEQ ID NO: 109909 - DNA, 344 bp, Homo sapiens
  misc_feature (1)...(344): n = a,t,c or g
cccgctcggggaagatgtctatcccggatacctgggcggccgataaaaacggggtaccaacaaccgatccgttcgcgggacatgctctgctccccgccgccgggccaaaagggtatggcctgatgatgatgattgacgccctctcaagcgtcttactcggcttaccgttcgggcgacaggttagttcgatgtatgacgatttacacgcagggcgtaatttggggcaattacatataggtattaatccgaactttttctcctccagcgaattattccgtcaacatcttagccagaccatgcgcgaattaaatgccattacccccgcgcccggttttaatcagggn

SEQ ID NO: 109910 - DNA, 110 bp, Homo sapiens
tgtttaacggcttgttactgccatgccagcataaaggcaacgtcgcgccggttgttcctgatgacataaagcctgtcattcaggagcagacgcaacaggtgacacccacc

SEQ ID NO: 109911 - DNA, 176 bp, Homo sapiens
ttcatattcatgcagaagacactctcctgcctttctatcttggggaaaaggacgatgtcacttatgcaataaagcccacttgctggccggggcttgacattattccttcctgtctggctttgctccgtattgaagctgagttaatgggcaaatttgatgaaggtaccctgcccacc

SEQ ID NO: 109912 - DNA, 87 bp, Homo sapiens
aaacgtttgcatgagtacaaacgccagcacctgaatctgctgcatattctggcgttgtacaaagaaattcgtgaaaacccgcaggct

SEQ ID NO: 109913 - DNA, 677 bp, Homo sapiens
cgtggcagtcctcaagaaaacatgtgccacaaagcccgcttttcttgaatttttaaagcaggaacaggaggccagccccgatcgaaccacgctctacagcctgatgatgaagcccatccagaggttcccacagttcatcctcctgcttcaggacatgctgaagaacacctccaaaggccaccccgacaggctgcctcttcagatggccctgacagagctcgaaacactagcagagaagttaaatgaaagaaagagagatgctgatcaacgctgtgaagtgaagcaaatagccaaagccataaacgaaagatacctgaacaaggttgagagaggttttcttcaactctattccaaaattatttttgctttgtgctaataagctgtcgttgtccagcaatactaatcttttggatcgtttggagtaattcccttcgcccagagttcttaaccggggtggatggaggccttcgggagagtcacaccaatgtggaaattgtatgtaaaaccttaacagcctgtcttaacagcattttcttaggaaagagattcatacattcattagaccctcaaatggatccaggacctcccaaggggttaagagcaactcctttagcttacttttcctttcaaaataacggtatttaatttcagatagtaatagttaaagctgaaaatat

SEQ ID NO: 109914 - DNA, 226 bp, Homo sapiens
  misc_feature (1)...(226): n = a,t,c or g
gaactgaactcgctgtcgaaagagctggcaggcgtaagcgaagtgagcttcccggagtttgcggctgaaaaaggctccgaactggaagagagcttntgggcagaccgtagcacactgcgtcagttcacgaagcccgccggtagcggcggtggcttcaataatataagttgggatgggttccgtgtcccatcctcgcggtcccttnccnaatttaaggcctccatta

SEQ ID NO: 109915 - DNA, 110 bp, Homo sapiens
tgcgctaccgggaactgactggggtaccccatgagcgcatcatcgccggatttcagcgcattgtcctcggcggcgaggcgctggacggttttacatcgcgtggctttgac

SEQ ID NO: 109916 - DNA, 139 bp, Homo sapiens
gttgctcggggaaaatatcgccgccggactaattatcgcctttatggtgctacacctgcgctccgttgaaggcggcgcagcgtttcagacgctaattaccatcgccaaaattatcccgttcactatcgtcattggcctt

SEQ ID NO: 109917 - DNA, 91 bp, Homo sapiens
  misc_feature (1)...(91): n = a,t,c or g
aatggcagaccgatttgtctgtttaaattgcatgaaccggtacaggttgcgcactggcagttttctaccgtgnaccccccttgtccgcaag

SEQ ID NO: 109918 - DNA, 121 bp, Homo sapiens
ggaagaattgggaatggatgacgttctccgcagatagcgtatcttcggtacatacgctcacggacgatcttccgctggagtcgctggccgatcagcccggtgccggaaatgttcatctttt

SEQ ID NO: 109919 - DNA, 352 bp, Homo sapiens
  misc_feature (1)...(352): n = a,t,c or g
cctccaaaccggggtcgcttgccccagcccatctccatcactggcaatgctgtcccccatcccccgggggctcccctgctcttgcatctcccaaccccacatgggaccatgtcctgctgccatttccttggcccctgcacccatgtcccctgcctcccgcccgatgccgcagacagccctgcccgcctgcgcgtttccgtcctgcacagcctgtctacatcctgctctttctcaaccccagatttgggctgtgaacccttggttttcagccagcgccgttcagggtccccggacagagtatcagagaactgcaaactgacaaactggagggccgccatgcttctntnncctt

SEQ ID NO: 109920 - DNA, 339 bp, Homo sapiens
  misc_feature (1)...(339): n = a,t,c or g
naaacgcgtacgttgatcccatgttcggttatatcaatgtcagaaacctcgctccgatcaaggtggtgatcaactccgggaacggcacagcgggtccggtggtgcacaccattgaagaccgctttaaagccctcggcgcgcccgtggaattaatcaaagtgcacaactcgccggacgacaatttcccctacggtattcctaacccactcctgccggaatgccgcaacgacatccgcaatgcggtcatcaaacacggcgcggatatgggcattgcttttgatggcaattttgcccgctgtttcctgtttgacgaaaaagggcagcctantgagncctnnt

SEQ ID NO: 109921 - DNA, 346 bp, Homo sapiens
acacgctccgactttttcacacggaaactctcaagcacctgcaggacatcaacatcgccacccctgttcacaacatgctgccaagtaaggggacgggacggggcccacggatgggacagcaaccggggacggacgtggggggtgcggagcgctgtcagcccaccttagcgcttcccagtgcaggacactgttcacaacatgctgccaggtaatggggtgggacaaggcccagggacagacgtgggagtacggagcatggtcagcccactttagcgcttcccggtgcaaggcacaggtcctgaaggagccgcgtgctgggaggagccgcgtgctgggaggagccgcg

SEQ ID NO: 109922 - DNA, 344 bp, Homo sapiens
aaagacagccacttatgcctaatgagtacaacccaaacaacgtggcaccacccgaaaaaaaactgctgcaaaaatccattgaaatagatggatttacccaacccattgtggtcacacataccgataaaaatgccatggaaatcgtggatggctttcaccgccatgaaattggtaaaggctcatcatcattaaaattacgcttaagaggttatttgccggtgacctgtctggaaggtacacgtaatcaacgcatcgccgcgactattagccataatcgcgctcgtggacgccatcacatcaccgccatgtcggaagttactccggaacttaggctattgggatgg

SEQ ID NO: 109923 - DNA, 83 bp, Homo sapiens
tggctctgaaggggctacgtgttttgctcgtggaaggtaacgacccccagggagcagcctcaatgtatcacggatgggtacca

SEQ ID NO: 109924 - DNA, 113 bp, Homo sapiens
  misc_feature (1)...(113): n = a,t,c or g
agccatcgctaacaaaacccaaaactttgaagttgttgctcagtatcagttcgactttggcttgcgcccgtccatcgcttacctgcactctaaaggtaannatttactccaat

SEQ ID NO: 109925 - DNA, 150 bp, Homo sapiens
aggtgaacgaagcggaaagccaggcgcgcgccattgtcgatcaggcgcgtaacggcgctgatttcggtaagctggcgattgctcattctgccgaccagcaggcgttgaacggcggccagatgggttgggcccgtattcagcagttgcccg

SEQ ID NO: 109926 - DNA, 110 bp, Homo sapiens
gggtttggcaatgcgatcggggatttgcccatgatcaacgggcagacgctggcgcaaatgtacccttccctgcaaacgatctacgattttctgtggttgatcggtgaagc

SEQ ID NO: 109927 - DNA, 80 bp, Homo sapiens; identical to SEQ ID NO: 109849

SEQ ID NO: 109928 - DNA, 337 bp, Homo sapiens
  misc_feature (1)...(337): n = a,t,c or g
aaanaangannngctgggcggtatcggtctggaactgatgggtcaccaaaaaggtgaatatcagtacctgaacccgaacgaccatgttaacatatgtcagtccactaacgacgcctacccgaccggtttccgtatcgcagtttactcttccctgattaagctggtagatgcgattaaccaactgcgtgaaggctttgaacgtaaagctgtccaattccaagacatcctgaaaatgggtcgtacccaactgcaggacgcagtaccgatgaccctcggacaggaattccgcgctttcagcatcctgctgaaagaagaagtgaaaaacctcccacgtccg

SEQ ID NO: 109929 - DNA, 124 bp, Homo sapiens
  misc_feature (1)...(124): n = a,t,c or g
catttcggtgattgggggattcctgctggcctcaaagggcagcattgattatcccctgtttatttccacgctggttggggtgtcattggttgtgccgtcggnttgtgtgcctnnccccnnnntt

SEQ ID NO: 109930 - DNA, 134 bp, Homo sapiens
taaccaattctcttgccgctaacgatgttgctgtcgtccatgccggatacgcgcgctggcgcaaaaaattgctccgctatggcgtggaattatatgaactcaagcggacgcgtgagcaaagtagtactttacac

SEQ ID NO: 109931 - DNA, 82 bp, Homo sapiens
aggggattgcgctatggttccctggcccgatctcgttcaccggcgaaaatgtgctggaactgcaaggtcatgccggtccggc

SEQ ID NO: 109932 - DNA, 135 bp, Homo sapiens
acttcggtctggcgcagctgcaccagttacgcggtcgcgtcggacgttcgcatcatcaggcatatgcatggttgctgaccccgcatccaaaagcgatgcctgccgatgcacaaaaacgtcgtgaagcaattgcct

SEQ ID NO: 109933 - DNA, 201 bp, Homo sapiens
  misc_feature (1)...(201): n = a,t,c or g
tgtnnnnnnnnnnnnnnnnnnnnnnnnnnnnnnncctgtacatcgtaaaggctgggagcatcctggccgtatcctgcttactcgatttgccgctaataatggctctcagtccccgtggatggaggagcaaattcgggatgcctggggaagcatggttctaaaaaatgttgtacgtgaaacggatgaagttggtaaaggtca

SEQ ID NO: 109934 - DNA, 345 bp, Homo sapiens
  misc_feature (1)...(345): n = a,t,c or g
caacannnnnnnnnnnnnnnnnnnnnnnnnnnnnnnnnnnnnnnnnnnnnnnnnnnnnnnnnnnnnnnnnnnnnnnnnnnnnnnnnnnnnnnnnnnnnnnnnnnnnnnnnnnnnnnnnnnnnnnnnnnnnnnnggtgaataaatcggcaaactacggagtactggataagttggcccgaggatatgcagatctgtcaaaagcggagagnnnnnnnnnnnnnnnnnnnnnnnnnnnnnnnnnnnnnnnnnnnnnnnnnnnnnnnnnnnnnnnnnnnnnnnnnnnnnnnnnnnnnnnnnnnnnnnnnnnnnnnnnnnnnnnnnnnnntatccaagtagcccgngtnt

SEQ ID NO: 109935 - DNA, 354 bp, Homo sapiens
cgggtcgacaatttcgttggttggcgaacgcgaatttttggttgatttccaggagagggaaccagagctttcagagcaggctatttatagcgaatttgaaaatactctgcggattgtcgatgcggagtcagtaacccaggggggtcgctgggtgacatttaccgccagacataatcacttacctgcaccgggagcggatgcctggccgatacttatccgcgaagcagcacgctacaccggggaacaaaaaacacttccgcttagcccgcaggggatcctccgccagtgtaaagaggtcgcctccctgtgtgatggcgacaccttctccggcgagcagctaaacttaatgctgca

SEQ ID NO: 109936 - DNA, 352 bp, Homo sapiens
  misc_feature (1)...(352): n = a,t,c or g
cgactctgtgatttctctctgaatttcctcctgtgtttcagttttctaagtccatggtgctggatgcatacagtgaatatgtgaacaatttcagcacagccgtggcagtcctcaagaaaacatgtgccacaaagcccgcttttcttgaatttttaaaggtaagcgcnnnnnnnnnncatttgggttttaacaccatctgataacaagttacatgtcaaagcttgactctgaatgcagttattcgttattaagatttcagtatcaatagtgccctagatattggattaatgctagaaatgaagatgaattttaggtcctaatgtagctttttgaaaacaattttatttgtgcc

SEQ ID NO: 109937 - DNA, 314 bp, Homo sapiens
cattttcccattcctgtgcacagaaaactgaacttgaatgaaatgaaatattttcttttaagatggatcctgggattcagaacctcaaaaagtgatcaagttagcgtccctaccagttagaagtctactcatgatggaagacacgttgtgggcggcttccggaggtcaagtcttcatcatcagtgtggagactcatgctgtagaggtaagtcacttaggtggctacacggtgtggaaaaaatgcatttcagaaacagctcagctgacttctggtgccgaagtcaaggcttcttgcctgtggctaaatttccttc

SEQ ID NO: 109938 - DNA, 345 bp, Homo sapiens
  misc_feature (1)...(345): n = a,t,c or g
ccagcaagcctgttgcccagacctagccagggtgggaggccgaattcccggaaggccgggccaggccaccccagcatcaggcctcaggcctgcccacctgcactggcttcattcagaccgtcccaggcaatgatgagatggcaccagctactccaggctgaccctctaccagctcagagaccaccaaggcagcaaggaagcccctccttcccaggagtgacagcagtttattcattcnnnnnnnnnnnnnnnnnnnnnnnnnnnnnnnnnnnnnnnnnnnnnnnnnnnnnnnctccagatgctccccaatgtcgtgggcatggcagccagccacagctctcatgc

SEQ ID NO: 109939 - DNA, 404 bp, Homo sapiens
tgtacaaagcattttacaactcattgcgccaggccgaagctctgacctttggcctgaactgtgcgctggggcccgatgaactgcgccagtacgtgcaggagctgtcacggattgcggaatgctacgttaccgcgcacccgaacgccgggctacccaacgcctttggtgagtacgatctcgacgccgacacgatggcaaaacagatacctgaatgggcgcaagcgggttttctcaatatcgtcggcggctgctgtggcaccacgccacaacatattgcagcgatgagtcgggcagtagaaggattagcgccgcgcaaactgtcggaaattcccgtagcctgccgtttgtccggcctggagccgctgaacattggcgaagatagcctgtttgtgaacgtgggcgat

SEQ ID NO: 109940 - DNA, 258 bp, Homo sapiens
tacattatcctcggtctcgggctgaacgtggttgttggtctttctggtctgctggtgctggggtacggcggtttttacgccatcggcgcttacacttttgcgctgctcaatcattattacggcttgggcttctgtacctgcctgccgattgctggattaatggcagcggcggcgggcttcaagctcggttatccggtactgcgtatgcacggtacctatctggcgttctccgggtaccgagatagaatgggaggcccc

SEQ ID NO: 109941 - DNA, 419 bp, Homo sapiens
  misc_feature (1)...(419): n = a,t,c or g
aannnttnaaaatactttacagaggtcagggtctttttgtcgacaataggaaaaatctacctacaagtgttnnnnnnnnnnnnnnnnnnnnnnnnnnnnnnnnnnnnnnnnnnnnnnnnnnnnnnnnnnnnnnnnnnnnncgtacttctaccacgttcccacccccagttcagaaccctcattaggcaagaaccctgttcgcctggacaggccataggtagagccatgttcttccttacatcttccgcatctgggacagcatgggagaaatgctaattaccatctcagcgacctcagaaatgcccttatctatgcttaaagagacaaggaaatcctccttcttctggtagatcaacggtctttccggtggcctgttcaacatgttcggtaacatttctggcatcggcacgccaatcgcg

SEQ ID NO: 109942 - DNA, 81 bp, Homo sapiens
tttttccacaaatcggtcagcgcgtaatgatcgacgatagcagtgtcgtgattggtgacgttcgtctggctgatgatgtgg

SEQ ID NO: 109943 - DNA, 111 bp, Homo sapiens
gtgatgcctgaatcgttgatggtcatacgttcttcctcgacgctgcgtaagcattgggaatggatgacgctctccgcagatagcgtatcttcggtacatacgctcacggac

SEQ ID NO: 109944 - DNA, 104 bp, Homo sapiens
tacctcaaaggtctgggggtcaaacccgacacccgtaaagcaattctctggtataaggaagcagctgaacaagggtatgctcatgctcaatatactttaggttt

SEQ ID NO: 109945 - DNA, 95 bp, Homo sapiens
gttgccgtccggttggcgttctgaaaatgaccgacgaagccggtgaagatgcgaaactggttgcggttccgcacagcaagctgagcaaagaatac

SEQ ID NO: 109946 - DNA, 83 bp, Homo sapiens
tggctctgaaggggctacgtgttttgctcgtggaaggtaacgacccccagggaacagcctcaatgtatcacggatgggtacca

SEQ ID NO: 109947 - DNA, 103 bp, Homo sapiens
aaaagatggcggatgccattgatgcttatcaacctgactacgtggtgctggcgaagtatatgcgggtattaacgccggaatttgtggcacgcttcccgaataa

SEQ ID NO: 109948 - DNA, 83 bp, Homo sapiens; identical to SEQ ID NO: 109946

SEQ ID NO: 109949 - DNA, 83 bp, Homo sapiens; identical to SEQ ID NO: 109946

SEQ ID NO: 109950 - DNA, 102 bp, Homo sapiens
gctggggttgattttgggactgattaacgggctatctcgctggggagaacggctgctggatacctcaattcagatgttgcgcaacgtgccgcatctggcgct

SEQ ID NO: 109951 - DNA, 77 bp, Homo sapiens
tttccgatccgccaaaactggaactgcaaaagaaacataccattgaagtggtggttgatcgcttcaaggtgcgtgac

SEQ ID NO: 109952 - DNA, 82 bp, Homo sapiens
tatgcgtaacgaactgttcaccgccactcgcggtcagggcgcacagttgaacggctaccgactgcgcggcagcaccgctcgc

SEQ ID NO: 109953 - DNA, 146 bp, Homo sapiens
ggtaacggtgcagattcccgcgaaactgagcgtttatatctcgatgtgcacaagcagctcccgaaagtgaccgcgcagaaaggaatcgtcagcgaagcaggcgcgtcggtttactcggcttccgagctggctgcacaggagttccc

SEQ ID NO: 109954 - DNA, 111 bp, Homo sapiens
tgaaatcagtaaaaaagatatcacccgtctgggctttcgttcgtcgctgctgcaagcgagctttaactacgaaaggatgcaggcgggcggttttacctgggcgatgttgcc

SEQ ID NO: 109955 - DNA, 83 bp, Homo sapiens; identical to SEQ ID NO: 109923

SEQ ID NO: 109956 - DNA, 96 bp, Homo sapiens
agcgcagaagctatagacccgcagcaagcgcgcattatcgaacctgccgttaacccggcattgattggcgcggtgaaagttccggatggcaccgtt

SEQ ID NO: 109957 - DNA, 73 bp, Homo sapiens
tcgaacagggcattgctttttccaatgccttattaccctggtcagaggtatttccgccgctctatcaggcgat

SEQ ID NO: 109958 - DNA, 166 bp, Homo sapiens
tgcgactttcagccagcacagaatatgcacgttttgaacaggatgattttgatctcgatatagtttacggtgaaccccgcccatcaccctatgagaagatcccgcttgctgttgaagaacttacgccactgtgttctccccagctggctgagcggttaaacaatcc

SEQ ID NO: 109959 - DNA, 222 bp, Homo sapiens
gcttcttctataagggacccgcagatgaaaaagagcgctactcccgcattgtatggtttgatcaggccctcagtgatgcgcagcgcgataatgccaaccgcagcgctgtggccactgcttccgcccgcatcggcaccattgtggtcgtcgcccctcgtcaggcgaactaccactttcagtacgccaacggctccgtgacaaatacagtaaatgcgacgctgc

SEQ ID NO: 109960 - DNA, 91 bp, Homo sapiens
gtaacgtcgctacctacggtggaaatatttgcaacggtgccaccagcgcagattctgccacgccaacgctaatttatgacgcgaaactgga

SEQ ID NO: 109961 - DNA, 457 bp, Homo sapiens
  misc_feature (1)...(457): n = a,t,c or g
cccccccccttgggggcccaagggggggggttccccgggcccgagaattgacgcccccccgggaaaaaaggggaaccccnnnnnnnnnnaaaaaacnnnnnnnnnnnnccccgggggaatgggaacgccctttattcccccctcttcggggggttaagcccaaaaaatggcggaaccccgaaaaaagaaccccccctttagttaaaaaagnnnnnnnnnnnnnnnnnngggggacaaaaaaagggcccctttccnnnnnnnnnnnnnnncaaaaacctggaggccgaacctaatggactcatctggttctttcattctggaaggcttccaagcccttccacaccagcccctttcctctttgcagtagaggaagtgtaccccaagaataatcagctggtgaacgccaggcttctctcagcgctgccgatgtacaagtcgcgccagaaaatccgacgca

SEQ ID NO: 109962 - DNA, 83 bp, Homo sapiens; identical to SEQ ID NO: 109946

SEQ ID NO: 109963 - DNA, 73 bp, Homo sapiens
gcgtaccgcgcgtcttccttttcggcgcgaaagcggcaccgggatactacctggcgaagaatattatctttgc

SEQ ID NO: 109964 - DNA, 76 bp, Homo sapiens
gcaggcgtggagttttgattttggtccccggcagattaccgttcgcttcgatgaaaatctcaacccggttatcttt

SEQ ID NO: 109965 - DNA, 80 bp, Homo sapiens
tgcgtgaaccgatgcgccacctgctatcactgaaaaaatccgaacaactggcgcgcgccagcgaaatgctgaaggcggtc

SEQ ID NO: 109966 - DNA, 74 bp, Homo sapiens
acctttgcgaaatgctgccgccctattcctggcgacccgattatcgcccacgtcagccccggtaaaggtctggt

SEQ ID NO: 109967 - DNA, 114 bp, Homo sapiens
gccgttaactgatgagacgcatcatctgtttggcgcagaacaattcgccaaaatgaaatcctccgccattttcattaatgccggacgtggcccggtggttgacgaaaatgcact

SEQ ID NO: 109968 - DNA, 83 bp, Homo sapiens
tggctctgaaggggctacgtgttctgctcgtggaaggtaacgacccccagggaacagcctcaatgtatcacggatgggtacca

SEQ ID NO: 109969 - DNA, 68 bp, Homo sapiens
gtaccgccatcgaacagggtaacggtcgccatcttctggaaccggttctggaagcaatgaacgcttgt

SEQ ID NO: 109970 - DNA, 169 bp, Homo sapiens
tgctgacctccggcgaatcggaatatcacgtgcttaaatccctgccggtgcagactgaaatcaacgggaatcgctttaccagtaaggcgcatatcaacggttcgaccacgctctacaccacctattcccatctgctgaccgctcaggaagttagcaaagagcaaatgca

SEQ ID NO: 109971 - DNA, 108 bp, Homo sapiens
tcacgatgcccactgcctggcgttgctaccggggagccgtggtgcagaagttgaaatgcttagtgccgatttcctgaaaacggcccagcttttgcgccagacatatcc

SEQ ID NO: 109972 - DNA, 97 bp, Homo sapiens
gtccggtcacatttggcgaactgaaaacctatgaaaaacagttacaatccagcggtcttgagccagcagcgattaacgtttcgctaaacctgccgcc

SEQ ID NO: 109973 - DNA, 62 bp, Homo sapiens
aacactgcggatgccgacgtttaccgcttcctgaagttcttcacctttatgagcattgaaga

SEQ ID NO: 109974 - DNA, 65 bp, Homo sapiens
ttctccggcacgctctcctggctgttcctgcaattcgacggtagcgtgccgtttaccgagctggt

SEQ ID NO: 109975 - DNA, 83 bp, Homo sapiens; identical to SEQ ID NO: 109946

SEQ ID NO: 109976 - DNA, 94 bp, Homo sapiens
tgtatattcagattatcgtggtggcgtgcctgacgggtatgacatcgcttctggcgcatcgctcggcggctgtttttcatgacggcatccgccc

SEQ ID NO: 109977 - DNA, 71 bp, Homo sapiens
accatcggcgtctttgtgttgggttatctttactgcctgacccagtttcccggttttgcttccacaagagt

SEQ ID NO: 109978 - DNA, 204 bp, Homo sapiens
agcgcctgggcagaagaagagacaaacagttatcagttgccggagtcgctggaaaaattctcccagcgtttcttagaagatcgcacgaaggccgggggggaaaccccgcgacctccgctgtttgaggcgatcgatcaactgcttgcagacccattgtcgatccgcgatctggtatgcatccgcgcattggatgagatcatcggg

SEQ ID NO: 109979 - DNA, 311 bp, Homo sapiens
  misc_feature (1)...(311): n = a,t,c or g
cgaagtcacttatgcaataaagcccacttgctggccggggcttgacattattccttcctggctggctctgcaccgtattgaaactgagttaatgggcaaatttgatgaaggtaaactgcccacnnnnnnnnnnnnnnnnnnnnnnnnnnnnnnnnnnnnnnnnnnnnnnnnnnnnnnnnnnnnnnnnnnnnnnnnnnnnnnnnnnnnnnnnnnnnnnnnnnnnnnnnnnnnnnnnnnnnnnnnnnnnnnnnnnnnnnnnnnnnnnnnnnnnnnnnnnnnnnnnnnnnnnnnnnnnnnnnnnnnnnnnnnnn

SEQ ID NO: 109980 - DNA, 99 bp, Homo sapiens
tctttccggcggacgcctgggcgacgtcggacgcagtcttttgcgtggtaacagcgcgctggtagatgagtgtgtcgcgttttatgaagaacacttccc

SEQ ID NO: 109981 - DNA, 61 bp, Homo sapiens
tacagatgatgcctacgcttgctccaccatctgtcctttcggctccccagcgccgctgcca

SEQ ID NO: 109982 - DNA, 118 bp, Homo sapiens
gtccgattgtcattatgcttgaccctggccacggtggcgaagactccggtgcggtggggaaatacaaaacgcgcgaaaaagatgtggtattgcaaatagctcgccgtttgcgctctct

SEQ ID NO: 109983 - DNA, 345 bp, Homo sapiens
aattcaatcgtccgacccggacatcagcgtgcgtgtgaattcccttgctgctaccaccttatttgccatgacgctcaaaaaccccaaactcggctatgttaaccgttatgcgctgggccgtgactatcacaaacttctgcgcaaccgactcaaaaagctgggcgagatgattcaacaacattgtgtttcgctgaattttaaaccgtttgtcgattctgcgcctattctcgagcgcccgttagctgaaaaagctgggctcggctggacaggtaagcactcacttatcctcaatcgcgaggccgggtcgttcttctttttaggcgaattgctggtcgatattccgct

SEQ ID NO: 109984 - DNA, 86 bp, Homo sapiens
agcagcgatggtcgctcccgtggtttcatcaacggtacagctgttcctctgtcacaactgcgcgaactgggtcagttgctgattca

SEQ ID NO: 109985 - DNA, 63 bp, Homo sapiens
ggcgaagctgcaagaatccagcccgctgccggttctcggcgctgtgccgtggagctttgacct

SEQ ID NO: 109986 - DNA, 115 bp, Homo sapiens
tcgcagccgatcaacaggccgatttgagccaactcgccagccatataggcggattacgcgcttcgttggccagcccggcggaagtcgatgaactcacaggctgtgtcttcggcgc

SEQ ID NO: 109987 - DNA, 93 bp, Homo sapiens
gaatctgaccgtgtttaataacgtagttacgtctcgtccgtacaccattgaaatcctgcaacaggcgttgacctttgccaatgaaaagaaccc

SEQ ID NO: 109988 - DNA, 161 bp, Homo sapiens
agcaaaacgctcagactttcatttggcttcatccagtcacttagcatgctgatcacctttaccggtattctttgggaaagcgcgggtacgctctcattcactgttggtggaacagaatggaatatccaggggtatatggtctataccgtcgtgctcattgt

SEQ ID NO: 109989 - DNA, 236 bp, Homo sapiens
gatgaaatctcttgcagagcagatgcgtaaccacgaccgcgagcagatgagccgcatggcccataacctgccagagcagtaccaggagtgcgcgccggtcgagcaggtggcgcaggtattcaacaagctgttcaacgagctgcgcgccgcgttcccggccagcatggcgaacttccgcacccaggaagacctgaacgaattccaccgtcagtggctgctggcgtttcaggagaacg

SEQ ID NO: 109990 - DNA, 103 bp, Homo sapiens
aggaatttgcccaaataaaacatgtcctgcatggcattagtttgttggggcagtgcccggatagcatcaacgctgcgctgatttgccgtggcgagaaaatgtc

SEQ ID NO: 109991 - DNA, 99 bp, Homo sapiens
tggtgcaatttcagcgtcctgcctgggacggctatctacgcgtaaatgcgttgctggcagataaattactgccgctgttgcaagacgatgacattatct

SEQ ID NO: 109992 - DNA, 264 bp, Homo sapiens
agggcagccatcccaccagcgaaaaactgctttcggtattgcgccccgcgtccggccacgtcgctgacgcactggggattaccgagggggagaacgtcatccacctgcgcaccttgcgtcgtgtcaacggcgtcgcgctctgtttaatcgaccactacttcgcggacctcaccctctggccgacgctgcaacgcttcgacagcggctcgctgcacgattttatgcgcgagaaaaccggaaatgcgatgctccgcacacacacgc

SEQ ID NO: 109993 - DNA, 95 bp, Homo sapiens
gcccgccagtcggcgcgcgcggtcagcgagctggatagccgcggcatcaccacgcgggatatcctctccgataaagccatcgaaaacgcgatggt

SEQ ID NO: 109994 - DNA, 140 bp, Homo sapiens
ccttctcagcatcgctgacatttgagcagtcatacagtgaagttgatggagatagtgcctcgatggctgaactctgcgccctgataagcgccctcgccgatgtgccggcgaatcagagtatcgctatcacaggttcagtc

SEQ ID NO: 109995 - DNA, 72 bp, Homo sapiens
cgtttgtaacgtcgacgacgagcaaattcaaaagccgcagcgtcggaatccggcggatctggggcgctttat

SEQ ID NO: 109996 - DNA, 72 bp, Homo sapiens
ggcaaatgctgaacgttaccgtcgcctgcaaacaattattgagcgtggttacggattacagatgcgtgaatt

SEQ ID NO: 109997 - DNA, 263 bp, Homo sapiens
gagctggtctttgaaatggtgatatttcacatacgtgataacaagctgcagatggaactggcgccggaacgcctgcgtggtgaaaccgcatcttttgacatcgaagctaacggtaaagtgtacgtacaaaaaggccgccgtatcactgcgcgccacattcgccagctggaaaaagacgacgtcaaactgatcgaagtcccggctgagtacatagcaggtaaagtggttgctaaagactatattgatgagtctaccggcgagct

SEQ ID NO: 109998 - DNA, 94 bp, Homo sapiens
ccggcaaagaggagttttacgaaacgctgcgctattaccgccggatgatcgaagtgacgggcgtgacgctaaaactcaatcacaccgtgacggc

SEQ ID NO: 109999 - DNA, 103 bp, Homo sapiens
agaccagcatttcgatgcttatgtggaccgatgccattgaacgtggcccggaaatgacggcgcttcgtgatggtgtacgcgggaaagataagctggatgtgcc

SEQ ID NO: 110000 - DNA, 77 bp, Homo sapiens
ataatctcagtgggcgtaataatcgccgcatggtcaaaatgaactgcgcggcgatgcctgccggattgctggaaagc

SEQ ID NO: 110001 - DNA, 143 bp, Homo sapiens
agctgctgctcggcaatatggggatggcaggcggcggcgttaacgccctgcgcggtcactccaatattcaggggctgacggacctggggctgctgtcgcaaagcctgccaggttacatgacgctgccaagcgagaagcagacc

SEQ ID NO: 110002 - DNA, 116 bp, Homo sapiens
tgctttttcaggttattgcagggggttgaaatgttacgtattgcggacaaaacgtttgattcacatctgtttaccggcacagggaaattcgcttcttcacaactgatggtggaggc

SEQ ID NO: 110003 - DNA, 83 bp, Homo sapiens; identical to SEQ ID NO: 109946

SEQ ID NO: 110004 - DNA, 85 bp, Homo sapiens
tgcctccaggcagcgtgccctgccatatcgttaattcttcagaagcgttcgtacaacttgctcgccagggcaccacctgctgtat

SEQ ID NO: 110005 - DNA, 73 bp, Homo sapiens
tgaagagaatgcgctcggcgaccatagccgggtggaaaggatcgccacggaaaagctgcaaatgcagcatgtt

SEQ ID NO: 110006 - DNA, 101 bp, Homo sapiens
tcgatcgcggcaagttggtggcctatccagggaattacgaccagtacctgctggaaaaagaagaagccctgcgcgtggaagaattacaaaatgccgagttc

SEQ ID NO: 110007 - DNA, 117 bp, Homo sapiens
accgtgccgccgatggtacgaatggatgtatcgccagatgttgtattcgaggctacaccaaacctgtttaccctcgatggtcgcgtggatgtcccttgggcgcgcatcgtggtgcac

SEQ ID NO: 110008 - DNA, 98 bp, Homo sapiens
gaacaacaatggcaggcgattatcgccgaaggtttaggtgcgcagtatggcgacgcggtgccgctgtcactattgcgtgatgaactggcacagcgtct

SEQ ID NO: 110009 - DNA, 96 bp, Homo sapiens
gaatacaccgctggtgaaccgcgccacacagggggtttatcctcccgcgtctacagttaaaccctatgtggcggtttcggcattgagcgccggggt

SEQ ID NO: 110010 - DNA, 110 bp, Homo sapiens
tggttaaaaccatgcgtgcttctatctgggcgctggggccgctggtagcgcgctttggtcaggggcaagtttcactacctggcggttgtacgatcggtgcgcgtccggtt

SEQ ID NO: 110011 - DNA, 122 bp, Homo sapiens
aggacgttttgctaccgctttgggaaatgcgtgaggaaccggtgaaggggattacctgcatcgatcttagccgtgtctcccgcgtggatacggggggactggcactgctgctccatcttatc

SEQ ID NO: 110012 - DNA, 130 bp, Homo sapiens
tgatgtatcgcgcatttgaagtgctgccgacgatggtaatgactccgtatgctgcattccacaaagagctgcacggtatgaccgaagaagtttacctcgacgaaatggtaggtcgtattaacgccaatat

SEQ ID NO: 110013 - DNA, 91 bp, Homo sapiens
tggctgcgccggacatcatcgttcgtaacgaaaaacgtatgctgcaggaagcggtagacgccctgctggataacggtcgtcgcggtcgtgc

SEQ ID NO: 110014 - DNA, 113 bp, Homo sapiens
cgaaactccccggtgttgaagagtacattaagttgggcgcagtacctggcggcactgaacgtaactttgccagctacggtcatctgatgggtgaaatgccgcgtgaagtgcgc

SEQ ID NO: 110015 - DNA, 105 bp, Homo sapiens
gaaagacggttccgtagttgttctgggttacaccgcccgcatcggttctgacgcttacaaccagggtctgtccgagcgccgtgctcagtctgttgttgattacct

SEQ ID NO: 110016 - DNA, 111 bp, Homo sapiens
ttcaaccctaatttgttcccttatgagaacatggaaggcaagattgatcgcccggaagagtatgccgatattgccactaagtgtgtgaccaacttccgtgagaagaatcgc

SEQ ID NO: 110017 - DNA, 96 bp, Homo sapiens
ggaactgctcggtggcccggacagcatcatgatcgggcgcgtgctatggcaagagtttttcaataaccgcgactggccggtggcctcggcggtagc

SEQ ID NO: 110018 - DNA, 109 bp, Homo sapiens
tggcaccgggcgtgctgaagattgttaaggtatatctggcggttaaacgccgtatccagcctggtgacaagatggcaggtcgtcacggtaacaagggtgtaatttctaa

SEQ ID NO: 110019 - DNA, 91 bp, Homo sapiens
tggctgcgccggacatcatcgtacgtaacgaaaaacgtatgctgcaggaagcggtagacgccctgctggataacggtcgtcgcggtcgtgc

SEQ ID NO: 110020 - DNA, 110 bp, Homo sapiens
gatgccatcaaacttgaccaggtttttgttcgagatattcacaaacaacctgtctcgcagtcactggtccgggcgatcgtcgctgtggcccaggcattgaatcttcaggt

SEQ ID NO: 110021 - DNA, 83 bp, Homo sapiens; identical to SEQ ID NO: 109946

SEQ ID NO: 110022 - DNA, 144 bp, Homo sapiens
gctgaggtaggcttcccgtactttggtggcgacggcacggaacacttcaacaaagtggaactggaaaacgtgctgctgcacaacctgccggtgaaacgcctgcaactggctgatggcagccccgccttggtgaccaccgtttat

SEQ ID NO: 110023 - DNA, 91 bp, Homo sapiens
tggagattcgcggccctggcgaattgttaggcacgcgtcagacgggtaatgctgaatttaaagtggcggatttactgcgcgatcaggcgat

SEQ ID NO: 110024 - DNA, 92 bp, Homo sapiens
tgatcgacccttcggtacagggaaccatttccgtacgcagtaatgatacgtttagccaacaggagtactaccagttctttttaagtattctt

SEQ ID NO: 110025 - DNA, 364 bp, Homo sapiens
  misc_feature (1)...(364): n = a,t,c or g
gcccctcccaggggatttttaaaacccccggttcaagaaggggaagggcttctttttaaggccggaagcttttgtgggggggaaaattggtcccctttttggatgggggggttttgccccaaagaaaaaaccctttcccnnnnnnnnnnnnnnnnnnngaaacaaagtttccctttgttgcctaggctgcaaggcaatggccccattttgggtccctacaaagtttgccctccggggtccctccctttttctgcctcaacctcctgagtaagtggggatacagggggnnnnnnnnnnggccgggtaaannnnnnnnnnnnnnnnnnnnnnnnnnnnnnnnnnnnnnnnnnnnnnnnnnnnntat

SEQ ID NO: 110026 - DNA, 73 bp, Homo sapiens
tcgattatctccggcagttcgacagggagtgtatcgaacgaaatctcagtccaggcggcagtgctgacctact

SEQ ID NO: 110027 - DNA, 89 bp, Homo sapiens
gccaacgaacccggcacttatgacggtatctccgccagctacagcggcccgggcttctcaggcatgaagttcaaagctattgcaacacc

SEQ ID NO: 110028 - DNA, 83 bp, Homo sapiens; identical to SEQ ID NO: 109946

SEQ ID NO: 110029 - DNA, 379 bp, Homo sapiens
gttggcatcggttagtgctctgttagccgaagctctcgtactcaaactacgcaagcagtcggtagccgcaacgttgaaagataactcaacattgctgacaggcttattgctggcggtaagtattccccccctcgcgccatggtggatgggcgtgctgtgtaccgtgtttgcgaagagcatccctaaccattggaaaggctgtgtaagatacaacacgctgagtacgccgcagggtccgccggatgcgcgagggctgcatgcaccaccaacgattgaggtcacatagggaagctggcggacctaattattgtcttgcataagttgacgggactatgagcgaacactaagttctatcagtaaacgattgtggagagtgggg

SEQ ID NO: 110030 - DNA, 112 bp, Homo sapiens
atttttctgatgctgcgcctcggtaccggcgacccggcgctcgattatttgcgtctgtctaacctgccgccgacgccggagatgctggcctctacccgcaccatgctggact

SEQ ID NO: 110031 - DNA, 81 bp, Homo sapiens
gctttcttgctacatgaacataaatcctgcggcgtcttctattcactacaaaggccgcaagttaccccattttgacgcagt

SEQ ID NO: 110032 - DNA, 158 bp, Homo sapiens
tgtctggcgcatctgcgttttcgtgcagcgatgcgacgtcaggggcgtgaatcacagtttaaggcgctgctctatccgttcggcaactatctctgcattgccttcctcggcatgattttgctgctgatgtgcacgatggatgatatgcgcttgtcagc

SEQ ID NO: 110033 - DNA, 110 bp, Homo sapiens; identical to SEQ ID NO: 110010

SEQ ID NO: 110034 - DNA, 108 bp, Homo sapiens
atttacctctccgctgtgtgaattcgacaacgtccttctgacgccacacattggcggttcgactcaggaagcgcaggagaatatcggcctggaagttgcgggtaaatt

SEQ ID NO: 110035 - DNA, 80 bp, Homo sapiens
tggtgcagccgttcgtggaaggtctggccgatatcgttgatatggccgcgattcagaaagcgggcctgacgctgggcgtt

SEQ ID NO: 110036 - DNA, 160 bp, Homo sapiens
tctgactcgtctttgcatgcacatgcaaagcaagctgctggagaaccgcaataaaatgctgaaggctcagggaattaacgagacgttgtttatggcgttgattacgctggagtctcaggaaaaccacagtattcagccttctgaattaagttgtgctctt

SEQ ID NO: 110037 - DNA, 93 bp, Homo sapiens
tgaataacctcacatttgatagacagtacgattttattctttcgactgtggtgctgatgttccttgaggctaaaaccatccccgggttgattg

SEQ ID NO: 110038 - DNA, 157 bp, Homo sapiens
gaaactcccttatctggctcaaagctggattgaagatgaaaagggtaacaagatcacctcgccgttaactgtgctgccgccagtgcaccgcatcgattcaatgatgaacgggcaggtaaaagtgcagggaatgccggatatcaacaaattgccagcc

SEQ ID NO: 110039 - DNA, 182 bp, Homo sapiens
gacttcgacgtgcgtaaggcgcgtccttattctggctatgaaaacttcgactttgaaatcccggtgggtggtggcgtttctgactgctacacccgcgtaatgcttaaagtgcaagagctgcgccagagtctgcgcattcttgagcagtgcctcaacaacatgccggaaggcccgttcaaagc

SEQ ID NO: 110040 - DNA, 200 bp, Homo sapiens
  misc_feature (1)...(200): n = a,t,c or g
ttaaagggttagagcttgatgtacgtattttgctcgccaattacagcaatagtaatggctgtcagtccccgtggatggaggaccaacccccccatgcctggggaagcatggttctaaaaaatataatacgtgaaacggatgaagccggtaaaggtcggatccccgggtggccgngctcaanttaatgggcatggaccccn

SEQ ID NO: 110041 - DNA, 90 bp, Homo sapiens
aacaacgatccgcagattggcgataagctgaaagtcgtgttcatcccgaactacagcgttagcctggcgcagttgatcattccggcggca

SEQ ID NO: 110042 - DNA, 133 bp, Homo sapiens
gaatcgtccattcgaaccacctcactgaggtggcatatagactataccgggatcaaaaactgaagctgtatctgtgggttgaccaaactttaaaatctgatggcaccctacaggaacatgacggtatctgcga

SEQ ID NO: 110043 - DNA, 111 bp, Homo sapiens
accgggagaacccgggtaaatccttagcgttagaaatccataggcaggggagtcccttgtctttgacattaatcccggagaggaatccgggttatggggcatcgagtggat

SEQ ID NO: 110044 - DNA, 577 bp, Homo sapiens
  misc_feature (1)...(577): n = a,t,c or g
cgtttcggaccatcgtgaatccaggtttccagaaaccctccatggtgaataggaattccagcatggtgtcaaaaccctcctgagctcgaaataacacagggcttttggaaaagcaagtatcgggcgccatatcaagttagcaaagtccggagatctccaaggggagaatttccagaatttctttcttgattggtccacgctgcccctaacgcatctgccccctttggagagtgggagggagcttccacaaatcccatcctgtgcagaaggcaggcctgtggcctgggagccggggaccagggcagacgggggacgggagtgaaggatgcggccctgggggctgcggtcgggaagggtcaggccaggccccagggccgctgagctcgcgagctgctgggaccctcctccgagcacctgccaacggtgacttgcgctgcttttcaggaagaaagaaaggtcccgcctccaataccaaagaagcctcccaaggggaagtttcccatcacaagagaaaaatccctggacctgcccgacagacaacgccaggaagcccggaggcgccccatgcccgccaant

SEQ ID NO: 110045 - DNA, 111 bp, Homo sapiens
ttttgttcacgctacaactggagacgccgcatgagggttaaacgctggttgttggcaggtattgcattgtgccttttaaccggtatgcgtgacccttttaaaccgccggaa

SEQ ID NO: 110046 - DNA, 83 bp, Homo sapiens; identical to SEQ ID NO: 109946

SEQ ID NO: 110047 - DNA, 98 bp, Homo sapiens
gctctttcccttcggctgggcaaaattgctgtggcgtttgaaagtcagcggtgtgcgaactgcgcgagtaccgctgatgggcgtgcgcgccgagtatc

SEQ ID NO: 110048 - DNA, 103 bp, Homo sapiens
gcaggcatacccactgactacgccatcgggcaaaattgagatttattcgcaggcgctggctgacattgccgctacctgggaattgcctgaaggcgatgtgatc

SEQ ID NO: 110049 - DNA, 83 bp, Homo sapiens
tggctctgaaggggctacgtgttttgctcgtggaaggtaacgacccccagggaacagcctcaatgtatcgcggatgggtccac

SEQ ID NO: 110050 - DNA, 97 bp, Homo sapiens
cgcatgttactcacttcgacaaaaccgatatcaccgagttggaagcgttccgtaaacagcagaacgaagaagcggcgaaacgtaagctggatgtgaa

SEQ ID NO: 110051 - DNA, 67 bp, Homo sapiens
tccagaacccttacgggtcgctgaatccgcgtaaaaaagtcgggcaaattcttgaagagccgctgct

SEQ ID NO: 110052 - DNA, 128 bp, Homo sapiens
tcgttcctggcgtcgtcacgctcaccacactgcataaagtgctgcaaaatctcctcgatgaaaaagtaccgattcgcgatatgcgcaccattctagaaacgctggcggaacatgcgcccatccaaagc

SEQ ID NO: 110053 - DNA, 215 bp, Homo sapiens
  misc_feature (1)...(215): n = a,t,c or g
taatgtagctaacgataaaataagaattatgagcgaaagcaaagagaatattaaccactattctctgatggattttatgaatgtagagcatagcctctggaaatggtcaaatgatcaccatattantcatnnnnnnnnnnnnnnnnnnnnnnnnnnnnnnnnnnnnnnnnnnnnnnnnnnnnnnnnnnnnnnnnnacatgtgatctagtatcata

SEQ ID NO: 110054 - DNA, 69 bp, Homo sapiens
tggcgggctatgccgcgaatctgaaagcctccggcatgaagtgcggctacgccagcggctggcagggct

SEQ ID NO: 110055 - DNA, 178 bp, Homo sapiens
ggcattatgcgccagagggatccgtccagggctgattaagcatacgcaccatgatatggatgttgataagccaggcaaagatagctatgagctgcgcaaggttggcgcggcacaaaccatcgttgccagccagcaacgatggtccttgatgacggaaacgccagacgacagaagagct

SEQ ID NO: 110056 - DNA, 147 bp, Homo sapiens
ggggttgctgcccataaaggtggcgtttacaaaccctcagtttctgttcatcttgctcaggatctggctctgaaggggctacgtgttttgctcgtggaaggtaacgacccccagggaacagcctcaatgtatcacggatgggtacca

SEQ ID NO: 110057 - DNA, 103 bp, Homo sapiens
tggcgctggcctactcaccaggcgttgccgcaccttgtcttgaaatcgaaaaagacccgttaaaagcctacaaatataccgcccgaggtaacctggtggcggt

SEQ ID NO: 110058 - DNA, 96 bp, Homo sapiens
ggtaacgtcatcaaggtccagttccttaatattcgtgactggccgtttggtgcagctaccagcattacgctgactatcgtaatgggcctgatgttg

SEQ ID NO: 110059 - DNA, 91 bp, Homo sapiens
tgcaaaaacacaaagggccgttgaacgtcttcgagaatatcgaaatgccgctggtgccggtgctttcacgcattgaacgtaccggtgtgaa

SEQ ID NO: 110060 - DNA, 83 bp, Homo sapiens; identical to SEQ ID NO: 109946

SEQ ID NO: 110061 - DNA, 101 bp, Homo sapiens
ttgtcgggcgctgtcatgtatcgttacatgaaacgcagccactgaggcaaatggaggaaaatcgcccccgtttgcaggggacgacggaggtgacgcctaaa

SEQ ID NO: 110062 - DNA, 108 bp, Homo sapiens; identical to SEQ ID NO: 71853

SEQ ID NO: 110063 - DNA, 657 bp, Homo sapiens
ccccccaccattccgtaaatgtttccagaacaactggatccaaagttgcaaaaccctccagtgttgaatagggatgtccagcgatggggtccaaaaccctcgccatgctcggagatgacacagggctttgggaagcgcaggaatcgggcgacaatgtcagactagcgcagggttgcagaagtcgcaaggtcggaattctcaaatttttttttcttatttggtcacggctgcccttacgccttctgcccccctggaagagtgcgagggagcttccacaaatcccatcctgtgcagaaggcaggcctgtggcctgggagccggggaccagggcagacgggggacgggagtgaaggatgcggccctgggggctgcggtcgggaagggtcaggccaggccccagggccgctgagctcgcgagctgctgggaccctcctccgagcacctgccaacggtgacttgcgctgcttttcaggaagaaagaaaggtcccgcctccaataccaaagaagcctcccaaggggaagtttcccatcacaagagaaaaatccctggacctgcccgacagacaacgccaggaagcccggaggcgcctcatggccgccaagcgagcggcgtccttccggcagaattccgcctccgagcgcgcggacagcatcga

SEQ ID NO: 110064 - DNA, 132 bp, Homo sapiens
  misc_feature (1)...(132): n = a,t,c or g
tttatcaagcgaaatgcccgcaggcgtcagcggagccggagcattacgaggcgttgtttgtttacgcgcaaaagcggctggataaatgtgtgttcggggaagagaaaccagcntgtaagcagtgtncggngc

SEQ ID NO: 110065 - DNA, 179 bp, Homo sapiens
ccgacctgaccctgctgcatttccgtaacactacggaagccggggccaccagcggttcgcgcgataaaggtctgcacggtaagctgaaagcgggtgtctgttattcgatgctccaccccattaactcgcgccaccagcgcgtggtggtcggtgtgcgtctacaacaggttgccggacgc

SEQ ID NO: 110066 - DNA, 367 bp, Homo sapiens
tgctattccaggtggtgttttacgcgcaaatggctcaggaagaagggcgctttgactttaatgatatttgcgctgctattagcgatgaattagagcgtcgccatccgcatgtttttggtgatagttctgccgaaaacagtagtgaagtgcttgcccgttgggagcaaatcaaaaccgaagagcgcgcgcagaaagcgcagcattcggcgctggactatattcctcgtagtttaccggctttaatgcgtgcgcaaaaaatccagaaacgttgcgccaacgttggcttcgattggatgacgctgggtacggtagtcgatatagtatacgaagagatctccgggtacggacctcgaatggtaatgagatc

SEQ ID NO: 110067 - DNA, 104 bp, Homo sapiens
atcatcatcgcaacaattctccactcccacccacaccccctgacgatgaatcagacgacactccagttcccccaactcctggcggagatgagataataccggac

SEQ ID NO: 110068 - DNA, 70 bp, Homo sapiens
tctttcgcgggaagaacttatccgtcttatcgatgtgtgcagaaatcagcaagcaaaaaatttatggtgt

SEQ ID NO: 110069 - DNA, 64 bp, Homo sapiens
gccagagaagtggtatctggtggcgcaccctggtgtaagtattccgactccggtgatttttaaa

SEQ ID NO: 110070 - DNA, 118 bp, Homo sapiens
atatggataaggcaggcactgtagatggcaactatgtaaactatagtggttttgtctattacaacaacaccaatggtgatttcgatcagtcctttaacggcgataccgttaacggcac

SEQ ID NO: 110071 - DNA, 82 bp, Homo sapiens
agatctcattgaccgtgaagggatgcgggtgctgtatgaaaaacaggacactgctggtagcgagttactgccacaagcaaaa

SEQ ID NO: 110072 - DNA, 647 bp, Homo sapiens
  misc_feature (1)...(647): n = a,t,c or g
atatgttttcctacacgatcccctttatccttccccgaaataaggggctccacctcccttcaccccgttttttgggtccgggggggcaaaaaggggttcggggggctcaaaaaggaacacagggagggagtcccggggggtttcacggggtcaggggggggttcacggggggtccgagaaaattccccaggggtccgggggggggtccnnnnnnnnnnntctgggtaagtctccgggggtctgggtccgggtccgggggggtctccnnnnnnnnnnnnnttttgaaaaacggnnnnnnnnnnnngccccaagtggaaggcaaaggggcaaacacgggtcccttcaacggttgctttttagggtcaaaagatcctcccctttcaacctcctgaaaaaatggccccccaagggggaacccccccttttaaaaaaattttggattttttgtnnnnnnnnnntttttttattttgccccagaaggtttttaacttttaaggttagnnnnnnnnnnnnnnnnnnnnnnnnnnnnnnnnnnnnnnnnnnnggtgaaccccccagcccaaccagcatattttttaacctccaannnnnnnnnnnnnnnnnnnnnnnnnnnnnnnnnnnnnnnnnnnnnnnnnnnnnnnnnnnnn

SEQ ID NO: 110073 - DNA, 79 bp, Homo sapiens
aaaaacgtatgctgtatctgttcgttgaccagatcataaaatctgatggcaccctacaggaacatgacggtatctgcga

SEQ ID NO: 110074 - DNA, 83 bp, Homo sapiens; identical to SEQ ID NO: 109946

SEQ ID NO: 110075 - DNA, 102 bp, Homo sapiens
gcggacctgatgatgccgtcaaccgtcgcatcagcctgctggtactgaacaaacaagccgaacaggccattttgcatgaaaacgccgaaagccagaatgagc

SEQ ID NO: 110076 - DNA, 164 bp, Homo sapiens
caagaattgttggaaaccccggctattcgaaaactctggcgttaccgtggctctaatgtgttgggaaccatctatgaatggccgcccacaaccaccagagcgctggatacgctgcttcgtgaaattcagaacgcacgcgaacaacacagccgtcttgatacgct

SEQ ID NO: 110077 - DNA, 66 bp, Homo sapiens
gacgggttcgagttctgctgtgataacggagagagactgcgtgtcacgttcgcgctggactgctgt

SEQ ID NO: 110078 - DNA, 125 bp, Homo sapiens
agcggcgcggggaccaccaccaccagcctcgcgtttcgtaaaatattcgcgcagttaaatgggcatgcggctgaggtggaaggcgacagttttcaccgttacacccgcccggaaatggacatggc

SEQ ID NO: 110079 - DNA, 79 bp, Homo sapiens
aaaaacgtatgctgtatctgttcgttgaccaaatcacaaaatctgatggcaccctacaggaggatgacggtatctgcga

SEQ ID NO: 110080 - DNA, 337 bp, Homo sapiens
tgccaaaaccgaaacacaacccattcctgagcctggtgccagaacaaggtgtgaaactgacgccgcgtcattatgcctatctgavaatttctgaaggctgtaatcaccgctgcaccttctgcattattccgtctatgcgcggcgacctggtgagccgtccgattggcgaagtgttaagtgaagcgaaacgtctggtagatgcgggcgttaaagagattctsgtgatctcgcaggatacttccgcctatggcgttgatgttaaacatcgtactggcttccacaacggcgagccggtaaaaaccagcatggtcagcctgtgcgaacagttatcgaaact

SEQ ID NO: 110081 - DNA, 98 bp, Homo sapiens
tggcactgcctggttcacaagaacccgctgaagttaccttgcgtaaagtcatctccctgcctgccccgctgcgcggttctgcggtttatcgtcatggc

SEQ ID NO: 110082 - DNA, 72 bp, Homo sapiens
ctcatcaatgcagctcggcagcaacgtgccgtttcctcgccagctcactgtcactcgtgacggcgatattat

SEQ ID NO: 110083 - DNA, 83 bp, Homo sapiens; identical to SEQ ID NO: 109946

SEQ ID NO: 110084 - DNA, 87 bp, Homo sapiens
tggcgtgggatggcactggtgaacctaaacttctggaaaataacgccgatacgccaacgtcactatacgaggcggcgttctttcagt

SEQ ID NO: 110085 - DNA, 101 bp, Homo sapiens
tcccgttcgttacgtcagcaaggggaactggtggggcagcgtttgcaactgcgccagcaacaacagcaactcagtcagcagatagtcgctgccgccgatga

SEQ ID NO: 110086 - DNA, 74 bp, Homo sapiens
aaacgtttgccggataactccgcaccgtacacttccaccattgttttcctggtacgtaagggaaatccgaagca

SEQ ID NO: 110087 - DNA, 88 bp, Homo sapiens
aagcctttgcttttgattttcagcaaaaccaacatgaccttaatctgacctggcagatcaaagacggttactacctctaccgtaaaca

SEQ ID NO: 110088 - DNA, 83 bp, Homo sapiens; identical to SEQ ID NO: 109946

SEQ ID NO: 110089 - DNA, 91 bp, Homo sapiens
acttccagtatctgttcctgccgatgtgtggtgcgctgaccgttggtgcgctgtgggttaacctggaagaaagctcaatggttctgggtct

SEQ ID NO: 110090 - DNA, 603 bp, Homo sapiens
aaaccggcagtgttaataggaagtccaacgatggtgtccaaaccctcgcgatgtcggaaatgacacagggtttgggaagcgcaggaatgggcagcaaatgtcagactagcgcagtggctgcagagtccaaaggtggaatttggcaaaatttttttcctattggtccacgtggcccctaaaggctttgccccccctggaagagtcgaagggatttttccccaattcccatcctgtgcagaaggcaggcctgtggcctgggagccggggaccagggcagacgggggacgggagtgaaggatgcggccctgggggctgcggtcgggaagggtcaggccaggccccagggccgctgagctcgcgagctgctgggaccctcctccgagcacctgccatcggtggcaaggggtgttattcaggaagaaacaagggtttcgcattcaataccaagtaagcctcccgagagtaagtttcccgtctcaagacaggtatccttggaagtgtcccaccgctatgggcaggaagggcggaggcgcctcatgagcgccgaggtatcggcgtccctttgtcagaatccatcttccgagcgcgcgcacagcatcatgg

SEQ ID NO: 110091 - DNA, 81 bp, Homo sapiens
ggagacgcagagccagtattaaacgccattgccgccaataactggcaaccggaggccatatttctcacccaccatcaccac

SEQ ID NO: 110092 - DNA, 107 bp, Homo sapiens
ggtatcttcgctggggattcgtcctcgtgggccgcaaattgaacctgtactggaaaatgtgcagccaaactcggcggcaagcaaggcaggtttgcaagcaggcgaca

SEQ ID NO: 110093 - DNA, 83 bp, Homo sapiens; identical to SEQ ID NO: 109946

SEQ ID NO: 110094 - DNA, 83 bp, Homo sapiens; identical to SEQ ID NO: 109946

SEQ ID NO: 110095 - DNA, 440 bp, Homo sapiens
  misc_feature (1)...(440): n = a,t,c or g
cccctgggaggtgggactccggactggcggttttggaatgtggggcagatggtcccaacaggcccgaggcccctggtgtcaggcatcagcagcttcctcctcagagtccaggtctggcggtgccttcgtgcccacggtctttactccctgcgccgggaccaacaatgccctgggtcctgagggctgcttttgacctgtgcggggagcagccccaacttgggggggggtcttacaggcttgtggacctgccttttcctgacaattcaggtcagagtctcaagacccctgggaggggccccaaacaactgtgaggcctgggtgctctgagcccactgaccgctagccttgtgcttggccccagcggcaagcctgcacgagctgtgtgctgccaaagtgtcagaggtccttcataacagagtgcacaggacggaggaagtgan

SEQ ID NO: 110096 - DNA, 385 bp, Homo sapiens
  misc_feature (1)...(385): n = a,t,c or g
ttaaatttgattatgggataaaggtcaaatcattttggacagctgcagacgggcacgaggtcttctacgggatcatgtttgatgcaggaagcactgacacccgagtacacgtcttccagttcacccggccccccagagaaactcccacgttaacccacgaaaccttcaaagcactgaagccaggtctttctgcctatgctgatgatgttgaaaagagcgctcagggaatccggnanctacttgatagtgtttttggggacatggccgccggaacaacgttttttaaagggctcctgtacttcttttttctcacttttacaacagtggggaccgaggggggtggttaaaaacccgttgtggtgtaaacaactttcctccccgccgg

SEQ ID NO: 110097 - DNA, 458 bp, Homo sapiens
  misc_feature (1)...(458): n = a,t,c or g
aggctgtgcgaattnnngtgtcgacgaattcgtgcgnggaggccggggtggggccgaccggagcggcggattccattagaccggctgccgcctgctccccggaaagggggactcgtctccgagcgtgtggcggatcgcgcggagcatgaaactcccacgttaacccacgaaaccttcaaagcactgaagccagggctttctgcctatgctgatgatgtagaaaagagcgctcagggaatccggcaactactggatgttgctaaacaggacattccgttcgacttctggaagggcacccctctggtcctcatggacacagctggcttacgcctgttacctggagaaaagggccataagttactgcagaaggtgaaagaagtatttaaagcatcgccttttcttgtaggggatgactgcgtgtccatcatgaacggaacagatgaaggcgtttcggcgag

SEQ ID NO: 110098 - DNA, 417 bp, Homo sapiens
tttcgtgtggcacccggtggaaccgaggagaacgtggagcgccgggagcggcgaatatggacgactacagcctggatgagttccgtcggcgctggcaggaggagctggcgcaggcccaggcgccgaagaagcggcgacggcccgaggctgccgagaggcgggctcggcggccggagaatgaaatgaatgatgtgcctttctttgatatccaactgccttacgaattggcaatcaatatatttcagtatctggacaggaaagaactaagaagatgtgcacaggtgagcaagacgtggaaggtgattgcagaggatgaggtgctgtggtacaggctgtgccagcaggaagggcaccttccggatagcagcatctctgactattcttgctggaagctcatcttccaagagtgccgggccg

SEQ ID NO: 110099 - DNA, 528 bp, Homo sapiens
ggcacgagtcagggtccagttggattccctggaccaaaaggccctcctggaccacctgggaaggatgggctgccaggacaccctgggcaacgtggggagactggatttcaaggcaagaccggccctcctgggccagggggagtggttggaccacagggaccaaccggtgagactggtccaataggggaacgtgggcatcctggccctcctggccctcctggtgagcaaggtcttcctggtgctgcaggaaaagaaggtgcaaagggtgatccaggtcctcaaggtatctcagggaaagatggaccagcaggattacgtggtttcccaggggaaagaggtctttctggagctcagggtgcacctggactgaaaggaggggaaggtccccagggcccaccaagtccagttggctcaccaggagaacgtgggtcagcaggtacagatgagccaattggtttaccagggcgcccgggacctcagggtcctcctgatccagctggagagaaaggtgctcctggagaaaaggtc

SEQ ID NO: 110100 - DNA, 436 bp, Homo sapiens
tttcgtggtcccggagggctcgatccgcatctacagcatgatgttctgcccgtttgctgagaggacgcgtctagtcctgaaggccaagggaatcaggtgggcacccaggcgggggacgctccccgagccgttcgggagcctgctgcaggcggcggggtggggtggtgtctacaatgagttctaccgcacttttgcctccagatcatatacgacctcgactaccatcaacgatattgtgaatggacacccataatatattgcatatcacgcttgttcctgcgatatttatcatgggttatgtttggctgatcttattttgacactctgcttattatggaaaggctaatcggtgatgcctcaagatgcctgttcctcgattttcccacggaggatgaacggtggtaagggatttaattttgatttacagttgttaatg

SEQ ID NO: 110101 - DNA, 416 bp, Homo sapiens
tttcgttcctcgcaaggtgcagatccgctcgctgctcagcctggaggacatcgaccccgacgtgctggacagcatgcactcactgggctgcttccgagaccgcaacaagctgctgcaggacctgctgtccgaggaggagaaccaggagaagatgatttacttcctcctcctggaccggagagaaaggtacccgagccaggaggatgaggacctgcccccccggaacgagatagaccctccccggaagcgtgtggactccccgatgctgaaccggcacggcaagcggcggccagaacgcaaatccatggaggtgctcagcgtgacggacggcggctccccggtgcctgcgcggcgggccattgagatggcccagcacggccagagtaaagcaatgttcagtaaaagcctggatatcg

SEQ ID NO: 110102 - DNA, 449 bp, Homo sapiens
  misc_feature (1)...(449): n = a,t,c or g
tgctccgtaattcccggnnnnnnnacctcgtccgtgttgcaggctgggaaggcgctgggtggagatgactttgagaacgaggaggagctgggggatgaggccatgatggccctggaccagagcctcgccagcctctttgccgagcagaagctgcgtatccaggcccggcgagacgagaagaacaagctgcagaaggagaaggctctgcggcgcgacttccagatccgggtgctggacctggtggaggtgctagtgaccaagcagcccgagaatgccctggtcctggagctgctggagccgctgctgagcatcatccggcgcagcctgcgcagcagcagctccaaacaggagcaggaccttctgcacaagacggcgcgcatcttcacgcaccacctgtgccgtgcccggcgctactgccacgacttgggtgagcgcgcaggggccctgca

SEQ ID NO: 110103 - DNA, 415 bp, Homo sapiens
tttcgtggttatttttctcctgaagatgcctctgtggggaatgttgggggtcttgtgggaggccccaagctctgactcctctgtctttccagctctctatgaaaggcccccctggtccagtggggctcactgggcgcccaggccctgtgggtccccgaggcctgcagggacctcatggaccccctggccgagtgggcaagatgggccgccctggagcagatggagctcggggcctcccaggggacactggacctaagggtgatcgtggcttcgatggcctccctgggctgcctggtgagaagggccaaaggggtgactttggccatgtggggcaacccggtcccccaggagaggatggtgagaggcgagcagagggacctccatggcccactggccaggctggggaagccgatcc

SEQ ID NO: 110104 - DNA, 399 bp, Homo sapiens
tttcgtgggacctgtgaagctctgggggatgaacgtagggcacttagcttcttccaccagaagggcctccaggattttgacactctgctcctgagtggagatggaaatactctctacgtgggggctcgagaagccattctggccttggatatccaggatccaggggtccccaggctaaagaacatgatactgtggccagccagtgacagaaaaaagagcgaatgtgcctttaagaagaagagcaatgagacacagagtttcaacttcatccgtgtcctggattcttacaatgtcacccatctctacacctgcggcaccttcgccttcagccctgcttgtaccttcattgaacttcaagattcctacctgctgcccatctcggaggacaaggccatggag

SEQ ID NO: 110105 - DNA, 401 bp, Homo sapiens
  misc_feature (1)...(401): n = a,t,c or g
tttcgtggaaggggagagggaaacgtgccctctgtttgatccttgttttgtgacattcnnnnnnnnnnngttttttaaccaaaagcaacccacccgggattttttaaaaacctggaaaaaaaacggaccctcctttatggtccgcccttttccctttaagggcccacccccccaacccannnnnnnnnnnnnnncccctttaagaaacccggcccaaagcggacgaggctggcccaagccggggagggggccccagcggaacccccagcccttattttcgggttcgggtaagttaagccccgccccacccaaattgttttgccaaaatnnnnnnnnnnnnnnaaaaacctaaaacccccgaaaaacccattgcccgggggaaaaaggcagggggggtgggg

SEQ ID NO: 110106 - DNA, 431 bp, Homo sapiens
gagtgacgaccggtttggagttaccgggtcgacgatttcgtcctggctcttgctggcctggtcagcgtctctgcttctagggtcttctcacagactggggaggtccgtggggcccctggtccttctgcagaggccacagcactgggtccctccctgttgcatatcctcttggccctgctcccaggcggagggtggcccggcctccgttgcccttcctgaaaggtttgttctggggagaaggcaaggactaaggcgtctccccttccgccccagcacatcctggagctggaagccatgctgtatgatgccctgcagcaggaggccggggctaaagtggctgagctgctgtcagaggaggagcgcgagaagctcaaggtggccgtggagcagtggaagcgccaggtcatgagtgagctgcgcgagcgggacct

SEQ ID NO: 110107 - DNA, 400 bp, Homo sapiens
tttcgtgagacgcatcacctacgctgctcgccgcttctacttctcctcaagggaaatgaaggaggggggcctggctcctggccggcgtctgaggactggcacccgcctgtccctggctcgaatgccccctccactcccgacccggaaggagtactccctggctggggcactcaaagctggctacaaagagacccgacccagtgagcggacacagatgatggagctcaatgaccgctttgccaactacatccaaaaaggtcgcttcctgaaacagcaaaccaaagcgctgactgctgagctgaaccaactgcgggccaaggaacccaccaagctggcagacgtctaccagactgatctgcgagagctgccgctagagctccatcaactcaccgccaacagg

SEQ ID NO: 110108 - DNA, 400 bp, Homo sapiens
tttcgtcaaggggttagaagaaagcattctgtcttttcttccttacctgtgataatagctctatcccatgtttttcttgagttatgctgactgctaatctatatgtaattatgaggagctgtgtactctcaatcaaatttcttctaagttcttaggtccaaacaggcacaccaagtatttaagagtccagtcatgaaaaggagctagcagagtgggaactgtgaggaccaggggtagctggtggtgctgacttcagcactcctgagtcctggccctccctctgtcccaggaggaagaggaggtagaacgggaaatcattaaacaggaagaaagtgtggatcctgactactgtgagaaattgctgcggcaccattatgagcagcagcaagaagattctagt

SEQ ID NO: 110109 - DNA, 424 bp, Homo sapiens
tgtactggatttggcccagaggttcttcaagcagaacattttacagtttatccagggggctgagtatgaaggaaaagacctagaggatcaggaaactttagcatttccaggtcatgtggctgcctttaagggtgatttggggatgcttaagaaattagtggaagatggagtaatcaatattaatgagtgtgctgataatggatcaactcctatgcataaagctgctggacaaggccacatagagtgtttgcagtggttaattaaaatgggagcagacagtaatattaccaacaaagcaggggagagacccagtgatgtggcaaagaggtttgcccatttggcagcagtgaagctgttagaggagctacagaaatatgatatagatgacgaaacgaaatggtggatccgggaattcaggggcaat

SEQ ID NO: 110110 - DNA, 434 bp, Homo sapiens
ccctctcgcactctcaacaattcacagccgaccaaaacaaagcgcccctacgcaggcccaaacccctctcggaagcccagcgactgccctcggagccaaaagacacagaccccgacgagccacggcccgagctataggagcgcgcaggggctgcggggaagccccggcccggccgccgagtctccgctgatcaaatggactggcgagcgggagggcggagaggagaggggaccaggcaagcggagagggtggcaaagcccgtccgagtctgggcgggctccaagcccgcgggtcccgcgaacccagccgctctccaaaccttgccggcgtcggagtcgcagagccgtgagcaagcggggacaggggagggggagaaaaacaccccgaaaagacgagccccctttttttagtggcccaatatggcggtggaaggg

SEQ ID NO: 110111 - DNA, 417 bp, Homo sapiens
  misc_feature (1)...(417): n = a,t,c or g
tttcgtgatgcagatgcctcctgagccggcatctgtgttgagtcctggctgcccagaagagccaagtgtgacgccccctcgggtctgtgtggacaccaggccggtgttttcctctctccctgacaccccctccggtctgtgtggacaccgggccggagttttcctctctccctgtaggaaacgagcagatgaaagtggaaaactttgaagctgccgtgcatttctacggaaaagccatcgagctcaacccagccaacgccgtctatttctgcaacaggtaccagctcaaggcctgcccagggcaggggcggccgggtgcgggggcgtcctccgggatgcttagcagggacctgagatgggagaggcctctgcgctgtagatgagggatccattcaccggtggtctcagaccaggagn

SEQ ID NO: 110112 - DNA, 393 bp, Homo sapiens
cccaggtcaggtagaactagctgattttggatctgctccaatggcttctcctgccaactccttcgtgggcacaccttactggatggctccagaggtgatcttagctatggatgaaggacagtatgatgggaaagttgatatttggtcacttggcatcacttgtattgaattggcggaacggaagccgccccttttcaacatgaatgcaatgagtgccttatatcacattgcccagaatgactccccaacgttacagtctaatgaatggacagactcctttaggagatttgttgattcctgcttgcagaaaatacctcaggaaaggccaacatcagcagaactattaaggcatgaatttgatcgacgagaccggccactacgtgtcatacgaaa

SEQ ID NO: 110113 - DNA, 413 bp, Homo sapiens
  misc_feature (1)...(413): n = a,t,c or g
tttcgttctcgcagtctcagcccgggccgtgcaacggggaccttcgacaatgagattgtcatgatgaatcatgtgtaccgggagaggttccccaaggccacagcacagatggagggccgtctgcaggagttcctgacggcctacgcgcccggcgcccggctggcgctggctgatggcgtcttgggcttcatccaccaccagatcgtcgagctggcccgagactgcttggccaagtctggcgagaacctcgtcacctcccgctacttcctagagatgcaggagaagctggagcggcttctgcaggatgcccatgagcggtccgaccaggagggagtcaacttcatcgtccagcttgtccggaaactgctgatcatcatctcacggccagctcggctgctggagggtctggagtn

SEQ ID NO: 110114 - DNA, 458 bp, Homo sapiens
  misc_feature (1)...(458): n = a,t,c or g
gcattcccggtcgacgatttcgtcaccttccccgagaagccgcccccgtcgccaggggacagggcgcgggtcgggaccctgcagaacaaaagggtgttcctggccaccttcgccgcagtgctcggcaatttcagctttgggtatgccctggtctacacatcccctgtcatcccagccctggagcgctccttggatcctgacctgcatctgaccaaatcccaggcatcctggtttgggtccgtgttcaccctgggagcagcggccggaggcctgagtgccatgatcctcaacgacctcctgggccggaagctgagcatcatgttctcagctgtgccgtcggcggccggctatgcgctcatggcgggtgcgcacggcctctggatgctgctgctcggaaggacgctgacgggcttcgccggngggctcacagctgcctgcatcccggtgtacgtgtctga

SEQ ID NO: 110115 - DNA, 448 bp, Homo sapiens
  misc_feature (1)...(448): n = a,t,c or g
agtacctctaccggnctggaattaccgggtcgacgatttcgtcagatgtggggatgggagcagagcagcggggacaagctcaggcagagtgtagcagggttgccgtgccctggggagcccaggagaaaaacccagggctgcaggaaggcccaaggtggtggtgcagccccctccctggccttgttctcaggctgctctttggttctgtccatggcggngcacaggcagatgaggtttccccttcccagatctgcagctggggcctgaccctggctaaggtggtggcggggtcatgtcttcagggcttaggctctgtgaggccaggtgtggagcctcccttcgtcctggccgtcctgggacccgtcctggtggtttctgacccttcccgctgctgtctagaactgctttctggagtgtgcgtaccagtacgacgacgacggctaccagt

SEQ ID NO: 110116 - DNA, 401 bp, Homo sapiens
  misc_feature (1)...(401): n = a,t,c or g
tttcgtccagaccatccaagaagacagtgcaaccacctccgagagcctgcatgtgatggcgccacagaagagaccctcccacaggcacggatccaagtacctggccacagcaagtaccatggaccatgccaggcatggcttcctcccaagggacatagacacgggcatccttgactccatcgggcgcttctttggcggtgacaggggtgcgcccaagcggtgctctggcaaggactcacaccacccggcaagaactgctcactacggcttcctgccccagaagtcacacggccggacccaagatgaaaaccccgcagtccacttcttcaagaacattgtgacgcctcgcacaccacccccgacgcagggaaaggggagaggactgtccctgagcatatatn

SEQ ID NO: 110117 - DNA, 688 bp, Homo sapiens
tttcgtggccaatgtgggatcgatgtttcaatattggaagcgctttgatttacagcagctgctgagagaactcgatgccaccgcaacggcattggcgaaccggcaggatgaaggtgagcagtccagaaagcggcttatcgaacagagccgggagttcatgaagaacactccacaggggaggcgcgcgaccatcgtgttcgctttgaagggatcttagaatgctggagcatgttcaggcgacgctccgtgagcgcttcattttcatcagatgaacgcacgggcggcaaacaacccgtttctttccccagatgtcttcagccccatttccagcagaacgcatgccatcctgcaggctgtggggatgtggaaactgataggttgtctggatatatgaaagtcagagccaattccaggtgcagatactggacaagcttggtctgtaagaacacgtgggcaggtgtgtgggtgtctcagaccctcgagctcatcccagaccctgtcccatgtcagttagcaagccaccaaagtccataagggatcctgtggggtggaaggtccgcggggcctgcttccctgttgctggtgcaggcggagtgtctgaaggctgcacgcatctgggcatagcagtgcgcctaacgcttcttgtaaaacagacatttcgcctgctaagccttttaaatgcctctct

SEQ ID NO: 110118 - DNA, 427 bp, Homo sapiens
cgtcatccttcaaagaccgggaccacttccagctgggctcactgtcccacctgcttaatgccaaggccacaggctaccaggagctcccagactggcgggagcaagccccagacccatctgtgcgcaacgtggaggtacctgaatggaccaagtgctcaaatcgggagaagagaaaggagaaggaaaaccccttctactcggactctgagggggagtcaggccccacggagtccgcagacagtgaccctgagtctgagagtgaatcggacagtaagagcagcagtgggagcggctctggggagtccagcagtgagtccgacaatgaagaccaggatgaggatgaggagaaagggagaggcagtgagggtgaacagagtgaggaggatggtaagaggaagacaaagaagagggtgtattgcgcacgaaa

SEQ ID NO: 110119 - DNA, 406 bp, Homo sapiens
  misc_feature (1)...(406): n = a,t,c or g
aaccaacatggtgaaacacagtttcgagcgnnnnnnnnnnnnnnnnnnnnnnnnnnnnnnnnnnnnnnnnnnnnnnnnnnnnnnnnnnnnnnnnnnnnnnnnnnnnnnnnnnnnnnngaagtagctcgggaagtcggtcccaggcccgcactggcccctccaggtcaacatactgggcccaaagtcccgccagcagcacgcgacaacgccaacgccccctccccatcagaggacctccgccaagacctctctccggggtggaccacgcacgcccagaccccacagccgaaactcaaaacaccaaggaacatgtggccacgacatggactgcccatgccagctttcccgaccttccttccagtggaaggcccgcgaaagcggggaccacctccgggctagcacgaaa

SEQ ID NO: 110120 - DNA, 395 bp, Homo sapiens
  misc_feature (1)...(395): n = a,t,c or g
tttcgtggtggacctgacccagatgcagaccttctggaaggatctgaagccatgcagcgatgggagtgtaaggccccatgggtgggtcttagctggacaggcagcagggcagggctgggagatctggtcccagacccttgtcaaccttaggaaggccaggagggctgtgggagagggtgcagatgggtggacccgatggagctcagccctcgctagcaggcagaacattggtgcttggcacttggggggactcacccgatctgtaagaaggaacctagggctatgttcagggaacagggaggcgatggtgaccgttggaggggcagtacacacacctgccagatggggggagacagagtgagacagangtgacanacaggggcatgggtaagcac

SEQ ID NO: 110121 - DNA, 396 bp, Homo sapiens
  misc_feature (1)...(396): n = a,t,c or g
tttcgtagacgactccccatggagagacagggagaaaggtgactcagaggaggggagtgagcaggtgcagctgtgggggcgggcagaaccacaggaactcagggtcccgggtgccagaaggggggcgtttctgcacctcagcagctgtggtgagggctgctgaggggtcaagaggaggtgtgggtccctgggcagatgaggccagggtagcacacgcgaggggcagcgggtgtgctgggagaagccggggaggaaggcccagcagtgtgtttaacccagctccccagcccagtccttcagaagggacaagagaggggcgtggagaancagaccctggagaaagtgtggggatgaacagtgctcacagacagnagccgggctgcacgggatctcata

SEQ ID NO: 110122 - DNA, 429 bp, Homo sapiens
  misc_feature (1)...(429): n = a,t,c or g
tttcgtgcggcctccaggcctcaggccccctcaccatcctagaggtcaagatcagctctggctaggtaaggggtggggggcggcacagctataggaaggaccgagcggagggagtagggggaggggagtggagagagagcgcgggaggaggaggaagggaaggaaagggagggcgtgaagaggcacccggaaggcaggaggagagggcaggagggaaactgcactcgcctccctcccgctccgtggccacaggtccccgcaagaaagaccccgtcccactctctgaggtctcctcccagctccagaaaaggggacattccacctagtctgcccaacaagtaggtctcagccactgtgccaggagctcgggactccctccctccagaggtttctggaatgcattcagcagaanaagctaaaagaacagga

SEQ ID NO: 110123 - DNA, 867 bp, Homo sapiens
ggcacgaggagcggatgagatcgtggggctcaccagcgtcccccatggcttctgagtagcgtgggagtggagtcagcaccaagccaggctccccgcgcctgccttgccctcacctgctcctgctctctgccagaggcagcatggtccgcagggcaccatggggcccgacagagtgacagcacgagaactgtgcgagaacgacgacctggccaccagcctcgtcctggacccctacctcggtttccgcacccataagatgaacgtcaggtctatcgctacctccgtgccttcctgccggaaagtggctttaccatcctgccctgcacgcgctactccatggagaccaacggggccaagatcgtgtccactcgtgcttggaaaaagaatgagaagctggagctgctggtgggctgcattgcagagctgcgggaggcagatgaggggctgctgagggccggtgagaatgacttcagcatcatgtactcaacccgcaagcggagtgctcagctgtggctgggcccagccgccttcatcaaccatgactgcaaacccaactgcaagtttgtgcctgcagatgggaacgcagcctgcgtgaaggtgctccgggacattgagcctggggacgaggtgacatgcttctacggcgagggcttcttcggcgagaagaatgagcactgtgaatgccacacctgtgagaggaaaggtgaaggagctttccgaaccaggcctagggagcccgcgttgccaccacggcccctggacaagtaccagctgcgtgagaccaagcggcggctgcagcaaggcctgggacagtggcagccgacagggcctgctgggccctcgggcctgcgtgcacccatccccgct

SEQ ID NO: 110124 - DNA, 437 bp, Homo sapiens
  misc_feature (1)...(437): n = a,t,c or g
tagcaccgcgcctgaattcccgggtcgacgatttcgtgcccaaccttcatgtcatgaaggccatgcagtctctcatgtcccgaggctacgtgaaggaacagtttgcctgtagacatttctactggtaccttaccaatgagggtatccagtatctgcgtgattaccttcatctgcccccggagattnnnnnnnnnnnnnnnnnnnnnnnnnnnnnnnnngcnnnnnnnnnnagcaannnnnnnnnnnnnnnnnnnnnnnnnnnnnnnnnnnnnnnnnnnnnnnnnnnnnnnnnnnnnnnnnnnnnnnnnnnnnnnnnnnnnnnnnnnnnnnnnnnnnnnnnnnnnnnnnnnntggttcccatgttattcccctgggcaaggaaatttatcttccttcttaaggaccctggggttttaagaacggaaattgcgcatcgg

SEQ ID NO: 110125 - DNA, 454 bp, Homo sapiens
cagcaccgcgccggattgcccgggtcgacgatttcgtgcgatggaaacctacatccgccagaggcagctcatcatgtcgcctttgataacatcacacgtgattggggagaatgagccactcacttcagtcttgaataaagtgattgcagcaaaggatgtgaatcacaaagggcaaggcctttgggtatccttgaagctcttgcccggtgacctcacccaggttcagaagaatttttcacacttggttgatagatcaacagcaatagcccggaagatgggctttcctgaaatcatactgccaggagatgttcggaatgacatttatgtcaccctgatccacggtgagtttgacaaggggaagaagaatacgccaaagaatgtggaggtgacgatgtctgtgcacgatgaggagggcaagctcttggagaaagcaattcaccctggtgctggatat

SEQ ID NO: 110126 - DNA, 427 bp, Homo sapiens
tttcgtccaagacggactctgggagggctaaggagccatcatgatccctaagctgctttccctcctctgtttcagactgcgcgtgggccaaggagacacaaggggagatgggtcattgcccaagccgtccctcattgcctggcccacctcggtggtgcctgccaacagcaatgtgacgctgcgatgttggactcctgccagaggggtgagctgtgttctcaggaagggaggaattattctggagtccccgaagccccttgattctacagagggcgcggacgaatgtcacctctataatctaaaagtcagaaacgctggagagtacacctgcgaatactacagaaaagcatgcccccacatcctttcacagagcagtgacgaccttctattgatggtgacaggacatttatgtaaacctttgctgcga

SEQ ID NO: 110127 - DNA, 433 bp, Homo sapiens
cggccagaattcccgggtcgacgatttcgtggtggacggacactgcgaaggcataaacatttcttgcgatttctacagattcatgatgaagcacctggctttcctccgcaagcggatgaacaacaacccttcccgaggcccctaccacttgcggacccccaaccgtatcttctgtcggaccgtgcgaggtatgctgccccacaaaaccaagcgaggccaggccgctctggaccgccttaaggggtttgacggcatcccaccgccctacgaaaagaaaaagcggacggtggatactgctggcctcaaggtcaggcgtatgaagcctacaagaaatgctgcctatgtggggcgcctggctcacgagggtggctggaagtaccacgcagtgacagccaccctgtgggagaagaggaaagagaatgccaaacgtatt

SEQ ID NO: 110128 - DNA, 404 bp, Homo sapiens
  misc_feature (1)...(404): n = a,t,c or g
tttcgttcttataaagaaaaaaggaaagcttcaaattgtggttctttggaggcccaccccaagagggaataacttaaaaaacctttgggagggggaaaggggaaaaaccggggagaaattttggggtaaactgttgttaaaagaccccccaaaaggcccccccttaaaaaccgggggacaaaaaacccccccccgggggggggaaaaaagggggaggggggggaccccccnnnnnnnnnnggggtttttaagggggggaaaaaaaggttcaaaacccnnnnnnnnnnaagggggaaaaactgaaaaatacaaaaaacccgggggagcgggccacccttttaaagggggcccccnnnnnnnnnnnnaattatttttccaaaaacccggggaaaaaagggaaaggg

SEQ ID NO: 110129 - DNA, 413 bp, Homo sapiens
tttcgtaggatgacagactccgaagggccccagaggcccccgctgtgttttttatctacattgctttcccagaaggttcctgagaagtcagacgctgtgcttcgctgcataatatctggtcagcccaagccagaggtaacttggtataagaatggtcaggccatcgatgggagtggcattatttccaactatgaattctttgagaatcagtatattcatgtgttacatctctcttgctgtaccaaaaatgatgctgctgtctatcaaatctcggctaaaaactcttttggaatgatctgttgttctgcttccgttgaggttgagtgctcatcagagaacccacaattgtctcctaacctggaagatgacagggacaggggttggaaacatgaaacagggacacatgaagaaga

SEQ ID NO: 110130 - DNA, 457 bp, Homo sapiens
  misc_feature (1)...(457): n = a,t,c or g
ncaggggaggcttgtaaggacttcatatccagctcaagcattttcgagcaccatgcccctcacaatgagtggaatccacacagcaacgccaagtgtgaggaggcctctcgctgtggaaaaaggcattacaaatgcagtgaatgtgggaaaaccttcagccgcaaagactcacttgttcaacaccagagagtccacactggagaaaggccttatgagtgcggtgaatgtgggaaaacctttagccgcaaacccatacttgctcagcaccagagaatccacgttgtagaaatgccttatgagtgtggcatatgtgggaaagttgttactcatagctctaaccttattgtacatcaaagagtacacactggagcaaggccttacaaaagcagtgaatgtgggaaagcctatagtcacacgaaatcgtcgaggcgggaattccggaacggtagctgatccg

SEQ ID NO: 110131 - DNA, 415 bp, Homo sapiens
cgcattcccgggtcgacgatttcgtgaggcaggtggggtgccagtggaagagagaaagcaggcgagtgtttacggcctgacttgggaggccggcggatcagcaattgcagaagcaggcagcggcagagagggaatggtgcaggcaggcgctgagaaggacgcgcagtccatctctctcagaaaagaacaatgggaaaccaaacatcaaagaacagaaaggaagatccctaaatacgttccgcctcacctttctccagataagaagtggcttggaactcccattgaggagatgagaagaatgcctcagtgtgggatccggctgcctctcttgagaccatctgccaatcacacagtaactatttggaatggtgagcgaactgcggggagccggtgggagctcattcagactgcactt

SEQ ID NO: 110132 - DNA, 465 bp, Homo sapiens
  misc_feature (1)...(465): n = a,t,c or g
tgcccattccangnnccnnagtcctggatcgacgatttcgccactagcattgacatggactctggagacggggtcacccacacggggcccatctacgagggctacgccctcccccacgccatcctgcggctggacctggctgggcgggacctgaccgactacctcatgaagatcctcactgagcgaggctacagcttcaccaccacggccgagcgggaaatcgggcgcgacatcaaggagaagctgtgctacgtggccctggacttcgagcaggagatgggcaccgccgcatcctcctcttgtctggagaagagctacgagctgcccgatggacaggacatcaccattggcaatgagcgggtccggtgtccggaggcgctgatccagccttccttcctgagtatggaatcttgcggcatccacgagaccacctttaactccatcatgaagtgtgacggggacatc

SEQ ID NO: 110133 - DNA, 416 bp, Homo sapiens
  misc_feature (1)...(416): n = a,t,c or g
gactggtgcgttgattttccatatcttttnnnnnnnnnnnnnnnnnnnnnnnnnnnnnnnnnnnnnnnnnnnnnnnnnnnnnnnnnnnnnnnnnnnnnnnnnnnnnnnnnnnnnnnnnnnnnnnnnnnnnnnnnnnnnnnnnnnnnnnnncccgctcgccgggctataagggaagatcctggctgcctctccagctctcctggctgggccccgccccctcgccaggctctgagggaagatcctggctgccactccagccctcctggctgggccacgccccctcgctgggctctaacggaagatcttcgctgcctctccagctctcctggctgggccgcgccccctcgccaggctatgagggaagatcctcgctgcctctccagctctcctggctgggccacgccccctcgacgaaa

SEQ ID NO: 110134 - DNA, 396 bp, Homo sapiens
tttcgtgggagagacggcgacgagctgcgcccgcagtcgtagtagccctgaggccagggagagggtctgcgggggccacgcacagcgtggcgatgggtggcgatggtccggacggcggtgttgccagccgatagggtgccagcgcgagccaaagggagaagctgggagtttctttgtttctggagagaggcgctgatgctgggcggtacggtattgtgtgctccgcgcacatgcagcattacgcggaggacacggaggggctgcgggagcaggaaggatagctctgctctacaagcccattgaccgggtcactctgagcaccctagtcctacacgacctgctgaagcacacacctgtggaccaccccgactacccgctgcttgtggatgccctccc

SEQ ID NO: 110135 - DNA, 291 bp, Homo sapiens
tacagcccgatggccagatgccaagtgacaagaccattgggggaggagaagactccttcaacaccttcttcactgagaccgtcgctggcaagcacgtgccccggcctgtgtgtgtagacttggaacccacagtcattgatgaaattcgcactggcacctaccgccagctcttccaccctgagcagctcatcacaggcaaagaagatgctgccaataactatgcccgagggcactacaccattggcaaggagatcattgaccttgtgttggaccgaattcgcacgctggctg

SEQ ID NO: 110136 - DNA, 530 bp, Homo sapiens
caaaggtgtctctagtccaggtggtgtcgtccttgcagagttctgtggtggaagctttcatcaaggtgttgtgcagtgtcaatccagtccctgtttctatcccaagcttcagtcctcccgccaatgcagggatcacgttaccgacgcgtgggtacaagtgcttggagtgtggggactcctttgcccttgaaaagagtctgacccagcgctacgacagacggagcgtgcgcatcgaagtaacgtgcaaccattgtacaaagaacctcgttttttacaacaaatgcagcctcctttcccatgcccgtgggcataaggagaaaggggtggtaatgcaatgctcccacttaattttaaagccagtcccagcagatcaaatgatagtttctccgtcaagcaatacttccacttcaacttccactcttcagagccctgtgggagctggcacacacactgtcacaaaaattcagtctggcataactgggacagtcatatcggctcatacaaacactcccatcacccccgccatgatt

SEQ ID NO: 110137 - DNA, 449 bp, Homo sapiens
  misc_feature (1)...(449): n = a,t,c or g
cacgacctcccgggttgacgatctcnnnncgagcttcttcgacatcgtgctggacttcatccttatggacgccttcgaggacctggagaaccctccggcctcggtgctcgccgtcctgcggaaccgctggctgtcagacagcttcaaggagacggtgggtcactgccctgctctcagacccacacttgctcacatcagcccgtgtggttgcctggctccgtcccctctgtccctagcactggcaccagggctgggcccccaccccctagatccgcggctgccaggcctgggagaccagagtctgccctggagaagcctccagggtgccccgttgctgcctggtgccccagtttagaaccaacatggtgtgcgctttcttcctattgtgtggntttacttttgtgctggtatgaattcgattccattttaatgcatcctgttaaatcaag

SEQ ID NO: 110138 - DNA, 416 bp, Homo sapiens
gcccacagcaagcctgatacagagtcacacaccagatgcacattacaaagagcgtcacagtggaatgagaggaaagcctgtgagaacaaacggatctccggtgctcagcagactgatctactgcaaatcacccccgacgcaaccaccaactccgccagaggaaatcacaagttttccatcttcagcagctcttacgactgcaagatcccacagctgccttttgggggaggttggggcttatgccttagggcgccagtcaggtccttccaggagaaggcggcaccaagcccagcgtcgaacgaagcaggtccttctcccttcacaagcagcatccacggctcagtggtgcccctcgcccccaccgctctgccctgccttcctcgctgaaacctcccaacactgacgtcaccggggtg

SEQ ID NO: 110139 - DNA, 416 bp, Homo sapiens
ttgttgggaacggcgccatccttgcagaacaatcaacctgtggagtttaatcatgccatcagctatgttaataagatcaagaacagatttcagggccaaccatgcatctacaaagcattcctggagattttgcacacatatcagaaagagcagagaaatgccaaggaagctggaggaaactacactccagcattgacagagcaggaggtgtatgcccaggttgctcgtctctttaaaaaccaggaagatttgttgtcagagtttggacaattcctaccagatgccaacagctccgtgcttttaagcaaaacaactgctgagaaggttgattctgtgagaaatgatcatggaggcactgtcaagaagccccaattgaacaacaagccgcagaggcccagccagaatggctgccagat

SEQ ID NO: 110140 - DNA, 434 bp, Homo sapiens
gggagctgccgaatttccgggacgacgatttcgtctcacccccaaccgtcggcccagtcggacggttccgatgcgttgccgggagccgggcgcggctctgtgtggactcggagaaacgcggttttgacgaagtatattatgggcagtacatctctttttacatgaaacaaatcttcttcttggatgacagtgggccgccatttggccacatggtgctggccttgggaggttatttaggaggattcgatggcaattttttgtggaacagaattggagcagaatacagtagcaacgtgcctgtgtggtccctgcgcctgctgccagcactcgcgggggccttgtcggtccccatggcctaccagatagtgttggagctccacttttctcattgtgccgccatgggagctgctctgttgatgcttatcgagaatgct

SEQ ID NO: 110141 - DNA, 421 bp, Homo sapiens
  misc_feature (1)...(421): n = a,t,c or g
tttcgtgctagtgggaggaggggctcaaggaaggatgctggcagcagtagtcatggggacgaccagccagccagcagaggtaagctccaaagagcagcccgacttgggcatcatcatcccagcccctctaattggcatgaagccagttagctccctggacctcagtttccttatctgcacaacaagatggttgttctcaactaagggtcacaaaatcactgtctcaggggccaaagagatgcatacatgagtgaaatgggcaagacacattttgcatggtaaattcatagatgtatttgtcattgccaccaaggtatgtccctttgcccatttttcttgcaacacatggcttttccaagccattttccanaagactttgttctcctgcctttcatagagacatcggtctctagtcacttca

SEQ ID NO: 110142 - DNA, 456 bp, Homo sapiens
agctccaggagaccatgactttcaaggatgtggaggtgaccttctcccaggacgagtgggggtggctggactctgctcagaggaacctgtacagggatgtgatgctggagaattataggaacatggcttccatggtgggaccattcaccaaacctgctctgatctcctggttggaagcaagggggccatggggcctgaacatgcaggcagctcagcataaggggaatccagttgctgctcgtacaggagatgtcctccagagtaaaacgaacaagttcatcttaactcaggaacctttgaaagaagcagaacccttagctgtgtcatcaggatgtcctgcgacaagtgtttctgagggaattgggctcagagactcttttcatcagaagagcaggcccaaggttcaatgtgatactcccattcaagtaagagttaagaaagaagagtccgtgtatt

SEQ ID NO: 110143 - DNA, 393 bp, Homo sapiens
tttcaagatgcctgaaatggacctcaagggcccccagatagatgtcaagggccccaagctggacctgaaaggccccaaggcggaagtgacagcccccgatgtggagatgtctctgtccagcatggaggtggacgtccaggccccgagagcaaagctggatggtgcgcggctggagggggacctgtccctggccgacaagggtgtgacagccaaagatagcaagttcaaaatgcccaagttcaagatgccatcattcagggtgtcggccccaggcgagtccatcgaggcgttggtggatgtgtctgagctgaaggtggaagccgacatgagcctcccctccatgcaaggggaccttaagaccactgacatcagcattcagccccccaatgtatt

SEQ ID NO: 110144 - DNA, 428 bp, Homo sapiens
ctacaaatctgggacagtttttcatctgaatacattatcttatataaaacagatttttcccatggaagagagaatatttaattttcatacagataagaaaagcttaaaaacacattcagttgtgaaaaaacacaagcaagtccgtggagaaaagaaacttttaaaatgtaatgactgtgagaaaatattcagcaaaatctcaacccttgctcttcaccaaagaattcatacaggagagaaaccctatgaatgtattgaatgtggaaaggcctttagccagagtgcccaccttgctcaacatcagagaatacacacaggagaaaaaccttttgaatgtactgaatgtgggaaagccttcagccaaaatgctcatcttgttcaacacccctgtattgcggccgctctggaggattcacgctaaggtacac

SEQ ID NO: 110145 - DNA, 371 bp, Homo sapiens
tccacaccctgtaccctcaccgtgtcggagacgcaactgctgtgcgaggcgcccaacctcactgggcagcacaaggtcacggtgcgggcaggtggcttcgagttctcgccagggacactgcaggtgtactcggacagcctgctgacgctgcctgccattgtgggcattggcggaggcgggggtctcctgctgctggtcatcgtggctgtgctcatcgcctacaagcgcaagtcacgagatgctgaccgcacactcaagcggctgcagctccagatggacaacctggagtcccgcgtggccctcgaatgcaaggaagcctttgcagagctgcagacagacatacacgagctgaccaatgacctggactgtat

SEQ ID NO: 110146 - DNA, 373 bp, Homo sapiens
  misc_feature (1)...(373): n = a,t,c or g
naggcaaaagcatctgacgctcccctccccccatagctgaccaaggccagggccactgcgggagcaccgcgcgtccacgtgcacccagcatgcccggtcaccctttattacgtaagagtcccaggatggagttgtacctgctgccggcccctcttccccgacggctaataataaacccgggttcctgtttcccggccgcggccactccagattcggggctgaggggctcactctgcaaccaaggcacgtgcattccggtcatcccacgcggggagcgagcgcaaggcccgcccagcccccacatgccagccccaccctccagtcggtccggacgccgacgccaattagaccctcgctgtgcccggcctgtatt

SEQ ID NO: 110147 - DNA, 378 bp, Homo sapiens
tccctggcaatttgctcagtttatactttttacacagatagcatcattatttcccatgtatgttgtgggatacattgaaccaagcaaatttcagaagatcatttatatgaacatgatttcagttacccttagtttcattttgatgtttggaaattcaatgtacttatcttcttcttattattcatctttgttaatgacgtgggcaataattctaaagagaaatgaaattcaaaaactgggagtatctaaactcaacttttggctaattcaaggtagtgcctggtggtgtggaacaatcattttgaaatttctgccatctaaaatcttaggcgtttcagaccacattcgaccgagtgatcttatagcagccattgtatt

SEQ ID NO: 110148 - DNA, 370 bp, Homo sapiens
gtgccaaatgccaagctgactgtcaacgtcctggacgtcaatgacaatacgccccagttcaagccctttgggatcacctactacatggagcggatcctggagggggccacccctgggaccacactcattgctgtggcagccgtggaccctgacaagggccttaatgggctggtcacctacaccctgctggacctggtgcccccagggtatgtccagctggaggactcctcggcagggaaggtcattgccaaccggacagtggactacgaggaggtgcactggctcaactttaccgtgagggcctcagacaacgggtccccgccccgggcagctgagatcactgtatacctggaaatcgtggacctgtatt

SEQ ID NO: 110149 - DNA, 434 bp, Homo sapiens
agtttttcgccttcttcgcttttgccacatgcggcagctacagtgggaagctccagttaagcgtggattgtgccaccaagaccgagagtgacctcagcatcgaggtcgagttcgagtaccccttcaggtgtgctcccaccctgggataccaacagacttgggagaggaaggggcagggtggaaccggccaatacctccccccgcaagtagctcctgcccagctcccacctcgaggctacatccactgggatcactgagcacctgccttgtacctggcactgctctggactctaggactatgtggtgagcaaggcagacataggctgtggccctctggctctgttccagcgaaggggtaagggacaggcaataaacaagatacaaaagtaagacaggtgtatatacataccttaacccagtaggtaccctgtagt

SEQ ID NO: 110150 - DNA, 416 bp, Homo sapiens
cccctcgggacctgcggcagcatgagcgcacacacagcgccgagcggcctttcaagtgcgacctgtgccccatgggcttcaagcagcagtacgcactgatgcgccaccggcgcacacacaagaccgaggagcccttcaaatgcggcctatgtgagaagggctttgggcagcccagccacctgctctaccaccagcacgtgcacaccctcgagactctcttcaagtgccccgtgtgccagaaaggctttgaccaatctgccgagctgctgcggcacaagtgcctgcccggcgcggccgagcggcccttcaagtgccctgtgtgcaacaaggcctacaagcgcgcgtcggccctgcagaagcaccagctggcccactgtgcgacggcagagaagcccctgcgctgcacgaatggcgaa

SEQ ID NO: 110151 - DNA, 433 bp, Homo sapiens
ccagttacggtgctggccgtcgagtctgagttcacaccggtgcccgcgtggtctccagttacggtgctggccgtggagtctgggttcacaccggtgcccgcgtggtctccagttacggtgctggccgtggagtctgggttcacaccggtgcccgcgtggtctccagttacggtgctggccgtcgggtctgagttcacaccggtgcccgcatggtctccagttacggtgctggccgtggagtctgggttcacaccggtgcccgcatggtctccagttacggtgctggctgtcgggtctgagttcacgctggtgcccgcgtggtttccagttacagtgctggccgcttgtacctttctgggaagttagaaggaggatcatttcatcgcctccctgtcctcccacaccttgacctatactgggccaccgctgtatt

SEQ ID NO: 110152 - DNA, 422 bp, Homo sapiens
  misc_feature (1)...(422): n = a,t,c or g
ntccgccagcaacccaaggcccagactacagaacaccaaatactgtgatgagaaattacttcccttttccttcagggccagtcctggctaccccaaggggaaagtcgcagcttggtgcgaatgaaagttcaactgtccccagcattgtcaatggtttttacagagagagagcaggcccaagcctggggcagagcatagaagctgggaaagcaccaggatgtttaatgcctgcagtccaaaattggctggtggaagtacctactgtcagtcccatcagtagattcacttatcacatgtctgcaggtgtacccaacagctccgaagagacagcaacnnnnnnnnnnnnnnnnnnnnnnnnnnnnnnnnnnnnnnnnnnnnnnnnnnnnnnnnnnnnnnnnnnnncaagagagatcaggtgtatt

SEQ ID NO: 110153 - DNA, 438 bp, Homo sapiens
aagtgagcttcctctcctccttcttcctcagcctgccctatggtgtggcagtgggtgtcgccttctccgtcctggtcgtggtcttccagactcagtttcgaaatggctatgcactggcccaggtcatggacactgacatttatgtgaatcccaagacctataatagggcccaggatatccaggggattaaaatcatcacgtactgctcccctctctactttgccaactcagagatcttcaggcaaaaggtcatcgccaagacaggcatggacccccagaaagtattactagccaagcaaaaatacctcaagaagcaggagaagcggagaatgaggcccacacaacagaggaggtctctattcatgaaaaccaagactgtctccctgcaggagctgcagcaggactttgagaatgcgccccccaccgaccccatgtatt

SEQ ID NO: 110154 - DNA, 218 bp, Homo sapiens
taaaaaaaaattattctgacagtctcccttctcccagtgcagttccacgctcctcttctactcccccaaaggtgaatgtcaagaatttggtacgtagctttccaggctattttttcttttttttgagacagagtttcgctcttgctgcccaggctggagtgcaatggcgcaatatcggctcacctcaatgtctgcctcccgggtgtcaaggcaactct

SEQ ID NO: 110155 - DNA, 441 bp, Homo sapiens
  misc_feature (1)...(441): n = a,t,c or g
actgggcgagggggcactgcctgggccagcccgaggggtccctactgggccctcccactcagacagtggccggtcctcctccagcaagagcacaggctccttagggggccgtgtggctggggggcttttgggcagtggtactcgggcctcccctgacagcagctcctgtggggagcgctcaccaccaccnccgcctccacctccttcggatgaggccctgctgcactgtgtcctggaaggaaagctccgagaccgggaggcagagcttcagcagctgcgggacagtctggacgagaatgaggctaccatgtgccaggcatacgaggagcggcagcggcactggcagcgagagcgtgaggccctgcgagaggaatgtgcggcccaggcacgaatggcgaagcggccgctctggaggatgcaagataacgtaaacgtcagtcc

SEQ ID NO: 110156 - DNA, 384 bp, Homo sapiens
cagcagaagcagaagacccgctggatcaatacgcccaccgcctacctgcgggtcaatgtggctgatgaggtccagaggagcatgggcagcctccgacccaagtccacgtggatgaaggctgacgaggtggagaaatccagcagtggcatgccgattcgcatcgaaaacgcaaaccaatttgtgcctctctatactgacccccaggaagtactggagatgaggaacaagattcgagaccaaaaccgccatgatgtgaagtcagcggggcctcagtcgcagctcctggcgagcgtcattgccgagaagagccgaagcccgtctacagagagccagctgatgtccaagaaagaagaggataccaaagacgattcagaggagtgtatt

SEQ ID NO: 110157 - DNA, 2250 bp, Homo sapiens
atggagaatagtcttagatgtgtttgggtacccaagctggcttttgtactcttcggagcttccttgctcagcgcgcatcttcaagtaaccggttttcaaattaaagctttcacagcactgcgcttcctctcagaaccttctgatgccgtcacaatgcggggaggaaatgtcctcctcgactgctccgcggagtccgaccgaggagttccagtgatcaagtggaagaaagatggcattcatctggccttgggaatggatgaaaggaagcagcaactttcaaatgggtctctgctgatacaaaacatacttcattccagacaccacaagccagatgagggactttaccaatgtgaggcatctttaggagattctggctcaattattagtcggacagcaaaagttgcagtagcaggaccactgaggttcctttcacagacagaatctgtcacagccttcatgggagacacagtgctactcaagtgtgaagtcattggggagcccatgccaacaatccactggcagaagaaccaacaagacctgactccaatcccaggtgactcccgagtggtggtcttgccctctggagcattgcagatcagccgactccaaccgggggacattggaatttaccgatgctcagctcgaaatccagccagctcaagaacaggaaatgaagcagaagtcagaattttatcagatccaggactgcatagacagctgtattttctgcaaagaccatccaatgtagtagccattgaaggaaaagatgctgtcctggaatgttgtgtttctggctatcctccaccaagttttacctggttacgaggcgaggaagtcatccaactcaggtctaaaaagtattctttattgggtggaagcaacttgcttatctccaatgtgacagatgatgacagtggaatgtatacctgtgttgtcacatataaaaatgagaatattagtgcctctgcagagctcacagtcttggttccgccatggtttttaaatcatccttccaacctgtatgcctatgaaagcatggatattgagtttgaatgtacagtctctggaaagcctgtgcccactgtgaattggatgaagaatggagatgtggtcattcctagtgattattttcagatagtgggaggaagcaacttacggatacttggggtggtgaagtcagatgaaggcttttatcaatgtgtggctgaaaatgaggctggaaatgcccagaccagtgcacagctcattgtccctaagcctgcaatcccaagctccagtgtcctcccttcggctcccagagatgtggtccctgtcttggtttccagccgatttgtccgtctcagctggcgcccacctgcagaagcgaaagggaacattcaaactttcacggtctttttctccagagaaggtgacaacagggaacgagcattgaatacaacacagcctgggtcccttcagctcactgtgggaaacctgaagccagaagccatgtacacctttcgagttgtggcttacaatgaatggggaccgggagagagttctcaacccatcaaggtggccacacagcctgagttgcaagttccagggccagtagaaaacctgcaagctgtatctacctcacctacctcaattcttattacctgggaaccccctgcctatgcaaacggtccagtccaaggttacagattgttctgcactgaggtgtccacaggaaaagaacagaatatagaggttgatggactatcttataaactggaaggcctgaaaaaattcaccgaatatagtcttcgattcttagcttataatcgctatggtccgggcgtctctactgatgatataacagtggttacactttctgacgtgccaagtgccccgcctcagaacgtctccctggaagtggtcaattcaagaagtatcaaagttagctggctgcctcctccatcaggaacacaaaatggatttattaccggctataaaattcgacacagaaagacgacccgcaggggtgagatggaaacactggagccaaacaacctctggtacctattcacaggactggagaaaggaagtcagtacagtttccaggtgtcagccatgacagtcaatggtactggaccaccttccaactggtatactgcagagactccagagaatgatctagatgaatctcaagttcctgatcaaccaagctctcttcatgtgaggccccagactaactgcatcatcatgagttggactcctcccttgaac

SEQ ID NO: 110158 - DNA, 399 bp, Homo sapiens
  misc_feature (1)...(399): n = a,t,c or g
accgagttcatggggaaccccgagcacagggtgtgcaacctgctgctgaaggacctgcagcccgaggactctggttcctacaacttccgcttcgagatcagtgaggtcaaccgctggtcagatgtgaaaggcaccttggtcacagtaacagaggagcccagggtgcccaccattgcctccccggtggagcttctcgagggcacagaggtggacttcaactgctccactccctacgtatgcctgcaggagcaggtcagactgcagtggcaaggccaggaccctgctcgctctgtcaccttcaacagccagaagtttgagcccaccggcgtcggccacctggagaccctccacatggccatgtcctggcaggaccacggccggatcctgcgctgccagctn

SEQ ID NO: 110159 - DNA, 445 bp, Homo sapiens
  misc_feature (1)...(445): n = a,t,c or g
ngaggggtgcccagccattttaggtatgagaaggacactgttgtggtccaggatttgggcaacatcttcactcgcctgccactcaagcggatgtggcatcaggcgctgctgcgctcaggggataaagtgcgcatggaccccccctgcaccaacacaacagctgcttccacctacctcaacaacccgtacgtgcggaaggccctcaacatcccggggcagctgccacaatgggacatgtgcaagtgaggttccgtggccacctgtgacttggggtggtgggttgctggggcttgtgggcatcggcaggtttctcagggatcttctgtgtagagtttctcaatgagatgagctgtagaggatgtttaacatccatccctgacccctcagtggattgagagtcagccaatgtattgcggccgctcgagaggatccaaggatacgtaca

SEQ ID NO: 110160 - DNA, 455 bp, Homo sapiens
gagatgggttttcaccattttggccaggctggtcttgaactcctgatctcaagtaatccacctgcctcagccttccaaagcgttgggattacgggtgtgagccactgcgcccgggccagcattacttctgagctctgctccctgccctgggcgctctgacacggcagcccaccagcttcactccagggccctttgcttccctggcttccctttgtgcctggctttccctcattcttcaaaacatcttcctctgaaccaggctgggagtgggcagttggcattccagctctggagttggaaccccagttacccatctactttgagtcctcccacccgtggtgagacggcatcaccctggccaatgcaaggtgagagcaaggacacctgagccagtgtgggtttgagagtttaatctgtgctctggcgcccacagtgctgtagcccctcatgggcca

SEQ ID NO: 110161 - DNA, 410 bp, Homo sapiens
actgctgctgctgctggagaccccatagcttgctacacggacatcccaaagattatttacgcctccaggacccactcgcaactcacacaggtcatcagcgagcttcggaacacctcctaccggcttaaggtgtgtgtgctgggctcccgggagcagctgtgcatccatcctgaggtgaagaaacaagagagtaaccatctacagatccacttgtgccgtaagaaggtggcaagtcgctcctgtcatttctacaacaacgtagaagaaaaaagcctggagcaggagctggccagccccatcctggacatcgaggacttggtcaagagcggaagcaagcacagggtgtgcccttactacctgtcccggaacctgaagcagcaagccgacatcatattcatgccgagtgtatt

SEQ ID NO: 110162 - DNA, 405 bp, Homo sapiens
ccacatagaggaactctcaggggtccgcacggctgtcacaatggcagtaatgtgtgtggctggcttattcttcatccctgtagctggcctcacgggatttcacgtggttctggtggccaggggacgcacaaccaatgaacaggttacgggtaaattccggggaggtgtgaaccccttcaccaatggctgctataacaatgtcagccgtgttctctgcagttctccagcacccaggtatttggggagaccaaagaaagagaagacaattgtaatcagacctcccttccttcgaccagaagtttcagatgggcagataactgtgaagatcatggataatggcatccagggagagctgaggagaacaaagtctaagaaaaacctggagataacagagagccatgtatt

SEQ ID NO: 110163 - DNA, 433 bp, Homo sapiens
caaggagttcgtgactgctgtggttctgggcaaagacctcgtccccaggattggcctctctcagctggaaggcttccgcagacagctcctggatgtcctgcagcgaagcaccaagcccaaatggcggatcatcgtgggggccaccaaatgcatccccaagtcggagctgcctgaggaggtagaggtgaccaccctggccagcacgcggctctggacccaccccagcgacctaactatagccctctcagccagcactccactctacccgcccggccgcatcatccacgtggtccacaaccaccctgcagagcagtgctgctgctgtgagcaggaggagcccacatcctttgccatctggggcgacaacaaggccaacaatgaggtgatcatctcgccagcctgtattgcggccgctcggaggatcaagctacga

SEQ ID NO: 110164 - DNA, 438 bp, Homo sapiens
cattcgggaggtgcagaaactggtggagagcggggtggatgtgaactcccaaaatgaggtcaacggctggacttgtttacactgggcatgtaaacgaaaccatggtcaggtggtctcttacctgttaaaatcaggagctgacaaagaaattcttaccacaaaaggagaaatgccagtccagttaacatcaaggagagaaatcaggaagattatgggagtggaagaagaagatgatgatgatgatgatgatgacaacctcccccagctgaagaaggagtcagaactgccctttgttcccaactatttggccaacccagccttcccttttatctatacacccacagcagaggattcagcccagatgcagaatgggggcccctccacaccccctgcatcaccccctgcagatggcgaagcggccgctctgaggatcacgca

SEQ ID NO: 110165 - DNA, 439 bp, Homo sapiens
tcctgtgcaatcctaccaaagtccgggactggaacatccaagggttgccctcagacgccttctccactgagaatggcatcatcgtcacccgaggcaacaggtgggcactgatgatcgaccctcaggcccaggccctgaaatggattaagaacatggaaggaggccagggcctgaagatcatcgacctgcagatgagcgattacctgcgaatcctagaacacgccattcactttggatacccggtgctacttcagaacgtgcaggaatatctggaccccacactgaaccccatgctcaacaaatctgtagcccgaatcggtggtcggctgttgatgcgcattggcgataaggaggtggaatataataccaatttccgtttatacatcaccaccaagctctccaacccatgtattgcggccgctcagaggatcacgctacg

SEQ ID NO: 110166 - DNA, 470 bp, Homo sapiens
tccaccccaacacagggggttccttgcccgacatgaccaacatccacttcccctccccgctcccgacaccgctggacgccgaggagcccaccttccctgcactgagcagctccagcagcaccggcaacctcgcggccaacctgacgcacctgggcatcggtggcgccggccagggaatgagcacacctggctcctctccacagcaccgcccagctggcgtcagccccctgtccctgagcacagaggcaaggcgtcagcaggcatcgcccaccctgtccccgctgtcacccatcactcaggctgtagccatggacgccctgtctctggagcagcagctgccctacgccttcttcacccaggcgggctcccagcagccaccgccgcagccccagccaaaacaacatcctccacccgcgtcccagcagccatgtattgcggcgcgctcgataggctccatgcatacggcgcaa

SEQ ID NO: 110167 - DNA, 431 bp, Homo sapiens
aacttcaggaaattctaaggaaatttctgtacctggagagagagtttaggcaaataacaatcagcaaggaaaccttcaccagtgagaagaacaatgaatgtcatgaacccgaaaaaagcttcagtctggactctactattgatgcagatcagagagttcttagaatacagaataccgatgacaatgataagtatgacatgagcttcaaccagaattcagcctctggtaaacatgaacacttaaatctaacagaggattttcagagtagtgaatgtaaggaaagcttaatggatctctcccaccttaataaatgggagagcatccctaacactgagaaatcctataaatgtgatgtatgtgggaaaattttccatcagagctcagcccttactagacatcagagaatccatactagagagaagccctgtatt

SEQ ID NO: 110168 - DNA, 437 bp, Homo sapiens
  misc_feature (1)...(437): n = a,t,c or g
caggaggtgtggtatcaacaacgcacagaggctcccgccggcaagatagtgacgtgtgccgggtttgtcctgggagggggtttgaagaaaaaagatgggggactctagctggtttttaatcccctggtgtttggtagtggacatctggtctgtcgggtgcatcatggcagaaatggtcctccataaagtcctgttcccgggaagagactgtatccttcacaggggaaccggtacttggccatggaggctggggtgggcgtgtggccctgaaaagctttgtgttcacaggcacttcttgtttctggnnnnnnnnnnnnnnnnnnnnnnnncctaacctataaagtattggactctttggcactaaaacaacagattgctacaaaccgaagcctgtattcgtccgctcgggtggataccatnaaacaaacgcgtgcaga

SEQ ID NO: 110169 - DNA, 401 bp, Homo sapiens
cacggtggggagcagcctgcgagggcgccgggcttccagcactcactatacctgctgtttggtttggccaggatggcctgggagtccccagggccgggcaaagactgcccccaacagacatgggcggagggaaccgtctcacccctgcctcttctcccttctatacgcagtgtcagtgggacgggagggtggtctgcccggggcctcaagctcctgtccaggaaccggacccatgtcgtacgccagtgcagccacacggccagcttcgaggtgctcatggacgtctccaggtgtgagatgggcatcttcttgtggccactatgcccgctgagcctacccccaaacctgcccctcctcaaactaaatcaaccaatctaagcactttgaacgaagcatgtatt

SEQ ID NO: 110170 - DNA, 398 bp, Homo sapiens
acccctccagtgccaccgtctgcagcttcatcgagcagcagtttgtccagcagaagggccaacgttttgggcttgggagcctggcccacagcatccccttgggccaggcagacccctcgctggccccttacattattgacctccccagctggacccagttccgccaggacaccggcaccatgcgggctgtgcggagacacctgttcccccagcactcagcccctggccgaggtgtcgtctgggagtggctgagcgacgatggctcctggactgcctatgaagccagcgtctgtgactatctggagcagcaggtggccaggggcaaccagctcgtggacttggcccccctggggtacaactacactgtcaactacaccacccacacgcagacctgtatt

SEQ ID NO: 110171 - DNA, 455 bp, Homo sapiens
  misc_feature (1)...(455): n = a,t,c or g
acctgtgtctgccttccttaggggaggaacatcatcgtgttctacggctcccagacggggactgcagaggagtttgccaaccgcctgtccatgttcgcccaccgctacggtatgcgaggcatgtcagcggaccctgaggagtatgacctggtaagctgccaccgcgtgctggccccagatggaggcagtgggtagaacagggagcaggtctgtagggcgcccctcagcagggggaggctggcagggagtggggtcctgggaagacgtcctcggaagttgccttcccgtgagggtcattgccatccctgcccgggctgactgacggaagggccattcctgcagctgcagccacgtgccaggcatcgtttccccaggactggccctcccctgagtgccagctgccctcctggcggccgctcgagaggataccagcatacgtncgcgccaatgcgctc

SEQ ID NO: 110172 - DNA, 446 bp, Homo sapiens
gaatgccaccaaaagcagggagccctaagggagcagttacaggttcacattcagaccatagggatcctcgtatcagagaaagctgagttacagacagccctggctcacactcagcatgctgccaggcagaaagaaggagagtctgaagatctggccagccgcctgcagtattcccggcggcgtgtgggagagttggagcgggctctctctgctgtctccacgcagcagaagaaggcagacaggtacaacaaggagttaaccaaagagagagacgccctcaggctggagttatacaagaacacccaaagcaatgaggacctgaagcaagagaaatcagaattggaagagaagcttcgggtcctagtgactgagaaggctggcatgcagcttaacttggaagaaatgtatgcggccgctgtagaggatcaagattcgtcgaggcatta

SEQ ID NO: 110173 - DNA, 408 bp, Homo sapiens
cctccgtgacaatcaatcagctcaatgaaaacatagaatcattgaaacagcagaagaaacaagtggaacatcagctggaagaagcaaagaaagcaatcaatgaaatacacaaagcacaaacggagcagttagagacaatcaacatcctcacattggaaaaggcagacttgaagaccaccctttaccatactaaacgtgctgcccgacacttcgaagaagagtccaaggatcttgctggccacctgcaatacgccttgcagcgtattcaagaattggagcgggctctctgtgctgtgtctacacagcagcaggaagaggacaggtccttgagctgcagtgaagcggtcctccagtggcggttacagcggaccataaaggagcaggcactgctgaacgcacacgtgtatt

SEQ ID NO: 110174 - DNA, 408 bp, Homo sapiens
gctcccagacctggccagctgcctggacgtcggcaatgagagtgggtgtggggagagaaccttggacccgtggcagggccaggacccagctgaggggggccagggtaagacgtcctcttcctcctgaatgcgcctgtagctgctgagccccagacagccccatgcctctgagacagggctgggaggagcaggagctattgtccctccagaggctcaggggtggtggggggcggagtagggggtgactgttttctggtttgatgttcctctctgtctcgggggctgtgacatattcttataaacatatgagcatagagaagagaatagaaacccccccaagagtgcatcaccagtgcccatgatatccgagacacagcatccgagacacagctaactgaccgctgtatt

SEQ ID NO: 110175 - DNA, 413 bp, Homo sapiens
  misc_feature (1)...(413): n = a,t,c or g
cagagggctgtggcgtgaacatctttgctgagctggggcgctactacgtgacctcggccttcactgtggcagtcagcatcattgccaagaaggaggttctgctagaccagcctggcagggagggtaggtgccaggtgggcagtggagccctgttctcccctgaagcttcagatagtggttggctgagcaggatctggttttagacccagtggcagaggatgggggaatctggagaatgaatgggttcttgctttagggaaactttcagtcaagtcgccccaccccaagacatttatttagcatcttttttcctaggcatgttcatattttgtgaagattgagagcaaaacaaccttagagagaatagatactctgttgannnnnnnnnnnnnnnnnnnnnnnnnnnnatgtat

SEQ ID NO: 110176 - DNA, 485 bp, Homo sapiens
  misc_feature (1)...(485): n = a,t,c or g
aatacactctccagtatgaattttctcatgtttattcaggtgtgaggaatgcataaaggctttcccacattctttacatttgtagggtttatctccagtatgaattttcttatattcattcaggtttgtggaccatccaaaggctctgtcacgatcttcacctgtgtaagctttctctctgttgtgaattctcttatgtgcagtaaggtttgttgacctattaaaggctttgccacattcttcacatttgtaaggtttctctccagtatgaattttcttgtgttgattcaggtctgtgtaccatccaaagtctttgccacgttcttcacaagtgtagggtttctctccagcatgaattcctttatgttgagttaggtctgagaacttctgaaatgacttgccacattcgttacatttaaagtgtttctctccagcatgacttgccttatctttggtngaatttgcaaatttactaaaacctttgg

SEQ ID NO: 110177 - DNA, 412 bp, Homo sapiens
cagcgacctggccctgcgcaactgcctgctgacctctgacctgaccgtgcgcatcggagactacgggctggcccacagcaactacaaggaggactactacctgaccccagagcgcctgtggatcccactgcgctgggcggcgcccgagctcctcggggagctccacgggaccttcatggtggtggaccagagccgcgagagcaacatctggtccctgggggtgaccctgtgggagctgtttgagtttggggcccagccctaccgccacctgtcagacgaggaggtcctcgccttcgtggtccgccagcagcatgtgaagctggcccggccgaggctcaagctgccttacgcggactactggtatgacattcttcagtcctgctggcggccacctgcccagcgcccatgtatt

SEQ ID NO: 110178 - DNA, 374 bp, Homo sapiens
cgacaaagtatgtcacagagcactggtgtgaagatcacttctttgggtaccagtacctgaatggtgtcaatcccgtcatgctccactgcatctctagcttgcccagcaagctgcctgtcaccaatgacatggtggcccccttgctgggacaggacacatgcctgcagacagagctagagagggggaacatcttcctagcggactactggatcctggcggaggcccccacccactgcataaacggccgccagcagtacgtggccgccccactgtgcctgctgtggctcagcccccagggggcgctggtgcccttggccatccagctcagccagacccccgaacaaaacagccccatcttcctgcccatatgtatt

SEQ ID NO: 110179 - DNA, 419 bp, Homo sapiens
cgttggcggatctcaaaaaccagatggttgagcccctatccctggcgcccacagcagtgtcctctgtgggggaccagctccaagttaaggccaaacacctgagtcaggaggtggaaggtctggagggaaagctccaatcccaggtggaaaacaatcaggccttgagtgtcctgagcaaggatcaaaagcagagactccaggagcaggaggagaaactccaggagcaggaggagatgatccgagagcaggaggcgcagagggtgcgggatctggagagactgtgtgaacaaatcgagaggcttcgggagcagcagaagacagtacgggagcagggtgagaggctacaaaagcaagagcagaggctacgcaagcacgaatgggaagcgggcgctttgagcataccccgaggttttccctcc

SEQ ID NO: 110180 - DNA, 397 bp, Homo sapiens
  misc_feature (1)...(397): n = a,t,c or g
nggttctgcagctgattcatgagagagataacatctgtaaacagatccacctgccagcccagagtggaagcagccgtgtgttggaggccatgcggagggggtcaggcttgcttggagagggggcatccctcacttttccatgtttccttaatgaccaaacggtgtccttgttgccaagaacctagcatagtgtgtggcacaaagtagctgctcagtaaatatttattgtatgactaagccactgggcactggagtttgcttctgctcacttcataagcaaaggctaaggactggtcacccattttcactgtttagtttaaaaagcataaatatttactgagcagccactgtgtgacagtaagtatttattgtatgactaagccacagggcatgtatt

SEQ ID NO: 110181 - DNA, 427 bp, Homo sapiens
  misc_feature (1)...(427): n = a,t,c or g
gcagctgattcatgagagagataacatctgtaaccagatccacctgccagcccagagtggaagcagccgtgtgttggagcccatgcggagggggtcaggcttgcttggagagggggcatccctcacttttccatgtttccttaatgaccaaacggtgtccttgttgccaagaacctagcatagtgtgtggcacaaagtagctgctcagtaaatatttattgtatgactaagccactgggcactggagtttgcttctgctcncttcataagcaaaggctaaggactggtcacccattttcactgtttagtttaaaaagcataaatatctcctgagcagccactgtgtgacagtaagtataaattgtatgactaagccacagggcatgtattgcggccgctgtagaggatccnaacttacgtcacgact

SEQ ID NO: 110182 - DNA, 398 bp, Homo sapiens
cgtggctcgtgtttatgagaagctgatcactggttgttacaacattctggccaatcatgcagatcctaacagtggactggatgaatccatcctggaggaatgtctccagtacttggaaaagcagctggaaagtagccaggctcgtaaagctatggaggagtttttctctgacagtggagaacttgtacagatcatgatggcaacagccaatgagaacctctctggtaaattctgtaaccgagtattgaaattcttcgccaaactcttccagctgactgagaagagccctaacccgagcctgttgcatctctgtggctccctggcacaactggcctgtgtggaacctgtgcgcctgcaggcttggatcacccgcatgactacatcgcccccaatgtatt

SEQ ID NO: 110183 - DNA, 433 bp, Homo sapiens
gcacgctacgtacgcttggatgctctatatcggccgcgcgggctgccagggtatttcgggaagggggcgtgaggaggcggcggcggcagcggcgggtagggctggcagcatagggaaggagaaagaaaggtaggaagagggcggggagtcctcagaggaggaggcgggaccggccgggcacctcacctgtctgatgcctgtgtacacattggtgttcttggagcccttttgcagtcatcagcatctatggatgcgcatcccgccacagcagacaatcatggatatacggcacttcactgggcttgctacaatggtcacgagacatgtgtagaactgcttttagaacaggaagttttccagaaaacggatggatatgcttttagtccattgcattgtgccgtgataaatgacaacgattgtgctgctgatatgt

SEQ ID NO: 110184 - DNA, 391 bp, Homo sapiens
acaatcaagtccgtcggcccaggaacacctggcctcgttgcaggaacaggtggctgtgctcaccagacagaaccaggatctgatggagaaggtccagatcctggagaactttgagaaggacgagacacagatggaagtggaagctttggcagaggtcatccctcttgccctctatgactctctccgggccgagtttgaccagctacgcaggcagcacgctgaggccctgcaggccctgaggcagcaggagacacgagaggtccccagagaagagggggcagcctgtggggagagtgaggttgctggagccacggccaccaaaaacgggccaacccacatggagctaaatggctcagtggctccagaaaccaaagttaacggagcctgtatt

SEQ ID NO: 110185 - DNA, 614 bp, Homo sapiens
  misc_feature (1)...(614): n = a,t,c or g
aaactgttcccaagcctttgacaagttacccagttccaaaagccccttccanantttcgggtatcttttcagnaacgccccactctantggtaccaatttactgtattactctgttttcacgctgctgatgaagacatacccaagactgggcaatttacaaaagttccacgtggctggggagttccttaaaatcatggcagaaggcaaaaggcacgtctcaccagccctgttccagtcacgggtgatcaccgtgcttctccagttgtttgaagttcatgaagagcatgtgcggatggtgctgctgtctcacatcgaggcatacgtggagcacttctctcaggagcagctgaagaaagtcatcttgccacaggtcagaggccaagtttgcagtggggtagtcacagaacctgagggaagagtgctgaaagaaagagttttggaggtattcagataatagcttagaaagccttcaggcagcagtctgtggaatacaaagtgctgaaattaaagttgcatttccattccattcacacaggcaaattgattaacctgacatatttggtcttaacctgggagaaactataattgtttgttaattttgggagggtgtatt

SEQ ID NO: 110186 - DNA, 389 bp, Homo sapiens
  misc_feature (1)...(389): n = a,t,c or g
nggggaccctgtcataccctgttgtgtctgtcgtcagtgaatccctgagtccagaacgcagtcagctcctctatctccttgctgaggctgtggtcatcattctgtttattattctgctgggggtaatcatggcaaaacgaaagcgtaagcatggctctctctgtctgcctgaaggtttcactcttcgccgagatgcaagcaatcacaagcgtcgtgagccagtgggacaggatgctgtggggctgaaaaatctctcagtgcaagtctcagaagctaacataattggtactggaacaagtgaacagtgggtcgatgatgaagggccccagccaaagaaagtaaaggctggagataagtcattactctcagaagaagacgacccctgtatt

SEQ ID NO: 110187 - DNA, 500 bp, Homo sapiens
tttttaacattaaagcaattgaaatatttattgatgtttcaactatgaaatttgacatgttgctgcaacaggaaaactcatggctctttagggaaaatgagtgcctggctgactaccatccgtgcagttttgctccagaccccattcccgttcactggtgtcgttcatattcgcgtcttccctgtttcctttattctccccacctgccccctctcacactgcatgtgctttcctgtttgcttttagccatcatgtgttcagtgaagccagacggggttcctcagctgtgcagaacggatgacatcggggagctgtgtgtgtgtgcagttgcgacgggcacgtcctactatggcctctctggcatgaccaagaacacctttgaggtaggtggaggagagtcttaccatgggcaccatctgtggctccgtctccaaagagcccttgccaggtgcatagtgatagacgtggaatgtaagatccattttagcaagacgtgtatt

SEQ ID NO: 110188 - DNA, 389 bp, Homo sapiens
  misc_feature (1)...(389): n = a,t,c or g
aatacagccttctcagattcttctggagctggagatgaactcggacctcaaggcccagctcagggaactgattattacagcagtgagggaaactgaagttggtggtggtgagaaagttatcatgnnnnnnnnnnnnnnnnnnnnnnnnnnnnnnnnnnnnnnnnnnnnnnnnnnnnnnnnnnnnnnnnnnnnnnnnnnnnnnnnnnnnnnnnnnnnnnnnnnnnnnnnnnnnnnnnnnnnnnnnnnnnnnnnnnnnnnnnnnnnnnnnnnnnnnnnnnnnnnnnnnnnnnnnnnnnnnnnnnnnnnnnnnnnnnnnnnnnnnnnnnnnnnnnnnnnnnnnnnnnnnnnnnnnnnnnnnnnnnnnnnnnnnnnnnnnnnnnnnnnnnnnn

SEQ ID NO: 110189 - DNA, 387 bp, Homo sapiens
actttgcccccttactgaagaggtccatgatgactcagcttacagggaaaatggttttaatattttcgtcagcaacaatattgctctagagaggtctctgccagatattcgtcatgctagctgtaagcataagatgtatctggaaaggctgccaaacaccagcatcattatcgcatttcataatgaaggttggacttcgctcctgcggaccatacacagtataattaaccgaaccccagggagtctgatagcagaaatcattctagtagatgacttcagtgagagagaacacctgaaggataaattggaagaatacatggcccgattttccaaagtgaggattgttcgcaccaagaaaagagaaggactcatccggacccctgtatt

SEQ ID NO: 110190 - DNA, 418 bp, Homo sapiens
  misc_feature (1)...(418): n = a,t,c or g
ctgtgttggagggagcaggcaaaggaagggtacctacccggaagctgaggcccccaagttgcaatagaggaccctcttgcctcagggccccccagaaccaaacttaagtgcctgccaggaggaaggcctgcagtagaaggggcagacagaaagaccaaagaaggaaaaggggcaggcagagaatgaggctccgaggggcccatgcccagctctgcaatatactctgcccctcagaaccactcgtggggccgccagtattcccatgccctgttcaagaccatgagccacatgctgtgcattggctatgggcagcaggcacctgtaggcatgcccgacgtctggctcaccatgctcagcatgatcgtaggtgcctgtattgcggccgctgtagaggatccnagaatacgtcaggggcttc

SEQ ID NO: 110191 - DNA, 412 bp, Homo sapiens
aatacagggtgccatgctgtggtgagccaggtgggactgtcccagtggcccagctggctgcaggccaaagtcctggggttgctgcgagggttgctgtggcaatggaaatagaagttcctcaaaagaacggcaatctggggtagggctgcctgctgctgctgctgctgctgctgtggatgctgctgctgctgctgcttctgtggagggaaggcagccaccgggtttgggggcggtgggccctgccggaagacctgccggttcacctggtggccgaatgccagctggaagggttgcaggggcagcgactggtttgggggtttcttggctgcgtggaaagaattcaggggtgcctggggccgccctacctccagctgcaccttctgtggcatcattggtcgcacatagcggaccg

SEQ ID NO: 110192 - DNA, 394 bp, Homo sapiens
taggggttcaagccgggcatgctcagagactgcagctccaaaaagaggctctagatgagcagctgtcccaggtccgagaggccgaccggcacccgggcagccccagacgggaacttcctcatgcagctggtgcaggagacgcttcagaccactcgggaagccctgaacagcagttggatgaaaaagatgcccggcgcttccagcttaaaatcgcggagttaagtgcgattatccgcaaactggaggtccgcaacgcattgctgtcggaagagaggaatgagctgttgaagcgcgtaagagaagctgagagtcagtacaagcctctgctggataaaaacaagcgcctcagtcggaagaacgaggatttgtctcatgctttacgccgaatggcgaa

SEQ ID NO: 110193 - DNA, 385 bp, Homo sapiens
cctgcctctcctcacagagtcagtgacctgaggatgatagacatgcacgctcactataatgcccacggcccccctcacaccatgcagccagaccgggcctctccgagccgccaggcctttaaaaaggagccaggcaccttggtgtatatagaaaagccacggagcgctgcaggattatccagccttgtagacctcggccctcctctaatggagaagcaagtttttgcctacagcacggcgacaatacccaaagacagagagaccagagagaggatgcaagccatggagaaacagattgccagtttaactggccttgttcagtctgcgctttttaaagggcccattacaagttatagcaaagatgcgtctagcgagaaattgtatt

SEQ ID NO: 110194 - DNA, 425 bp, Homo sapiens
agtcgcaattcacaccttgtagaacattggagaattcatactggacagaagccttacaaatgtagtgaatgtgacaaggtgtttaatcgcaattcaaaccttgcccgacatcaaagaattcatactggagagaagcctcacaaatgtaacgaatgtggcaaagcttttagagagtgttcgggacttactacccatcttgtaatccatactggagagaaaccttacaaatgtaatgagtgtggcaagaacttcaggcacaaattttctctaaccaatcatcagagaagtcacacggcggaaaaaccttacaaatgtaatgaatgtgccacggtctttagtctgctttcataccttgcacggcaacaaataattcatagtacagagaagcatgtatgcggccgctcggaggttcacgcaagaaccac

SEQ ID NO: 110195 - DNA, 384 bp, Homo sapiens
agtgggccttttcattggaaattgtattatcttcctcgctggcgtctgcaccgtgctcctccccggagtatgcaccctcttcctccccagcccatgtcgggtcttcctcgctggcgtccgcaccgacctcctccctggtgtctttaccgtcttcctccccggcccgtgtcatgtcttcctcaatggtgtccacaccgtactcctccctggcgtctttaacgtcttcctccccggccggtgtcggatcttcctcactagcgtccgcaccctcttcctgcctggcccgtgtcaggtcttcctcgctagcgtccgcaccatcttcctccctggcatctttaacgtcttcctccccggccagtgtcgggtcttcctcgctggagaccg

SEQ ID NO: 110196 - DNA, 452 bp, Homo sapiens
ggtcatccagtaatggcagctggaagcccatgtggccatattggactctgggatctagaagacaaaaaattaatcaaccaaatgagaaatgcacactctacagcaattgccggactgacatttctccatagagagccacttcttgtcacaaatggcgctgacaatgctcttaggatatggatatttgatggtcctacaggtgaaggccgacttttgagattcagaatgggtcatagtgctcctcttaccaatatcagatattatggacagaatggacagcagattctaagtgcaagtcaagatggaactcttcagtcattttccacggtacatgaaaaattcaataagagcttgggacatggattaataaataaaaagagagttaaacgtaaaggacttcagaataccatgtcagtgagacttccacccatcacaaagttttgcagcagagg

SEQ ID NO: 110197 - DNA, 427 bp, Homo sapiens
  misc_feature (1)...(427): n = a,t,c or g
ngacagcaggaacaagattgaggaattacaacaacggaaggaagctgatcacaaagcccagttggctcgaacccagaagctgcagcaggaacttgaggctgccaatcagagcttggcagagctgagagatcagcggcagggggagcgcctggaacatgcagcagctttgcgggccctacaagatcaggtatccatccagagtgcagatgcacaggaacaagtggaagggcttttggctgagaacaatgccttgaggactagcctggctgccctggagcagatccaaacagcaaagacccaagaactgaatatgctccgggaacacacccctgggctggcagctgagttgcagcagcagcagaatgagtacgaggaccttatgggacagtgtattgcggcggctctggcctaaacgcaacggcacgct

SEQ ID NO: 110198 - DNA, 417 bp, Homo sapiens
  misc_feature (1)...(417): n = a,t,c or g
nggacggtcgaattgagaacgattccctctgcctctatacccatggagagtacatcacccttgtgctgaacagtgggagtggcctgtcgcatgtttacgccaaccagtcggtccaggaagacccccggatgatggccttctttgactcactggtacgccgagagatcgagggctggagctctgactcagacagtgacctcagtgagagtactatcctccagctgcacgctggggtcagcgagcgctcaggctacactgactcagagtcttcggcctcattgcctcgctccccgcctcccacagtagatgagtctgcaaacaacgccctccacctggggcccctgcgggtcaccaacacaaacacagtagcctcaactccaccaccaatgtattcgngccgctcgatatcctccaggg

SEQ ID NO: 110199 - DNA, 393 bp, Homo sapiens
  misc_feature (1)...(393): n = a,t,c or g
aatacaatgtccggcgaaggttttcatttcgtcttctagtttcttgagtaagaaagatttcccacttccccactgtgcatataaccccacacaaatgggtggctgcatggtaggctcactgagaatatctgccagggcactgctatataaatcatatccaagcatgtcaccgtctgtttcagtaggagacaagtgtctggctccaaatatttgagttaaaatactcttctgatggctacagtcaatattataaggagtctcgcctgctttgttgggcctataaagtaatcgcccatctttgggatttcttaaaagcagttctgccagtttccggctccttccacgaatagcaatatgcaagggagtatctcctttcttatctacagcagacan

SEQ ID NO: 110200 - DNA, 392 bp, Homo sapiens
  misc_feature (1)...(392): n = a,t,c or g
nggcctcacagctgagtctacatcaaagaattcatgctggtgagaacccccatgaatgtaaggaatgtgggaaagcctttatctctgattcacatcttattcgacatcagagtgtccatactggggagaaaccttataagtgtaaggaatgtgggaagtcctttcgtcgtggctcagaacttacccgacatcagagagctcatactggtgaaaaaccctatgagtgtaaggaatgtggaaaggcctttacttgtagcacagatcttgttcgacatcaaaaagttcgcactggggagagaccccataagtgtaaggaatgtgggaaggctttcattcgaaggtcagaactcacacatcatgagagaagtcactctggtgagaaaccctgtatt

SEQ ID NO: 110201 - DNA, 402 bp, Homo sapiens
ctcatatgtgattcagctgttccagcgtctttctgggacggaatgttggtacccattggtgataagccgtcaaccattgctgataggttatacctcggggcacccacgagcgtccgcggattcagcatgcacagcatcggtccacagagcgaaggagtctacctaggtgtagaagcgtactgggccggcggcctgcacctctacaccccattacctgtccggccaggccagggtggctttggagaacttttccgaacacgcttctttctcaacgcaggaaacctctgcaacctcatctatggggagggccccaaagctcatattcgtaagctggctgagtgcatccgctggtcgtacggggccgggattgtcctcaggcttggcaccatcgctcagtgtatt

SEQ ID NO: 110202 - DNA, 423 bp, Homo sapiens
cagagttaataagcaagatacagccgatctgatccgaccgaagcggaaatatgaaaagaagcccaaagttttctcatcgtctgccgctggtactccccaacagacgagtcctgctgcactgccagtcttcaatgctaaagatctgagtcagtatgactttcccagctcagacgaagaacctctctcccaggttttgtctggctcttcggaagctgaggaagccaatgatcctgatggtccttctgctttccgtaggaaagcaggctgtcagtactatgctcctcacttagaccaaactggcaactggccttggactagtcctaaagatggaggattaggggatgtgcgatatagatactgcttacctactctcaccgtacaccaaaggtgtattggatttgcacgaatgggtaagcgcgtgcc

SEQ ID NO: 110203 - DNA, 427 bp, Homo sapiens
ctacagaaggtcaggggtcagagatacaaccaggtgatttggatcctttgtcaaggggtcatgaaacatcaggcaagggtttggagaagacttcccttaatataaaacgagactttcttggtttcatggatactgattcagcacttagtgaagttcctcaattgaagcaagagatttctgaatgtcttattgccagcagttttgaagatgactcccgtgtagcctcaccgttagaccagaacggaagcttcaatgttgttattaaagaggaacctctagatgattatgactacgaacttggtgagtgcccagaaggggtcactgtgaaacaggaagagacagatgaagagacggatgtatactcaaacagtgatgatgatcatataataaagaaacagctaaagaggcactatgtattacggcggct

SEQ ID NO: 110204 - DNA, 428 bp, Homo sapiens
ccgctgctctgtggggacctacaacagctcgggtgcctaccggttcagctctgagggggcgcagtcctcgtttgaagatagtgaagaggactttgattccaggtttgatacagatgatgagctttcataccggcgtgactctgtgtacagctgtgtcactctgccgtatttccacagctttctgtacatgaaaggtggcctgatgaactcttggaaacgccgctggtgcgtcctcaaggatgaaaccttcttgtggttccgctccaagcaggaggccctcaagcaaggctggctccacaaaaaaggggggggctcctccacgctgtccaggagaaattggaagaagcgctggtttgtcctccgccagtccaagctgatgtactttgaaaacgacagcgaggagaagctcaagggcacctgtatcgcgg

SEQ ID NO: 110205 - DNA, 622 bp, Homo sapiens
gcctcccaggctgggcctcccgggagcagccgcaagtgttcaccagggtcacccacagatcctaatgccaccctgagcaaagacgaggcagcagtgcaccaggacggcaagccacgatacagctatgccactctcatcacctatgccatcaactcctctccagccaagaagatgaccctcagcgagatttaccgctggatctgtgataacttcccctattacaagaatgctggcattggttggaagaattcaatacggcacaacctttctctcaacaagtgtttccggaaggtgcccagacctcgggatgaccctgggaagggttcctattggacaattgacacctgccctgacatttcccgaaagagaagacaccctccagatgatgatctgtcccaagactcaccagaacaggaggcaagcaagagcccacggggaggcgttgcagggagtggagaagcctcactgcctcctgaggggaatccgcagatgtcacttcagagccccacatctatagccagctacagccagggcacaggatctgtggatggtggagcagtggcagcaggggcttcaggccgagaaagtgctgagggtccccctcccctctataacaccaacc

SEQ ID NO: 110206 - DNA, 380 bp, Homo sapiens
cctccaaagaaaatagagtcttagaagatgtgtaattcatcaaaagtgtaatgccattgtaagctcagtggtgtttagtaaacccgagagtagtatccccatctgggctgccttagtccaacaagagtattgtgttcagctttgggtaccatattttaagaaagatattggtaaacaggtataactggaatggtaaaagtttgaaaatacgtcatgtggtagcagaaggaacacaaatgttgtgtttgtaaataaagcaatggtaagtccctcaaattagtttagagtcagtaaagggttcccagataaaagaaaaataggtcttattctcgataccagaaggcaagactaaacattctaggaatatgatacagggcgaa

SEQ ID NO: 110207 - DNA, 422 bp, Homo sapiens
  misc_feature (1)...(422): n = a,t,c or g
aacgccgagctcacccgcgtgccgctcaagcggctggacctgatctttgtcaccttccaggactccaggatggccaagcgtgtccgtaaggattacaagtatgtccagtgtggtgtgcaaccccagcagtcctcagtgaccaccatcgtcaaatcatattactggagggtcactatggccccacaccccaaagacattatttggaaacacctgtctgtccgccgcttcttttggtgggcccgctttatcgcaatcaacaccttcctcttcttcctcttcttctttctcaccacgcctgccatcatcatgaacactatcgacacgtacaacgtcacccgccccatcgagaaaaaacagaacccaattgtgacccagtgtattgcggccgctctaganggccnactntcaagggcttcgaataa

SEQ ID NO: 110208 - DNA, 422 bp, Homo sapiens
taaataaggcaactctttttgaggtaatgctttctgatgagtgtatcatggatgtcgtgggatgccttgaatatgaccctgctttggctcagccaaaaagacatagagaattcttgaccaaaactgcaaagttcaaggaagttataccaataacagactctgaactaaggcaaaaaatacatcagacttacagggtacagtacattcaggacatcattttgcccacaccatctgtttttgaagagaattttctttctactcttacgtcttttattttcttcaacaaagttgagatagtcagcatgttgcaggaagatgagaagcctttgtctgaagtttttgcacaattaacagaagaggctacagatgatgataaacggcatgtattcggccgctgtgagtatcaaaatacgtcggcggcc

SEQ ID NO: 110209 - DNA, 424 bp, Homo sapiens
ggaagaaaagctttatgagtgtagtgaatgtgggaagttctttatggacacttccacactcattattcatcaaagagttcatactggagaaaagccttatgaatgcaacaaatgtgggaaattctttaggtattgcttcacactgaatagacatcagagagttcactctggagagaggccttatgaatgcagtgaatgtggcaaattctttgtggacagctgtacactgaagagtcatcagagagttcacgctggagaaagaccttttgaatgcagcatttgtgggaaatcctttagatgtcgctccacacttgatacacatcagagcattcacactggtgaaaggccttatgagtgtaaagaatgtgggaaattctttaggcacaatgtattcgcccgcgtgggtttcctaaatacgtccttt

SEQ ID NO: 110210 - DNA, 419 bp, Homo sapiens
gcgtccaattatgtcagtgactggtgggaggaatttgtgtacctgcgctcccgaaatccgctgatggtgaacagcaactattacatgatggctttcctgtatgtcacacccacgcctctgcaggcagctcgcgctgggaatgccgtccatgccctcctcctgtaccgccaccgcctgagccgccaggagatacccccgactttgctgatgggaatgcgccccttatgctctgaccagtacgagaagatcttcatcaccacgcggattccaggggtccaaaaagactacatccgccacctccatgacagacaacacggcgctgtcttccaccggggccgattcttccgcataggagacccactcccgaagcagccgtgtatgcggccgctctgaggattcacctaacgtcgcagcagttg

SEQ ID NO: 110211 - DNA, 379 bp, Homo sapiens
  misc_feature (1)...(379): n = a,t,c or g
acagatgccgggggactacagctgcgaggccaggggccagagggtctccttccgcctgcgcatctcagagcncaagatgatgtttgcaaaggagcagtcagtgcataatgaggtgcaggctgaggcgggggccagtgccatgctgagctgtgaggtggcccaggcccagacggaggtgacgtggtacaaggatgggaagaagctgagctccagctcaaaagtgggcatggaggtcaaagggtgcacacggaggctggtgctgccacaggcgggcaaagcagatgctggggagtacagctgtgaggctgggggccagagagtctccttccacctgcacatcacagagcccaagggggtgtttgcgaaggagcactgtatt

SEQ ID NO: 110212 - DNA, 374 bp, Homo sapiens
tggtggcacggctcgttgaaagcacagtccctgtctcttttgtctgagtccctattgttctgaaatagtccaataaagagattccggtggccggcctggtgcctggcccctgactggtggggacatgtgtggacctgctgctcctggggttcgctggatgggggcttcgtgctcccatgttcttcagcacttgccagccgccccttggctaaagaccaaagatgacagccgagccccgggatatgtttgatccccatggctggtctgaggactcctactatgaggcattagccaaggcccagaaaattcagatggtcaaattggaaaaggccaaaaaggagcgaacaaaaattgagtttgtgacgggcgtgtat

SEQ ID NO: 110213 - DNA, 419 bp, Homo sapiens
aaactgggtctcctgcctcacctcagagctctgataggtacacagaccccctaccccaagacagcaggatgaggcggtggtttccctcccacagagcccccaaaacaacgccacagttatagctaacaccacttccagctgactggtaggcccggggtaaccttctcccactggcaggcagcagaagtctcagggaggccatgagtggctccacgtgatcacacggggcactgggtgggacaggtagatgcctgtccccatggccagcagctccggagcagctcctcagcttgtgtcttgcatctctttcagcctcccggaggagttcctgggacacagccattgctgcccaattctatggatcccacacctgtattgcggccgctctagagggtcttacctaacgaagcagcatgtcg

SEQ ID NO: 110214 - DNA, 405 bp, Homo sapiens
  misc_feature (1)...(405): n = a,t,c or g
nagctgcagtcagagctgctagagctgtaaattatgttggagcagggactgtggagtttattatggactcaaaccataatttctgtttcatggagatgaatacaaggctgcaagtggaacatcctgttactgagatgatcacaggaactgacttggtggagtggcagcttagagtgagaatattttttctattaaaaatcagccnnnnnnnnnnnnnnnnnnnnnnnnnnnnnnnnnnnnnnnnnnnnnnnnnnnnnnnnnnnnnnnnnnnnnnnnnnnnnnnnnnnnnnnnnnnnnnnnnnnnnnnnnnnnnnnnnnnnnnnnnnnnnnnnnnnnnnnnnnnnnnnnnnnnnnnnnnnnnnnnnnnnnnnnnnnnnnnnnnnnnnnnnnnnnnnnnnnnntatt

SEQ ID NO: 110215 - DNA, 405 bp, Homo sapiens
ggcaaaggttcatctaccgcatttacgccagcctgcgcatcgaggagctcttcagcatcgtccgagacttcccagactcccggccagccatcgaggacctcaagtactgcctggagaggacggaccagaggcagcagctgctcgtgtccctcaaggctgccctggagactcggctcctgcatccaggcgtcaacacgtgtgacatcatcaccctctatatctctgccatcaaggcgctgcgtgtgctggacccttccatggtcatcctggaggtggcctgtgagcctatccgccgctacctgaggacgcgggaggacacagtgcggcagattgtggctgggctgacgggggactcggacgggacaggggacctggctgttgagctgtccaagaccgagctgtatt

SEQ ID NO: 110216 - DNA, 402 bp, Homo sapiens
atggaaatgggggcttcgtagttcattggttaaacaacaaggaatttcattttacatcatctacagaagtatttatgcatcaattacgaaagctttctgataagcaggtagatcatgaaaatgatgatgcagatagagaagatgaggaacattcacaggaggatagagaacggggtttacatatgaaattagaccatgatttatccctggatagagaatctgaggcaggtacaggatcctcagaacatgaagatggagaaagagaaggaagtcctagaacctactcacgacttagtgtaccaatgccactgcctacggttctgcttgatcggaagattgaaacgctgctaactgaatggaataagaatcctgatatgctttttacaatacaccctatgtatt

SEQ ID NO: 110217 - DNA, 397 bp, Homo sapiens
ccacccagtacaggtggcccaagcggggccagatcatcaaggaggcatctggagaggtgtacaggtccacagtggtctacacgtacttctcagagcccgtctcctgtgagttgggccccggatgaccacagaaccccaatccttgctcgtggatctgggctctgatgccatcttcagctgcgcctggaccggcaacccatccctgaccatcgtctggatgaagcggggctccggagtggccctgagcaatgagaagaccctgaccctcaaatccgtgcgccaggaggacgcgggcaagtacgtgtgccgggctgtggtgccccgtgtgggagccggggagagagaggtgaccctgaccgtcaatggaccccccatcatctccagcaccactggcgaa

SEQ ID NO: 110218 - DNA, 395 bp, Homo sapiens
ggtgatcgcagaaaatcagggcaagattaagacgtacatcagtcaagtgtgtgatgactccatggtctgtcgcttggactcagctgtgcatatggctgggctaagactgttaaccaacatgactgtgactaatcattgccaacatttgctttcctattcttttccagacttttctgctttgttattcctgggaaatcacttcaccaagatacagattatgaaactaattataaactttaccgaaaatccagccatgacaagagagctggtcagttgtaaagtaccatcagaattgatttccctctttaataaagaatgggatagagagattcctcctaatatccttaccctatttgagaatataaatgacgacataaataatgaagggcatgtat

SEQ ID NO: 110219 - DNA, 398 bp, Homo sapiens
  misc_feature (1)...(398): n = a,t,c or g
aatacatggccttgactgagtgcaggagggcgccaccacctttctttagattgtcggcccagagctgataggatcgaagggcccctgaggaggccccgcagccagtgatctcctgctcgaattgatctgagaagccctcccccttgttgagcttctccagccgggcttcgatgaactgtttgaacagctgcaggtgcacagcccgccggtggaaggcctgcagaggtgccccaggcttctgggccaagaagacttcctcactgaaggtcactggctggcccgggctgcagacgagtgcgtcgcggtaccccccgaagagcagggcctgggctttgaggaagagacgggacaccccttccccggnggccaggggcgacctttctgagccggagccttaa

SEQ ID NO: 110220 - DNA, 396 bp, Homo sapiens
cttggggatgggtactctatctcagagaaagggccatggccccagtgagtgggatgccagagctggatctgtgttgggactggtactctatctcagagaaagggccatggccccagtgagtgggatgccagagctggatctgtgttgggactggtactctatctcagagaaagggccatgaccacctaggtttctcatttcatcaggggtcttatacagcatgggcagtagtaacaaggcaagtgattaagagctgggatggatgggctggcatgtttttaaactttctccttctacctcagcggtgtctcctgcacacactagctacagtgagcccatgagcacactgagatatgcatccagtgccaaaaacattatcaacaagccacgtgtatt

SEQ ID NO: 110221 - DNA, 406 bp, Homo sapiens
actacgagttcatagtgagcccatcctctgcacgggctggaggccctgacagcaacgtgctgctccttaggctgccggaaaaagtgctcagtgccccacctcaggaagtgactctaaagcctggcaatggcactgtctttgtgagctgggtcccaccacctgctgaaaaccacaatggcatcatccgtggctaccaggtgtgtagtttgggcaacacatctctgccgccagccaactggactgtagttggtgagcagacccagctggaaatcgccatccatatgacaggctccttctgcgtgcaagtggctgcagtcactggtgctgcagctggggagcccagtccacctgtctgcctccttttagagcaggccatagataaagccagtcaagaatacagtgtatt

SEQ ID NO: 110222 - DNA, 410 bp, Homo sapiens
caagactctgagttcaaggtgagcccatcttctgccagggctcgagtccctgcaagcaacgtgctgctccttaggctgccggaaaaagtgaccagtgcaccacctcaggaagtgactctaaagcctggcaatggcactgtctttgtgagctgggtcccaccacctgctgaaatccacaatggcatcatccgtggctaccaggtctggagtctgggcaacacatcactgccaccagccaactggactgtagttggtgagcagacccagctggaaatcgccacccatatgccaggctcctactgcgtgcaagtggctgcagtcactggtgctggagctgaggagcccagtagacctgtctgcctccttttagagcaggccatagataaagccagtcaagaatacagtgtatt

SEQ ID NO: 110223 - DNA, 560 bp, Homo sapiens
catatgctgtgcgtgtcagtcagcaatacagcttgtgttcgcagatattccttgatgacagcacagccatccagcattatcttacaatggcaataatatctgtgaccttggagatacctcatcatatcacacaaaaagatgcagatagaactttgagcatacctgatgaacagttaccctcatttgcggtttccaccgtgcacattatgaagaaaagaaatggaggtgggagtttaaataactattcctcctccattccatcgactgccagcaccagccaggaggtccctcagttcagtgttcctcccactgccaacacaaccacgtccgtttgcaatcggtccatgcgctgctccaccctgtttacatctgagaaagggagtgaaccagacaaagagaggaaagccccggagaatcatgctgacaccatcgggagcggcagagccatccccattaaacagggcatgctcttaaagcgaagtgggaaatggctgaagacatggaaaaagaaatacgtcaccctgtgttccaatggcgtgctcacctattattcaagctta

SEQ ID NO: 110224 - DNA, 231 bp, Homo sapiens
tgatggtatcaggcaatgaagtagagtatcttgatttaaatcatttctccggagtgatatccttcaagcgcccttttatcaatcatactgttggtcaaccccccagctattccctgaagattacagcgtcagatggcaaaagctatgcctcaccctcaacttttaatattactgtggtgaaggaccctcattctgaagttcctgtaacatgtgataaaacaggggtgtatt

SEQ ID NO: 110225 - DNA, 231 bp, Homo sapiens
aatacagggggcgctgctggaggacacagagaccaagaacgctgtgctggagcacatggaggaactgcaggagcaagtggcgctggtgagagtgggtcctgaccccagcccagcacatcataggcccacagggcacacgggccacagggccacgcaagcatgggcactgggcagcagacagtgttataattgtgcattggaggtgctgcctgcctggccccagagcctgga

SEQ ID NO: 110226 - DNA, 232 bp, Homo sapiens
tgggaatgtgggggtttcacgaccgggacctggtgttacggaaagctctctataccatgatgaggacgggagctgagagggaagccctgaagcggaggtggaggtggcagcagacgcagcagaataaggagtcagggctggtgtacacagaggaggagtgggagcgggagtggacggagctgctgaagctggcctccagcgagccgcgcacacacttcagcaagaatgtatt

SEQ ID NO: 110227 - DNA, 286 bp, Homo sapiens
ctgggaatgtgggggtttcccgaccgggacctggtgttacggaaagctctctataccatgatgaggacgggagctgagagggaagccctgaagcggaggtggaggtggcagcagacgcagcagaataaggagtcagggctggtgtacacagaggaggagtgggagcgggagtggacggagctgctgaagctggcctccagcgagccgcgcacacccttcagcaagaatgtgttgcgcacgctctatagaatccccgcttacgtgcgcgggcatgccacatgagact

SEQ ID NO: 110228 - DNA, 419 bp, Homo sapiens
aaacacatgctgatcctcataattcccgacgtggctttttcttctctcacgtgggttggctgcttgtgcgcaaacacccagctgtcaaagagaaggggagtacgctagacttgtctgacctagaagctgagaaactggtgatgttccagaggaggtactacaaacctggcttgctgctgatgtgcttcatcctgcccacgcttgtgccctggtatttctggggtgaaacttttcaaaacagtgtgttcgttgccactttcttgcgatatgctgtggtgcttaatgccacctggctggtgaacagtgctgcccacctcttcggatatcgtccttatgacaagaacattagcccccgggagaatatcctggtttcacttggagctgtgggtgagggcttccacaactaccacctatgtatt

SEQ ID NO: 110229 - DNA, 426 bp, Homo sapiens
acttcccacctggcgactcctatgggatgcagggcagcgtggaggaggtgctgaagaccgtggcaaccatccgggacaaggggcgggccaaccacagtgccttcctctttggctttggggatgggggtggtggccccacccagaccatgctggaccgcctgaagcgcctgagcaatacggatgggctgcccagggtgcagctatcttctccaagacagctcttctcagcactggagagtgactcagagcagctgtgcacgtgggttggggagctcttcttggagccgcacaatggcacatacaccacccatgcccagatcaagaaggggaaccgggaatgtgagcggatcatgcacgacgtggagctgctcagtagcctggccctggcccgcagtgcccagttcctatacccagcagccctgtatt

SEQ ID NO: 110230 - DNA, 391 bp, Homo sapiens
  misc_feature (1)...(391): n = a,t,c or g
ctgtggaataagccattggtgggtgtgaaccactgtataggccacattgagatgggccgcctcatcactggagccaccagcccanccgtgttgtatgtgagtggaggaaatacgcaggtatttagagggctctacccactccatctcaatttctgaggcactgaaccagtattttctttgttctatctgagtcatgggaatgtcagaaacaaagatggacttatctgaacctaaaatactgtagaccagaaaacccccaacagagtttgtaacattgcaaattttggcagcatgatcagaacattagatggcttatcattatcagactttatatctgattataaagattaggaatttctacttcaggaaaggaatgaatgggatatgtatt

SEQ ID NO: 110231 - DNA, 393 bp, Homo sapiens
cgagattggagcagaaactggagcaagaagtgggcctggggctgaagtagagaccaaggccactgctatagccatacacagagccaactctcaggccaaggcaatggttggggcagagccagagactcaatctgagtccaaagtggtggctggaacactggtcatgacagaggcagtgactctgactgaggtcaaggccaaagccagggaagtggccatgaaagaagcagtgacccaaactgatgctgaggctggcaaaatagttaagaaagaagcagtgacacagaccaaggctaaagcttgggcgctggttgccaagacagaggccaagagagaagcaatgacccagaccaaagctgaaactcatatattggctgaaaaagagactgtatt

SEQ ID NO: 110232 - DNA, 423 bp, Homo sapiens
  misc_feature (1)...(423): n = a,t,c or g
gacaaaagtacttgatgcgggaatccatagatgttcacagcgttgtcaccgaggtccctgtgaaacatgtagacaagaagtggaaaagcattgtcgctgtggaaagcatacanaacgaatgccttgtcataaaccttatctgtgtgaaactaagtgtgttaagatgcgtgactgtcagaagcatcaatgtagaagaaagtgttgccctggaaactgtccaccttgtgatcaaaactgtggacggactttaggatgtagaaaccataagtgtccatctgtctgtcacagaggcagttgctatccctgcccagaaaccgtagatgtgaagtgtaattgtggcaatacaaaggtgacagtgccctgtggccgagaacgtaccacaagaccacccaagtgcaaggagcaatacatgtccggtgtatt

SEQ ID NO: 110233 - DNA, 326 bp, Homo sapiens
actatacggctgcgagaagacgacagaagggcttggtttaaaagaagcctcctaatgcatctgtattctgatcggtgttacgtcaattcaacagtgagatgcagttttattaaaagctgatacttggctgggtgcagtggctcatgcctgtagtcccaacactgtgggaggccagggcaggcaagatcgcttgagcccaggagttaaagaccagcccggacaatatggcaaaaccctgtctctacaaaaaatacaaaaacaaccccggcgtgttgtgggaggttgtagtgagatggagatgtaggagatgtaggatgtaggagatg

SEQ ID NO: 110234 - DNA, 416 bp, Homo sapiens
  misc_feature (1)...(416): n = a,t,c or g
natgaagctgcagttgatgccatcctctccctaaatattatttctgccaagtacctgaagtcttcccacaactctagcaggaccttctaccgctttgaggctgtgtgggatagctctctgcataactcccttcttgtgaaccgagtgacaccctatggagaaaagatctacatgaccttgtcggcctacctagagctggatcattgcatccagccggctgtcatcaccaaggatgtgtgcatggtcttctactcccgagatgccaagatctcaccaccacgctctatgcgtagcctctttggcagcggctactcaaagtcaccagattcgaatcgagtcactggcatttacgaactcagcttatgcaaaatgtcagacacaggtagtccaggtatgcagagaaggagaagtgtatt

SEQ ID NO: 110235 - DNA, 391 bp, Homo sapiens
  misc_feature (1)...(391): n = a,t,c or g
natttacccactggcccaagaggccagcaggcacagccccaacgggcagagaagaatggaatgctgcctgcctcatatggcccaggagaacagaatgggactggtgggtaccagcgggcctttcctcccaggaccaaccctgaaaaacacagccaaaggaagagcaatctggcccaggtggagcactgggcaagggcccagaaaggggatagcaggagtcttcccttggaccagacgcttcctcgccagggtcctggccaatccctgtccttcccagaaaactaccagactcttcccaagagcacccgacacccctcggggggctcctcgccacctccccgaaacctgccaagtgactacaagtatgcgcaggaccgagccagcctgtatt

SEQ ID NO: 110236 - DNA, 383 bp, Homo sapiens
ggcggcggtccatcacctcccctccttccgccagcaccaccaagcgccccaagtccatcgatgacagtgagatggagagccctgttgatgacgtgttttatcccgggacaggctgttccccaacagctgccagcagccagtccagcgggtggcccaacgatgtggatgcaggcccggcttctctaaagaagtcaggaaagctggacttgtgcagtgccctctcctctcagggcagctctccgcgcatggctttcaccccccacccgctgcctgtgcttggtggagtcagaccagggagcccccgggccgcagcatcagccctgcccctcccctggacgtccgtcatccagcaaaagaaaaagtatttcccgcacccatgtatt

SEQ ID NO: 110237 - DNA, 490 bp, Homo sapiens
tgtgtcatttgctacataggatcaagacttcaaatcccaaaagaacttcatcattaacatgacttgcagattttgctggcagcttcctgaaacagattacgagtgtaccaactccaccagctgcatgacggtgtcctgtcctcggcagcgctaccctgccaactgcacggtgcgggaccacgtccactgcttgggtaggtcagagttcaaggacatttgtcaacaaaatgtttttctccaagtttattgaagggactttaaccagaaatttgcgagtcaagttacttaattagaaacatttatcagcagctctttagatgtgccaagcatcatcaataaactcaacgtactaaagtaaagcatccagaaaattgcagttctttttaaatgtaatatttgataaaataagaaaaacatttgaagtataaagcataatacacagtaattgacctttacccaaaataacaatgaaagcagcaccaataccatt

SEQ ID NO: 110238 - DNA, 394 bp, Homo sapiens
tcatgtatgccagagatgccgtagtgggggccctgatgccggccgccatgatcgccccggtggagtgcccctctgcggctgcttcggacgcatttgcgatggctagtcccatgaatggagaagaatgcatgctggctgttgatatcgaagacagactgagtccaaatccgtggcaagaaaagagagagattgtttcctctgaggacgtggtgaccccctctgcagtgactccatcggccctctcagcctccgctgggccatttatcacagtgacggatgacccgggagctgcaagcatctttgcagaaaccatgaccaaaactgaagaggtggcagatatgctgttggagctctgtgtcaccgagttggaggatgtggccacaagacttgcaga

SEQ ID NO: 110239 - DNA, 395 bp, Homo sapiens
ttgagaaacctgtttattggtggtctgagctttgaaactacagatgatagtttacgagaacattttgagaaatggggcgcactcacagattgtgtggtaatgagagacccccgaacaaaacgttccaggggctttggttttgtgacttattcttgtgttgaagaggtggatgcagcaatgtgtgctcgaccactcaaggttgatgggcgtgtagtggaaccaaagagagctgtttctagagaggattctgtaaagcctggtgcccatctaacagtgaagaaaatttttgttggtggtattaaagaagatccacaagaatataatttgagagcctactttgaaaagtatggcacgattgaaaccatacaagttatgcaagacaggcagagtgtatt

SEQ ID NO: 110240 - DNA, 395 bp, Homo sapiens
agggccacatcgggcatgcggctctcagatatgtctcccagaagtaatactgcatgctgcgcttcaagccctcctgcccttgtttcccctgggtctttctctggcctggtctacaagaatgtcactgtgcctgtctacacagcactgaaggggagagctacacagatcagcaacatgccctttatggacgagtcctctgggtctgacgatgactgcagctctcaggcgagtttccgaatctcggtcccctcctctgagtccaggaagaccagcggactaggcagcccccgggccatcaagagaggcgtctccatgtcctcactgagctccgagggtgactacgccatccccccggacgcctgctcactggacagtgactactcagagcctgtatt

SEQ ID NO: 110241 - DNA, 392 bp, Homo sapiens
  misc_feature (1)...(392): n = a,t,c or g
acaataaaaatgtggtttaagaccgccccgnnnnnnnnnnttgtttttttcaagggaaagaaaatttttttttccaaggtaaatggtgtgcccccgttaaggcagggcctccttagccccaattttaaaccaacctgggcaaaaaaattagcccccctttttnnnnnnnnnnngacacggaaataggtttcaatattattggacatttactccttaatgatactaattatggttatttgacttgggaatggacagagagactgaggagttacatttatcccttaatctttgcaagcatttacaagattcttcatcttttagggaaagatagtgttcagttgctggtaagtttaaataaaagtaactaaatgatattggggccatggtgtatt

SEQ ID NO: 110242 - DNA, 399 bp, Homo sapiens
  misc_feature (1)...(399): n = a,t,c or g
ncggcagcagaacgcggtgggcagggagaaggagctgctcagcagccagagggacgggcggtttgaaggccgcccggtgcccgacggtgacgccaagcagagatcaccaaagatgaggcagagaccccctcctcgccgggacatgaccattcctcgaggcctcaacctgccgaagccgcccatcccgccccaagtggaggaagagtattacaccatcgccgaattccagacaaccatcccagacggcatcagcttccaggcaggcctgaaggtcgaggtgatcgagaaaaacttgagtggctggtggtacattcagattgaagataaggaagggtgggccccggccaccttcattgacaagtacaagaagacgagcaacgcgtcgagacccaatgtatt

SEQ ID NO: 110243 - DNA, 388 bp, Homo sapiens
ttggcacacacagtctttgcccttcatattccctactgcaggtctagggttattgaccatttcttctgcgatgtcccagccatgttgcttcttgcctgtacagatacttgggtctatgaatatatggtttttgtaagtacaagcctctttctccttttccctttcattggcatcacttcttcctgtggccgagtcctatttgctgtctatcatatgcactcaaaggaggggagaaaaaaggccttcaccaccatttcaacacatttaactgtagtgatctcttactatgcaccttttgtctacacctatcttcggcccaggaatctccgctcaccagctgaagacaagatcctggcagtcttctacaccatccttacccccctgtatt

SEQ ID NO: 110244 - DNA, 384 bp, Homo sapiens
cgcgcattttgtgttggccagtatttggagcctgaccaagaaggcgtcgccataccagatctggggagtctctcctcacctctgatagacacagagaggaatctgggcctgcttctcggattacgcgcttcctatttagcaatgagcacgccgctgtctcctgtcgagattgaatgtgccaaatggcttcagtcatccatcttctctggaggcctgcagcccagccagatccactacagctacatcgaggagaaagacgaggtcctctgcagctccccagggggcacacctgccagcaaatctcgactctgctcccacagacgggccctgggggaccattcccaggcatttatgcaagccattgcagacaacaacatgtgtatt

SEQ ID NO: 110245 - DNA, 274 bp, Homo sapiens
actgtgaggtggcagttaactggtatgcaccacttgtagctcccatatctaaggacagaactacatgtactgtgcctctaatagattacatagatgggaatgattattccattgaaccacagcaaggtggggatgaagatggttttgccagaggggcctgggactggagtttactatggaaacgtattcctctaagccacaaggaaaaggccaaaagaaaacataaaactgaaccttatcggtccccagccatggctgggggattatttgccat

SEQ ID NO: 110246 - DNA, 395 bp, Homo sapiens
gcagtgcctcaagagccttaaaggaaaagctttcaaaggatattgattcccttattggtaaggacagccaggtgaagagtcaaatatctgaactaaacttgttaatgaaagaaacagagtgtaatggagagagggctaaagaagaagcaattacacattttgaaaagctctttgaagttctggaagagaggaaatcatctgttttgaaagcaattgactcctctaagaaactaagattagacaaatttcagactcaaatggaagagtaccagggacttctagagaacaatggacttgtgggatatgctcaagaagtgctaaaggagacagatcagtcttgctttgtgcagacagcaaagcagctccacctcagaatacagaaagccacatgtatt

SEQ ID NO: 110247 - DNA, 402 bp, Homo sapiens
aatacagtctggggtttaatgttacttggtgatatgagacttccattcttccaggtggaagatgagctcagctccccagtggtggtgttcagatttttccaggaattaccaggctcaggtcggtgaattttaaaagagggctattttcatatctgtggtaaaggctttgaatttgataccatttcaaggtaaatagttcaaaatatttttattgctgacaatcttcagtcagcatttcagaaaaatgtaataattgtgatgaaaactacagtccgaaacgccttagcaatttgctgatagtttgcggtgattaaaccaggggttcccaaatgccagtccctggaccagggctggaatggctaagaaagagttgcttgaacataaagatttgtgggtcttact

SEQ ID NO: 110248 - DNA, 394 bp, Homo sapiens
gggagaccgagctgaaggtgcacctgaagctggtggaggaggaagccaacctgctgagccgccgcatcgtggagctggaggtggagaaccgaggcctgcgggctgagatggacgacatgaaggatcatggaggtggctgtgggggtcctgaggcacgcctggccttctccgcgctgggtggcggagagtgcggggagagcttggcagagctgcggcgacacctgcagtttgtcgaagaggaggccgagctgctgcggcgctcctctgccgagctcgaggaccagaacaagctgctgctgaacgagctggccaagttccgctcggagcatgagctggacgtggcgctgtcggaggacagttgttctgtgctcagcgaaccttcacaggaggagct

SEQ ID NO: 110249 - DNA, 369 bp, Homo sapiens
agcaccagcatgtcttacagtgtgactctgactgggcccggaccctggggcttccgtctgcaagggggcaaggacttcaacatgcccctcactatctcccgggtgagtgcaccctgccacagcctggcacccgatggggcaggcacgcttggaggagggcatgtgtgtccgtctgtctggcagtcctttctgagcctctcagaaagcagagcatgccccatcccctgggactggcctgggcctctggtctcagacacagcttgttgctcactgcagcgcgccggcctgttatgcatgtgagacatcatgagcaggtgagaggtgattttatcatacaagaaaatgctgagtcttcaggcacgcaggctg

SEQ ID NO: 110250 - DNA, 394 bp, Homo sapiens
atggtcactggcatgcattttgtatgagatgtgctgcatgaatcatgcattcgctggctccaatttcttatccattgttttaaaaattgttgaaggtgacacaccttctctccctgagagatatccaaaagaactaaatgccatcatggaaagcatgttgaacaagaatccttcattaagaccatctgctatcgaaattttaaaaatcccttaccttgatgagcagctacagaacctaatgtgtagatattcagaaatgactctggaagacaaaaatttggattgtcagaaggaggctgctcatataattaatgccatgcaaaaaaggatccacctgcagactctgagggcactgtcagaagtacaaaaaatgacgccaagagaaagaatgtat

SEQ ID NO: 110251 - DNA, 418 bp, Homo sapiens
  misc_feature (1)...(418): n = a,t,c or g
agcccagtggcaaggcctccaagggaaacaaaagcaaagccaagaagagcaagtccccaaagcccgtgaagccagtggagaacgaggatcagtccgggctgcagaagtccctcaagttcaacctgatgagcgatgcccctggggacagtccccgcatccacctgcccctcaactacccaccaggcagccatgacctgggccgccactatcgctctaactccccactgccttccatccagctgcagcaccagtcaccctcagcctccaagaagcaccaggtggtacaggacatgccacctgcaaacacattcgtgggcaccgggaaccccccgtccacgggctctgagcagtactccgagtacggctcgcgcaccaaaccccccagtattcgnccgctctntggttctttcgcgagcct

SEQ ID NO: 110252 - DNA, 427 bp, Homo sapiens
  misc_feature (1)...(427): n = a,t,c or g
tgtcaagcctgagaacctgctggtgtgggatggtgctgcgggcgagcagcaggtgcggatctgtgactttgggaatgcccaggagctgactccaggagagccccagtactgccagtatggcacacctgagtttgtagcacccgagattgtcaatcagagccccgtgtctggagtcactgacatctggcctgtgggtgttgttgccttcctctgtctgacaggaatctccccgtttgttggggaaaatgaccggacaacattgatgaacatccgaaactacaacttggccttcgaggagaccacattcctgagcctgagcatgaaggcccgggccttcctcatcaaagtgttggtgcaggaacaactgagacctcacgcagaagagatgtattgcggccgctgtaggntttttaacaagttcctgaac

SEQ ID NO: 110253 - DNA, 1491 bp, Homo sapiens
gacatgtctgagagtaaagccaaaaagatagaaatcaaggacgtggatgggcagacgctgagtaagctgattgactacatctatactgctgaaatcgaggtgactgaagagaatgtccaggtgctgctcccggcagccagcttgctgcagctcatggatgttcggcagaactgctgtgacttcctgcagtctcagttgcatcccaccaattgcctgggcatccgtgcgtttgcagatgtacacacctgcactgaccttctgcagcaggccaatgcctacgcagagcagcactttccagaggtgatgctaggagaagaatttcttagcctgagtctggaccaggtgtgcagcttgatatccagcgacaagctgaccgtttcttcagaagagaaggtgtttgaagctgtgatctcatggatcaattatgagaaagaaacccgtttagagcacatggcaaagctgatggaacatgtccgacttcctctcttacctagggactacctagtccaaacggttgaagaagaagctttgataaagaataacaacacctgtaaagacttcctcattgaggccatgaaataccatctcctccctctggatcagagactattgattaagaacccaaggaccaagcccaggactccagtcagccttcccaaggtaatgattgtggttggcggccaggcacccaaggcaatccgcagtgtggagtgctatgatttcgaggaggaccggtgggatcagattgctgagcttccttccagaagatgcagagcaggtgtggtgttcatggctggccacgtgtatgccgtgggagggtttaatggctcactgcgggtgcggacagtggatgtgtatgacggcgtgaaggaccagtggacgtccattgccagcatgcaggagcgccggagcacactgggcgcagcggtgctcaatgacttgctctacgcagtgggaggctttgatggcagtactggtctagcatcggtggaagcctacagctacaagaccaacgagtggttctttgtggccccgatgaacacgcggcggagcagtgtgggtgtgggcgttgtggaggggaagctatatgctgttgggggttatgatggagcttcccgccagtgtctgagcactgtggaacagtacaacccagcgaccaatgaatggatatacgtggcggacatgagcacccgccgcagtggcgcaggggttggagtgcttagcggacagctgtacgccacaggtgggcatgatgggcctttggtgaggaagagcgttgaggtttacgatcctggaacaaatacctggaagcaagtggcagacatgaacatgtgccggcgcaacgcaggtgtctgtgcagtaaatgggctcctgtatgtggttggaggggatgatggatcctgcaacttggcttcggtggagtactacaatcctgtcactgacaaatggacgctgcttccaacgaacatgagcacggggcggagctatgca

SEQ ID NO: 110254 - DNA, 393 bp, Homo sapiens
acatgtcctcccccaccaagacctggctggccctggtccgcatcttctttggccgccacccaatgctgttcagttaccagcgctccctgccacgccagcccgtgccctctgtgcaggacaccgtgcgcaagtacctggagtcggtccggcccatcctctccgacgaggacttcgactggaccgcggtcctggcgcaggaattcctgaggctacaggcgtcgctgctgcagtggtacctgcggctcaagtcctggtgggcgtccaattatgtgagtcccgccaccgccaccaacgccccacctgaagggctaaggttgtgagctcgcctgctcaacttgcgagttatacgccctgccccacaaaaagaacacaacccacacgcccccgtgtatt

SEQ ID NO: 110255 - DNA, 398 bp, Homo sapiens
aatgatgtcattttatgctcgaagattgtgcccacaaaggagactatgccgagtaataactcagtggcacaggtccaatctaacccaggccctgttgctatttcagatggtgcccatagtgctagcaataactcgccccttttaacaaatatcacacgtactcagaaacttcctactcctgtgaatcaggcaactttgagccaaacacaaggaagtgaaaaattgttggtatgttcagctccaacacatctgactcccaatattattttgttaaatcagacaccactttgtacaccaccaaatgtcagttcttcacttccaaatcatatgccctcctcaatcaatttacttgtgcagaatcagcagacaacaaacagtgctattttaacaggatgtat

SEQ ID NO: 110256 - DNA, 385 bp, Homo sapiens
cagcgagctggctgagagcgcatgcgaggagaagcccaacttcaacttcagccagccctacccagaggaggaggtcgatgagggcttcgaagccgacgacgacgccttcaaggactcccccaaccccagcgagcacggtcactcagaccagcgaacaagtggcatccggaccagcgatgactcttcagaggaggacccatacatgaacgacacggtggtgcccaccagccccagtgcggacagcacggtgctgctcgccccatcagtgcaggactccgggagcctacacaactcctccagcggcgagtccacctactgcatgccccagaacgctggggacttgccctcaacagaaagcgactacgactacgaccaggaatgtatt

SEQ ID NO: 110257 - DNA, 210 bp, Homo sapiens
  misc_feature (1)...(210): n = a,t,c or g
tttcgtgaagaggttggcccggtgctgcgcggggagccggctcggacccggggannnnnnnnnnnnnnnnnnnncaccttcgccctcagccagtcccgctccccagccctctgcgcagccgcaggcacgggacaataaacagagagtaggatcccctgtaatgcggccgctctagaggaggcnnntttacctaatcggcatggctcttnn

SEQ ID NO: 110258 - DNA, 381 bp, Homo sapiens
ccgggaggcctggcctcccccagggccgccacctctgctggttgctctgtgctttcaccttaaagctctgccaagcagaggctcccgtgcaggaagagaagctgtcagcaagcacctcaaatttgccatgctggctggtggaagagtttgtggtagcagaagagtgctctccatgctctaatttccgggctaaaactacccctgagtgtggtcccacaggatatgtagagaaaatcacatgcagctcatctaagagaaatgagttcaaaagctgccgctcagctttgatggaacaacgcttattttggaagttcgaaggggctgtcgtgtgtgtggccctgatcttcgctagtaatgtcatcattcgtcagcgactgtatt

SEQ ID NO: 110259 - DNA, 390 bp, Homo sapiens
  misc_feature (1)...(390): n = a,t,c or g
ntgtccttttcccaagaaaaaaagtggtaggacctttcagtatattaatgtcccctctgaagtgagcactttcctgtgcgcaggacatgacacctgggcagcaagcatttcatgggtcctttactgcctggctctgaaccctgagcatcaagagaaatgccgggaggaggtcagggccatcctgggggatgggtcttctatcacttgggaccagctgggtgagatgtcgtgccccacaatgtgcatcaaggagacgtgccgattgattcctgcagtcccgtccatttccagagatctcagcaagccacttaccttcccagatggatgcacattgcctgcagggatcaccgtggttcttaaaaaatggggtcttcaccacaaccctgtatt

SEQ ID NO: 110260 - DNA, 445 bp, Homo sapiens
ttgtcatcctggggcaacgctgctgttgctgttggagaccccatagcttgctacccggacatcccaaagattatttacgcctccaggacccactcgcaactcacacaggtcatcagcgagcttcggaacacctcctaccggcataaggtgtgtgtgctgggctcccgggagcagctgtgcatccatcctgaggtgaagaaacaagagagtaaccatctacagatccacttgtgccgtaagaaggtggcaagtcgctcctgtcatttctacaacaacgtagaagaaaaaagcctggagcaggagctggccagccccatcctggacatcgaggacttggtcaagagcggaagcacgcacagggtgtgcccttactacctgtccaagaaaatgaagcagcaagccgacatgtatgcggccgctctgagggtctagctacgacggacaa

SEQ ID NO: 110261 - DNA, 426 bp, Homo sapiens
cttccctccttctctggatacaggtgggagagctggaggctatgggatttctctctggccatgtctgggggtagggccaagcaagggccctggcagcattgttctgagccttgagatgttcttcatccaggaagtggggaccaatatctgggcagggaatagtgtctgtggactaggagaggagtcagttgcccatactctttgtctggctgtagccagcaggatgcccaagagttcctgaagctcctcatggagcggctgcgccttgaaatcaaccgccgaggccgccgggctccaccgatacgtgccaatggtccagttccctctccaccccgccgaggaggggctctggtagaggaacatgagttaagtaatgatgagcgaacgtatgcgcgcgctctagagcatacattcttacgtagatat

SEQ ID NO: 110262 - DNA, 395 bp, Homo sapiens
atagttctcgcctgttatttccccagccccaggtcagtggaataacctgtcctcctttctctcccatctcttccctcccttgctggtggtgtcccttcagctgcagaggatgttgccaagcctgagcctcacaggtggggccgggaggtggtggttgggggtctagtatacagagaagctataggtaccataggtacctggaagggggctgatgggaggctagggtggcccagggctgggaggaggtgtgcctgggaggcagttcgtggaggtggcactgacagccgtccacacgcactctctgtagatgcagtgcagtctggcccccacatgacaccctattctttactcaaagaggatgtcaagtggccgcccactctgcagccgcccactct

SEQ ID NO: 110263 - DNA, 432 bp, Homo sapiens
  misc_feature (1)...(432): n = a,t,c or g
cggcagctatcactaccttgaggtatgatcagctagcaggcagactggcatctgggtccaaggacacagatattattgtatgggatgtgatcaatgaaagtggtctgtaccgtctaaaggggcacaaggatgccatcacgcgagcattgtttctacgagaaaagaacctgctagttactagtgggaaagatgccatggtgaaatggtgggaccttgatactcagcactgctttaaagcaatggttggccaccggactgaggtatgggggttggttctgttgtcagaagaaaagcgactcatcactggggtctcagacagtgaactgagggtatgggacatagcttatctgcaagagaaagaaaaaacggaagaaccaggcccatgtattgcgtccgctctcgagtntggaggcttcccgcaacggcctcttt

SEQ ID NO: 110264 - DNA, 394 bp, Homo sapiens
ctctgactgcactctatgtcctggaccatggcctgcgggtcacagtctccctgaaggagctgcagagtaacttaggggtaccgccagtccgcggaagctgcccgctcaccatgcccctgcccttcgacctcatctacaccgactaccacggcctgcagcagatgaagcggcacatgggactctccttcaagaagtaccggtgcagaatcagggtcatcgacaccttcgggacgaaacctgcgtacaaccacgaggagtacgccacgctgcacggctaccggaccaactggggctactggaacctcaaccccaagcagttcatgaccatgtttcctcatacccccgacaactccttcatgggcttcgtgtccgaggagctcaacgagacggagaa

SEQ ID NO: 110265 - DNA, 390 bp, Homo sapiens
  misc_feature (1)...(390): n = a,t,c or g
gtcgtcgctgagtacaccagctgcctcatctatctggagcccggcctccatctcgccaggctcagcgcccgcgtccgtgtcggtgccggagccattggccgcgcctagcaacacctcgtgtatgcagcgctccgtagctgcaggcgccgccaccgcagcagcctcttatcccatgtcctacggccagggcggcagctacggccaaggctaccctacgccctcctcttcctactttggcggcgtggactgcagctcatacctagcgcccatgcactcacatcaccacccgcaccagctcagccccatggcaccctcctccatggcgggccaccatcatcaccacccacatgcgcaccacccgttgagccagtcctcaggccaccaccaccn

SEQ ID NO: 110266 - DNA, 392 bp, Homo sapiens
ctggcacaacaccaccttctttggggtttttcaagcacagtggggtgacatgtacctgtcggccatctgtgagtaccagttggaagagatccagcgggtgtttgagggcccctataaggagtaccatgaggaagcccagaagtgggaccgctacactgaccctgtacccagccctcggcctggctcgtgcattaacaactggcatcggcgccacggctacaccagctccctggagctacccgacaacatcctcaacttcgtcaagaagcacccgctgatggaggagcaggtggggcctcggtggagccgccccctgctcgtgaagaagggcaccaacttcacccacctggtggccgaccgggttacaggacttgatggagccaccatgtatt

SEQ ID NO: 110267 - DNA, 439 bp, Homo sapiens
ccgccatcaagggtcagaaccccagtgccactttcggtgacgtgtccaaaatcgtggcctccatgtgggacagcctgggagaggaacagaagcaggcctacaagaggaagacagaagcagcaaagaaggaatatctgaaggccctggcagcctaccgggctagcctcgtctccaagagctccccagatcaaggtgagaccaagagcactcaggcaaacccaccagccaaaatgctcccacccaagcagcccatgtatgccatgccaggcctggccttccttcctgacgccgtcggacctgcaggccttccgcagtggggcctcccctggccagcctcgcccggacgctgggctccaagtctctgctgccaggcctcagtgcgtccccgccgccgccaccctccttcccgctcagccccacactgcaccagcagctgtca

SEQ ID NO: 110268 - DNA, 411 bp, Homo sapiens
  misc_feature (1)...(411): n = a,t,c or g
ccaccagcatcatcagcttcaacagcgactgctctgcacgggccctggcctcgggctcgcggcctgtcagcatcatcagcagcatcagcgaggacctggagtgctactccagcacggcccccgtctccgaggtcagcatcacacagttcttgcccctcccgaagatgagcctggatgagaaggcccaggacgcagggagcagacgctcttccatcagctcctggctgagcgagatgagcgcgggcagtgagggtgagcagtcgtgccacagtttcatagcccagacgtgttttgggcacggngaggcaatggcagaacctggtggcctcgagtttgtcagcagcctccagaacaccgctgtggtgtgcagagagaagccccaggccagccccgacaacttgctcatcctgg

SEQ ID NO: 110269 - DNA, 448 bp, Homo sapiens
  misc_feature (1)...(448): n = a,t,c or g
ctgggcttgaatgtcgggactggggagctcccgcggcgcctttggggctctgcggttggcttcctatgtgggggctgctctcagctaccagcagccttgctgcatctgtctccctgctcttntgcaggacgttcttgcccaggatgcagctggggacaacctggagatgatggcnccgagcagggggagcgccaagtccagggggccactggaggagctgctgcacacactgcagctgctggagaaggagccggacgcgctgccccgccccaggacccattacaggggcagatacgcctgggccagcgaggaggatgacgccagctctctgacagctgacaacttggagaaatttggaaaactcagtgcgttccccgaacctcctgaggatgggacgctgctatcggaggccttgtattgcggccgctctagaggaaccgagcaagga

SEQ ID NO: 110270 - DNA, 403 bp, Homo sapiens
  misc_feature (1)...(403): n = a,t,c or g
aatacactggtggggcgtggggggccccccctcagagcgcaggggctgcagggccacatgatccccgccccgccggctcgaggccttgaggctcagggagcgcaaagcgcccgagaaggcatcagaggcgctgagcggtggggatggcgggtaggctgcatgcaggccccctggcccatagtcagggaggtccaggctcggctcggacacaaagtccaggctacggatgctgtcgtcccccagggtcagggaatcagggcctggaacctgctcgcctggtccacagaagggcaccttgggacccgtggggaaagccggcctaaacttgtacatggcaggtgtcggggggctggtcctctgcaccgacagggcactctcagcactgcctgggcgcggngtctgg

SEQ ID NO: 110271 - DNA, 359 bp, Homo sapiens
gtggtcatctatttccagggcttacgagtggacctgccaatcaagtcgggccgctgcggtggccagtacaacacctatcccatcaagctcttctatacgtccaacatccccatcatcctgcagtctgccgtggtgtccaaccattatgtcttctcccaaatgctctcagctcgcttcagtggcaacttgctggtcagcctgctgggcacctggtcggacacgtcttctgggggcccagcacgtgcttatccagttggtggcctttgctattacctgtcccctccagaatcttttggctccgtgttagaagacccggtccatgcagatgtatacatagtgttcatgctgggccatgtatt

SEQ ID NO: 110272 - DNA, 366 bp, Homo sapiens
gccctgctgcactgcgggcccccagctcagctggggcactggcagcatggagctgaagagaggaaagaccttcatcaagtccagcctgcaggtttcccacgagaaacccccagacccagcagccgtggctgcagccagggaggggacaggcccctggtcagtccttccaggagggcaacagaggccccacagtgagaagggcccccaagccagccccagtgcccaagaatacgacagatgccccaacaaaggggcgcagctggaccccaaagggggacccgcagccctctgtggagccaccttcaaaccggtgcgaaagtgcaagactcacgacagcatgtctggggcaggcagggccacggctgg

SEQ ID NO: 110273 - DNA, 384 bp, Homo sapiens
gccctcacacagcagcatgcactcgattcgcagctggtagctggggatggcacagacagggatcagtggcctgcaccccccacctgtccctgccagaggggcactcagcacagggctctggcttgggtggtgggcaaagggagggggtttccaccgcctgccccatccaacaggcaccctcccgggcctgcgcagagcaggatccaattcctccagaggcctccagccccacactttgaggggaaggactgggggtggggctcgagtgatgtttagaagcccaaccgctgcaatgctgctcctggagcccggggcagccattggcacagcctcttctcctccctggctgggccctgctccctattcctgctctcctcccacctg

SEQ ID NO: 110274 - DNA, 396 bp, Homo sapiens
  misc_feature (1)...(396): n = a,t,c or g
cctctccccaatgacattcttagccccccacccccccgccttccttcatgccccttttgccccgtcccttttggtcacgtcttttgcacacttgcctcccagaaactgtttctctcacacatgctcattctcttcttctttgccaggctcccactcccttgcccctttctgtttgaaatctttgcccttctgcatttttgattcttttgtgtaccctcttgcacacttgcttttgcacacgcgnnnnnnnnnnnagcattttcagtgctctccggaagccttgtttctcccctttaataatgttcttgcgcaccatgacatggctgcacaccgcatcttgtcttttctacctggatgagagctctaccacttctttccttttgcacactctgtatt

SEQ ID NO: 110275 - DNA, 380 bp, Homo sapiens
ccctggctgaagctgtgtgttctcatttcacccaaaacctttggacagtgcagggcatagaagattcattccacaaacttataccaaaaggacatgagaaacgtggacatgagaatttaagaaaaacttgtaaaagtataaatgagtgtaaggtgcagaaaggtggttataatagaattaaccaatgcttattaactacccagaaaaaaacaattcaatctaatatatgtgtcaaagtttttcataaattttcaaattcaaacaaagataagataagatatactggagataaaacctttaaatgtaaagaatgtggcaaatcatttcacgtgctctcacgcctaactcaacacaaaagaattcatactggagaatgtatt

SEQ ID NO: 110276 - DNA, 377 bp, Homo sapiens
  misc_feature (1)...(377): n = a,t,c or g
ngcactgaaggtgcagtttaagagagaatatggttttatttctcagaccctgcaagaggaaagatacaggtatgagcgactggaggaccagctgcatgacctgacggacctgcatcagcatgagacagccaacctgaagcaggagctggccagcattgaggagaaggtggcctaccaggcctacgagcgctcgcgggacatccaggaagccttggaatcctgccagactcgcatttctaagctggagctccaccagcaagagcagcaagctctgcagacagacaccgtgaatgctaaagttctcctggggaggtgcatcaacgtgatcctggccttcatgactgtcatcttagtgtgtgtgtccaccacgatgtatt

SEQ ID NO: 110277 - DNA, 388 bp, Homo sapiens
gcggccgccgcgcccgggaaaatgctgggcatgtacgtgccggacaggttctccctgaagtcctcccgggttcaggacggcatggggctctacacggcccgcagagtgcgaaagggtgaaaagttcggaccctttgctggagagaagagaatgcctgaagacttggatgaaaatatggattacaggttgatgtgggagatattttgtactgggtgctggatttacttagaaagataaaaagtatcgggcagagaaggtaaagcttaaagcctggttcgtgggagtaagggagaagttttgtacattttggatgctaccaacccacggcactccaactggcttcgcttcgttcatgacgcaccatctcaggagcagaagaacttgggtg

SEQ ID NO: 110278 - DNA, 377 bp, Homo sapiens
tgatcattccatacttctgtgctctagcagtgtggcaactgccttcattgcatctcttctgcagggaataataatggttggggttatcgttggttcaaagaagactggtataaatcctgataatgttgctacacccattgctgatagttttggcgaccttataactcttgccatattggcttggataagtcagggcttatactcctgtcttgagacctattactacatttctccattagttggtgtatttttcttggctctaacccctatttggattataatagctgccaaacatccagccacaagaacagttctccactcaggctgggagcctgtcataccagctatggatataagtagcattgggggcatgtatt

SEQ ID NO: 110279 - DNA, 376 bp, Homo sapiens
ataaaagacttcatattagagagaattcttaccaatgtgaagaatgtgtcaaagtgtttaagcggttctcaacccttactagacacaagagagttcatgctggagagaaacccttcaaatgtgaagaatgtggcaaagcttttaagcattcctcaacccttactacacataagatgattcatactggagagaacccctacatatgtgaagaatgtggcaaagccttataccattcttcacaccttactacacataaggtaattcatactggagagaagccattcaaatgtgaagaatgtggtaaagcttttaaccacccttcagcccttccttcccataagttcattaaagttaaagaaaatccctacaatgtatt

SEQ ID NO: 110280 - DNA, 380 bp, Homo sapiens
tcatccccactgagtcagaatgattcctgcactgggcggtcggcagatctgctgctgcctccaggggacacaggcaggaggcgccatgacagtctccatgaccgtgcggcaccctcccgagcggagcgcttcaggatccaggaggagcaccgtgaggccaagctgaccctgcggcccccaagcctggcagccccctacgccccagtgcagagttggcaacaccagccagagaaactcatcttcgagtcctgtggttatgaagccaattatctgggctccatgctgatcaaagatctgcgagggacagaatccacgcaagacgcctgtgccaagatgcggaaatctacggagcacatgaagaagatccccaccattgtatt

SEQ ID NO: 110281 - DNA, 413 bp, Homo sapiens
gccatgtccttcacatgtgcgccgcaggccctgtcaccaagatcatgctgtcggagaagctcctcatctcagtctgtgccgtcaacaaccacgtgcggacatggtctgtgattcgctaccgcggcatgatttccacccagcccggctccaccccactcgcttcctataagatcctggctatggagtcggcacatgggcatgtcggctgcagtgatggcaatggcattggcccctacggtgagcggcacgaccagcaagtgttcatacggaaggtggtgcccagtgacagccagctcttcgtgcgtctctcatctactgggcagcgggtgtgctccgtgcgctcaaaggaaggctcacccacgacggcatgtaatgcggccgctctgagtagcaagctacgaagcggcgtgtcc

SEQ ID NO: 110282 - DNA, 411 bp, Homo sapiens
ctcctgcgccatatccggaagttggaggaaaacgaagagaagaagcagtaccgggaatcttacatcagtgacaacctggacctcgacatggaccagctggaaaaacggtcgcgggccagcgggagcagtgcgggcagcatgaaacacaagcgcctgtcccgtcattccaccgccagccacagcagttcccacacctcgggcattgaggcagacaccaagccccgggacacggggccggaagacagctactccagcagtgccatccaccgcaagctgaaaacctgcagctcaatgaccagtcatggcagctcccacacctcaggggtggagagtggcggcaaagacaagctgaaagaggacttacaggacgtgtatgcggccgctctggggatctagctacgaagcggcagc

SEQ ID NO: 110283 - DNA, 412 bp, Homo sapiens
  misc_feature (1)...(412): n = a,t,c or g
aatacatgtgtgccttgaatgcttttattatgccccgattgaggggttggatgagagacttagtgtttgggggcataaaaagaactcctatgttggcgtgtgcattttcgagttctttgcagcaatggattgtagcattatccaaaattaacaaaaccttgannnnnnnnnnnnnnnnnnnnnnnnnnnnnnnnnnnnnnnnnnnnnnnnnnnnnnnnnnnnnnnnnnnnnnnnnnnnnnnnnnnnnnnnnnnnnnnnnnnnnnnnnnnnnnnnnnnnnnnnnnnnnnnnnnnnnnnnnnnnnnnnnnnnnnnnnnnnnnnnnnnnnnnnnnnnnnnnnnnnnnnnnnnnnnnnnnnnnnnnnnnnnnnnnnnnnnnnnnnnnnnnnnnnnnnnnnnnnnnnnnnnnnnnnn

SEQ ID NO: 110284 - DNA, 443 bp, Homo sapiens
cttggagaaaggcgaggagccatggatattagaggaaaaatttccaagccagagtcatctggaattaattaataccagtagaaactattcaataatgaagttcaatgagtttaacaaaggtggaaaatgtttctgtgatgaaaagcatgaaataattcattctgaagaggaaccttctgaatataataaaaatgggaacagcttctggctgaatgaagacctcatttggcatcagaaaattaaaaattgggaacaatcttttgaatacaatgaatgtgggaaagctttccctgagaattcactcttccttgtacataagagaggttacacaggacagaaaacctgcaaatatactgaacatgggaaaacctgtgatatgtcatttttcatcactcatcagcagtgtattgcggccgctcagaggatcacgcaacgtacgcgtc

SEQ ID NO: 110285 - DNA, 410 bp, Homo sapiens
aggtcttggaggggaaccagcgagtagaggagcagctgaggctgcgggagcgggagttgacagccctgaagggggccctgaaagaggaggtagcctcccgtgaccaggaggtggaacatgtccggcagcagtaccagcgagacacagagcagctccgcaggagcatgcaagatgcaacccaggaccatgcagtgctggaggcggagaggcagaagatgtcagcccttgtgcgagggctgcagagggagctggaggagacttcagaggagacagggcgttggcagagtatgttccagaagaacaaggaggatcttagagccaccaagcaggaactcctgcagctgcgaatggagaaggaggagatggaagaggagcttggagagaagatagaggtcttgcagaggtgtatt

SEQ ID NO: 110286 - DNA, 428 bp, Homo sapiens
aacccatcagctggcagcattctagaaaatgagcaaagatcaaatttaatgaataatatccttcgaataatttctgatttacagcagtcttgtgaatatgatattcccatgttgcctcatgtccaaaaatatctcaactctgttcagtatatagaagaactacaaaaatttgtggaagacgataattacaagctttcattaaagatagaaccagggacaagcaccccacgttctgctgcttccagagaagatttagtaggtcctgaagtaggagcgtctccacagagtggacgaaaaagtgtggcagctgaaggagccttgctcccacagacaccgccatcccctcggaatctgattccacatggacataggaagtgccatagtttgggttataatttcattcataaaatgaacacagcagctgtatt

SEQ ID NO: 110287 - DNA, 396 bp, Homo sapiens
gctctcgtacgtttgcacatagagaataccatgcatttcagggttctcaggctcagcttctttacacattgtatgatgacattctcagctcatctttgctctcagattctcacccatgtcaggtaatcagagaatgatttccttgctgccaccatcaccactgccatgaccattactatcaccatcaccaccactgccaccattgccatcaccatcaccaccactgccaccaccatcactatcaccaccaccaccactgccgtgaccatcactatcaccatcaccaccactgccaccactgccatcaccatcaccaccactgtcaccaccatcactatcaccatcactatcaccaccactgccatgaccatcactatcaccaccaccacatgtatt

SEQ ID NO: 110288 - DNA, 408 bp, Homo sapiens
ccccagctgactgagctagaagatgccgcccgctgcatccacagtggcactgatgagacccatctggcggatctggaggaccaggtggccacggctgcagcccaagtccaccatgctgaactccagatttcagatattgagagccggatttcagccctgaccattgcaggattaaacatagcaccatgtgtgcgcttcacaagaagacgggatcagaagcaaaggacccaggtacaaaccatagatacatcaaggcagcaaaggaggaaactgcctgctccaccggtgaaagctgaaaaaattgagacatcttcagtgactaccattaaaacatttaaccacaacttcattctccaaggctcctcaacaaacaggactaaggaaaggaaagacaccccccatggtatt

SEQ ID NO: 110289 - DNA, 439 bp, Homo sapiens
cggactggagaaaaagtgaaagttgaacatgtggtcagtgtcctggagaagaaatatccgtatgtagaagtgaatagcattttggggattgattctgcttatgatcggaatcggaaggaagcaagaggctactatgagcagactggagttggacctctgcccgttgtgctgttcaatggaatgccctttgaaagggaacagctagaccctgatgagttagaaaccatcacaatgcataaaatcctggagaccaccaccttcttccaaagagcggtgtacttgggtgaactgccccatgatcaagatgcggtagagtatatcatgaatcagccaaatgttgttccgcgaatcaattctaggattttgacagctgaacgagactacctggatttaacagcgaatgtattcgtccgctcggaggatccagcatcggaccgac

SEQ ID NO: 110290 - DNA, 439 bp, Homo sapiens
  misc_feature (1)...(439): n = a,t,c or g
cgacgatgctggtatcgtctcgagcgcccgcaatacacgtgtctgggtctcctcaccattctcatctccagtctggccttgcttccccaatccttgagcctggatctcttccccatcctcctctccagcctctttcttgtccttcttctcaaatgtctgggtctccacagcatcctcacttccattcttatcctggttctcccactcaggtgtttgggtctctgcatcaattttacatcttaactggtcttgggtctctcccatatgtgcctgggtttcagggagattctcacctccagcctccctctggtttctattccctagttcctgaatgttggttctactctcaactcccatccggtcctgggtgtcccaccctggtgtcaagatctcgccatcagnttcacttattactagtctctgggttgcacactccaat

SEQ ID NO: 110291 - DNA, 402 bp, Homo sapiens
cctgtggccgccacatacccaccgactttgagacaggcctgggcccatggaaccgctcgaaaggctggtcccgaaaccaccgtgctggtggtcatgagcgcccctcctggccacgccgtgaccacagccggaacagtgcacagggctccttcctggtctccgtggccgagcctggcacccctgctatactctccagccccgaattccaagcctcaggcacctccaactgctcgctggtcttctatcagtacctgagtgggtctgaggctggctgcctccagctgttcctgcagactctggggcccggcgccccccgggcccccgtcctgctgcggaggcgccgaggggagctggggaccgcatgggtccgagaccgtgttgacatccagagcgccatgtatt

SEQ ID NO: 110292 - DNA, 621 bp, Homo sapiens
gaaacctggggagattgtggacgccaactttgggcagcagcccttcctgtttgacattgaggactacatgcgggagtggcgtgccaaggtccagggcacggtccactgcttccccatcagtgcccggcttggcgagtggcaggctgtgctgcagaacatggtttcatcttacctcgtgcatcatgggtattgtgccacagccacggcttttgctcgaatgactgaaaccccgattcaggaagaacaggcgtccataaagaacagacaaaagatccagaagctggtgctggaggtccgtgtgggcgaggccatcgagtccacccagcgcttctacccagggctgatggagcacaaccccaacctcctcttcatgctcaagtgccggcagtttgtggagatggtgaatgggacggacagtgaggtccgaagtttgagctcccgaagccccaagtcccaggacagctaccctggctcccccagcctcagtccccgacatggccccagtagttcccacatgcacaacacaggagcagacagtcccagctgtagcaatggcgtcgcgtccaccaagagcaaacagaacccctgtattgcggccgctctggaggatacgagcaaggc

SEQ ID NO: 110293 - DNA, 394 bp, Homo sapiens
ctttatcaggtgaacgaagatactcaatgccaccattgtttcatacacattatgtaccagatatagtcagatgtgttccaccttttcgagaaattgcatttttagaacctagagaaatcacactgcctgaggccaaagataagttgagtcagcagatactggagttatttgaaacatgtcagcagcaaataagtgatttaaagaagaaagaactctgtcgaacacagctgcggagagaaattcagctgttatttccacaaagcagactttttttggttgggtcctctttaaatggatttggtacccggagcagtgatggtgatttatgcctagttgttaaggaagaaccatgtttttttcaggtaaatcagaagactgaagcacgaatggcgaa

SEQ ID NO: 110294 - DNA, 390 bp, Homo sapiens
tcttcagagtctgcgaaatcctccattttgggggaacattttcagagaaaaaaaggcgaacgggttatttggcactggcgctacccaaggacttagatatcttaaccatcctcctcaaacggcaagcccccagtgtacagtctgtccctcaggcctcgagcgagctcctccctccccctcagcgccgcggcccgcgtgtaacgggctagtcgtcccgcccccgcccacaacgagcccaggacgcgcaggaagctcggccggtcagcgcacctcttcacccaaaatctcccgccgcaccctgggcccttggccggccgcgtgtttccctcccggaccgctcacctccgccgccctagaagactggttgagccgccactgcgctcctaacat

SEQ ID NO: 110295 - DNA, 382 bp, Homo sapiens
  misc_feature (1)...(382): n = a,t,c or g
nttcaagcccaccatcggttacccccccctcacagggccccctgtccccccgctggcggacctactatatgccttgctctttttgggccaagctaagggctggatccccaagcccgtagtcttgggctttgggatgcacattattgaagagacacaagtgttcagggagtcccagtctgtggaaaatctagtcatctctctattgcagcacagcctctatgtgggggctcctagcggagtcatccagctaccactctccagctgctcccgctaccgatcctgctatgactgcatcttggcccgagacccctactgtggctgggaccctggcacccatgcctgcgcagcagccaccaccatagccaacaggacagcatgtatt

SEQ ID NO: 110296 - DNA, 379 bp, Homo sapiens
cccctgatgtccttgcgaaagccagctgaatgcggagctactgtgtttgagactgatgtgatggtcagctccgatggggtccccttcttcatgcatgatgagcacctcagcaggaccacgaatgtagcctctgtattcccaacccgaatcacagccccacgcagtgacttctcctggactgaactgaagagactcaatgctggatcctggttcctagagaggcgacccttctggggggccaaaccgctggcaggccctgatcagaaagaggctgagagtcagacggtaccagcattagaagagctattggaggaagctgcagccctcaacctttccatcatgttcgacttgcgccgacccccacagaaccacgtgtatt

SEQ ID NO: 110297 - DNA, 386 bp, Homo sapiens
  misc_feature (1)...(386): n = a,t,c or g
cccctcccaaagtcctttagcttcctttcccctgtgacttccgtgtcccgggactcccccctcgggaacctggggaaagaactgggcccaaacttgcaggtaagggggcttgtggctttgcctccctggtccgccttgcttttcctccttttcggtggcattggtgcacttgggctcacgctgctcccggctggttggttatgatttcaaacctgccttgtactaaaacctccggggcaaccggatcctcttttttggttgggctccggtttttttggnnnnnnnnnnnnaagttctcttgtattgccttgtttctttttccttcttcctgtcttatttttaactgcgccgcggctcatggtttagaggccctcccagactgtatt

SEQ ID NO: 110298 - DNA, 385 bp, Homo sapiens
cttcaccagaacccagcagcttgccagcatcgttgcagaatactctgaaacatatttcccagtggcccaaactctttattaggaaaatggacgaattgaatagcaaatggagcatttcctccctctgctatttatacacggaaagacttactacagcgatctacccatattgccaccaagactttccaggctcttcgcatatttgtgaacaatgagctcaatgaactctacacgggactgaagacagctcagaagtttctgagacctggtggtcgtcttgttgccctctccttccattcactagaggatcgcatcgtcaaaagatttttgcttggaataagcatgacagaaagatataacctaagtgttagacaacaacatgtat

SEQ ID NO: 110299 - DNA, 389 bp, Homo sapiens
  misc_feature (1)...(389): n = a,t,c or g
aacaaagaagatgtaggtcttggagagctgtccagtgaagaaggctctgtaggcagtgatcgtggcagtattgtggacnctgaggaagagaaagaagaggaggagtcagatgaagattttgcccatcatagtgacaatgaacaaaaccggcacaccacacaaatgagtgatgaggaagaggatgatgatggctgtgaccttttcgctgactctgagaaggaggaggaagatattgaggacattgaagaaaatactagacctaaaagaagcagacctacatcgtttgcagatgagctggctgcccgcatcaagggggatgccgtgggtcgagtggacgaggagccgacaaccttaccctcaggagaagcaaaacctcggaagactgtatt

SEQ ID NO: 110300 - DNA, 414 bp, Homo sapiens
  misc_feature (1)...(414): n = a,t,c or g
ggtcagcagctgtggccaagcgagcactggcccatggcctcaagtgcaagtcccagttcaccatcactccaggttccgagcagatacgcgccaccattgagcggaacggctatgcacagatcatgagggatctgggtggcattgtcctggccaatgcttgtggcccctgcattggccagtgggacaggaaggacatcaagaagggggagaagaacacaatcgtcacctcgtacaacaggaatttcacgggccgcaacgatgcaaaccccgagacacatgcctttgtcacgtccccagagattgtcacagccctgccccctgcgggaaccctcaagttcaacccaaaaacaaactacctgacgggcaagaatggcgaagcgnccgctctggggggtcccttaacctaaggacgcn

SEQ ID NO: 110301 - DNA, 493 bp, Homo sapiens
gcggccgccctggccaaatgctcatccggggccagcttggacagccacctgcaccggatgttgcacagggactcaaccatcagcaatgagtcctcccagagctgcagttcgggccgccagtaacattcgcctgcacagcgactccagcagcagcacacaggtgtttgagtctgtggatgaggtggagcaggtggaggctgaaggcagattggaggagaaacagcccaagatccccaatgggaacctagtgaacggcacttgttccccagactcgggtcatccttcctcccataacttctcctcgggcctctcagagcactcagagcccagtctgagcacagaagacagtgtcttggacgcccagcggaacacccccacggtgctgcgacctatggatggcagcgtggatgacaggcagagcagcgaggccaccacatctcaggatgaggctccccgggaggagctggccgtgcaggacagcctggagagtgat

SEQ ID NO: 110302 - DNA, 409 bp, Homo sapiens
tctcccccatgccgtttcatccatcgcaggtctctcccagggctcgttttccagtctccatcactagtcctaacagaacaggagccagaactcttgcagacatcaaagcaaaagcccaactggtcaaagcacagagggcagcagctgccgctgccgccgcagctgctgcagccgcctcagttggagggaccattccaggacctggcccagggggtggacaaggtccaggagagggtggtgaagggcagactgctagaggaggcagtccaggctcagacagagtcagtgaaactggaaagggccccacactggaactggcaggaactggaagcaggggaggtacgagagagcttttaccctgtggtccagagactcagcaacagtctgagaccaagaccacccttgtatt

SEQ ID NO: 110303 - DNA, 404 bp, Homo sapiens
cccgcctcgctcagttgctagagggctatgcccggtactctgtgagtgtattccagccaccctttcagccaggccgcatggccttggagtctcagagccctggctgcaccacactgctctccacaggttccctggaggctggggacagcgagatagaccccattcagccacctgagctccagctggtgacccctatggctgagggggacacagggcttccccgggtgtgggcagcccctgaccggggtcctgtgcccagcaccagtggaatttcttctgagatgttggccagtgggcccattgaggttggctccttgccagctggcgagagggtgtcccgacccgaagctgctgtgcctgggtaccagcatccaagtgaaactatgaatgcccacacatgtatt

SEQ ID NO: 110304 - DNA, 395 bp, Homo sapiens
cgcaccctgaacaagtgccaggcctccacacgtgcccgcaccctcacctccgactggcgcaccgtgggctcccagcatggtgtcacggtcactgagagtgacagctatagtgccagcctgtcgcaggacacagacaaaggaaggaacagcatggtgtccactgagagtgcctcttccacctacgaggagctggcccgggcctatgagcatgccaagctggaggagcagctgcagcacgccaagtttgagatcaccgagtgcttcatctctgacagttcctctgaccagatgaccacaggcaccaacgagaacgccgacagcatgacatccatgagcacaccctcagagcctggcatctgccgctataccgcctcaccacccaagccccatgtatt

SEQ ID NO: 110305 - DNA, 426 bp, Homo sapiens
  misc_feature (1)...(426): n = a,t,c or g
cagcctctgccaagcggccaacaggagcctgggctgcctgtggtgtgctgacggccagcctgcctgtcgctatgggcccttgtgcccgccgggggctgtggagctgctgtgtcctgcgcccagcattgatgcagtcgagcccctgaccggtccccctgagggaggcttggccctcaccatcctgggctccaacctgggccgggccttcgccgatgtgcagtacgccgtgagcgtggccagccggccctgcaaccctgagccctctctctaccgcacgtcggcccggattgtgtgtgtgacatctcctgcccccaatggcaccactgggcccgtccgggtggccattaagagccaaccaccaggcatctcaagccagccatgtattgcggccgctctagaggatacncgctaggtnacgcggaatcc

SEQ ID NO: 110306 - DNA, 410 bp, Homo sapiens
ctatggtggaatataaactcgacagcgagggcaccccctgcgagtataaaacccccttcaggaggaacaccacgtggcaccgggtgcccactcctgccctgcagcccctctctagagcttcccccatccccggcacgcccgaccggctgccgtgccaacagctgctccagcaggcccaggctgccattcctcgaagcacctccttcgaccggaagctgcccgatggcacgagaagctcacccagcaaccagtcatcctccagcgaccctggacccggcgggagcggaccctggagaccacaagtgggctacgacgggtgccagtcccctctactgctcgaacaccagggctcaggccctttggaatgtgacggagccagggagagggaagacaccatggaagcatgtatt

SEQ ID NO: 110307 - DNA, 413 bp, Homo sapiens
gaggaagggatggacttaccagatagctctggccttttccagcaccagaccacttacaatagggtgagtccatgcagaaggactgaatgcatggagtctttcccacacagctccagtctcaggcaacaccaaggagactatgatggacagatgcttttcagttgcggtgatgaagggaaagccttcctggacacctttactcttcttgacagccagatgactcatgctgaggtgagacccttcagatgcctaccatgtggaaatgtgttcaaggagaaatcagctcttattaatcacagaaaaatccacagtggagaaatatctcatgtgtgtaaggagtgtggaaaagccttcattcacttgcaccacctaaaaatgcaccagaaatttcacactggaaaaagacatgtatt

SEQ ID NO: 110308 - DNA, 381 bp, Homo sapiens
ggaaaggtggtggagaaagaaaaggcttctcagctccagaaccaatccagcagcagctctggaaaagagggtgtaaggccttcccatagtcttcctacgacaagcctggagttcagctcagtctccgcggagaaaagcccagtgttcgcagtcacaccggggagtacagagcgcagcatgacgacacctcgctctagcacagccccctttgagtccaccccatgtgagctacccatatctcctaccgctgctcccaggacagtaaaagaacagacggtatcggctggagataacgtaataatagctttacccgacaatgaagttgaactgaaggcctttgttgcgcaagcaccacctgtagaagcaacctacagctatgta

SEQ ID NO: 110309 - DNA, 384 bp, Homo sapiens
gtcgggccagaagccctgtgggcccatgtgaccatgaatgaccagaatctgggcttcaaagccgggtatgtcatccaggttctggaagcctccaacaaggactggtggtggggccgcagtgaagataaggaagcctggttccccgcgagcttcgtcagattgcgagtgaatcaggaagagctgtcggaaaactccagcagcacccccagtgaggagcaggacgaggaggccagccagagccgccacagacactgtgagaacaagcagcagatgcggaccaacgtcatccgggagatcatggacaccgagcgggtgtacatcaaacacctcagggacatctgtgagggctatatacgacagtgccgcaagcacacaggatgtatt

SEQ ID NO: 110310 - DNA, 579 bp, Homo sapiens
ataaatgtgaggaatgcgggaaagtgtttaaaaagaatgccctccttgttcagcatgaacggattcacactcaagtgaagccctatgaatgcacagagtgtgggaaaacctttagcaagagcactcatcttcttcagcgccacttcatccacactggggagaagccctataagtgcatggagtgtgggaaggcttttaaccgcaggtcacacctcacgcggcaccagcggattcacagtggagagaagccttataagtgcagtgtatgtggaaaggccttcacccaccgctccacttttgtcttgcatcacaggagccacgctggagaaaaaccctttgtgtgcaaagagtgtggcatagcctttcgagataggccaggtttcattcgactgtacatcatccacacgggagagaagccctatgagtgcattgagtgtattgagtgtgggaaggccttcaaccgccggtcataccgcacgtggcaccaacagaggcacactggatgtaaaccctttgaatgcaacgagtgtggaaaagctttttgcgagagtgcagacctcattcaacactacattatcc

SEQ ID NO: 110311 - DNA, 410 bp, Homo sapiens
accttccgaagagccatttcatctcagcccgacatcgccagagactagtggacccagctgcttcaaaaaaggagctgagtctccccagaagaggaagtttttgccgaacaagcaaccggaaaagcttaataggcaatgggcagtcaccagcattgcctcgaccacactcacctctctctgctcatgcaggaaatagccctcaagatagtccaagaaatttctcccccagtgcctcagcccatttttcatttgcacggagaaatgacaggactgatggacgccgctggtcgttggcttctctcccttcctctggctatgggacaaacacacccagctctacggtctcttcatcctgttcctcccaggagaagttgcatcagttaccataccaaccaacaccagacctgtat

SEQ ID NO: 110312 - DNA, 411 bp, Homo sapiens
aaaccctatgaatgtcatgagtgtgggaaagccttcagtcaccgctcagcccttattcggcatcatataattcatactggagaaaaaccctatgaatgcaatgaatgcgggaaggcctttaatcagagttcatacctcactcaacatcagcgaattcatactggagagaaaccttatgagtgtaatgaatgtgggaaggccttcagccaaagcacattccttacccagcatcaggtcattcacactggagagaaaccttataagtgtaacgaatgtggcaaagcctttagtgatcggtcaggtcttatccagcaccagagaactcatactggggagcggccatatgagtgtaacgaatgtgggaaagcctttggctactgctcagccctgactcagcaccagaggttgtat

SEQ ID NO: 110313 - DNA, 397 bp, Homo sapiens
gggggtgtgtttttccccagagtggaagtagccgggaggtaactccaattcgtgcccaaccccaaggttctggtccgcaaccaagtacaccccctcaggtattgagcgccgttattatatctcccccaagcgggcggcgtgaaagaatttcccgcctcttttctagtgccagctccacagccaaggagaatagcaaaaaattaaaaatgaagtttccacatacagtcccaaccagagaaccaaaaagtaaaattaataaaggaggaatacctcaacgtaacataaatgatagcctggaaattacaaaattggacttttccatcgtttcagaaggggagatgtcctcgttcgcgcctcagtttcgggcctgtaatattcagaatccaccagctgtatt

SEQ ID NO: 110314 - DNA, 387 bp, Homo sapiens
catagagccactgacacttttctttgccaattctttggaccctgacttctgcccatccctgacatttggttcctgtcttaatgccagtgaaataagatttcgccgcctatcatctgctaactgctacggactcaggctcagaaaggcctgcgcttcacccaggtgccagcctccacaggttccaacccaggagcccaagttccttttggccctgactcagacactattaggactggcaagtgataagcagagtcccatactctcctattgactcggactaccatatcttgatcatccttttctgtaggaatcggatataacatcatctgggtacccatggccagctgtgacttctccatccgcacctacacctatgcagactgtatt

SEQ ID NO: 110315 - DNA, 719 bp, Homo sapiens
gggtgatcaacgtcagccccttggagtggggccacgtgctgctggtgcctgagcctgcccgccagctcccccagcgcctgctgccgggtgcactgagggcagggattgaggctgtgctgctgagcttacacccgggcttccgtgtcggcttcaacagcctgggaggcttggcctcggtgaaccacctccacctgcatggctattacctggcccacagactgcccgtggagcaggcgccaagcgagcccctggaccctggaggccatttgcatctgctccaggacctcccagctcctggcttcctcttttacactcgtgggccagggcctgacttggagtccttgataagcagggtatgtcgggccactgattatctgactgaccatgagattgctcataacttgtttgtcacccggggacgtccgccgggaaagacatcaccttcctcagccctcacaggggtccgagtaattctgtgggcccggaagtccagctttgggataaaggacggtgaagctttcaatgttgccctctgtgagctggctgggcacctccctgtcaaaacatcccaggacttcagcagcctgacagaggcagctgctgtggccctcattcaggactgtcggctgcccccatcccaggcagaagacgtacaggcagcactggtggccctgatgtcccaggaagagcaataatacttctggatgtaaaaaaaaaaa

SEQ ID NO: 110316 - DNA, 379 bp, Homo sapiens
agaaaactgactacgttccctaaatgctttcttggaagcgaatttgtgtcatggctgttggaaattggagagattcacaggcctgaggaaggcgtgcacttgggacaagcattattagaaaatggaatcattcaccatgttactgataaacatcaattcaaaccagaacagatgttatatagatttcgctatgatgatggaacattttatccaagaaatgagatgcaggacgtgatttcaaagggtgtaagattatattgtcgtcttcatagcctttttactccagtgataagagataaagattaccatttaaggacctacaaatctgtggtcatggccaacaaactgatagactggttaattgcacagggagtgtatt

SEQ ID NO: 110317 - DNA, 416 bp, Homo sapiens
  misc_feature (1)...(416): n = a,t,c or g
cagaaaactgactacgttccctaaatgctttcttggaagcgaatttgtgtcatggctgttggaaattggagagattcacaggcctgaggaaggcgtgcacttgggacaagcattattagaaaatggaatcattcaccatgtnnntgataaacatcaattcaaaccagaacagatgttatatagatttcgctatgatgatggaacattttatccaagaaatgagatgcaggacgtgatttcaaagggtgtaagattatattgtcgtcttcatagcctttttactccagtgataagagataaagattaccaaataagcccctacaaatctgtggtcatggccaacaaactaatagactggttaattgcacagggagtgtattcgtccgctgtggctattcaccntaggtggcggcata

SEQ ID NO: 110318 - DNA, 384 bp, Homo sapiens
  misc_feature (1)...(384): n = a,t,c or g
aatacagcacctggttataagaatttatatccccagaaaaagaaatcagtgtccttcctcaagccttgttttgatttacatttttgtaattactaaggtgaccaaacctcccctgtaaatcatccactgacctttccactttgcacnnnnnnnnnnnnnnnnnngaaaaaagggggggtttttggccccagggggggaggggggagggaaaaattgggataaaaggcaccttgggccccgggggtaaaaggaattttccgcctgggtcccccaagaagccgggaaaaaagggcccgggcaaccccccggggcaatttttggtttcccaaaaaaaaaggggcttccccatggtgaccagggggggggaaaacccccgaccccagg

SEQ ID NO: 110319 - DNA, 393 bp, Homo sapiens
agacatagcaccattgtattggccactaatgataaggatcaagagaaatatggattattaaatgtaacaaaaattgctgaaaatgggaaaaaggttcgaaagaactggttgtcttcttgggcggtgttgcagggttcatctttactttttaccaaaactcaaggaagtagcacaagttggtttggcagtaatcagtctaaaccagagttcacagtggacctcaagggggcaacaattgagatggcttcaaaggataaatccagcaaaaagaatgtatttgagctgaaaactcgtcaaggaacagaactgctaattcagtctgacaatgacactgttattaatgattggtttaaagttcttagtagtacaatcaataatcaggcagtgtgtatt

SEQ ID NO: 110320 - DNA, 398 bp, Homo sapiens
  misc_feature (1)...(398): n = a,t,c or g
atatggctggcctaataaatgggtactgccggctggggaatggaacctcgcagtcctttatcctcagacctcaaaaaaaaggtgaacgggctttgccctcaataccaaagttggcccacagcgaaaagcaaggcatgcgggccccccccgtttttgtgtcaggtaaggggctttaggtaacagacctcgaaaagccctttcatggggtaagacgatcataaaagtctatttttaggataaatggttcgttttagaaaagcttatgaaaataagccttttggctatccaaatttgcataattttaccctccttaaatagttttaagtatgggtcatagnnnnnnnnnnnnnnnnnaagatgggacatagataaaataccagatcactcagcagtgtatt

SEQ ID NO: 110321 - DNA, 367 bp, Homo sapiens
agggtgccacccatcatccacgtgcagcgcacggaccagccactgccacagagcattcagcaagccatgcgctacttgcgcagccagtgcgtggaccaagtaggcatcatccgcaagtctggggtcaagtccaggatccagaacgtgcgtcaaatgaatgagacctcgcctgacaatgtcaactacgagggccagtcagcctacgacgtggatgtcatgataaagcagtatttccggaacctgcatgagcccattatcaccagcgagctcgcctccactttcctacagatctaccagctcctccccaaggatcagtggttggcagcagcacaagccgccaccatgctgctccgcaatgtgtagtcgt

SEQ ID NO: 110322 - DNA, 392 bp, Homo sapiens
aaaagtgggccccgccagactggcccggaagatgggtgtgaagcttggaaataaggtgagatttgtagggaaccggggggtagagtttggggtctgtaactcagtctacagttccctcgggtccctacagcagaagtcttggtgctgccccacttcacctttccccaagttcctttcagggcacaccagcccacacttggatgctaatggttcccttgaccaggttggctacagcatccgctttgaggactgcacatcagagcgaactgtcctccgctacatgacagatgggatgcttctccgggagttcctctctgagcctgacctggcgagttacaggtatctctaatctctggcctatctctcccttcttcccacacagccaatgtatt

SEQ ID NO: 110323 - DNA, 397 bp, Homo sapiens
aagctccctcatagggtggatggcacaggatttgtagtgtatgatggagctttgttcttcaacaaagagcgcaccaggaacatagtaaagtttgatttgcggactaggataaagagtggagaggctatcatagcaaatgccaattaccatgatacctccccttaccgatggggaggcaaatctgacatagacctggcagtagatgagaatgggctatgggtaatctatgcaacagaacaaaacaatggtaaaattgtcattagtcaattgaacccttacaccctacggatcgaaggaacatgggatactgcatatgataaaaggtcagcttccaatgcctttatgatttgtggaattctgtatgtggtcaaatctgtatatgaggatgatgtgtatt

SEQ ID NO: 110324 - DNA, 397 bp, Homo sapiens
ggattgagggtcataaagcaggagtggggcaagtcatttgggcagaagggaaatctagaagttgtgatggaacaggtgccatgaactttgtagaatgtggttacgatgcttttcctgttggatatgagtatgctggcttcccacacatggatgacaagcagaaagccagagaaataaggaaattcagttacatcatacatgcggaacagaatgcctggacatgtaggtgtcaagaaataaaaccagaagaaagaagcatgatttttgtgacaaagtgcccatgtgatgagtgtgtacctttaattaaaggtgcaggcataaaacaaatctatgcaggagatgtagatgttggaaaaaagaaggcaaacatctcttacatgagattcggggaatgtat

SEQ ID NO: 110325 - DNA, 404 bp, Homo sapiens
aggcacagccagtctggcagtggaaggtgacctgggctgttcaccaggccctgcatgggaagaaggacttccccgtgctgggggctggcctggagccctcccagcctcccgactgccgctgcgcagaatataccttccaggcagagggccggctctgccaggccacctacgagggcgagtggtgcaggggccggccccacggcaagggaaccctgaaatggccggatgggcggaatcatgtggggaatttctgccagggcctggagcatggcttcggcatccgcctgctgccccaggcctctgaggacaagttcgactgttacaagtgtcactggcgagaaggcagcatgtgtggctacggcatctgtgagtacagcaccgacgaggtgtacaagggctgtatt

SEQ ID NO: 110326 - DNA, 408 bp, Homo sapiens
  misc_feature (1)...(408): n = a,t,c or g
nctacctgaaggaagatgttcccacctgcggctatctgaacgtgctctccaacagccgctggcgagagcgctggtgccgagtgaaagataacaagctcattttccacaaggacaggaccgacctgaagacccatattgtgtctattccgctccgtggctgcgaggtgatcccgggtttggattgtaaacatcctctgacgttccggctgctgcgcaacggccaggaggttgcagtattggaggcatcttcttctgaagacatgggcaggtggattgggattttactcgcagagacgggatcgtccacagacccggaggctctgcactatgactacattgatgtggagatgtctgcaagtgtcattcagacagacaaacagaccttctgtttcatgaacaggcgtgtat

SEQ ID NO: 110327 - DNA, 440 bp, Homo sapiens
gagggggcccacaatcaaccgctcactgctggcactggccaactgcatcaacgccctgagcgacaagggtagcagcaagtacatcaactatcgcgacagcaagctcacccggctcctgaaggtaccagccacagctgggcctgggcactgggcaccaagggtgaggctgccagattaaacaaatgaaaatacagggcacccagctaaattccaacctcaggatacacagcaaaatttgttttagcgtaaatatgtcccatgaaatatttgggatattcttatgctaaaacaaagtaattgcatatctgaggttcaaatttaactgggtatcctgtattttatctgacgaccctacccaaagactggacaatgggaaggaaaaggagcacgaatggcgaagcggccgctcggaggatcacgcatcgtcgcggcatgccatc

SEQ ID NO: 110328 - DNA, 474 bp, Homo sapiens
  misc_feature (1)...(474): n = a,t,c or g
atcacacaaggacctccagtggactggaatgacattgctggtctcgacctggtgaaggctgtcattaaagaggaggttatatggccagtgttgaggtcagacgcgttcagtggactgacggccttacctcggagcatccttatatttggacctcgggggacaggcaaaacattattgggcagatgcatcgctagtcagctgggggccacatttttcaaaattgccggttctggactagtcgccaagtggttaggagaagcagagaaaattatccatgcctcttttcttgtggccaggtgtcgccagccctcggtgatttttgttagtgacattgacatgcttctctcctctcaagtgaatgaggaacatagtccagtcagtcggatgagaaccgaatttctgatgcaactggacactgtactaacttcggctgaggaccaaatcgtagtaatttgtgccaccatgtaggcggnn

SEQ ID NO: 110329 - DNA, 393 bp, Homo sapiens
catgaggatctcctggaaacagatccaaacgagctaattgaggaggttctctccttctcagcaggaaaaactctttggagagaagggctcagatagattcaggcaaaaagtccaagaaatggtggagtccaatgaagcaaagctagtggctttggtgaacaaatttattggttatctcaaacagaacacatattgttttccacatagtttaaggtggatcgtgtctcagatgtacacaaccctctcctgtgtagataggctggaagttggggaggtcagggcaatgtgtactgatctcctgttggcctgcttcatttgtcctgcagttgtcaatccagagcaatatggaataatatccgatgctcctattaatgaagtagcacgaatggcgaa

SEQ ID NO: 110330 - DNA, 443 bp, Homo sapiens
cgttttccacacctcacgggtcattctgttcacccctttggatgcgtaccggtttgagctaatgcggttcaggacagtgtttgatgagaagaccttgcctttcacactcaggacggccacaagtgtcagtggggcagaggtggaggtgcagagctggctgaggatgtcaccaggtttctccgccattcgtgaccccctcactcaggttccctgtgagaatgtgatgatccgttaccctgtgcccagtgagtgggtgaaaatcttccgcagggaaagtgtcctgggggaaaagtctttgaaagccaaagtgaaccggggggcaagatttggctccactagtgtttctggctctgagcctgtcataagagtaactgtgggagctgacaagtacgagcatagtattgcgggcgctgtagaagatacaagcatacgtccgcgcgcat

SEQ ID NO: 110331 - DNA, 424 bp, Homo sapiens
cagccagacttggcattggccagaagccttcctcctgctgaggagctgccggttgagacccccaagagggctggcgctgaggtgtcctgggaagtcagctccccaggtcccccgcccaagcaggctgaccttcctgacgctaaggattcaccaggaccccagcccacggatccacccgcctcagaggctcctgatcggccgtctaagccagagagagcagcaatgaatggagcagaccccatctccccccagcgggtgagaggagctgtggaggccccaggcacccccaagtctctcatccctggtccctcagaccctggcccagctgtaaaccgaacagagagccccatgggggccctgcagccagatgaagccgaggagtggccggggcgcccccaaagccatcccccagcacccctgtatt

SEQ ID NO: 110332 - DNA, 423 bp, Homo sapiens
  misc_feature (1)...(423): n = a,t,c or g
gcgtattcttggatcctctacagcggccctgtgattgatggtgatgtcattcctgatgaccctgagatcctcatggagcagggcgagttcctcaactatgacatcatgctaggtgtcaaccagggcgagggtctcaagtttgtggaaggggtggtggaccctgaggatggtgtctctggcactgactttgactattccgtctccaattttgtggacaatctgtatggctatcctgagggtaaggacaccctgcgagagaccatcaagttcatgtatacagactgggcagaccgtgacaaccctgagacccgccgtanaacactggtggcactcttcactgaccaccagtgggtggagccctcagtggtgacagccgatctgcatgcccgctacggctcgcctacctacttctacgccttctaa

SEQ ID NO: 110333 - DNA, 424 bp, Homo sapiens
  misc_feature (1)...(424): n = a,t,c or g
tccaaggccagctgagcccgggcagctggatgctttggacttcctcgtgggctctggctgtgaccacaatgtcaaagacaaggaggggaacactgcccttcatctggctgctggtcggggccatatggctgtgctgcagcgacttgtggacatcgggctggacctggaggagcagaatgcggaaggtctgactgccctgcattcggctgctggaggatcccaccctgactgtgtgcagctcctcctcagggctgggagcaccgtgaatgccctcacccagaaaaacttaagctgccttcactatgcagccctcagtggctcggaggatgtgtctcgggtcctcatccacgcaggaggctgcaccaacgtggttgatcatacaccagtatgtatnnnnnnnnnnnnnnnnnnnnnnnataacgta

SEQ ID NO: 110334 - DNA, 397 bp, Homo sapiens
  misc_feature (1)...(397): n = a,t,c or g
ctgcccctcgcggtgtcgtgcgtatgagcgtgttacacggagcacaattgcaaaaatttatcagcagagcgccgaggcgtattctcatacagagagagtttctctggcacgaagctatggtgcttccctgtgccctggctcttactcccctatagactacagagatggttctgtaatgaatatgttgcacatacacaatatagtgtggtctcaggcttgccttggtgcgtgtgcgcctctcttagagaagaagcttagccccccagagccatcatgctcagatgtggtaggtctcccttctggtgatgtgggtcacttaagagatggcagctaccacggaagcgctgtagcgcnnnnnnnnnnnnnnnnnnnnnnnnnnnnnnnnnnnnnntgtatt

SEQ ID NO: 110335 - DNA, 436 bp, Homo sapiens
  misc_feature (1)...(436): n = a,t,c or g
ccaaaaggctggaaagcagttggcacgggcggccccctttggagaaggancgagagaagatctcagcacccccgcatcgcagggctcagaaggtcatgatccgctccagcagtgacagcagctacatgtctgggtccccagggggaagtcctgggagtggcagtgctgagaagccgtcctctgacgtggacatcagcacacacagccccagcttgcctctggcacgggagccagtggtgctttctatagcatcctccaggctgccccaggagagcccacccctcccagagagccgggacagccacccgccgctgagactgaagaaatcctttgagattttggtgagaaagcctatgtcctccaagcccaagcctccacccaaaaaatactttaaaggacagtggtatgcggccgctcagaggatttaccaaggaaa

SEQ ID NO: 110336 - DNA, 852 bp, Homo sapiens
aaaacaagaaaaaaaaaggaatactttagaaccttttctgatgccttgtgactttcagaatttaaaatcccccttggcagataaggccacccacggcggaaggcgggaagccgagacgggggctgaggggaccttgctcccattggagctggcagggcgggaaggggtgctgcggtcagcagaggggcacccttcgcctgcgccgtgtgcagtgcctgcagtcactccctcattcccagggagtagccttgggtcagatgctggctcagatcttataactgctcctggtctgggtagccaggcctgcccagatgtgcaatggctggaataaagggttcttggaagcaatttgttacaggcaccctgtgggctgtggctggctgtggcacacgtgaaggttgtgtgtcaaacctactccctggacatggcgcatggctgcacacaggcaccttggctgagaagatgcacagtcctggtttcactctcctcccctggcctgtcctgtctgcttccacccagctctgcaggccaccagcccccgcctctcgtggccacccccagcccaacatgtcctcagccgcacatctcctgtgtcgacaggtgaagtcccgcttggcttttgggaagcccctggtggagcagggcacagagctggcggacatcgcgcagtctcgcgtgaagattgagcatgctcggtttctggtgctgagagctgcccacctcatggacctggcaggaaacaaggctgcagccttggatatagccatgattaaaatggtcgccccgtccatggcctcccgagtgattgatcgggcgattcctgccttttggagcaacaggggctgggcagcg

SEQ ID NO: 110337 - DNA, 436 bp, Homo sapiens
  misc_feature (1)...(436): n = a,t,c or g
tggtcacgtaatcggggatcctctacagcggccgcttcgccattcgtgctgtgtttttcggctcctccttgtcattaagctcctctctaaactggttattctagttaacaactgtaatctttcatcacggatcttagcttctttgcattgggtttgaacataatcctttagctcagcaaagttcattattacccactttctgaagcctacttctgtcagttcatccatctcagcttcagnnnnnnnnnnnnnnnnnnnnnnnnnnnnnnnnnnnnnnnnnnnnnnnnnnnnnnnnnnnnnnnnnnnnnnnnnnnnnnnnnnnnnnnnnnnnnnnnnnnnnnnnnnnnnnnnnnnnnnnnnnnnnnnnnnnnggctgttgacctttggatggggttttttgtgggtctttttttgatgtactttgtcggtgcttttt

SEQ ID NO: 110338 - DNA, 399 bp, Homo sapiens
  misc_feature (1)...(399): n = a,t,c or g
ggcagcatggtggtgccggagaaggagcagagctggatccccaagatcttcaagaagaagacctgcacgacgttcatagttgactccacagatccgggagggaccttgtgccagtgtgggcgcccccggaccgcccaccccgcagtggccatggaggatgccttcggggcagccgtggtgaccgtgtgggacagcgatgcacacaccacggagaagcccaccgatgcctacggagagctggacttcacgggggccggccgcaagcacagcaatttcctccggctctctgaccgaacggatccagctgcagtttatagtctgggcacacgcacatggggcttncgtgccccgaacctggtggtgtcagtgctggggggatcggnggggccccgtccttcc

SEQ ID NO: 110339 - DNA, 437 bp, Homo sapiens
ccagaaacaaaaggtgaccgggggaagcaagggcctcttgaaagaggtgagcgaggggaacctggagcccccggaccaaaggggaaacaaggtgaatcaggaactagaggcccaaaggggtcaaagggggatcgtggagaaaaaggggactctggagctcagggaccaaggggtccacctggtcaaaaaggggatcaaggagccactgagatcatagactacaacggcaacctccacgaagccttacagaggattaccaccttaactgtcacgggtccccctggacctcctggacctcaaggactacaagggccaaagggagagcagggatctccaggaatcccaggaatggatggagagcagggactcaaaggatcaaagggagacatgggggaccctgtattctggccgctctggagtaatctcggtagcgtctg

SEQ ID NO: 110340 - DNA, 398 bp, Homo sapiens
gaaccagcagttgttgataacgtccccattttggacattaatcagattccagctgagggtggaggacggattgtgctgtatggggacaccaattgcttggatgacagtcgccgacagaaggactgcttttggcatctggatgccctcctccagtacacatcgtatggggtgacaccgcctagcctcagtctctctgggaaccgccagcgccctcccagtggagcaggctcagtcactccagagaggatggaaggaagccatcttcatcggtactccaaggttctggaggcccatttgggagacccaaaacctcggcctctaccagcctgtccacaaaaaacttgggccaagccacagcctgtattgcggccgctctaggggtctacctacgaggcact

SEQ ID NO: 110341 - DNA, 388 bp, Homo sapiens
ttggtcctcaatttcttattaaccataagagaaatcaggccagagagaatttctccaagtggaagaaatgtggtaaaggctttactcggtcctcacaccttactaaacataagagaattcatcttggagagaaaccctacatatgtgaaaaatgtggtaaagcttttaaccaatcctcaacccttaatttacataagagaattcattctgcacaaaaatactacaaatgtgaagaatgtggtaaagcctttaagtggtcctcatcccttaatgaacataagagaattcatgctggagagaaacccttctcatgcgaagaatgtggcaatgtctttaccacatcctcagacttagctaaacataagagaattcatacaggagatgtatt

SEQ ID NO: 110342 - DNA, 425 bp, Homo sapiens
  misc_feature (1)...(425): n = a,t,c or g
agatgtcatgccgcgacgtagcttgatcctcagagcggccgcaatacagccctcgtatatccagatgggtcaaagatgcgaatcggaaaatattatcaggaaggaatgaaatcagattgtcattaagaatgagaactttcagtttgtggagcttattgaaggctcctcgttcaatatacttgattaaattgtagtcagcctggagatactccaagttctctatgccaaggaaagtgtcagctcggagaatctttaattcattgttgttcaagtgcaactgctttaatgcactgagcccaagaaaggctcctccctcaatgttctgcagtttattattccccagatgcagggagactgcatgtgaaaaattcaagaatgtatttggatacagaatatttanaaaattatttttgaaattgaggtgg

SEQ ID NO: 110343 - DNA, 380 bp, Homo sapiens
  misc_feature (1)...(380): n = a,t,c or g
aatacaggnnnnnnnnnnnnnnnnnnnnnnnnnnnnnnnnnnnnnnnnnnnnnnnnnnnnnnnnnnnnnnnnnnnnnnnnnnnnnnnagtcaaggaagaatgctacggcttgaatgtgtcctccgaagttcatgtgttgnnnnnnnnnnnnnnnnnnnnnnnnnnnnnnnnnnnnnnnnnnnnnnnnnnnnnnnnnnnnnnnnnnnnnnnnnnnnnnnnnnnnnnnnnnncctgttttcatgggagtgggtttctatcataagaagggttcctgataaatagatgagtttggctcccttttcttctcttctcttctcttctcttctcttcncttcncttctcttctcttctcttcccttcccttctcttcccttctcttt

SEQ ID NO: 110344 - DNA, 1092 bp, Homo sapiens
ccgggtcgacccacgcgtccgcgtccttgttgacataaaggacaccgaacccctgattcagacagcaaaaaccacgctgggctccaaagtggtcaacagttgtcaccgacagatggctgagattgctgtgaatgccgtcctcactgtagcagatatggagcggagagacgttgactttgagcttatcaaagtagaaggcaaagtgggcggcaggctggaggacactaaactgattaaggtgatggttttgatgcagagggagaccaagacatcattgttttgaagtttctgaaagtgttgggaggcaaaaattcaggtgcctgggggagaaatggaaggccacaaggcagaagaagaggtgctagatgttctccgactgaacgtgggtggctgtatttacacagcccggcgggagtccttgtgccgcttcaaggactccatgttggcatctatgttcagtggtcgctttcctctaaaaacagatgagtcaggggcttgtgttattgaccgtgatggacgtctatttaaataccttttgcattacccttcatggagaagttcagaattcccacagatgagggatacccggggtcgccctacagggaagagggctgattactttggcatcccttatccatacagcctgtctgaccatttggccaatgaaatggagacatattctttaaggtcaaatatagaacttaaaaaggctttaacagacttctgtgattcatatggcttagtctgcaataaaccaacagtttgggttctccactatccttaacacacctggtgcaagctgtgagagtagaattattggtgtatatgccacaaaaactgatggaacagacgctattgaaaagcagctgggaggaagaattcacagcaaaggcatttttaaaagagaggcgggaaataatgttcagtacatttggagctattattcagtagcagagttgaagaaaatgatggatgcctttgatgcttgggaaggaaaaggtgttagctactggcgggtgcctcatgagctgatagagtgttggactctagaagaacggcctttacttggaagcctgcgtcacatggctccat

SEQ ID NO: 110345 - DNA, 430 bp, Homo sapiens
ttggcccatgcagtgggcgagggcctccggattaaaaattttttttttaatagagacaaggttttgccgtgttgcccaggctggtctggaactcctggactcaagcaatttgcctgcctcggccttccaaagtgctgggattacaggtgtgagcctctgtgcctggcctggattatttttgtaatgggaattgttttagcaattttctaagtttgcttacagttctgtgaaatctcgttttctctttaacagtagctaatttggatctagtccttccacgtgtctaattccagccaacctgcctcatttagttctcatacctatagccagatctccttcagtttcatttctcagttccaagctaagactcttccttcccccaatgtattgcggccgctctagaggatgcacgcaaacgtagaaggcagta

SEQ ID NO: 110346 - DNA, 386 bp, Homo sapiens
  misc_feature (1)...(386): n = a,t,c or g
caaggcatacaaagtgcttagaacaagtcccgttacctagtaactactatccaagtattgtcagtannnnnnnnnnnnnnnnnnnnnnnnnnnnnnnnnnnnnnnaacactatgaaggagagaaacactatgaatgtaatgaatttggaaaatttagcaagaaatcaaactttacccaacatcaaagaatgtacacaggagaaaaacctgatgagtgtaaagaaaatgagaaagccttgaagaagttataccatactcaaaatgagagaactcatgcaggagagaaagtctatgattgtaagaaatgtgggaaattctttcatgaaaaagcatgccttactcaacatcagagaacaaacacaacaggaaaacccagcaagtgtatt

SEQ ID NO: 110347 - DNA, 425 bp, Homo sapiens
  misc_feature (1)...(425): n = a,t,c or g
accaccttagcgtgtatgctccagagccgncgcatacacctgggctcgaagtgtgcgactctctgctgttttcacctccctcctgatcagagctgtgatgttggctgacagccaagcacaggctttctctgttgcaagccccacagcaatgttctctgcactgctcagaacggctgccggggtctcctctggaagcagcgcccgcacagccccagggctcttcctttgacagaactcccgccccagggccaatgcctgggccccgtgagggcacagctgggaacacaagatctccaacagctgggctgggtctcccccttcctctccctgtgtcaccagctgctcttggagaagtgactctgcctggcacaccagatctgccaccagtggagcgttgatatgtttgacacagtttgatccaattc

SEQ ID NO: 110348 - DNA, 369 bp, Homo sapiens
cagggggaacagccagtccccaggcgccaagtacatcatccgagacaatggtgatcgcattgacttgcgtttccaccccaagcccagtgaccttcacctgcagaccggctataaggcacgtagcaggccagggcctctctcagccacctgagcagaatgctttccaagatagggcaggctgggttaggccatctgagtctgtctcgttcattgggatccagacttgactgtcttgttaaaggctgttgctgcccaggtgtgcagggagctgttggcctctggcattcagggtgggggtggtataaacccggggcagcttgcatatggcagggaagaggaatcaaaggaggaacagtgcagaatggcgaa

SEQ ID NO: 110349 - DNA, 373 bp, Homo sapiens
  misc_feature (1)...(373): n = a,t,c or g
ngtggatcagccctgcgagccaagcttacaggcctggagccctgaggtccacctgtaccacatgaacatgacggtcccctgccccacagaaggctgtagcttggagctgctcttccaacacccggtccaagccgacaccctcaccctgtgggtcacttccttcttcatggagtcctcgcaggtcctctttgacacagagatcttgctggaaaacaaggagtcagtgcacctgggccccttagacactttctgtgacatcccactcaccatcaaactgcacgtggatgggaaggtgtcgggggtgaaagtctacacctttgatgagaggatagagattgatgcagcactcctgacttctcagccccactgtatt

SEQ ID NO: 110350 - DNA, 412 bp, Homo sapiens
  misc_feature (1)...(412): n = a,t,c or g
ntggccagaagccttcctcctgctgaggagctgccggttgagacccccaagagggctggcgctgaggtgtcctgggaagtcagctccccaggtcccccgcccaagcaggctgaccttcctgacgctaaggattcaccaggaccccagcccacggatccacccgcctcagaggctcctgatgggccgtctaagccagagagagcagcaatgaatggagcagaccccatctccccccagcgggtgagaggagctgtggaggccccaggcacccccaagtctctcatccctggtccctcagaccctggcccagctgtaaaccgaacagagagccccatgggggccctgcagccagatgaagccgaggagtggccggggcgcccccaaagccatcccccagcacccccagtgtatt

SEQ ID NO: 110351 - DNA, 409 bp, Homo sapiens
tcttcgggaactggggctgcatcatatacagtaaacacaggagaaacagaggtaggctttgttccaacgtttggaccttgttacctgaatctttatggaagccccagagagtacacgggattcccagacccctatgatgagctgaatactggaaagggggaaggagttgcctacagaggcaggatcttggttgaattagccacttttcttgagaagacaccaccagataaaaagcttgagcccatttcaaatgatgacctgctggttgttgagaaataccagcgaaggcggaagtacagcctgtctgccgtgtttcattcagccaccatgttgcaagatgttggtgaggccattcagtttgaagtcagcattgggaactatggcaacaagtttgacaccaccatgtatt

SEQ ID NO: 110352 - DNA, 998 bp, Homo sapiens
tgagcggccttgtttacagcttctgtcctgctcctgcatcttgccaggctcctctgccaactgtaggcctgcctcatccctgcactggttccaacctccctgcactaatgcctgcatcctctctcgcctcttggccccctatccctgcacttctggaaacctccctgcactctggaaacctccctgaacacctccccaactctgcgctctcagcctccctgcatctctcctggcctccctgcacttcttccagccccccaaattctctggacctccaccctggcctcctcctcccaactttcattgtcttgggcatctctcaaccctcagtcctcttcttccttcccttctttatcatctcccctttcctctccacgtcccgcccccttcctcttcctgcctcctcatctcccttaagcatcctcttctccaacctcccgtcaccgtttactctgcaaaactgacagcacttaggacgaggcttgggggcagggagcagtgttggggagagggctccccaaccccagggttgggattgttctctggtggggaccacccaggggtcgggacaaccaagggtgcctgggcaggttcgcagagttgggcaagccgggcttcgtatgggggattcgggtgagggtgggcgagtaatggtttccgaacgcacgcaggggagaagggaagggacgcgggcgttgaacctttccaggtcagttggagtttgacccgttccacctgggcttttcaaccccagtccgcgagttttttttttgaaggtgtggggggtagattcattcacgtggtttgtaatgaaataatccaaaaaatagggccaaagcgccccctggcaggagcgagggcggggggccgcgctctataattattttttaaaatgatgggggaggtttgttgcccccgccagccccctgaggaggcggggaccgaagctacaacgcggttcggatttggcgggggtttttttccttaaaaaaaaaaaa

SEQ ID NO: 110353 - DNA, 478 bp, Homo sapiens
  misc_feature (1)...(478): n = a,t,c or g
nnnnnnnnnnnnnnnnnnnnnnnnnnnnnnnnnnnnnnnnnnngttacccagcaacccgagtcatatcctgatgatatccatgctcctcagtcacgcatcccgtggtgcaggggctgaccccaagaggagctgctgcccccagagggtggggagccgaggcagggcctgggtcagacttaccaggctatgctcccagcccagccctcactagggacccccgagtgcatctctctcctctccaggcctctgtttctccatctgtgcaaccacagtgttggacatggtagtcccaagtgtctgctcgtaactttgccctctctgtgcccccaggtcagggctgcgataagacccggtcacgggtgaccctgcaggagtggaatgaccctcatgaccatgaccttgaggcccagctcatctaccggcagtgtattgcggccgctgtagaggatccaagaatgcgttcggatacagacactt

SEQ ID NO: 110354 - DNA, 475 bp, Homo sapiens
  misc_feature (1)...(475): n = a,t,c or g
atgctatcgacctggacgagggagtcaatggggaagtgacatattcttttcggaaaataactcctaaacttccaaagatgtttcatctgaactcgcttacaggagaaatatcaactttagaaggattagattatgaagaaactgccttctatgaaatggaggttcaggctcaagatggtcctggtagtctgacaaaggcaaaagtactgatcacagttttagatgtaaatgataatgctccagaagtgactatgacgtctttaagtagctcaatccctgaagacacacctcttgggacagtcattgctcttttctacctacaagacagagattctggaaagaatggtgaggtgacctgcaccattccagaaaacctaccttttaaattagaaaaatcaatagataattattataaattggtcacaaccaaaaacttggaccgggaggtgtattcanccggtcggatatccgagcc

SEQ ID NO: 110355 - DNA, 441 bp, Homo sapiens
  misc_feature (1)...(441): n = a,t,c or g
ccatggtggaggtctccatcgtccagctgccacccttcagcatcagcaccagccgcgctgcaccccccaagtcccgcctctcagacatcactggctccagcaagaccagccggggaggtggaggcagtgggggcggagagcctcccaaaagccccccggaacgggctgtgcttgtgtctgaagtgaccaccacctcggccctggtcaagtggtctgtcagcaagtcagcaccccgggtgaagatgtaccagctgcagtacaactgctctgacgatgaggtactgatttacaggatgatcccagcctccaacaaggccttcgtggtcaacaacctggtgtcagggactggctacgacttgtgtgtgctggccatgtggaatgacacagccacgacactcacggcctgtgttngnccgctcggaggctcacgcacggacgcgc

SEQ ID NO: 110356 - DNA, 460 bp, Homo sapiens
  misc_feature (1)...(460): n = a,t,c or g
gacttcgcggggattctcnnnnnnnnnnnnnnnnnnnnnnnnnnnnnnnnnnnnnnnnnnnnnnnnnnnnnnnnnnnnnnnnnnnnnnnnnnnnnnnnnnnnnnnnnnnnnnnnnnnnnnnnnnnnnnnnnnnnnnnnnnnnnnnnnnnnnnnnnnnnnnnnnnnnnnnnnnnnnnnnnnnggggcccggttttttgggggcccaaaaaggcccttaaaaaaatttggnnnnnnnnnnnnnnnncagggccaatttttggcccgggaaaaaaaaccctggggccccggggaaaaaagtaccctcccgggggggaggaaaaaagagggggaaggccgggggcccccccggtaagggaaagggccagggcccgggcaaaaggggagaggtttttttttgaaaacttttttattattttaaggggtttttaaaaagggaccccccggggttttcccttatggg

SEQ ID NO: 110357 - DNA, 465 bp, Homo sapiens
  misc_feature (1)...(465): n = a,t,c or g
ccgctcttcagtgctatgaccagccagagcccgaggctccgggatgcccctcacacagactctgggaagtgccacctcttcccatgggggacacaggcccatagctccacctccatcgctgcgtacccctaagttctagcagcctgtggtccctggggcccacgcggcaccccagaggctgcgctgtgcaccagggcctcccttcacgaagcctcttgccctgttccctttcagcttgaacaagtcctgtcaaaaaaactggaggaggttgaaggtaaccaaccaatcttcccatgtaatgcttctgttttgttgggaaaattgattttatgctgactttttgcttttaacttatgacttcaggtgaaatatccagttaccaggatgcaataaaaattgaaatagaaaacggccggccatgtattgcggcctttggggnnnnttcgctcaattggcacgaacgtc

SEQ ID NO: 110358 - DNA, 461 bp, Homo sapiens
  misc_feature (1)...(461): n = a,t,c or g
tgtaagttccctagagnngaacctccagagnggnngncaccagccatccctcaagcacaccaatttttttacccaagaggctgttgcaggcatctcggtagggccgcgtgggccccgaggtgggcggcccttccagtgtgccgactgtgggatggtcttcacctgggtcacccacttcatcgagcaccagaagacccatcgcgaggaagggccctttccgtgccccgagtgtggcaaggtcttcctgcacaactccgtcctcactgagcatggcaagatccacctgccggagccaccgaggaagaaagccccccggagcaagggcccccgggagtccgtcccacccagggatggagcccagggcccagtggcccctcgcagccccaaaagacccttccagtgtagcgtctgcgggaaggcctttccctggatggtccacctcattgaccaccaaaagcttc

SEQ ID NO: 110359 - DNA, 440 bp, Homo sapiens
ccatgccatagtgttccttggcacagcttattaaacagtcattatgaaaaactacctgatgtgggctatcgagttgtaacagacaaaggatttaatttttcaccagcagatgaagcttttgtttgccaaaagaagaatcatttccagataaccattcacatccaagtttggggaagtccaaaatttgttgaaaccgagatgggcctaaagccaatagaaatgttttacttgaaagtttttggcactaaggtggaagctaccaatcaaataattgctattgaacagtcccaagcagataggagcaaaaagattttcaatcctgttaaaattgacctactggctgaccaggtcaccaaagtaacactgggacgattacacttcagcgaagccacagcaaataatatgagaaaaaagggaaaaccaaatccagaccatgtatt

SEQ ID NO: 110360 - DNA, 411 bp, Homo sapiens
caaaagtcgcataaaatggttaagaaaatgtgccaagattacctcagtaattctggtctgtgttctcaggagaccctggaaataaacaatgtgtcttctgtggcttcagcgtcacttagtgcaggctgccattcaacaaacgcattgtcaacagtcaaccaaaagaaacccattggccaccataccctgaggactaaccctgacacagatgcccttccagatgccctcagtagtctaactgattccatcgccccagccttgggggagaagcactgctgcctatgcactccatttacaggtgaactgtcacccctacaactcagcttgcaaccagccctggccaccaccagtttccccacactgagctgaatattggacatgcccatcttagacattccagcccgatgtatt

SEQ ID NO: 110361 - DNA, 299 bp, Homo sapiens
  misc_feature (1)...(299): n = a,t,c or g
gcggactccggagccgcacaaaccagggctcgccatgaagccaggattcantccccgtgggggtcgtggtcggggaggaaaaagaggaaaccagtcggggaagaatgtaatggtggagccgcatcggcatgagggtgtcttcatttgtcgaggaaaggaagatgcactggtcaccaagaacctggtccctggggaatcagtttatggagagaagagagtctcgatttcggaaggagatgacaaaattgagtaccgagcctngaaccccttccggtccaagcttagcagcagcaattcct

SEQ ID NO: 110362 - DNA, 384 bp, Homo sapiens
aggtgtttgagttctcttcctggtcacaggtcgccctcccccgagagggtcccaggctgcccagggaggaccagccaagcagctgctgcccctggagcgggtgtaccaggagattgccatcctgaagaagctggaccacgtgaatgtggtcaaactgatcgaggtcctggatgacccagctgaggacaacctctatttgggtgagtgacctggctcattcccacagcagctcactcagggctggcccaagggctcccttgggacatgtatgaccttcaggtgggcggtgtaaatgcactgacctcctggggacagaagaaaaacacacgttctgaagccctggattcccttgcacagccctgcagaaccaggcccaaatgtatt

SEQ ID NO: 110363 - DNA, 381 bp, Homo sapiens
  misc_feature (1)...(381): n = a,t,c or g
aaaaaaaattttgggcccgggccccggggtttttcccgttaacccccccccttggggggcccaaaccggggggtttttttgggggcaaaggtttgggcccccccctcccccccggggaaaccccggcccccctnnnnnnnnnnnnnnnnccgggggaaagggggccctccttttattnnnnnnnnnnnnnnnnnnnnnnncggaaaattccttttacccccannnnnnnnnntccggggaacccaaaaaaagccccccccttccccgttggggcccaaaaagggaacccccttttccnnnnnnnnnnnnnnnnnnnnnnnnnnngaaagaaaataaactcattggaggtaattttatcaaactcaaaaccacacatgtatt

SEQ ID NO: 110364 - DNA, 389 bp, Homo sapiens
gggctcttcaaaggcggtccctgaataagcatcgcagcttgtccttctacaatgaaaggggtctcttcaagtctgaggagccccccacagaggaggaagaggagtctcctggtgatggagaaccaaccttggatggggagctagtcctgctagagcaggaccctttggtgccacctccaccctcacaggcacccctctctgctgagcgggtggcttttcccaagggcctgccctgggccccaaaggtcagacagaaggacattgagcacttcttggagatgagcaggaacaagttcatcggattcaccctggggcaggacacagatacattggttggattacccaggcccatccatgagagtgtgaagaccctaaagcagcactgtatt

SEQ ID NO: 110365 - DNA, 455 bp, Homo sapiens
cgagcttccctatcaaacactgtccagtcatgctggtattggccttattacaaattaccgcctcttggcataccgtgcgccatgaacttatctccactatgatgccaatcttccatggaaaccatcctatctcagctattattatgcactatgcatggcatgggcagggacagtctccctcaattcgcgaacttatcatgcatgcaatggcagaatggtacatgagaggggagcagtatgatcaggccgaattgtctcgaatacttgatgtggcccaggacttgaaggccttgtcaatgctgctaaatggtactccatttgcctttgttattgaccttgctgcacttgcttcacgtcgtgaatacctcaaacttgataagtggctcacagataaaattcgagagctttgtatgcgctctctctagagcatcaaggtacgtgcgcgtgcataagag

SEQ ID NO: 110366 - DNA, 408 bp, Homo sapiens
cagccaattactgtgattgatctcagggaaacagaccagggatacaaaggtttgtctgtaaggagtgtgtgttggcgaggtgaccacattctagttggaacacaggacagtgaaatttttgaaattgtggtgcaagaaagaaataaaccttttctaattatgcaagggcattgtgaaggtgaactttgggcacttgctgtccatcctactaaacctttggctgtgactggaagtgatgatcgttcggtcaggatatggagcctagtagatcatgcattaatagcaaggtgtaatatggaagaaccaattcgttgtgcagctgtcaatgcagatggaatccatcttgcccttggaatgaaggatggctcattcactgtacttagagtaagagatatgacggaatgtatt

SEQ ID NO: 110367 - DNA, 403 bp, Homo sapiens
cgaaggggggggcccatacgctggttctagtactaaactagcagaggacgccgctttgtggcaggttgctgaatcaaaaacacccctcggcgtggccttcagcagcctccaggaggtcatcattcagctggtggattctcaccccgatatccatttgaatgtacgggacagacaagggctgaccccgtgtgcctgtaccatgactttcaagagcagcaagtcagccgaggccattctcaaacgagagtcaggggctgatgagcaggtggataacaagggccggactttccttcatgtggcagttcagacctctgatattgaaagtgtgctgttcctgatcagtgtccgcgctaatgtgaattcaagagtccagaaagcctccaagttgactccacacagctat

SEQ ID NO: 110368 - DNA, 409 bp, Homo sapiens
ctggacgcctggaaccgggagctgctggacaagtactgtgtggcctacggcgtgggcatcattggcttcttcaaggtacacaagaagcagggtccccgagcagttcagagccccctctgcagctcagtgcctgaattctcatttgtgaaataggtgtaatggtagcacccgcctcctggggttgttgggagggttaaatgagtgagtatatgtaaagcactgggagcatgcggtgcccactgcctggcaagtgctttgtaagtattaggggagcgtgccagggggatcgcctgctgtgcgtggggtccagcacacagcaggtgcttgcctaaaggaggccacagagtaagtgtgaagtcagaggagcatgctctgctaggtgccccaaaatctgtcaaggcaatgtatt

SEQ ID NO: 110369 - DNA, 426 bp, Homo sapiens
tccactctgccaagtgcagtctcagctcccctgacgcccctggtactcttgctccttcagcaacgcctcactccaaagctgttccatgaagtggtacaggcgttccgagcagctgtggccaccacccgaggggaccaggaaagtgctgaggccaacaaattccaggtcacggacagtgctgcattcaatgctctggttaccttctgcatcagagacctcattggctgtctccagaagctgctgtttggaaaggtggcaaaggatagcagcaggtaagaggggagggggtgaaggggggtagggtggaaggtgggtcgggaccacacacaggagaagccagaggccttgtggctaggacagagacatggcaacagagccagcgtcttcttggggaccctgagaaggcagcggggcacgaatggcgaa

SEQ ID NO: 110370 - DNA, 450 bp, Homo sapiens
  misc_feature (1)...(450): n = a,t,c or g
tatggaagaatatatttctgtgtccctgggggtgggaattccctttccttgcgctcgtattagggacctctggttatttttcaggcccctggaacccctatccttgcacggcaggtggcccccactcccataattaaaccagtgtttcaggccccggcaacggtgcagcccagggcaaccctgcagcgcttgcccggcgtccaggtaaaagggcaggcggcggattttttgaggccgcaggggcccccaagtgttatttttttgaagcagagatcaggccttaggagnnnnnnnnnnnnnnnaaactggatactacgtcaaatctggggaggaaggttctctgtgaagaaagtgctttttctttgacctcccacatgggataagtcaggannnnnnnnnnnnnnnnnnnnnnnnattagtcacacagaatttaacaccagcagctgtatt

SEQ ID NO: 110371 - DNA, 878 bp, Homo sapiens
aagccccaaggccgtgggatgggagagggtggcaggcgtgcccaggtagaagtagggaagggctctccaatcctccaggcacggtgagaagcagcggtggtctcctattctccaccgccagcacagggtcagcatgcagtgaatattgaactggtgggctgcttttttccctcctgctgtcttaccaagtgctagaaagagacgaaccaaacctaaataatatgaagtttctgccttccagggactcgcagtcctgggtgtcggggctaggtagagggaacagaaagggtctctggaggttgggtgagacccagtgactatgacctcctccaaccctgcagacccaataggtgaccagtgggaagaggaggaggaaggcttcaactacgcagtggacctggtgaagcacatccgaagtgagtttggtgactactttgacatctgtgtggcaggtgagtggctggatcatcctggtggcggggatggagctagggaggctgagatgcccagagagcctgtcggtgttcggttcaggacacagtgatcaggggcactcatgggtccatgctggatgaaggacatgcagaggtgaactgcaccgtgtccttgctccttttgtatcacccactcccctcctgggcctgccaccatcgacccctagctttttgttcctctgcctggctgtgcccttagcctgctcggcctctcaaagtgctgggattagaggcttgagccaccaggcccggctggaatgcttgcattttcttgcctgatttccctgggagcaccccccttaacactgaatggagctggtgagagcaaatatccttgtttctgatattagatattaaaaatatggtttttccccaaaaaaaaaa

SEQ ID NO: 110372 - DNA, 408 bp, Homo sapiens
atacatgcccctgaactccttaagacttctccagggtgtttctaacggagctccctattccctctcccagtaaccactctcacactctacctcccacacatacaaaaactcacattaatgctcactccagagacgtgtctccctccctagccagacttctaccctctccctgtatctcacaacacaatccaaacccccactaccctcaaactcccactattcagaaattccctgccaacagcatcacaaaaccagggcacatggtatcttttcaatcctcttcggtagtagtcacacaaaaagccgttgctactgtaagctcttctgcctgcctattcaaaggcaaccacagtggttattatctccaactcttctcttccctttagcccccgcctcctttactgcact

SEQ ID NO: 110373 - DNA, 437 bp, Homo sapiens
gggccatacctgctccagttcctcacccctgtgcgcttcactggggccctgactccgctctgcaggagcctcgtgcatctggcgcagaagaggcaggaggccggggccgacgccttcctcatccagtacgacgcccatgcgagcctcccgtctccatatgctgtaaccggaagactgttggttgtgtcttccagcccctacctaggggacggacgtggggcagcggcggtgcgcctcctcagtgttctgcacccaagcattcaccctttgctgggtcagcattgggaaacgactgtcccaaagctgctggggttcctggatgagcacacagaagagaccctgcctcagcaggagtgggaggagaaaaagaagatgttcctgcgagacaccctggccagtattgcggccgctgtggatgatacaaactatagaccact

SEQ ID NO: 110374 - DNA, 440 bp, Homo sapiens
ttggcaagggggctgcacaggagaatggggcccctgagtgttccccccggaatccgctggagccctttgccagccttgagcagaaccgggaggaggcccaccgggtgagtgtccgtaagcagaagctgcagcagttggaggatgagttctacaccttcgtcaacctgctggatgttgccagggctctgcggctgcctgaggaagtagtggatttcctgtaccagtactggaagttgaagaggaaggtcaacttcaacaagcccctgatcaccccaaagaaagatgaagaggacaatctagccaagcgggagcaggatgtcttatttaggaggctgcagctgttccgaaccctctccaggtcccaccgggtgagtgtccgtaagcagaagctgcagcacttggaggatgagttctacaccttcgtcaacctgctggagtaa

SEQ ID NO: 110375 - DNA, 436 bp, Homo sapiens
  misc_feature (1)...(436): n = a,t,c or g
ctagaaagtgtcagggactctggaaagaaacataatggcctcacctgtgaagagctggctgaaaaagacgacatcaagtaccgtacctctattgaagaaaaaatgactgctgcccgcattagaaaatgccccaagtgtgggactggcctcatcaaatctgaaggctgcaaccgcatgtcttcccgctgtggtgcccagatgtgctacctctgtcgagtttctattaatggatatgaccatttctgccaacatcgccgctcaccaggagccccttgccaggagtgttcaagatgctctctctggaccgatccccctgaagatgatgagaagcttattgaggaaatccagaaggaggctgaagaggaacagaaaagaaagaatggagagaacatgtattgcgnccgctctggagnatcctacctaaagagagttacac

SEQ ID NO: 110376 - DNA, 446 bp, Homo sapiens
  misc_feature (1)...(446): n = a,t,c or g
ctacagaagactcagaggatgctgtaagcataagaagcaagtctgtccctggggctttagacaagggctccttggaagagactgaagaaagcattgatgccttagtgtcctcgcagttatctacaaacactcaccgtctggcaagtggcctatcaactaccagccttaacagcatgatgagcgtttacagtgaaacgggagactatggcaacgtgaaagtcagtggtgaaatccttctccatatcagctactgctacaaaactggtgggctgtacatttttgtcaagaattgcagaaatctgcccataggagatgaaaagaagcagagcacagatgcttatgtcaagtcctaccttcttcctgncaagtcccggaaaaacaaaaatgagaccaaaatcagcacaggcactgtgttgcggcggctgtgtcgctntaacgcaacgggc

SEQ ID NO: 110377 - DNA, 445 bp, Homo sapiens
  misc_feature (1)...(445): n = a,t,c or g
cgccccaggcctggcatggaggatgtgctcatttgtctcctgccccagctgagccaggtgggaggaggcagtgggtgcctatctggggaaccttccccctccacccacctctccctgcagccatctctgcagccaggctggtgctgagctcagctacgggaaggtactgacagtcacagagccaggtgacaccnnnnnnnnnnnnnnnnnnnnaagagctgactcaatatcacccgacatccccaagtcccctcagctggtaggccagtagctctgaggaccctcctgttactaactcatcttctcccttccctggtgcccagctggctgtccaaaagtatgagcccctcttcccagctttctctgattgccgggaaaacaaaatgatgaaaanaatgctacaggcccctgtntcgcgtcggntntgtnccctaacngtatgtag

SEQ ID NO: 110378 - DNA, 448 bp, Homo sapiens
gaacttaaaatatactggggaacgacaacctcgggcaaaccacatgtggcttactttgtgcccatgtcaaagattgcagacttcttaaaggcagggtgtgaggtaacaattctgtgtgcggacctccacgcatacctggataacatgaaagccccatgggaacttctagaactccgagtcagttcctatgagaatgtgctcaaagcaatgctgcagagcattggtgtgcccttggagaagctcaagttcatcaaaggcactgattcccagctcagcaaagagtacaccctagatgtgtacagactctcctccgtggtcacacagcacgattccaaaaaggctgcagctcaggtggtaaagcaggtggagcaccctaaactgaatggcctcttataccccgcactgtattgcggccgctctggaggggtcctcgctaccgtacgcggcc

SEQ ID NO: 110379 - DNA, 407 bp, Homo sapiens
  misc_feature (1)...(407): n = a,t,c or g
cctgaagaggacattgagcaaagagatcctcttccgagagctggaggtgcgacaggttgccctgagacatcttattcacttccttaaggaaataggggatcaaaagttgcttttagacctcttcaggttcctagatagaacagaagagcttgcgctatctcattatcgagagcatttgaacattcaggaccctgacaaacgaaaagaatttcttaaaacctgtgttggtttgccattttcagcagaagattccgcacacatacaggaccattacacgctcctggaacgtcagatcattattgaggcaaatgatcgccatctagaatcagcaggacagactgagatcttccgaaagcacccccgcaaagcctccatcatcaacataacacgagaacancacgtgtatt

SEQ ID NO: 110380 - DNA, 491 bp, Homo sapiens
  misc_feature (1)...(491): n = a,t,c or g
tgtttttttccccaaacggaattcccgctggagagaacccattcaaatgtaaacagtgtggtaaagcctttagtcattctagtagccttcgaatacatgaaagaactcacactggggagaagccttataaatgtaatgaatgtgggaaagcattccatagttccacatgccttcatgctcataaaagaactcacactggggagaagccatatgaatgtaaacagtgtgggaaagccttcagctcttcccattcctttcaaatacatgaaagaactcacacgggggagaagccatatgaatgtaaggaatgtggaaaagcattcaagtgtcccagttctgttcgcagacatgaaagaacccactctaggaaaaaaccctatgaatgtaaacattgtgggaaagtattatcttatcttaccagctttcaaaaccacttgggaatgcacactggagagatatctcataaatgtagtntatgtggganagtgtat

SEQ ID NO: 110381 - DNA, 471 bp, Homo sapiens
  misc_feature (1)...(471): n = a,t,c or g
cctgatgaaggaagctacgtttgtgttgcgaggaactatcttggtgaagcagtgagtcgaaatgcgtctctggaagtggcatgtaagtgaacataatgaacctcatgtgcacatttacttttatttatttcaagtaagttttgatgtgttcccatagacgctgaaacctaaagaatcaatcaaccccctgcataattttacttggtcttcttcagagaagtctggtcaagatagtatcaagccagggtgttgtagtaagtttgtttatatgaaatcaagatgaccaatatgttattataagaaagnnnnnnnnnnnnnnnnnnnnnnnnnnnnnnnnnnnnnnnnnnnnnnnnnnnnnnnnnnnnnnnnnnnnnnnnnnnnnnnnnnnnnnnnnnnnnnnnnnnnnnnnnnnnnnnnnnnnnnnnnnnnnnnnnnnnnnnnnnnnnnnnnntccgcgtcacgaatggcgaa

SEQ ID NO: 110382 - DNA, 762 bp, Homo sapiens
ctaattttctattctattcttgagtctgttttagtagtttatctagaaaattgtccttttttctgttttcaaatacataatatttttacaaggtcacgtagctagtaggaggctgtaagcctggtgagtttttgcttttatttaataacttgcttttttctaaacaggtgatctgtgtccacgatgtctcatccatctaccgagtccccttgttgttagaggagcaaggggttgtagattattttcttcgaagacttgaccttcctattgagaggcagccaagaaaaatgctgatgaaatggaaagagatggctgacaggtttgcctgcaatgaggagctgggagtgctagcctcctttactcttttgtagggctggtgaagccgactctagccctagcacttttgtacttttgcacttctgccatccactcattagaagagcctttgtagtaagagatgttcagaaaggatcttagctgtcacgtagctgtggcacagatgaggagatcctgatagggccaggccaggtgccgggcctccagacaatgagttcgggttatgtcttaacacgcttgtctcttaccaactagatcagtgcagatgggcgtcctggtggcagcgggtgagtgtgcatatccaaagcccacacgaatggctgacagtggctggagcactcctgggtaccactccagagttctgagctgtgtttgggaatgtgtctcaccccacaccagaaagggatcacattaggacggtgatgg

SEQ ID NO: 110383 - DNA, 424 bp, Homo sapiens
catgctatcgcgatcttggacgagggaacgagtgatcggcgatgccgcaaagaatcaagttgcaatgaaccccaccaacacagtttttgatgccaaacgtgtgattggacgcagatttgatgatgctgttgtccagtctgatatgaaacattggccctttatggtggggaatgatgctggcaggcccaaggtccaagtagaatacaagggagagaccaaaagcttctatccagaggaggtgtcttctatggttctgacaaagatgaaggaaactgcagaagcctaccttgtgaagactgttaccaatgctgtggtcacagtgccagcttactttaatgactctcagcgtcaggctaccaaagatgctggaactattgctgggctcaatggacttagaattattaatgagccaactgctggtgcg

SEQ ID NO: 110384 - DNA, 373 bp, Homo sapiens
ttggtccagctcatcgacgtggcccggcaggctgcccagggcatggattgagcctcccagcctggggaggggtgggggcaaagggtgggggaaatgaggtagcccccagccattccggctcctgcctcctccccctcaggtacctccatgccaagaacatcatccaccgagttctcaagtctaccagtatctatctgtccctgggctggggttgagtgggggtgtcaagggcttagaaggatgcctcctgtgggggttctgggaattacaagggaggggcatgtgtcccagagctccttcccaggtggcagacctgtggccagccagggggctttaatgccagtctcttacaagtcagaggtgtggctggttc

SEQ ID NO: 110385 - DNA, 473 bp, Homo sapiens
ggtcgaccagaagtacaagcgccaggcacaggctgaccgagtgaacctgcggaaactgcgcggctactacaaccagagcgaggccggttctcacacctctcctttgtgacttcaagagcctctgcattctctttctgcaaaggcatctgaatgtgtctgcgttcctgttagcataatatgaggagttggagagacagctcacccccgtgtccaccgtgacccctgtccccatactgacctgtgttccctccccgatcatctttcctgttccagagaggtggggctggatgtctccatctctgtctcaacgtcatggttgcatgagctgcagcttcttagctccccaatgaagttaagataccgaatataaatttgtgttcccaaatatttgccatgaagcgttgatgggttaattaaatgagttcaattctagaagttgagagagccaataaagactgagagcttccagaaaa

SEQ ID NO: 110386 - DNA, 409 bp, Homo sapiens
cttcccctctggcctcaccaacttgtgcctggccaagactgcattttcccctcgagggctccaggcactcggccagaccttcggggcaaacccagcatttgccagctcccttcgatacctggacctgagcaagaatcctgggctcctcgccacggatgaggccaatgccctctacagtttcctggcccaacccaacgccctggtgcacctggacctgtcaggaactgactgcgtcatcgacttgcttctcggtgccctgctccacggctgctgctcccacctcacctacctcaacctggctcgcaacagctgctcccacaggggtctctccacaggaagggtcgagaggccccgccggccttcaagcagttcttcagcagcgcctacacactgagccacgtcaatctgt

SEQ ID NO: 110387 - DNA, 420 bp, Homo sapiens
tgggagcatacaatgtgagctgcaagcacatgcagcatatccgcatgtcccttcgcgggaaggctgtggtgctgatggctactaacaccatgatgcgcaaggccatccgagggcacctggaaaacaacccagctctggagaaactgctgcctcatatccggcggaatgtgggctttgtactcaccaaagaggacctcactgatatcacggacatgttgctggccaatatggtgccagctgctgcccgtgctggtgccattgccccatgtgaagtcactgtgccagcccagaacactggtctcgggcccgagaagacctgctttttccaggctttaggtatcaccactaaaatctccaggggcaccattgatatcctggtgagtggacctggtttgactgtgctaaccaagcaaatgggga

SEQ ID NO: 110388 - DNA, 395 bp, Homo sapiens
agcagatcctgtccacggtcatctacgatagcgagctgcagctggagctgccggccgtgtcacccgaggatgatggagagtactggtgtgtggctgataaccagtatggccagagggccaccgccttcaacctgtctgtggagttcgcccctgtgctcctcctggagtcccactgcgcggcagcccgagacacggtgcagtgcctgggcgtggtgaactacatcccggattccgccgtgttcgttgtgctgccatctccgcccgtgtccgtcaaagtttgcgagtggcagtatttgtatctcttgtttgccgttgttctatattctctctatacacgtatcgtcctatacgtcatatataatttactattattatatgttgcgcttttcctatct

SEQ ID NO: 110389 - DNA, 375 bp, Homo sapiens
agacaaatctcaagggggcaaaaggtgccatttatgtccggtgaactcctgtcccctcgctgctctttcacttgtggaaagtctcaggttacctcctctgaaggtcttctctgccttacttgcttctcttcctcccatcagagcctgccctcgcaaaacccgatcttgaagaatatcaccgactacctgatcgaggaagtaagcgccgaggaggaggagctgctggggagcagcgggggcgctcctcctgaggagcctcctaaggaagggaacccggcagagatcaacgtggagcgggatgagaagttgattaaggtgccagtggcagcgcggggcacgtgggggctcgggcggtgagggcaggagctgaacgct

SEQ ID NO: 110390 - DNA, 586 bp, Homo sapiens
gctgcttgatattctaagatttgatgctggaactttggtgtcaatgctcaaaatgcccaaagacaccactcaacctcagtgtctatgcacacccaagcttttgcagcaggacaggtagagcagagatgagtgtgctacaacatgctggtagagggtacccccaattgtgcttggggatttcctattcctcatggaaaaatgtgtcttccttaatttttcccataagaaccaccctacttcatgccctgtctctctgtcccaaacaccaggacagtcctctcaccagtctcaaccacccaatggattgacaaaggtgcaaatatgattcagtggagaaggcattctcttgtcaacaaattgtttagaaacaacttttttttacacaatttgttttttttttatccccaaaggaaaaaaattcacctgaacctcaatactaactcaaaaactaactcaaaatggattatgcaactaaatataaactataaaactagaaaaagtatagcagaaaatataagacaaaatcttcatgacacagagttaggtaaagtgttctttattatcaataaacacaaaccattaaaga

SEQ ID NO: 110391 - DNA, 398 bp, Homo sapiens
ggaacacgatcttcagtgattatagcccatatgcttgtacattggtgcaagaaaacctatgccttaatcttcatatgatcaatgagtttattcataacgaggttcaagaagcttttaaagagttactgcaaatccatcagtacgttatggcccttagcgaagaatattttgatccatgtatagccggctggacagggaaatattatgaacttgaagaaaagatagtcagtctgagcaagaacctgctaggtgctcttacggacttccattctgaatatattggcagagcctctatctttacttgccaactgtcaaggcaaggtgagcaatttctgcacagaaatattcaagaatatcttatgatccttaccgaaccagatggaaaagggaaacagaag

SEQ ID NO: 110392 - DNA, 388 bp, Homo sapiens
caaattccagaatgcgctattagttcgttacaccaagaaagtaccccaagtgtcaactccaactcttgtagaggtctcaagaaacctacgaaaagtgggcagcaaatgttgtaaacatcctgaagcaaaaagaatgccctgtgcagaagactatctatccgcggtcctgaaccagttatgtgtgttgcatgaaaaaacgccagtaagtgacagagtcaccaaatgctgcacagaatccttggtgaacaggcgaccatgcttttcagctctggaagtcgatgaaacatacggtcccaaagagtttaatgctgaaacattcaccttccatgcagatatatgcacactttctgagaaggagagacaaatcttgaaacgcactgcacttgtg

SEQ ID NO: 110393 - DNA, 392 bp, Homo sapiens
gtgaaatttggcatcaattatgactaccctaactcctcagaggattatattcatcgaattggaagaactgctcgcagtaccaaaacaggcacagcatacactttctttacacctaataacataaggcaagggagcgaccttatctctgtgcttcgtgaagctaatcaagcaattaatcccaagttgcttcagttggtcgaagacagaggttcaggtcgttccaggggtacaggaggcatgaaggatgaccggcgctacagatactttgagggcaaaaggggaggatttaataccttcttagaccgggaaaggtatgaaagaggttactgtatcctggatgcaagagaatttggggcgctgactataaaaggggtagactccgcgcctcgatc

SEQ ID NO: 110394 - DNA, 425 bp, Homo sapiens
  misc_feature (1)...(425): n = a,t,c or g
ggtacgtatacangcgtttatttaccattcgcaaggccctgtcccagctcaagggtggggggctggctcaggccttttattctgcccaggaggtgagcctcatcctgtcagatgtggtgggggaccctgtggaggtgattgccagtggccccaccgtggccagttcccacaatgtgcaagattgcctgcatatcctcaatcgctacggcctccgtgcagccctgccacgttctgtgaagactgtgctgtctcgggccgactctgacccccatgggccacacacctgtggccatgtcctgaatgtgatcattggctctaatgtgctggcgctagctgaggcccagcggcaggccgaggcactgggctaccaggctgtggtgctgaatgcagccatgcaaggtggatgtaaaaagtatggcccacct

SEQ ID NO: 110395 - DNA, 434 bp, Homo sapiens
  misc_feature (1)...(434): n = a,t,c or g
actaccctagtgtcgtgcaattcaacgacataaactatggtaataagagcatcaggaagtttacctaaaatgccattttgatgaaaaattttagttatagcatactcagtctcctagagttcattctcaatgggtcagggtaaggggatnnnnnnnnnnnnnnnnnnnnnnnnnnnnnnnnnnnnnnnnnttcaggggcctcacttgagaggctctggtgcagaatgaacaccttagtctgtttagggagcctcctaccaaactgaatccagcctcaagacttcagcatttctggctttcctttcaagggggaccccaactccccagttcttttggaggacccagttctttgtgccttaacaaagaaacacaaaccaacccccggcctgagtgtcctgtgctatcaaattgtaaggggggggtgtggggcccgg

SEQ ID NO: 110396 - DNA, 481 bp, Homo sapiens
  misc_feature (1)...(481): n = a,t,c or g
atggaactcgtctattgacctggcgcaagacacatgctctggtgatggctgtgagggaggaatgaggatagacatagacactcctgtgtctcaaacatgcttgtttattactctgttatgactctgtcttccctggggcaggaccccagcctgcctacatttgcagacagacacagtggcatgtggagacaacagtgtgtcccagtgacttttctttaccccccagctgtcggcagtactcagtggaagggtgatatgacactgatactgctattttgaaacctggaggatggaaaggtgcaaaaatctatcaccagcaacagaaggtgcagactgtgttggtggcggtaattttgtccatcaaatgaatatgtgtgaaaacattccctcctttggccctacaggtcagaatggcggcagcagagcatcgtcattcttcaggattgccctgctggccctacctcacagctgaaactttaan

SEQ ID NO: 110397 - DNA, 409 bp, Homo sapiens
tttaacatgagttcttccaggggaccactcccagtaaaaagaggaccaccaccaagaagtgggggtcctcctcctaagagatctgcaccttcaggaccagttcgcagtatcagtggaatgggaggaagagctcctgtatcacgtggaagagatagttatggaggcccacctcgaagggaaccgctgccctctcgtagagatgtttatttgtccccaagagatgatgggtattctactaaagacagctattcaagcagagattacccaagttctcgcgatactagagattatgcaccaccaccacgagattatacttaccgtgattatggtcattccaggtcacgtgatgactatccatcaagaggatatagcgatagagatggatatggccgcgatcgtgactattccc

SEQ ID NO: 110398 - DNA, 413 bp, Homo sapiens
ttcctggggccattgaatacaaaggcgccaacatccagctcctggaccttcctggaatcattgaaggcgcagcccaaggaaaaggccgtggccggcaggtgatcgctgtggcgcgcacggctgacgtcatcatcatgacgctggatgccaccaagggagaggtgcataggcctctgctggagaaagagctggagtctgtgggcatccgcctcaacaagcacaagcctaacatctacttcaagcccaagaaagggggtggcatctcctttaactcgacagtcacgctgacccagtgctcggaaaagctggtgcagctcatactgcacgaatacaacatcttcaatgcagaagtgcttttccgagaagactgctccccggacgagttcatcgaagcgatcgtgggccactcggcc

SEQ ID NO: 110399 - DNA, 400 bp, Homo sapiens
gccactcgttcagtgcggtggaattccatttgactattctcaccctcgtgatgtctacagtaacctcagtcacctgcctggggccccagggggtcctccagctcctcaagggctgccctactgtccagaacgatctcctctcttaatgggtcctgtgtcggtggcctttatcccagtgccatcactggcagagattgtggagcggaatccccgggtagaaccagggggccggtaccgccctgcaggttgtgagccccgctcccgaacagccatcattgtgcctcatcgtgcccgggagcaccacctgcgcctgctgctctaccacctgcaccccttattgcagcgccagcagcttgcttatggcatctatgtcatccaccaggctggaaatggaacattg

SEQ ID NO: 110400 - DNA, 453 bp, Homo sapiens
  misc_feature (1)...(453): n = a,t,c or g
ccattagtacagtgcggtggaattccccaccccacggctccacttcctcatgaccggctacacccctctcactacggaccagtcagtaagagcagccttcagtgtcccaggccaggccggccctgggcccaacaggccctgtcctagcctttctctcttccccactgccccaggagctaccctttgtggaccccaaggcgcggcgctcagggactggcacagagtgggcgactttcttgctgacttgctctccaccctccctctgcctttggcttctgccaaagagaagccaaagggggactgtgccctgagcgctggccgggtccctgtctcactgtcctatcaggtggccagcgtgaggaagaccacggtcctggatgtcatgaggcggctgctgcagcccaagaacgtgatggtgtccacaggccgagaccgccagaccaaccactgctn

SEQ ID NO: 110401 - DNA, 451 bp, Homo sapiens
  misc_feature (1)...(451): n = a,t,c or g
acaccattattnnnnctggtggaattcaacaagagtctagcagctgacaccaagaaacagaatgctgacccgcaggctgtgtctatgcctgccactgagaccaaaaaggccagccatgtggctgatacgaaggtcaatacaaaggctcaggagactgaggctgcaccctctcaggccccagcagatgaacctgagcctgatagtgcagctgcccagtctcaggagaatcaggatactcggcccaaggtcaaagccaagaaagcccgaaaggtgaagcatctggatggggaagaggatggcagcagtgatcagagtcatgcttctggaaccacaggtggccgaagggtctcaaaggctctaatggcctcaatggcccgcagggctataaggggtcccatagccttttgggcccgcagggcatcaaagactcggttggctgcttgggccccgc

SEQ ID NO: 110402 - DNA, 966 bp, Homo sapiens
tcacgggttgctatagtaagtccagcccggcccactggcccggcccagctgcccactgcccggctgcttggttgacgtaactgtagctcccggggtttgtggtgctgatgggtgggcaaggccaactgatacacagaccatggtttgggggtggtgctcaagaacatagctccctcttccttctggggtgctgatagggcaggaccttcttccctaggcaggaccttttctgcccacatcttctgcagtaggcatagttcagggaccaactcctttgtgtggtacttgctctcccacacaaccactgcctgctccacacaaccacagcctgctctcctacacaaccactgaccttatcttgcctgagctgcccaccattcagggaggaagggctgggcctgacctcagtgcctctggggactaactgcacggtgactcctgccccatctgataccagctggacgggggctttcccggctgctaagactgcatgtgcctgaggctgccctgggcactgcacacatgcacgtgcacatgtgggggtgagtagaggtcagcacagctgtttgtactatttaaggcagatgtggcagcagccatcccagacacgtctgttcctcagccaagctgcagtcctgatgcagatgtagccaaaagctcctgggtcctaaatatggccacagggtccactgcccgtccccattaaccctatccacccatgtgttcctccatctcaacagtgctggcctgtgggcggccccaagcaacagcagtgtacaaggtgtcagagtatgcacggcgctttggtgttccggtcattgctgatggaggaatccaaaatgtgggtcatattgcgaaagccttggcccttggggcctccacagtcatgatgggctctctcctggctgccaccactgaggcccctggtgaatacttcttttccgatgggattcggcttaagaaata

SEQ ID NO: 110403 - DNA, 469 bp, Homo sapiens
tatagtgacatgcttactgccagcttggcacgagggagattgccaacgggcaccgcaccgcctcggacgccggtttcctcgttggctcccacgtccagtaccgctgcctgccagggtacagcctccagggggcagccatgctcacctgctacagccgggacacaggcacacccaagtggagcgatagggtgcccaaatgcgccttgaagtacgagccgtgcctgaacccgggggttcccgagaatggctaccagacgctgtacaagcaccactaccaggcgggcgagactctgcgcttcttctgctatgagggctttgagcttatcggcgaggtcaccatcacctgtgggcccggccacccctcccagtggaccagtcagcccccactctgcaaagttgcctatgaggagctcctggacaaccgaaaactggaagtgacccagaccacagattcatcacggcagctggt

SEQ ID NO: 110404 - DNA, 468 bp, Homo sapiens
cctgctactccaatcttggcacgaggcgcgttggaccgaattctcaagctgggcgaccagggcccggctcttcagggcttcttggttttccacagctttggtgggggaactggttctgggttgacctcgctgctcatggaacgtctctcagttgattatggcaagaagtccaagctggagttctctatttacccggcgccccaggtttccacagctgtagttgagccctacaactgcatccttaccacccacaccaccctggagcactctgattgtgccttcatggcagacaatgaggccatctatgacatctgtcgtacaaacctcgatattgagcgtgcaacctatactaacctgaataggttaataaggccaattgtgtcctgcatcactgcttccctgagattcgatggagccctgaatgttgacctgacagaattacataccaacctggtgccctatgcccgg

SEQ ID NO: 110405 - DNA, 445 bp, Homo sapiens
  misc_feature (1)...(445): n = a,t,c or g
aatggtaccccnnaaccatgcttactccgagcttggcacgagggacaaaattacaggacagagtttaaggtatggatttgttttctatattgatccaaaggatgcagagaaagccatcaacactttaaatggactcagactccagaccaaaaccataaaggtctcatatgcccgcccgagctctgcctcaatcagggatgctaacctctatgttagcggccttcccaaaaccatgacccaaaaggaactggagcaacttttctcgcaatacggccgtatcatcacctcacgaatcctgggtgatcaagtcacaggagtgtccagaggggggggattcatccgctttgataagaggattgaggccgaagaagccatcaaaaggctgaaaggtcagaagcccaacggtgctaccgaaccgaatactgtgaaaggtgccaaccactcc

SEQ ID NO: 110406 - DNA, 495 bp, Homo sapiens
aggaagtcgccgagttaattgaccagcatgagacgatgatgaagcttgtcctggaagacccactgcttgtgtctctcaggctggaggggggcaccgtcctggcgcggctgaggagagaagagcttggcacagaagacagccgggacaccctggaggccgccacaagcctgtacgaccgagtggatgaggaggtgcacaggctggtcctcacctcgaacaatcgtctccagcagctggagcacctccgggagctggcgtcactcctgaaagggaatgaccaggtcagagctgcaggaggaaggcggcccggtcagcatcccctccaggccaggctggccaaggcaaccctctcaccttcacactgtgtctttagggccttgatctgatttccatttggaatgaaattatgtcaggatagggcatgccatactgcttgtgtaaaaagaaataaattttattttttacgtgaaaaaaacctcgtgccaagaatggcgt

SEQ ID NO: 110407 - DNA, 449 bp, Homo sapiens
tccacctgaggagccacgccagttgtggacgagggccatccgtgccaagtgcatgttcttcaaggacaagaccatgctgtgtccaatgcataagatcaaggggccctgtgagcaagagctgaactcttttgctgtcttccggcgggtctacattgagcgggacgaggggaagcacatcgctagcatcattcaacggagagaacggctgcacatgttccgtgtggggggccttgtggtccacgccatcggacagctgctgcctcaccagatggctgactttcatagtgccactgccctctatcccgagggctacgaggccacgcgcatctattggagcctccgcaccacacaatcgcgctgctgctatcgctgtcctattggggagaaccccgggcggacggacaccgaatccctaggccctgactgccctggaacgactggttattccg

SEQ ID NO: 110408 - DNA, 468 bp, Homo sapiens
catgcttacgccaagcttggcacgaggtggtgaaggtggccactcagccggctgacaatccccttgacgttctatcccggaagctccacctggggcccaatgatgggcgtgatgatcctcgcctgtctctgcctggaaaactggtcttcccaagctccactggcagccacttctccatgttgggcatcggagacatcgatatgcctggtctcctactatgctttgtccttcgctatgacaactacaaaaagcaagccagtggggactcctgtggggcccctggacctgccaacatctccgggcgcatgcagaaggtctcctactttcactgcaccctcatcggatactttgtaggcctgctcactgctactgtggcgtctcgcattcaccgggccgcccagcccgcccttctctatttggtgccatttactttattgccactcctcacgatggcctatttacagggcg

SEQ ID NO: 110409 - DNA, 444 bp, Homo sapiens
acttagaaggtccttacgccaagcttggcacgaggtttgtaattgaccatcagcgactttccggccagggatactgtttttcagcttcgttacctcccctgttagctgctgcagcaattgaggccctcaacatcatggaagagaatccaggtatttttgcagtgttgaaggaaaagtgcggacaaattcataaagctttacaaggcatttctggattaaaagtggtgggggagtccctttctccagcctttcacctacaactggaagagagcactgggtctcgcgagcaagatgtcagactgcttcaggaaattgtagatcaatgcatgaacagaagtattgcattaactcaggcgcgctacttggagaaagaagagaagtggctccctcctcccagcattcgggttgtgggcacgggggaacaaacagaggaagaactggaat

SEQ ID NO: 110410 - DNA, 426 bp, Homo sapiens
ccatgcattacgccaagcttggcacgaggtcgcactggcacctaccgccaggtcttccaccctgagcaacttatcacaggcaaggaagatgctgccaataactatgcccgagggcactacaccattggcaaggagatcattgacctcgtgttggaccgaattcgcaagctggccgaccagtgcacgggtctccagggcttcttggatttccacagctttggtgggggaactggttctgggttcacctccctgctcatggaacgtctctcagttgattatggcaagaagtccaagctggagttctctatttacccggcgccccaggtttccacagctgtagttgagccctacaagtctattctcaccacccacaccaccctggagcactctgattgggccttcatggtagacaatagaggccatttg

SEQ ID NO: 110411 - DNA, 468 bp, Homo sapiens
ggcaaacccaaaagtttcagaaaagtacagaccctgctaaactcttttgaaagctaccaagggtaccctgggtagagccaaacagctggatggggtcaatcctcacagcaaaaaacctggcagggtggtgctccctcataaagcgcattgattccctggcacttccttgatttgatgtcagcgaaatccccgcaggctcctcgtgtgggtgtctcatggcaccatctccacctcagtcttgcatcctgcctttggaagccagggagcggcatcctgagcctcaaggcctgccgcaggtaccttctaaaatagctctatgatttttttgtttacttataacccaactcaccaggactcacttccattcacagagatatgcagcccctactcagtgccctgccaaatgtgggcatgtttgaccccagcttcagagtccctggcacccaggcagccagcaccaccaataca

SEQ ID NO: 110412 - DNA, 456 bp, Homo sapiens
gttgtacctgcatacgccatgcttggcacgaggagaagctgctaagagtccaaatggattggtggtagtttctatatttataaaagtttctgattcatcaaacccatttgttaatcgaatgctcaacagagatactatcacaagaataacatataaaaatgatgcatatttactacaggggcttaatatagaggaactatatccagagacctctagtttcatcacttacgatgggtcgatgactatcccaccctgctatgagacagcaagttggatcataatgaacaaacctgtctatataaccaggatgcagatgcattccttgcgcctgctcagccagaaccagccatctcagatctttttgagcatgagtgacaactttaggcctgtccagccactcaacaaccgctgcatccgcaccaatatcaactttagtttacaggggaaggactggcc

SEQ ID NO: 110413 - DNA, 417 bp, Homo sapiens
tcaggggtgtcaatgaaaatgactatagccctggctccatgaacggtgtgaggtaatgtggccagtgacatcctgcaatgtgtggaagggagggtagactcgtcctccccaccctcagccccactggattcctggtcgcttggcttctgcttctccttcccgaaactatctgctaaaaacgcatgacttccagaggacaagcttggggagcctccccagctgcacctcagtgcctccttcagtctgacagtgtccccacagatccctctcaccctcatcctgacgtttcataaaaccaagtctgcgtgcataccccaagaggggtaagggtggaggggtggctctgcgactcacctcacagggtccgtgcacaccttggctgtttcagcaacgcgtcctgcaccaccaactgtttcc

SEQ ID NO: 110414 - DNA, 432 bp, Homo sapiens
ctataaagtaatacagaaagggacagtgctcccatctatgattaagtgcgcgcaactaattcatacttaaggtttttttgtctccttcccttgctctatttaaattggtgattctctcacacctgatgactcttctctcaaatgcccatccttgatatttcctagaagttttgtgcaccgagggcggcctgagcctctggattttcacttgggcatgttcctgccctccttgcttcaccaggcatctgcggagcagcaggagcgcttcttcatgcccgcctggaacttggagatcattggcacttatgcccagacagacatgggtcatggtatggagtattcagtatacaatataggttgggcgggcccctgtgagcttaccatgtgtggagtgccccctcgtgccaagataggcgtaatgatgctacgatt

SEQ ID NO: 110415 - DNA, 410 bp, Homo sapiens
gggcgacgtcctgcaaagtgtcctttgtggggctgatgccctgatcccagtccagacgggtgctgccggctcagccagcctcacgctgctaggaaatggctccctgatctatcaggtgcaagtggtagggacaagcagtgaggtggtggccatgacactggagaccaagcctcagcggagggatcagcgcactgtcctgtgccacatggctggactccagccaggaggacacacggccgtgggtatctgccctgggctgggtgcccgaggggctcatatgctgctgcagaatgagctcttcctgaacgtgggcaccaaggacttcccagacggagagcttcgggggcacgtggctgccctgccctactgtgggcatagcgcccgccaaacctggtgggccttggcggccg

SEQ ID NO: 110416 - DNA, 178 bp, Homo sapiens
tttttttttttccttttacatgaatttatttctatacaatgttctaaaaacaccccttggtttgtacataagtttttttctttttttcttcatttttaaattactttataacaactggtttcctgattttttttttaatttcctttcctctgaaatctgccatgatttaaaaaaaaaa

SEQ ID NO: 110417 - DNA, 424 bp, Homo sapiens
tcatagacacggtacgctggacggggggctgggatgcagagcagcctgtatgtgtgttgctggcgctgcgttcctggggactcaactgcagggatatggaacctgaatgagaagagcaacgggggctccacccagctcgtgatgaggctctgtatacgagaggggggccatgacgtcccgagtaacaaagacgtcacctcactggagtggaataccaatggaacactcttggctacggggtcatatgacggttttgcaagaatatggacggaagatggtaacctggccagcaccttagaccaacataaaggccccatctttgccttgaaatggcaccgaaaggggcactacattttgagtgctgccgtagacaaaacaacaataatttgggatgcccacacaggagaagcccaacagcagtttt

SEQ ID NO: 110418 - DNA, 421 bp, Homo sapiens
  misc_feature (1)...(421): n = a,t,c or g
annnnnncccgtccgtgcgcttcgatgtgtacaacgtggactccaaaaccaacatctccaaaccgaaggatttcctgggacaagcgttcctggccctgggagaggtgattggaggccagggcagccgagtagagcgaaccctcacgggtgtaccaggcaagaagtgtgggaccatattgctgactgcagaagagcttaacaattgtcgggacattgccaccatgcagctgtgtgcaaacaagctggacaagaaggacttctttgggaaatcagaccccttccttgtgttctacaggagcaatgaggatggcacgttcaccatctgccacaagacagaggttgtgaaaaacacgctgaatcctgtgtggcagcccttttggatccctgggcgggctctgtggaatggggactatgacagaag

SEQ ID NO: 110419 - DNA, 428 bp, Homo sapiens
gcaatatgcactacgcatatactgttactggggcgcgcgacagaaagaacaggaagtgcaggagccgcggctcatcttttctttcaacgagatggacaatcgctacgagggcctcgaggtcatctcccccaccgaatttgaaggggtgctttatctcaaccaaatgggggggttcaacttcgtggacgatggctcactgcccggctgcgcggggctgaagttgagcgacggtcgcaagaggagcatgtccctctgggtggaattcattaccgcctccggctacctctcggggcgcaaaatccggtccaggtttcaaacgctggtggctcaagcggtagacaaatgtacctaccggcatgtggtaaagatggtggcagacaccaacgaagtgaaactgataatccgagataggtacgtggtgcagattc

SEQ ID NO: 110420 - DNA, 470 bp, Homo sapiens
cctgtggcccctttagcatggcgggattggagattcgggatagagggccccgtgtgctcatgcctagacattcattcaagccctaatggctggaaccctcaagccccgtggctgcctcaaggcctgccttttccaaaaatggcagcgcatggtaccaccccctgcggagcccacacgtcagcagcccagctatcggcggaaacggaagatgtcagggggcagcaccatgagctctggtggtggcaacaccaacatcagcaacagcaagaagaagagcccagctagcaccttcgccctctccagccaggtacctgatgtgatggtggtgggggagcccaccctgatgggcggggagttcggggacgaggacgagaggctcatcacccggctggagaacacccagtttgacgcagccaacggcattgtcgccgagcctcgtgccaagaacggcgtaggcattgcataacgct

SEQ ID NO: 110421 - DNA, 450 bp, Homo sapiens
acgcccgcttggccgagggagtgacccaagtcagcgcggaagaaagaggaggcccgccaggcggagtttgttataatagggcaggcactaaaactgaaatccattgtgagaggggatgctccatcaagcttggcagcttcagggatctgtaaaaaagagccgtgggagccccagtgtttctgcagtaatttccctcatgaagccgtgtgtgcagatccctggggccaggccttgctggtttccactgatgctggcgtcttgctagtggatgatgaccttccatcagtgcccgtgtttgacagaactctgccagtgaagcaaatgcatgtgcttgagaccctggaccttctggttctcagagcagacaaaggaaaagatgctcgcctctttgtcttcaggctaagtgctctgcaaaagggccttgaggggaagcaggcttgggaagagcac

SEQ ID NO: 110422 - DNA, 450 bp, Homo sapiens
agctcgggaacagcgacctcactgttccgacgggaatggtcaaacacatgacagccagagacctgtgccaattgctggtttacttaagacactgtgtggatgacaacagccggacgctagctaagcaccacccgcccctaccaataaagaggggcttgctagaccatgcactggcgggccaggcggagagtaccatccccggccagagaaaatttctattcatgaagaattacgcaaaatacgagctctttatttatcccatgaatttcttcccagaccaaacggatacttggtgccagcagtcaaatggcagtcaaacccagcttttgcagaattttctgaactccagtagttgtcctgaaattcaagggtttttgcatgtgaaagagctgggaaagaaatcatggaaaaagctgtatgtgtgtttgcggagatctggcctttattgct

SEQ ID NO: 110423 - DNA, 424 bp, Homo sapiens
ctaaaaagggtcaaccctgaagaattcatatcatatcctctgcgggaaaagatagacttgagggacaacatctttgccaatgtggacccaggagcattcaccaatctctttaacctgcgttccctccgcctaaaaggcaatcgtgtaaagctggtccctttgggagtattcacggggctgtccaatctcactaagcttgacattagtgagaataagattgtcgttttactagactacatgttccaagatctacataacctgaagtctctagaagtggggggcaatgatttggtttatatatcacacagggcattcagtgggcttcttagcttggagcagctcaccctggaaaaatacaacttaacagcagtaccaacagaagcccttttcctcccggtcgctcggccaaactagcgtgtcgggt

SEQ ID NO: 110424 - DNA, 453 bp, Homo sapiens
gttgacctgatctacggcttcctggccgagggagtggaacacgccagaagggtgccgagggaaagccccctggccacagcagtcacgtcctctgcatgggcatctcctccgacggcgagtaccttgcctctggtgaccgcagcaagctcattctcatttgggaggcccagagctgccagcacttgtacaccttcacaggacaccgggatgcagtgtcggtgaggagctgggtctatgtcagtggatctttagtgggcacatgctagtgttctaggctcagtgctggcctctggagtctctgtcctcagggaacctgcatcctggggtagcgagtgggtaacgagtggtgctgtaaaatacataaatgggctaaagggatggggaggagctgggggagaccgggccgagcttgctcaggaatcaacgagggcctttgaaaaccgcctctgggcg

SEQ ID NO: 110425 - DNA, 460 bp, Homo sapiens
  misc_feature (1)...(460): n = a,t,c or g
ngtatcaagtactagctccaactgcctattatgatcagactggtgccttagtggttggccctggagcaaggactggccttggagctccagttcggttaatggctccaacacctgttttaattagttcagcagcagcacaagctgcagcagcagcagcagctggaggatctgcaagtagccttacaggcagcacaaatggtctgtttcggccaattggcactcagccaccacagcagcagcaacagcagccaagcaataatctgcaatctaattcattttatggaagcagttctttgactaatagctcccagagtagttctttattttctcatggacctggtcaccctggaagtacatctcttggctttggaagtggtaactctttgggtgctgctataggctcagccctcagtggattggctttcccggtcccacggccaagtagtcagtgtcaagctaa

SEQ ID NO: 110426 - DNA, 480 bp, Homo sapiens
tcggactcggaaaacaacgtcaattttggttttatgccttcgtgccggggggtgtatgagttaacatctcacattaaccggatactccactgtaccgacaacggagcgacgtgtttcaaaggacacaagtggtacttggttgtggggagtggaactgggatcctttccatgttcgctgccaaggcaggggccaagaaggtgtttgggatcgaatgctccagtatttctgactactcagagaagatcattaaggccaaccacttggacaacatcatcaccatatttaagggtaaagtggaagaggtggagctgcctgtggagaaggtggacatcatcatcagcgagtggatgggctactgtctgttctatgagtccatgctcaacacggtgatctttgccagggacaagtggctgaaacctggggggcttatgtttccagaccgggcagctttgtacgtggtagcgattgaagacagacag

SEQ ID NO: 110427 - DNA, 486 bp, Homo sapiens
  misc_feature (1)...(486): n = a,t,c or g
atacggaatcctggacggacgccctgtgaaaacacnccttctagggtgggatctgaccacctcattgattgagactggtcttccagctgttacaagttggtagggccacatactagggtgatgagtacaactgaattctcatgagaagctgaaccaggttccctctcctgtactgataaggcagaggtgcatttggggacagtgcccagaagtgactctgcttacccctcagttggccagatgcgccattcccaagccttggagccagaacccctcatgcctactcttagttgagtctcacctgtgtcccttcctctgtccaggaggaaatgaacacatggatccaggctatctcttccgccatctcctctgataaacacgaggtgtctgccagcacccaaagcacgccagcatccagccgcgcgcagaccctccccaccaacgttgtaaccatcaccagcgagtccagccccggcaagcgggaat

SEQ ID NO: 110428 - DNA, 458 bp, Homo sapiens
  misc_feature (1)...(458): n = a,t,c or g
tgtgtcagaaggaggggactatttaagtgaatgtgtgggatactttgttgatgaggacagatgggtaaatctgccacatattcataatcacctcgatggacatgctgttgcagtaacagaatcctacgtgtatgttgctggatcaatggagccagggtttgctaaaactgtagaaaggtataacccaaatttgaatacatgggaacatgtttgtagtctgatgacaagaaagcattcttttggactaacagaagtcaaagggaagctctatagcattggaggacatggcaactttagtcctggttttaaagatgtgactgtttataatcctgagcttgataaatggcacaacttggaatcggcaccaaagattcttcgagatgtcaaagcactagccattgaagaccggttngtatgttttcccagtcacgtnnnnnnnnnnnnnnnnnnnnnnnnnn

SEQ ID NO: 110429 - DNA, 471 bp, Homo sapiens
  misc_feature (1)...(471): n = a,t,c or g
cgtatcnnnnnnnnnnnnnnnnnnnnnnnnnnnnnnngggagagatgttaaatcaggatcagtcccttgaaatcagcaacacacttacaaacgagaaaatgaaaatagaagagtgtataaagaaagggaaaaaggattatgaagagagtcatcagagagctgcggctgcagaggtatccgtacttgaaaactggaaggagagtgaagtgtataagctacagatcatgcagtcacaagcagaagcctatctgaagaagctggagctgattagccatgatcctgcagcatatcctgacatggagtccgatatatgttcatgggaattgtttctttctaatgttacaaaagaaactgagaaagcaaagtatcagtttgaagaacaaattaaggcaattaaaaatggttctcgggtcagtgaactttctaaagtgcagatttctgagctttcatttcctgcctgtaacacgggtg

SEQ ID NO: 110430 - DNA, 399 bp, Homo sapiens
ggctgagatcccagggaaaggaggcggctttccggaaagtagtacaagcaactatggtacgcgatcgtcagcatggccccgtcgtgaatgtgaaacgaatccaggtcaaacgatcaaggagcaaaggcgggctggccggccccgacggcaccaagtctgtctttgggcagatgtgtgctaagatgaactcgtttggtcccgacagcctcctccttcctcaccgtgtctggaaagtcaagtttgtgggtgaatctgtggatgactgtgggggcggctacagcgagcccatagctgatatttgtgaggagctgcacaacggactcacgcccctgttgatcgtgacacccaacgggagggatgagtctggggccaaccgagagtgctacctgctcaggccgg

SEQ ID NO: 110431 - DNA, 436 bp, Homo sapiens
atcgtatgtagactgctacgcctttctggacgacggacatgcgctatgactgcctcacctttgccttcctcttcctgctgttgggcatgctggtgcgagtggtgcggcaggagacgctcgatctagtgctggagcctggtttgcccagcttgacctaaaacttaaaaccacttttgatgaaccaagactgggactgggggcttcatgtggccaagctgggtatccacgtggaactggcagtggtgggctctgtgctgggtgccttcctcaccttcccaggcctgcggctgggccagacccaccgggacgcactgaccatgtcggaggacagacccatgctgcagttcctcctgcacaccagcttcctgtttcccctgttcatcctgtggctctggacaaagcccattgcacgggacttcctggaccagccggcgtt

SEQ ID NO: 110432 - DNA, 391 bp, Homo sapiens
attgcgccccagccacgcctagcttggcacgaggcattgtcaagggcaaagcccgcctgcctgtgaagtggatggccccacagagcatctttgactgtgtctacacgggacagagcgacgtctggacctatggcatcctcctctgggagatcttctcacttgggctgaatccctaccctggcatcctggcgaacagcaagctctataaactggtgaaggatggataccaaatggcccagcctgcatttgccccaaagaatatatacagcatcatgcaggcctgctgggccttggagcccacccacagatccaccttccagcagatctgctccttccttcaggagcaggcccaagaggacaggagagagcgggactataccaatctgccgac

SEQ ID NO: 110433 - DNA, 425 bp, Homo sapiens
tgccacagttatgaccatgactacagccagcttggcacgagggctgctatgtcataaacggtcacaaatggtggatcacaggcatcctggatcctcgttgccaactctgtgtgtttatgggaaaaacagacccacatgcaccaagacaccggcagcagtctgtgctcttggttcccatggataccccagggataaaaatcatccggcctctgacggtgtatggactggaagatgcaccaggtggccatggtgaagtccgatttgagcacgtgcgtgtgcccaaagagaacatggtcctgggccctggccgaggctttgagatcgcccagggcagactgggccccggcaggatccatcactgcatgaggctgatcgggttctcagagagggccctggcactcatgaaggcccgcgtgaagtcccgg

SEQ ID NO: 110434 - DNA, 437 bp, Homo sapiens
aatgtatgacctgcattactgtttcctggcacgacgcagtgggaaaccaagaccatctttacagggcatacggcagtttttgaagatgtttcctggcatctactccatgagtctctgtttgggtcagttgctgatgatcagaaacttatgatttgggatactcgttcaaacaatacttccaaaccaagccactcagttgatgctcacactgctgaagtgaactgcctttctttcaatccttatagtgagttcattcttgccacaggatcagctgacaagactgttgccttgtgggatctgagaaatctgaaacttaagttgcattcctttgagtcacataaggatgaaatattccaggttcagtggtcacctcacaatgagactattttagcttccagtggtactgatcgcaaactgaatgtctgggatttaagtaa

SEQ ID NO: 110435 - DNA, 464 bp, Homo sapiens
  misc_feature (1)...(464): n = a,t,c or g
ctagcttaccccttctgctagcnggcgcgcgaggactttctgtttgtttggcacctttgacctcttattcgtaacattactgtggataatacagccaaatgtgaatggaggcattgagaacacattacagaaggaggtgatgcagtatgactactattcttcatattttgatatatttcttctggcagcttttcgatttaaaggggtaatacttgcatatgctgggagcagactgcgccattgttgggcaatagcgttgacaacggcagtgaccattgcctttttactatcaaaagtgatcctttcgaagcttttctctcaaggggcttttggctatgagctgcccatcatttcattcatccttgcctggattgagacgtggttcctggatttcaaagtgttacctcccgaagcagaagaagaaaacagactcctgatagttcaggatgcttcagaaagggcat

SEQ ID NO: 110436 - DNA, 472 bp, Homo sapiens
agtagcgtcggttcatgcttaccccattcttgtcacgaggggaatgcggagtgactccagaaagtgagaatctcaccttgtcgtcatctggagctattgaccagtcgtcttgcacagggacgcctctgtcatccactatttcctccccagaaggccctgccagcaacagcttggcccagtctgtcatgtccatggcatcctcccagatcaacactgacaccgtctcctccatgtctggctcctacatcgcccctggcactgaagaagagggagaggctctctcttccccccagcctgccagcagggccccctcagaaaaaggagaggggctgccagcggagtctccagacagcaactttgctggcctcccagctggagagcaagatgcacagggaaatgatgttatagaggaagaggatggatcacccacgcaggaaggccataggacgtgcgcatttctaagtatggagtg

SEQ ID NO: 110437 - DNA, 459 bp, Homo sapiens
  misc_feature (1)...(459): n = a,t,c or g
gtgaccgttgtgaccatgattacgccnttcttggcacgagggccgacagacaggccctgaatgagcacttccagtccattctgcagactctggaggatcaggcgtctggtgagcgacagcgcctggtggaaacccacgccacccgcgtcatcgcccttatcaacgaccagcgccgggctgccttggagggcttactggcagccctgcaggcagatccgcctcaggcggagcgtgtcctgttggccctgcggcgctacctgcgtgcggagcagaaggaacagaggcacacgctgcgccactaccagcatggggccgccgtggataccgagaaggcacagcagatgcgcttccaggtgcatacccaccttcaagtgattgaggagagggtgaatcagagcctgggcctgcttgagcagaacccccacctggctcaagagctgcggccccagattcaggaac

SEQ ID NO: 110438 - DNA, 444 bp, Homo sapiens
tatgaccatgcattacgcctagcttggcacggagggactgcactagagacacttggaaatcctacagttgagtaggaaccatatcagaaccattgaaattggggctttcaatggtctggcgaacctcaacactctggaactctttgacaatcgtcttactaccatcccgaatggagcttttgtatacttgtctaaactgaaggagctctggttgcgaaacaaccccattgaaagcatcccttcttatgcttttaacagaattccttctttgcgccgactagacttaggggaattgaaaagactttcatacatctcacaaggtgcctttgaaggtctgtccaacttgagggatttgaaccttgccatgtgcaaccttcgggaaatccctaacctcacaccgctcataaaactagatgagctggatctttctgggaatcatttatt

SEQ ID NO: 110439 - DNA, 441 bp, Homo sapiens
ccgtcttatcggattcctggccggagggagtggcaaaacactatccgcagacttcggctacctacggaggcatcaggtctgggctcctttcccttcaatacccggaaggaactgcacagttggaaggcagagaatgaagccttcaccctggctgacctgaagcaactgccggagctgaacccaccagtgctgatgcccacagggaatgaggggactcccctgcgggcctttttggagttgatccgggcctgccggctaccccctcggatcattacccagctgcaggtccagttccccaagacaggttcctcccggcgctacggaaatgtgccttttgagtatgaggactcacagactgtggagcaggaagagcttgcgtatacagccgagggtgaagaaataccccacggaacctacctggctgatataccagccagcccg

SEQ ID NO: 110440 - DNA, 469 bp, Homo sapiens
ggaaggcccacgaacagcctccgggtgttgcaagagcagctctcccaggagcggcagttacgaaaggaggaggcccacaatttcagccagaaaatggtccagctgaaggaggctcagcagagggcgctcctgaggcgggagtttgagctgcagagtctgagcctccagcggaggctggagcagatattctggagccaggagaagaacatgctggtgcaggagtcccagcaattcaagcacaacttcctgctgctcttcatgaagctcaggtggttcctcaagcgctggcggcagggcaaggttttgcccagcgaaggggatgacttcctcgaggtgaacagcatgaaggagctgtgcttgttgatggaggaagagcagtataacgctgcagcattgtgataacaaggcctgcacgggggacagctggacccagaacacgcccctcgtgccaagctggcgtatcatgtat

SEQ ID NO: 110441 - DNA, 463 bp, Homo sapiens
  misc_feature (1)...(463): n = a,t,c or g
gaccatgcttacgccaatnccggcacgaggacctgctgctggcccctgacaatgccctcaagattgtggactttggcagtgcccagccctacaacccccaggcccttaggccccttggccaccgcacgggcacgctggagttcatggctccggagatggtgaagggagaacccatcggctctgccacggacatctggggagcgggtgtgctcacttacattatgctcagtggacgctccccgttctatgagccagacccccaggaaacggatgctcggattgtggggggccgctttgatgccttccagctgtaccccaatacatcccagagcgccaccctcttcttgcgaaagggtctctctgtacatccctggagccggccctccctgcaggactgcctggcccacccatggttgcaggacgcctacctgatgaagctgcgccgccagacgctcaccttccc

SEQ ID NO: 110442 - DNA, 464 bp, Homo sapiens
tgctacaccagcttgtccgaggggtcagactggcccagacagggattagggtagggatgtgacaaggtgaggaagggaggtggcacagctgctcaccttggagatagccagagggacagggaacctggggacgggggatggtgccagctgtggccctggctcctggggcctccaggaagggaagaaggaaccagggcagagcccacagccaggagctcaccttctccaggttggtgttgaccagccagagggtctccaggttgcttatggaaccacagagaacagtcccgtgacattcgcgcacttccctgaggacactgtggagcagaaggcagaaagcgcgggcacaattatgcctcacacggagagatgtcgccacaatgaatgagcagggcttttgcaagatcgagggccgttctaaggatatgatcaagcggggaggggagaacatctaccccggagac

SEQ ID NO: 110443 - DNA, 410 bp, Homo sapiens
ggcgccccagttaccatcggcaaatgtcagaacctattgtccctgcagctcccccgccccctcagggattcaaacaagaataccatgacccactctatgaacatggggtcccgggcatgccagggcccccagcacacgggttccagtcaccaatgggaatcaagcaggagcctcgggattactgcgtcgattcagaagtgcctaactgccagtcatcctacatgagagggggttatttctccagcagccatgaaggtttttcatatgaaaaagatccccgattatactttgacgacacttgtgttgtgcctgagagactggaaggcaaagtcaaacaggagcctaccatgtatcgagaggggcccccttaccagaggcgaggttcccttcagctgtggcaggtcctggtc

SEQ ID NO: 110444 - DNA, 402 bp, Homo sapiens
ggcgaaatgactggcatttgcagtgctattcatttgtaaaattccttctaggatcagatgtgctagcataacacatgaattgataagtagttatgtgtacatgctgcaagagttgttctgttttctagtaaaagactcttttctcatccttagatctgttcgcagttgagtaccaggctggagaaacagcaagcagccagcaaggaggagctggaagtggtaaaggtaaggagtgaaatcgcgctgtgataaaatttatttcaaagtcacacaggcttgtaagtacctgaaagaaccccaaacaccaccattttgtattaaaggatttattaataggaattatggagactaggatacctctcttctgaccaggtgtgattggcttccctacccggtgaaagg

SEQ ID NO: 110445 - DNA, 454 bp, Homo sapiens
  misc_feature (1)...(454): n = a,t,c or g
ccgcgcaaatgaaaacatgcaggatgctcacgccnagctgggtgcgaggggcagcgggaaggagagcaagcaggaatgggaggcagaggccagttttgtgaaaaacgaactgaaaggtgttgaggtcggcgcagacactgggtccaaatctatttcagagaagggttccgaagaggatgaagaggaaaagctggacgatgacgataagtcccatgaatctttccagcccgaatcaggagctgcctctagagggaaaaaatttgatgaagaaagcaatgcttccatgagcactgctagagacgaaacccgagagggattctacatggaggacggagatccttcaggagctcagctccttcatgaaagaacactcgccttctcggtttggcctaaggatagagtaatgataaaccgcttataccacatctgcgaagcagcggtgaaaggcacatgg

SEQ ID NO: 110446 - DNA, 459 bp, Homo sapiens
cgcgcgaatggatactgtgatgaccactcactacgccaagcttggcacgaggcctcgtgccacggcgaagcccaatctcgtctagtaagggcaaaggaaaagtggacaaaattggcccaattttgttgaccaaggcatgcaagaaaggtaccggctctcttgataaaggggaagaacaatatggtgcagatggagagactgaaggccaagggctagacaccacagctccggggctcatgggaacagagcagttatccacagagctggacagtaaaatcccaacgcccccagcacccactctgctaaaaatgacctctagccctgtgggcccgggcactggctcagcaggacccagcttacctggcggggctctccccaccagtgtacgctcgatagtaaccactctgggaccctccgagctcatctccgccgtaccgaccacaaaaagcaatcatggtg

SEQ ID NO: 110447 - DNA, 424 bp, Homo sapiens
tgccggcggccgaggagtggtgcaagctcagcgaggtccccagcctcccccaggggaagcagggatccctggacaccccacacctccagccacgctcccctcggagcctgtagagggtgtccaggctagtccctggcggccacgtccagtcttgccaacgcacccggctctgaccctgcccgtgtcctcagatgcctcctctccttcaccgccagccccgaggcctgaacgacctgaatcacttctggtctcaggaccatctgtcaccctgactgaaggtctaggaactgtgaggcctgaacaggaccccgccaagtctccaggaagtcccctcctgctgagaggcttgtcaagcggggatgtggctgcacctgagcccatcatgggggagcccggccaagccagtgaggagttccagccattg

SEQ ID NO: 110448 - DNA, 452 bp, Homo sapiens
gcacgaggggatgcagacggctgcgaggcgctgggcacagttgctgtcccctttgacgatgatgacaagattgttgggggctacacctgtgaggagaattctctcccctaccaggtgtccctgaattctggctcccacttctgcggtggctccctcatcagcgaacagtgggtggtatcagcagctcactgctacaagacccgcatccaggtgagactgggagagcacaacatcaaagtcctggaggggaatgagcagttcatcaatgcggccaagatcatccgccaccctaaatacaacagggacactctggacaatgacatcatgctgatcaaactctcctcacctgccgtcatcaatgcccgcgtgtccaccatctctctgcccaccgcccctccagctgctggcactgagtgcctcatctccggctggggcaacactctgagctttgg

SEQ ID NO: 110449 - DNA, 445 bp, Homo sapiens
ggctgtggagatcccacgagcctgaccgcccggacgccttccaccgctgcatattcctcttctgctgccgcgagcagccgtgctgcgccggcctgcgagtttttaggaatcaactacccaggaaaaacgatttttactcatatgagccaccttctgagaatcctcccccagaaacaggagaatcagtgtgtctccagcttaagtctggcgctcatctctgcagggattgtggctgtttaggccccaatacgtgctccagatgccacatagcatattactgcggcaaggagcatcagaccctagactggagattgcgacataggcaggcttgtgctcaaccagatcatctggaccatataatttcagaccacaacttcctttttccagaatttgaagttgtaatagaagcagaagatgagattatgcctgaggttgcggaaaagga

SEQ ID NO: 110450 - DNA, 462 bp, Homo sapiens
gaggaattcggcacgagaagaaacctacatttatggatgaggaagttcaaagcatactcacgaaaatgacaggcttgaacttgcagaagacttttaagccagctatacaagaactgaagccaccaacctataagctaatgactcaggcacagttggaagaggctacaagacaggcagttgaggcagctaaagtacgattaaaaatgccaccagttctggaagagcgagtaccaataaatgatgtgttagctgaagataagattttggaaggaacagaaacaaccaaatatgtgtttactgatatatcatatagcataccacaccgggagcgttttattgtcgtcagagaaccaagtggcacactacgcaaagcctcttgggaagaacgggaccgaatgatacaagtttatttcccaaaagaaggcggaaaaatttgacaccaataattttaagggagaaaat

SEQ ID NO: 110451 - DNA, 450 bp, Homo sapiens
cgctcgctgtgatcatcctgatcaccagccaggagtacgccgtcaagatcattgagaagcagccaggccacattcggagcagggttttcagggaggtggagatgctgtaccagtgccagggactcaggaacgtcctagagctgattgagttcttcgaggaggaggaccgcttctacctggtgtttgagaagatgcggggaggctccatcctgagccacatccacaagcgccggcacttctacgagctggaggccagcgtggtggtgcaggacgtggccagcgccttggactttctgcataacaaaggcatcgcccacagggacctaaagccggaaaacatcctctgtgagcacccctaccaggtctcccccgtgaagatctgtgacttcgacctgggcagcggcatcaaactcaacggggactgctcccctatctccaccccggagctgg

SEQ ID NO: 110452 - DNA, 338 bp, Homo sapiens
ggtaccgctgtgcacacccaatgcaccgtttacacactcaagtatttggaccgcaaatggtacttgtgtctttactcaaactgttgctattatggatgttgcggggcagtggtggaggtgtttggccaaagagtgaccatcatctcagtctgacagagactgtcctagtgttagcattaaaagtcccatgtccataaaaacccctcagtaggctgggcacggtggctcatgcctgtaatcccagcactttgggagctgaggcaagtggatcacttgaggtcaggagttcgagaccagcctggccaacatggtgaaaccccatctctactaaatattga

SEQ ID NO: 110453 - DNA, 430 bp, Homo sapiens
tttgagacggagtctcgctctgttgcccaggctggagtgcagtgacgtgatctcggctcactacaagctccgcctcccaggttcacaccttagcctcccgagtagctgggaccacaggcgcccgccaccacgcccgcctaatgttttaattttttagtagagacggggtttcaccgtgctggccaggccggtctcgaactcctgacctcaggtaatccacctgcctcagcctcccaaagtgctggaattacaggtgtgagccaccgcgcccagcatcagtaagttttaatattacgtctagtcggctcacgggtgcttgagccagaagtgggaagggtacacttgtattttggggctcaaatggttttcaaataaaatacatctgaccaaataaagtgaacacagtcctgagccctcctctctccagata

SEQ ID NO: 110454 - DNA, 349 bp, Homo sapiens
ccaccacgcccggctaatttttgtatttttgctagcgatggggtttcgccatgttggacaggctggtcttgaactgctgacctcaaataatccgcctgcctcagcctcccaaagtgctaggattacaggcatgagccaccgtgcccagcctcaaatgccttttgaatgaatgaatgaacaaaccctcacaacagtactataagaactagatattatttgagtctgtttgtggataaggctcagaaagattaaataattttttccaacttgtagaggtagtgattcagagactcagatcttctgacaccagaaactaacttctatatacaggggctaatggcagagcctc

SEQ ID NO: 110455 - DNA, 666 bp, Homo sapiens
tcccccaaatctttccctttcactcaggctggggttcagtggcacgatcacggctcagttcaccctttaccccctagggtccaatgaactttccccctcaaccccctgagaaactggggccacagggttattccaacacccctttctaaatttttgaattttttttttttttggtagagatggggtttcactatgttgcctaggctaatcttgagctcctgggctcaagcaatcctcctgcttcagcctcccaaagtgctgggactacagatgtgaaccactgtgcccggcatgctgttctttttggagggactcttctttctctctcccacccctgtttcacctggttaacgcttaggcatcttgaagaaaccagaccaggcactaacgaactggaggaggccaaggtccctgtacttcctcaaagctcttattatccttcataattatagagtcttatgattatttacttatctatcactccagctagactataaattctgtgaggccagcagaccttggctgtttgcttattactgtattcccagtgcctagtacagagtaggaccttggtgaatatttattattattattattttgagaaggagtttcgctctgtcacccaggctggagtgctgtggcacaatctcggctcactgcaacctc

SEQ ID NO: 110456 - DNA, 376 bp, Homo sapiens
  misc_feature (1)...(376): n = a,t,c or g
cgaatctcctgtcccagctcctgaagtagctgggattataggcatgtgccaccaggcctggttcattcttgtattttcagtagaaacaggnttttgccatattggcaaggctggtctcaaaactactggcctcaagtgatccactggccttggcctcccaaagtgctgggattacaggtgtgagccaccccacccagctggaacctgaacaactcattcctgataattggcccctccagcccaggccagaggcttgtgcaaagatatcacagaatcgcttaatggactagaaggcttttcctgatcctggttccaatttagggacaaatttgatgcctgggtcccagagaggcacggacgcgtgggtcgacccggg

SEQ ID NO: 110457 - DNA, 648 bp, Homo sapiens
  misc_feature (1)...(648): n = a,t,c or g
gtcgacttttttttttttttgagatggagtctcgctctgttgcccaggctggagtgtagtggcgtgatctcagctcactgcaagctccacctcccggcccacgccattttcccgcctcagcctcccaagtagctgggaccacatgcgcccgccaccgcacctggctaattttttgtatttttagtagagacggggtttcaccatggtctcgatctcctgacctcgtgatccgcccaccttggcctcccaaagtgctgggattacaggcatgagccaccacacccggccacaaagttaagtcttaactgaagtttttccttttgatggataaactttagaggcatggttctgcttattaaagaaatttgttagggaagccacgctgaagacctccgtgtgacagaagggttcatgaacaaggcttcatctgctcactctttctgcagacgggatcatttctccgttccccacccctggcgtttggctctttactgaaagaatgaaggatacttacctcaactagaatttgggtttaccaaagcaatttggggttttgcttgaataacttgattttgtttgctttggttattaaacnnnnnnnnnnnggtatggggttaaaggaattccaaagcctatttggttgggaag

SEQ ID NO: 110458 - DNA, 563 bp, Homo sapiens
gggtctctcatttccattgcccaggatggcatacaagtggcattatcatggctcactgcagcctcaacttcctgggctcagatgatcctcccacctcagcctcctgggtagctaggactacatgcatgcgccaccacattcagctacatttttgtatttttagtaaaaatggcatttcgccatgttgcccaggctgggtccttaaaactcctggggactccaacagatcccactccaccttggccctccccaacgtgcctgcagagggtgtaagcccacccacaccccggccccaattttcaaatctaacttttactttacctaccaatttgtggtctggagggaaaaaagccaaacacttcctcctccatttcaattatattttgaaactagttacattgcttctagttttctgtgatcagccttcaaacacgtggtgactgaagtagcataatctaatcattaactgggtattttcagaaaatctggccattcaagaatcaaggtataaaatgagtaaaagcacctgacttgaaatttgtatatggtttctttagtttaac

SEQ ID NO: 110459 - DNA, 512 bp, Homo sapiens
ctactactactactactaaattcgcggccgcgtcgaccttctgcataccctggaaggccatgccctgcccattcgctccttgaccttttccccggactcccagctccttgtcactgcttcagatgatggctacatcaagatctatgatgtgtgtcgcttcttgctgctctcaagccctactcccccatgcttctgcttctagcctgctgggagctgggaaactgaccaagcatggaaaactacagcaatgctcataacaggctaaaaggctctggggaagaaggcatttcaacagcagaaaagaggaagaagagggagaagagaaaatggagaaacaagaaataagccaacacaaaagaggggtgaagaaaagagagggtgcaaaagagaacaaagtaaaaacaaaaacaaaacaaaaaggacaaacaaatccccaaagaactctccaacggcaggtttcctggatgctccacccttccttataataaagaaggaaatggaaaaaaaaaaaa

SEQ ID NO: 110460 - DNA, 424 bp, Homo sapiens
  misc_feature (1)...(424): n = a,t,c or g
ggaggnnnnnnnnnnnnnnnnnnnnnnnnnnnnnnnnnnnnnnnnnnnnnnnnnnnnnnnnnnnnnnnnnnnnnnnnnnnnnnnnnnnnnnnnnnnnnnnnnnnnnnnggggggcacccaaatgtaggtagggatgaaaaaaaacaggaactctcactgggggctgagggaattgcaaagcgccagggcagctttgaaaaactttccaccagtttcttataagcataacttatcatagggcccagccatttcactactaaaaattgacccaagggaactgaaaacttatgttcccacaaaaactcgcacatgactgtttatagcagcttcattcataattaccaaaacctagaaataccccagatatccttcaacaggtgatgggataagctgtggatatccattccttgagttaatccatacn

SEQ ID NO: 110461 - DNA, 550 bp, Homo sapiens
tttgagttggagtcaccctgtcgctcaggctagagtacagtggtgcgatctcggctcactgcaccctccccctcctgcgtccaagtgattctcctgcctcagcctcctgagtagctgggattacaggtgcccacgaccaagcccagctaatttttgtgtttcagtagagatggagtttcatcatgttgtcctctcaaactcctgacctcaagtgatctacccgccttgcccttccaaagtgctgggattacaggtgtgagccaccgtgcccagccagcacccaataatttaattggcatactgaaccctgttccacccggaagtcagtggacttcacatttctctgctgtttgatcttaaataagagcaacagactaggagaggtgagaaagtgctgattaagcccgagggtaaataggagttaagcaaacaagagaagaggaaagagcgatgcagatagagggagcagcacatgtgaagatcctgtggtcggacccagcgtgatgttttaggaactcctcggacagtgtagctagagttcagagcaaag

SEQ ID NO: 110462 - DNA, 457 bp, Homo sapiens
  misc_feature (1)...(457): n = a,t,c or g
ttaaaaaaaaccagggtggggcccctggaaaaccccctttattcccccccttttgggggcccgggccgggggttccccttggggcccccgtttggaacccacctgggccaaaagggcaaaatccgttttttttnnnnnnnnnnnnntaannnnnnnnnnnnnnnnnnncttttttatccccccttttcgggggggttaggcaaaaaaacccctttaaccccaaagggggggggtcccataaaataaagggcaaccccttttttcccccctggggggaaaaaataaactttttttccnnnnnnnnnnnnnnnnnnnngccaaaaaaacaaactccaatgccagtgtacaaataaaagaataaaacaaaaggaaccataanccgctcctaaggggaaaagaaaaggagtggaggagcggacatgccgacgaaatcgtcgacccgggaatctgcgtccgg

SEQ ID NO: 110463 - DNA, 464 bp, Homo sapiens
  misc_feature (1)...(464): n = a,t,c or g
cggccccgccgttaatcccaccccttttgaagcccctgccagggggtttccaggggcaggggttcaaacccttccgggccaccccggggaaacccctttttttttaaaaatcccccccattaccccggcttgggggcgggggccttttttcccccccctcccgggggttaagcccaaaaaatgccattacccccaaaggaaagggggccattaaccccaaatggcccccctnnnnnnnnnnnnnnnnnnnnnnnnnnnngcacctcacagatagttatttgttgaaggatatacaaggcctgggtttactctaaggtttctgcacagagaccataacttgtgaggcttctctgaagctcattgcattctatattcattgcctattttctgatccttctggccactgccggtgtgattccccagcaggccctctccatcaatatccctgtcccagaaatacgaaa

SEQ ID NO: 110464 - DNA, 647 bp, Homo sapiens
  misc_feature (1)...(647): n = a,t,c or g
tttactgctcactgaattttattttcttattttcttcttttttttttttttgagacagagtttcgctcgtgttgcccaggctggagtacaatggcacgatctcgggtcactgcaaactctgcctcctgggttcaagcgattctcctgcctcaacctcccgagtggcctgggactgcaggtgcccgccatcacgcctggctaatttttttgtatttttagtaaacacagggtttcaccatgttggccaaggatggtctcgatctcctgacctcgtgatccanccgcctcggcctcccaaagtgctgggattacaagcttgagccaccgctcccagctgttttaaataacgtaaaataacagtgctgagcagtaagaaaatgagatccagcccttgtaacacacccgacaaagcctctccaattgggcttttactttcctctccagtcttcttctcacaactcactcctgcctcttgctccagacattcctttttttcccccaagttcttcaaatatatctggttctctttaactccaggctatgacacaagtgattacctctgtttgaaatgatgtctcaattcctcctctaccaactatgcctgggccattctcccttcaggtctcgacagaaatctcagttcctca

SEQ ID NO: 110465 - DNA, 534 bp, Homo sapiens
ctgagacagtctagctgtcagccaggctggaatacagtggtgtgatttcagctaactagaaccttcacctcccaggctcaaacaatcctcccagctcagcctcccaagtagctgcgactacaggtgcatgccaccacgtccagctaatgtttatattttttgtagagacagggtttcaccatgttacccaggctggtctcaaactcccgagctcaagcaatccacctgccttggtctcccaaagtgtcagagttacaggcatgagccatcaatcacgcccgggctgccaatattccaactgaagtagcaggttgtttttactaatgattttatgaaactctcttgcaaacaagtacatcatagacaaattatgtctgcacaacttttagagttgtttaaagtaacctaatagaaagacagtgcctaagattcattccttatctccagctttgtaagtcacaggctgcctagagcacctggactgctgcccctgggtccccacgaaatcgtcgacccggaaatctaaattcctag

SEQ ID NO: 110466 - DNA, 2073 bp, Homo sapiens
ttttttttttagatggagtcttgactctgtcgcccaggctggagtgcagaggtgcaatctcggctcactgcaagctccgcctcctgggttcaagccattctcctacctcagcctccccgagtagcggggactaaaaagcgcccggcaaccacgcctggctaatgttttttttttgtatttttaagtagagacgggggtttcaccttgttaagcccaggatagtctgggatctcctgacctcgtgatccgcccccctcggcctcccaaagtgctggggattacaggcatgagccaccacgcccggcccacttacaatttttaaacttctttcctcttcttcctataactaagggctccaatgatactacttattcagggaaggaaagtactgtatctagataaactacccttaagtattacaggcttagcaagttgaatttctagaaaatactcattcataatttatttatttattttttttgagacagagtcttgctctgttgcccaggctggagtgcagtggcgtgatcttggctcactgcaagtcctggcctcccaggttccccacccattctccctgcctcagcctccccgagtagctggaattacaggcatgcgccagcacgcccggctaagttttgtatttttggcagagatggggtttcaccatattggccaggctggtctcaaactcctgacctcgtgatccacctgcctcgacctcccaaagtgctgggattacaggtgtgaggcaccgtgcctgtccactaattcatattttaaaagaggactgagcaaagacagcaatggaacctctggctgcagggagatccctggggtatgccctgatatgtaaaacaaaccacaagcagtcgagttcagggtcatgcatcttcaaagtgacgaagaatatatgtaaatgcttgtttttctcctccatatttctcgtgtagaggtatatgagaatttagcatcaagacgctatactgcaaaccctgttctgtgttgcctatattcatagcataatatttaataaatactcccaaggttgtcattgctggtcacatattagctgacaaaggcacactgaagggactttgattcttactgtaaaatgcaaagattgttttaaactactcaacatatacaatcttaaactatgtgatgattattctcgatcatttatgataatttcaattctaaaagattactaaaaaaaattggctgtagggtatctgaaaacaaaaatagaatgtactccataaagtacatgcacagaatttttaaaaatgcaggcatacaaatatttaatggcagagtggtaataacctgagactttttaaaaatggcaaaacaatatttcagcaatttttggaaaaaaaacccaaatattttccctaagaagtctctcttggcaactttctttttaagtaacaaagcagcagcaacatttttaaatgttcataaagctcgctttccattaacaagtttattaaggaagagtggtcctgaaacttcaggataaaacttttgataaaaatagaatcactaattttgacctaaaacagacactaaaacacccctccttccaatttaagagtgtcatttatacctcctacttacagtaaataaatcaaattaattataagatttcaaatggaaaatctgaaacacatatcaacatcattttcttctaataagataacagaaattaacttcaatggatttccccaaaaagagaatagtttctaaaaacttaattacagctgtggtaaatgaatctgggtttaccaatctcagatctcaatgcacttagttttagttggtattctgtgagatggctagaattcctgatttaagtatgtagtatgtatttttttaaggcaaggcaagtttgagtatgtataaagcatagatattagcatggttataaaggcaatatgaccgacatacacattcagttttctgaagcaatatattccaagctacatacaatttaatttcatgtcctattctaagactacatgcttaacattaagcttagaaacataattgctgtaatacattaaaaat

SEQ ID NO: 110467 - DNA, 607 bp, Homo sapiens
ttttttttttttaatgagacagagtctcgctccgttgcccaggctggagtgcagtggcacgatcttggctcactgcaagctctgcctcccgggttcacgccattctcctgtctcagcctcccgagtagctgggactacaggtggcccgccaccatgccccggctaattttttgtatttttagtagagatggggtttcaccgtgttagccaggatggtctcgatctcctgaccttatgatccgcccgtctcggcctcctgcagtgctgggattacaggtgtgagccaccgtgcctggtgtttttgggttctttaatgcttcttttagagccacatttttcttttcaaaccgagttcccatcgcagtcaagaaaaaggtagagaagcaaaatgaaattctagaccaagtttttccatttaccaggaattgatttaaaaaaaaagtgctaatttctcatgcctccatctctgctacatcccttggaaataaatgcgtgtagttccttgcagggtgtgtcttctgggtaggacgctcgttcctaaatgccttcagtcatgtatgtgttgtcgtcttaataacatttgtcttacggtctattcacctttttc

SEQ ID NO: 110468 - DNA, 470 bp, Homo sapiens
  misc_feature (1)...(470): n = a,t,c or g
cgaaattgcactattcacggattagttttaccttaaaaacggcagctttatatggctaatcttaatgaattataacaactttgagatattatttttatcctttcatactggcaaagattaaaaaggtttgttaacatcttgaatcagcaaaactctggagaaacaggcacattaagggcagaagacaaacttgtaccatccctatgaaaggtgattttggcaattaactgttaaatgacaaatctaaataccctttggcctagctattccactgctagaagtttattctacagatatactcacatacctggaatgtacacagttattaattacgacattgtttgtaatcacagagaataagaaaaaaccaaacacctatcaattggtggactggttaaataaattatagtacatnnnnnnnnnnnnnnnnnnnnnnnnnnacacacacacgaaatcgtcgagcagaaata

SEQ ID NO: 110469 - DNA, 534 bp, Homo sapiens
ttttggagacagggtcttactctgtcacccaggctggagtgcagtggtgcaatcttggttccccacaacatctgcctcctgggctcatgcaatcctcccacctcagcctctcgagtagctgggacgaaaggcatgcgtcacaaagcccagctaattttttgcatttttggtagagatggggtctcaccatgttgcccaggctagcctcaaactcctgagctcaagtgatctgcctgccttggcctcccaaagtactaggattacaagcatgagccaccgcacctggcctcgggtatgaattttttggttcctgttttgctctttggaggaaggggaacattaaatattaatgtagatgactcaataaatttttcttggaatatgaagggattaattcaggatatatgtgagagagaaagtatgtgggttatccttagttcttaagtaactactaatatttgaatagtagtttaatgtcctatacataatttcctcatatgacacaacaaatcgaactccgagttagcctcgaaa

SEQ ID NO: 110470 - DNA, 484 bp, Homo sapiens
ttttttttttttctgagacggagtcttgctctgtcgcccaggctagagtgcagtggcgtgatctcgtctcactgtagctcaacctcctgggctcaagcgatcctgctgcctcagtccccgaggtagctgggactacaggtgtacatcaccacttctggctaatttttgtatcttttatagagacggggtttcaccatgttgcccaggctggtctcaaactcctgagctcaagctatccgcctgtcttggccttccaaactgcaaggattacaggcgtgagccactgtgccaggcgcattagcaatttttcatagcatatctacaaagttctaatatgtatataatgtatattacaagaacataagtgctttgatttaggttattcagttatataattatgttgagtcccaactgtgtgccagataccgtgctgagtaggtagtaaacattggtaagcaaaacagacatagcccctgcccttatc

SEQ ID NO: 110471 - DNA, 385 bp, Homo sapiens
  misc_feature (1)...(385): n = a,t,c or g
tttcgtgcaggttgcaggcgggaaccggcctcgtcccagccctgggcctgggagagagaaggaggccgaagaaaaccaacttcggcaacctccggagacaggacgtttaaaaaaggctaannnnnnnnnnnnnnnnnnnnnnnnnnnnnnnnnnnnnnnnnnnnnnnnnnnnnnnnnnnnnnnnnnnnnnnnnnnnnnnnnnnnnnnnnnnnnnnnnnnnnnnnnnnnnnnnnnnnnnnnnnnnnnnnnnnnnntttccccaccctggggggggccccccggaagccccatttccccgggaggccaacccggaagaatctttgaacccaaagggtcaaggttcccggaacccaaggttaccccatggctctcaacctgggggaaa

SEQ ID NO: 110472 - DNA, 549 bp, Homo sapiens
  misc_feature (1)...(549): n = a,t,c or g
cccgcaattcccgggtcgacgatttcgtggagaatgaagggcagctaccaggaaaataagttattcttacaaattctcccattcatagtctaagcttcagatactcaaagaggatgacaagacacaggcaagataaatggttcgttgaacaaagtacagcagacaacccttgaccaagaatgtcataggctgacctgttctgaattgataacattcccagagtttacttatctccagaagtacacaatgatttaaaaagatgttttaggccaggcacggtggctcacacctgtaatctcagcagtttgggaggccaaggtgggtggatcacgagttcaggagatcgagaccatcttggctaacacagtgaaaccccatctctactaaaaatacaaaaaattagccaggtgtngtngcgggcgctgtagtcccagctactcaggaggctgacgcaggagaatggcgtgaacccgggangcagagcttgcagtgagctgagatcgcacttactggcagtccggcctggggcnacaggagcgagatttccgt

SEQ ID NO: 110473 - DNA, 487 bp, Homo sapiens
  misc_feature (1)...(487): n = a,t,c or g
cctcaagacacattctcccgtggctcctggaaggtgctagcctggcgtctcccccttcctctctggccgctgttgttccatgtcctctgcttgttcctcctagctttcctgacttctgaacataggagcaccccggggtgcagttctcagacctcaccgctgtccacatccacttcctaagcaagctcattcatcccatggttccaaagcccatctctacactcagcgtgcctggatgtgtgtctccagcttggctctcctcctagacctacagctgtgtgcaccccgctgcctcctccacannnnnnnnnnnnnnnnnnnnnnnnnnnnnnnnnnnnnnnnnnnnnnnnnnnnnnnnnnnnnnnnnnnnnnnnnnnnnnnnnnnnnnnnnnnnnnnnnnnnnnnnnnnnnnnnnnnnnnnnnnnnnnnnnnnnnnnnnnnnnnnnnnnnnnnnnnnnnnngaaatcgtcgactcgggaattccggc

SEQ ID NO: 110474 - DNA, 281 bp, Homo sapiens
ttttttttttttgagatggagtctcgctctgtcgcccaggctggagtgcagtgacttgatcttggctcactgcaagctctgcctcccgggttcacaccactctcctgcctcagcctcccgagtagctgggaccacaggcacctgccaccacacccagctaattttttaaagaatatttttagtagagatagggtttcactgtgttagccaggatggtctcgatctcctgaccttgtgatccacccgcctcggcctccgaaagtgctgggactacaggcgtg

SEQ ID NO: 110475 - DNA, 615 bp, Homo sapiens
  misc_feature (1)...(615): n = a,t,c or g
aaaanggggtcctcaacttggtnaaccccaagactgggaatactgtggccgtggatcaagggctcaattgcaagccttggaccctcccctgtcctcaagggagaattatcctcaccctcaagcctcccaagtggctgggactataggcatgcacccacccatgcatgactaattttttgtagagacggggcttcgtcacattgcctaggctgatctcaaactccctgggctcaagtgatccatcctccttggtctcccaaaatgctgggattacaggcgtgagccaccatgcctggcctacactattcttattattgaagaatcatcaatggaattttctctcttctgcaaaacgagtgaaaatattagctatttctaatcaacataaaaattaatcaaaatggcataacattgaaatcttcaaggacagaggctctctgggtgcataccataatcaagaatcatgctgtttatttatttatcatgcttagtcctcacagcagcccagagaattgggtattatcatctccacattagagatgaaggtaaagctcacaaaaatacctacagttaaactgggtaagagtggtgagttaaacaccatctccacgaaat

SEQ ID NO: 110476 - DNA, 1549 bp, Homo sapiens
  misc_feature (1)...(1549): n = a,t,c or g
ggctcactgcaacctccacctcctgggcttgagcgatcctactgcctcagccccccaagtagctgggaggacaggcgcaacgacggcgctcagctaatttttgtatttttcgtagagatagggtttcaccgtgttgcccaatttggtctcgagctcctgagctcaagtgatccgcccgaccttggcctcccaaagtgctggggattacaggcatgagccaccgtgcctgggccagaaaatttgtaaacacacacaaactctcaaggggcataattccctctcaccaaaccaattcacaatacagataaaagagaataacttgtgttcatttttgtacaaacaaaaaagatataaattgtgaatgatgcatgatttttaattacaagtaaactgggcaaatgcttctgcattatttaaagctaaaaggtgatcagtggaaactttcctctgttagtactctaatactttttatatttatcggctcactacaacctgtgcctaccaggttcaagcgattctcctgtctcagccacctgagtagccgagaccacaggcacgcactaccatgtccggctaattttgtatttttaatagagacagggtttcaccgtgttggccatgctgggtcttgaactcctggaccttcaaccgattcggcctgccttggccttcccaaaagttctgggattacaggcgtgaaccacagcgcccagccttattataattgttactatttaaatctcttttgatctctccttcaagagagacctcatccccattcagttgcttccatttatttattcatcttctgcctcctgggctcgagagatcctccagcgtgagtctcccaagtagctgggactacaggctcacaccactaagcttggataaattttgtaggttttggagagacaggctcttgccacgttgcctaggctggtctcaaactcctgggctcagaatgatccacctgccttcgcctcccaaagcactgggacatgagccaccacgcccagccgcaagtaccttttacacaaaatgcaaacaccattcttccatcataaaagtgataccacagcttccgtgaagttttgccaggtgtagtactcataattaccttgggtaaactttttgatgttaaactgtatcttcttattacgaaaccatttttccattgtattaactacttttacaacaaagcaaataacaagttattttacaaaccatttagaaatttctgtactatggtcccaataatgtaaaatatattaatgccttttacattcaggtaaattatccacttggaaactacatatttatgacttacagaaacttacataaacaaattatacaaattatatgctcaatttttaggtatatagtcttaaattaagcttaaatatacattctcaggataaattaacagttcagaacttcacaacttgaaatctgtggaacatgacattggagatgacagaactctggtggaattcttagatggaatttgccgaaacnnnnnnnnnnnnnnnnnnngaaaagggagggccct

SEQ ID NO: 110477 - DNA, 431 bp, Homo sapiens
  misc_feature (1)...(431): n = a,t,c or g
acaaatttggggggaaaaccaattccgagggggtttttcccccccaaaaaattttttgtgaaagggacctcccccggggggccccccggtttnnnnnnnnnnnnnnnnnnggaaaccgggaaggggggaaaaccccccgggccggccaatcccggatttaaaaaccccccccacccataataatttaccccaaaaagggggaagagggggcccccccgggccccctttaaaaaccccctttcccnnnnnnnnnnccccggggggnnnnnnnnnnnnnnnnnnnnnnnnnnnngntaaattctcctctgggggagaaaaagcgtctcctaaggttgggacggtaaaagaggtgcagggggaagccggaggtggaaagttctaacaagaagtttcttgccccagcagccgtttcggctggggaattcacgaaa

SEQ ID NO: 110478 - DNA, 1020 bp, Homo sapiens
cgcctccgccccatccccaggggccgcctcccccggggcggcctccaggctgccgagacctataaaggcgccaggttttctcaatgaagccgggacgcactccggagcgcactgcgtggtcgcaccctacccgggctgccttggaagtcgtccccgccgcccctccgcaccggcatgaagctcatcgtgggcatcggaggcatgaccaacggcggcaagaccacgctgaccaacagcctgctcagagccctgcccaactgctgcgtgatccatcaggatgacttcttcaagccccaagaccaaagtatcggttggggaagacggcttcaaacagtgggacgcgctggagtctctggacatggaggccatgctggacaccgtgcaggcctggctgagcagcccgcacaagtttgcccgtgcccacgggggcagccgccagccagaggcctcggacacccacatcctccttttggaagggttcctgctctacagctacaagcccctggtggacttgtacagccgccggtacttccttgaccgtcccgtatgaagagtgcaagtggaggagaagtacccgcaactacacagtccctgatccccccggcctcttcgatggccacgtgtggcccatgtaccagaagtataggcaggagatggaggccaacggtgtggaagtggtctacctggacggcatgaagtcccgagaggagctcttccgtgaagtcctggaagacattcagaactcgctgctgaaccgctcccaagaatcagcccccttccccgctcgcccagccaggacacatggacccggacgcggatgcggccacagaacggccaggcctgcagcgtcccagcaggacagcatgtgagcgtttccctatgggggtgtctgtacgtaggagagtggaggccccactcccagttgggcgtcccggagctcagggactgagccccaagacgcctctgtaacctcgctgcagcttcagtagtaaactgggtcctgtttttttaaaaaaaaaa

SEQ ID NO: 110479 - DNA, 792 bp, Homo sapiens
ttttttttttgagatggagtttcactcttgttgcccaggctggagtgcaatgacgcaatcttggctcactgcaacctccaccttcccagtttaagctgttctcctgcctcagcctcctgagtagctgggattacaggtgcccggcaccacgcccgggtaattttttgtatttttagtagagacagggtttcaccacgttggccaggctggtctcaaactcctaacctcaggtgattcacctgcctcagcctcccaaagtgctgggattacaggcatgagccacagcgcctggccaggctaagatttgtttaaacccacttaatttctgagacaaaggtttaaactacttacaagtatttgtggataggatgttatacatcaaaactgagactatccttctcttcgccaattaacagaattattaattacctcaaacattaggtgctgtactttcttaggcaaactccagaaaaatcactgaataaaaacatgggtgttatggtaaatatacaagaatttataacaccataggccttacaccacttccagacataaagctgagaatgagcccagcctcggtgaaacatccttgggcacacactgcacagcttggggctgcatccaagaccgaggcccaagaaggggcagctgtgcgtgttcctgtgtttgaaaaccacatgctctccctttcagaatcaaacccccctagaccgtccctggaatctttctgaacaccaatggattcaatgtgacagttctagttctcctggcattgggggtggggaatacgca

SEQ ID NO: 110480 - DNA, 618 bp, Homo sapiens
cactacattccagcatcaagtttgggcgccccaaatatccgagccatatcatcgtctctaatcatgaataagttaaaatgccatcattgtagctatgcagccaaatgcaaacaaacactaaaaaagcacttgcttattcatacaggagtgagatcatttagctgtgactttttacacttggagaaaacatgtaagaaaacatttcttggtgcgcaagaaggataaaaatgcaaatgtatggtatgtaagatcatgttagcagccagtgttggagtaagacatggatcttgaccctatggtttttgtgtagactgttccaataaatcccaaccaggaaggccagcaagtgtagatgagagacaggatacagaatccctcatgataaagactatgaggagaatgaagtaggagaagctgatgaaaagtgggtggatgatggagatcagaatgatccatctcaatgagatgaattagcagatgtttgtatgtctctagatatttaactgacccactatattcctcaaggatactgcatttggacataatacaaattggcagtttggaatgttgaacttaaagtcttgcaaaatgtggtacatgctagatggtagttatgtt

SEQ ID NO: 110481 - DNA, 668 bp, Homo sapiens
cctcccgcccctccctgccctctctgagataccgaggctcccactgctgcctggctggaggcacctccccacgagctcagcccaccctcccaggctccggctctccttgcctctttgcgtgccccttgcccctgtgcaagctggcagtccagggcaggactcagtttacctcccaggctctccggctcaggacaggctgcgccattgacttgttcttcatgggaccagggctctcagagccgggcagggagcccgggggccctggtcctcactgtctcttcccccacaggaactcagggactcagagtgatggcgagggtaagacaggcctcctgggctcatgcacacctgggccacacccggcccagacctggggctggacgggagggaagggtcccgagtgagcaggtagtgtttgggctgggaatagagacggcattccttccagccctgggccctgggcttccacatcctgacctcagtaaggagagagagagccaggccgaggagggcccaggcggggcgccctgacccggcctctaccttccagagaagcagcccggcctggtgatggagcgcgctctgctcagtgatgagagagtcctgaaggaaatccagagcacactggagggagaccgcgggagcggcaactggcgttcacatcgagc

SEQ ID NO: 110482 - DNA, 615 bp, Homo sapiens
atactactactaaattcgcgagccagctcgactatattaattatgagacagagtctcgcatcatgtcagcatcaggctggagtaaagtggtgcgatcttagctcactgcaacctccgcctcccgggttcaagcaattctctgcctcagcctcccgagtagctgggaccacaggcgcccgccgccacacctggccaattttttgtagttttagtagagatggggtttcaccatgttggccaggctggtcttgaactcctgacctcgtgatccacccgcctcggcctcacaaagtgctgggattaccagcattgagccaccgtgcccggcctccatttttttaagttagctttctttcacactcacatgtgccagggtgactttattctcccttcactgcccatccagtaagcatgctaaggtaatgcaaaaacattttaatattagaccaagagaaaagaaattaggaaggaaaacctgttgccataacaagtacaaagattcaaaaattcaactcagatatatactatttgctcccataacttcctattttttgcaggtattttacagctatataatgtgtggatgcgagggggatggagggaattccaccgcac

SEQ ID NO: 110483 - DNA, 381 bp, Homo sapiens
gtgcccaggctggagtgcagtggcccgatctcagctcactgcaacttctgcctcccgggttcaagtgattcccctgccttagcctcccaagtagctgggactacaggcgtgtaccaccatacccggctaatttcttgtattttagtagagatggtgtttcaccgttggccaggctggtctcaaactcctgacctcaggtgatccacatgcctcgacctcccaaaatgctaggattataggcatgagccaccgtgcccagctcttctttcaactctttattttgacctaattttagacttacagagaagttgcaaacatagtacagggtatgcatatacctctcagcttacaccactaacgttaacctcttagaattccacc

SEQ ID NO: 110484 - DNA, 402 bp, Homo sapiens
tttttttgagacagggtattgctctgttgcccaggctggagtgcagtggcatgatctcggctcacagcaaagtgggcctcctgggctcaagcaatccccccatcttcagcctccccaaaagtaggctggggaccgaaaggcgtgtgcccaccaacacctggctaaattgtgctttttcggtattttttgtagaagacagggttccgccctgttgcccaggctggtctcgaacttctgggctgaagtgatcctctcacctcagcctcccaaagtgttgagattacaggcgtgacaaccaaccacgcctggcccatttgttattcttatctctttccttccttaccttcagcttttcagtcctatttctgtgcacctatattattcacgtcgacgcggccgaaa

SEQ ID NO: 110485 - DNA, 525 bp, Homo sapiens
gtatatacccaaaggattataaaatcatgctgctataaagaccacatgcacacttatgtttattgcggccacttattccaccaattagccaaagacttggaacccaaccccaaaattgtcccaaccaatgatagactggattaagaaaaggtggcaccatataccacccatggaggtgaggcgcttttctagtctgtgaacgtgcatctcaaccaaagccgccactctcccgctcccattaatgtcgcccttattcctcaggcatgaggactaggaaggggtgagaagtcatttgctatttaacttggctctcattagtcccaaggaataagcaggtggatgatgatgctggcttgatggatgataccactccagggagggaaatgcataaaccgcttatcaggtgtgattattataaaggattgttagatgtaatgcaggagatttattcagaaggaatgatactcagtctctctcttcacatataatagaatatagcaagcaatgaaaggagtgaaatgagag

SEQ ID NO: 110486 - DNA, 1530 bp, Homo sapiens
  misc_feature (1)...(1530): n = a,t,c or g
ccaattcgtcacgatcaccgccgacggatcgacagcctatatggagctgagcagtctgagatcggacgacacggccgtatattactgtgcgacgtcccctataacggggtctggaggtgtacagacatcctattactacttcatggaggtctggggcacagggaccgcggtcaccgtctcctcagcctccaccaagggcccctcggtttttccccctggcaccgtcgtgcaatagcacctctgggggcacagcggtccctggtctgacatggtcaaggagtcgttcgtctagccgggcacggtgtcgtggagctcacgcaccctgaacagcggcgtgcacgccttcccgtgctgtcatacagtcctcaggactctactccctcagcagcgtggtgaccgtgccctccagcagcatgggcacccagacctacacctgcaacgtgaatcacaagcccagcaacaccaaggtggacaagagagttgagcccaaatctccgtgacaaaactcacacatgcccaccgtgcccagcacctgaactcctggggggaccgtcagtattcctattccccccaaaacccaaggacaccctcatgatctcccggacccctgaggtcacatgcgtggtggtggacgtgagccacgaagaccccgaggtggcaggtgaactggtacgtggacggcatggaggtgcataatggccaagacagaagccgcgggaggagcagttcaacagcacgtaccgtgtggtcagcgtcctcaccgtcctgcaccaggactggctgaacggcaaggagtacaagtgcaaggtctccaacaaaggcctcccgtcctccatcgagaaaaccatctccaaagccaaagggcagccccgagagccacaggtgtacaccgctgcgccccatcccgggaggagatgaccaagaaccaggtcagcctgacctgcctggtcaaaggcttctatcccagcgacatcgccgtggagtggaagatcaactcggcaaccggagaacagatacaagaccacgcnctcccgtgctggactccgacggctccttcttcctctatagcaagctcaccgtggacaagagcaggtggcagcaggggaacgtcttctcatgctccgtgatgcatgaggctctgcacaaccactacacgcagaagagcctctccctgtccccgggtaaatgagtgcgacggccggcaagcccccgctccccaggctcttttgagtcgcgcgaggatgcttggcacgtacccccgtgtacatactttccaggcacccagcatggaaataaagcacccagcgctgccctgggcccctgcgnnnnnnnnnnnnnnnnnngggggccgttttaaaggatccaagtttacgtacgcgggcttgcgaggttatagtttttttatagggccaccaaaattcaattcacgggccggggtttaacaacggggggaggggaaaaacccgggggttacccaactaaatggcctggaagaaaatccccttttcgccagggggcctaaaaaccaaa

SEQ ID NO: 110487 - DNA, 988 bp, Homo sapiens
  misc_feature (1)...(988): n = a,t,c or g
gaaaccaagtgatttccatgtcaagtggtgaacaggctaagaagaaaaacagagtctcgctgcatcccccaggctggagtacagtggtatgatcttggctcactgcaacctctgcctcctaggttcaagtgattctcctgcctcagtctcccgagtagctgggattacaggcgcccaccaccatgcccggctaatttttgtatttttagtagagatggggtttcactatgttggccaggctggtctcaaactcctgacctcaggtgatctgcctgacttggcctcccaaagtgctgggattacaggcatgagtctacgcccagcctagactttttgcttttacaaaaaatgttgctgtgtatattctttcccatctcctggtgcagacgtgaagnnnnnnnnnnnnnnnnnnnnnnnnnnnnnnnnnnnnnaacacagttgacgtaaatgagcaacagtgggcagattgctcaacaggcagagtgccacattgttttcaaagtgcttctagcaatttatactcttgccagcaatgcataagaaatcttgttgatccacattctcaccggtataggcttttcagacttctgaaaatttaccagctgaatnnnnnnnnnnnnnnnnnnnnnnnnnnnnnnnnnnnnnnnnnnnnnnnnnnnnnnnnnnnnnnnnnnnnnnnnnnnnnnnnnnnnnnnnnnnnnnnnnnnnnnnnnnnnnnnnnnnnnntttctattttcctattaggttgttttctcattgatttatcagagttcttcatgtagtcttgagactatttatctcttctcccagtttgtagtttagatttcactttcttaagggtttatggatttaggttctaattttcatatggtcaagtatgttcatcatttctttttaaattctttttgtggcttaaggagtctttcactaccccaaagtcaaaaatatatttacctatattttccacacaaaattatatagttttttt

SEQ ID NO: 110488 - DNA, 1335 bp, Homo sapiens
tttcgtcgaacgccagcccttggtctgagcctgcgggccctgttggcttacattttctccctggctggggaaatggacatgaccaaacattcttttttttcagttagatcaacaggctatcatctcaggagaatccatttactggagccagaaacctactccatcatccaacgccaccccttggtctgagcctgcggctgtagatgtggaactcacagcatatgcattgttggcccagcttaccaagcccagcctgactcaaaaggagatagcgaaggccactagcatagtggcttggttggccaagcaacgcaatgcatatgggggcttctcttctactcaggatactgtagttgctctccaagctcttggccaaatatgccactaccgcctacgtgccatctgaggagatcaacctggttgtaaaatccactgagaatttccagcgcacattcaacatacaggcagttaacagattggtatttcagcaggataccctgcccaatgtccctggaatgtacacgttggaggcctcaggccagggctgtgtctatgtgcagacggtgttgagatacaatattctccctcccacaaatatgaagacctttagtcttagtgtggaaataggaaaagctagatgtgagcagccgacttcacctcgatccttgactctcactattcggagccaggtatgtggggagccgtagctcttgcaatatggctattgtggaagtgaagatgctatctgggttcagtcccatggagggcaccaatcagttacttctccagcaacccctggtgaagaaggttgaatttggaacttgacaccacttaaacatttactttggatgaaagctcattaagaacactcagacttacaccttcaccattagccaaagtgtgctggtcaccaacttgaaaccagcaaccatcaaggtctatgactactacctaccagatgaacaggcaacaattcagtattctgatccctgtgaatgaggataggagctggaaactcaattagtcctctgtgacatttactggagggtggaacattcttctgtcgcttgaagcagaactcattcaatcaaataatttaatttctctgactactatatgggtaacaaatgaatatgtctgaacctcagctataatactttctactacctttgcaaggagatgggataggaacaatcactcataggaggcgttgcatggacagggtcatagggggaagaaaggtggtttatctgttttatttagccatttcagggggctcttcacaagaggagacggtggtagagggtgaactagagaagataagaatgtcttcct

SEQ ID NO: 110489 - DNA, 661 bp, Homo sapiens
tttttttttttttgagatagagtctcgctctgtcgccaggctggcgtgcagcagcacaaatctcggctcactgcaacctcggccttcccggttcaagtgattctcctgcctcagccccctgagtagctgggactacaagtgtgcatcaccacgcccagctaatttttgtattttttagtagagatggggtttcaccatgtagaccaggatggtctcgatctcttgaccttgtgatccgcttaccttggactcccaaagtgctgggattacaagcgtgacgcactgtgcccggcctgccttgcctgtttgtcagctgctggcgtcatctgccaagaaccccctctcacgaggggtctgttcaccgctttgttcagtgtagcacccgctgccctaagggtctcaccctgcggtgagtgctgagttacagtcccgcatcgcctcaccaagctttccagatattttgagttttacaaattgaaggtttggggcacccctgcataaagcaagctcactgatgtcattttaccaaccatgtgcttgcttcttatctctgggtcagcactttttaggaataaagtttttgttgttgttgttgtttttgagacagagtcttgcctgtcaccaggctgagtaagggtgcagctcatagctcatgcagctt

SEQ ID NO: 110490 - DNA, 750 bp, Homo sapiens
tttgagacagagtttcgctcttgctgcccaggctggagtgcaaggcacgattctcggctcaccgcaacgtcgccccctgggttcaagcgattctcctgcctcagcctcccaagtagctgggattacagtcatgcaccaccacacccggctaattttgtatttttttagtagagacagggtttctccatgtcggtcagggtagtcccgaactcctgacctcaagtgatctgcctgcctcggcctcccaagtgctgggattacaggcgtgacgactgcacccagcctagaatcttgtataatatgtaattgtagggaaactgctctcataggaaagttttctgctttttaaatacaaaaatacataaaaatacataaaatctgatgatgaatataaaaaagtaaccaacctcattggaacaagtattaacattttggaatatggtctattagttttgtgatgtactgttttacaatttttaccatttttttcagtaattactgtaaaatggtattattggaatgaaactatatttcctcatgtgctgatttgtcttatttttttcatactttcccactggtgctatttttatttccaatggatatttctgtattactagggaggcatttacagtcctctaatgttgattaatatgtgaaaagaaattgtaccaattttactaaattattcagtttaaaatggatgattttttgttatgtggatttcatttcaataaaaaaaaactcttatca

SEQ ID NO: 110491 - DNA, 835 bp, Homo sapiens
gattcgcctgcctgtaatcccagctactccggaggctgaggcaggagaatctcttgaaccccagaggtggaggttgcagtgattctcctgcttcagcctcccatgttgctaggattacaggcacctgccaccacgcccagttaaattttttgtagttttggtagagacggggtttcaccatgttggccaggctggtctcaaactcctgacctcaagtgatctgctcaccttggtctcccaaagtgctgggattacaggcgtgagccaccgctcctggctgagataggtctttcttaaaggggagagggaagtggtggagagagaggagagaaaatgacaaaggaggaggctgagaatctaacaggtgtgaccaattctgctactgaatgagagcagaagcctgtgaacttccagttaatagaccacttaattgggggaacgccctccacaccgttataaaaaaggccaccagaaaggttttgaaaagcgagaaaacaacagctgtgtaggggtagctagcagttagtgttgtacagaagacagatatttgtgcatttcctgcattttcctaagtttgctgcaatgagcatgtattactttcatagttataaaacacatgcaaaatgcccttttaaaatgaaaaaaaagtccatgagtgtaagtgatatatatgctttggaaagcctgggacggtcattgtttactctcaatagtatgtgtttgcctttgtctttttgagacattttgttttaatctgttgatgacaataacctgttgataatataacttgataacaaataaaatgacttatgattgattatcattttaaaaaaaa

SEQ ID NO: 110492 - DNA, 495 bp, Homo sapiens
ttgaaaaggagtcttgctgtgttgcccaggctggagtgcagtggcgcaatctcggctcactgcaacctccacctccctggttcaagtgattctcctgcctcagcatcttgagtagttgggattacagcacactcttgaccccaggagtctggtttcacagcctgtgctatactctgctacaatgttgctatgttgtagcagaaacaaatctcttttattcctgcccatttgcctctctgacatccactccttttgtaaggaacttcttctcccttccattcacgtgggccacagtgggaaacagccatgtcttgcccactgagacctaacttcctgtccttagctgattgggtccagatatagtcatctgacccaggctgagccaatcagagtcctttcctgggaatatggcggacactaaccttgatctgatattttctctaaggaaggcagccatattctgcctgaactgaaatttgaaatgccacgcacttc

SEQ ID NO: 110493 - DNA, 451 bp, Homo sapiens
ctactactactaaattcgcggcgctcgacgggtaaactagattccctatgatctcttatttatttatcattgttttgagacagagtccactcttgcccaggctggagtgtagtggcgcaatcttggctcaccacagcctctgcctcctgcattcaagcgattctcctggctcacctcccgagtagctgggattacaggcgcccatcaccacacctggctaatttttgtatctttagtagagacaggctttcaccacgttggccaggctggtctcgaactcctgacctctggtgatccgcccgcctggcctccgaaaatgctgggattgcaggcatgagccaccatgcccagcctgatctaaaaggaagtttttactaattgagattatgaaattttatgaaaaataaaaatgaaagaggggcacaatatctagctctgtatttaaaaatat

SEQ ID NO: 110494 - DNA, 448 bp, Homo sapiens
  misc_feature (1)...(448): n = a,t,c or g
ctgcattgttgctgggaaggcagcgtggtgccgctgctatgggagagatggcagatcctcacaaatgacacaggcaagttccacaggctccagccattctacctttgagcagccacccaaaacagccaacagcagggtcccaaagaggcatttgcacagccgtgttcacggccgcattactcacagcagtgaaaacatgcaagcgcccacatgtccacccacgggtgaagtgaatgggtgaagaaaacgtggcacagccatgcaatggagcagtatcctaccctaagaaggaaggaaactctgaaggtnnnnnnnnnnnnnnnnnnnnnnnnnnnnnnnnnnnnnnnnnnnnnnnnnnnnnnnnnnnnnnnnnnnnnnnnnnnnnnnnnnnnnnnnnnnnnnnnnnnnnnnnnnnnnnnnnnnnngggaattccaccgcactggacta

SEQ ID NO: 110495 - DNA, 684 bp, Homo sapiens
agcctcagtcatgatttcactttatttgtatcgatgacaatattaactcttcagatttataaaatgacaaaacttgataattacctggaaacaatttattattaactaggtccaaccctaaatccatcaagaaaaaccacctaacatattcagtgttaaaaaagagacattacgactagccttggccaatatgggcaaaaccctgtctctactaaaaatacaaattttagcagggtattagtggtacgtgcctgtaagtcccagccactcaggaatgtgccatcacccctggttaattttgtatttttttagtagagatggggtttttccacgctggtgaggctggtctcaaactcctgacctcaggtgatccgcctgccctgccctcccaaagtgctgggattacaagcatgagtcaccgtgccaggctaattgtgtcctttttaaaggaacaaacaatttgactgttgtgcaaatgaggcttacctggtctgaatatgaagcacctgccctgggctgctgtctcagggcaggaaagtggggtggtcagaaaggcagccaacactgtttctgctgccactgtcactaagcctggagtgcctgttttcaactgcagtgatctggtccctaacatttagcctaaacagtgagctggtaaacaaagccgaattcaccgcactgtca

SEQ ID NO: 110496 - DNA, 414 bp, Homo sapiens
  misc_feature (1)...(414): n = a,t,c or g
agccccggggttttcccctccgccgggtggaaaacccgggcccgggaaattaatttggggggccnnnnnnnnnnnnntaatttttnnnnnnnnnnnggtaaaaaatggtttttttaaaaaggccccccccnnnnnnnnnnnnnaaacagaaaaccccccctttttttaagggcccaaaacaaaggggggattttgggcccccggaaccctgaaattttgaggtcaaaaaaaaccccggccccaaccccccaaaaaatggggataaaaacccggggtttttnnnnnnnnnnaccccccaattgggggnnnnnnnnnnnnnnnnnnnnnnnnnnnnnnnnnnnnnnnnnnnnnnnnnnnnnnnnnnnnnnnnnnnnnnnnnnnnnnnnnnnnnnnnnnnnnnnnnnnnnnnnnnnn

SEQ ID NO: 110497 - DNA, 1371 bp, Homo sapiens
ctcggctttactgcagcctccgcttcctgggttcaagcgattctcctgcctcagcctcccgagtagctgggactacaggcgcgtgtgccacgccggctaattttttgtatttttagtagagatggggtttcaccatgttacccaggatggtctcaatatcctgagttcatgatccacccaccttggcctcccaaagtgctgggattacaggcgtgacgaccacacccagccagttttcctattttctgaattcagaattgacttctctgggaaaactggagatgagaatctgcccagtgctctgctgtccagtcaccgccttttgaattttagttttgggcaccagggagtaccgttagctttccccttcttctggcccactttgacttcaccacgcacaataggggtcaacacctttaactttttaatttctaatctgctttactgtctttaggggtgtgtatggaaataaaacattgaacagggtttcttggaggccctcaagggtgcctactttgctgggttcccttttccagcagctcccccaccgtcccttagcccccccgtcctcgtggcagcctctcctgcctctgctgagctcccctccacgtgttccacccccttaccctgctgttgtttacatccaacctgcctgagaatttcctctggggaggaatctattcctgtcatggtctagtgcctgggagggagagaactttctgggggtagggtgccctccatctgaaacaggccaggtgagcatcatgcataaggcctccattctgtccgctcagattctgggtggggccacaggcaaatctcctgacttatggggagttggcttgtggttcctcccttggatagcctccatggaaccactataggctttccccaaaaagctgccctctgaaaatagctgctgccttcgaagatccctcccctttttaaaagcactttcctaaagcccctcagggatggcgggagcaaacagcactggtatattctaaggagtaaagtgcaggaattcagcagtgagagcatgtctgggacccacccggactggcctccaattaactcccaaacctcttttggggaaactcgccctccctggggaaccagagttctggctctaacattggaggcagctatgcacttagttccagaggaagccactaacaggcttgccatgtgttaggatgttaggttcttaaggagttcacagggcttgggttcatctgatcactggatggatagctcagcctgggggcatttttagtgtttttccctggtgataaatccccaaggcagctggatttggagctggtggcaagttgaaattattaaaaataaatttgtgtgggactgtcaaaa

SEQ ID NO: 110498 - DNA, 469 bp, Homo sapiens
ttttgagacggagtctcactctgtcgctcaggctggagtgcagtggcgccatctcagctccctgcaacctccgcctcccaggttcaagcgattctgcctcagcctcctgagtagctgggattacaggaaatgggccaccatgcctggctaatttttgtatttttagtacagacggggtttcaccatgttggtcaggctggtctggaactcctgaccttaggtgatccacccacctcagcctcccaaagtgctgggattacaggcgtgagccaccacacccagccaatgtgggaattaaaaaaaaaagagtcctaggaatcaagttgtgggttccagatcccacctccattctgccactaggactgtcagtcatcctttttgagcctcaggtaccttctctgttaagtaacaggatgggccagatgatttttttttccttgagacagggtcttgctctgttacccaggct

SEQ ID NO: 110499 - DNA, 1047 bp, Homo sapiens
cctctcaggggagccagtgtgaaccagggtttgcagtaaggtcagtcgccaactatctggctttatggaagaggcgggaaggcccactcagcaactgctctctgggagcgtgtgtccctggggacaggatggaggggaggggaagctcagggtgacactccagctaaagccgagagaagccaagtgcaggatgagcaagttccaggcagtgggaacagcctgtgcaagctctgaggtggccacgggctggcacttggaacggagggcagagggactggtgcagcaggagtggggacggcgggaaaacaggagcctggagggagagggaggagacggtccgcagtgcctgctggctgggagggatgcagattctgcccaagggagacaaagtaccccacgcaatacacaggctcttcatgctggtgctggtttttcattttttctgacacagagtctcactctgttgcccaggctggagtgcaatggccagatcttggctcactgcagcctccgcctcctgggttcaagcgattctcctgcctcagcctcctgagtagctgggactataggcgtgcaccgcaatgcccagctaatttttttatttttagtagagatgggtttttgccatgttggctaggctggtcttgaactcctgaccttaggtgatccgtccacctcagcctcccaaagacctgggattacaggtgtgagccagtgcacccagccttgtgctgggttttaaagcagctctccctatatctcatgcttcaccacctaccagagtgaggctcagggtgaaactcagagcaaggtgcaagacaacttcaggtatctccatgctcgaagccctgacctactgtattgccccgaaagtcttccctgctgtggctgcatcttttccacgtggataatcttggttcacctctagcacaggaattcttttccgggggctcctaggatgggctgggtgggtgggcgtggaggatgtctgcctcccctgagtttgtatggaaaatgtattctggtgcacttctttccgcgcgtggg

SEQ ID NO: 110500 - DNA, 543 bp, Homo sapiens
gtgcagtggcatgatcttggctcactgtaacctccgcctcctgggttcaagagattgtcctgcctcagccctgctgagtagctgggattacaggcgtgcgccaccatgcctggctagttttttttattttcagtagagacggggttactccgtgttggtcaggctggtctcgaagtcctgacctcaggtgatccaaccacctctgcctcccaaagtgctgggattacaggtctctgagctactgcgcccggccctgtaatccctaaccttccaacttagctcccactttggcccagagttctgaattgtctggtccatgcccaactcttgaagctcacctgtcatctcccatttttttgaggctcttttttaacatttgctgctctgtctgcttaacacattccctgcccagatctgtaggctcactctcatcactcaagcccttggatctcataccaggttccttggaggcagccttccagaccctcaaactagggaagccctgctgacctttcacgaattccaccacgctaggtagacgtc

SEQ ID NO: 110501 - DNA, 575 bp, Homo sapiens
  misc_feature (1)...(575): n = a,t,c or g
tttttttttccagacagagtcacgctcttgtcacccagtgcagtggcgcaatcatagctcactgcagccttgagctccctgggctcaagtgaacctcctgcctcagcctcccaagtagctgagactgaaggcacatgacagcatgcccggctaattttttattttttgcagaaatgggtctggctggtctcaaactcctgggctcaagtgatcttcttgcctcagcctcccaaagtgctgggattataggtgtgagccaccacacgtggccgggaatttagcttttaagaagaaatctctaaaggaattttttttttaagttagtccccaaaagtggggggaaatggggagttcagaagtcacggagtttagggtcaaagtaaaatccaacatgtttccagattcccctattcttcattaagatatggcntttttcagtgggcccagcccagccagtttaaggcacacacagccttgacctgaccggggttccattcccagttgccccagggttccaggtggtcagcaccactgtccaccaggttgcaccaactgcctgagtgccacactcagct

SEQ ID NO: 110502 - DNA, 701 bp, Homo sapiens
ggtctggctctgttgaccaggctggcgagcactggcatgatcatggctcacttcaaccttgaactcctggtcttaagggatcctctcaccacagcctcccaaatagctgagactacaggaatgcactgccatgcctggctaatttttaaactttttttagagaagtgggggaagaggggcgttctccctgagttcccaggctgatctcgaactcctgggctcaagcgatcctcccgccttggcctcccaaagtattgggactacaggcataagccaccatgcctgaccttctcaggctttattagactcaccttctgatagaaccatttaatgtggaattcagccctacacaagaactttcgataagttcttcatgaataagctcacgcattaactgaatctcagcattttttccttgcatctgtgctatcacataacttatgcagtgtttccattatatttaacttatttaagtgttcatttactattttgcttactagtttgttttgcagctttacagaataaataatgttttaagcatttctcttcagggtttcacagttactaacaagtatcaattaacctgagatgatctatttacaatgtaaccattctggattagaattattttcgtgtctttgcatgttctgtatccagtgataatattattcaaaagtggcactttttctctttcctttgga

SEQ ID NO: 110503 - DNA, 382 bp, Homo sapiens
  misc_feature (1)...(382): n = a,t,c or g
ggaaattcaggcgtgacccacacgcgtgngcagacgctgtggggagtccggcctaacctcggctattctcgctgttgaaagctcctgaaagcgacgtacagaccatccttgacattgatgcaatcgcggacccacaagctgaagatactgagggcacagcagtcatcttggagacagagctgaggactgaggagaaagttgtggctgagatggaagaacaccagcatcaagttcacaatgtggagattgtggtcttagaggattaactgnggatctcagggccaggagttatgttttgatttggaattttaattatttgtttatttttatcattggcccactcatttccacataggacccttttttnnnnnnnnnnnnnngg

SEQ ID NO: 110504 - DNA, 708 bp, Homo sapiens
  misc_feature (1)...(708): n = a,t,c or g
tactgattaacattaaatttatttatttaaaactatgaataatttgttttctaaattaaaacagttctaagtttccagaagagaactctctttattgtatttgagacagggtctcactctgttgcctaggctagagtgcagtagtgcaatcacagctcagtgcagcctcagcctcccgggttcgagagatcttngcgaccaccttggcctccagagtcgctggaaccacaggtgcacaccattatgccggctaatttttgtattttttgtagcaatggggtctcaccatattgcctaggctggtctcaaactcctggactcgagtgatcatgatccttccaccttggcctcccaaagtgttgggattatggggacgagccaccgcatttggcttgaagagtactctcatttatacttctgataagctttctgatggaaaagaaaggcatttttaggcacgaagcacgaaatggacagcaccttgggtatactttcagggacatgaaaaaatgtaattattacttatatgcatcatagaagaaaaaataagctttataatagttggtttggaaaactagagcgaacacagcatttcttatggatgatgggagaagatggaattaacaccaggctgatattagttgacaacaaatatcagagtgcttgctctgtgctctagttaatttgtcagatttcacagggattttt

SEQ ID NO: 110505 - DNA, 410 bp, Homo sapiens
  misc_feature (1)...(410): n = a,t,c or g
ccccnnnnnnnnnncaggggggggattcaaagccccctaagcccaaaaacccggggggcaaaaaattctccccttttacccccccaaaaaaggggggataaaagggaaacccgcccccccccgggaannnnnnnnnnnnnnnnnnnnnnngaaaaagaaactcccttttttggcccagggggaaggccaaggggccaatttggggccccgcaaaggcccccccctggggtttcggcccttttctggcccaaccccccgaagaaggggggatataagggnnnnnnnnnnnnnnnngggaaannnnnnnnnnnnnnnnnnnnnnnnnnnnnnnnnnnnnnnnnnnnnnnnnnnnnnnnnnnnnnnnnnnnnnnnnnnnnnnnnnnnnnnnnnnnnnnnnnnnnnnnnnnnnn

SEQ ID NO: 110506 - DNA, 910 bp, Homo sapiens
  misc_feature (1)...(910): n = a,t,c or g
taagtcacttttttttttggaaaatttttggttggttgttttgagacagagcctcactctgttgctcaagntgagtgcagcgcgtgatctcgcctcactgggacctctgtctcccagattcaagagattatcctgctcagcctcccgagtagctggggttgcaggtgcctgcctccccttccagctagttttttgtatttttagtggagatggggttttgccgcgttggtcgggctggtcttgagcttcctgccacaggtcatccacctgcgtcggcctcctaaggtgctgggattacaggcatgagccaccaagcctggcctgtttttttttgtttgttttgtttttgttttttttgttttgttttgttttttgagacaggtcctgctctgtcctgcagctggagtgcagtgagctgagaatgaaacactgcactccagcctgagttacagagcaagactctgtctcaaagaaaccccaaaaaagaaaaacagaaaaacctatacaccaaagaacttacttacgtcatcatgctgtttagtttctacataaagtgttttgctcctcagtaccttcttttgtgtttggttaatgatttatcctgtaatattttgatcctttcttaaattcttttctgtatattttaaaagttatttttttagtggctactatgaagatttcatttaacatgctgagttcaaagtctagttcagactgatagcaactcagcttcaatagcactccattaactctgctcctttctctgtcccctacctatagttaacaaattatgtctttaaacaattagtgcctattaacatagatccatattattttatgcattttttttttgagaaggagtctcgctctgtcgcccaggctggagtgcagtggcgcaacctcggctcac

SEQ ID NO: 110507 - DNA, 452 bp, Homo sapiens
  misc_feature (1)...(452): n = a,t,c or g
ttatcatctacttatcatctacctatcatctgtctatttttctatctatcatctatctaccatctatgtatctacctatcatctagccatctgtcatctatcatctatcacctatcatctatctgtctcacctatcatttatctatgtatttatgtatcatcatcacccagctatgaactatctatcatgtatgatgtatctatcatctatgtatctacctatctgttnnnnnnnnnnnnnnnnnnnnnnnnnnnnnnnnnnnnnnnnnnnnnnnnnnnnnnnnnnnnnnnnnnnnnnnnnnnnnnnnnnnnnnnnnnnnnnnnnnnnnnnnnnnnnnnnnnnnnnnnnnnnnnnnnnnnnnnnnnnnnnnnnnnnnnnnnnnnnnnnnnnnnnnnnnnnnnnnnnnnnnnnnnagtgcccagggcccaccattgtctctatgcattggatg

SEQ ID NO: 110508 - DNA, 2405 bp, Homo sapiens
ttttttttttttgagacggaatctcactctattgcccaggctggagtgcagcagcacgatctcggctcactgcaagctccgcctcccgggttcatgccattctcctgcctcagcctcccgagtagctgggactacaggcacccaccaccatgccttggctaatttttttgtatttttaggtagagacaagggtttcaccgtgttagccaggatggtctcaatctccggacctcatgatccacccgcctcagcctcccaaaagtgctgggattacaggcgtgagccaccgtgcccacccaggatctacattttaacaagatctcgatgatttgtgcatgcattaaaggttgagaaagcactagtctacatgcccatctatctggacaccccacagccactccagcccagcatggccatgctgaatgcagacccctcccctagaccacaaatttctgtttggttttccttcctgatgaacagtttctatcctatgtatggagatgggagtgtggtctggagtggggtcaatgtcgccgccatgtggctgcctcactttttaatgggctccaaatgacacagagctgggtcacctgggtctcactgcagtttcctggatcagggatactggaaagatgtcatgttccacatggacaccagcttaagctttaggctgacacaaaaagactccctccagcatgcaagtggcatggctcttttttgttaccacgctgttcccttccacttattggtgccagtgcccctcagtcctcctctggtcctgttggtgtccctctccaaatctgaggcctcccttccttagggagagcatcagtcctggagccctccatcgggagctctccattaaaaagggcatcttcagaacacagggtggggcccactcgggcagcagatcacacggtgcagcaggagctcagaggctgcaatgcagccactgggtgtgacctaattgggcaccctgggtactgatatcagtattttgtttgtttgtttgtttgttttgcttcctgttctgggaagcaactttgatgcatactgtattcatattctttatgcaacctgactggcttgaccaaaaccaggatttaaacagcagagtaattagagagtttatggaagagaagagtctggggatgttagggacttgggtagagtcctgcccttccaggacattctcctccctgctgcttgctcagtgtctgttgccttccaaggcttctccactaggcaggagatgtggcaacagatagatatgtgccattccagcttcactgcccaaggcaaagatgatttctttctccccaggattttgatattccagggggccatgtgcatgcttaggaccatttctggcatgagctccattcttggctcagcctaggttacagtcatgcatatcagaggctgtgatgagcagggccatgaataattcccaaagcgagggggtctttgggctcattgctgtgtgggccagcccacattatcatacactaaaaatatattttctaaatgccccatgttgtcttcactctcacaagagtcaagaggtgggaggcctggcttttccttattttccttgtgagctaacagagtggcggtacattcgtaaaaaggtgactctaaggaatcccaggcctctcctccactacagctgcttcagggcaggcctcggggctttggcttggcaagacagtttcacccaggtggatgccccttcatacctcccggcttcctgtgctgactccatgccaaccatgccaaggccaaaactcaccaccaaatctgagagcatctgctgtctgcctgaaagaagccactgcactctaaccaatgggttcatacttgttttagcttcatttaaacatttaagcaatggtctattttgaaaattactcatatgtagtttctgccattgatgccttatagtgaaaacaaattgacaaactttccctaatttctatttcaatgatatgtgatatgtttccccttatctttggaaatgacaatgcatgattagtggtccatggacaaagaatgaatgagtgggcacatatttttaagcttactatggcaataatgtcaatatatcctctcaaacaagcacctgatacaagtcatccattgcttccagttctgagcacagcttgggcatttgcttctggagataacagtgggaccagctctgcctggatgctgtccatagcttccaagattcccctgggcagcattttcagtaggaggagataatctgcaggttcccattcacacaccttagtgtggattcatgcagtgatgaccacagtttgggcgaaagaggctggattcaatctataatataacaatgactggtttgactctaactgggagctactagctcttaagagcat

SEQ ID NO: 110509 - DNA, 488 bp, Homo sapiens
cagctctctgcctgctcaccacagcctggagagggcacaccacccaaccagcaggcaaccccgaagagccggtgacgggcacatcctggcccacttcaagaggggctggaggaccgagaggggtctcaggctggcgattcacccggttctccacccaccctgggaaatgctctgcggcccctcccacagcccagcacctgctccctgaggggtgtggggactggaggcgggatcactcaggctccagcccagccctacccctgctgtgcactgcagccgttcccaggcagtgcccacgctctgggaggcaacggaccactcggacccccacccctgctcgccaagctccaagcacaatcttggtacccccctcgtgggctgacagcaaacagatgtctggcagtgagggtggagggagacagtgggcggcagcaccctcgaagaccgggtcccctgagtgacggagaataaacacttgaagaaccgtg

SEQ ID NO: 110510 - DNA, 395 bp, Homo sapiens
  misc_feature (1)...(395): n = a,t,c or g
ctcaggtatttacccagacaacgacagtgcttcaaaactagaaaatagaagagcaaattaaactcaaagcaaacagaaggcaggaaatactaaagataatagtagaaatcaatgacatggaaaacaggaaaactggagaaaagtaagtgaaacaaaaagctggttctttgnnnnnnnnnntcataaaagtaatgaacctctagtaaggtgaacaaaaggaaagagaaggcccaaattaccaatatcaagactgaaacaggacatcactacagattctgcagacattaaaacttatgagaggaagtcaaggccatgattaaaggaaaattcatagctttaaaggcacatgttagaaaggaggaaagccaaaattaagaagcacccacctcagaaag

SEQ ID NO: 110511 - DNA, 403 bp, Homo sapiens
  misc_feature (1)...(403): n = a,t,c or g
agcggctcgcgggccgcgagtccgcggggaggaggaacagtgggcccgggagatcggggcccagctgcggctgatggactcagcatcggaaggtggcggtgaccgagggggtggggactgagccgcccgcctctgccgcccaccaccatctcaggaaaggctgttgtgctggtgcccgttccagctgcaggggtgacactnnnnnnnnnnnnnnctctcctttcggggctttttaactttgggcctggcctaaggcccctggggcttccccccctcctcctgggagggggcccgtgaaaagcaaatgacccaaacgggacccctaccctcttggacccaaaaaggggggctcgtttgccggttgtttcagcccggggcccaaccattttccttgagccagccg

SEQ ID NO: 110512 - DNA, 465 bp, Homo sapiens
tatttatatataatttaatattgatatactgcttgtgtgttttataatatatttttggctttcaatcatcaccaataagttttgctggcatcaacatcttacttttttaactttttaaatttttatttatttactattattattatttttgagacaaggtctcactcgtgtcacccaggctggagtaggagtatcacaataacagctcgctgcaccctccaactcctgggctcaagtgatcctcccatctcagcctcccaagtagctgggaccacaggcgtaagccaccacatccagccaatatcttgtttagaaaaacaattttcactttgccatattgaaaacattgtttccaagaaaaacaattcttagaattatcctaattttctgtgcatagggaagatgaagctggggtaagctggggtacacgtggagatcggaagaggagaagataacgtctctggg

SEQ ID NO: 110513 - DNA, 514 bp, Homo sapiens
gatacagcatcttgctctgctgcccaggctggtgtacagtggtgcaattatagctaactgcagccttgacctcctgggctcaagcaatcctcccacctcaacctgggaggtatgggcgcacaacactatgcctggataatttttttattttttgtagagatgagggttcactatgttgcccacgatgatctagaactcctgggctcaagcaatcctccctcctcagcctctcaaagtactgggattacaggcatgaacccaggatacttttctaaaagcaaaaactggaggcaaattataatgaaaattttgtttctaaaacaaaacatattgtttcaaatatacatataaaatcattatggtgcacaaaagtgtgctgcaagttatttttgctctataccatttgaaagaattagaaaccctactgatcccaagcactgacttccacattactactcatcgcaaaaatataatataacactactggctgctggggcttctttgggtgtgtagt

SEQ ID NO: 110514 - DNA, 400 bp, Homo sapiens
  misc_feature (1)...(400): n = a,t,c or g
ctcaatattaggctaagctatttgggaaagttctccccaccgcccctgtacgcgtcatcctaaccccccttaggaaaggagttagggtctcagtgcctccagccacaccccctgccttccccagcttgcccatttccctgccccaaggcccagagctccccccagactggagagcaagcccagcccagcctcggcatagacccccttctggtccgcccgcggctcgattcccgggattcattcctcagcctctgcttctcccttttatcccaataagttattgctactgctgtgaggccataggtactagacaaccaatacatgcagggctgggttttctaatttttttaactttttaattaaatcaaagaaaacaatacgcnnnnnnnnnnnnnnnnnt

SEQ ID NO: 110515 - DNA, 413 bp, Homo sapiens
  misc_feature (1)...(413): n = a,t,c or g
gggtcaccaatgtccttcaccccggaaaggcaacaaaatgtacaagaccacaatggatgtcatcttcatattaatagttggactcagaacccattttggtggtggttaaacaatcnnnnnnnnnnnnnnnnnnnnnnnnnnnnnnnnnnnnnnnnnnnnnnnnnnnnnnnnnnnnnnnnnnnnnnnnnnnnnnnnnnnnnnnnnnnnnnnnnnnnnnnnnnnnnnnnnnnnnnnnnnnnnnnnnnnnnnnnnnnnnnnnnnnnnnnnnnnnnnnnnnnnnnnnnnnnnnnnnnnnnnnnnnnnnnnnnnnnnnnnnnnnnnnnnnnnnnnnnnnnnnnnnnnnnnnnnnnnnnnnnnnnnnnnnnnnnnnnnnnnnnnnnnttctgtattaaattttttaaaacacaacattt

SEQ ID NO: 110516 - DNA, 421 bp, Homo sapiens
  misc_feature (1)...(421): n = a,t,c or g
tgaaaattaaaaaaanaaaantnnttttttnnnnnntttnttttnnnnnnnnnnnnnnnnnnnntntnttaattttaacatttacagtttaattgttcattgtggaaaaacagagaaaagggcatacgctgtccaagcacaggcttccatgtgggctcagcccaccatgacatggggatgaatcccaactctcacccaccatgacaggtgatccccccagctctcacccaccatgacaggtgatcccccaagatctcacccaccatgacatggtgatacccccagctctcatccaccatgacgtggggataccccccagatctcgcccaccatgacatggggatgctcccagctctcacccaccatgatgtagggatacccccagctctcacccactatgaccatgtggatgaccacccgc

SEQ ID NO: 110517 - DNA, 724 bp, Homo sapiens
gagatggagtttcaatcttgttgcccaggctggagtcagattccgtctcaataatcatcatcatcatcatcatcatcatcatcatcatgatgtcagagacaaggtcttgctttgtcatccagcctacagtgcagtggcaagatcatagctcactgcagcctggaactcctgggttcaagccatcctcccacctcagcctcctgagtagctgggactataggtgcaacaccaccatgcctggctaattattttttgtagagacagggtccactacgttgcccaactgatctcgaactcctggtctcaagtgatcctcccacctcggccccccaaagcactgggattacaggtgcatgtgaccacaccccacctacctctgagactttccatccactttttctttctggcggaaatgaatgcccgggggcaaacttgccgacggcggtcacctctcattgccccaaccctctgctccctccctctccctgtccctgccaagacacttgggcctgcccttcctcctcagtgggacctttcacctggtctgtccccgacattctcattacccagatggctcgctgggagagggatgggtgggacggccgtatccctgctgtgcctgcctgtggccttgtcactggcagagtcgacttcccacaccctgacgttgggcttggccatgtggctctcagaagtggccggggcccaatgctgagcctaggcc

SEQ ID NO: 110518 - DNA, 414 bp, Homo sapiens
  misc_feature (1)...(414): n = a,t,c or g
tgccccttccttgcacaagctttcccaaaaaaagccaagttttttttgggaaacttttttctaactttggcaaccccccttgggtaagttccccaagccctttcccnnnnnnnnnnnnccaccgttaaaacccttagtttttttcccagggccatgggttccccccgttattccccaacccttagagggccaagttgaaagattttttaaaacccttagtttcaaggccaccttggccaaaaaaaccaactcccttttttccaattcttttcnnnnnnnnnnnnnnnctagccaggcattgtggtgtgcacctgnnnnnnnnnnnnnnnnnnnnnnnnnnnnnnnnnnnnnnnnnnnnnnnnnnnnnnnnnnnnnnnnnnnnnnnnnnnnnnnnnnnnnnnnnnnnnnnnnnnn

SEQ ID NO: 110519 - DNA, 457 bp, Homo sapiens
ctttttttttttgagacaggatcttgctctgtcacccaggctggagtgcagtggtgcaatcatggctcactacagccttcacctcccaggctgaagcgatcctcccaccttagcatcccaagtagctgggactacaggtatgcaccatcacacccagctcatattttattttctgtagagatgggtctcgctaagttgcccaagctggtctcgaatttctgggctcaagcaatcctcccacctcggcctcctaaattgctgggattataggcatgagccaccgtgcctggcctctgggcaatttttttctttttctcatcaccttctacttgacatcaagcctgacttcaagctgctaaaggacagaaactgtgtctcatttttgtgtcctccactgccccagcacagtcatttttgttaatagtgagttagtgcgaacgcgtgggtcgacccggga

SEQ ID NO: 110520 - DNA, 438 bp, Homo sapiens
gtgtggagacagagtctgctctgtcacccaggctggagtgcaatggcgcgatctcggctcactgcaccctccacctcccaggttcaagcaattctcgtgcctcagcctcgcgagtagctggagctacaggcatgtgccaccacacccagctaatttttgtatttctagtagaggtggggtttcactatgttggccaggctggtgctgaactcctgacctcaagggatccgcctgccttggccttccaaagtgctaggattacaggtgtgagctaccacacccagctggctatgttcatttttaaggcaactttaaaaaagtactagttggctgaaaagctgattgatgctggcaccccctcctgggcagacacagaaagtcccaggggcacagccacagcaatgggcagccagcagggatgggcaggggctctaagcc

SEQ ID NO: 110521 - DNA, 431 bp, Homo sapiens
  misc_feature (1)...(431): n = a,t,c or g
ggggaagagggccctgtctaccactacctccccagcacctctcctccctgcacacatctgccgaatcaccaagtgctgcaggccctgcctccaaagtgtcaatcagtttctgcaccctgcccaggcagggccaccgtcagctcttgcctggtctctgtagtggccttcccaggccttccactacccctctagcctcctccagccctttcgtatccaccaggtagcctcaacannnnnnnnnnnnnnnnnnnnnnnnnnnnnnnnnnnnnnnnnnnnnnnnnnnnnnnnnnnnnnnnnnnnnnnnnnnnnnnnnnnnnnnnnnnnnnnnnnnnnnnnnnnnnnnnnnnnnnnnnnnnnnnnnnnnnnnnnnnnnnnnnnnnnnnnnnnnnnnnnnnnnnnnnnnnnnnnnnnnnnnnnnnnnnnnnnnnnnt

SEQ ID NO: 110522 - DNA, 427 bp, Homo sapiens
  misc_feature (1)...(427): n = a,t,c or g
gtttttccacgttattaaatgtcaaagaatttaccaaagggcttttttaccttttaaaaatttttaattataaaattggggtggggccaatggttcccccccgttttcccccccttttgggagtccaggaagggggattcccaagttccggggtttaaaccccccctggccaaaatgtttaaccccccttttttttaaaaaaccaaaaaattaattggggttattgggggggcccattaatccccctttttggggggggtagggcaaaaaattccctttaacccggaaggcgagggttccaattaaccaaatttcccccctggccttccagcccaggggccaggtcaaatttttttttcnnnnnnnnnnnnnnnnnngatggatttaggcaatggtcatcaatgtctatcaccaatgccatcaccaa

SEQ ID NO: 110523 - DNA, 430 bp, Homo sapiens
ttttttgttttgttgttgatacagagtcttgctttgttgcccagctggagtgcagtagtgcaatcttggctcacaagcttcagcacctcagtctcctggatagcttgggaccacaggcatgcactaccatgcccagctaatttttgaaaacagggtctttctatgttgcccaggctggtctcaaactccttggcttaagcaatctgccctcttaagcctcccaaagtgctgggattacaggtgtgagccattgctcctagtggagaccccttctcttagaaagagagagagagagagagagagagagagagaggggaaagaacataaaaggcatggtgaacaggtcctacgaggaaagattaaagggccagagtcatttagcttgaaagaaagaaggctaaaggatgatttagcttatacatgagaaaac

SEQ ID NO: 110524 - DNA, 648 bp, Homo sapiens
ttttttttgagacggagtctcgctttgccgccaggctggagtgcagtgatgcaatcctggctcactgcaatctctgcctcctgggttcaagcaattctcctgcctcagcctcctgagtagctgggattacaggtgcgtgccaccacacccagctaatttttgtattttttttagtagagacagggtttcaccatgttggccaggatagtcttgatctcctgacctcgtgatctgcccacctcagcctcccaaagtgttgggattacaggcgtgagccaccgcacctggccataaattctccttttaacaaaacatgaaagctgagaattcctaaagattagaggcataaatgagtttcaaatagtcctgcaagaaaggccaaatgaggacacactttcctcctttgcaggggaatgaaaaggaggtggtctagtctcagctcctctgcaggaaagtgatgtagcccaggaaggcaacatggtggagggaaaaccatgtgaaaccggcaggcaggagccacaggctctgatccgggctctgctcctacctgtgcgtctataagacgcctcatctcatggacttccatgtttgcacctttacaatgattgggtgtttcccagacattgattattcaagtctacactgtcg

SEQ ID NO: 110525 - DNA, 802 bp, Homo sapiens
  misc_feature (1)...(802): n = a,t,c or g
tttttttttcttgagacggagtcttgctctgtcacccaggctggagtgtagtggcacgatcttggctcactgcaagctctgcctcccgggttcacgccattctcctgcctcagcctcccaagtagctgggaccacaggtgcccgccaccatgcccggctaattttttgtagttttagtagagacggggtttcaccgggttagccaagatggtctcgatctcctgaccttgtgatccgcccgcctcggcctcccaaagtgctgggattacaggcgtgagccaccgcgcccggccgactggagtgtttttaatcttatgcaaatattaatgacacttggggggaatatagcttcctgagttaaatgctgcactttgctacagaagagggcaggtaaggtcacagactttaaaacagtaaaatataaagcgaactatttacagggccgaggagggattataaatatcaaaggtaagaagacacattttgataagataaaaacataaacataaatactaaatgccaccaaaactgagggatcataatatgtgaagggaaaacccaaataaatgcgtgtagcactcaatatctcaaacctatgtatctttaagaacaaatatatatctttgaaatattctataaagattagaagatattagcccagagttcttnnnnnnnnnntggaagcaaaagctgagggcgaaacannnnnnnnnnnnnnnnnnnnnnnnnnnnnnnnnnnnnnaacctctctttttaatcatctcccaaaaggttagaaccaagctcctgattggaaaagcag

SEQ ID NO: 110526 - DNA, 451 bp, Homo sapiens
tttgagacagagtctcactctgttgcccaggctagagtagagtgatgtgatctcggctcactgcaacctccatctcccgggttcaaataattctcctgcctcagcctcctgagtagctgggattacaggtgcctgccaccatgctcacctaatttttgtatttttagtagagacgaggttttgccatgttgaccaggctggtctggaaatcctaacctcgagtgatctgcccgccttggcctcccaaagtgctgggattataggtgtgagccagtgtgcccagccagtaactgcttttcaatatgagatgaacatctaaatgttatttctaggctcatttacataaatatcaagccttttctctagaactgagttgatgctgcagagaagagccagttctttcctctgcctcccctcggagtggagctaggagcagctggagactggcagg

SEQ ID NO: 110527 - DNA, 646 bp, Homo sapiens
ccaggctggactgcagaggtgtgatctcagctcactgcaacctctgcctcctgggttcaagcaattctcatgcctcagcctcctgaatagctaggattacagatgcccatcaccacacctggctaatttctttatttttagtagagattgggttttgacatgttggccaggctggtctcaaattcctgacctcaagtgatcctcctgcttcagcctcccaaaatgctgggattacaggcatgagccactgcgtccagccttcatgtaatttttctgaagaacaatttgtcatcaccttttcagttaaaaatatacatttctttggggtctaggaatttatacttctgggaacttaatgtaaaggcaatactcatccaagagggtaaagaatacacagatacacacgtatacatacatacatgactccctggaagaattatttgtcatagaaaaaattgaaaccagttgttatcagtagtagattagttaaaaataacttgcagctattaaaaggtaggtggtatattcatatactgtcaatgaaagatatccttaacataataattgatagcagttttctgaaggtcatataattccatttaaaatttatatataggccgggcacggtggctcatgcctgtagtcc

SEQ ID NO: 110528 - DNA, 343 bp, Homo sapiens
aagagtctcaaactagagggcaggggcgcgatctcagctcactgcaacctccgcctcccgggttcaagcaactctcctgcctcagcctcccgagcagccgggaccacaggcatgcaccaccacacgtggctaatttttgtagttttagtagagacggggtctcaccatgttggccaggctggtctcgaactcctgatctcaggtgatccgcccacctcggcctcccaaagtgctgggatgacaggcgtaagccaccaagcccagcgaagactgcatttcaaaattgctctacaattaaagaaatgcactgatagtcttaaaaaatgaagttgggggaaaccca

SEQ ID NO: 110529 - DNA, 683 bp, Homo sapiens
aaggcaattctccaagcctcagcccctggagtagctgggttaccaggcgccgacaccacaactgactaattttgatttctagtagagacgggctcaccaatgtgcgcagcctgtgtcaaatccctgacctcaagtaatccactcaccttgcctccccaaagtgctggattacagggtgagccatcgcttcaggcccaaagcatagataatttcttagtcaacctttatttattattttccttttcaacagttttactctgtcacacatgctggagtgcagcagtgccatcacttcgcaaccctgaacttgagctcaagtgatcctcctacctcacccttccgaggagctaggactacaagtacatgccaccccatccagttaattgaactttgttttttgcaaggccaaagtatgttgaatgttatgagagtgaaagagaagtacttgctccaagatgctcatctagcattatgaattatggttaatcttttggaggaccaaagggttgcctttaaaagtcagaatattaattttaaatttattaagtgtagagaattggttaacatccctccgtatcattggccctcttcttctaccactgacatatccagtcttaagacatgtacccctatctccttccttctcttcttttattattttaatttattatatttctcgtgcc

SEQ ID NO: 110530 - DNA, 449 bp, Homo sapiens
ttttgagacagagtctcgctctgttgccaggctggaatgcagtggcatgatctcggctcaccgcaacctgcgactccctggttcaagtgattctcctgcctcagcctcctgagtagctgggattacaggcacgcgccaccatgcccagctaatttttgtatttttagtagatggggtttcaccatgttggccaggatggtctcgatctcctgacctcatgattccgttgattataagatgagtagtccctttggccctcatttgatactttctttccggaaagggaccgagtacagcgccttcacacgacaacactcaggaccagatgactgggaatgcaaatgaaaccctgggaaggacaacatggagacaccaactaaagactctctgcgccccagagcacacccctttcacctggcagtatccaatcttggggttccggtggggca

SEQ ID NO: 110531 - DNA, 471 bp, Homo sapiens
ttttttgagatagggtctccctctgtcgcccaggctggagtgcaaatggcgcaacgttggctaactgcaacctccgcctcctgggttcaagcaattatcctgcctcagcctcctaagtagctgggattacaggtgcccaccaccacatgcagctagtttttgtatttttagtagagatgggatttcaccacgttggccaggttggtctcgaactcctgacctcaggtgatctacctgtctcagcatcccaaaatgctgggattacatgtgtgagccaccgtgcccggcccacccttcatttcttactacagcttcctgaccgtgtagaaaggattacttcaagggaaatttactgtgtgtttttctctgatgtttagatccccagatcacaagcatttctgtggtcccaggcttttctgatgaagccatccctggggtccttgggagctgtgagtcaggcttcaggctttt

SEQ ID NO: 110532 - DNA, 419 bp, Homo sapiens
  misc_feature (1)...(419): n = a,t,c or g
agtttgggaaggcaatccagagcccatatgacattatgcagggtcagggatccgggttctttctatattggtcctccccattctcaacctgtggcnnnnnnnnnnnnnnnnnnaaaggaaaaggggcccaactttgtgccccagccggaagggaagggccacattttgggctaatttaacccggaaaccccgggcctggacctaaattcccccatttaaccccaacccccaaaagacccgggaacaacgggannnnnnnnnnggcccgggaaaaannnnnnnnnnnnnnggaaaaaaaagagaaattgtttttttccccagggggcccttaaaacccagggctaaaaggaaccccccccctgggcccccaaaagggggggggtaaaggggggggnnnnnnnnnnngggccaaaaggggg

SEQ ID NO: 110533 - DNA, 493 bp, Homo sapiens
gagactgaatctcactctattgcccaggctggagtacagtggggtgatctcagctcactgcaacctcttgtctcccgggttcaggcaattctcatgcctcagcctccccagtagctgggattacagatgtccaccatcatgccccactaatttttcatttttagtagagacgaggtttcaccacatcggccaggctggtctcaaactcctgacctcaagtgatccacccgcctcggcctcccaaattgctgggattacaggcatgagcgaccgaacctggccttaagcagacttttcaagcattcatcactagctgctataaataactagtgtggttatattcaattcctgcctcaaaggcttacaatctaattagacaacacagatagaatatgcaggcaaaagaaacagaacaaaaggatcatgagcattaactaataagcagccatcaacttaagctctgacgtatttcttcaaggttgaaagaatatcg

SEQ ID NO: 110534 - DNA, 571 bp, Homo sapiens
ttttttttttttgagacagggtctcactctgttacctaggctggggtgcagtggccaaatcatggttcactgcagccttgaattcctgggctcaagtgatcttcctgcctcagccttcccagtaggtgggactacagaagagcaccaccacacccagctcgattttttatttttcttttgtaaagacagagtcttgctatgttgatcaggcttattttgaactcctgggtttaagagatactaccacctcgacctcccaaagtgctgggattacaggcataagccactgtgcccggcctgattctgtatgtctttaatgactactggattactctgtatggccatccctccatgacacagacaggatttccacttatccccagaaaatacctaaacctatttttcattttcccccaaactcccagacccaaagtgaaatcatgcctctggtaccactaggaagtcagctaataggtagagctgggaaaagaaaggaggacataaatagagttgcaggtgtgggaatcaccatgcccaaagaagaaatgaaaggatgaaacccacgcgtccg

SEQ ID NO: 110535 - DNA, 764 bp, Homo sapiens
tgagaaggagttttgctctgttgcccaggctggagtacagcagcatcatcttggctcactgcaacctctgcctcccaggcccaggcgagtctcctgcctcagcctcccgagtagctgggagtacaggtgcgcaccaccacgcctggctacttttttggtatttttagtagagacagggtttcaccatgttggctaggctggtctcgaactcctgacctcaggtgatccacccgcctcggcttcccaaagtgctgggattataggcgtgagctactgcgcctggctctaattttgtatttttagtagagagagggtttcaccatgttggtcaggctggtcttgaactcctgatctcaagtgatccacctgctttggcctcccaaagtgctgggattacaggtgtgagccaccgcacctggccttgctttaccaaagtttctatacagaaggcgtttaagaatattttggcattattattactacaaaatatcatgtaatgtcaaaacgtaaacatacttaaaccttggtctatcagtacttgtacagtagaactggacaagaagctggtgttacacaatcactgcacaacagactgtacagatcccatgccaaatttgtttagcttggtttgacaaagccgtaataaaccaaacccatcactcagtgaaacttctaaatcgtatggatttgaaagggcccctgggggtgtaagagaactccaagatgtattctgatttcacagccagctacaaaggttgcttctc

SEQ ID NO: 110536 - DNA, 287 bp, Homo sapiens
  misc_feature (1)...(287): n = a,t,c or g
ggttgggattnacaaggcacntcaccaccacacctggctaatttttgtatttttagtagagacaggtttcaccacgttggccaggctagtcttgaacttctgacctcaggtgatctgcccacctcggccttcaaaagtgctgagattacaggcgtgagtcaccacacccagccttggagatgagaattctctattcccaccacccctgctcccagcaaccccactcacatctgcctgcatcctgtccaggatcgaagcagtgtggttgtttttcgggtaattctcca

SEQ ID NO: 110537 - DNA, 900 bp, Homo sapiens
aactcctggactcaagcgatccgcccacctcggcctcccaaagtgctaggattacaggcgtgagccaccacaccggccttctatttttcttaccagcatgaattaaatcctttttgtctttttcttttttttgagacagagtcttgctctgttgcccaggctagagtgcagtggcaccatcttggctcactgcaacatcggactcccaggttcaaacgattctcctgcctcagtctcccgagtaggtgggactacaggcatgtgccacaacacctggctaatttttgtatttttagtagagacggggtttcaccatgttggtcaggctggtcttgaactcctgacctcaggtgatccacctgcctcggcctcccaaagtgctgggattacaggcatgagccaacacacccggcttcaagtgaatcttgatgaaatatttgaagagaatgtaacattatttttattttgtattggttcagatgcatatagtcgactcagaatgatctttggtaaagtatgtgaagcacatctgatatgtcaggtctctcatttttgcactgatactaacaccacaatagattacagtttcataagatgtatatgattatatatgaaattcatcactgcaataattagatttagttaacattcttcatttcccacatttgctttaactcctctttcagattcatagtcttctatgtttacttttatgtttatgttttatgctatttctaggagtaggacagctatattaaaaatgacactgcattatttttatcatacagcagaatgtctgatctgttggcagaaatacatagatgtatatggcagaatgtatgtataatgtagtaatgactctatccgaggacattttatagccataacttaaaaaaaaaa

SEQ ID NO: 110538 - DNA, 688 bp, Homo sapiens
gagatctgtcacccggttggagtgcagtggcatgatctcagctcactgcaacctccccctcgtgggttcaagcgattctcctgcctcagcctctggagcagctgggactacaggtgtgcgccgccatgcccagctaatttttgtatttttagtagagctggggtttcaccatattggctagaccggtctcaaactcctgaccttgtgatccgaccgcctcagcctgccaaagtgctgggattacaggtgtgagccaccatgctcagccctgaatatcaagttttaggataggtcacttaaagctgctattgggatggaattcagggtaggcttttttatcatggtgtacttttcttaatcaggggaataaaacagaaaaattctgatgcagggggcgtacaattttattttggtttcctaaggttctcattgggaaaagttaaggatctgctgggtctacaaagtgggcaaggcagtccccatcccccaggggtggaggacaatattaacaactctataagaaggccagtgtcagaagaatagggagtaagactcagctttacttgaggctgttcaagcatcccacctatttctcgataaaatgtctgacccaggtttgccctcaggtcacctaagtacaccctttaataatctcctgtctcctccagaagatacttttggttccaca

SEQ ID NO: 110539 - DNA, 1218 bp, Homo sapiens
  misc_feature (1)...(1218): n = a,t,c or g
ggtaagtccactgacttattttatgacaagaaatttcaacggaattttgccaaactattgatacataagggttgagagaaacaagcatctattgcagtttctttttgcgtacaaatgatcttacataaatctcatgcttgaccattcctttcttcataacaaaaaagtaagatattcggtatttaacactttgttatcaagcatattttaaaaagaactgtactgtaaatggaatgcttgacttaacaaaatttgtgctctttcatttgctgttagaaaaacagaattaacaaagacagtaatgtgaagagtgcattacactattcttattctttagtaacttgggtagtactgtaatatttttaatcatcttaaaggatgatttggatataatcttattggaaattaccctatcatgttttagagcccgtttttatgtttaaaactaattttttaaaataaagccttcagtaaatgttcattaccaaccttgataaatgccactcataaaagctggttttggggctatagcatatgcttttttttttttaattattacctgatttaaaaatcctctgtaaaaaccgtgtagtgtttccataaaatcctgtaacctcgcattttaatggtcccgctattataagcttttaatagcatgaaaatttgttaggctatataacattgccacttcaactctaaggaatatttttgagatatccctttggaagaccttgcttgggaagagcctggacactaacaattctacaaccaaattgtctcttcaaatacgtatggactggataamctctgaagaaacacatctggtataactgaattaagcagagcatcaaattaaaccagacagaaaccgaaaggctctatataaatgctcagagttctttatgtatttcttattggcattcacacatatgtaaaatcagaaaacagggaaattttcattaaaaatattggtttgaaaagnnnnnnnnnnnnnggggggcggccgttctaaaggatccaagtttacgtacgcgggctgtgcgaggaaatagtttttttattagggcccccaaaattcaattcccgggcccggggtttaacaaggtcgggacgggaaaaaccctgggggttccccaattaaaacgcctttggaaggacatccccttttggccagtgggggaaaaaaagaaaaagggcgggttnnnnnnnnnnaaaatt

SEQ ID NO: 110540 - DNA, 1286 bp, Homo sapiens
ttttttttttttttggagacagggtctcactctgccacccaggcgggagtgcactgccatgatcacggctcactgcaatctcaacctcctgggctctggtgatcctcccacctcagcctaccaggtagctgggactacaggcacacaccaccacacacagctaacttttgtaattttagtagagatagggttttggcacgttgcccaggctggtctggaaatcctgggctcaagtgatccgcccaccttggcgtcccaaagtgctgggattacaggtgtgatctaccgcgcccggaccacctgcacatttaaaattgtgaacctctctgtatacttcagtaacttttcaaagatttctttgacacaaagttctcagaaatcttaaagctagcatttcacaacagaaaaaaagagcttctggttcactagtgaaattttaccaatagaatttaaaaacaaaaagctactaacgcatatcagctcagaacactaccagcagatctttcctttaacttcgtgaagcactgggattcattctttcggcaaaagaaagatgaacaacactgtaacccaaagaaaaggtatcactgcaagaaaagacttctttttgaaagcagctctagcagcaaaagataggaggaaagcaagaaaaccacgccaaacgtcttggttaactctcggaagaaaggaccgccaattgagaggtcctaccaagccagaaagccagatccagggaaatcccagcaactctttggagtgcaaacaccaaccccacaatccaacctaccggaaatcctgcggtgaattagaggcctgccccgctagtcatgaggtgattcagtgacggctacaaacgctcctcatgtgcatcctggacttggtacacccggcttgcccatcaccagcctggagaaaccgccacgagcagaatcccggaggccaataaagaccccaactttgcaagtcaggggcgcgagtggtctcgcttctcaggtccccagaggcaaccgatttcgcccgcccggcctggcgcggcgccttcacctcggaaacgctgggtggacttcgctgtaaaccgtaacttcccatccagacggcagccgcgccgccgcgcctcggcccgctcctggcgccacaggtcgcccgtcccgcgttcccaaaagcaccgcgttcactcagaagctcacgcagcctcgcgacgctcacctacccctcccaatatcgccgctgtctcaaccgccgcccagcccatagcctgcggccagctggctcctcagggtcccgct

SEQ ID NO: 110541 - DNA, 549 bp, Homo sapiens
ttttttttttggagacagaatcttgctctgttgcccaggctgaagtgcagtggcgcgacctcagctcactgtaacctccaccctcccggatttaaagcaattctactgcctcagcctccccagtagctgggattacagacatgcaccagcatgcctggctaactttttattttagtagagatggggtttcaccatgttgcccaggctggtctcgaactcttgagctcaggcaatcgcctgccttggcatcccaaagtgctgggattacaggcatgagccaccgcaccctgccacttggctcattttaaatgtttttgtagagacgggatcttgctatgtttcccaggctagtcttgaatgcttgggctcaagcaatctcccgccttgggctgctgggattgaaagcataggccaccgtgcccagacctaaccaaaattattttaagattggagggaaaaaaaaggcccagtaaaattggcagctttgtgatctctcacaggcccaggggacacccccaaccagccatctcttagacaccagcccagaga

SEQ ID NO: 110542 - DNA, 494 bp, Homo sapiens
  misc_feature (1)...(494): n = a,t,c or g
cggacgcgtggggtttttatgttagactgtgtaatctatgaaactttatttaaattgtttctgtgctgttttttccaggcccagacctcatggataattatttggcactgatactctctgcatttattcgttaatggacttttagaggtaagacttataaaccttattttattccattttgtttattttctctaacagattctttcatgccaaggtgtggtgacttcacgcctgtaatcccaacactttgagaagccaaggcaggcggatcacttcaggccaggagttcgagaccagcctgaccaacatggtgaaactgtgtctcaactaaaaatacaaaaattagccatgcatgatggcatacccctgtagtcccagctactcaggaggctgacacacgagaattgcttgaacccggaaggcagaggttatactgagctgagatcttgccgttgcattccnagcctgggcaacagagcaagcctcttgtctta

SEQ ID NO: 110543 - DNA, 1446 bp, Homo sapiens
gctgcaaaatgctcttaattaacctgacaaaatgccacatacagggttactgcatcttttttatcatggaattttgaaaacaaaaattgttctcttgaggcagcagtatttgggatattagaggtaaaaaccacccttagaatccagtcctaaaaacatcaatgaatattcctatatttacaaattcttctatttctacatgtcatctatcaacaggattatgaacctgaaagcctgaggaataggaatttatcaaggatactcatgtttgtactttttttatctactgcccttttttattttttttgaggacaggattctcggctctctcaccaggctgtagtgcagtggcgcgatctcagctcactacaacctccgccacccgggctcaagcgattctcctgcctcagcctcccaagtagctgggaccacaggcacgtgccaccacacccagctaatttttgtattctcagtagagatggggtttcaccatgttcgccaggatgacctcgatctcctgacctcagcctcccaaactgttaggattacaggctaagccaccacacccggccatctactgatatttctaagcatgaagtgacattttttttttttttgagaaggagtcttgctgtgttggccaggctggagtgcaatggcatgatctcggctcactgcaacctccaccttccgggctcaagcagttctcctgcctcaacctcccaagtagctgggatcacaagcgcacaccaccacacctggctcatttgtatttttagtagagacagggtttcaccatgggggccaggttggttttgaactcctgacctcaagcgatccgccctcctcggcctcccaaagtgctgtgattacaggcgtgagccaccgcgcccagccgaagtgacaatatttatatacaataaagtttaactgtaaaagcttacatttatgcgtggtcatttttaattgatgattagatgaagagacaaataaatggtcccagtttagctactgatatactcaacaaaccttgacggacctgagggcattatgctgagtaaagaaaatcatttccgaaggtcacatatcacttggtaatctcacagtaacaaaattatagagatggagaacagatcagtggttgggcaggagttagagatggtgggcagaagagagggcaggagagagatctttctggtgatgaaacagttctgcataggaaattgtagtagtagttatatttacagacacttgatagaatggcacagaactacgcacacacattgtaccaacttcaatttctgggtttttatactctattatggttacataaaatgtaaccactggggcagtatgcgcaaatatacaatgacctctctagtttctttacaacttcctgagagtctattattatttcaaaataaaaagtttttttaaaaattgaaa

SEQ ID NO: 110544 - DNA, 407 bp, Homo sapiens
  misc_feature (1)...(407): n = a,t,c or g
ctatagatcaatggaacagaataagtgttccacaaaatagacgccacacatatatgcctcaagggatattccagaaaaggtgcaaagataattccaacagaaaaaaaggatagtcttggataatattgaaacaattaggcaatcatcaaaaaagaaccttcaatagcccaaaatatggaatgaatacccatattcattgataaatgaatggataaagaaaatttggtatatatatatgtatatatatatatatacacacacaatggaatactattcagcctttaaaaagaaggaaatttggcgggggcaatgntttcgcttgtaatcccaccactttgggaggactataggtgtgagccactgcacctggccttatttattacaataagatctcaaattaattcttc

SEQ ID NO: 110545 - DNA, 385 bp, Homo sapiens
  misc_feature (1)...(385): n = a,t,c or g
nnnnnnnnnnnnnnnnnnnnnnnnnnnnnnnnnnnnnnnnnnngtcaaacaacagcagatttcttatctgaaaccatggaggcaaggaggaagtggcaaaaccattttccagtgctgaatgaaaaaaactatcaatgtcaactccatggcgaataaaaatttccattaggaatgaggagaaattaagtctgtcaggcagaggagcacaagcaaatttgtcaccagctgacctactcctaaagaacgcttaaaagccattctctgggaattnnnnnnnnnnnnnnnnnnnnnnnnnnnnnnnnnnnnnnnnnnnnnnnnnnnnnnnnnnnnnnnnnnnnnnnnnnnnnnnnnnnnnnnnnnnnnnnnnnnnnnnnnnnnnnnnnnn

SEQ ID NO: 110546 - DNA, 400 bp, Homo sapiens
  misc_feature (1)...(400): n = a,t,c or g
actggaggtcctgttagtacaatcagacaagaagaaaaaataaaaggcataagattgaataggaaaagataaaactgtctctgttcataaatgacatgatttatttatgtaggaaactagaaggaatttacaaaaaggccactagaaagaaaaagtaagtttaacaaagttgcaggaaacaagttcaatatataaaaatcaattatatttctatatactagcaataataaaaaattaaaattaaaaatactatttactnnnnnnnnnnnnnnnnnnnnnnnnnnnnnnnnnnnnnnnnnnnnnnnnnnnnnnnnnnnnnnnnnnnnnnnnnnnnnnnnnnnnnnnnnnnnnnnnnnnnnnnnnnnnnnnnnnnnnnnnnnnnnnnnnnnnnnnnnacctg

SEQ ID NO: 110547 - DNA, 410 bp, Homo sapiens
  misc_feature (1)...(410): n = a,t,c or g
cccctggggccatggccgttgttcccaattctcgggggggaaaagaaaaaagatcccttaggtcccggaaatttggggcggagccagcttttctgattgggggtccccccttaggtcagcctccggatgggggcccccccgggaaaaggggccccccgggtgccttaaaaaggggggtccccccccggtccggaataaagccgggccaaactcccccggtggtccctaagggggtcctgggcgggaaaaacccctggttttccgcctggggaaccccaggagggagaaagggtttttttnnnnnnnnnnnnnngtctcattgcccatagactaataaactatttaatcatgggaaatgattaggggaaagacataaaaagagaacctgtaatccacttttttttgctctg

SEQ ID NO: 110548 - DNA, 474 bp, Homo sapiens
  misc_feature (1)...(474): n = a,t,c or g
ttaagtgattgttctgcctcagcctcccgagtagctgggatcacaggtgcacgccacccacaccccggctgatttttgtatttttagtagagatggggtttcacccatggttgcccaggctggccttgaactcttgacctcaggtgatccacctgcctcggcctcccaaagtgctgggattacatgcttaatttgtttgttttttcactttagcagtacattctggaaatctttctatgtctgtatttttcatcacatgggacatagcataatttaactagtacacgattgatttctcaatattacttttaagagtgacttaatgggagtcaatggcttaaccttccattcatggatttatggcaatattattatggggaccctattaaattcntaatccccngattttnaatttaaggccggcccgcnaagcttaattccccttttggtgaggggttnaattttaggcttggg

SEQ ID NO: 110549 - DNA, 575 bp, Homo sapiens
caccatggtaattgctctgtccaaaaaccttgcttcttgttgcatgaaatgtttttccctttttttttctactttctgaaatctgatcaagcagaggttttatcttaaaactagaatcatagattattattattttaggactgaagagaccttaaagttaagctatagggattagattctggggtaataactctcttcattttccatatagagaggttaacctcgatgtagtgatttgaattaactggtaacctttttttttctttttgttatggagtctccctctgttgcccaggctgcagtgcagtggtgcaatctcggctcactgcaacctccatctcttaggtacaagcgattctcgtgcctcagctttttagtaaccaaggattacaggcggacgccaccatgcccagctaatttttgtatttttagtagagacagggttttactatgtttgccaggctggtctcgaactcctgacctcggatgatctgcccacctcagcctcccaaagtgctgggattataggcgtgagccactgtacccagccaactggtaacccttaaaaaaaaaaa

SEQ ID NO: 110550 - DNA, 437 bp, Homo sapiens
ttttttttttgagacaggtctcgctctgtcacccaggctgcagtgcagtggtggtgccatcactgctcaacacagcttctatctcccaggctcaagcgatcctcccaactcagttgcccaagctcccaagtaggtgggaacactagcacacaccaccacgcccagctaagtcttttggtttttgttttttggttttgaggtgggtttgtctttttgtagagactaggtttcaccatgttttccatgcttatctcaaactcctgggctcgaacgatccccctgcctcagcctcccaaaatgctgtgactacatgagtgagccactgtacaaggccacagcagattttcttaaaaaatgaagcaagactgtcaattaaaagatatggcagtatttgttgttaataacattcaagctatcaagctcgtccataactgggc

SEQ ID NO: 110551 - DNA, 416 bp, Homo sapiens
aggcatcagatttcagtcttctctttccaagcacatagtacaagcaggctctttcatcccacactctttttttttttccgagacggagtctcactttgttgcccaggctggctcgatctcagctcactgcaacctctacctcctgggttcaagcaattctcctgcctctgcctcccgagtactacaggcatgctgagaatacaggcatgtgacactgtgcccggctaatttttgtgttttcggtagagatggggtttcaccatgttggccaggctggtttcaaactcctgacctcaggtgacctgcccacctcagcctcccgaagtgctgggattataggcataagccactgcgcccagcccaaattcgtatgttatacagaattttctgatttataaatgtgggcaactgatcgt

SEQ ID NO: 110552 - DNA, 558 bp, Homo sapiens
agtgtgctgggagtttcacttaccaaagctgttccactactggggatgatgctcttcctcattttgtctgacaaattcccacacaatatttatttatttatttttgagacggagtcttgctctgttactcagggtggagtgcagtggtgcaatctcagctcactgcaacctccgcttcctgggttcaagtgattctcctgcctcagcctcccaagtagctgggattacaggtgtgtgccatgacacccgcctaattttttttattttttattttttattttatttttagtagagacgaggtttcgccatgttggccaggctggtctcgaactcctgacctcaagtggtccacccgccttggcctcccaaagtgttgggattacaggcatgagccagcagcccagcctgaaaaaacgcttcttacaccaacagagtcagctttctctgaacttggctgtttttgtcaagagttcgtttagactttcttctaggatgaaaaatcatgtgtatttgttttacatctaagtaaggagtaatatggagtcagaccaattccat

SEQ ID NO: 110553 - DNA, 4270 bp, Homo sapiens
  misc_feature (1)...(4270): n = a,t,c or g
agaaaagttgatatcatggcagatgcagcatattccattttccaaaaagcaaaaagtttttactggcaactttgtcattgatgaaaatatcttaaaagaagaaggaatagaaaattttgacgtttatgcaattaaaccaggtcatcctttgcaaccagatttcttcttagatgaatacccagaagcagttagcaagaaagtggaatccaactggtgctgttcccaaaattccaaagaagaagaaaactgcagatgccaacccaaaacccacgttctggagctgtggaagaaacatttagaattgttaaggactctctcagtgatgatgttgttaaagcccactcaagcaatctatctgtttgaactctccggtgaagatggtggcacgtggtttcttgatctgaaaagcaagggtgggaatgtcggatatggagagccttctgatcaggcagatgtggtgatgagtatgactactgatgactttgtaaaaatgttttcagggaaactaaaaccaacaatggcattcatgtcagggaaattgaagattaaaggtaacatggccctagcaatcaaattggagaagctaatgaatcagatgaatgccagactgtgacaggaaaatataaaaaaaaagtcgactgctatgctcaaaaagtaaaaaaagctcaacagttaaaatctaatgtttgttttctttcctgttatattataaggatatgcacgtttgttctggaaaagatagaatttgtctctaaaagacttgaaattgtaattaaaatggcaagctaatcaaacataagcttcattaagtgggattctaagacagtctgtgtttttatatttcaagggtttaaccctttgagccttacatctcattcactgtctttctccaagaaaagtattttgggcggacagtcagatcaagcagtaaaattagctctttcaaatcttcttggcatgtaaaatggaagctagtcctgttttaaaatttttagttttgggattgtatacctaatggaaaatccttaatggatggtttttggatttttaatatacctatttttaaaggaaaatcctatatagtacattttacaaaaattataaaaaatgaattagtactggcgaggactaaatgaaacaataatttttcattttgataactagctttccaggtggacttagccataggaaaatattactaatgtaatttaacaaattgctgcatgtattccatttaaaaatatgtttaaaattggtcctaaaacaaaataattttctccctagggagtatgcatttgggctacagtgttttgaaacaggaaaccttaggaatagggtcattgggtatgggggctggaactgtgtatcccccaattcatttgttgagggtcctaactcccatttctttttgaatggtgactggttccggagatgagggcctttaaagagggtgaccttaagttcaaaggggggctgttaggtctaatccaacatgggtgtcctttgggcattaaggagatacccagcaatgtgtggcacaggaacaaagaccagggaggagggacacagtggaggaagggcagtttattctgccaaggcaaaggaggaggagggctttcaggaaggaaacaaattcacccaggcaccttggatcttttgacttctaatctccaggattagtggaggaattaatttctgttgttaagccgtccactgtgggaggccgacgcaggaggacttgcttgaggccaggagttcaaggccagcctggacaacataagttagcccctttttcttccccccttattaatttatataaaaagccccccaatctgtggtattttattatggcagccctagcaagctaatacagtggtttgagaggctgggagggttgaggggaagataaacttttaaaaagctcttatctttcatttcaatccagttaaaaatacttgctcagtgtaacaattttgcttctcaagcttccactcctaatattgttgtgccattaagcaatttagctaatcctgacattcccttagattccataatgttaggagcatttaatctgtattttacaagttaggaagcagaggatcagagatgggaagggacttagcccagggcccaaccatttaaccaggccccttctaacaaaaaacttttacaaatacatttatgtggaaatggggggggaaantctcccaagatcctcaccctctcccatccccaggaatggagccccatgtaatccaaagtgaaccttaaaaatagggacagtttccaacaagtccaggagattccacagcaactgatcaaagggagtcccagtcaaccgtgagcaagccgtgattatgatgaggaagcccccctctgctttaatcccacacaagggaacgtaacctgaagtaacctgatgttaaccaatctgctgtgtctactatgatgtttccttgttcatgatagtgctgctttacaaatgcagaccaatctatcatacctgacaagacttctgttttattttgtagacaggaatgctacccgagttcatgaatcgctaataaaagcccaattagatctttacataatttgttgagattttattctttgacattcttaaaggtttgggaaaattagaggtagaacataccgtgaggcagcaatctctgggttctggtcattaaaatatgaatttgctaattatacctatcccaacagggggatcgagactggggaccttgcgcttttctggactgacctgcttgattattgccctaagtgattgtctagtgtaggctgcccattggaatctctgccttctggctttaaaaatttttccagattggagtaaattgagctgactggttttgagctttgtaatgttaggggaccagcaatgagttcctctgatccatccaatcattagtagattaaatctttgttttaaacccatcacagtccactattcatccctttttaaaataaccatttaaaaattttctaccctgaattgcattttgaaagggatggttcctaggtaacacaaggtagaaaatttacatctcaaaggcagagaacttacatttcaggcctaaatattgttatttgccaagacagaaagttgatgctaagaagcccagttcagacaaaatggttgaaggtgagtttatttggactaatgctctcacctattgtaagaatttctactgattttcctttatagatacacgtttttacaaagagtttcaaaataactggctaaataccagaaacgcaaattttggagactgatttaattcaataggcggtcttttcaacttagcttctgtttcttaactagattactgagttcagggcagagcccattagcaaatagagcagacaaagggtttcctatttctggatgcagatggatagttctgaaaatgcaaatctgcttcacccaagggcctaatttttataaatattacctagctttctttttgcctttggagtaaaacagtaactaagtgaaaagattggcagattcaattttcttataaactagttgcttaaacttttcatttgccttctacgtgagctcttttaaagagacaaacatttttgaaatctttttagaagcttttgcacatcaataggtatccctaggagggcctgattcagaagccctcatttttaaactcaattcttagatgaacagtcttattcatctggaatgttccacataatggtcatcataattctaatttatctttagtaagatttcaccatttttgtaagtatttgcagcttctaggccctaacacatgtaaaaggtaaacatagccaggaaggtgaaatacacagttctttaaaaatttaagggatgcctggcccagggcgaggtggcttcacaccctgttaatcccaggcactttggggagggctgaggtcgggaggcccaggagtttgagaccagcctagcccaacatggtgaaaccccgtctctactaaaaatacaaaaattagatgggtgtggcagtgtggcctttaatccagctaccctcccaaagtgcctgggattataggtgtgagccaccatgcccagcctaaataattttttaaattccagtttttaattattctttgttaggatacagaaatgctttgtgtcctgcaatactgttaaatctccttattagttttagcagctttttttgtaaatcccttaggattttctatgtatgtgattgttatctgcaaataaaggcatgttttatttcttctt

SEQ ID NO: 110554 - DNA, 365 bp, Homo sapiens
tgggaaatgatacagtcttgatttggctccttccagcttctttttatttcctattttaaaaaatctttaaagtaaaatctttaaagggcacccacttttttcttcagtaaataatgtaaaaaagactgcattgacatggctacatcccccaggacccctcagttgtttagggctggactaaatggctggcgtcattgcttacaaacgtgtcttgaacttgatggagcttatgttgagaaataatgcttatatttttatcttttaattctgtgtttttccatgaactttctgaagtccccttgtactgggggattggattagtaaatctttgcgcatctactctatggaagtgcgctctgtgctat

SEQ ID NO: 110555 - DNA, 559 bp, Homo sapiens
atagttttgttttttgtttgtttggttttttttttttttgagtggagtcttgctctgtcgcccaggctggagtgcaatggtgctatctcagctttctgcaatcttggctcactgcaacctccgcctcccgggttcaagcatttctcctgcctcagcctcccgaatagctgggattacaggtgcatgccaccacaccagtctaatttttgtatttttagtagagacggggtttcaccatgttggtcagactggtctcgaactcctgacctcaggtgatctgctcaccttggcctcccaaagtactgggattacaggcatgagcccccgcacctggcctcttttgggtttcttgttttgggtaaagggccatttaatttttattctgtgattccacacagtcaagagcctcatggcgacacactgcaagattgtaacggaggtggctgcacccttaggtgtgagccatgatgtctgcgcaccgccagagtcatctcacgacccatttctcagactgtctcatcaccaagtgcaacgagactcagctcgttccgaatatggg

SEQ ID NO: 110556 - DNA, 639 bp, Homo sapiens
tgagacaaagtttcactcttgctgcctgggctgaagtgcaatggcacgatcttgggatcttggctcactgcaacctccacctcccaggttcaagcgattctcctgcctcagcctcctgagtagctgagaccacaggcctctgccaccacgcctggctaattttgtgtttttagtagagatggggtttctccatgctcgtcagggtgatcttgaactcctgaactcaggctatctgcatgcattgacctcctaaagtgttgggattataggcgcgagccaccgtgcctggccactaattttaaaactaattttcttgaagtccaaaaaagtctcaagaaggataaaaaatgattattatgcaaaaagtttatactgaaaaacatcagtataaaatgcaataaatggaaaaatgccatgtgtccttaaaaggagattaagtatcactatgatgtaccctctctgaaatatgcctacagttatattttatgaaatttacagtgcagtttgtttccctcactaaaattaagaaaaaggtactttttatcgtcagccttgcagcacttctctacaaaagctgcgaaatcatccataacagctttcagttgctcttttgttgccttgggcaaagtgtataactcg

SEQ ID NO: 110557 - DNA, 473 bp, Homo sapiens
cttcctcagatttgttgagtttctatttattgttcttttcaaacaccagctaattactatcatcaattttatttgctatttcattacacttctgcttttatttttattatttttgagacgattttattgagaagactttataatcttgctctgtcacccaggctggagtgcaatggcatgatcttggctcactgcaacctctgcctctcgggttcaagtgattcttctgccttagcttccccaagtaaccagaattacaggtgcacgccactacacctggctaatttttttatttctagtagaaacagggtttcatcatgttggcgaggctggtctcaaactcctgacctcaagtgattcacctgcctcggcctcccaaagtgctgggcatgagccactgcacccggagtctgcttttatttttaattccttctatttttattttgggagattttactttttctgcttctctg

SEQ ID NO: 110558 - DNA, 782 bp, Homo sapiens
ccatcaccacgccagggtaatttttgtatttttagtagggaaggtgtttcaccatgttggccagtctggtctcgaactcctgacctcgtgatccacccgcctcagcctcccaaagtgctgggattacatgtgtgagccaccacgcccggccccaaacgggtagatttcttttgtttttgttttttttttttgagacagagtcttgctcctgtcaccccaggctggagtgcagtggcgggatctcggctcactgccaagctccgccacccgggttcacgccattctcctgcctcagcctcccaagtagctgggaactacaggcgcccgctaccgacgcccggctaatttttttttgtatttttatagtagaagacggggtttcaccgtttttagccgggatggtctcgatctcctgacctcaggtgatccacccgcctcggcctcccaaaagtgctgggattacaggcgtgagccaccgcgcccggccaacttatatattttcaagattcacctccctctcaccaaaatatttaactacctgctgaatacgcctctgtactaggcacataatggaactaaaaaatgctcatgtccagtttttgtgttgagtgaacaatgctgcagaccctaataagattgggtacggatcggcatgcgcctgtagtcccagctactcaggagaattgcttgaacctaggaggtggaggttgcagtgagccgagatcgtgccactgcactccagtctgggcaacagagcgagactccatctcagaaaaaaaaaa

SEQ ID NO: 110559 - DNA, 377 bp, Homo sapiens
actctgtcacccaggctggactgcaggggcacaatcatgactcactgcagctccggctcctgggctctaaggattcttctatctcagcctcctgaaatagctgggactacaggggtgtgccacctcacccagctaatttttccaaaattccttttacagacacgggcctcactatgttaatcaggctgggctcaaactcctggcctcaaatgaccctcctgcctcgcctccctaacaactgggatacaggtgggagtcgcatgtcccacctacaggctatcttttattgttctttctccacatttttatgccaaagcatgcagtactttccacaataagctatattttcttgtatttattttgtggttttatatttt

SEQ ID NO: 110560 - DNA, 581 bp, Homo sapiens
tttcgtctcaggaggccaaccaagatccctgaaaagctaacagcgtggtcagccttcccacagacagtgcacccaccgtgggaggacacttcgccccccattgttaacgtccaccgcgccccaaaaatccccacagcgagcttccttccccttccctccccccatgtttgcaagtggagttccccactcgaagaagacagcacagttagcaaagtagaggctggtccctgggacactcgcaccccatgtttgtcaggaaagcccctgcggtcacacggccccatgaggaagcccagaggggcctgctggggctgatgaaggcccagggcagggcggcctgctcttcccataaatgacagctggcaaccaaagcccagagatggcagcctccacatgaggagtggcatctccatgaacggcttgtgttctcgcacagccccattgcgtagatgaggaaactgaagctcagagaggttcctgcccttgcccaaggccacacagccggatgagctagaaaggtgctaggggactgggaggtgggggagctgagacgctgtcccgctgctgccaggatgcggccg

SEQ ID NO: 110561 - DNA, 425 bp, Homo sapiens
  misc_feature (1)...(425): n = a,t,c or g
attcaccagctcgtgaccagtgagcggggcagcccagggccacccaaaccacagctgcctgtggcccataccctttgtgccctgggctgcctgtggcactccatccaccccttccaggaagcccagcttccacgctgtcccccttactccccgtggtggggctcaggggtccagcaggccctgcacggaccaggcttctgaggtggggctgtgtcaccattctcctcccacccccaaccgccaacactggacttcccccgggattgaccactacactgaccaggccccaggaggcccccaactcccagacgctttccacccctacccaagacccaagcaagggaacagaaaatccctggtccttagagacactgcccggacgcgtgggtcgatgcccaaaatccggatagnnnntccggaggtat

SEQ ID NO: 110562 - DNA, 366 bp, Homo sapiens
  misc_feature (1)...(366): n = a,t,c or g
gatagaccatgttttgtttattcattcatccattgatcgacatctgggctttttctacctttcggcgcttgtgaatagtgctgctatgtgtatttgtttgagtctctgttttcagttctttgggttgatgcaaaggtcatttccttttgcaccaacctagnnnnnnnnnnnnnnnnnnnnnnnnnnnnnnnnnnnnnnnnnnnnnnnnnnnnnnnnnnnnnnntgtaattcttaaaaggccatgccaactctaggactgagggtttaagagctaatccctgccttcttactcctcatcaactcccaccccagtgggtgccctccaacacacctgcctcgagaaccccctccccagctcagtgaccc

SEQ ID NO: 110563 - DNA, 451 bp, Homo sapiens
  misc_feature (1)...(451): n = a,t,c or g
gtttctctttgtcacccaggctatagtgcagtgacgcaatcatgtctcactgcagtttctaatggccggtcataagcaatcccacccaggttagcctcccgagtagctgggactataggtgcagccaccatgccctgctaatttttctattttttttttgtagagacaaggttttgccatgttgctcagttggtctgaaaatccagggccaagcaatctgcacgctactcccggccttaaaagcttttgtgcctgggcgtgggtggctcatgcctgtaaacaataaggtcagggatatcgaggaccagcctggaccaacatgggtggaaaccccattttttactaataaaagtacaaaaattaggccggatgtagtnggcgctgctgttaatncccagttactccgggaagagagggcaggagantttgctttgaacccgtnagatgggag

SEQ ID NO: 110564 - DNA, 888 bp, Homo sapiens
gggcctggagctgcacccgcttctgggtggacgcacttggcgagcggcgcgggatgcagacggctgcgaggcgctgggcacagttgctgtcccctttgacgatgatgacaagattgttgggggctacacctgtgaggagaattctctcccctaccaggtgtcccctgaattttggcttcccacttctccggtggctccctcatcagcgaaacagtgggtggtgtcagcaggtcactgcttacaagtcccgcatccaggtgagactgggagaggcacaacatcaaagtccctggaggggaattgaacagtttcatcaaatgcagccaagatcatccgccaccctaaatacaacaagggacacttttggacaatgacatcctgctgatcaagctctccgcaactgcgcgtcaatcaattcccgcggtgatccgccatctctcttgcccaccgccccttccaagcttgcttggcactgagtgccttcatctccggcttggggcaacactctgagttctggtgccgacttacccagacgaagctgaagtgcctggatgctccggtgctgacccaggctgagtgtaaagccgtcctaccctggaaagattaccaacagcatgttcttgtgtggtgcttccttgagggaggcaaggattcctgccagcgtgactctggtggcccctgtggtcttgcaacggacagctccaaggagttgtctcctggggcccatggctgtgccacagaagacacagggtctggagctcctacaccaaggtctacaactatgtggactggattaaggacaccatcagctgccaactgctaaagcccctggtccctctgcagtctctatacccaataaagtgaccctgctctcacaaaaaaaaaaaa

SEQ ID NO: 110565 - DNA, 567 bp, Homo sapiens
gaaaccccacaaatgtgaaaaatttggtaaattctttaacaagtcttcaaccctttctgcacataatataattcatactggagagaaaccccacaaatatgaagaatgtggtaatgcttttaaccaattctcaaatcttactaaacaaaattaatactgaaaatgttacaaaccagaaaaatgtgaaaatgattttaacaataaccttcaaatttttctaaacataaaggaaatcatactggtaagaaattataaaaatgtgaagaacgtgacatagcctttaaatggttgtcacacttgattgtaggtaagataattcatactggcagaaacttcccagaagtgtgaagaatatggcaaaactttaattcctataccttattgcacaggaaagcatttatacttcagaaaatgtcgtactgatatacagaatgtagaaaagccattaatatgtgcttacatcttattcaacattagagagttagtacttaataaaagcattataaatgcaattactgtcaaaactcagtataaggttttgttttagtgcgtgtttttgtttgctcg

SEQ ID NO: 110566 - DNA, 1153 bp, Homo sapiens
  misc_feature (1)...(1153): n = a,t,c or g
atggagtcttgctggagtgcagtggcacgactctctgctcactgcatcctctgcctcccaggttaagcgattctcctgcctcagcctcctgaggagctgggactacaggtgcacgccaccacaccctgctaatttttgtatttttagtagagacggggtttcaccatgttggccaggatggtcttgatctcctgaccttgtgatccacccgccttggcctcccaaagtgctgggattataggcgtgacccaccgcgcctggcctatacatcttttaattatattctatcccttttttcttttgatgttggcaaaagttaatatgcacagaatattgacctaagataagttttccatagttataagtggctactcatgaaatccaatgactaggaccctagaatgtcattttggctcctctactccttttgctcaatgtattcgtgaaagcatgactacaaaaggtgttaacttaaatacaacaacagtatctcagaagcaggactactgacgagaggaaaaatgtggtacagacttttaacctctggcttgctcccttttaatcaccaaacaggaaattcagaataagcagaaagtaggaccaagtgatgactcacctagaagaggcccagagtatcctgcctgtgggacatcatgacatcatcactgagtgtcgccacattcccngcccacacagggcttcatcgtaactgcttctagagatgggtattgtgaaggtgtggaaataaaaccctactgatttgtataaattttaatagttataaatataatactataactcgagaaaaggccatttctagagaacagattcatttgcttaattttccaaaattatgtctccatattacctgtttccatgacctgactgacctaaatggacaccccaaaatggttaagatgtaccttgacctagtttaccttatgcatctctttgcaagaatcagcccagccaacaatgtctgggatttttattgtatatgttatagaggtgagaaatgtaaaatatgaaaatgaatatgtttattttgtattgaaaaagatggttgaaaagatggttgtaagctattatagtataaacacatttttgctattaaaaatgctattcaaagcagttaaactgtaaaaaaaaaaaa

SEQ ID NO: 110567 - DNA, 452 bp, Homo sapiens
tgagacagtttcactctgttgctcaggctagaatgtaacagccttgatctcctgagctgaagcgttcctcccacctcagcctcctgggtaattgggactacgagtgcgtgccactatgactggctaatttttttaaatgatttttttgtagaaatggtctcgctatgttgcccagtctggtctcctggggctcaagcaatcctcctgccttggcctcccaaagtactagaattacaggcatgaggggtgagattgataaggaatacactagttaatcaatattaggcattaaattgggtttagggcggccaacatatgggggctaaattacttgctcattgccaaatttaaggagcacaattaaataaaagtgctaaaatcaaatttgatgaggaaaacagggtgatggaagtgttttcttctttatcttaattggagtggtggtgaagtgg

SEQ ID NO: 110568 - DNA, 1122 bp, Homo sapiens
  misc_feature (1)...(1122): n = a,t,c or g
gaaaacccattctcctgcctcagccttctgagtagctaagattacaggtgtgcgccaacacgtctggcttatttttttgtatttttagtagagatggagtttcaccatgttggtcaggtgggtctcaaactcctgacctcaagtgatccgcccatctcctcccaaagtgctggattgcaggcatgagcgcctagccaggaagctatcttntcttcttgagttatgaaactttgcaacagttgttcaaaatggtgtttgtccttcctatagctttccataattttcaaattaaattcctgtaatggctatataatgtatgttttaaaaggcaattctcttgactttggaaatatggaagactctgctttaacctagtcttgctcccattcccaggcccaatagagatcattccttttattgttagtgtgtgtatttttgttgggtgtgcttttaatgcatcccaagtatgcatcattttggataaaaaatacatccaaattaagatgttttaacacataggacaaacttggtgccctttttattgcccaaaaaaaaaanaaaaattgggttttccttcatgggatttctagaaacactgcctacactttatgaaaactacatagtattcacctgtgacaggtagagtttatcactattaattttatgaggctatttattactttccagtgcatccacttagaacaagctaagagtaaggctgctaactttaattccttgcctgattttattgtacagtgtgcacaagcacaatggtatgcttgtatatagaaactaaaaatactatgaagtacataagttccctatggcttatggagagttatttattaattaactttatggtagggctagtatgaatacctttttaacaattgtgtgctattacaacaatgaagattcaaatgactccgctttgaaggatgttttctctatatggtaaaatatatatgaagaagtcttgattacgtgaagatcacttgactcagaatacttcaatgtattttgttcacattaccactaagcatattatcagtaaactattaactgactgcacattatgtaatacgttgtactttttgttgaattcaccgaagttcttccatt

SEQ ID NO: 110569 - DNA, 992 bp, Homo sapiens
gagatagagtcttgctctgtcaccctggctggagtgcagtggtacaatcatggctcactgcagcctcaacctcgtggactcaagcgattctcccacctaagcctcaagagtaactgggactacaggcccaaccaccttttcttttttttttttttaaattagtagagacagggaatcttactatgtgacccagactggtcttcaattcctgggctcaagcgatcctctcgcctcagcctcccaaggtggggttatatgcgtgacgcgctgtgcccggctccaaagaacatttcttaagattggtggtgcaaggatcacaccttgagaaacactgatttaggccttcccacagtacaaagaaatgttgcctgcaccatccttacagcacacctgatgacttacaagaggtgctgctgaattcctcccagggaagcagccttaattcttctcagcaagacaaggaggcagccttcaggaaggacccaggagcttggtattagaggatggatcccaagtctgatggcaaattttagagtgctccagggaactctgaagttctgaatgatagggcaaaagggagtgattccatctttctaacctggcaggatagcaggtaccaagccagaaataaggaaaaagcaagctgaacttgtctttccctgacatttgaactgcctgctgttctcctcaccaaaaataaaaaagctggtctcaagacaacaaaagtagagaagtaaaggtaacagaggtctccagcctgcaggaagactcatataacctcagtccaaagttctttttatacaaagcacagatttttactggctaagtgctcacccaatgacccattttcagtatttgtttattcctgtatttcacccatgtttatcgagcacctactgagtgtgtggcccgtagtcaggaatgcccatcaattaccaggcagcaaggctattcttagttttctgatgtctatttaaagcggacgcgtgggt

SEQ ID NO: 110570 - DNA, 784 bp, Homo sapiens
  misc_feature (1)...(784): n = a,t,c or g
tcaaatgtttttccccctttgatccagtgctaagttcaggtcctaaatatctttggtaattttttaccccaatgatcttatactgtcagaggggatgttaaagtctccccctattattgcaaaggagtttaagtctctttgaaggtttttgaaaacctgctttttgaatatgggggcttttgtatagggggcatatatattttcgatagttaaatttttttggttaattgaaccttttcccttttttttttttcgagttggagtttcactcttgtcacccaggatggagtacagtggcatgatcttggctcagtgcaacctctgcctcctgggttcaagcaattctcctgcctcagcctcccaagtagctaggattacaggcatgtaccaccacacccaactaatttttgtatttttagtaaagatggggtttcaccatgttagccagggatggtcttgatctcctgacctcatgatctgcccgcctncaacctccccaaagtgcctgggtacattttaatatctggtagtgttcaggaactccagataacttcccctgccctgctcttcttttacacaagtttccaaaatattcttgtgtgttcatttttcaacaccaaccttacagccagtttatttagttaaaaaaaaaaaaatcagttagcatttaaatttagttttagactgacaagagagaaatgacatctttataaaaataattcttcttagtaaaggtcatagtttgtctctctgaagagttttaaagttttcttctcattggccc

SEQ ID NO: 110571 - DNA, 558 bp, Homo sapiens
gttgttgttgttgttggggtttggctcacccaggctcacccaggctcacccaggctgtggtgcagtggcttgaacatagctcactccaacctcaagctcctgggctcaagcgatcctcctgcctcagcctcttgggtagctaggactataggtgcatgccaccacacctggtttaattttttattttttgtagagacaaggagtgggcggcgggggcggggattcttgctttgcccaggctggtctccaactcctagcttcaagagatcctccctccttgttctcccaaagtgctgggattacaggcatgaaccaccgagccaccatacctgacctgagagttatctttcaattgacatcttgcttctgcatccttgtttcatcctctcatcccctcttatcggtggatatcacaaaacatcacactcagccagccatgaatactcacagatttctaatttccattagagcagtctgaggaatgaaggcaatactgggaagaaaaggctgtgcacccaagagagtttaaacttgacaaacctggatgccatcactctc

SEQ ID NO: 110572 - DNA, 606 bp, Homo sapiens
tttttttgagatggagtctcgctctgtcgcccaggctggagtgcagtggcgcaatctcggctcactgccagctctgtctcccaggttcacaccattctcctgtctcagcctccagagtagctgggactacaggcgtccgccaccacgcccggctaattttttgtatttttagtggagacggggtttaactgtgttagcaaggattgtctcgatctccttatctcgtgatctgccggcctcggtctcccaaagtgctgggattacaggcgtgacacgtgtacccagaccctaacttttcaaattttacaatggagagaaaagggaactattttaccaaattcaggtagctaaaattgatagaactatctttcctatggagaatgccctacaaagatacaacactatagcttactgttattacttgctccacaagcaatgttctttaatgaagcatggtgccacttcaaggaagtgataatccacatttttgaaagattctataaagaagtggtatcaagatctaaatgggagtctctcaatacaccttacaaattccctgatgtagttttgttgagtctaaaactaattgattggaaaatgtgatac

SEQ ID NO: 110573 - DNA, 964 bp, Homo sapiens
cgacttttttttttttttgagacggtgtctcactctgtcacccaggctagagtgcacctgagccatcttggctcactgcaacctctgcttcccacgttcaagcaattctcttgcctcagcctcccaggtagctgagattacaggcgcctgctactacacccagctaatttttgtattttcagtagagacagggtttcaccatgttggtcaggctggtctcgaactcctgacctcaggtgatccacccacctcggcctcccaaagtgctgggattacaggcataagcccaccggcatcaaggacttttataaaagtttttttgttttgttttgtttttttgagatggactcttcgcttctgtcacccagggcttggagtgcagtggcacgatctcggctcatggcaagttctgcctcccaggttcaacacccattctcctgcctgaaacctccccgagtagctgggactacaggcgcctgcccaccatgcctagctaatttttttttgttttgtattttttagttaaagatggggtttcaccatgttggtcaggttggtcctgaactcctgacctcatgatccacccaccttggcctcccaaagtgctgggattacaggttgtgagccaccgtgcctggccaacccacccaaattgtgtaccctacaccatcctagtgcttgggagccaacacccactcacaggaggctaagggcaagtttaggtaactcttaacaccacgaattagttgcctgctggcaaactttcaaactccaaggcctgaaatttctgggttgggagttcaccttcccagatgggacttcaggggatttcatttcaccccccttcattccagtggttcacggagcctctgtgaggtgcaggcctggagaggagccctgtggcctcagcaaagggcaggcaggctggtgagcacccaacctctggatcgaggggactcaatta

SEQ ID NO: 110574 - DNA, 560 bp, Homo sapiens
gagacaggtttttcctctgttacctaggctggtgtgcaatcgcataatcatagctcactacagccccttcaactcctggggcacaagtgatcctcctgcctcagttttccaggtagctgagactacagccacacaccaaaattagccatgcctggctgattttatttttttgtagaaacagggtcttgctatgttgcccaggctagtcttgaactcttggccctccaagtggatcctccctgctttggctcttaaagtgggtaggattatagggcttaagcccactgcacccaagcccaaaagaatttttaaatataaatacagataagtacgtatatttataggacaagacaagatgagggaaaagataccttgggaagtgatccaagactaataaaaacaaatcagcagttcaacgctcatttatagtgctggtagtgggtatcactaattaactgcacactcttacttagccagggtagagcctcacaatgcttcccaacactaacatgccaagcagatgctaccaactgatgtaaaatttcctgactgatatatat

SEQ ID NO: 110575 - DNA, 380 bp, Homo sapiens
  misc_feature (1)...(380): n = a,t,c or g
gtgaggttgagcagcttttcacatgcatatgaccatgtggatatcctcttctgtgaactacctgtttaagtctgaagcagatactatttggtagtatcaactaaaactgaatataatacataccctaaatttagcaattttgtacctgtttttttcttacatacctgtaatcccagcactttggggggccgaggcgagcagatcacctgaggtcggtagttcgagaccaacctgaccaacatggagaaaccctctactaaaaatacaaaattagccaggcgtggtttcgcatgcctgtaaatcccagttacttggggaggctgaggaggggagaatcactttgaacccagggngggcggaggttggcagttgagctgagg

SEQ ID NO: 110576 - DNA, 1016 bp, Homo sapiens
ctgcagctaaataacaaattcagcaaagttatagggagcgagatcaacacccaaaaatcagttgtttccatataccagcaaagaaatttttaaaaaaagaaaaaaaaaatagttcagtttgcaacatttagaagagtaaaacacctaggaatatatttaaccaaaaaattgaaagatttatccactgaaaactaaaaaacattgctgagaggaaattaaagaaaatctaataaatgggaaaggacatcccatattcatgggattgggaaaacttttaaggataggcaatatttccccaaaacaatctacagattcaagtggtctgtttgcagaaataaaaagccaaccttcaaattgatacggaactgtaaggggcctcaaaaagccaaaacaatattgaaaaacaaaagcaaagctgagaggacttacactttccaaattcagaagttactacaaagctacagtaatcaacaagcatagtgctggcaaaaagacagacatataaaccaatggaatagaattgagagcccataaataaatccaaatatctatggcaaattaatttttgacaggagtaccacgaccattcaatggagaaagaagagtaccttcaacaaatcatactagaacatttgtataatggccatggtaaaaaaaaatgaagtgggacccccatataaaataattaactcatatataataattaactcatggatcaaggacctcaatgtaaggggtaagattggcaaaattccttagaagcaaacatagaagtagatctgcatttccctcagatttgacaatggattgttagatttgacacccaaaagcactagtaacaaaatttaaaaatagattagattctgcaaaaatgtaaagcttttttgcattaaaaaacattttcagccaggtgcagtggctcatgcctgtaatcccagaactttgggaggccacagcataaggcttgcttgagcccaggaatttgagaccagcatgggcaatatagtgagaccttg

SEQ ID NO: 110577 - DNA, 473 bp, Homo sapiens
gagacaaggtcttgctttgtcctccaggctggagtgcagtggtgcaatagttcactgcagcctcaacctcctaagctcaacaaatcatcctgcctcagcctcttgagtaactgggaccacaggcacatgccaccactcccacctaattttctgtaaaggcagggtcttactatattgcctaggctgttccttgaacttctggcctcaagtgatcttctcactttggcctcccaaagtgctgggattaacaggcatgagccactgcacctgggcaagaaataaggtttaatttattggtgacagctgtctgtccagttgggccttgcagagagctgctgatgtgagtggggttcagggccagggttgagaagccgtgatccttacgagctcctctgcacctccaccttctggaaaagggcagggtccccacagttcagattttttgccggctctcggtgggacctgactcaaca

SEQ ID NO: 110578 - DNA, 433 bp, Homo sapiens
tgaggcagggtctcggtttttcatacaggctggagtgcagtggtgcgaccacagcccacgagagccttgatttctttggctcatgtgatccttcagcctcctaagtagctgggaccacaggtgctcaccaccacgcatctggctaatttcttatttttaaagagacctggtctcactgtgttgccctggctgctctcaaactcctgggctcaagcgatccttccgctttggccaccaaaaacgttgggattacaggcgctagtcatcatgcccagcccacagtacatgttctataattactgtcccacgtgatatttaaagccagtcttccaaattaatatggtaggatgaaaacatgttttaaagatttttagcctaagctttcactctgccgcccagactggagtgcagcggcacgatcatagcgcactgc

SEQ ID NO: 110579 - DNA, 369 bp, Homo sapiens
tttttttgagacagagttttgctcttgttgcccaggctggagtgcaatggcgtgatcttggctcaccacaacctccgcctcgcaggttcaagcttttctcctgcctcagcctcccaagtagcagagttcacaggtatgtaccaccaagcctgactaattttttttgtatttttaatagagacggggtttctccatgttgggtcaggctggtctcgaactcccctcctcaggtgatgcgcccaccacagcctcccaaagtgctgggattacaggtgtgagtcacagtgcccggcccagattcattaattcctaaggtgaaagatactttctaaattgactaatttggttgcagtggatggtttgtcgacg

SEQ ID NO: 110580 - DNA, 516 bp, Homo sapiens
  misc_feature (1)...(516): n = a,t,c or g
tttttttttggagacgagtttttctcttgtcacccaggctggagtgcagtggcaganncgtaggtcactcaaggtatcctcctgcctcagcctcctgagtagctaggactatagggatgtcccatcacacccggctaattttttttaatgttttgtatgttttatgattttttaataatattatcttattatccttttaatgtctgtggaattagtagtaatgccacctctttcattctcattattagttatttgtgtttccacatttttttctgaccaccctaggttacaatttattaattttattgttactattttcagagaaccaactgttggtttcgccaactttatgaatttatttgttcatactctatagcactgatatccactctattatttcttctgcttactctaggtacattttgctatccttatctaataaagaagcaatatcactgattttaagccattcaccatttttaatacaaacatttactgtattataaataacaggta

SEQ ID NO: 110581 - DNA, 491 bp, Homo sapiens
  misc_feature (1)...(491): n = a,t,c or g
agacaaggtctcaccctgttgtctgggttgtagtgcagtggtgggaacacagctcaccgcagctctatctcccgggctcaagtgatcctcccacctcagcctcccgagtagctgggactacaggcatgcgccaccaggccagctaatttttgtattttttgtaaagatggggttttgccatgttggcaggctgggtcttgnacttctggtctaaagccatctgcctgcctcnncctctcaaagtgctgggattagaggaggcgagccactacgcctggccaagaaaatttgattaaccaacagaatgatgtcacttgccaagtcagtccagcctagtggaaagtgtgtttaggcttaggtggaagtggtggagagaagtccctgccatgcagaggggacagtgacccgagccggaagcaggggacagggcagatgggagacccctgtcatcccaaaacccacctgcctccccttggggtgtgttttttgtc

SEQ ID NO: 110582 - DNA, 571 bp, Homo sapiens
ttatttttgagacagagtcttgctctatcgcccaggctagagtgcaatggcacgatctcggctcactgcaacctctgcctcccaggttcatgcaattctcctgcctcagcctccccaagtagttcggattacaggtgcctgccaccaaacccaagctaatttttgtattttttttagagatggggtttcgtcatgtgtgtcaagctgatcctggacttatgacggtcaggtgatctggcccgctttggcctccccaagtgctgggattacaggcataagccactgcgcccagcctcccattttttcaatctcctcagttcttctattctcaacgttttttgacttcacctttcgtttccctgatttgattttaattctccttcatgagtttcaaagttgaactcaattggcctgttgctatttcattgtttatctccgattctggttgggctactgtatatgtgatggccttcttttatctctggaaaacaaggactctaggccattgtttggaaatcctcgagttttcccgttgggagatccatttcaggtattagatttatcgtcgacc

SEQ ID NO: 110583 - DNA, 2665 bp, Homo sapiens
ggcacgagggcgttagcccgcggccaggcagccgggaggagcggcgcgcgctcggacctctcccgccctgctcgttcgctctccagcttgggatggccggctacctgcgggtcgtgcgctcgctctgcagagcctcaggctcgcggccggcctgggcgccggcggccctgacagcccccacctcgcaagagcagccgcggcgccactatgccgacaaaaggatcaaggtggcgaagcccgtggtggagatggatggtgatgagatgacccgtattatctggcagttcatcaaggagaagctcatcctgccccacgtggacatccagctaaagtattttgacctcgggctcccaaaccgtgaccatgactgatgaccaggtcaccattgactctgcactggccacccagaagtacagtgtggctgtcaagtgtgccaccatcacccctgatgaggcccgtgtggaagagttcaagctgaagaagatgtggaaaagtcccaatggaactatccggaacatcctggggggggactgtcttccgggagcccatcatctggcaaaaacatcccacggcttagtccctggctggaccaagcccatcaccattggcaggcacgcccatgtttgaccagtacaaggccacagactttgtggcagaccgggccggcactttcaaaatggtcttcacccctaaaagatggcagtggtgtcaaggagtgggaagtgtacaacttccccgaaggcggcgtgggcatgggcatgtacaacacctgacgagtccatctcaggatttgcgcacagcttgcttccagtatgccatccagaaggaaatgggccgctgttacatgaggcaccaaggaacaccatactgaaaagcctacggatgggcgttttcaaggacatctttcccaggagatcttttgacaagcactattaagaccgactttcgacaaagaataagatctgggtatgagcacccggctcattgaatgacattgttggcctcaggtcctcaagtcttcgggtggctttgtgtgggcctgcaagaactatgacggagatgtgcagtcagacatcctggcccaggggctttggctccctttggcctgatgacgtcgttcctggtctgcccctgatgggaagacgattgaggctgagccctgctcatgggaccgtcaccccgccacctatcggggagcaccagaaagggccgggccacccagcaccaaccctcatcgccaagcatttttgcctggacacgtggcctggaggcaccgggggaaagcttggatgggaaccaaagaccttcatcaaggttttgccccagattgctggaagaaaggtttgccttggagacggtggaagagtggaagccatgaccaaaggacctggcggggctgcaatttcacggcctcaagccaatgtgaaagctgcaacgaagcacttccttgaacaccaccggaatttcctcgacacccatcaaggagcaaccctggaaaagagcccctgggcaggcagtaaggggaggccgccaacccatggcttgcagtgggaggggcccagggctgagcccggcgggtcctcctgaagcgcggcagagggtgagcctcacagccccctctctggaggcctttctagggggatgtttttttataagccagatgttttctacaagcatatgtgtggttccccctcttggggacgtgaggcaggagcagtgcgttttacctcagccagtcatgtatgttttgcatactgtaatttatatttgcccttggaacacatggtgccaatatttagctactaaaaaagctcttcacaaaattgtctgctgtgtttgtccctgaggggaggaggtagtgggaccctgaggcagaggccctgctagagctggcaggttcccctggggcagaccagagcacctcaggaaggggctgccacggcagggaagggaccaggcagccctgggagcccgcattccacaggggcccactgcggagttctcggacactcagggcacaagcctgtgggttccctggaattttgtagcatgatccagtttctgtgtccagttctccattctgagagtcaatcagttcctgataggttgtcattgatttttttcttcgttggttttaaccttctaaacatctccaggccactttcttagcctttttgtaggtactaaaaagaggtcctacccacacctgcctcacacttctcctttccaaggctgcatgagtttggaggggcttgggtgtgtgtgaacaagggccctgcattgtctaggcatgcagttcacaggcttgggttcactttcaccatgcattggcaaaactagaaaagtaagattgtgacaaattgttctcggccgggcacagtggcgcacgcctataatccctgtactttggggaggctgaggtgggtggatcacttgagggccaggagttcgagatcagcctggtcaacatggtgaaaccccatctctactcaaaatacaaaaattagccaggcgtggtgatgcgcacctgcagtcccagtctactcgggaggctgaggcaggaaaatggcttgaacctgggagggcagaggttgcagtgagccgagactgcaccactgcactccagaataggatgacagagcaagactctgtctcaaaaaaaaaa

SEQ ID NO: 110584 - DNA, 388 bp, Homo sapiens
  misc_feature (1)...(388): n = a,t,c or g
aaaaaaggaagttaagaaaattctatttacaatagaatcaaaaagaataaaacacttaggtaaaagatgtttacactgaaaactacaaaacactgctgaaagaaattaaaggagacataaatagaaagacattctatgttcatagagtggaaaatgtaatattgttaaaatgttcatattatcaaagatgattcacagattcagtgcaatcccagtcaaaatcccagtggcannnnnnnnnnnnnnnnnngcnnnnnnnnnnnnnnnntcttaaatttctttgggacccccaagggcccccaaagagccaaaacggttttnnnnnnnnnnnnnnnngccccggcccccatgtttcttgatttaaaagggggatacaaccgggccatag

SEQ ID NO: 110585 - DNA, 1857 bp, Homo sapiens
acggacaaacaatctctgctcgcctccaagtactagcttacagcactgcaacaaccctgctaaattttatattagccgttctcgaactcctgacctgtgatttgccggcctctgcttcccaaagtgctgggattacagcgtgagccaccacacctggccttttttcttttttcagaccgagtctcggtctgtcacccaggctggagtgcagtgatgcaatctcagctcactgcaaccgctgcctcccgggctcaagcaattctcccgcctcagcctcccaagcagctgggactacaggcacatgccaccacgcccggctagctttgtgtttttagtagagacggggtttcaccatgctggccaggctggtctggaactcctgacctcatgtgatccgcccatctcggcctcccaaaatgctgggattacaggctgagtcaccgagtctggccccccaccacccccgtttgtttttttttgagacaaagtctggctctgtcactcaggctggagtgcagtggcacaatcccacctcacagcaacctctgcctcccgggttcaagcaactctcccgcctcagcctctcgagtagctgggattagaggtatgcaccatcatgcctggctaacatttatttttagtagagacagggcttctccatgttggtcaggctggtcctgaactcccgacctcaggtgattcacccgcctcaccatcccaaagtgctgggattacagaggtaaaccactgagcccaactggaactgtgattttgatagtacccacaaggcaggattctcttaaaaacagctatgccaccatgtattattgtctatgaagttatctccaacactcagcttgctgagagcctcagcatttcaagattgtgcaggactggccaggcacagtgactcatgcctgtcatcccagcactttgggaggccgaggcgggcggatcacgaggtcaggagattgagaccagcctggctgacacggtgaaacccttgtctccactaaatacacaaaaaaaattaccgggctgtggtggcaggcgcctgtagtcccagctactcaggaggctgaggcaggagaatggcgtgaacccgggaggtggagcttgcagtgagctgagactgcgccacagcactccagcctgggtgacagagtgagactctgtcccaaaaacaaaaaaacaaaattagccgggcatggtgtcgggcacctgtaatcccagctacgtgggaagctgaggcagaatggcttgaacctcggagatggaagtagcgttgagccgttaccacaccattgcagtcctgcctgggtgacaagagactccatctcaaagaaaaaaaaaaatcaaggagtaaacttgttggtctttgaattgtaactttggagaacctccccgccactaccgaattccccaaagtccagtgtaccatgtaggatttcacttgatccgcggaggaaaccatgccccaattactaggttaaaatctattaagtgccgggcgcggtggctcacacctgtaatcccagcactttgggaggctgagggtggatcacctgaggtgaggagttcgagaccagcctgaccaacacagtgaaaccccgcctctactaaaaatacaaaaattagctgggcatggtggcggctgcctgtaatcccagctacttgggaggctgaggcaggagaatcgcttgaacccaggaggcggaggtggcagtgagctgagattgcgccactgcactccagcgtgggggacagagcaagactccgtctcaaaaaaaataaaaaaataaaaataaaaaactattaagtatcaggagtgaaaatacatccaagagtgaatgaagc

SEQ ID NO: 110586 - DNA, 379 bp, Homo sapiens
caacttttgcaccatgatttactttttccatgtaatctgttctttgccatctttgcctagggatagtgaacttcctcccaaagtagggaactggggaactcttttgatgcctggaggacctcatagatggattaacctctcaaaaacaagggcaagacaaaaggtggaagcaacccaagtatcgaatgaatgaatggatatacaaaatgtggcatataaacacaatgggacattattcaatttttttaaaggaaggaaattgtgacacatgctataacatggataaacattgaggacattatgctaagtgaaataagccagtcacagaaagacaaatacgtgatttcacttatatgaggttactagagtagacaacttc

SEQ ID NO: 110587 - DNA, 1226 bp, Homo sapiens
ttttttttttttgagaacagggtcttgctctgttgcccaggttggagtgcagtggctcgatcacagctcacttcagcctccacctcctggacttaagagattctcccacctcagcctgttgagtagctgggactacagatgtgcatgccaccaacactctgctaatttttctactttttatagagatgagatttcaccaagttgcccaggctggtctcgaacctctgggctcaaagaattagggctcaagcagttctcccacctcagcctcctgaagtggtgggattacagggccaagaaaagatagtctggaaaagttacttgctaaaaggcttgattaaactaaatgtgtcctctttgttaacctttgattgtttgattatatttttcttaaaatttatctttttaaaataattttttaaaaattttaatagatatgaggtctctctctgttgcacaagctggtctcgaactcctgaactcaggtaatcctctcacctcagcctcccgaagtgctaggattgcagatgtgagccaccacacccagccaaaatttcttaactacatataaattatcttaatgatctagggtattttgttagggggaatacatacagtcagggatagggataagagggggaagttaatgagtgggtttacttaaatatattaaggacaaacatttcaagtaaaaatttcaggagaaaatttttttttaggtttctaagaaatatatttgtggatgtggaatttttctgtcagatgacgtaagagcaaagttgaagatagcctaatacctggggattccatagggagggtaattttttatttaaaatgagcaagaaggacccctagccttttattgtggtcttggaaactcattccccccacccagtatcattccttgaagaaatggttggttcctaggtctggggcaggaaatatatgagataagctgaaacatcttgactatcagcaaagattttatcaaacgatgctagggttgtgtcagaaggactcagcagccaactgaagacgttcccactggccaaaatagggcacattgagtatctgtaaagataactgcatggatcaaaacacatcaaaagctgggcacagtggctcatacctataatcccagcactttgggaatctgaggcaggtgtgttgcttgagtccaggagtttgagaccagcctgggaaacaatggtgagaccccctctctt

SEQ ID NO: 110588 - DNA, 802 bp, Homo sapiens
  misc_feature (1)...(802): n = a,t,c or g
tttttaactacaaaaataaacatacggattgttaattctttgtatttttcttgcctgtnccctgtgggaaaagctgccattttcaatttgaaattagtccacaaatctataatatagttcttctttaggaaaagcattagaaaattggcatggataagattttgaaaacacctcaaatatgaggtttaatataatactacaaaacttgtgccactttatctgtgtaaaatgatctttatacttttctgttatgtttatgttttaagacagtgtctcgctatgttgcccaggctggaatgcagtggcacaaccacagctcactgaagtcttgacctcccagggctcaagtgatcctcccacctcagccttccaagtagctggggattacagatgcgtaccacaacgctcagcttactttttattttttgtaggaggaaggggttctttcctattttggcttaggctggtcttgagcaactaggttcaaggaatcatcttgccttggcctcccacctaagtgttgggattataggtgtgagcctacccacaccccagccctgttttaacagccagcctatagcaatggttttatattttgttaataagttatcctgtattgcctatagtaccaagaagagtaaacaaattgtattattatgttaaaatattggttatacaaatagcattcaatactaattattacagcaaaatagtctacaacagttacactggtttactcagtagattaagacaaaaatttttagcctgggtgacaaagtcaagaccccatctctaaaaaata

SEQ ID NO: 110589 - DNA, 397 bp, Homo sapiens
ggctggagtgtgcagttggtgatctcagctcactgccacctccacctcccaggttcaagcagttgtcccacctcagcctctgaagtaactaagactacaggcatgtaccacaatgcctggctaatttttttttgtatttttactagagataaggtttcaccatgattgtcaggctggtctcgaactcctggtctcaagtgatctgcctgcctcagcctcccaaagtgctaggatcacagttgtgagccactgcatccggcctgtttttgtagatttttaagagatccttatatacataggacatttggttgtgtctatctctgaattataaattcttctaatttaccccttgctgttgaactttgcttacaatacgttgtgtaatgcagtttttaaa

SEQ ID NO: 110590 - DNA, 746 bp, Homo sapiens
ctttctttctttctttctctctctttctttctctctctcttctttcctttcctttccttccttccttcctatttttctttttttttttttgaaacagattcttgctctgtcccccaggctggagtgcagtggcgtgatctcggctcactgcagcctccacctcccaggttcatgtgattctctggcctcagcctccggagtagctgggatcataggcgctcgctaccacggctggctaatttttgtatttttaatagagacagggtttcaccatgttggccaggctggtctcaaactcctgacctcaagtgatccgcccgccttggccccccaaagtgctgtgattacaggcgtgagccgccacgcccagcctaataagggttttaaagataattagtgtgtaggtctgtaggcttatgatggtaaccacaagttgttaatggcattgtgaaaagtttttagttgccgcctttatgggtggatgcctgaattacattttgatttgatacttataaaaagaaaaagtatttcttcagccttaaaaaattgtttaaaagtttgtgatcatattgtctaccatgtagccagctttcaattatatgtaagagggactttttgacatttacaaataatactttgaggtagatatctgaaagcaccagcacttggaaggtgttcagaagtaacaaattataaaatgagctaacaaacgaaaggcaaaataaaaccgtaaagcaagcaaaaaa

SEQ ID NO: 110591 - DNA, 870 bp, Homo sapiens
aaacaagcgggttcagtactcagtgtgttcctytatcccttgtagcatttgggataactattaaacactgcaaatataaagtggttttggttttgttttgttttgttttttttaattggtgatcattttaataataccgtccatgcataaatgttagagataccaggagggaraggaaaatattaaatagtaaaaggtccaaggcatggtttcacttgcaatttaaggaaattttacctttctcatcaataatagaacagatttcaccacccctgacccattctaatcaccattttaatggccatactctttgctgtattctagtacagagaggtggggagccttttttgtagcaaaggctgtgacacattgtgaaatatcaaaaaggtgtcacgtataaagaccagcttaggctgggcatggtggctcacacctggtaatcacagtgctttggaaggctgaggcaggaggattgcttgaggccaggggtttgagaccagcctgggtaacatcgtgagaccacatttctgcrraratgaaatacaaaacttagccaggtgtagtggcatatagcctgtagtcccagctacttgggaggctgaagcaggaagatcacttaagaccaggagtttaagactgcagtgagccattattgtgccactacatgccagcctgggcaacagtgagatcccatctctaaaaataatttaaagaccagcttaggccaggtacagtggcacacacctgtaatcccagctactcgggaggccaaggcaaaggaattgcttgarcctgggaggttgcagggagccaagactgcgccactgcattccacattccagcctgggcaacagagggagactctctctc

SEQ ID NO: 110592 - DNA, 655 bp, Homo sapiens
agcggccgctcgcgatgctagaactaggcgattccctgcttcagcctcccaggtagctgggatcacaggtgcacccgccaccatgcccagccaatttttgtatttttaatagaaatggggtttcactgtgttggccaggatggtcttgaactcctgacctcaggccatccacctgccttggcctaccaaagtgctgggattacaggcgtgagccaccacaaatcacgtaacttttatatgtactgagaaaacaagcgtgagccaaaaatcatgtaacttttatatgcactgagaaaccaaataatttgtgtgatttgctttattgtgatgttagtccattgaggtggtttgaaaccgaacttgccatatctccaagatacgcttgtattcaagaaccatttgttgaaaagactattctttttctatcgaatcatctttgtacctttttccataacttagtgaccttatctatgtgagtctctttctggattatgtattctttttttcgatcttggattcaatttgctaatatctcgttgcgcatttttgtgtctgtgctcaggctgttattggtctgtagtttcttagtacggtctttggttctagtatcgggatgctggcctcatagaatgggttgagtgctctctctcttcag

SEQ ID NO: 110593 - DNA, 960 bp, Homo sapiens
tcacagacaaggttttgcccaggctggtctcaaactcctggactcaagcaatcttcttgcctcagcatcccaaaatgctgggattacaggagtgaagccaccgcacccggcttgccaaatcatttctatcagcactctcaccatagcttccctgctcaatggcctatggtatttcccatggtctgacacagaaacttccaattctgcctgataagactgatccaaccatatttttgacatcaatctaccacacaccctgtgttctcactgggcagagaacatcaatatgtataagagaacccatacaaatataatttgttgtttttaagttatagaaatgtcatgttgttttcttttctcttttctttattttcagacggagttttgctcttgtcgccccaggctggagtgcaaatggcgccatcttggctcactgcaacctccgcctccctgggttcaagcgattctcctgcctcagcctcccgagtagctgggattacaggcatgcaccaccatgcccagctaatttttgtatttttagtagagatggggtttcaccacattggccaaggctggtctcaaactcctgacctcaagtgatctgcacccccgcttggcctcccaaagtgtgtgagccactgtgcccagcccagagtttctatcttttgatggtaccttttgaaggagcagctggagagggcaggatcaaaattaaatcacatgaaagtgtactcccctccgcctgctccttataaggaaccccttatgactagaacccaagaccagtacccacagcctgaaagggagatttcagacaaccctaccataggaagtagtgaagaaaccttaatttctaatctcctaggtgggatacagtgagggattccatttgtggggcaatggggggatgctgggggagttccctcccctcacagactagagacggcacctaagattctg

SEQ ID NO: 110594 - DNA, 597 bp, Homo sapiens
  misc_feature (1)...(597): n = a,t,c or g
ttgcgaaagggtctcactctgtcacccggactggaggtgcaggtagcatgttcacagcttcactgcagcctcgaccgcctcagggtcaggtgatcctcccacctcagccttccacaggcacgcaccaccatgactggctaacttttgtattttttgtagagatgggttttaccatgttgccgaggctggtnttgaactcctggggctcaagtggatcctggccagccttggcctgcccaaagtgtgtttttaatgtcctcaaaatgagaattcctcacgttagcaggtcacttggggtgaacaagatgctttcattctacatcacggtgtctgggtgtccccagggacagctgcgctgaggaaccgcagcagtggggaaaggaaagggattgaaaggggtcctatatctgtccccagtcgctttctacatctccatcaggacttttcacatttctgttagtaattctaagaatttattctgagttgtaattccggttgttctattctacagtatacctttgaattttgattacacaaaaaaccttgttatccctgtggtgagccatatataccttacggtttcccaaacaaaccccc

SEQ ID NO: 110595 - DNA, 528 bp, Homo sapiens
  misc_feature (1)...(528): n = a,t,c or g
ataaagtacaaatattttcccccattctacaggttgtgccttcactctgttggctggttcgcttgctgtgcacaagccttttagtttgacatagtccctttgtctatgttttttttgtttaaatttgagacagagtctttctctgtcacccaggctggagtgcagtggtgtgatcacagcttactcagcttcaacctcccggcctcaggcggtttccccacctcagcctctcaagtagctgggaccacgggcgtgacacccatggttggctgatttttccaattttttgtagagatgaagtctccttctgttgcctaggcttgttctcaaactcctgggctcaagcgatcctcctgcctcagccttccagagtgccatgatttacattcatgnaggccaccaaggcntgggcctcaagagtttttcattnattgatttntcagttttnattccntgtgatctnaggaagacaattgatatggattttgantttttaaggaattttttgggcaggnacagtgggtcaag

SEQ ID NO: 110596 - DNA, 403 bp, Homo sapiens
  misc_feature (1)...(403): n = a,t,c or g
cggcacgagtacacatacacacatgcgtgcacacaacaacacttaagggtgggggacccaaaatatcttcaaactaccatattattactctccttgatttcactgccaaatttatgttaggaagcatctgtaaggggttcacagtgaccagtcctgtaatcccagcacttaaggccgtgnaagtggatcagttgagcccgggagtttgagatgagccttgnaacatggcgaaaccctgtctctacaaaaagtagaaaaattggctaggtgcggtagtgcatgcctgtagtcccagctactctggaggcagaggtgggaggatcacataagcccagagaggtcaaggctgcagtgagctgtgattgcaccactgcacaccagcctgggtnacagaatgagacac

SEQ ID NO: 110597 - DNA, 653 bp, Homo sapiens
aacattttattccatttacctcagatgtttttatttttttaaggaaactttatgtgtacagttgacaccctctcttattccttgcagaagcaagcactaaatggaagttgatatgtatcctttccatttatgtatttatgttttgttataaatttatatatgttaataatgctgtacattattctctgtacatgtacatgctgtaacatatcactctgtagtgacagaaaatggaatactttcaaaccttcattagtatcaaatatatatacatacacaaacatatatatgtatgtacatatatttattttgtttgtttttttcccccgagacagggtcactcaggctggattgcagtggtgtgatcttagctccctgcagccttgaactcctgggctcaaaggatcgtcctccttagcctcctgagtagctgggattacaggcgtgtgacaccatacctggctaatttttaaattttttttgtagagacatcatctcattatgttgcccagactgatcttgaacttctggactcaagcaatcctcctgccttggcctctcgaagtgttgtgaaggttaaatgagttaatacataaagtgatctgaatactgcctgacacaaagaaagcactcaataaatagtaacttttaaa

SEQ ID NO: 110598 - DNA, 360 bp, Homo sapiens
atacaaatacctttattttgcttttaaacatatctaccagtaaacatgtgagtgtgtaggttgctcaagtccgggagaggaaaggttacagaagacatataacaaatattcacaagaaatcatgatgggaataatatcttttcttctttttttgagacaaagtctcgctctgtcgcccaagctggagtgcaacagcatgataatcagctcagggcaacctccacctcccgggttcaagcaagtctcctgtctcagcctcccgagtagctgggactatgggcgcccgccaccacgcccggctaatttttgtatttttagtagagacggggtttcaccatattggtcaggctggtcttgaac

SEQ ID NO: 110599 - DNA, 458 bp, Homo sapiens
ttttttttttgcgatggtgtctcgctctgttgccaggctggagtacagtggcgcgatctcggctcattgcaacctctgcctcctgggttcaagtgattctcctgccttagcctgctgagtagctgggactacacacacgtgccactgcacccagctaattttggtattgttagtagagacgtggtttcaccatgttggccaggatggcctcaatctcctgacctcgtgatctgcccccctcagcttcccaaagtgctgggattacaggcatgagccaccgcacctggctggccaatttgatttttaagtatcctatcaattatttaggtctcagatggtacatcacctctcaggaagcattccctaaccatttagcaggtcaggttagttcctcttgcagcataatcccacatcacccaatgcttccccaatatgtagttacttgcttatttaaatgt

SEQ ID NO: 110600 - DNA, 393 bp, Homo sapiens
attttttgtggagatggggtctcaccatattgtccaggctggtctcaaaccctggccacaaccaacctttctgccttggcctcccagagtgctgggattacaggcatgggccaccacacccagcccctgaagctatcttttaaaaaaatttttactagcacttaggtgatttctgctttgacctaattggtactctccttgcaaaatttgccagtgaaaaaaacttactaatgtctgattttccatgagatgttctccatatagttacatatcatatgtaattactacattcaatattattggacataacaagggtatggtgccgtcttgtttggggagtttgacattgaggcgaagatgcttcctggatgggtgcggtggctcacgtctgta

SEQ ID NO: 110601 - DNA, 498 bp, Homo sapiens
cttttttttttttttgttgacatggagtctcgctcttgttgcccagtctgtagtacagtggcacgatctcggctcattgcagcctctgcctcccgggttcaagtgattctcctgcctcagccccccaagtagctgggactacaggtgcataccaccatgcccaactaattttgtatttttggtagagacggggtttctccatgttggcccaggcttgtctcgaactcccgacctcaagtgatcagcccgccttggcctcccaaagtgctgggattacaggtgtgaggcaccgctccctggccaagaccaatatttcttgacgctgacttcaggagctagcacagaactggttggagcccagctaaacttaaaatgcacagccaagggcagcaaagccttctatgtttacagagccaaaaggatgccgaaggccctggaagttgaaaatcaagactggctgctgtaaagcagaccatctcagacgtattctcattcctg

SEQ ID NO: 110602 - DNA, 375 bp, Homo sapiens
  misc_feature (1)...(375): n = a,t,c or g
aatctatgaatgtgggatatttttgcatttatttgtgactttaatttcttatgtcaatgttttacagttttcagtgtagagatattttaccttcttggttaaatttattcctaagtattttatattttgtgacactactgcttgttgtatattgatatgcctgcaactttactgaatttgtttattagttctaacagtctttttgggggattctttcagcnnnnnnnnnnnnnnnnnnnnnnnnnnnnnnnnnnnnnnnnnnnnnnnnnnnnnnnnnnnnnnnnnnnnnnnnnnnnnnnnnnnnnnnnnnnnnnnnnnnnnnnnnnnnngttccagtactatgttaaacagaaatgaaagtggaagtccttggag

SEQ ID NO: 110603 - DNA, 470 bp, Homo sapiens
  misc_feature (1)...(470): n = a,t,c or g
atcctgggacctgtattttgtcggcttacacaattaacggaaaccatactgtacatcttcagtctgacttagggtactgggcagctatagcaaagacccagcattgcccagaaaaggcataaattatacctttttcccctttttttgagacggagntcgnccctatcgcccaggctggcatacagtggcgtgatctcggctcactgcaacctccgcctcccgggttgaagcaattttctgcctcagctagggttacagtcgccatccaccactcccagctaatttttgtattttttgtagagacggggtttcaccatcttggtcaggctggtctttaactcctggacctcgtgttccacccaccttttgcctcccaaagtngttagggatttacagtagtgtaggccaccgnggcccngtcttaattattanccttttcatatccttaatttgggatttcggacntttac

SEQ ID NO: 110604 - DNA, 2304 bp, Homo sapiens
ttcataatcctcatacacggaaccagcatgtcagtgcatccagggtcttccagagccccctggaatctgatgtttctcttctcaacattaaccaggcagtcagctgtctgactcgaggcgtattgaaccctgagcttggctatgatgcccttttagtcggggacacagactaatcttttggcttatgatgtctacaataattcggatttgttctacagagaggtagcagatggggcaaatgcaattgtgctggggacattgggagacatttcttcccctcttgcgattattggtggcaattgtgctctgcaaggtttcaatcatgaaggaagtgatctcttttggacggttactggagacaatgttaattccttggccttgtgtgactttgatggtgatggaaagaaagagcttcttgttggatcctgaggattttgatatccgagtttttaaggaagatgagatcgtggcaaaaatgacagaaacagagatagtcacctttctttgtcccatgtatgggagtcgatttggtgtatgccctttccaatggcgcaggtggagtttatgacaaaacatcccgatactggagaattaaatcgaaaaatcactgccatgagcattcatgcttttgaccttaattctgatggagtgaatgaactgataactggttggtccaatgggaaggttgatgctcgaagtgaccgaactggggaggtcatctttaaggacaatttttcttctgcaattgccggtgtggtagagggagattaccggatggatggccacatacagttaatctgctgctcagtggatggggaaatccggggctacctgcctgggcacggcttgagatgaggggcaacctcatgggacaccagtgcagagcagggacctgatccgagagctgagtcagaagaagcagaatctgttgctggaactccgtaactatgaggaaaatgccaaggctgaattggccagtccactgaacgaggctgatgggcatcggggcataatcccagccaataccaggctccacaccacgctctcagtcagcctggggaatgagacccaaactgctcatacagaattacgcatttccacttctaatgacaccatcatccgagcagtattgatttttgcagaaggaatttttacaggtgaaagccacgtggtacatcccagcattcacaacctctccagttccatctgcatccctattgtgcctcccaaagatgtccctgtggatctgcacttgaaggcattcgtgggttacagaagcagcacccagtttcatgtctttgaatcgacaagacagctccctcgattctccatgtatgcgctggaccagcctgggaccctggccagtggagccaattcagttatgttaactttaccattgcagaacgggcacagagggttgttgtatgggctccggtcagaacttttctgttaccagaagacactcacattcagaatggctccaatttccaaggtgtggtttcacaatcttttacggaattggcggccacctgcatataaaaaataaaacttagtggagagatcactataaatactgatgatattgatttggctggtgatatcatccagtcaatggcatcattttttgctattgaagaccttcaagtagaagcggattttcctgtctattttgagggaattacggaaaggtgctagttaaggtggatgaatatcctttcagtgcattcagaagctcagtgctgatatggctgatcattctaatttgatcccgaagtttgctggtcggagctcgaggatgctcgtctgatgagggacatgaaaacaatgaagagtcgttatatggtatctctatgaccttaatagacgacttgctaaatggatataaaattcgctgtaaacaatccacacagagctgttgggaaacctcaaagcagtaaaatcaagcaatttcaaagagcaggtcgtctgcggggttggaaaaccaaagaacccaggtgatcactgcttgtcgggatgcaattcgaaagcaataacatcaacacactgttcaaaatcatgcgagtggggacagcttcttcctaggggccaagaaatgaagcttcaggcctgtgaagttggagagcagcaagaatagtgcctcagagcgaaataacttcatgcactccttcaatatctcaggaagcttactctcctcagctttctcataaaacctgaaaaacagcaatgtcaagttgttcatcaaagccacagatgtaaaatgactcacagaataaaagtctgatcgttagctttgtaaaaaaaaaa

SEQ ID NO: 110605 - DNA, 345 bp, Homo sapiens
ctcctttggtgctcttcctttctttacatagattttactttctaacctgttatttttttcttctctctagagaacttcttttaacatttcttgcaaagcagatctactggcaacaagatatctcaatttttgtttgtctgagaaagtctttatttctccttgacttttgaagaataagttcacagggtacagaattctaggttggtaggctttttctctcaaaactttaaaatatttcactccacacttgtttgtatggtttttgagaagtgggaagtaattactatatttgtttctctatagataaggtgtttatttcctctggcttctttctagatatgccga

SEQ ID NO: 110606 - DNA, 375 bp, Homo sapiens
  misc_feature (1)...(375): n = a,t,c or g
atcagctacatcaagaaggctcatcagctaaatcacgttggtcaaaatacctagtnnnnnnnnnncaaaaaatttatgtataaagatattaactgtagcactatttttattagccaaagaccataagcaacccaaacgtccatcaataaaagactggttaaataagctatagtatggctacatagtggaaaattatgaagccataaaaagagaaatgagggaaatatttatactgctaaagtatgaggaacgtatttatactgctaaagtatgatttccaggatttattatgcgaaaaaaaacgaagtacagaacagattgttctcgatgctaccttaagggaggatgcgcaggactgccaatatacgtgtttga

SEQ ID NO: 110607 - DNA, 413 bp, Homo sapiens
caaatgtctttagagtcaggatcttgctctgtcacccaggctggagtgggtggcatgatggtagctcactgcagtctcaaactcctgggctcaagcgatcatcctgcctcagcctcctgagtagctagcacagatgcagtgccaccatgctagactattattctctattctattctattctattctattctattctattctattctttttagagatggggtctcgccatgtttcccaggctggtctcaaactactgtactcaggcaatcctcccgccttggcctcccaaagcactggaattataggcatgagccacccagactcaaaaaatatattttagagcttggaatatctgtgtgcagccaagagacctcatgtggaaatccagtatcagtggcctggatttgagtggc

SEQ ID NO: 110608 - DNA, 921 bp, Homo sapiens
ttttttttttggatagattctacctttgtcacccagggcgggagtgcagtggcatgatctcggctcactacaacctccgcatcctgggttcaagcagttctcctgtctcagcctcccgagtaggctgagattacaggtgcgtgccaccgtgcccggctcatttttgtattcttagtagagacggcatctcaccatgttggccaggctggtctcaaactcctggcctcaactgatccactctcattggccttccaaggtgctggggattataggcatgagccaccgcacctggctcagtaagtacattttttattatcaaaaacagagtagtgtatggttggcgtattctgtgtagaaatgtattttattgatgtctcctatttttataatttctgagttaagtactttttaattaatgctttttagttttgggcagaattccagttgaactaaagcacctcattttcccagatacatgaaataaaatatttggctttctttttccaatttccacactgatgttattttgtgaaaaatcagtgcctttaagataaaatcgttaatacgttaagataaacatggagaaacttgatctaatatttaatatttcattcagttctacactttattaacttctacacccagcagatttagacattatgtaaccatctcaagaagtttcacttgggatgtaatgcttcacgcttgtaatcccaggcactttagggagggctgagggtggggagggactgctttaagggcaagggaggtctggaggacccagcctgggggcaaattacaggcaagatcccatctctattttaaaggaaaaggtttcactttgggaggccaaggcgggtagatcacaaggtcaagagatcgagaccatcctggctaacatagtaaaaccccatctctact

SEQ ID NO: 110609 - DNA, 654 bp, Homo sapiens
tgaggcaggctttccctcaggttggaatacaattgtgcaatcaaggctcactgcaccctcaacctccggggatcaagtgatcctcccatctcagcctcctgagtatctgggatcacaggcatgcacaaccatgcccagctaatttttgtatttttttttttttgtagagatggcgtttcatcatgttgcccagctggtctcgaactcctgggctaaagtgatccacccaccttggcctcccaaagttctggggttacaggtgtgagccaccatggccagcctataattctttttgtgtgtgtgacgtaaaacctaaatataatgaaatcacaacttaagtgggctatttcctgagcattgacaaatgcatgtaactgtgtaatcctattacgatgcggcatatcatcatcagttcagaaagtcccctcacgaccctttctagtcagtttccactttcctcctcccctacaaaggcaaccactgctctttttcactataggttggttttgcttgttctagactttccaaaatacatagaatctcgcagtttgtatgcttttgtatctggtttaactcagtaaggttttttttattggttgaactgattcatgttgttttatcagcagttaatttcttccatatgctattttttct

SEQ ID NO: 110610 - DNA, 494 bp, Homo sapiens
  misc_feature (1)...(494): n = a,t,c or g
gaaaaaacttttatcctagaatagtacatccagtgaaaatatccttcaaacatgaaggagaaatactttcctagaccaacaaaagctgagggatttcaacactggacctgtcttaaaaggaatgctaaaaggagttcttcaatctcaaataaaaaggatgttaatgagcagtaagaaatcatctgaaggtacaaaactcactgttaatagtaagtacaggccaggcatggnnnnnnnnnnnnnnnnnnnnnnnnnnnnnnnnnnnnnnnnnnnnnnnnnnnnnnnnnnnnnnnnnnnnnnnnnnnnnnnnnnnnnnnnnnnnnnnnnnnnnnnnnnnnnnnnnnnnnnnnnnntccatcttactaaaaatacnnnnnnnnnnnnnnnnnnnnnnnnnnnnnnnnnnnnnnnnnnnnnnnnnnnnnnnnnnnnnnnnnnnnnnnnnnnnnnnnnnnnnnnnnnnnnnnnnnnnnnnnnnnnnnnnnnnnnnnnnn

SEQ ID NO: 110611 - DNA, 1186 bp, Homo sapiens
ttttttttttttctgcccaagtaactttattcgtgtcttctcaaacatttcagatcaaataatgccattttctaatcttgaaaccagcaagattagaaagagaatgaggccatcctttcactcagactttcccagtgtactcaagattgtattccaggaacgaagtcaaaccctggcctcacttcttaatttagaattaaactagaatccaggtcccattgcataactgcctaattgttttgcaacccagggagccacaaacggaagctaaaacttagcctttctaaagttatcctaagtttttactatctaaccaggcactttctcgatttttttttccccttaaaactcctaaaagtacaggtgttggtatgtcctggccggcatctggaagggctggccccgggaaatcaggggcctatctagcggggaatggtctggggcagtcacccccatcctggggggcagataggcaaaggggctgctgggcagggtgtcaagacaacacgggtacccgcaacagcagtcccgagggtctgagatttctcaatggtcagcagggtgggctggaagagtatcaccagagccactcaggaaccagccaatgcggaatggctgggtttcttattgaacatgaaatgcttcctctttggcctggactgttttgctaaaattgttagtgggttttggggcaggccagtgtatgggaaacttttttttttgttgggggggggcgatggagtctccctctgtttgcccaggctggagtgcagtggcgcaatcttggctcaccgcaacctccacctcccaggttcaagcgattctcctgtctcagcctcctgagtagctgggattacaggcatgcaacaccatgcctggctagtttttttttgtatttttggtagagacagggtttcatcatgttagccaggctggtcttgaactacagacctcagctgatccacccgcctcggcctaccaaagtgctgggattacaagcatgagccaccgcgcctgggcgaaatggcatttttcaagaaggaaagaagcactgggattcactgagaaattacaacaatgcataaaaccagagctgaaatttgatagcaattaaaagttcaaaatatcaggtacaataagctaaattaaaaaaaagaaaaaacagtatgagcctaaattggctctg

SEQ ID NO: 110612 - DNA, 585 bp, Homo sapiens
gtttcatctttgtctcctaggcactcagttcagtgcctgatacataataatagaggcacaaatgttttaagagttgaggaattttcaactctttctgaaagaataggaagatataaaggcttctcagagacggtattatttaagctgattttgtttttgtttttgagatgaagtcttgctctctcgcccaagatggagtgcaatggcgtgatctcagctcactgcagcctctgcttaccaggttcaggtgattcttctgcctcggtctcccgagtagctgggattacgggcatccaccaccacacccagctattttttgtatttttagtaaagacgaggtttcaccatgttggccaggctagtctcaaactactgatctgaggtgatccgcccaccttggcctcccagagtgctgggattataggcatgagccaccatgcccggcttatttaagctgattctttaagggtaagtagaaattttttccaggtgaataaaaccttgagctattattccaagcagagaccagtaggtgcaaagacacagggatatagagatgttgaagtttaccaaacactgctagat

SEQ ID NO: 110613 - DNA, 470 bp, Homo sapiens; identical to SEQ ID NO: 110603
  misc_feature (1)...(470): n = a,t,c or g

SEQ ID NO: 110614 - DNA, 529 bp, Homo sapiens
gacggaatctcactctgccacccaggctggagtgcagtggcctgatctcacctcattgcaacatctgcctcctgtgtgagatctattttcctgcctcagcttcctgagtagctgggattacgggcatgcaccgccacgcctgactaatttttgcagttttatttttcttaatagaaatggggtttcatcatgtttgccagggctggtccttgaaaatccttgaccctcaggtgatcccacccaccttgggcctccccaaagtgctggggattataagttgtgaagccactgccctggcccaaagatgtcctttttaaaaaacttgtcaattaatagagggacttctctagggtaggcattggattaataaattttatttgggccaacttcacactcatgggcatttgtaggcaatgggaatttaattgaaggttaatttggggtaggatattgtggaaactctattgggaaaatactgccttattctgggaggttgacttgtcatccatagattatttcagcatacaat

SEQ ID NO: 110615 - DNA, 505 bp, Homo sapiens
ttcaattttggctcactgcaacccccacctcccggttcaagtgattatcgtgcctcagcctagcaagtagctgagattacagggacctgccaacgtgcccggctaagttttgttatttttagtagagacggggtttcactatgttggccaggctggtctcgaactcttgacctcaagtgatccgcccacctcggcttctcaaagtgctggaattacaggcatgagccactgtgcccggtctaaatctaacttttaaatgcactggaaaaccaaaacagctgtgtgactcagtttaccccgatggtctggagccgaacctgcaacatcgccaagaatgcctacactgttgggtgcaatcctgtgccttaaatctacttctctccatttgatggatgagaaaaacaaggttccgagaggttgagggcctccccaaagctacacagcaagtgggggcacagcccaaactcaagggcacgtcataactctcagttcccggacgcgtggg

SEQ ID NO: 110616 - DNA, 515 bp, Homo sapiens
ttttttttttgagatggagtctcgctctgttgtccaggctggagcgcaggggtacaatcttggctcactgcaacatttgcgtccccggttcaagcgattctcctgcctcagcctcctgagaagccgggatgacaggtgtgcgccaccatccctggccagtttttgtagttttagtagagacagggttccgccatattggccaggctggtctcgaacccctgacctcaagtaatctgcctgccttgacctcccaaagtactaggattacaggtgtgagccactgttcccagccagaagtgtttaaactttaatttgtgaatcagtaagccttactttaggagggctttcaatacagatgaggaatagaaggtattagtgagatagggtgcatatacattttaaaaagattatgctcatgtaaatgataaacataaacctgtgctatatacgccgagaagcttccacaaaagccacctcgcctaaatcccaccaaggaaggcattcaacatacacag

SEQ ID NO: 110617 - DNA, 2332 bp, Homo sapiens
  misc_feature (1)...(2332): n = a,t,c or g
gccctccgggaagatggcggccgtgcaggcggccgaggtgaaagtggatggcagcgagccgaaactgagcaagaagtggtggtaatcattagttccagggtgctctgccatgttgacgcaagctgctgtaaggcttgttagggggtccctgcgcaaaacctcctgggcagagtggggtcacagggaactgcgactgggtcaacttgctcctttcacagcgcctcacaaggacaagtcattttctgatcaaagaagtgagctgaagagacgcctgaaagctgagaagaaagtagcagagaaggaggccaaacagaaagagctcagtgagaaacagctaagccaagccactgctgcatgccaccaaccacaccactggataatggtgtgggtcctgaggaagagagcgtggacccaaatcaatactacaaaatcccgcaagtcaaagcaattcatcagcttgaaggtcaatggggaagacccataccccacacaagttccattgtaagacatctcacttcacttgactttcatccaaaaattttagtcacctgcagccttgggggatcaccttgacctgacatccaccttaaaggtggcagggaggatccatgccaaaaagagctttctgggggaaagctcatctttctatgatctttcgaaggagagggggttgaagtttgcaagtcattggccaattccagaaattataaatcagaagaagaatttattcatattaataacaaactgcgtcggggagacataattgggagttcaggggaatcctgggtaaaaccaagtaagggtgagctggagcatcattccgtatgaggtccacacttgctgttcttccctgtttgcatatgtttaccttcattctttcactttgggccttcaaaggacaagggaaacaaggtatcgccagagaatacttggacttgatcctgaaatgaactttgtgaaggcagaaaatttatcatccgctctaagatcattcacatatataagaagtttcttagatgagctggggattcctaagagattgaaacttcccaagatgaacatcattcccagggggagccgtngggccaaccctttcattactttattacaaacgagctgggacatgaactttatatatgagaaattgctccagaactctatcataagatgcttgtgggttgggtgggcatcgaccgggtttatggaaattgggacgccattccgggaatgagggggattgattttgacggcacaatcctggagttttcaccacctgtggagtttctacatgggcctatggcaggactattcacgattcttcatgggaaatcacgggaggaaggatggttttcagggatggtgaagcatattacaggcagttacaaggtcacctaccacccagatgggcccagagggccaagnccttacggatgtttgactttcaccccacccttccgggcgaatcaacatggtagaagagcttgagaaagccttgggggatgaagcctgccagaaacgaaccctctttggaaactgaggaaaactcgcaaaattcttggatggatatctggtgtggcaaaaagctgtttggaatgcccttccaccttcgggaccacagccagggctccctttgaacaagcttgttgggggaagtttcctgggaagttgactttggcatcaattcctacatttcaatctggtgaatcaccccacagataaatgagccgctttggctaaagtggcaccgctctaaagaggggtctgactggagcgctttgaagctgtttgtcatgaaagaaagagatatgcaatgcgtatactgagctgaaatccatccccaattcggcaacggacagcctttttaaaagaaacagcccaaagccaaaggcctgcaagttgattgatgaggcccatggttccatagatggaaaacttcctgtactgccccctggaaataatgggctgccccccccacagctggctggggccatgggccattgattcgagtcgcccatgtttcctcacgggactcccaacaacatcaagggaagtaccttcctgtttccttgccatgaaacccgaaagcaaagaaggagaatgtagcaacccactgatacactggaaagcacaaccagttggcacttctgtcctagaaaattaataattgccaagttgtataactcaggcgtctttgcattttctgcgaaagatcaagggtctgcaagggaattcttgtgtgctgctttccaatttgacaccgcagttctgttcagccatcagaagagagacaaggaattaaaaatttctttttaatcctgtcaaaaaaaaaaaa

SEQ ID NO: 110618 - DNA, 244 bp, Homo sapiens
gtagcaccatgcaataccctgactggatgggaaaagaggctataaaaatacttcagtgacaatatgtaaatacagaaaccccgactggatgggaaagaggctataaaaatacattttgtgggcctacagcagctgctcacgcctataatcccaacactttgggaggctgaggtgagcacttgaacccagaagttgaagaccagcctgtgcaacatgatgaaaccctgtctctacaaaaaaaaaa

SEQ ID NO: 110619 - DNA, 414 bp, Homo sapiens
gtgattctcctatctcagcctcccaagtagctgggattacaggcacacgccaccatgcccagataatttttgtatttctggtagaaatggggtttcaccgtgttggccaggctagtcttgaactcctgacctcaggtgatctgcctgctttggcctcccaaaatgtttgagaagttaggggacttgttctttcagcatctatttaatgaatctgcttgtatttttgatatcctaatgtgtcccaacactgaactcctaatctttcctctaaaacctgttccacctgcagccctctctattttcacttgatggcagttttatccttctcgttattcaggataaaaacctgagactcattcttgtttttcctctttctcttatatcccacatcttatcctttaaggaattatactg

SEQ ID NO: 110620 - DNA, 490 bp, Homo sapiens
ttagtgaaaagacagggtcttgtcacattgcccaggctggtctcgaacttgtagctcaagttatgtgcctgcctcagcctcccaaagtgctgggactacaggtgtgagccaccatgcccagccacatcaatttttaagtagatatatgcctatcggcattccaaggtcaaataaatatctaggattatcctgctgtgccgacaccttgcagttaacattgtgatgaaataatccagtgttaatttgttgatgcgcttccttgtatccctgcatttcagagtgaaaagataaaacaatttcttactgtgtacatgatgattgagtactgacaggtaacatgacctggggaagaagtcacttgacattagctaacaatgtcagagacagattaagaagtgaagactcccgattgcttcccattaaaaataataattatgaccaggtatggtgacatgtacctgtagtcccagctatgtgggaggctgagctg

SEQ ID NO: 110621 - DNA, 1043 bp, Homo sapiens
  misc_feature (1)...(1043): n = a,t,c or g
tctaagacctcaaactatgaaacagctaaaataaaacattggggaatctctccaggacattgggagtgggcaaagattttttgtgtaatacctgacaaacaggcaaccaaagcaaaagtggacaaatgggatcacatcaagttaaaaatcttctgcattgcaaaggaaataacaaagtgaagagacaacccataggaatgggaaagaatatttgcaaactatccatctgtattaggccattcttgaagtactataaaggaaatacgtgagactggggtaatttataaagaagaggtttaattgggctcacagttttgcagggctgtacagggaaggcatgggtgcttaacatctgattcagcttgtaggggagggcgtcagggaaggcttccaaccattgtgggaagggcaaaagggggaataagtattctcacatgggcaggagcaagggcaaagagaggggggaagggaattgccacacacttaaccagatcttgttgagtactcaggtcttgttgagggttgctttaggtccaggggtaccccatttaccctgatgtgtttatacacatttcatacctgtattaaaatatctcatgtacccccataaacatatacacctactttgtacccacaaaaatttaaaaataaagttaatttcaatgtttaaagacttgttattaaaataatagcagtttctataaatttaatatttcaataaaactcccagtatttattgttaacactggaaaaagttttccaaaacgtatatggcagaaatatgggccttgatgtgaggacagcatcaattaatgagggatcctctcccttgatcaaaacaccttccaccaagacccacctttaacgctgaggcattacctctcaaagtgaggatttggggcaggggactaatatccaaactgttattcaacatctgacaaggtgtttcacaaccagaatatataaggngctataacaattctatagaaaaaaaaatctgatttaaaactgggcaaaaatcttgaatagacgtttctcaaaag

SEQ ID NO: 110622 - DNA, 372 bp, Homo sapiens
  misc_feature (1)...(372): n = a,t,c or g
aagaaattgaagacaatgaaaaggcattccatgttcatcgattagaaaattcagtattattaagatggcagtacttctcaaagtgatctacatattcaacacaattcctatcaaatctcagctgacttcagaatctgacaagctgattctgagattcatatgcaaattcaaaggagctaggaataaccaaaagaatcttaggaaggaacaaagttgggaaccctcacaattttcaatttttaaatcttcctacagggctggggcacgtttgctcatgccccttaatcccaaccccttgggagggccgagggngggaggggtcngtttgagtccnggggggctttgagaccntcctgggggnccaccttggtt

SEQ ID NO: 110623 - DNA, 424 bp, Homo sapiens
  misc_feature (1)...(424): n = a,t,c or g
gtcgcccagactcggagtgcagtggcnngtctcggctcactgcagcctctgcttcccaggttgaagcaattctcccacctcagcctcccaaaggcctgggattacaggcgtgcacncatgcccagccatgagacaattcttattccactgtggcccagggaagccaaaaggttggaaatccctgttctaaagccaatgcaggcttcacatgtgactagttttatgagagccaatacagattacctatctcctaaaaattctaccttgcttcccttcagcactatcactttttaaaaggttttatttagaaaacacttcaggtaaaatatttacaaaggaatgaagtactaatacatgctacaatatacatgaaccttgaaaacatgctaaatgaaagaagccagaaagaaaaggccacatattg

SEQ ID NO: 110624 - DNA, 728 bp, Homo sapiens
ttttttctgagactgagtctcgctctgtctcctaggctggacttggctcactgcaacctccgcctcccaggtttaagcgattctcctgcctcagcctcccaaataactgggattacagtcacacgccaccatgaccgactaatttttgtatttttaatagagacaaggtttcacatgttggcctggtctcgaactcctgaccttaagtgatccgccagcctcggcctcccaaagtgctgggattacaggcgtgagccactgcgcccggccaaagctttatcttaaaaagctagtcaacctcatcctgtcaatgctactcctattcattttctgctcagctatggtctgattcctcaaattctcaattagtcatctgaaactaacaactttttgcttgttgactttgctttgctatacttaacacaaaggctagagttctaaaccgaaaacaatcttcttcctgtccttaagttccaccagcaagatactcatctctacttaagactgagtccatcaaaacacacatctccaatacagcaaaccaagtcccaagtaaacacaacaataccaggggaaggtgcacgcaaggtttcgagcaccatggagagagtatcggcaagcggtaaagatgtgagttattctgactgggtgcaggcattttgttcaatgttcagactccctgaccagacatgctgaagtggagaatacctgccaaagtatccctccag

SEQ ID NO: 110625 - DNA, 454 bp, Homo sapiens
tgcacaggccgggcacagtggctcatgcctataacctcagcctcccaaagtgctgggattacaggcttgagccaccgtgcctggcctcaagcgattctcttaactcagcctcttgagtagctaggattacaggaacgcgccaccacgcccagctaattcctgtatttttagtagagacagggtttcaccatgttggccaggctggtctcaaattcctgaccccaggtgatctgcccaccttggccttaaaaagtgctgggattaaaggcgtgagccaccatgcccagcctcctacccttttctttgcccagccagataagcaggactttatggggcaaagcctatgtcagctctctccaagggcactgggaattttcctgaggtgtaatcgcttctcgctgtatgttctggaacatagagctagcaatgaaggtatttctttcggacgcgtggg

SEQ ID NO: 110626 - DNA, 514 bp, Homo sapiens
cctgaggcagagtcttgctctgttgcccaggccagagtgcagtggcacatctcagctcactgcaagctccgcctcctgggttcacgccattctcctgcctcagcctcctgagtagctgggactacagacgcccgccaccacgcctggctgattttttgcatttttagtagagacggggttttgccaggatggtcttgatctcctgatctcgttatccagctgcctcagcctcccaaagtgctgggattacaggcgtgacgtactgcacccagccctgaatatgtatgtttttaattgacattttctctctgcttttttcccacatgactctttcttctgttacaggccaagtggagagactcgctggctgagggcagcccgaaggccagcaagcaagacaagcaagcaggtacagccctcatgcctccacccccaggcttcccgacctgtgccagccctcggccaaagttaatcactgttccttctgtgtgataaccacgctgtgaaccccaca

SEQ ID NO: 110627 - DNA, 426 bp, Homo sapiens
ttttttttttgagatggagtttcactcttattgcccaggctggggtgcagtggtgcgatctcagctcactgcaacctctgcctcccaggctcaagcgattctcctgcctcagcctcccaagtagctgggattacaggcatgcgccaccacgcccggctaattttttgtgttttcagtagagacgaggtttctccatgccggtcaggctggtctcgaactcctgacatcaggtgatccacccaccttggcctcccaaagtgctgggattacaggcgcgagccaccgcgcccagctgctttttctttttaaaaagtaaaatataacagagaaaactgcacaaaacagaagtgttcaaattaaatttttttttttttgagacaaggtcttgccctgttgcccaggctggagtgcagtggctcagtcgac
